United States Patent Application Publication US 2005/0228172 A9 - sequence listing, part 159

SEQ ID NO: 715859 - DNA, 1887 bp, Homo sapiens
aatttgagcatttggtgcatgatactttattatgtgtggtcacatgcgtcagttctctagatttgctttgtttttctgcacttcaggccatcacttcaagagaacactatgaataggtgctggatctaatgacctttcaatggaatggccacttaattcaatccaggaaatgtttgagagtcaagtagatcaagggagacatttaatgacatggggacaagcatggtaccccagggatattccaggaattgagaccctattgtaccttcaaacctgagattgtatgaattctccactatttgttgctttgttttctctttctctccttctaataaagttctaaaccatctgcatagcttaaatgaaaagctctattagcaaagtttgtaattaactcttaaagctctttcaagtagattaaaatagctgaaccatgtgtatgaccatgtttttgcttatgtctctgtcttttctttataaaaattcctaaaagtgagtattttacttcctaaggggagcatttgaaaggttggagtcctatgtgacatcaggataattgaggccaaatttccttgtgatcaacactatctggaaagctgcctcagttctccagttccttttgaagttgacatcaccgctgtgtgtggtatttcgaacatctgttcccatgattcccaaggaacaagtgtcatgaatcactgcttcccaaaagagttacattttgctgaaagttgacttcaattttacttgtggtcttaaaagtctcaaaagatatattaaaaattcacttccagagtgtttgtagcaaacaattattgcttgttttgtggtgcaagactgatacgttacttcagggaagcaaaaacaatggggattttctaggcagtggcatattcttttattctctcttccctcccacaacactcaatatttcttggaaaattcccagggagtctgaaactcctaaaagttatcttctactatcaatgaggatacaattatcccctctaaaaaaagtaagatatcttttaaaaagaaaaactcattatattttcatgtccctgagaaagtttacctcatttcatgaaaattaagagttataaccctgcctaaaggttgggaatctaataatttcctctactttttacgtgagacagaaatatcttggattaaaatgttgtctttatattgaattaaaatagcaaaaccaatgaaccaagttagsttgcttaagttctgaggatctgaaatggtctgggatgaaacagcaataccttctttaaaattatatcccttttctctgaaataatttatattacaaataaattataggcaacatcatttaaactatctagcatcaaactgttatctgacgcgtgagtatatcaaaatttaaaataagatattaaagaatttgtttctgctcattgctttccatatttctgtctggaacaggattattatttttatttgctcattgataccacttcatatttttcctaatttttaaggataattataaatagaaagtaaaacttaccaacttaagtttcatataaaccttttcattttagaatagttttatacttatataaaagatgtaaagataggacaaaatattcctgtatatgctaactcaatttcctctggtgttatcatcttacattattatggtccatttggcaataataacccatattggcacatcattagtaactaaactccatattttatttggatttcattaatttttctctaacgccctttatttctgttccagaatctcatttaggatactacgtggcatttggtcctcatgtctccttatcctcctctgatctgtgacagtctctcagacagtttccttgattttgatgatgttgacag

SEQ ID NO: 715860 - DNA, 1825 bp, Homo sapiens
tataaacatatacatcacacacatatacacacacacacayatatatactgtcatgttatcacagatatataaaataatatatataatcatatctgtttatacataaatgtgtgtgtgtgtgtgtgtgtacacatgcatttgtcatgatgtttagggtgatttcaaattcaggactatgcggtttacttaatcccctctacaatatatctctattgccttctttcatacaaatttccaaagaaaatttcccagcattttcaatgataaagggaataataaagaatacaacattcttgattattcatttgcttaatcacactttatgatacaatttataatataacattcttgaaataataatacaatgttaatactatcaccacctattactgctcttatattgatgtctctctagttattttggttgtctaaagttttgtctctagtatatttttagaatgagcttatggggcaatattgcctgagaatagtcagggaaaatgtttgataatagtttgtgtcattaataactgaaactttagtttaattgctgaatatagatggtaaatatataaaaaagataaaatgaattgtaattaaacaatattatctttatgatatgtaataggcatttacattgtctattctattttgtatttgtttaaaacttgtgaagtgaactaaactgatctcactatccgtgagtaggttagattctaaagaacaccatatctagaagttacatgtaatgggatgactttctggaaccataaaattaaacataccagagcaacaaatactggtatcttttatataatcaatctactcttctcctatcgtcctcttccacttcctcttccctatttccattgcctttcttacatttctcctgccactccctcccaggtactcaccgctaccctgcgttcctgcatagacttccatcagagagaacatgttaggaaagttaaattgcagtaagcacatcacagcaatgacgaggacaggtacttttctgggaaacactggaagacagctggagaggattctgctgctgtgaaagcacctaaagcctccttgactcagcctcacatcctatcttcaagaaaacatcatatggttattatataaacctcttacgggatttctaaggttaatttcaatatataaatggctactcaacagaatcaaggtaattagagtttgcttatattcaaaaagagttgcaaaatgtctcctagaaaacagaattaactataagaacctgaaatttgcatttcataactttaaggagtttaaattatcaagattaatattgcactaaaaagtttgtgcattcatgcgtgatcgaatatgaaaacacatgacctgtgaactgagcaaaaggtatgctttctgaagcatatactctgtgtgattaggtcactgatgccattgaaatatgtagatttaatgttaaagctactggttctctgagtgttttcatgatctcaccagatttttttttttgtaccattcactcttttctatttaaaagactttcagtcgtagtctaaaaaaaattccaaacactttagttctggaatttcacttattctctacaagttattattactacaatttagtacaaactctcattttcatagcttactattccaacttctcctagtatgtaacccttatgctctataactgaaaacattctggtaaaaggaatcagcatgctaatactattttaaacacacatcctcattctctttcctattattcataaaactagaaaaataaaaaaacacttttcttccagcagtggatagaagaaaaa

SEQ ID NO: 715861 - DNA, 2656 bp, Homo sapiens
cattttttttattagaaaagaaacacatgttttatacttagccctatatcctgtatcttcccctcccttcctcttttggtttttcttgtcctacaataaaaagcactagaatatccactggatgtattgtttataaattaagtaacatattgttcatataataaaacgattctcttccccacatgatttcatcaccactgtctcttcctaagtgtgacaatgtcttctgcttacttcaacattaaatattttatatttacttctagattaataaactgtagaccctaccaattgtctctatagaagattactagtttgctcatttatgtaatactcatattcccctttcatgtaccttccttaaattttaatagttgcatttatccttccaagtagcattcaaactttaaatataaatacatcttcatcacttgttccctcatttacacaatacttcctaattatttactacataagagagtggtcttataactatatttttctctatatctcttgtatcaactttcaaactggaatttttgacagataccacttctatatataggtgtacaggtcctgctaatgctgagagacaaaaaagagaacagaaaggaccactcttgctgagacaaaaaagagaactgggaggacaactcctgcaggcatgtggacattcatagaaaatacagccttcaccatctaagacttgggacaggaaagcagaacagaaaaagataaacataaaatgaaagggccagatgggagaataaactgtgtagaaaagctgacaggttctaaagcactgtgatatctcctactgtttataaaacaggcatatggactttaaaccaggagcaaatctctggaacatctytggttatcagatttcaaattttgataaaaagaagactctgattccattctcaaataatttcaagacagtagtgaactaaattttagacaacaaaaatgcatattcaccttctacagagataactgtctcagaaatacttgctcaatactagaagcctgacaaaaagaaaagcacatattttgagggtatacatatcatttaatatagtttctactattttctgcacaaaatctgggataacctttaaaaaatgcagtaaaaacaagcaagaaaatataaccaactgtcaagagagaaaacatttaatagaaaacaagcaaggatggccaagatgttggtttttatcaggcttataaataaaaatatatatgaaaaagtcaaaagatatatatatgtgtgtgtgtgtgtgtatttgaagaatctcaacaaagatggaaaatatgaaaaaaattcaaatagaaattttatacctggaaaatgtagtattagaaataaatagccacagcagagaaacttgaagaaaagacaagagaaattattcaaactgaattaaaaattagaaacatacagtgatctgtaggactatgccaaatgttctgacagatgcataattgaaattcacaaaagaggagaaatcaaaagtatgtaaaaaatcaaagcctgttgttgtggcatgtgcttctcaggaggctgagccaggagcattactggagcccaggagtttgagaccagcctaggaaacataatgagactctgtctcaaaaaaaaaaaaaaaaaaaaaaaaaaaaaagagagagtgagagagagataatatttaaatttttctaagtgaaagacatactgtaactaccagaaacataaaacccagtgaacttcagaaagtataagtagaaagaaaaacacacttaaatgtatagcagacaaactggtaaaaaccaaggataaagaatggatcttaaaaagtcaccacagagtaaaggacattgcttcagatcaatggaggtcagaagacaatagaacacatttttaaggggctgcaaaaatattgccatgtggaatcatcccatgttcagtaaaatatgtgttctccaaatgaaggcaaattaaagtctttttgatgaacaaaagacatgagaatttttatccaatcgatttgaatatcaagaaatattttttaaaatgttttttgatgataaaaaattgaagcatatcataagaaagacaagtcttcaggagtgaatgaagaaaccagaaaggataaatataaaaataaaacttcaaagttcaactactaaaattttcataacatagcattgactgtgtgaagtaaaattatcagtgttgcacaattgatactatatgcagatgtgaattatgtgttattagaccaaaaaagcagacggacgataagaaaaccatattacatcaggttcttacattactaaaatatgcttttcaacaaagatagtaataggatgaaaatggacattataatctctaaagtaactcacaaaaattaataatacaaggaagcataataaaacataaaaaataaatagaagataaaagtacatgatttactaaaaaagaaggcacaaaagtgggaacaaagaaaagaacaaattaatcaaagagaaaataaacgccaatgtgttagacttaacaatagttgcataaaaaattaaaatgcagagattgtcagactgaataagaatgtgaagctcaacagcacactgtttgcaagaaaaaattttaaatataaataagagatttttaaaaagg

SEQ ID NO: 715862 - DNA, 2656 bp, Homo sapiens
cattttttttattagaaaagaaacacatgttttatacttagccctatatcctgtatcttcccctcccttcctcttttggtttttcttgtcctacaataaaaagcactagaatatccactggatgtattgtttataaattaagtaacatattgttcatataataaaacgattctcttccccacatgatttcatcaccactgtctcttcctaagtgtgacaatgtcttctgcttacttcaacattaaatattttatatttacttctagattaataaactgtagaccctaccaattgtctctatagaagattactagtttgctcatttatgtaatactcatattcccctttcatgtaccttccttaaattttaatagttgcatttatccttccaagtagcattcaaactttaaatataaatacatcttcatcacttgttccctcatttacacaatacttcctaattatttactacataagagagtggtcttataactatatttttctctatatctcttgtatcaactttcaaactggaatttttgacagataccacttctatatataggtgtacaggtcctgctaatgctgagagacaaaaaagagaacagaaaggaccactcttgctgagacaaaaaagagaactgggaggacaactcctgcaggcatgtggacattcatagaaaatacagccttcaccatctaagacttgggacaggaaagcagaacagaaaaagataaacataaaatgaaagggccagatgggagaataaactgtgtagaaaagctgacaggttctaaagcactgtgatatctcctactgtttataaaacaggcatatggactttaaaccaggagcaaatctctggaacatctttggttatcagatttcaaattttgataaaaagaagactctgattccattctcaaataatttcaagacagtagtgaactaaattttagacaacaaaaatgcatattcaccttctacagagataactgtctcagaaatacttgctcaatactagaagcctgacaaaaagaaaagcacatattttgagggtatacatatcatttaatatagtttctactattttctgcacaaaatctgggataacctttaaaaaatgcagtaaaaacaagcaagaaaatataaccaactgtcaagagagaaaacatttaatagaaaacaagcaaggatggccaagatgttggtttttatcaggcttataaataaaaatatrtatgaaaaagtcaaaagatatatatatgtgtgtgtgtgtgtgtatttgaagaatctcaacaaagatggaaaatatgaaaaaaattcaaatagaaattttatacctggaaaatgtagtattagaaataaatagccacagcagagaaacttgaagaaaagacaagagaaattattcaaactgaattaaaaattagaaacatacagtgatctgtaggactatgccaaatgttctgacagatgcataattgaaattcacaaaagaggagaaatcaaaagtatgtaaaaaatcaaagcctgttgttgtggcatgtgcttctcaggaggctgagccaggagcattactggagcccaggagtttgagaccagcctaggaaacataatgagactctgtctcaaaaaaaaaaaaaaaaaaaaaaaaaaaaaagagagagtgagagagagataatatttaaatttttctaagtgaaagacatactgtaactaccagaaacataaaacccagtgaacttcagaaagtataagtagaaagaaaaacacacttaaatgtatagcagacaaactggtaaaaaccaaggataaagaatggatcttaaaaagtcaccacagagtaaaggacattgcttcagatcaatggaggtcagaagacaatagaacacatttttaaggggctgcaaaaatattgccatgtggaatcatcccatgttcagtaaaatatgtgttctccaaatgaaggcaaattaaagtctttttgatgaacaaaagacatgagaatttttatccaatcgatttgaatatcaagaaatattttttaaaatgttttttgatgataaaaaattgaagcatatcataagaaagacaagtcttcaggagtgaatgaagaaaccagaaaggataaatataaaaataaaacttcaaagttcaactactaaaattttcataacatagcattgactgtgtgaagtaaaattatcagtgttgcacaattgatactatatgcagatgtgaattatgtgttattagaccaaaaaagcagacggacgataagaaaaccatattacatcaggttcttacattactaaaatatgcttttcaacaaagatagtaataggatgaaaatggacattataatctctaaagtaactcacaaaaattaataatacaaggaagcataataaaacataaaaaataaatagaagataaaagtacatgatttactaaaaaagaaggcacaaaagtgggaacaaagaaaagaacaaattaatcaaagagaaaataaacgccaatgtgttagacttaacaatagttgcataaaaaattaaaatgcagagattgtcagactgaataagaatgtgaagctcaacagcacactgtttgcaagaaaaaattttaaatataaataagagatttttaaaaagg

SEQ ID NO: 715863 - DNA, 1613 bp, Homo sapiens
  misc_feature 459, 460, 461, 462, 463, 464, 465, 466, 467, 468, 469, 470,471, 472, 473, 474, 475, 476, 477, 478, 479, 480, 481, 482,483, 484, 485, 486, 487, 488, 489, 490, 491, 492, 493, 494,495, 496, 497, 498, 499, 500, 501, 502, 503, 504, 505: n = A,T,C or G
  misc_feature 506, 507, 508, 509, 510, 511, 512, 513, 514, 515, 516, 517,518, 519, 520, 521, 522, 523, 524, 525, 526, 527, 528, 529,530, 531, 532, 533, 534, 535, 536, 537, 538, 539, 540, 541,542, 543, 544, 545, 546, 547, 548, 549, 550, 551, 552: n = A,T,C or G
  misc_feature 553, 554, 555, 556, 557, 558: n = A,T,C or G
tgcatggcaatgtgaaattagacttcaagtgaaattaaggttgtggaaaaatgatagagagattgtcttaaatgggtgggatcaatgaaatcacaaacttccttataagtgaaagaagaaggcagaagaaaggcaacattggaggtggtggcatgagaaattactcaacatcactgactcttaagatacaagaatgaagacccagtgtggtggctcacgcctaatcccagcactttaggaggctggggtgggtttatcacgaggtcaggagatcgagaccatcctggataacatggtgaatccccatccctactaaaaacacaaaaaattaactcggcttagtggcaagtgcctgtagtccaagctacacaggaagctgagtcagaagaatcccttgaacccgggaggcagaggttgcaatgagctgagatcatgccactgcactccatcctgggtgannnnnnnnnnnnnnnnnnnnnnnnnnnnnnnnnnnnnnnnnnnnnnnnnnnnnnnnnnnnnnnnnnnnnnnnnnnnnnnnnnnnnnnnnnnnnnnnnnnnggtggggattatagtgataaagaatgtacactcatcctgagacaccgagagggaggatagcttagattcctaaggagggtatatcattcatgaggtccaacccccatgaagaacacctcccagtgagccccacctgcaacattggggatcaaatgttaacatgagatgggaagggcaagcattcaaaccatagcaagagttaaatttcctattttaaaaaaatcactgatatgattccgttttgccatatataaaagctagtatttcagcctaccattgagtgtacttatagctcatcaaaagggcaatctgtctcaggaatacagatttacctagaggtatccaattgcagtcaaagaaagagcaatgagggagagaaaatgttagtgatggagacmccagcgctgcattttacaacaaaccatgtacaaactttacggattggttctgctaacttactacagtttacattcctctcaggtgggagaattgttgcgttttatcttaagatagaaaagcaattcagataatctgaaatctccacaagaaggataaggagcagagcagaaactcttctaggcaggaattcaatcctttcaactgtctgtggtccatagaaacaattgtctgcactgggagtcacatgaggtacagaccacagccagacctctgatcctctcattagtgatttcagaagacattaccagtcaactgagtaattcactgagtaaagtaaacatttggcactgaaagaggttagacggataactatttgtatcaccatattcatgaagctggaatatgttccattactcgtatgacatccgaatggaagatgttgaaaggtctctcatcttgtaagatggatatgaaagaacattttctgagaaatgaaattattaacacacctgcgaggtggatggaagagaaaaaaaagaataatcagcttgagttcttctccttgataagacaactcactaaaaacttaaagagaaaaatacaagtttaaaataattaaccagagaagacgactctagagtttttaaattgttcca

SEQ ID NO: 715864 - DNA, 1607 bp, Homo sapiens
tgatgagttcatgtcctttgtagggacatggatgaaattggaaactatcattctcagtaaactatcgcaagaacaaaaaaccaaacacggcatattctcactcataggtgggaattgaacaatgagatcacatggacacaggaaggggaatatcacactcggggactgtggtggggtcgggcggaggggggagggatagcattgggagatatacctaatgctagatgacaggttagtgggtgcagcgcaccagcatggcacatgtatacatatgtaactaacctgcacaatgtgcacatgtaccctaaaacttaaagtataataaaaaaaaaaacatttcaaaatctactggataacctagaagtgaaaaatagcctataggttcaaaaactcctgtagtgaagaaagaaaataactaatatacagtgacaatataaatattataartatttattttattaccaccctgaaatttgataatacaaacatgtaatagctacatatcatccatatatcaggtcataaaaaatcaacacattcttcaaaaatttagcataacagaaaatgcactctgtctccttgatggaattaaggtaaaaataaaagtaaaaataagtagataagtagatggaagtagatgtttaaaaacaaagaaaaatatttgtttgggataacataaaatctcaattgacaattccaatatttccagaacattgcctgtcaacttgtgtagagttgtccccaggagatatttgtcaatgtctagggttattgtggggatgtcaagactggtggaggtgtgaaatttagaggtcaatcgaaacacctagcattgctagggcagcctcccacaacaaagaatcctctggtcctaaaggtaagtagcaccaaggttgagaaaccataatctagacaggaaacactacgtagctattccaagtgctcaggaaaacacatcagtgccctcgaggggaaaagtgtaaacattttaattgctgcacatggtgacacaaatccatgttgttaatctaagtggaatgggctgaagaacaaaacgtaattcaaagagattacgtgagccacaatgaggacagctgcctggaagaaacagacccaagtatccttggatatgaactccctttggagctttgcaacaagcagtttcttaaaggcaaaaatggttccagaagtgggatgatgcaaagaggtttgtcacaaattctcattggcttatggaaataacatttattagtgactggctatacactgttacactattattgggtgtgggttatagtgtctagtgtggcgttattggttaatttatagctactgtggcaacagcaagcagcctagatgaacacacagctcaaagaggagcaggacagaactgctgtctcatttgaatatctctctgggcctgattatttaaaaggacttgcatttctcacatgaaagttattttcttttctcaatgtccataaatgagaataaatagacataaaatagatcttttcgaggatgaagaaaacggaatgaaaaacaaaacccaagctgaccagaaatcatagagggaagaaaacattataaatatatggatttttcaa

SEQ ID NO: 715865 - DNA, 1607 bp, Homo sapiens
tgatgagttcatgtcctttgtagggacatggatgaaattggaaactatcattctcagtaaactatcgcaagaacaaaaaaccaaacacggcatattctcactcataggtgggaattgaacaatgagatcacatggacacaggaaggggaatatcacactcggggactgtggtggggtcgggcggaggggggagggatagcattgggagatatacctaatgctagatgacaggttagtgggtgcagcgcaccagcatggcacatgtatacatatgtaactaacctgcacaatgtgcacatgtaccctaaaacttaaagtataataaaaaaaaaaacatttcaaaatctactggataacctagaagtgaaaaatagcctataggttcaaaaactcctgtagtgaagaaagaaaataactaatatacagtgacaatataaatattataaatatttattttattaccaccctgaaatttgataatacaaacatgtaatagctacatatcatccatatatcaggtcataaaaaatcaacacattcttcaaaaatttagcataacagaaaatgcactctgtctccttgatggaattaaggtaaaaataaaagtaaaaataagtagataagtagatggaagtagatgtttaaaaacaaagaaaaatatttgtttgggataacataaaatctcaattgacaattccaatatttccagaacattgcctgtcaacttgtgtagagttgtccccaggagatatttgtcaatgtctagggttattgtggggatgtcaagactggtggaggtgtgaaatttagaggtcaatcgaaacacctagcattgctagggcagcctcccacaacaaagaatcctctggtcctaaaggtaagtagcaccaaggttgagaaaccataatctagacaggaaacactacgtagctattccaagtgctcaggaaaacacatcagtgccctcgaggggaaaagtgtaaacattttaattgctgcacatggtgacacaaatccatgttgttaatctaagtggaatgggctgaagaacaaaacgtaattcaaagagattacgtgagccacaatgaggacagctgcctggaagaaacagacccaagtatccttggatatgaactccctttggagctttgcaacaagcagtttcttaaaggcaaaaatggttccagaagtgggatgatgcaaagaggtttgtcacaaattctcattggcttatggaaataacatttattagtgactggctatacactgttacactattattgggtgtgggttatagtgtctagtgtggcgttattggttaatttatagctactgtggcaacagcaagcagcctagatgaacacacagctcaaagaggagcaggacagaactgctgtctcatttgaatatctctctgggcctgattatttaaaaggacttgcatttctcacatgamagttattttcttttctcaatgtccataaatgagaataaatagacataaaatagatcttttcgaggatgaagaaaacggaatgaaaaacaaaacccaagctgaccagaaatcatagagggaagaaaacattataaatatatggatttttcaa

SEQ ID NO: 715866 - DNA, 964 bp, Homo sapiens
ccatgctggagtgcagtggcgtgatctcggctcactgcaacctttgcctcccgggttcaagtgattctcctgcctcagcctcccaagtagctgggattacaggtgtgcgccatcatgcccgaataatttttgtattttttagtagagacggggtttcaccatgttggccaggttggtctgaacccctgatttcaaaggatctgcctgccttagcctcccaaagtgctgggattacagttgtgagccaacatgcgcraatgctgtattttttgatataatcagtttatttgcctgattagtttcttactttgatgttacatcaaaaaattatatttcaggtttaaaatgtgtaaaaatacaaaaatttataccgatatgttcatattaactctctaggatttcagtagtctaggagatttttgtttccatgttttaaaaaatttaattttcctattacaaatataaatatatgcaagctaatacctgcctcctataaacatctgaaccatttcgaactctgaaactctattgacatttacaaaaccaaacaggtaaaaatgtccttgttaaatttatggctagatttgcagttttgaactggacatttataagtgttttttaatgaaaattaaagaatttcataacacctacacacacaccccactctctgtgcccagcaacaaggttgctgttaagtggtcttcaactttttggcacttcccagcctcatatccattattccaatagaggcagaaaaatgggtcataaaaggccatactactgaagcttcttccaatttgtaaacatcctgagccatttcccaagggattgaaatttcaagcacacaggtcagaggagttcaaaactggctacgtgatactctgcatagtaattgcaaaatttctaagttatatcacttgccaagaaacttctgagtctcttcagggctgactttgagatttca

SEQ ID NO: 715867 - DNA, 964 bp, Homo sapiens
ccatgctggagtgcagtggcgtgatctcggctcactgcaacctttgcctcccgggttcaagtgattctcctgcctcagcctcccaagtagctgggattacaggtgtgcgccatcatgcccgaataatttttgtattttttagtagagacggggtttcaccatgttggccaggttggtctgaacccctgatttcaaaggatctgcctgccttagcctcccaaagtgctgggattacagttgtgagccaacatgcgcaaatgctgtattttttgatataatcagtttatttgcctgattagtttcttactttgatgttacatcaaaaaattatatttcaggtttaaaatgtgtaaaaatacaaaaatttataccgatatgttcatattaactctctaggatttcagtagtctaggagatttttgtttccatgttttaaaaaatttaattttcctattacaaatataaatatatgcaagctaatacctgcctcctataaacatctgaaccatttcgaactctgaaactctattgacatttacaaaaccaaacaggtaaaaatgtccttgttaaatttatggctagatttkcagttttgaactggacatttataagtgttttttaatgaaaattaaagaatttcataacacctacacacacaccccactctctgtgcccagcaacaaggttgctgttaagtggtcttcaactttttggcacttcccagcctcatatccattattccaatagaggcagaaaaatgggtcataaaaggccatactactgaagcttcttccaatttgtaaacatcctgagccatttcccaagggattgaaatttcaagcacacaggtcagaggagttcaaaactggctacgtgatactctgcatagtaattgcaaaatttctaagttatatcacttgccaagaaacttctgagtctcttcagggctgactttgagatttca

SEQ ID NO: 715868 - DNA, 964 bp, Homo sapiens
ccatgctggagtgcagtggcgtgatctcggctcactgcaacctttgcctcccgggttcaagtgattctcctgcctcagcctcccaagtagctgggattacaggtgtgcgccatcatgcccgaataatttttgtattttttagtagagacggggtttcaccatgttggccaggttggtctgaacccctgatttcaaaggatctgcctgccttagcctcccaaagtgctgggattacagttgtgagccaacatgcgcaaatgctgtattttttgatataatcagtttatttgcctgattagtttcttactttgatgttacatcaaaaaattatatttcaggtttaaaatgtgtaaaaatacaaaaatttataccgatatgttcatattaactctctaggatttcagtagtctaggagatttttgtttccatgttttaaaaaatttaattttcctattacaaatataaatatatgcaagctaatacctgcctcctataaacatctgaaccatttcgaactctgaaactctattgacatttacaaaaccaaacaggtaaaaatgtccttgttaaatttatggctagatttgcagttttgaactggacatttataagtgttttttaatgaaaattaaagaatttcataacacctacacacacaccccactctctrtgcccagcaacaaggttgctgttaagtggtcttcaactttttggcacttcccagcctcatatccattattccaatagaggcagaaaaatgggtcataaaaggccatactactgaagcttcttccaatttgtaaacatcctgagccatttcccaagggattgaaatttcaagcacacaggtcagaggagttcaaaactggctacgtgatactctgcatagtaattgcaaaatttctaagttatatcacttgccaagaaacttctgagtctcttcagggctgactttgagatttca

SEQ ID NO: 715869 - DNA, 964 bp, Homo sapiens
ccatgctggagtgcagtggcgtgatctcggctcactgcaacctttgcctcccgggttcaagtgattctcctgcctcagcctcccaagtagctgggattacaggtgtgcgccatcatgcccgaataatttttgtattttttagtagagacggggtttcaccatgttggccaggttggtctgaacccctgatttcaaaggatctgcctgccttagcctcccaaagtgctgggattacagttgtgagccaacatgcgcaaatgctgtattttttgatataatcagtttatttgcctgattagtttcttactttgatgttacatcaaaaaattatatttcaggtttaaaatgtgtaaaaatacaaaaatttataccgatatgttcatattaactctctaggatttcagtagtctaggagatttttgtttccatgttttaaaaaatttaattttcctattacaaatataaatatatgcaagctaatacctgcctcctataaacatctgaaccatttcgaactctgaaactctattgacatttacaaaaccaaacaggtaaaaatgtccttgttaaatttatggctagatttgcagttttgaactggacatttataagtgttttttaatgaaaattaaagaatttcataacacctacacacacaccccactctctgtgcccagcaacaaggttgctgttaagtggtcttcaactttttggcacttcccagcctcatatccattattccaatagaggcagaaaaatgggtcataaaaggccatactactgaagcttcttccaatttrtaaacatcctgagccatttcccaagggattgaaatttcaagcacacaggtcagaggagttcaaaactggctacgtgatactctgcatagtaattgcaaaatttctaagttatatcacttgccaagaaacttctgagtctcttcagggctgactttgagatttca

SEQ ID NO: 715870 - DNA, 964 bp, Homo sapiens
ccatgctggagtgcagtggcgtgatctcggctcactgcaacctttgcctcccgggttcaagtgattctcctgcctcagcctcccaagtagctgggattacaggtgtgcgccatcatgcccgaataatttttgtattttttagtagagacggggtttcaccatgttggccaggttggtctgaacccctgatttcaaaggatctgcctgccttagcctcccaaagtgctgggattacagttgtgagccaacatgcgcaaatgctgtattttttgatataatcagtttatttgcctgattagtttcttactttgatgttacatcaaaaaattatatttcaggtttaaaatgtgtaaaaatacaaaaatttataccgatatgttcatattaactctctaggatttcagtagtctaggagatttttgtttccatgttttaaaaaatttaattttcctattacaaatataaatatatgcaagctaatacctgcctcctataaacatctgaaccatttcgaactctgaaactctattgacatttacaaaaccaaacaggtaaaaatgtccttgttaaatttatggctagatttgcagttttgaactggacatttataagtgttttttaatgaaaattaaagaatttcataacacctacacacacaccccactctctgtgcccagcaacaaggttgctgttaagtggtcttcaactttttggcacttcccagcctcatatccattattccaatagaggcagaaaaatgggtcataaaaggccatactactgaagcttcttccaatttgtaaacatcctgagccatttcccaagggattgaaatttcaagcacacaggtcagaggagttcaaractggctacgtgatactctgcatagtaattgcaaaatttctaagttatatcacttgccaagaaacttctgagtctcttcagggctgactttgagatttca

SEQ ID NO: 715871 - DNA, 972 bp, Homo sapiens
ttttgatctgtgattcatattcagtctataatccattttgagttaatttttatatacgatgtgaggtaggaattaaaatttattattttgtataaagatatttagttatccctgcatcattcrttttttgaaaaggctatcatttcccctattgaattatcttggtgttcttgtcaaaaattaattgaccatagatatgtaggcttattgacatactctcaattctatcccattgatctgtgtctatcctcatgctaggaaggaccacacagtattaactactatagattcatggtaagttttaaagtcagaaagtgtaagtccttcaactttgtttcttttcaagattgttttggctattctgggaacattgcatatctttgtgaattttagggtcagctcatcaatttctgagataatgatttaggccatgatctgtagcagtgtgtgaggtagcctgaccagaagcctgagcttgtcccaatgccagctcatctctgggaaaaatacaggcaggctggggaagccttagcgaatggaaccccacatggataacatggggctcctagtcttgaattccactttttacagagcttctgatccttacatttccagggtttttacctttcctgtgtctttgaccaagggaaaaataccagtgattgttaaagaactttgctaccatggatgcccagagcacaccgtggttgcctatcatggttctcattgtgctattatcattggttagtctttttctcttttgggaaacatggcagagatagaaacaaagccctttgtggtggtcatgactcttcttcccaaactatgttcttctctgggctctggtaaatagaagtcactctgaacatatggttgcatcctcccaaggtccctggatgcttgtcttccttccaggagaatgcaagacagttatggagaggctgggggtagggatggggggatcacaaattc

SEQ ID NO: 715872 - DNA, 972 bp, Homo sapiens
ttttgatctgtgattcatattcagtctataatccattttgagttaatttttatatacgatgtgaggtaggaattaaaatttattattttgtataaagatatttagttatccctgcatcattcgttttttgaaaaggctatcatttcccctattgaattatcttggtgttcttgtcaaaaattaattgaccatagatatgtaggcttattgacatactctcaattctatcccattgatctgtgtctatcctcatgctaggaaggaccacacagtattaactactatagattcatggtaagytttaaagtcagaaagtgtaagtccttcaactttgtttcttttcaagattgttttggctattctgggaacattgcatatctttgtgaattttagggtcagctcatcaatttctgagataatgatttaggccatgatctgtagcagtgtgtgaggtagcctgaccagaagcctgagcttgtcccaatgccagctcatctctgggaaaaatacaggcaggctggggaagccttagcgaatggaaccccacatggataacatggggctcctagtcttgaattccactttttacagagcttctgatccttacatttccagggtttttacctttcctgtgtctttgaccaagggaaaaataccagtgattgttaaagaactttgctaccatggatgcccagagcacaccgtggttgcctatcatggttctcattgtgctattatcattggttagtctttttctcttttgggaaacatggcagagatagaaacaaagccctttgtggtggtcatgactcttcttcccaaactatgttcttctctgggctctggtaaatagaagtcactctgaacatatggttgcatcctcccaaggtccctggatgcttgtcttccttccaggagaatgcaagacagttatggagaggctgggggtagggatggggggatcacaaattc

SEQ ID NO: 715873 - DNA, 1093 bp, Homo sapiens
ctgtagctgtaccttcattgtctttatgcgaaactctacgcctagggacagcaaactttttctgtaaaggctaaagagtaaatagtttgtgggctgtgcattctactcaacctctgctgttgtagcagaaaagcagccacagacactatgtaaatgaatgagaatagttgtgttctgataaaactttatttatagaaacaggcagtgtgccatgggctgtggtctgcttacccttccctgctctcagcagagaaactaggagcccaggctttattaccaaacttggtaaaattcatttgtacccatgccttccaaaataggggcacaataaaagttatttgcatgaatgaattaatgataattgtgggctctttctattgcagacctctcatggctcttttggacatcagtctcttatgacttgtcaatttgttcaggtccttgtttaaagatgagaggcttttagaaacataatgtgcacaatatgcaaaataatactgagaaaaatgattttataaactcgtgagggtatttttcttgtcatgatgaaatagttacctttccctaatgaaagcatatctcaaggcatagccatactgcaggcagagcacatggcccctgctttggtctggtgttgctgcattctgcatagggtcagctgagaggcacgactccagcaccaatcaattgggtgaaaaatttcaaaattataccccttttattgtctcagaactgtgtttcttcacagttttctttatgtaatttattgctctaattcattcaaaaaaggattttattacagcagtgagaaatcagggagtgatcccattctcagagaagagtatgccattaggaaggaccgtctgttttttttgagacggagtctcgctctgtcgcccaggctggagtgcagtggcgcgatctcggctcactgcaagctccgcctcccaggttcacgccattctcctgcctcctcagcctcccgagtagctgggactacaggcgcccgccaccacgccaggcttattttttgtatttttagtagagatggggtttcaccatgttagccaggatggtgttttttttttktttt

SEQ ID NO: 715874 - DNA, 750 bp, Homo sapiens
tggcatatgtgctattcttttaaagtgggaacatggcttataaataatccagtccagaaaattaagtgaagaaaggcttcagtctatactcctgtagcaaatggagactctgactgaagtggccatttcatttctaatgtctctggagaaattttagccacaagcttccttccgttttaccagatccctctgtagtatttctcaagggagcaaaagctgtttggatttttttccctctgctgaaaaattgccttatatgtgtctcatttcagtgcttacatgaaaaacagttgtcagctgattaaaaaacaagttagaattagttacaatatgattcaattgatgacccacagcatctgctagttggatttaaaatgatcagatcttaaaaacagtcttttaaygggacaaaatcaactttatgctcattctaaatctctcaactgctataaaaccacaaagaaatttgaaataaagtcagaaaagagcagagcattcctgggtgtaatacaaacaactgacttgaaaatatgtgcagatcactttcttacatacactagctgtgccatttggtacctaagagaaaggcttacctaactaaaatactaagattctaacatacacatgtgggtaaatgacctaaacaaacaatttttatcccccactccttgaactctgctgcctctgctgctgttgtaaatgccttcatggagacaggcaccccagtacccactagcaccctgctgcagc

SEQ ID NO: 715875 - DNA, 750 bp, Homo sapiens
tggcatatgtgctattcttttaaagtgggaacatggcttataaataatccagtccagaaaattaagtgaagaaaggcttcagtctatactcctgtagcaaatggagactctgactgaagtggccatttcatttctaatgtctctggagaaattttagccacaagcttccttccgttttaccagatccctctgtagtatttctcaagggagcaaaagctgtttggatttttttccctctgctgaaaaattgccttatatgtgtctcatttcagtgcttacatgaaaaacagttgtcagctgattaaaaaacaagttagaattagttacaatatgattcaattgatgacccacagcatctgctagttggatttaaaatgatcagatcttaaaaacagtcttttaatgggacaaaatcaactttatgctcattctaaatctctcaactgctataaaaccacaaagaaatttgaaataaagtcagaaaagagcagagcattcctgggtgtaatacaaacaactgacttgaaaatatgtgcagatcactttcttacatacactagctgtgccatttggtacctaagagaaaggcttacctaactaaaatactaagattctaacatacacatgtgggtaaatgacctaaacaaacaatttttatcccccactccttgaactctgctgcctctgctgctgttgtaaaygccttcatggagacaggcaccccagtacccactagcaccctgctgcagc

SEQ ID NO: 715876 - DNA, 578 bp, Homo sapiens
cactgcctcaaactgcctcacgttaccaacgtcaaattgttttaggtcgtaagtgagcttcaacaatgagaaggttgtatggagaacatggaacttgtctctcagagcacaaagaaatcactggggtaggtgagaaaaggaagaggaggctagcatgggagcaggtgtggttcacctgccttctgcaaaaaaactgcgtggccacactgaacgactggtggcagctgggaggaggacagccacaaggtgggccaaggaaactgagccrcaagcaagacctgaaacccacctcgataggaaagagactgactccaaagagatgtgagttggacgtgtcagtggtcatggcagaacattcagctaagatagaaattaggaactcagattaccacaccagagaacagaggccctgagtccgcgagtaggaacactcagaggtcaggccttcagtagactagagcttgagatgagcccaatggccttcttgacaagggtttcaggttttgttttggctttttgggttttttgtttgtttgttttttgagacagggtttcgctctgtcacccaggctggagtg

SEQ ID NO: 715877 - DNA, 578 bp, Homo sapiens
cactgcctcaaactgcctcacgttaccaacgtcaaattgttttaggtcgtaagtgagcttcaacaatgagaaggttgtatggagaacatggaacttgtctctcagagcacaaagaaatcactggggtaggtgagaaaaggaagaggaggctagcatgggagcaggtgtggttcacctgccttctgcaaaaaaactgcgtggccacactgaacgactggtggcagctgggaggaggacagccacaaggtgggccaaggaaactgagccgcaagcaagacctgaaacccacctcgataggaaagagactgactccaaagagatgtgagttggacgtgtcagtggtcatggcagaacattcagctaagatagaaattaggaactcagattaccacaccagagaacagaggccctgagtccgcgagtaggaacactcagaggtcaggccttcagtrgactagagcttgagatgagcccaatggccttcttgacaagggtttcaggttttgttttggctttttgggttttttgtttgtttgttttttgagacagggtttcgctctgtcacccaggctggagtg

SEQ ID NO: 715878 - DNA, 654 bp, Homo sapiens
aaacttytcaagttactcagaacccagattccttgatttgctaaaacagtggcagagagctatgagattaaagaagaaactccaatcccaatatttttggcatttgttgtttaattctaaacaaatgaggaataaatatctaatctaattcagattcttacacattccttgatgtctctgacagctgaggtactgaatttcctcgagatggtagatagtagacagtgttgttctctaaagatctatcattaaatattttgtagagatgtggaaatgaagatttacctcttccagacccttcaggttatctttagagtgagatggcagcagcacgaacatgctgagcttccccttggtgtacctcatttccaggatctgtgccttcacctcctctatgaagccaattctgtagaggcctttttgcgtcatcatcttcacactcttgttttcattctgtagtagtcaaggtaggaggtcacaggacggctatgggaaactcccaaattcatatggccccagcttcacggaggacaggggttcctaaagatgagaaggttctgcaggagaagtcctgagccacaccagggatccagcctacaagagtctacccactcatcagtggcccttactttgccaacactttatctttccgtg

SEQ ID NO: 715879 - DNA, 613 bp, Homo sapiens
cactcaacatagcataaggtatatgcttacatgtaaacaaaaatacacataaatgtgctagaccatgatataaaacctattttatagatacttttatatgctctttctcattccaccccaccttaatcaattaattgatccatcccacgataaggaggtatcattatcccttcttcatagaagaatcaattgcatccagggagagctgaagtcacacagccaagaagcagtaagactggcaggaatgggtcctcaggccttccacctttgggctcagctctggggctccttccacaataacacagccctaagctccacttgaaaagccccaggctagcgggcaatatcccacctttagtatacaccctttcctactcaaactaccaaatcaccagttacttgaatatttgcagatgtcttaagaagaaaagatcttccatctcaagaagagctctatttaaatcccataataatagattaggttgacatcatctacatttmaaattttctggaggagttaactcactaaggggaaagtacatatccaggccttaatatgagcttcattaatgaattgctttccttttgacagctgagtagagccttgaaagaa

SEQ ID NO: 715880 - DNA, 672 bp, Homo sapiens
cctcatcataaatcaagcagcatctgtatcgttttagggtttctttctggctatggttgattatctagctttgtaaagttcttagaccttcaaatgagacaattttcctgattgttccgttttaagtcctcatgtacttttacataataggtgaatgttcttctaattctatttcattattactcttatgctaatcattctaggttcaatagaatttcttttctattagctcataagcatttaaaaaggcaacaccttcttgtattcatatgtgtccagaaagtatggcccataagagttatttaggtaaggatgaagaatttacacttgggacttgaagcagcttcactcctgygaagaggagatgtatcttgacatcaagccacatctctgaactgcgcaactccactatccctacccaatctcccattcctcatttctcatctaccattagagaaaggccagcgaaagagaacttccgggtagtgggtctgttcctcagtaattcctcaagctcttctcagtatatgcaactggttccccagcagtagttacctgggctcttaaattttctggtctccttcatccatctttaggcatgagagttatgcactgtctgggaccagcatttgaccctgcaatgctgaggctatgtaattcattgggacaatg

SEQ ID NO: 715881 - DNA, 1017 bp, Homo sapiens
gtcctttttactctcttctgctcctctgagctttgcttctgaatacacaaaacctgtatttgtgactgccaagaggccttccactgtgaggaagaatgcattgtaaatcactctttcacagccagttaacagggagtgtctttctcacccataattatggttttgcttggagttgagaaagttgttttgggggcaataaattgtgatgtcagttatccttcactccctttgcatgtgagtcctcagtcggaaattggtattcttaacagttgaatctctggggtctccaaggctttgcagctgaaaattttggagtcctctgctttggaaagaggagagagagaggaaggagagggaaagaaagcaagggagagagattcatagaaggcccttttgttttcaactttggtgacaggaaatttgaaagtgggggaagggaacttggctcttactaaaaatattttatgttggagaatgttaatgaggctttacacgaataaaaaaaaaaattccaaacctagtgcatcagggtcatgaccgggacttttttcgtgtgcaaaggcctttgtacacacacacctcttctaaaaagcagccgcgcacacacacttgtattactgctgcatcacattgcgaaagctccccagcaagaaaaattccaggcagaataagagaatcagagctcttccattcgtggaaattgttagtggaaaacttcatttccaatatcaaatttaatattactgagtggcaggttatgataaggccactttaacacttaaaaacgagctgtttcttaagtctcctctgtgatggttttatgaattgttattctgctctctttaggtaatcagatacgaggaattgtttggcagcctagccagagagaaaagcctttgcccagattttaggcaatccctggtaattggtgcagcctgctgtggctgggccaagcgcttgtccgcatccctcagtatggctttgggtcttgtwtttcccgtgcagaggagaggtcat

SEQ ID NO: 715882 - DNA, 2317 bp, Homo sapiens
gggggaagaaaccagtttctagatatttcacttagattttgatttgggacttacagttcctgtattttataatcagcaaagattattaagaaatccattttaaagttttgatttttttctgatgattgagcattttgtactagcactaattaactataactattttaatgtttaaaagctacagaaggaatcaaatcatgttgcttataaattaaataccaatcatctacttaattatttaaaatgctctgggaatgtaaatcatatttggatactaaattgctttgttaatcaaaccacaagaaaacacgttaacttgctggtgattcagtagtgataaaataaaacagaagagatgatttgtactttggatactagtaattcagagaataaatgcaggagtagaatttaacctctgcatttatgatgctaagaggaygatttttattccatggagccaaagacactgcagttcctagaggacaaaattgtctatgaatctagtccagtctaaaaatacttactataagcacttcaataggtatgaaaaatagatacttgatagctgctatagtttatcttcttgtctttgttaacgtttgtttctaccctttacccccattataaaataataccgggaaaagaaactttttctgatagtcctggtgtcaaaggctaaagtttccaatgcagagaacaagatatctggggcttttgactgcccatgtgaattaggaccctgagcttgtcatccatctctggactgtctggacaaaggccaagaagccctgagagggtgagaggttagggaaaagtttagggtgaggtcttaggagaaggacttacagagaaatctgccagggtgctgatggttcctcccacccagcgggcacctcctctcacctcaagccaggtgagggggtgctgcgaaagcacttggggagcttaacatttcttacattttgggaaacatggggcttggcacccaactcacacttggaagagtcagaaggcaagaggctgtgtctagaggggcttttggttacagtgtgtggagacaggactgggtggaattggtagggcaggatgtgtgtgtgtgcccttagcctgggggtaaggcctctggagagatcttcctgtgctgttctggagttggagccatcccaaaggacttcctggtagggcaggtgacctcagaagaaggatggtggtactttggctatagaagccaagtaggggtgcaaagtggcaaaccagggaggctgatcatccgagaaacaggtagggatcctaaaggggggtggggtgggattctgaagaacccctaaaagcaccccacaagaagaagcatgagcgtgtgggagctgtcacactcagagagtatccctgccagattacaatggaacccgtcatgctaacaccttgtttcctccttttctcccatcatttctccttctacttcatccccacgataacgcagaggaacagtgagagaagtggggtgagaagaggaggaagcagtgttgtgttccttcctctctgcaaatctgcaagttgaaatcaggccccaagctgagcgggagagtttttaagtggatgagaatttgcagtaacctggactagatatttaatatctctgaggagctaaaagagctataaattctgcttgaaatacgatccaaagggtgagattgaacaaagccgtaatgtgtacttgaagggacagtgagagaacaaacaaaattgcctttcaactgtattctaccaacccattcagtaaaccagttacatacacaagaaagaaatggtccctaatcccatcactaataactttacaatagatttctctccaatctttctctcttgcagttgctatatatcacttatactcttatgacccaagttaatactcttcataagcttaattattaatgactacataaatttgtattatttaaatatactgctatgtattaatgttctattattgaaagttgttttcaagttataaataatattgtgaaaaatattaatgcttttcctgaatttttgatgatctgattcccagaggtaaaattattatttcagaagtgccattgaatatttttatgactattttttacacattattggtttttggaaagtttgtatcatctatcctatcacagcagtgactgacaatgcctgcttttccataccataggagagttccacttaaagatacatgccaagaaaataaacaaaatggcatctcttcatttatttatttttgcaatagttctttttcatctgatgtattttcatattttattagcca

SEQ ID NO: 715883 - DNA, 1107 bp, Homo sapiens
tttttgagacagagtctcgctctgtcgcccaggctggagtgcagtggtgcaatctcggctcactgcaacctccacctcccgggttcaagtgattctcttgcctcagcctcccgagtagctgggattacaggcacatgccaccacacccagctaatttttgtatttttattaaagatggggttttaccatattggccaggctggtctcgaactcctgagctcgtgatccgcccgcctcgacttcccaaagtgctgggattacaggcatgagccaccgcatctggtccccttatatttttaaatatcaacagatgtgatctaagtagaggaattaggatacaaattttacgttctttaggctaatctatataaatgtagcttttttgtttytgagacagggtcttgctctgccacctaggctggagtgcagtggtgcaatcatggcttactgtagcctcaaccttctgggctcaagcgatcctcccacctcagcctcctgagtagctgggactaccggtccatgccaccatgcctggctaattattattatttgggggtagggggtagagatagggtctcactgtgttgtccaggctggtctccaactcctgtgctcaagcgatcctcctgcttcggcctcccaaggtgctgagattacaggcttgagccactgcacccagacaaatataatgttttacactagtattttctccctacactgctgtccctcaaaattatcaaaagttagaatgaccatcacctaatcacctcaccttgcttctgcgagatacgccaccagtaacttgtaattaatcagagttaatgatgaggtggtattcaggaaactcatcgaaattgtgcataatcctgggagttcctgggactgtgtttcctgtgtggatgccgttgaccgtaggtgttatatgtgccatgtgttttcagggggagaatatttaatactgttgatctaaaccctcttcctactaggaactaattactcacatataaaccatatcaatttttgtatgtgctgaaattcacatagcataaaattcaccattttaaagtgaacaactcagtggcatttagtacatccacaatggtggca

SEQ ID NO: 715884 - DNA, 1107 bp, Homo sapiens
tttttgagacagagtctcgctctgtcgcccaggctggagtgcagtggtgcaatctcggctcactgcaacctccacctcccgggttcaagtgattctcttgcctcagcctcccgagtagctgggattacaggcacatgccaccacacccagctaatttttgtatttttattaaagatggggttttaccatattggccaggctggtctcgaactcctgagctcgtgatccgcccgcctcgacttcccaaagtgctgggattacaggcatgagccaccgcatctggtccccttatatttttaaatatcaacagatgtgatctaagtagaggaattaggatacaaattttacgttctttaggctaatctatataaatgtagcttttttgtttttgagacagggtcttgctctgccacctaggctggagtgcagtggtgcaatcatggcttactgtagcctcaaccttctgggctcaagcgatcctcccacctcagcctcctgagtagctgggactaccggtccatgccaccatgcctggctaattattattatttgggggtagggggtagagatagggtctcactgtgttgtccaggctggtctccaactcctgtgctcaagcgatcctcctgcttcggcctcccaaggtgctgagattacaggcttgagccactgcacccagacaaatataatgttttacactagtattttctccctacactgctgtccctcaaaattatcaaaagttagaatgaccatcacctaatcacctcaccttgcttctgcgagatacgccaccagtaacttgtaattaatcagagttaatgatgaggtggtattcaggaaactcatcgaaattgtgcataatcctgggagttcctgggactgtgtttcctgtgtggatgccgttgaccgtaggtgttatatgtgccatgtgttttcagggggagaatatttaatactgttgatctaaaccctcttcctactaggaactaattactcacatataaaccatatcaatttttgtatgtgctgaaattcacatarcataaaattcaccattttaaagtgaacaactcagtggcatttagtacatccacaatggtggca

SEQ ID NO: 715885 - DNA, 2184 bp, Homo sapiens
  misc_feature 111, 112, 113, 114, 115, 116, 117, 118, 119, 120, 121, 122,123, 124, 125, 126, 127, 128, 129, 130, 131, 132, 133, 134,135, 136, 137, 138, 139, 140, 141, 142, 143, 144, 145, 146,147, 148, 149, 150, 151, 152, 153, 154, 155, 156, 157: n = A,T,C or G
  misc_feature 158, 159, 160, 161, 162, 163, 164, 165, 166, 167, 168, 169,170, 171, 172, 173, 174, 175, 176, 177, 178, 179, 180, 181,182, 183, 184, 185, 186, 187, 188, 189, 190, 191, 192, 193,194, 195, 196, 197, 198, 199, 200, 201, 202, 203, 204: n = A,T,C or G
  misc_feature 205, 206, 207, 208, 209, 210: n = A,T,C or G
ttatttttctgcaactggtgtttgaaaacattttctcaaaattccagagggaaaattttcatcaatttttaaatcaagaagttaaattatatcaagaagacaatacataannnnnnnnnnnnnnnnnnnnnnnnnnnnnnnnnnnnnnnnnnnnnnnnnnnnnnnnnnnnnnnnnnnnnnnnnnnnnnnnnnnnnnnnnnnnnnnnnnnncttttaaaaattactcagcatcacgaggcctcattttcttcatctgtaagataaactgcaaaataaataaataaataaataaatacaagacaatttctaaattcccttccagcgttagaattcttgtctctgctgtctgtctcctgcacctggcacaatgccagtggccatgtttgtgttggacgctgaggccacatcccttggacacatggtcttgtgtggcacagctggtgccctggggctgagtggagaacaaggccagggttgtgccgggtcaacagcagtgacttccaagtgtataacattgagtctgttacccgagaggcagcatcacaaggatcaggagtccaccccagatcaacaagggagcttcctgggtagccagaaatctggagcctgtggaaaagctaagctgtaaactgatggtgctaggagcatgagtgcttcagttgccagtttacttagacaaatttcactgaacagcatccagtcccttgtatggttcttattaaatcaaccacttcatgcttgggatatatttcgccctggatattcttaaaaacgacattcaatctctaatatgctgtgtggcaggtagaataatggcctccagaaatgtccacatgctaatccctggaatctgtgtatatgttgcatggcaaggaagcattaaagtcacagacggaattaaggttgccaatcagctgactgtaaaacaggagattatcctggactatgttggcctagtggaatctcaagagtcttttaaagtggaaggtgggcagatgaaacaggtcagaggcagagggagactggaagatgctgcacwgctgattttgaagatagaggaagggaccaccagccaagggatgcaggtggcctccagaagaaggcaaggagacagattctcccctgagcctccagagtgagctcagccctgcccgcaccttggctttagctcagagagacccattccagacttctggcctccagaactgtaggaggataaatgcattttactttaagccactatgtttgtggtaatttttaacagaagcaataggaaattaatagatactgtgtattctaatgtcagagtctagattactatgataataaaaaatacaaacaaaaggaaaaatatacaaatttttaaaagtgaagtaaaataaaatgcttcagagatttactataatgagttcattaagatgactggaaattgatacattcaaagcaaaagaaatagtaaattaaaaattccagaataaaactacaaagaaatgaaatgcacgttattcttgtgagttgaaaatgcgcaattgttttttttctccttcagagtcactgtgaactgtgagctccagttaatcatggagacttgtcaggggagggtgggaattatgcaccaagcatgaaattgggttgaacctgggagttgcttaattgccagattccgtattcaagggagaagtcagaagaccagaagcacatgggtagtaagtcctctgcaatgcatctggccaagcaggtatgggaggtcggataaagactatgagtcaagaaggaggtcaggccggcacggtggctcacgcctgtaatcccagcaccttgggaggctgacatgggcagatcacgaggtcaggagattgagaccatcctggctaacacagtgaaaccctgtctctactaaaaatacaaaaaattacctaggcgtggtggcgggcacctgtagtccaagctactggggaggctgaggcagaagaattgcttgaacctaggagatggaggttgcagtgagccgagatcatgccactgcactccagcctgggcaacagagcaagactctgtctcaaaaaaaaaaaaaaaaaaaaagaaccaggtcatacaggagtcctgaagctcaaggtaggggcaggaactagaagaggataatgacagcagacaagggcaccccaacaaggacaccttcaaagt

SEQ ID NO: 715886 - DNA, 2184 bp, Homo sapiens
  misc_feature 111, 112, 113, 114, 115, 116, 117, 118, 119, 120, 121, 122,123, 124, 125, 126, 127, 128, 129, 130, 131, 132, 133, 134,135, 136, 137, 138, 139, 140, 141, 142, 143, 144, 145, 146,147, 148, 149, 150, 151, 152, 153, 154, 155, 156, 157: n = A,T,C or G
  misc_feature 158, 159, 160, 161, 162, 163, 164, 165, 166, 167, 168, 169,170, 171, 172, 173, 174, 175, 176, 177, 178, 179, 180, 181,182, 183, 184, 185, 186, 187, 188, 189, 190, 191, 192, 193,194, 195, 196, 197, 198, 199, 200, 201, 202, 203, 204: n = A,T,C or G
  misc_feature 205, 206, 207, 208, 209, 210: n = A,T,C or G
ttatttttctgcaactggtgtttgaaaacattttctcaaaattccagagggaaaattttcatcaatttttaaatcaagaagttaaattatatcaagaagacaatacataannnnnnnnnnnnnnnnnnnnnnnnnnnnnnnnnnnnnnnnnnnnnnnnnnnnnnnnnnnnnnnnnnnnnnnnnnnnnnnnnnnnnnnnnnnnnnnnnnnncttttaaaaattactcagcatcacgaggcctcattttcttcatctgtaagataaactgcaaaataaataaataaataaataaatacaagacaatttctaaattcccttccagcgttagaattcttgtctctgctgtctgtctcctgcacctggcacaatgccagtggccatgtttgtgttggacgctgaggccacatcccttggacacatggtcttgtgtggcacagctggtgccctggggctgagtggagaacaaggccagggttgtgccgggtcaacagcagtgacttccaagtgtataacattgagtctgttacccgagaggcagcatcacaaggatcaggagtccaccccagatcaacaagggagcttcctgggtagccagaaatctggagcctgtggaaaagctaagctgtaaactgatggtgctaggagcatgagtgcttcagttgccagtttacttagacaaatttcactgaacagcatccagtcccttgtatggttcttattaaatcaaccacttcatgcttgggatatatttcgccctggatattcttaaaaacgacattcaatctctaatatgctgtgtggcaggtagaataatggcctccagaaatgtccacatgctaatccctggaatctgtgtatatgttgcatggcaaggaagcattaaagtcacagacggaattaaggttgccaatcagctgactgtaaaacaggagattatcctggactatgttggcctagtggaatctcaagagtcttttaaagtggaaggtgggcagatgaaacaggtcagaggcagagggagactggaagatgctgcactgctgattttgaagatagaggaagggaccaccagccaagggatgcaggtggcctccagaagaaggcaaggagacagattctcccctgagcctccagagtgagctcagccctgccygcaccttggctttagctcagagagacccattccagacttctggcctccagaactgtaggaggataaatgcattttactttaagccactatgtttgtggtaatttttaacagaagcaataggaaattaatagatactgtgtattctaatgtcagagtctagattactatgataataaaaaatacaaacaaaaggaaaaatatacaaatttttaaaagtgaagtaaaataaaatgcttcagagatttactataatgagttcattaagatgactggaaattgatacattcaaagcaaaagaaatagtaaattaaaaattccagaataaaactacaaagaaatgaaatgcacgttattcttgtgagttgaaaatgcgcaattgttttttttctccttcagagtcactgtgaactgtgagctccagttaatcatggagacttgtcaggggagggtgggaattatgcaccaagcatgaaattgggttgaacctgggagttgcttaattgccagattccgtattcaagggagaagtcagaagaccagaagcacatgggtagtaagtcctctgcaatgcatctggccaagcaggtatgggaggtcggataaagactatgagtcaagaaggaggtcaggccggcacggtggctcacgcctgtaatcccagcaccttgggaggctgacatgggcagatcacgaggtcaggagattgagaccatcctggctaacacagtgaaaccctgtctctactaaaaatacaaaaaattacctaggcgtggtggcgggcacctgtagtccaagctactggggaggctgaggcagaagaattgcttgaacctaggagatggaggttgcagtgagccgagatcatgccactgcactccagcctgggcaacagagcaagactctgtctcaaaaaaaaaaaaaaaaaaaaagaaccaggtcatacaggagtcctgaagctcaaggtaggggcaggaactagaagaggataatgacagcagacaagggcaccccaacaaggacaccttcaaagt

SEQ ID NO: 715887 - DNA, 2184 bp, Homo sapiens
  misc_feature 111, 112, 113, 114, 115, 116, 117, 118, 119, 120, 121, 122,123, 124, 125, 126, 127, 128, 129, 130, 131, 132, 133, 134,135, 136, 137, 138, 139, 140, 141, 142, 143, 144, 145, 146,147, 148, 149, 150, 151, 152, 153, 154, 155, 156, 157: n = A,T,C or G
  misc_feature 158, 159, 160, 161, 162, 163, 164, 165, 166, 167, 168, 169,170, 171, 172, 173, 174, 175, 176, 177, 178, 179, 180, 181,182, 183, 184, 185, 186, 187, 188, 189, 190, 191, 192, 193,194, 195, 196, 197, 198, 199, 200, 201, 202, 203, 204: n = A,T,C or G
  misc_feature 205, 206, 207, 208, 209, 210: n = A,T,C or G
ttatttttctgcaactggtgtttgaaaacattttctcaaaattccagagggaaaattttcatcaatttttaaatcaagaagttaaattatatcaagaagacaatacataannnnnnnnnnnnnnnnnnnnnnnnnnnnnnnnnnnnnnnnnnnnnnnnnnnnnnnnnnnnnnnnnnnnnnnnnnnnnnnnnnnnnnnnnnnnnnnnnnnncttttaaaaattactcagcatcacgaggcctcattttcttcatctgtaagataaactgcaaaataaataaataaataaataaatacaagacaatttctaaattcccttccagcgttagaattcttgtctctgctgtctgtctcctgcacctggcacaatgccagtggccatgtttgtgttggacgctgaggccacatcccttggacacatggtcttgtgtggcacagctggtgccctggggctgagtggagaacaaggccagggttgtgccgggtcaacagcagtgacttccaagtgtataacattgagtctgttacccgagaggcagcatcacaaggatcaggagtccaccccagatcaacaagggagcttcctgggtagccagaaatctggagcctgtggaaaagctaagctgtaaactgatggtgctaggagcatgagtgcttcagttgccagtttacttagacaaatttcactgaacagcatccagtcccttgtatggttcttattaaatcaaccacttcatgcttgggatatatttcgccctggatattcttaaaaacgacattcaatctctaatatgctgtgtggcaggtagaataatggcctccagaaatgtccacatgctaatccctggaatctgtgtatatgttgcatggcaaggaagcattaaagtcacagacggaattaaggttgccaatcagctgactgtaaaacaggagattatcctggactatgttggcctagtggaatctcaagagtcttttaaagtggaaggtgggcagatgaaacaggtcagaggcagagggagactggaagatgctgcactgctgattttgaagatagaggaagggaccaccagccaagggatgcaggtggcctccagaagaaggcaaggagacagattctcccctgagcctccagagtgagctcagccctgcccgyaccttggctttagctcagagagacccattccagacttctggcctccagaactgtaggaggataaatgcattttactttaagccactatgtttgtggtaatttttaacagaagcaataggaaattaatagatactgtgtattctaatgtcagagtctagattactatgataataaaaaatacaaacaaaaggaaaaatatacaaatttttaaaagtgaagtaaaataaaatgcttcagagatttactataatgagttcattaagatgactggaaattgatacattcaaagcaaaagaaatagtaaattaaaaattccagaataaaactacaaagaaatgaaatgcacgttattcttgtgagttgaaaatgcgcaattgttttttttctccttcagagtcactgtgaactgtgagctccagttaatcatggagacttgtcaggggagggtgggaattatgcaccaagcatgaaattgggttgaacctgggagttgcttaattgccagattccgtattcaagggagaagtcagaagaccagaagcacatgggtagtaagtcctctgcaatgcatctggccaagcaggtatgggaggtcggataaagactatgagtcaagaaggaggtcaggccggcacggtggctcacgcctgtaatcccagcaccttgggaggctgacatgggcagatcacgaggtcaggagattgagaccatcctggctaacacagtgaaaccctgtctctactaaaaatacaaaaaattacctaggcgtggtggcgggcacctgtagtccaagctactggggaggctgaggcagaagaattgcttgaacctaggagatggaggttgcagtgagccgagatcatgccactgcactccagcctgggcaacagagcaagactctgtctcaaaaaaaaaaaaaaaaaaaaagaaccaggtcatacaggagtcctgaagctcaaggtaggggcaggaactagaagaggataatgacagcagacaagggcaccccaacaaggacaccttcaaagt

SEQ ID NO: 715888 - DNA, 2184 bp, Homo sapiens
  misc_feature 111, 112, 113, 114, 115, 116, 117, 118, 119, 120, 121, 122,123, 124, 125, 126, 127, 128, 129, 130, 131, 132, 133, 134,135, 136, 137, 138, 139, 140, 141, 142, 143, 144, 145, 146,147, 148, 149, 150, 151, 152, 153, 154, 155, 156, 157: n = A,T,C or G
  misc_feature 158, 159, 160, 161, 162, 163, 164, 165, 166, 167, 168, 169,170, 171, 172, 173, 174, 175, 176, 177, 178, 179, 180, 181,182, 183, 184, 185, 186, 187, 188, 189, 190, 191, 192, 193,194, 195, 196, 197, 198, 199, 200, 201, 202, 203, 204: n = A,T,C or G
  misc_feature 205, 206, 207, 208, 209, 210: n = A,T,C or G
ttatttttctgcaactggtgtttgaaaacattttctcaaaattccagagggaaaattttcatcaatttttaaatcaagaagttaaattatatcaagaagacaatacataannnnnnnnnnnnnnnnnnnnnnnnnnnnnnnnnnnnnnnnnnnnnnnnnnnnnnnnnnnnnnnnnnnnnnnnnnnnnnnnnnnnnnnnnnnnnnnnnnnncttttaaaaattactcagcatcacgaggcctcattttcttcatctgtaagataaactgcaaaataaataaataaataaataaatacaagacaatttctaaattcccttccagcgttagaattcttgtctctgctgtctgtctcctgcacctggcacaatgccagtggccatgtttgtgttggacgctgaggccacatcccttggacacatggtcttgtgtggcacagctggtgccctggggctgagtggagaacaaggccagggttgtgccgggtcaacagcagtgacttccaagtgtataacattgagtctgttacccgagaggcagcatcacaaggatcaggagtccaccccagatcaacaagggagcttcctgggtagccagaaatctggagcctgtggaaaagctaagctgtaaactgatggtgctaggagcatgagtgcttcagttgccagtttacttagacaaatttcactgaacagcatccagtcccttgtatggttcttattaaatcaaccacttcatgcttgggatatatttcgccctggatattcttaaaaacgacattcaatctctaatatgctgtgtggcaggtagaataatggcctccagaaatgtccacatgctaatccctggaatctgtgtatatgttgcatggcaaggaagcattaaagtcacagacggaattaaggttgccaatcagctgactgtaaaacaggagattatcctggactatgttggcctagtggaatctcaagagtcttttaaagtggaaggtgggcagatgaaacaggtcagaggcagagggagactggaagatgctgcactgctgattttgaagatagaggaagggaccaccagccaagggatgcaggtggcctccagaagaaggcaaggagacagattctcccctgagcctccagagtgagctcagccctgcccgcaccttggctttagctcagagagacccattccagacttctggcctccagaactgtaggaggataaatgcattttactttaagccactatgtttgtggtaatttttaacagmagcaataggaaattaatagatactgtgtattctaatgtcagagtctagattactatgataataaaaaatacaaacaaaaggaaaaatatacaaatttttaaaagtgaagtaaaataaaatgcttcagagatttactataatgagttcattaagatgactggaaattgatacattcaaagcaaaagaaatagtaaattaaaaattccagaataaaactacaaagaaatgaaatgcacgttattcttgtgagttgaaaatgcgcaattgttttttttctccttcagagtcactgtgaactgtgagctccagttaatcatggagacttgtcaggggagggtgggaattatgcaccaagcatgaaattgggttgaacctgggagttgcttaattgccagattccgtattcaagggagaagtcagaagaccagaagcacatgggtagtaagtcctctgcaatgcatctggccaagcaggtatgggaggtcggataaagactatgagtcaagaaggaggtcaggccggcacggtggctcacgcctgtaatcccagcaccttgggaggctgacatgggcagatcacgaggtcaggagattgagaccatcctggctaacacagtgaaaccctgtctctactaaaaatacaaaaaattacctaggcgtggtggcgggcacctgtagtccaagctactggggaggctgaggcagaagaattgcttgaacctaggagatggaggttgcagtgagccgagatcatgccactgcactccagcctgggcaacagagcaagactctgtctcaaaaaaaaaaaaaaaaaaaaagaaccaggtcatacaggagtcctgaagctcaaggtaggggcaggaactagaagaggataatgacagcagacaagggcaccccaacaaggacaccttcaaagt

SEQ ID NO: 715889 - DNA, 642 bp, Homo sapiens
taggtatactttttatggaagaaattggtttcactctgctctgaatgtacttttttctctctctctcttatttttcactttgtgtgtgtgtgtatgtgttttaataataaaaagcagaactgataagagtgattaactgtgaagtatggttccagaagatggaggagagatttgtgccttctactttctaaacttttgtttaaaaatttttttwaaataaaatctttttgtaatgaccttttttttttttttttttgagacggcgtcttgctctgtcgcccatgctagagtgcaatggtgtgatcttggctcactgcaacctccgcctcccgggttcaagcgattctcctgcctcagcctcctgagtagctgggattacaggtgcccgccaccatgcccagctaatttttatacttttaatagagatggggtttcaccatgttggccaggatggtctcaatctcttgaccttgtgatctgcccacctcagcctcccaaagtgctgggattacaggcgtgagccactgcacccggcctgtaatgaccttttttaaagtaaaaagacagtgcatactcataccacaaattatgggcagtacataaaaatgacaagcgtaagtgttaagcataggtataggcatc

SEQ ID NO: 715890 - DNA, 642 bp, Homo sapiens
taggtatactttttatggaagaaattggtttcactctgctctgaatgtacttttttctctctctctcttatttttcactttgtgtgtgtgtgtatgtgttttaataataaaaagcagaactgataagagtgattaactgtgaagtatggttccagaagatggaggagagatttgtgccttctactttctaaacttttgtttaaaaatttttttaaaataaaatctttttgtaatgaccttttttttttttttttttgagacggcgtcttgctctgtcgcccatgctagagtgcaatggtgtgatcttggctcactgcaacctccrcctcccgggttcaagcgattctcctgcctcagcctcctgagtagctgggattacaggtgcccgccaccatgcccagctaatttttatacttttaatagagatggggtttcaccatgttggccaggatggtctcaatctcttgaccttgtgatctgcccacctcagcctcccaaagtgctgggattacaggcgtgagccactgcacccggcctgtaatgaccttttttaaagtaaaaagacagtgcatactcataccacaaattatgggcagtacataaaaatgacaagcgtaagtgttaagcataggtataggcatc

SEQ ID NO: 715891 - DNA, 623 bp, Homo sapiens
ttacaagaaaaagacaaacaaccccatcaaaaagtgggcgaattcaccgcattcttatccttaaacagggtgattgtcctataggaagaggagggacctctcatgtgagktctcagcttcccgaagcaccctcaattcttactgaagacataaaggctgataatatgatgatttgatattcgtatgaaaattaagtcaggaactaaatttgttaaacagcttagttgtaggaagaaacttgatatgtagctaagtattcattcaaggttaatatttgcagcctccatgatttaaattcagctttttcttatttccttccttcctcttgtcttctttttcttcttcccgcctcaatacagttaagacaagttactctaatttgtacacaagtgaatccagttgaggcactttagcctgtaggtcagagcacaccccttttaccagaaatatctctttctaaggtatttcttcactctgtatgagtaaattcaaaataaaaagctatattaatacaatgaattctgtctgtgtgctttgggaaatgcaagaccccaccccaaatctgtttacttttactcattgagaaagcttccagataaattcttgggaggttctcacatgct

SEQ ID NO: 715892 - DNA, 1169 bp, Homo sapiens
tttgtgtttatgccaataacatcattcttaatattctcataaggaaactatgcacttcttcaaggagttttttactcagacagtgtctgtatattgagatctgagcccactttactaagctggataaccacaatctttattcataggtgctacacttattacactaaacacggagggatttcagtgagtagggagacagtttaaggaaaataacctgagactcccacacatacacatctttgtggtagtagagcgtatgggaataggcatgaggacagaatggaggaggcaatcaattgttttagtaatttctctacaggtcaaggtaagtggaggaatgaagctcctagacctttccctttgcatcacatatgctgacgctcttactttataattaactgcagtgaaggctgtgtctcctttagcagggttgtggacccatcaaaaataatttgtccggagtaagtgtagggaaaaaggggcagcctaccttttgctaaaccacagatcatttttgttggtctgcctatctgttgtttgtgttcccctctgcatggctccagccacatttgctttttttttttttttttttttttttgctaaggagtctcgctctgtggcccaggctggagtgcagtggctccatctgggctcactgcaagctccgcctcccgggttcacaccattctcctgcctcagccattctacggcctcccgagtagctgggactacaggtgccygccaccacgcctggctaattttttgtatttttagtagagacggggtttcaccgtgttagccaggatggtctcaatctcctgacctcatgatccgcccgccttggcctcccaaagtgctgggattacaggcgtgagccaccgcgcccggcccacatttgcttctttctgtcagtgagctctttctaccattgtgcccctccaacttctggtctgcctgtgattgcagccctaggctgcccaggcatctggtgcccgcaggtcacactccagttcccccaaacccagtgaaaccagcaacaacacagcctttactagaatgtaataatatttccattttgcacttttgagacagcaaattctcaggatctaacggtccctcatgttgatctatattgctctcacataccgtctgactacaaatcaaggatg

SEQ ID NO: 715893 - DNA, 652 bp, Homo sapiens
ggaaccattttattcatctttagtccttagcactgggcccagcacatagtagcaagcaataaatatttgtcaaataagtgatgctgtatctctgtgtatctagaacatgacataaaacagaaaataaatggtagtgtacataaaaaagggacacrgcacatttcagaaattaatcaaaaataaatcttctgtgaactgagagaaggaagaatcaaaataaaacagagtagcaccatgatcatctatgaacaagggaccaaaatgctgtgtttatagtgagaataatcatggaacttctttccacctcctgatttctgggtaagggaggagggatgtggagctgacattattgtgtagggaagggacaaataatctaagaagcaggaaacctaggtcttccaaaaaatttacatacagccactaattgccttgtcttcaagttccctcctttttgattatgctaatgatatatactgagaacctgaaagatcccaacagagaagacattgaagcagctgtaaggaagaacaaggttctggtctgagaatcatttattcaataaacatggatttactcatcaactattatatggtaggccttgagatgaggacacagcgctgaacaggacaggtgtggtccctgtcctcattaa

SEQ ID NO: 715894 - DNA, 608 bp, Homo sapiens
ttttattaattgggaaagatttgatactccatcactgtatctataattttgtaatctgagagaccaaggtaagcaagacggatagagttaaatctgttttctcttaacttgagactcctactaaattttgaattgctcttgattaggctcttgagtgtcctacccttgcctgaatgtccctactacacctagtataagacagatctggtccrggagcttttgtgtgctcctcagtctctccaccaaccctaggattgcattcaagtaaaattaacagcaacagcacacccccaccccaaacacaactggtagcagaaatgttagatcacaggcttagcaacagactgtctgcatttgaattttgactctggtagttattaattgtgtggctataggcaaactacttaacatcttcttgcttaattgcctaatctgtaaaaggaacataagataggactaacctcatagcatctattgtttgcctcatattcactgaatgatcaggtatctggctaaatcttcatcttttcccaaaacccttccattaggtcccctctaaatcaattcaaaattgaagctttatggtgatttttcttttgaaataccag

SEQ ID NO: 715895 - DNA, 608 bp, Homo sapiens
ttttattaattgggaaagatttgatactccatcactgtatctataattttgtaatctgagagaccaaggtaagcaagacggatagagttaaatctgttttctcttaacttgagactcctactaaattttgaattgctcttgattaggctcttgagtgtcctacccttgcctgaatgtccctactacacctagtataagacagatctggtccaggarcttttgtgtgctcctcagtctctccaccaaccctaggattgcattcaagtaaaattaacagcaacagcacacccccaccccaaacacaactggtagcagaaatgttagatcacaggcttagcaacagactgtctgcatttgaattttgactctggtagttattaattgtgtggctataggcaaactacttaacatcttcttgcttaattgcctaatctgtaaaaggaacataagataggactaacctcatagcatctattgtttgcctcatattcactgaatgatcaggtatctggctaaatcttcatcttttcccaaaacccttccattaggtcccctctaaatcaattcaaaattgaagctttatggtgatttttcttttgaaataccag

SEQ ID NO: 715896 - DNA, 1535 bp, Homo sapiens
aaatatggaaaagttagcccggcgtgatggcgtgtgcctgtagtcccagctcctcaggaggctgaggtgggaggattgcttgagcccaggaggtggatattgcagtgatctgagattgtgccactgtactccagcctgggtgatgcagtgagaccctgtttcaaaaaaaaaaaaaaaaraaagaaattatggtttgcaattttgatccaagttccagtcctgacaaatacaatatctgcatttatgtagtagattctatccaaatgaagttgaattgaaggataaataagtaagggtaacctactttttttcttagttactgattatgattctatacttggtttcctatttagtgtataacccaagttgaaccacaagagcagttatgtattaacaaattatatgtacttaacataagatttaccaggtgatataatttaattaaccataagaacttctttgtttttagtatattcaacagaacataagagcagattgctccaatattgacaaaattcttgaaccacctgaaggccaagatgaaggtgtgtggaagtatgaacatttaaggtaggaccttacatcaaaatactaatagtacctctcacaaaactagctttcatattaatgataattatgaattgtaaaatttactatgtaactgcagactaagaagccaaattttaaagctttggcattttcagtgtcacaaggttctcagctttcttcactggttgtttccaggtcaaattatgctgcagagtcactcattttgaaaggtggtttatttcagagttgataatttggacctgcctctgcacctctcttcttttcttttcttttttttttttttttttgagatggggtctcactctcttgcccacgttggagtgcagtggtgtaatcactgcttactgtgcctctacctcttaggctcaagtgatcctcccacttcagcttccagagtagctgggactacaggtgtgtgccagcatgcctcactaattttttaattttttgtagagacaggatctgattgtgttgcccaggctagtctcaaactcctggattcaagcaattttcctaccttgtcctcccaaagtattgagccaccctttctacatttattcatttgggccttattatccccgccttttttttgaaacagggtcttgatctgttgcctaggctggaatgcagtggtgcaatcttggcgcattgcagcctctgtctcccatgctgaagcaatcctcccacctcagcctcctgagtagctgggactactagtgcatgcctctaagcctggctagttttttgtattttttgtagagacaaggtttcaccatgttgcctaggctggtctcaaactccggggcttaagcaatccacccaccttggcctcccacagtgctgggattaccaccatgccagcctgggttttattcttatttcatgattttccttaattgtatctcttaaccgctaatatagtatttccgtttccccatttttgcataactgtgtcatcttttgtc

SEQ ID NO: 715897 - DNA, 597 bp, Homo sapiens
cactataatagtctgtgattatagtccatagaaaattacaaaaaccaatttaggcaggactgttaatggtgcagttcattcagaaatgagcatttgagtcacccatcaggtgaaggaccatcactagctgagatgcttgctgaggacaaagaggatctagaattgatcatgtaagaaatgggtttaaataccatctatgaccacataaccacttgcagaaataaagacccaaataggtataattatttatttctcactttttwataaatatgcttatgtatatattggctagatatttttattctattcttttatacccttatcatctaacacaagatacattgataataattaactttatatcacaatatttacattacaggataccaagagagaagagagaatattatctgaggaaattacatcctcctctcaggagaaggttagtatatttttagttgtaagtaaaatagttgtcatgcaaggcagaagtattacttggttattgtccttattctacttatctggttgaaccttgattgatacatgatataatcctataaattcattgagacatatatttccaggagtacagag

SEQ ID NO: 715898 - DNA, 1214 bp, Homo sapiens
ccctgtgcgtgaatcccactgcatattgcagcaatgctgacttctgccagagacgattctccatcaactctacattttgtgtgtgtgtgacttttaccgattgatatggtttggctgtgttccacccaaatctcatcttgaattgtagttcccgtaatttccatgtgttgtgggtgggacctggtgggagatatctgaatcatgggggcaatttgtcccatactgttctcttggtagtgaataagtcctatgagatcgggtggttttataagggggaacccctttcatttggctctcattttctctcttgcctgctgccatgtaatatgtgccttttgccttccaccatgattatgaggcctccccagccacgttgaacagtgagtctattaaacctctttttccttataaattacccagtctcagatatgtctttattagcagcatgaaaatggactaatacacataccatgagtatatctcattggcaaagcctgcatccaagctgtaagggagtctgagaatgtgagtgcaggaaagtctkagcatcttcaaggaagagggagagttaccttcctccaaataaactcaaacatgtcataagaaatagatccaaatattgaatggccgaaacaaatgccagatatgtttaataaagtgtattctttccttggattatttttctcttctctttatgttcacatgatattagattgttttttcatcattacctctttttcctcgaaaagaaatagtattaatggctgatatttaattcattttcacagtagagaacatgtcatctcctcagttttgctacattcactcaccacttatatgtaatttaatattttattttaaagtaatatgaaatttaatacaatatttttaaaaggaaactataaattactaccataaatagaaaaacaatatattatgctataaattataagttacttgtggaaacaaatgttatcacatttaacttcagatgctggtgcccacgaaatgttcttagcctgaggttgtctctctcctttttcatagcccttactagagtatttattgtttccttgttcatttttgccccttcccaaaatatgctaaaagacttcatttttcttcaagatgcagactcagaacctacactaatgcccaacagtcagcagatcctcaatttgttgattacagtaatttataaactagaaaataat

SEQ ID NO: 715899 - DNA, 1214 bp, Homo sapiens
ccctgtgcgtgaatcccactgcatattgcagcaatgctgacttctgccagagacgattctccatcaactctacattttgtgtgtgtgtgacttttaccgattgatatggtttggctgtgttccacccaaatctcatcttgaattgtagttcccgtaatttccatgtgttgtgggtgggacctggtgggagatatctgaatcatgggggcaatttgtcccatactgttctcttggtagtgaataagtcctatgagatcgggtggttttataagggggaacccctttcatttggctctcattttctctcttgcctgctgccatgtaatatgtgccttttgccttccaccatgattatgaggcctccccagccacgttgaacagtgagtctattaaacctctttttccttataaattacccagtctcagatatgtctttattagcagcatgaaaatggactaatacacataccatgagtatatctcattggcaaagcctgcatccaagctgtaagggagtctgagaatgtgagtgcaggaaagtctgagcatcttcaaggaagagggagagttaccttcctccaaataaactcaaacatgtcataagaaatagatccaaatattgaatggccgaaacaaatgccagatatgtttaataaagtgtattctttccttggattatttttctcttctctttatgttcacatgatattagattgttttttcatcattacctctttttcctcgaaaagaaatagtattaatggctgatatttaattcattttcacagtagagaacatgtcatctcctcagttttgctacattcactcaccacttatatgtaatttaatattttattttaaagtaatatgaaatttaatacaatatttttaaaaggaaactataaattactaccataaatagaaaaacaatatattatgctataaattataagttacttgtggaaacaaatgttatcacatttaayttcagatgctggtgcccacgaaatgttcttagcctgaggttgtctctctcctttttcatagcccttactagagtatttattgtttccttgttcatttttgccccttcccaaaatatgctaaaagacttcatttttcttcaagatgcagactcagaacctacactaatgcccaacagtcagcagatcctcaatttgttgattacagtaatttataaactagaaaataat

SEQ ID NO: 715900 - DNA, 1214 bp, Homo sapiens
ccctgtgcgtgaatcccactgcatattgcagcaatgctgacttctgccagagacgattctccatcaactctacattttgtgtgtgtgtgacttttaccgattgatatggtttggctgtgttccacccaaatctcatcttgaattgtagttcccgtaatttccatgtgttgtgggtgggacctggtgggagatatctgaatcatgggggcaatttgtcccatactgttctcttggtagtgaataagtcctatgagatcgggtggttttataagggggaacccctttcatttggctctcattttctctcttgcctgctgccatgtaatatgtgccttttgccttccaccatgattatgaggcctccccagccacgttgaacagtgagtctattaaacctctttttccttataaattacccagtctcagatatgtctttattagcagcatgaaaatggactaatacacataccatgagtatatctcattggcaaagcctgcatccaagctgtaagggagtctgagaatgtgagtgcaggaaagtctgagcatcttcaaggaagagggagagttaccttcctccaaataaactcaaacatgtcataagaaatagatccaaatattgaatggccgaaacaaatgccagatatgtttaataaagtgtattctttccttggattatttttctcttctctttatgttcacatgatattagattgttttttcatcattacctctttttcctcgaaaagaaatagtattaatggctgatatttaattcattttcacagtagagaacatgtcatctcctcagttttgctacattcactcaccacttatatgtaatttaatattttattttaaagtaatatgaaatttaatacaatatttttaaaaggaaactataaattactaccataaatagaaaaacaatatattatgctataaattataagttacttgtggaaacaaatgttatcacatttaacttcagatgctggtgcccacgaaatgttcttagcctgaggttgtctctctcctttttcatagcccttactagagtatttattgtttccttgttcatttttgccccttcccaaaatatgctaaaagrcttcatttttcttcaagatgcagactcagaacctacactaatgcccaacagtcagcagatcctcaatttgttgattacagtaatttataaactagaaaataat

SEQ ID NO: 715901 - DNA, 702 bp, Homo sapiens
gagagcacttgccaaggctactgaacaaagggtcaagcacccagccagtcactgagttccagactcttaataacaaggttatgaagctatgygaagccttcatcccttctcataactacacaggcatgtcggggcttctgaagttgtgacagtgatttcctttaaagaaaacgattctaagtaaaccaaggacacttcacccttgactttgaaaatgtctacaaactttcccagagcaaatctctgccggcgtttctcacttcccgatctgatcggcctgaggagcccacgggctgggctggcacgttcttttgttcagcttctctaccggaaggagtttgtgtaaaaaggaatagaaatcagtgttcatgccacaataggggtaattgttctgagctgccacattccgttaaatgtttacctttttgtttcacaatctaacaggaaacgaggagcaaaggatttttggttcccttatccccctttggtcaagactaaaaaagaccagttgttattctagttgctcaaaaatgaaatgctcaaggtaggaaatgagcacagttgctaaagactccagatcacaatctggggtttcaaccaaatccgttgcatgaaatgtttcagaggaatgaggctttgtcaaccttctccatgtgcctccaggacaggatgtttagcaagaggtgctgaacattgtaacca

SEQ ID NO: 715902 - DNA, 702 bp, Homo sapiens
gagagcacttgccaaggctactgaacaaagggtcaagcacccagccagtcactgagttccagactcttaataacaaggttatgaagctatgcgaagccttcatcccttctcataactacacaggcatgtcggggcttctgaagttgtgacagtgatttcctttaaagaaaacgattctaagtaaaccaaggacacttcacccttgactttgaaaatgtctacaaactttcccagagcaaatctctgccggcgtttctcacttcccgatctgatcggcctgaggagcccacgggctgggctggcacgttcttttgttcagcttctctaccggaaggagtttgtgtaaaaaggaatagaaatcagtgttcatgccacaataggggtaattgttctgagctgccacattccgwtaaatgtttacctttttgtttcacaatctaacaggaaacgaggagcaaaggatttttggttcccttatccccctttggtcaagactaaaaaagaccagttgttattctagttgctcaaaaatgaaatgctcaaggtaggaaatgagcacagttgctaaagactccagatcacaatctggggtttcaaccaaatccgttgcatgaaatgtttcagaggaatgaggctttgtcaaccttctccatgtgcctccaggacaggatgtttagcaagaggtgctgaacattgtaacca

SEQ ID NO: 715903 - DNA, 597 bp, Homo sapiens
caaacctctgactgtttctcaaagttagagtaaagttgattctgacaactttgctatttttttttagggtttccaaagagggacaagcccatggagctccctacttttccattttaactagatgacctttcttgcctagatcctgactttagtgaaagattaaataagtacacaaatataatgccgacatttagactgaggataggtcttctgcatattaaataaaatgcatgaatctttatttcatttcacttttgattggttccttggtgttgtattcttgtcaaatgttttcagtgtaaatacacggaatatcatagtattctcttaagatttatatgtataggtaaatatattaatgcatktatttatttatttatttatttttcttttattatactttaagttttagggtacatgtgcacattgtgcaggttagttacatatgtatacatgtgccacgctggtgcgctgcacccactaactcgtcatttagcattaggtatatctcccaatgctatccctcccccctccccccaccccacaacagtccccagagtgtgatgttccccttcctgtgtccatgtgatctcattg

SEQ ID NO: 715904 - DNA, 597 bp, Homo sapiens
caaacctctgactgtttctcaaagttagagtaaagttgattctgacaactttgctatttttttttagggtttccaaagagggacaagcccatggagctccctacttttccattttaactagatgacctttcttgcctagatcctgactttagtgaaagattaaataagtacacaaatataatgccgacatttagactgaggataggtcttctgcatattaaataaaatgcatgaatctttatttcatttcacttttgattggttccttggtgttgtattcttgtcaaatgttttcagtgtaaatacacggaatatcatagtattctcttaagatttatatgtataggtaaatatattaatgcattyatttatttatttatttatttttcttttattatactttaagttttagggtacatgtgcacattgtgcaggttagttacatatgtatacatgtgccacgctggtgcgctgcacccactaactcgtcatttagcattaggtatatctcccaatgctatccctcccccctccccccaccccacaacagtccccagagtgtgatgttccccttcctgtgtccatgtgatctcattg

SEQ ID NO: 715905 - DNA, 656 bp, Homo sapiens
tgagaggccgaggcaggcgggtcacctgaggtcaggagtttgagaccagcctggctaacatggtgaaaccccgcctctactataaatacaaaaattagcagggcatagtggtgggtgcctgtaatcccagctactcgggaggctgaggcagggagaatcacttgaacccaggaggtggaggttgtagtaagctgagatgaaaatcctttaaacctcccaaattgcatcatttaggtgattcctactttacctacaaataacaccaatcctggatggacatacctttaggattgtgtcatttcttatatttcccccaaattctataatcccaaacttcttacaggattggtcagaagatatggaaacaatcaccaatgagagccaacacctctgctaaaactgagtggattaacaatatgtgctaagtgggctgaggacatgactgatttaattcactcaattaaatcagaattcattctgtttctcacaggggaaggtgaggtgagaagkgaagtgatgaaggaaaaaatatgtatgtgggtgcttaattgacttgtactcatttacaagctacaacccattgtctttattcttttcatatgttttgaaactcttagaaattctcagaggaacaaagtcatataagtgtaaaacca

SEQ ID NO: 715906 - DNA, 643 bp, Homo sapiens
actccttcatttgctttttttaaatttggcctctgttcaatctttgtcactttcccttgaatctttttcaagtgtctcattgttagtgttaaaattttagattattccataatcttcatctatttttccataaggcattatctgttgtgtgtattcactcatgtttctcctgcaaacccacttctttaaagaaagaagttgaattacttattagagcattttgaacctcatattcagggagaatgagtttcagtgctacatcacagttactacaaactacagttgttataaatatattgcaatggtcactgtaaagaagccttaaaacatacaacgaatatraacagtgtgaacaaattccaaaacaaatattatcaaattggtggagtcacatgaaacaaatatacttttgttttaaggattatttttaaagtctttcatgttattgctattctatatatgtacagaatatatgtattgtagcttaatgataggaaatttgtgctgcaaaaaaaaaatgcctatttattttgcttgggttgtccattctcttctaaatgtagtatttattgagtcagttgttatcttagaaagttagaatcataggtagtttatgttttcatttaaaacattatatttcatt

SEQ ID NO: 715907 - DNA, 604 bp, Homo sapiens
tttttattctaacagaagtatgtcaaaagggagggccccaaagaaattctccaagtcccattaagttcacatatatctcagggtaattttcagagtgccgcaaacattacctgccggctttatttctcttgaggctgaggtaacctatttctgtgaggacccactaatatagacgagttaatggaaattacattccaagattggaacatgtcaagaaagaggcagacggaataaagttagtaaaccattcaccattcttaacaccgaagagtgccatctcagtacaagatggaacagagggccaggcatcaggccggtgttcaagtcagaaatgaaggtggaagcctggagctagggacatctatcccttttatyaggaaattgaaggctttctcagaagtctcagcagattcctcttatattctatcgcccagatctgtgtcacgtggctatacgtagcttcaaggaatgctgcaaaggcaagcaataattttggcaggtctaaaagtgcaaatgggcaaaggagaagaggaccaggcatgggcacaggactagccacccaacagtatttgtggaaagtaaatattcaaagatggtgtcttca

SEQ ID NO: 715908 - DNA, 1564 bp, Homo sapiens
  misc_feature 1325, 1326, 1327, 1328, 1329, 1330, 1331, 1332, 1333, 1334,1335, 1336, 1337, 1338, 1339, 1340, 1341, 1342, 1343, 1344,1345, 1346, 1347, 1348, 1349, 1350, 1351, 1352, 1353, 1354,1355, 1356, 1357, 1358, 1359, 1360, 1361, 1362, 1363: n = A,T,C or G
  misc_feature 1364, 1365, 1366, 1367, 1368, 1369, 1370, 1371, 1372, 1373,1374, 1375, 1376, 1377, 1378, 1379, 1380, 1381, 1382, 1383,1384, 1385, 1386, 1387, 1388, 1389, 1390, 1391, 1392, 1393,1394, 1395, 1396, 1397, 1398, 1399, 1400, 1401, 1402: n = A,T,C or G
  misc_feature 1403, 1404, 1405, 1406, 1407, 1408, 1409, 1410, 1411, 1412,1413, 1414, 1415, 1416, 1417, 1418, 1419, 1420, 1421, 1422,1423, 1424: n = A,T,C or G
tggtacatagtcagttcatctttgatgtgtctgattatctctcaagaaacactaactaattaacatatcttaaagttacaaatattaacaaacacattctattacagtagcccttccttatctatagttttgctttccttgattttagttacccatggttggttacagtctaaaaataggtgaatacagtgcaatgagatattttgaaagagaaagagagaccacattcacataacttcttttacagtatattgtttaattgttctattttattattattttttgttgctaatctctttctttgcccaatttatggattttttcataagtttgtatgtataggaaacatatgtgagttttggtactacctacagtttcagacatccactaggggtcctggaacacatctcccaaaagaaaagggggaactattgaatgtataatttagaaaagtttagaaatgaacccaatcagttctggtgcattgctttkgtataaataacagctccttggcatataatttatatcccctacaattcatccatagaagtgtaaaatttaaaggttttattgtatttacagagttctccaaccattactgtaatccattttagaacattttaatcaccttgagaagaagccttataactattaatagtcacttctcacttcctcccaacaacccgagtcttaggcaaacactaatctatttttttgtctctataatcttgcctattctagatctttcatgtaaatggaatcatacagtatgggtcttttgaatgacttctttcacttggcataatgttttcatgatacatcgatgttgaaactcctttttattgttggataatacaacattgtataaatgtatcacattttatttatccattcatcagttaatgggcatttgtgttgttcctaccttttggatattatgaataatgctgctgtgaaccttcaagtacaagtttgtttgtatagatgtatgtttttatttctctagaatataatcctgggagtagaattctagatcatatggtaactcagtgtttaaatttttaggatactgccatatgattttccaaagttgctgcatcatttaatattttcaataacaatttaatgtgagtgacaacttttccacattttggtcaacagttgcatctgtcacctgtgtaacacctcagctacttagactctagccctctagagcaaaaccggtattagatgtatttttgattatagccacttagtgagtgtgaagtgccatctgttggcttcattaatatttcctcattggctaaatacgttgagcaacttgnnnnnnnnnnnnnnnnnnnnnnnnnnnnnnnnnnnnnnnnnnnnnnnnnnnnnnnnnnnnnnnnnnnnnnnnnnnnnnnnnnnnnnnnnnnnnnnnnnnntacttgtttgtttatttatttattttcagctttcacaagaagtacatttttgtgtcttaaaaattaatttgataaatagcttttaaatactaaaatagcaactgatttaaacatttctaagaagtagataaagttaatta

SEQ ID NO: 715909 - DNA, 583 bp, Homo sapiens
caaaatctatcattaatatgtcctatcctggaaaataaagatagtaataagaagactttaatagatactttttatatctcaaaaaccctaatmtttccctatggtggatatatttcctataatcttaactaaaatattctcatgaggtctgagtggaaaactaatctctacaatgagttttcttgctctggttataagaaactatttaaaggaaaaaccagtaagttgttcattcttcttttttgtttttttgttttttttgagacagagtctcactctttcacccatgctggagtgcagtggcaaggtcttggctcactgcagcccctgcctcctgggcgctagtgattgtccctcctcaacctccgggttagctgggaccacaggcatgtaccaccacacctgcctgactactttttgtgtttttagtagagacagggttttgccatgttgcccaagctgatctcaggctcctaagtccaagcaatccaccctcctcaacctcccaatgtgctgggattgtagatgtgagccaccgcacccagcctgttcccttttatttaaacttaaaaatatgtactaa

SEQ ID NO: 715910 - DNA, 2362 bp, Homo sapiens
tgatatgaacaactagcaacgaaaatgtctagaaagaatgactcccaatcagaaaagaagattccgtaccagaaatgtttccgtgtggacaaacacaacagatgtcccctatacagacatgcagcaaccagttataagagagaagcatgttattaaattgttttaagggtttattaccaaggcttaagtcttgtccaaatccttcatgatgtgcaaaacaaccagaaatttttaaggacaggattcacatgatctgatttgtgttttaaaaataaaactttagagctaagtgtaaaataaaatggagttgaggaaaagggaccatttagtaggttgatccagtatttttgatagtaggtgatggtgatttggagtacagtagaagcaaaaaaaaaaaaaaaaaaaaaaaaatggagagaactgagcaagtttaacgggaatttagtgggcagaaatgatagaacttggaggacaaacaagataaaggaaaaactaattcattcaggctgggcacagtggctcacgcctgtaatcccagcgctttgagaggctggggcgggcggatcacatggtcaggagatcgtgaccatctttgctaacacggtgaaaccccgtctctactaaaaatacaaaaaattagccaggcgtggtggcacacgcctgtagtcccagctactcaggagtctgaggcatctgaggcagaagaatcgcttgaacccgggaggcggaggttgcagtgagccgagatcacgtcactgmactccagcctgggcgacagaatgagactctgtctcaaaaaaaaaaaaaagaattcattcaattaatacatatttattgaattattgcaatattactgggcttggtgctgcaacagtgaatacgacaaaaatccctggaatcatagattatgtattctatggaaaggtaattctcattcttcagctactggtccttggattcaatctaacattaatcataaacttatatttcaagacaactgacaaatctctcacaagcttgattcatcatcagtgaaagtttctagtcccccgaatatttaaaaaaaaaagagagagagagatgcagctcctgaaggaaaatgtcccaagttgtttttgtttgtttgtttgtttgtttgtttttacatggagatagtagatcaaaggacacctactgagaacagagttctagtcagtcaaactgaatggctgcttcagaaccgtcaaatcttccaggacaagaatctttgctatccttgcccagaaagaccactgtgattctttcttcctgtaccctagtctaaatggaagcttttattgctgttcttctgcgccattgtgttttgaatgtgtgaaagtttgtaaaatttatcatttctccacagattactggactgtgatgagctccatctggacttgaatgaaaggaatgctaatcatcctggatgtggatccgggcaagacagtgtgttgtcttcctctgggaacaggatgagtgaggtttccaattgtgtatagatagttgcattatgttagaggagaacatattttaaatgttatgtgtaggaagaaaggctttgggtatccataggaatggtggaatatagctaatatattatgcttttaccaaaagagggttcctactcctactaatagacactctttttttttttctttagaaattatctcttgcctattctctgtccatgtgtttgtgtgggattgatgccaactccaggttccaggcatgagacaatgatctgaacctggccagtaagagcacgttcttcccagccacactgactgtttcatgcatagtcatcaaaaggaaagcatagataaaagagggaaacggaagattcttgattacattgtttgaactcacagaaatagtaatgctaaatcatctctaacactagcattttcaataagtataagggctatgtctgtcttgattactatattattcacatgtaataggaaagtacctagaagataacaggaagataactatttgtttaattgaattaaatcaaattcaatttaatattttaagattttcctggactgtaaaatataattttgatgaacggagaaaagagcaaattgtatcacacaatgaaatgtgtgctaaatagccctgaattaattggtttgcctttcactggacatttcaccttaaatcttacaatttcttatcatttttatggtctcagctcgaattttaagccaaagtacaagaggaaaggcctgtatcacacaagtccactaatttcctcacagtattcagaagactttattttcaccatattagagttttttcctacatcttaagtatattcttttattcgatatatagttta

SEQ ID NO: 715911 - DNA, 931 bp, Homo sapiens
ggaaagaaagcaaactctgaagttttctatcatgaaagttcttttgttttgaatacctctgtaagatgataataaatttttctcaatgccccaaataagaaagaagagattataagaatccactcttcttagaagtgaaagagagaagcaagttacaggaagagaaaaaggtactagtctttgtccaagagactagtcaactaatctttctttgtgtactatacaagagttgggagcaggagtagctctgagaggagtgagaatgtctcaaatcttttgaacagttccaggaacgacatctaatcagcagagaatgattatttatatgggaatttttgtatctaatattatctaattgttacttttgttatcaagggtagaaaaaccatggatgctactgaaaattcccccagttggtatctgcaagttgaatttctcaaccttccttgtattcccttggaaatatgacctaataattaatttgggatttgtcaaggaaaaagttgagtcttcctaaaactttagaaaaaaaaatctgcatttttgactgagatatatatatctcctcctttttgctattggaaactatgtattatttttatctatagtcatcctacagtgctttggaacagcagaacttattcttgctgtctagctgtaattttgtatcytttaacaaatttagttcctattcctagagacccactgaaactgctcttgctttctctacccattacaaccatattacaaaattgaataagcaagtttttgacctcatattatttgaattcttggcatcacactgatatggtttggctgtgcccccactcaaatttcatcttgacttcccatgtgttattggagcaacccagtgggaggtaattgaatcgtgggggcaggtctcccctgtgctgttctcatgatagtgaat

SEQ ID NO: 715912 - DNA, 931 bp, Homo sapiens
ggaaagaaagcaaactctgaagttttctatcatgaaagttcttttgttttgaatacctctgtaagatgataataaatttttctcaatgccccaaataagaaagaagagattataagaatccactcttcttagaagtgaaagagagaagcaagttacaggaagagaaaaaggtactagtctttgtccaagagactagtcaactaatctttctttgtgtactatacaagagttgggagcaggagtagctctgagaggagtgagaatgtctcaaatcttttgaacagttccaggaacgacatctaatcagcagagaatgattatttatatgggaatttttgtatctaatattatctaattgttacttttgttatcaagggtagaaaaaccatggatgctactgaaaattcccccagttggtatctgcaagttgaatttctcaaccttccttgtattcccttggaaatatgacctaataattaatttgggatttgtcaaggaaaaagttgagtcttcctaaaactttagaaaaaaaaatctgcatttttgactgagatatatatatctcctcctttttgctattggaaactatgtattatttttatctatagtcatcctacagtgctttggaacagcagaacttattcttgctgtctagctgtaattttgtatcttttaacaaatttagttcctattcctagagacccactgaaactgctcttgctttctctacccattacaaccatattacaaaattsaataagcaagtttttgacctcatattatttgaattcttggcatcacactgatatggtttggctgtgcccccactcaaatttcatcttgacttcccatgtgttattggagcaacccagtgggaggtaattgaatcgtgggggcaggtctcccctgtgctgttctcatgatagtgaat

SEQ ID NO: 715913 - DNA, 1630 bp, Homo sapiens
  misc_feature 729, 730, 731, 732, 733, 734, 735, 736, 737, 738, 739, 740,741, 742, 743, 744, 745, 746, 747, 748, 749, 750, 751, 752,753, 754, 755, 756, 757, 758, 759, 760, 761, 762, 763, 764,765, 766, 767, 768, 769, 770, 771, 772, 773, 774, 775: n = A,T,C or G
  misc_feature 776, 777, 778, 779, 780, 781, 782, 783, 784, 785, 786, 787,788, 789, 790, 791, 792, 793, 794, 795, 796, 797, 798, 799,800, 801, 802, 803, 804, 805, 806, 807, 808, 809, 810, 811,812, 813, 814, 815, 816, 817, 818, 819, 820, 821, 822: n = A,T,C or G
  misc_feature 823, 824, 825, 826, 827, 828: n = A,T,C or G
atgaatataaccaagatatatcgtgacattcattttcctatttctctactgcactctgtctctattgaattagttgaagccaacctcatctgcctcagcctctataatagcaactttactggtgtttccagtttcattcttatctcccttttgctcctttgtcttaagtcatactcccagagaagctaaaatctgggagaatggtttaaggcaaaactgtttttgcctaaaaatagttttggtgtaaaaattttaccatataatcttccttttaagagccctcagtggcttctctttttccttacaataaaatgcacaattgttgatatggtgaacaggattctccatcctctgatactgccagactccttctctaatatcctcacctactcattagccactctgatgtccttcaagtttcttaactaacaaaacctttccatcttgatggtttttgagtatgctatttcttcttgagaattaattttttttacattcagccaaggtggacagaaaaaaaggaaattcatttttataggtattctctgtctccattctcaattccacgtctcatcatccatttcactcaataggacctcctctagctttcatctaattaagtttgtcttgttagagtgtctattatattctgtaatttcttttgcagtactcattatcactttttcttcttttcctatctaattttgtggatatttgaaaaaatctatnnnnnnnnnnnnnnnnnnnnnnnnnnnnnnnnnnnnnnnnnnnnnnnnnnnnnnnnnnnnnnnnnnnnnnnnnnnnnnnnnnnnnnnnnnnnnnnnnnnntaaagttatagtcataagaatactttataaatcacacactaatatatacatatttattttaaattgtataacatgttggttttttattgaattaattactaaattacattataacattgtagtattacattataaaagtgatggacattgatcaaaaaatatattgagcttccacatatacttacaaaaatgtcaaataattttgcaattctatgttcaggaaaacaggatcccttcaatgcctagttagttgagggtttttaacataaaggtatgttgaattttcaaaagccttctctgcatctattgagataaacatgtggtttttgcttttaattctgtctatgtgatgaatcacaattattgatttgtgtatattgaaccaaccttgcatcccagggataaagcctacttgatcatgttaggttacctatttgatgtgctgctggatttcrtttgctagtatcttcttgagaatttctacatctattttcatcaaggatattggcctgaacttttctttttgtattgtgtctctgccaggttttggtatcaggaagatgctggcctcatagaatgaattaaggaataattcatcctcttcaattttttgggagagtttcagtaggaatggtatcagctcttcttcatacatctcatcgaatttgactgtgattccatttggtcctgggcttctttcagctggtaagctttttactactgattaaattttggaacttattattggtctgttcaggaatttgatttcttcctgattcagtcttggcaggctctttgtgcc

SEQ ID NO: 715914 - DNA, 1799 bp, Homo sapiens
taggtgaagtgccttcattgtcgcgtcatattgtggggaggcgctatgtgatatccacatgacatcagtggtcatgttaaccttcatcacactataatttctcagaatttttaagagtaattttggctcttgtttggttgtttcatcagaagtatggagatgagaagtttagaaggtgggtatcgttctctgctctgctgacagtctctactgttcatgagtcagtgccttggctttctctactgtcaacgtccttctccaaacaggaaaggacaagaaaaaccaccaaccstgttaagtggtgtgtggtttattcctgcacaagccagagcaggaggaacatgctggcttccagtaattcacgaagaagttctgctaagtcattactcgcccctcctgtagcaaaccctgtaaagcataagagcatttcctgggcaaataatacatggcccctttgcaatcatgtaaagtgcctgtataagttttgaaattaaggagaccctgctcggtctcagagagattcagtctctcccagcctttcagactcttctagtggtcattggtaggtttagcagaagtctctgttgccctctttttctttttctcttcttttctttctttttttttttttttgagacggagtctcgctctgtcacccaggctggagtgcagtggcgggatctcggctcactgcaagctccacctcccgggttcacgccattctcctgcctcaacctcctgagtatctgggactacaggcgcccgccaccacgcctggctagttttttgtatttttagtagagacggggtttcaccgtgttagccaggatggtctcgatctcctgaccttgtgatccgcccgccttggcctcccaaagtgctgggattacaggcgtgagccaccgcgcccggcctctgctgctctctttttgagaataaaagggtcacacctcagactctcttccgtggattcaggtggtgaaagtgttttctaaaatacatgtataatggactaaaaatggcaatctctttctttttaagttctttttttctcttcgcttacacagtctgtacataggcagtttttctttatagagatgccagattttaaggggaaaaaaaccgctgcatgcatcgatcttttcgtataaaacaaaactcatttttagattagtttgggaagggatcaagaacaaaggaaaatgaaaacaattatttatttgtttattttcttggaggcttaaaatgggccacgcctactttctttttggaaaaatactacaggaagccgactgtcccgtgttaaaggaatatgctcgaacaaataaagtgagtttggcaacaggctggctgtctcttacaccagcttctcccagcctgaagctcaggggaaagaggggcccgcgtgtatgcaaattgcagggatttgtggtaggaattacttcactgaatgacgcatttcccagtggtatctatagatgggcttttattgtgtttgaggttttaagtgaagagtgggaagatttgcacagatagaaccatttaactcaatctaaacataaaaaaaaatagccagcctattaactggttgaattcagtttcagttagactaatttagagggaattgtcaaagaactattttacagaccattgtaaacgttaaaatcaatatcgattcaagtgcattgaagagacagactcccatttaaatatgttgttattagaaagggatcctccacttgtatttgttgtaactcttacttttaaaaaattgagttatagttgacataattaagtgt

SEQ ID NO: 715915 - DNA, 1013 bp, Homo sapiens
tttttgcttcgattccagcaaacttttgcttgttaatcagcttttattggtgtacaaaaaggtaccagctcacccttggctctctcctttgctcaacttcagaaaacatccctgagaactttgggctttcattatgttccagccaatttccctagtctttacataaaggtacttagaggcatctgcacatcaaaatgcaagtaaacaagtcacctggatgccaagcatttctcactgcaatcgttcctgatccttcctctttctcataatgaaactgtgggtcacctataaccggcggggggacaatataacttatcatccaagtgaacagaaacgccaaccagaaaggattcataaacagggactaccaactgaagcaggactcgtcctctgatctgcacccatcttataaaggagacagcctttaaaatacagacttctggctgggtgcagtggctcatacttgtaatcccagcactttgggaggccaaggcaggcagatcacgaagtcaatagatcgagaccatcctggccaacatggtgaaaccccrtctctaatcaaaatacaaaaaattagctgggcgtggtggtgcacgcctgtaatcctagctactccggaggctgaggcaggagaatcgcttgaactcaggaggcggaggttgcagtgagccgagatcgcgccactgcactccagcctggcgacagagcgagactctatctcaaagaaacaaacaaagcaacaacaaaaaacagacttctaagataatgctgcattctgaaatccttaacactcaaaatcccagaaaccaaagcaattaaaacccagggcaatacatatatgtatgctgttggttgaactggacctagtgaaaagttgtgggcagagaggactacttctctatggtgctcatggctatagagcctttgctggttcccccatcccaattttggagctccctactatacaacgagcctgggcctctcaccctgcctcggcgtcctggacatacctg

SEQ ID NO: 715916 - DNA, 670 bp, Homo sapiens
tcaaaagctgtgattgatgagtgatagatacatcacgattttttttaaataaggaagcaaataactgctttgaaatgtacctcagctgagcatggtagctcatgcctataatcccagcactttgggaggctgaggtagaaggactgcttgaggccaggagatcaagaccagcctgggcaacaaagcgagaccccatcgctattagaaaagaaaagaacctcaacgaagtgtcatacatggtacatggggtgggtgtagagagataataaaagggagaaaaggtaagaagatgaggatcactgaactagatactaaaagctatcctaattccactgataatratattagtagctcaccattaatacattatcacattgaggtaattctgtcaacaacattttgagataaattctgtaataaccactcttttacagatgaggaaactgaggccaggagagattcagtatcttaataaaaggcagctagaaacagcaaagtcaggattcaaacctatgcctatgggcttaaactgtagatctgcactgagtagtaactactgttgatggaagtatcagaataaattaatcaggtatatcacaagccaatccaaacttgaaagcactggcatacatgtataaaagcttttagactacaaaattctttactaata

SEQ ID NO: 715917 - DNA, 603 bp, Homo sapiens
aaatgatgccaaattgggaaaattcagacacatatactagatattttccagaaaaagaaaagggtcagctgggtgcagtggctcacgcctgtagtcccagcactttgggaggccaaggtgggtggatcacttgaggtcaggagtttgagactagccagaccaacatggtgaaaccctgtctctattaaaaatagaaaaattagccgggcatggtgacatgcgcttgtaatcccagctactcgggaggctgaggcaggagaatcacttacmgggaggcggaggttgcagtgagccaagattgtgccactgcactccagcctgggtgacagcctgggtgactctgtctcaaaaaaaaaaaaaaaaaaaaaaagaaagaaagaaaaggctggtatctggaaaaagaaaagcttagggacctttacctgatgttcgttaaagcagctgaactttccatactggacatgatacgggcacatttaaaacaaagactaacatcttactgccaatcattactctagtgagacacttttaagaacagtaatattttgatgttgttagttgtgtgtgcgcaacaaaaagctgacaactcctgctcaacgatgt

SEQ ID NO: 715918 - DNA, 1069 bp, Homo sapiens
gagagcagagaggaggtagaggagtctaagacagtccagtgggtgactaagacaagtattccgtgagcccgttgctggtgagacatattctaagtgccatgagagaaggctaaaggcctgtttttagatgggaaagcaggaagtcttctttgagttttgttgttttcaagatttgttttattttaatagaattttactaaagggtaaaattggatgaaaaataattaagagctttatgaagataagtatttcatcaaaatctcaagggtagatagagccagaggtacaatgaatggcaaaggagtgcattagaggtagctgtgaaataccagagcagaatagcagacagctggaaatgaatattatgcatcactatgccaaagttctcagccattctcactgcaaggaaattttcactggccatttctttttttcactgggcctggcagctatcatatttctcaggaccatctccttttaaaaatttatcatggagagttttgagcctacacaaaagaagggagaattgtgtaatcaacacctgtgtacctatttcataactaaagttggatgacagtatcatagaacctcctgtaaaaataacatgtttagacgtgctttctgttagctagaattcagcttttggggacatgtgtaatataataaaatatatacttatgttaaaaaatctttttgtttcaacctgttttccctcccaacaaacagttttttggttttttttgtttctttgtttttttttttaaagctgagactcctagtgactagccaaagtgatagatatgactttgcttcatgtaaatttagtgttaaggattaactaaggtagcatatgtgaaaatactcaactttgtgcctgtgacgtattgtttgaaaaataatagaaagtaagattaatgagtatacaaatgataatgaattgattacatttttcactcagcaaacatttattatgttcctccagctccttagcactgtattaggtaccatagaaaatataaaatgaagaaatatrttttatttcccaaataaggagtataagtaataaaac

SEQ ID NO: 715919 - DNA, 3728 bp, Homo sapiens
  misc_feature 1277, 1278, 1279, 1280, 1281, 1282, 1283, 1284, 1285, 1286,1287, 1288, 1289, 1290, 1291, 1292, 1293, 1294, 1295, 1296,1297, 1298, 1299, 1300, 1301, 1302, 1303, 1304, 1305, 1306,1307, 1308, 1309, 1310, 1311, 1312, 1313, 1314, 1315: n = A,T,C or G
  misc_feature 1316, 1317, 1318, 1319, 1320, 1321, 1322, 1323, 1324, 1325,1326, 1327, 1328, 1329, 1330, 1331, 1332, 1333, 1334, 1335,1336, 1337, 1338, 1339, 1340, 1341, 1342, 1343, 1344, 1345,1346, 1347, 1348, 1349, 1350, 1351, 1352, 1353, 1354: n = A,T,C or G
  misc_feature 1355, 1356, 1357, 1358, 1359, 1360, 1361, 1362, 1363, 1364,1365, 1366, 1367, 1368, 1369, 1370, 1371, 1372, 1373, 1374,1375, 1376: n = A,T,C or G
tggtgtggctctgtgtcctcactcaaatctcatctcaaaytgtaatctttacatgttgagggaggtacctggtgggagatgattggatcatgggtgctgtttcccccgggctgtttttgtgacagtgagggagttctcacgagatctgatggttttaaaagttgcagtttcccctgtgctctctctttcccgttgtcatgtaagacgtgccttgcttcccttagctttctgccatgattgtaagtttcctgaggcctccccagccatgcagaactgtgccaattaagcctctttcctttatagattacccagcctcaggtattctttacagcagtgtgaaaatgaactaatccacttcctaatggaggatctttttaatattaatcgccactcatagaatcatttcagccaacttgggatgaaggtagaagtgaagggtacatagcacaggaatcctgtcctgctaaagttacatagttaaatttaccaattagaaacactctaagaggtgtgaatatttaataatcattttacaaataaagacacagttacaagagaacaattaatttatagaggtagtacaggtagaaattaaatttttaatggtgtccagttaggctacatgaactgtctcaagttagtacactgaggttgccttttgagtcaactcagatcagcctgaatttgaaaacttggctatggtcattatcccctgccttttctttgttttttaagagtttatttaattcttaccactgggcttattggaatccaagagttttagaatcccttttctctataatgtttagtaatgacacactaacctagcaattatgtgaaaaaaaagcatcagaaaccccatattagtggaagtaaacatttagaaaaatttatatatgtcttctagttttgttttaggtcaaactctgttctcctacctactttgtttcctggattggaatacccggtattatctgttgtcattccttcaatttctctggaaagtcacatatgtccaaatatttggggaaggtaatgagagtcctggagtgtccaaatctatagaccacagaaagaggagaaagtgctctcatttcaccaacagcatgaatcagttcctgggttatagcagatactcaaatgcttactgaaacttaaaatgaatcagtatttaaatcaatatataaaatccatctttattttaaaagaatctgttaatacttttcaaattgaatgaaagcctgctgtgtttacttatgctgcaaggtggctttgcnnnnnnnnnnnnnnnnnnnnnnnnnnnnnnnnnnnnnnnnnnnnnnnnnnnnnnnnnnnnnnnnnnnnnnnnnnnnnnnnnnnnnnnnnnnnnnnnnnnncagtgtgtgccttcacacttgagaggaaaagctctcaagttgccggggagctgctggcttcttcgggtgcaggccacagattagtcacagactttccaggaaataaagattgagttcttgacctgagcctgaataggaagagacttaccccaggaacccaaaccattcatttgcagtagttcacggggccccctagatgtagccatggatgcatatatgaatagccttttgtatttctttgaaacattcactctcaattttagaatgctgtggacattctgagtgtgaaacagagatgggccactggaataaaataataccaaataaaatattcacaccttaaaactcttcatagagaaacatgaacctctagattgaaatcaaacgttctaggtagatataacatcctttgcagggtatatgtaatgtatagccacttaaagtcttgcaattcacatagtattttcaagctttgactcttctaggctacttttgccatttacttttggcctcaggggtattatcttggataatacagttgtctagtttgtggaaattgcattgtgaaaagtcctctggaagaaaaaaaatgggttggagataagttatttcaaaatgtgagtgtccattttctgctgttaaatagacaaatcaaactggcacacttcctttgtaactgttgttttgctcgtgttattagaaaattcatatctgctggaattttcatcttaatcacatgacatgtcgttatagccaaaaggagtggaagagcctgtcttggagattttcctggggaaatcctgaggtcattcattatgaagtgtaccgcgcgggagtggctcagagtaaccacagtgctgttcatggctagagcaattccagccatggtggttcccaatgccactttattggagaaacttttggaaaaatacatggatgaggatggtgagtggtggatagccaaacaacgagggaaaagggccatcacagacaatgacatgcagagtattttggaccttcataataaattacgaagtcaggtgtatccaacagcctctaatatggagtatatggtaaggacatttttcaagtggtatgtacaaaagaaatgtttattcatgctttcagtcagcagtcttcatgctgttctttaatcatttattttatatgaagttgaaaaaagattttctttgagggtattttcctctgcatattcgtttattaatgttccttttgtttctaagagctcttgacattcagagtaggacgaaatgcctttagatgcaatgttcctactaagtgctgtaaattctactctcaccaggaaggttaatatagtgaaaatgcaaaacagctggtatatttgctgttaattgacttagctgaaaatttacttcctaattcctgatagaacctttttatgaatggtggatctgaaaaattcagactaataatcggaagaaactttctggattgctgaaatatattgttcctaatgggtctttgtttcttataaacatgtaaatgacattgtaaaggatacatttttatggttgctttatgttgaagagtgctttggcaatggcttttttctccccttggatttattatttgtgaacttgaagcatgaaaataagccttggcaaaggattaatttaaaatattcagcttatccttaacaaccttatatttactctgagtaaatttgcaactttaagggacataattactttaagactactagcatataactcatgagtatactgccatttcataccctaaacatttagaaaacttttcaaaaatctattatattccttccatgaatgaggaatgcactagcaaagcctgataataaatagttattggtgatggcaaaacttatttaacaaacattggaaatggcattttcattgcagttaattttcatacattctagtttttttctgtatttaccttagttttggtggatattctttatttagataattttcatgaagcatggaagttctaagttcctattgcccgttataaagtatggcattacactattttaacttttaccagaaaaaattattttaccctaaagaaagtaggtggcactcaagagactaatcagggattaagaattgagactcaggagtgaggctgtctgggttaaacttctggcactgacacgcactagctatgtgacattgggcgcttgctaatttctctctactttggtttcctggtgtctagtattatatactcacctcaaaggattattgtgaagatagaaggagataacctggacaaagtttagctcattagcaaacatacttcaagatctcagtaaatgttaccaagaca

SEQ ID NO: 715920 - DNA, 3436 bp, Homo sapiens
tgttcatcccatcttgaattctgttatattctcctaggtctgttcttcctttcctttttataaaagcgttttacaaatgggagcaccccaacccctttgttataatcagctcatagctaaagttgtagcagttgtaccctttgttctttgcagttttgtcttttggcaacattgaccaccttggccaagccagagatgccatcttctttccccccagcctcgttctcccacataaatgcaagcacagacactcgggtaatactctgctggaggtagtcattaagaataatgtgcattatattttctcatttatcttttttccatttattttagaacttatgttaatcttcctgctacggagagaaaggttataattaatctgaaaagtgtttctttggtttttctagatgagaattctccagccaacttctgggattctaagaacaggggtgtgactggaacacaaaaagggcaaattgtatggagaattgagcctgggccctatttcatggaacgtaagtaactaagtgtgaaatataaacttattattgaacattgcataagtatgcagaattctatggagtctttttgaatgttattttgaaattctttggtttggatttacatatttatgccatgatggaaaatatattgttttagaaaatgctcagtaaagaatgttcacatattttgaaaaaactgtatgtgtttaaatatacagttagccatccatatccgtggatttcacacctacagattcaaccaactgtggatcaaaaatattcaggaaaaaaaaatgtcattttgtctctactgaacaagtacagacattttttcttattattccctaaacaatatggtataacaattatttgcatagcatttatgttaggtattataagttatctagagatgatttaaagtatacgagaggatgtacacaggttatatgcatatactctgacactttatgtaaggaacttgagcatctgtggattttggtatcccatgggggtcttggaacgaatcccccgtggatatcaagggacaactatataatatgtgcatgtgtgtatatgtatatacacacacacacacacaaacatacacatttacatatatatgcaaatattacatgtacatacatatacatgtatatatacaaaaatatatatagtatattttatattttacatatacataatgtatggtatataaattatatatggttactttaatactttacacatttttatataccctttatatctataattaatatttattcatatgaatttcagaaagaataagtcaagatatcgcttaatttaataacatgacttgcctttgaaatatctcattataatttttgccagcggcagaataacttcgtgtktggaccccagtcttttcaaagtgttgatgaaatagacgggctcactgacattgaggtcggcttaccagaaaatcagacattggctgcagataactcaactattacctaattaattcagtgttatagtcatttataaattcaaatgctcatatatagtgcctggttcacaaaaatatcttgtccctttttctgttgggtgatggtgttatttatagttgccaccaatattattgaaaaaatagtaaatactcagtacatttttgtggaatatatagaagaaggaaggaataaatgctttactagttggtccaggttaacttctacatttatagaatttatttttctttctttcttttttttttttttttcttgaaacggagtttagctcttgttgcccaggctggagtacaatggcgcaatctcggctcatcacaacctccgcctcccgggttcaagcaattctcctccctcagcctccagagtagctgggattacagtcatgcaccaccacgcccagctaattttgtatttttagtagagacagggtttctccatgttggtcaggctggtctcgaactcctgacctcaggtgatccgcccgcctcagcctcccaaagtgctgggattacagacatgagcccctgtgcctggccatttttctttaatgtagaaaaaaaaatgggctttttaaactttttctgagttgttgagctctgagtgagccttaagattagtatatgcaaaagatttaatataaaagagaatgtgtgggtactagtacttaaagatagcacttactaaacgtgaacattaaagatttgattaaatggaaacctgccacaagcatatctttgtgaagcatatcaaacttctctaatacacagttatcttaaaaggttaacatctgttactttgaattgccattaaaggcatgaaataatttcttttaccatccttactagtaaatcagcactctagaactttctctaatcctgcttctgccccataagaaatgtcttcttttcatattccagttttctgactggattctctcttaggccttaaaagaaatgtcatttttaagggaaaatgctcacaaaaagcagagagaaaggaaggtcagaaaggggaagtaggtacattcagcagaatcctagctaatagcacagcatataggaaagtttggaagaaaacttgccaacatgtgaatgaggatggtttctggcaggtggaattatggatgatttgtttttccgacttatgtctatgtaactttccaacattgccccagctggcacgactatctaagtaatgaagaaataagtgataaaagaatgtgggaaaatggaatgggaaatagctggttttactttcagtgtgattcctcctttgaaaggatcctggtgtttaaaaggctgatctagctgagaaatattgccaactgaacttcaggggaaaaggtaaaatcacttcctttggagtgattttggcaaaatcactccaaaatgctgaaggctgctggtaattattgcctgttggagtgcacagattgatattacaaggctcatgtgaacccatgggaagaagtcagtaccacatgctgctatagtttggaatataatgtgagaaaaagcccatttacagagtatcccctttactgtgattgattttctttctccctcccaaagtgttagagattcataatgtcctggctgattaggctatagttaaatagatctgtcttgactgatttctctacatctcaccctagtatttaatagaaatgggcttgatattgaaactaggagttgggaatgaagaaaagagaagggttttttttttttcttttctccgtattttagcatttccaccttaattcttctcacataaaattgggagtattgcggagcataattgtaaaactggaaatattcagtgatgcattttttaaagactgagaaatgtagtataagtaaagttcaggacagtgaataggaatttcagaaagattctcctttgaataagtctttcttcattaat

SEQ ID NO: 715921 - DNA, 3436 bp, Homo sapiens
tgttcatcccatcttgaattctgttatattctcctaggtctgttcttcctttcctttttataaaagcgttttacaaatgggagcaccccaacccctttgttataatcagctcatagctaaagttgtagcagttgtaccctttgttctttgcagttttgtcttttggcaacattgaccaccttggccaagccagagatgccatcttctttccccccagcctcgttctcccacataaatgcaagcacagacactcgggtaatactctgctggaggtagtcattaagaataatgtgcattatattttctcatttatcttttttccatttattttagaacttatgttaatcttcctgctacggagagaaaggttataattaatctgaaaagtgtttctttggtttttctagatgagaattctccagccaacttctgggattctaagaacaggggtgtgactggaacacaaaaagggcaaattgtatggagaattgagcctgggccctatttcatggaacgtaagtaactaagtgtgaaatataaacttattattgaacattgcataagtatgcagaattctatggagtctttttgaatgttattttgaaattctttggtttggatttacatatttatgccatgatggaaaatatattgttttagaaaatgctcagtaaagaatgttcacatattttgaaaaaactgtatgtgtttaaatatacagttagccatccatatccgtggatttcacacctacagattcaaccaactgtggatcaaaaatattcaggaaaaaaaaatgtcattttgtctctactgaacaagtacagacattttttcttattattccctaaacaatatggtataacaattatttgcatagcatttatgttaggtattataagttatctagagatgatttaaagtatacgagaggatgtacacaggttatatgcatatactctgacactttatgtaaggaacttgagcatctgtggattttggtatcccatgggggtcttggaacgaatcccccgtggatatcaagggacaactatataatatgtgcatgtgtgtatatgtatatacacacacacacacacaaacatacacatttacatatatatgcaaatattacatgtacatacatatacatgtatatatacaaaaatatatatagtatattttatattttacatatacataatgtatggtatataaattatatatggttactttaatactttacacatttttatataccctttatatctataattaatatttattcatatgaatttcagaaagaataagtcaagatatcgcttaatttaataacatgacttgcctttgaaatatctcattataatttttgccagcggcagaataacttcgtgtgtggaccccagtcttttcaaagtgttgatgaaatagacgggctcactgacattgaggtcggcttaccagaaaatcagacattggctgcagataactcaactattacctaattaattcagtgttatagtcatttataaattcaaatgctcatatatagtgcctggttcacaaaaatatcttgtccctttttctgttgggtgatggtgttatttatagttgccaccaatattattgaaaaaatagtaaatacwcagtacatttttgtggaatatatagaagaaggaaggaataaatgctttactagttggtccaggttaacttctacatttatagaatttatttttctttctttcttttttttttttttttcttgaaacggagtttagctcttgttgcccaggctggagtacaatggcgcaatctcggctcatcacaacctccgcctcccgggttcaagcaattctcctccctcagcctccagagtagctgggattacagtcatgcaccaccacgcccagctaattttgtatttttagtagagacagggtttctccatgttggtcaggctggtctcgaactcctgacctcaggtgatccgcccgcctcagcctcccaaagtgctgggattacagacatgagcccctgtgcctggccatttttctttaatgtagaaaaaaaaatgggctttttaaactttttctgagttgttgagctctgagtgagccttaagattagtatatgcaaaagatttaatataaaagagaatgtgtgggtactagtacttaaagatagcacttactaaacgtgaacattaaagatttgattaaatggaaacctgccacaagcatatctttgtgaagcatatcaaacttctctaatacacagttatcttaaaaggttaacatctgttactttgaattgccattaaaggcatgaaataatttcttttaccatccttactagtaaatcagcactctagaactttctctaatcctgcttctgccccataagaaatgtcttcttttcatattccagttttctgactggattctctcttaggccttaaaagaaatgtcatttttaagggaaaatgctcacaaaaagcagagagaaaggaaggtcagaaaggggaagtaggtacattcagcagaatcctagctaatagcacagcatataggaaagtttggaagaaaacttgccaacatgtgaatgaggatggtttctggcaggtggaattatggatgatttgtttttccgacttatgtctatgtaactttccaacattgccccagctggcacgactatctaagtaatgaagaaataagtgataaaagaatgtgggaaaatggaatgggaaatagctggttttactttcagtgtgattcctcctttgaaaggatcctggtgtttaaaaggctgatctagctgagaaatattgccaactgaacttcaggggaaaaggtaaaatcacttcctttggagtgattttggcaaaatcactccaaaatgctgaaggctgctggtaattattgcctgttggagtgcacagattgatattacaaggctcatgtgaacccatgggaagaagtcagtaccacatgctgctatagtttggaatataatgtgagaaaaagcccatttacagagtatcccctttactgtgattgattttctttctccctcccaaagtgttagagattcataatgtcctggctgattaggctatagttaaatagatctgtcttgactgatttctctacatctcaccctagtatttaatagaaatgggcttgatattgaaactaggagttgggaatgaagaaaagagaagggttttttttttttcttttctccgtattttagcatttccaccttaattcttctcacataaaattgggagtattgcggagcataattgtaaaactggaaatattcagtgatgcattttttaaagactgagaaatgtagtataagtaaagttcaggacagtgaataggaatttcagaaagattctcctttgaataagtctttcttcattaat

SEQ ID NO: 715922 - DNA, 3436 bp, Homo sapiens
tgttcatcccatcttgaattctgttatattctcctaggtctgttcttcctttcctttttataaaagcgttttacaaatgggagcaccccaacccctttgttataatcagctcatagctaaagttgtagcagttgtaccctttgttctttgcagttttgtcttttggcaacattgaccaccttggccaagccagagatgccatcttctttccccccagcctcgttctcccacataaatgcaagcacagacactcgggtaatactctgctggaggtagtcattaagaataatgtgcattatattttctcatttatcttttttccatttattttagaacttatgttaatcttcctgctacggagagaaaggttataattaatctgaaaagtgtttctttggtttttctagatgagaattctccagccaacttctgggattctaagaacaggggtgtgactggaacacaaaaagggcaaattgtatggagaattgagcctgggccctatttcatggaacgtaagtaactaagtgtgaaatataaacttattattgaacattgcataagtatgcagaattctatggagtctttttgaatgttattttgaaattctttggtttggatttacatatttatgccatgatggaaaatatattgttttagaaaatgctcagtaaagaatgttcacatattttgaaaaaactgtatgtgtttaaatatacagttagccatccatatccgtggatttcacacctacagattcaaccaactgtggatcaaaaatattcaggaaaaaaaaatgtcattttgtctctactgaacaagtacagacattttttcttattattccctaaacaatatggtataacaattatttgcatagcatttatgttaggtattataagttatctagagatgatttaaagtatacgagaggatgtacacaggttatatgcatatactctgacactttatgtaaggaacttgagcatctgtggattttggtatcccatgggggtcttggaacgaatcccccgtggatatcaagggacaactatataatatgtgcatgtgtgtatatgtatatacacacacacacacacaaacatacacatttacatatatatgcaaatattacatgtacatacatatacatgtatatatacaaaaatatatatagtatattttatattttacatatacataatgtatggtatataaattatatatggttactttaatactttacacatttttatataccctttatatctataattaatatttattcatatgaatttcagaaagaataagtcaagatatcgcttaatttaataacatgacttgcctttgaaatatctcattataatttttgccagcggcagaataacttcgtgtgtggaccccagtcttttcaaagtgttgatgaaatagacgggctcactgacattgaggtcggcttaccagaaaatcagacattggctgcagataactcaactattacctaattaattcagtgttatagtcatttataaattcaaatgctcatatatagtgcctggttcacaaaaatatcttgtccctttttctgttgggtgatggtgttatttatagttgccaccaatattattgaaaaaatagtaaatactyagtacatttttgtggaatatatagaagaaggaaggaataaatgctttactagttggtccaggttaacttctacatttatagaatttatttttctttctttcttttttttttttttttcttgaaacggagtttagctcttgttgcccaggctggagtacaatggcgcaatctcggctcatcacaacctccgcctcccgggttcaagcaattctcctccctcagcctccagagtagctgggattacagtcatgcaccaccacgcccagctaattttgtatttttagtagagacagggtttctccatgttggtcaggctggtctcgaactcctgacctcaggtgatccgcccgcctcagcctcccaaagtgctgggattacagacatgagcccctgtgcctggccatttttctttaatgtagaaaaaaaaatgggctttttaaactttttctgagttgttgagctctgagtgagccttaagattagtatatgcaaaagatttaatataaaagagaatgtgtgggtactagtacttaaagatagcacttactaaacgtgaacattaaagatttgattaaatggaaacctgccacaagcatatctttgtgaagcatatcaaacttctctaatacacagttatcttaaaaggttaacatctgttactttgaattgccattaaaggcatgaaataatttcttttaccatccttactagtaaatcagcactctagaactttctctaatcctgcttctgccccataagaaatgtcttcttttcatattccagttttctgactggattctctcttaggccttaaaagaaatgtcatttttaagggaaaatgctcacaaaaagcagagagaaaggaaggtcagaaaggggaagtaggtacattcagcagaatcctagctaatagcacagcatataggaaagtttggaagaaaacttgccaacatgtgaatgaggatggtttctggcaggtggaattatggatgatttgtttttccgacttatgtctatgtaactttccaacattgccccagctggcacgactatctaagtaatgaagaaataagtgataaaagaatgtgggaaaatggaatgggaaatagctggttttactttcagtgtgattcctcctttgaaaggatcctggtgtttaaaaggctgatctagctgagaaatattgccaactgaacttcaggggaaaaggtaaaatcacttcctttggagtgattttggcaaaatcactccaaaatgctgaaggctgctggtaattattgcctgttggagtgcacagattgatattacaaggctcatgtgaacccatgggaagaagtcagtaccacatgctgctatagtttggaatataatgtgagaaaaagcccatttacagagtatcccctttactgtgattgattttctttctccctcccaaagtgttagagattcataatgtcctggctgattaggctatagttaaatagatctgtcttgactgatttctctacatctcaccctagtatttaatagaaatgggcttgatattgaaactaggagttgggaatgaagaaaagagaagggttttttttttttcttttctccgtattttagcatttccaccttaattcttctcacataaaattgggagtattgcggagcataattgtaaaactggaaatattcagtgatgcattttttaaagactgagaaatgtagtataagtaaagttcaggacagtgaataggaatttcagaaagattctcctttgaataagtctttcttcattaat

SEQ ID NO: 715923 - DNA, 1635 bp, Homo sapiens
gtacaaataattaattgtttttacagtgaaatgacacagaggaatgttctaagtaaagcggggcaatacatttatacgcaaggtgcaatgtatccgtcattttatttaattcttggaacacaaccttgaatggttattctcacttctcagatgaggaaacccaggcttacagagtttgagtgacttacttaaggccatatagggagtgagtgaagacaaaatttgaactcagattacaaatcccatttcttttcaggatactgcactacaatccaagtacagcttacctgttctcacttttattttccattatgtcccatctctgtaactcattattcaaataagtttatattattatagtgggaacctacttatctggttatctaacttctaaggaacaggaagtaggtcaaaactcttctgagaaacataatagatgttacaacgttcacatgtgagaagattctccttggcagccattctgtctttcaagtatacgctgtaattattttggatgtttataggactgcaatgataggatactgtgggagctttccctctgatcttccaatgactggctgctcttccaacttcagttctcatcttaaatgttacatcctctgagaggctttctccatcccttgctgctccctgttctttatagcactttttataaccattggtaattatggacttatttgtttattgcccatcttccccatgacattgtaaactccccaaaggcaggaaacatggctgctttattcagcagtgtttcctagcacttatggtacctggcacaaagtatggtaagtgttcatgggatggatgaaagaatggacaaagggacatgcagaaatatgtggttttgtcgtctgacctagggaagactggattacgttttgagctagggtagctcaatcaccctttccatataaatagccttgagatttggtggcctcccaaagacaatagacaggagctatgaagccagtccactgggacaggaggaggaaggaaagtaacatctactgagcccttaacaagtacaaagcaatgaactattagaagtaatggtggctgggtgcggtggctcaatggtggctcatgcctgtaatcctagcactttgggaggccaaagcaggtggatcatgaggtcaggagttcaggacctgcctggccaagatggtgaaaccccgtcttcactaaaaatacaaaaattagccaggtgcagtggcaggtgcctgtaatcccagctactcgggaggctgaggtaggagaatcacttgaaccccagtggcagaggttgcagtgagccaagattgtgccactgcacttcagcctgggtgatasagtgagactccgtctcaaaaaaaagtaatggtaaaacccacaattactcttgcaccaacctaatagctgtacatggacttatttaacataaaaagcactgcaggagaaagaaaaacacctattttacaaatgaaaaaagtgagacttacactggtgaggttgcccaacgtcacccaacaaagtggcagaaccaggatatgaagtgcagaaccaggatatgaagttaatctgtcacttttttttttttttaataaagcaaatttggccaggcacagtgactca

SEQ ID NO: 715924 - DNA, 1025 bp, Homo sapiens
tgaccataatggacttaaattcccataaccttttaactgctcggctgtatctgtcaagtcagacagtgccctgtgactgtaataatgagtatgaatgatcagtgctsgtcttcctttcttgacattataccattaggcaagtcaaagcatttctctaggactgcctgagggcagttctgaaaacgtttatttgtgaatgtgccactgaactgtatctagaggaaccaggatgtgcagagtcggcaatccagagttttgtggttttgagcattgctgcttctggttgtctccgaacacatgcccttctttaacttcaccagaatattgggtggtttcatgagaatgttttctgtgggaattcagtcttgagactttgttcattgtcctcaaatgatctagtagagttgatcttctggggtgattccgtgcagaggaggaagtggttacacatactgtgagagtctgagagacagcagtagctggagactttttcctgagtttgtcgctgtatagtttaggttctcattttacagttgtgagttttcatgttaagagattgcctttttacctgcctttgcatttctctccagtggattctgttttagtaaataattggacattggctttccaattctttttttatttctctgccacaggaaaaaaagaaaaaaaaaagatagcaagattgtttattccaaacaccgggtggaaattgttaggagccacatacgttattttggcctaaattaatcatgtccctgctttgtattttactaagcacttatcaggtagacagaaaagtgttttgtacttgggaacacaaagataaaggaggacgggctgagcaccatagctcgtgcctgtaatcccagctactttgggaggccgaggtgggtggatcacttgaggtcaggagttcacctggccaacatatgaaaccctatttccgctaaaaatacaaaaattagccagacatggtggcgcattcctgtaatcctaactacactggaggctgaggcaggaga

SEQ ID NO: 715925 - DNA, 591 bp, Homo sapiens
tcaacttgctattcatgccttatataagtaaatttgtaatccttgtaccatacacacacacacatgcacatrcacacacacacacacgcacacacacacacacacactgtgactgtttgctttaccattgtattctcagcagcagagactttacggcagagtatttttttttggtaaattttgtttgatgaaagtttgcatggttattctgtatattccataaataaataattaaatctactgtagaaaattgagagctaccttctagtctaaaaaatgttctgtattttgcaattgtcatgtcctactgaaactgctcactctctcaatcttggcaacctaaaatctcttaagggtttactccaaagaaagacattttttaaaagaaggctttgctaaccttaaatatatatgctttgtaaataaattaaatctttctatttaatacaaattttatttagaaatggcctgatttttcattttgacatactcagtctttaattattccttgctctctgcattttcctagaactttggggatacacagagtaagccccttactctgacactatgacatgattttgttagaca

SEQ ID NO: 715926 - DNA, 591 bp, Homo sapiens
tcaacttgctattcatgccttatataagtaaatttgtaatccttgtaccatacacacacacacatgcacatgcacacacacacrcacgcacacacacacacacacactgtgactgtttgctttaccattgtattctcagcagcagagactttacggcagagtatttttttttggtaaattttgtttgatgaaagtttgcatggttattctgtatattccataaataaataattaaatctactgtagaaaattgagagctaccttctagtctaaaaaatgttctgtattttgcaattgtcatgtcctactgaaactgctcactctctcaatcttggcaacctaaaatctcttaagggtttactccaaagaaagacattttttaaaagaaggctttgctaaccttaaatatatatgctttgtaaataaattaaatctttctatttaatacaaattttatttagaaatggcctgatttttcattttgacatactcagtctttaattattccttgctctctgcattttcctagaactttggggatacacagagtaagccccttactctgacactatgacatgattttgttagaca

SEQ ID NO: 715927 - DNA, 591 bp, Homo sapiens
tcaacttgctattcatgccttatataagtaaatttgtaatccttgtaccatacacacacacacatgcacatgcacacacacacacrcgcacacacacacacacacactgtgactgtttgctttaccattgtattctcagcagcagagactttacggcagagtatttttttttggtaaattttgtttgatgaaagtttgcatggttattctgtatattccataaataaataattaaatctactgtagaaaattgagagctaccttctagtctaaaaaatgttctgtattttgcaattgtcatgtcctactgaaactgctcactctctcaatcttggcaacctaaaatctcttaagggtttactccaaagaaagacattttttaaaagaaggctttgctaaccttaaatatatatgctttgtaaataaattaaatctttctatttaatacaaattttatttagaaatggcctgatttttcattttgacatactcagtctttaattattccttgctctctgcattttcctagaactttggggatacacagagtaagccccttactctgacactatgacatgattttgttagaca

SEQ ID NO: 715928 - DNA, 591 bp, Homo sapiens
tcaacttgctattcatgccttatataagtaaatttgtaatccttgtaccatacacacacacacatgcacatgcacacacacacacacrcacacacacacacacacactgtgactgtttgctttaccattgtattctcagcagcagagactttacggcagagtatttttttttggtaaattttgtttgatgaaagtttgcatggttattctgtatattccataaataaataattaaatctactgtagaaaattgagagctaccttctagtctaaaaaatgttctgtattttgcaattgtcatgtcctactgaaactgctcactctctcaatcttggcaacctaaaatctcttaagggtttactccaaagaaagacattttttaaaagaaggctttgctaaccttaaatatatatgctttgtaaataaattaaatctttctatttaatacaaattttatttagaaatggcctgatttttcattttgacatactcagtctttaattattccttgctctctgcattttcctagaactttggggatacacagagtaagccccttactctgacactatgacatgattttgttagaca

SEQ ID NO: 715929 - DNA, 582 bp, Homo sapiens
tctaaaagccaatagtagtacacacagtacaataggaatgttatgtgttttcatggaaaagcaactacaatgtttacatagtcaatagactgcaacatttccagaaacaaaactcagtgagtagaattaagaaaatgactgtccctcagggaaagcaaatatcaccagtgaattagttagagcaccggggacattgttccatggaccaagttgactaaggactagtggtgagattaatccctgcagcagggagtaagagtttctctcttcaaatgtttaaatttgacccaaatagacatcttgctctgagtaaaataaaaccaaagggtcacctgcagacctttcctgttgttgctaatgtctagtccctcaaaagctcagacctgatgcaygagaataggctcctatgtggtttctcagcaggttttccctttattttgtcctacaaataacaaactcaatgcagaacttaagaacctaggctgtgcccagttcagaagcctgctctttcatgttctatttctgttacttgcacaagtatcttagccactttatttcttggtttgcaaatctggaaaattg

SEQ ID NO: 715930 - DNA, 1132 bp, Homo sapiens
agaaatcaacattctgcttatgaagcaacatatacgaagaggattgcctatgtttgatagtattctcaaatgtaaagtaaaaccattagtgaccatatcagacgtaccacttacactccaacgcatatcctctcatctcacctttttattctagcaatggcaatggaaaccagctgtatgcaaatgtaatccagcttcaacttgcttagctgaatcatgtatatctagctttctgctctgggattcttgtccactaccatatgagattctgacatgtatgcaaatctacaatagtgggtgtgctaatccctcatggtgcaaacctagactattaggtgatgggatctgggagatactcacttcttttgttctttggacagacaattgcattattatttgtataaatatcctcagaatttccctaatgagaatgagcccagtttttctgcaatgttggtcaacttgaaaacctaccatttgataactttttcttctttcccatttcagtctttccagttgtccactactctttccagtcatccactactctttctcaagatcacttccccaaatagcatagctgtatctagtccttaactcagtctcagtttttagatggaagcaaagatatacatttctaataaaatggcttcattaaaaagctacaaattaatttaaaaatttattttagagaagtaagaaaaatcatatgactcttctgtgtaacattttatgcttgattattgaaaacacttttaaaaaatgatcaaaactaacyaaagtagatattgctgaaggaagaataaatgtatcaaataaattatttgattttcaaaagtattttgatcatttcaaaataagaacactaatggcatgcttaccatgctctaatgatgtattttaatgatacaaataatgactctgctataattatttgttccaaggttgatagctcactcagtgcataaaatgcatattactacatgtagtagctcaggaaacagcatgtagcaaacacttgttgaatcagttattataaataacctacagtttataagtgaattctagttaggttagacataacaacaacactagtgccaactccttgggcatccatttgttaaacctgata

SEQ ID NO: 715931 - DNA, 1297 bp, Homo sapiens
ggctgaagttctctttttttaatactttgtatttaatttttttcttttatcatgttaacggtttgagtcatgtcattaacatgctataagtttctgaccccatacaaaatagacacttgagatatgctgcaaagccttattttttatcagaactgatggcctgaactgcaaaatttggttccatttccattagccatggctgctttaacgcttgctccaacctgtgtcatttgtgttctttttcttggaatacagacttttctttagatttattaggttcatgcaaaagtaattgtggttttgccactgaaagtaatggcaaaaccacaattacttttgcaccaacttaataataaatattattttataattattctaaaacagattatagctacacataatacaagtttcttattttgaatgacacaaacttctcatgtttatggctataacatggtttctatcagattgttctgagtctttattcaaacacttgcatcccagaaaataaagatggaaatcaattagatttagatttagatcaattacattgttaagatgccagatgacaagtccatttttttgcgatccgtaaaagataagacttggttaggggaagtgttgttcactgtgctgaagttatattattcatgytggttgttacaaaccagattagctggagccctgctttatttctgtaagacttaggatggcagtggctgaccctctgccgcccaccaaatatacacacacagcatcctttacttcacagtaagtgcaagctaaaaatgagtactctggatggcattgtgtgtactagcacattaatactactctaagaagaactagaaagattaatgtttacttctcatctactgcccttgtgcccaacaccttccttcggaacttgacaatggtgctagattctgccagatatttatcagactttgactttgtccttgatgtcttagctgttggtcagcctacctctcattctgatctcacttatactatatcttgcaaagattccataaaatttctggcatataaccagcactcctcctcaatttccaatgtggtataaatattttgctatggatttcagggagttggaaaggtggtgaggaaagaggttaaatgtgcaagttcagcttgccctgttatgttgacatatgtcatttagttaatttagactgtttaacaatattaacctttcagtgaattggcaatgtaatcattggaagtgtatgggcctgagacaaaggcaaacaaacctactaataactttcaacatgat

SEQ ID NO: 715932 - DNA, 1532 bp, Homo sapiens
tatctagtaaatataaaccatcctgaaactttgttaatcaatgacagaaggggcagaagtaaatctctgagtcctggggcattcttctgtacagagctgtacatcaaacttttgctgctaatgaatataattcatcaagaagatttttaaaaattttatatagttacatagactgctctcctgttgtggaaacatctgcttagaacctcagaaattaaggtatttaagcttttatttcttaaataggacttaataacaacaggcagaattcatatttaattgtgaaggcttaattgttgtcatttctagttaacttcaaattaaacttataaaatacacacccatgcatgtatgcacacacacacacacacacacagacacactttttaaaaaacttgccaattccaatagtgagaaacaaatcacagaactcttttaacatgtccatggctatattgattctttaaactttatgttttcatgtacatttcaatttgcagatggctataaaattgacataagtatgataacataaagcaattttagaaaacttgagagcagcaattcattcagtggataaaacaaatattaataaaatttatctaattacatttacttcttctgtatttctgactataaaactaggtagagggggaaggtggaacttgttatggtgggagagcaaaggacttttgagccctcatagataaataataataaaatatgagaatatgggatataatttcgtatcataggatacataatgcaagtcacactatctcatactatgcatggtttaattttaccaaaagaataagccttattatttttcccagtaagagtcagcaaataacctgtggttatgatttgttttctttaagcatgagctactaaataacactttgcagttgaatgacaatttacactcctgttgtcaacaaaagaccaaatccgtatagaaatggcattcttattccataatgatatatttatttggtgtcattggactttgatcaatatcattttctcaaaacatagaactcctttctcgtgactaaaagaacagcttatatcaagtcaagtcttctagtcctagtatcagaatttgattatatgttcctgaatttgtatctaactttcttctycctttgtgaaatcaaaattatctctagagtgtttttaatcaaaaacagttactaaataagagataatgaatgtgatgtgtttatcacgccaacaaggttttattacatcaaatgtttgtaacatttcaatgtgaaaatttttttacacttatttgttattaaggtctcattatctgtgagataagtcacaaaaaaacaaagaggtgaatgagttcaagaacgcatggagggtttgttagtcttaggcacaggaatgggcttttgcttaatctcacaattgcatgggtttagctctttctgtctgtaaacattagaaaagattttagccacaagtaaatgaaaacttgagttacagaagttcaaatgaatcagggtgtatttttctca

SEQ ID NO: 715933 - DNA, 589 bp, Homo sapiens
caggtgggtttccatgggagttctaatttgcaagtttaaattagacaagctggtgcaaaacaagctggtgcaagttctatgtggccatgctgttaaccgagacgttgtcactgcagcatatctgtgcagtctatgggggatggaggagtcagtggggtaagccaataggtgatatctagctrtcttttagggaagatggtcaacagggggcaattgtataaggcacatatctggattaccacattaaggaactgggatgaaatagagaactggaaattgtgccaagggtgactaagccctgtttcttgtatgagaaagtccaacttatattcaaagtgaatgccaaggcaacataaaattacaggaattcactaccatgcatccccatgctcctgaatttttaagtccaaactccctatatctagctgataatatgggtgccaagtaatatggaaattcctggaatttctgctgctaattggaagtcccagcccatttcattcaaggtaatttatctttgggtccaatgtcagcattttatgacacttagatgctctcatcaaagatgtgtgtatgaaatggcttaagg

SEQ ID NO: 715934 - DNA, 589 bp, Homo sapiens
caggtgggtttccatgggagttctaatttgcaagtttaaattagacaagctggtgcaaaacaagctggtgcaagttctatgtggccatgctgttaaccgagacgttgtcactgcagcatatctgtgcagtctatgggggatggaggagtcagtggggtaagccaataggtgatatctagctatcttttagggaagatggtcaacagggggcaattgtataaggcasatatctggattaccacattaaggaactgggatgaaatagagaactggaaattgtgccaagggtgactaagccctgtttcttgtatgagaaagtccaacttatattcaaagtgaatgccaaggcaacataaaattacaggaattcactaccatgcatccccatgctcctgaatttttaagtccaaactccctatatctagctgataatatgggtgccaagtaatatggaaattcctggaatttctgctgctaattggaagtcccagcccatttcattcaaggtaatttatctttgggtccaatgtcagcattttatgacacttagatgctctcatcaaagatgtgtgtatgaaatggcttaagg

SEQ ID NO: 715935 - DNA, 1578 bp, Homo sapiens
cttgcagaatcatttcccattactaaattcacctgctttattacgtctcaggaatgaattttttcaattaagtcttccccttgtttttgttgtgttgtaactactttacgatgactgccctacttagggatggtatcttaggccatttgggctgttacaaacatttttgttacaaaaataccataagcaggatagcttataaacaacataaatttatttcttacagtactagaggctcggaaagttgagattaagtcactgtcagaatcggtatctggtgaggctcagttttctggttcacagacagtgactgtcttctcgctgtgtcttctcttacaatggctttcccttgcagtggatctctcttgcatctctttaataaaagcactaatctgattcaccgattcatgaatcacgaatcacttttgaaagatcccgtctcctaataccatcatattgggaattggaatttcaacataggaatttggggggaatattagtctattgttgatggtttgatgacctaattctcatggtggttttaacccatgctctgttttaataaaaataaaatgttgtaaaattatataattttttctgacagataactccaccctttcctcatactttatcctctttaaaatcactatatatttagaagatggtttattttctaggcatttctgcaaactgattaggtcgaacttttatttttctttgaccaaatattatatttattatcaaatatatgcattctactttgatcctcctgatcctccctccattacccccaaaaaaccttttaaggatcatatcatcttaattaggaagttcttcggctacatccaaaatatgatttttctttataaaattggactaataactccaatttgtgcagaccacatctgaagaatgttacaaacgtgtgtgaactctgtaaggctcccagtccaactttttttttttttgagtcggagtttcgctcctgtggcccaggctggagtgcagtggtgtgatctcggctaactgcaacctccgcctcctgggttcaagtgattctcctacctcagactcccgagtagctgggattacaggcatgcaccaccacgcccagctaatttttgtatttttagtacaggggggtttcaccatgttggccaggatggtctcartctcttgacctcatgatccacccaccttggcctcccaaagtgctgggattactggcatgagcactgcacctggccccagtccaacttttatgtctccattttcatctttcctaatccagccttatactggaagcttcttcggactaagccaagtaaaccttaggtcttcatgttcatatggggaccttaatattgatacggggcttgtacactttaaaatatttccacatatgttaagcttgtggtgatcctctgaggcatgacagatactattttccttgtttcatagaagagaaaatttgaggttccctggcttccagtctggcactcttcctgctattccatgctgtgttctctgattgaaaaatagtaagtctttggtattccccagcttggtcaaatctgt

SEQ ID NO: 715936 - DNA, 1880 bp, Homo sapiens
  misc_feature 1103, 1104, 1105, 1106, 1107, 1108, 1109, 1110, 1111, 1112,1113, 1114, 1115, 1116, 1117, 1118, 1119, 1120, 1121, 1122,1123, 1124, 1125, 1126, 1127, 1128, 1129, 1130, 1131, 1132,1133, 1134, 1135, 1136, 1137, 1138, 1139, 1140, 1141: n = A,T,C or G
  misc_feature 1142, 1143, 1144, 1145, 1146, 1147, 1148, 1149, 1150, 1151,1152, 1153, 1154, 1155, 1156, 1157, 1158, 1159, 1160, 1161,1162, 1163, 1164, 1165, 1166, 1167, 1168, 1169, 1170, 1171,1172, 1173, 1174, 1175, 1176, 1177, 1178, 1179, 1180: n = A,T,C or G
  misc_feature 1181, 1182, 1183, 1184, 1185, 1186, 1187, 1188, 1189, 1190,1191, 1192, 1193, 1194, 1195, 1196, 1197, 1198, 1199, 1200,1201, 1202: n = A,T,C or G
ttatttgtttctgaaaattacactctcaaaactgggtcattctagtgtaatcacagtgccatataaggggaagcgtgtaattagtgcacataacgcctttatcagaatccctaatattaatgagccctgaactgagaattatctgtaggatgccagagcccttagccagtaaccaagatacaatataattttaaaatctttactttcactactagaggtaatggttatgataatttttcaaactgggctttctttctgtgctgaaatctgtttccacagccctaaaaatctgaagttttcctcttcttttctaggaaacctcaaaggtagatctcctcaccattacaagaacaattatatttataattcaagctgagttgtgactccactttgccctacatggggtttaaagatggtaaaactgaactccattctcatttgaaagtacctgtgagtaaacattttttcccacagcacagcactggccattgctaactgactccctgccagcttctataacaatggattttggactcttctaatttttaaaatttaggtcctagaatatacttatcattttaattcaacatgtaagaaatcaaatggatttcgaagactcagaagtcattgtttcttcagtgttcaaacccaatgcccagacttacactcaggtgacatgagtgtgatcagccacgtgtgggaactaaaacagcctcttcccaagtagaggtttggagagattatgatggagtcaataatgactctcacataccctctgggcattcacaaacagcttgtgaatgatcctgccagcatgtcctcttcctgcaccggtgactaacacttcaggctgctccagcaggcaactcacaaacctaggagacagagacaggcaatgaaagggtggaaagtgagctgtccaggccactgggcgtccatcctcccacaggagttttgtggacaaatcctcaagctgatactggctaaacccaacaaggttggagtgaaattttacagcaagataagattgacatttggaattattatcgacttaactgacaatcttcgtgctttttcacctgtgctcataaaagatgtgtaannnnnnnnnnnnnnnnnnnnnnnnnnnnnnnnnnnnnnnnnnnnnnnnnnnnnnnnnnnnnnnnnnnnnnnnnnnnnnnnnnnnnnnnnnnnnnnnnnnntggtggtttagccgatacactacacagcatcagctgtacatgttacgatcggccgggccctcactcaccccatttacaagtcatatcacatacctagtatgcaccacctactaccatcataggtgataatcgagatgtgtgttctaacacattacatattatcmgccataaaatgatgatatccttcatttacagagcatagaaggaactgaaagacatttaagtgaaataagccaggcacagaaagacaagtattgcacgttttcactaatatgtgggagctaaaaaaacaaacaaactgaactcacggagataagagaatagaatgatgttagtgtcttatggatagtcatttaagtgtgtaaacatgggttagaagtgggaagctgggtagaagttttacaagaagatttaagatggccaggaggcttaaaaaggctagctatgggaggtgatacagagttgacatatctctaagtagaattaccagaggcttagaagggtaatggggagcagggcataaagaggggatggttaatgggacaaaaatacagttggatagaaaaagtaagatctagcattcagtagcaaaatagggtgcctatagttaacaataatttgttgtatatgtcaagataaataaaagaatggaattggaacgtttaattggggaatcca

SEQ ID NO: 715937 - DNA, 1880 bp, Homo sapiens
  misc_feature 1103, 1104, 1105, 1106, 1107, 1108, 1109, 1110, 1111, 1112,1113, 1114, 1115, 1116, 1117, 1118, 1119, 1120, 1121, 1122,1123, 1124, 1125, 1126, 1127, 1128, 1129, 1130, 1131, 1132,1133, 1134, 1135, 1136, 1137, 1138, 1139, 1140, 1141: n = A,T,C or G
  misc_feature 1142, 1143, 1144, 1145, 1146, 1147, 1148, 1149, 1150, 1151,1152, 1153, 1154, 1155, 1156, 1157, 1158, 1159, 1160, 1161,1162, 1163, 1164, 1165, 1166, 1167, 1168, 1169, 1170, 1171,1172, 1173, 1174, 1175, 1176, 1177, 1178, 1179, 1180: n = A,T,C or G
  misc_feature 1181, 1182, 1183, 1184, 1185, 1186, 1187, 1188, 1189, 1190,1191, 1192, 1193, 1194, 1195, 1196, 1197, 1198, 1199, 1200,1201, 1202: n = A,T,C or G
ttatttgtttctgaaaattacactctcaaaactgggtcattctagtgtaatcacagtgccatataaggggaagcgtgtaattagtgcacataacgcctttatcagaatccctaatattaatgagccctgaactgagaattatctgtaggatgccagagcccttagccagtaaccaagatacaatataattttaaaatctttactttcactactagaggtaatggttatgataatttttcaaactgggctttctttctgtgctgaaatctgtttccacagccctaaaaatctgaagttttcctcttcttttctaggaaacctcaaaggtagatctcctcaccattacaagaacaattatatttataattcaagctgagttgtgactccactttgccctacatggggtttaaagatggtaaaactgaactccattctcatttgaaagtacctgtgagtaaacattttttcccacagcacagcactggccattgctaactgactccctgccagcttctataacaatggattttggactcttctaatttttaaaatttaggtcctagaatatacttatcattttaattcaacatgtaagaaatcaaatggatttcgaagactcagaagtcattgtttcttcagtgttcaaacccaatgcccagacttacactcaggtgacatgagtgtgatcagccacgtgtgggaactaaaacagcctcttcccaagtagaggtttggagagattatgatggagtcaataatgactctcacataccctctgggcattcacaaacagcttgtgaatgatcctgccagcatgtcctcttcctgcaccggtgactaacacttcaggctgctccagcaggcaactcacaaacctaggagacagagacaggcaatgaaagggtggaaagtgagctgtccaggccactgggcgtccatcctcccacaggagttttgtggacaaatcctcaagctgatactggctaaacccaacaaggttggagtgaaattttacagcaagataagattgacatttggaattattatcgacttaactgacaatcttcgtgctttttcacctgtgctcataaaagatgtgtaannnnnnnnnnnnnnnnnnnnnnnnnnnnnnnnnnnnnnnnnnnnnnnnnnnnnnnnnnnnnnnnnnnnnnnnnnnnnnnnnnnnnnnnnnnnnnnnnnnntggtggtttagccgatacactacacagcatcagctgtacatgttacgatcggccgggccctcactcaccccatttacaagtcatatcacatacctagtatgcaccacctactaccatcataggtgataatcgagatgtgtgttctaacacattacatattatccgccataaaawgatgatatccttcatttacagagcatagaaggaactgaaagacatttaagtgaaataagccaggcacagaaagacaagtattgcacgttttcactaatatgtgggagctaaaaaaacaaacaaactgaactcacggagataagagaatagaatgatgttagtgtcttatggatagtcatttaagtgtgtaaacatgggttagaagtgggaagctgggtagaagttttacaagaagatttaagatggccaggaggcttaaaaaggctagctatgggaggtgatacagagttgacatatctctaagtagaattaccagaggcttagaagggtaatggggagcagggcataaagaggggatggttaatgggacaaaaatacagttggatagaaaaagtaagatctagcattcagtagcaaaatagggtgcctatagttaacaataatttgttgtatatgtcaagataaataaaagaatggaattggaacgtttaattggggaatcca

SEQ ID NO: 715938 - DNA, 612 bp, Homo sapiens
tttatttattttttatgtagcatctcgctctgttgcccacgctggagtgcrgtggcgcaatctcggctcactgcaacctgcacctcccaggttcaagcaattctcctgcctcagcctcctgagtaactgggattacaggtgtgtgccaccactcccagctaatttttgtatttttagtagagatggggtttcaccacgttggttaggctggtctcaaactgctgacctcgtgatccacccacctcagcctcccaaagtgttgggattacaggtgtgagccgcagtgcctggcctcctttaatttttttaaaaagtggaagtgtaatttacatatagtgaaatacacagatattaagtgtatgtacagttgcatacaccaaatatctttaataaccttaagaaatttaaatgtccacttgtgaaaaaaaactctaagcaaactaaatatagaagagaacttcttcagtctgataaagggcatctattaaaaacctatagctaacatcatattcagtggtgaaagactgagttctttctacactaaaaaagaaaatttaaagatctaaatagggatataccaggttcaagatgtacctaagttcaagattagtt

SEQ ID NO: 715939 - DNA, 732 bp, Homo sapiens
cccttcctctctatcccattcaagtaatctaaaaagtccacaccaatctcctaaccagcattgttgccacgaatatttctaaaattcaaatctgatcatatcaatgttcttaaatttcttaggatctccatgtttccctactctctaatccagaaatgcttggctgggcgaggcggctcacgcgtgtaatcccaacactttgggaggcggaggcgggtggatcacctgaggtcaggagttttagccaggtctggccaatgtggtgaaaccccgtctctacaaaaatacaaaaattagccaggcatgatggcgggtgcctgtaatcccagctattccggaggctaaggctggaaaattgcttgaacctgggaggtggaggttgcagtgagctgagatcgtgcccttgcactccagcctgggcaacagagccagacccttctcaaaaagggaaaagtaaaaacaagaaatgcttattgaaaaaatgtttaacttctaattctgatagccatggccctttcctgatctggctcctacctacctgtgctatatgtattccatacccctagtcataaagaataacttgccattgcacaaaaccatcctgctttsacctagaaaaggcctgcttttcacacttttgcctagggaagacgtttaacattcttaattcctactcattcattgaaactcaacttaagcattacttcctctcaaaatccttttctgattctg

SEQ ID NO: 715940 - DNA, 904 bp, Homo sapiens
tcacacctcaaataatgtagacctataagtgcttaataaacatatgtcaaatgaatgaaacagtaaatacagatatgttatataatattatgctacatggttaatttcagggccactgggagtgaatttaaagactactcagattattttatatgtaatgacactttcgtttgaagtagtttatcttgatatatgtaattttagtaattcagcttatatttatttcttagtatttaatgtttataaagtgttcataatttgctgtaaatgctataaaataagcaaagaattcattctccactaagtgataataacatatgtatttataataaaattgatttaactaggttgtcattttcatttttccaaataggagtatgactattatgtgaaaaacttatcataacttggtaatattgatgctgctkctgataatgatgatgatgaggaggaggaaggttgagaagggacccacaccttgagcaagctttgcttttcacaatcctctttaattctattaataggacccaaggagaagctcccactcagtcagagtaggcctaccccttccccaacatgatcagtaagttctgaaccatagttcctcaacgtcttctgctcaattttcagaattcggaaaggagccacatacatctaccctttccactaaaactcactgacttgagtccatccaccaagactcacctcatgatttttattcctgttgcatcaacaccataagcatctcttaattccaggtctttcttcatttcccactctctaatccccataaggctctgccatttcttgatcctatctttttttccacacttttgtaacttttgaaattcaccacgattctcttcatctttttccttcactgaaaacctggctctcctctgag

SEQ ID NO: 715941 - DNA, 1437 bp, Homo sapiens
aaaacaatagataaagtgtttaaaaagcagtaaagggcaagaacagaaggtgtttgtgggaaagaaccctgtgatcatcgccaacagctcatcyactctttctgcctcattctgccagccttgtcactccagctgagggtgtggcagccaaagcaagcctaggccatggactcactgtactgaccacagtctgtgaagaggacatgccaagggatgggcttgggctgggaagaggatagtggaactgggtctgtgaaacactcccaaatgcaagtgcaaactgctagtgatagatgactgaagtccagccaagcctattcaactgtgattattataaaaggcatgaagtttacattcaggatttaggcttatttatttgattagcaattgaagacttggccttgtgttcttggctgggctctaagcatgtcagctcacagaactaaaagcacctatcgagaaaagaaaaacaaaacaaatgaaactactttctcagtcttctcttagccaactgtcattgaatacatagtgcttctttgaggcatttaatttgttataccactccctctttcctaatggagataggctataaggaatctcaagctcaagagaaaaccacatcaaccaaaagatatctcataaatgcatttggaaagttcaatgtaaataaattaatgttgctgcaagtggttctacccagcactttgtcaaaaattattttctttgttcctttcttgttatttatttgtatttatttatttattttgcagggggtacagagccttgctctgtcggccaggctggggtgcagtggcacaatcttggctcactgcaacggccatctcccgggctcaagcaattcttctgcctcagcctcctgagtagctgggattacaggcatgtgccaccacgcccggctaatttttgtatttttagtagacacggggtttcaccatgttggccaggctggtctcaaactcctgacctcaggtaatctgcccatctcggccacacaaagtactgggattacaggcatgagccaccgcgcccagcctgttcctttctttaagataaccctcattcttcaaatggaaggacttcacatctgactagggatttgtacattggcccattaaattaaagggtgagggccaggcgcagtggctcacatctgtaatcccagcactttggtaggccaaggcaggcagatcacctgagctcaggagttttagactattctggtcaacatggtgaaaccctgtctctacaaaaaaaaaaaaaaacacacaaaaattagttgggcatcgtgccagctacttgagaggctgaggtgggagaatcacttgagcctaggaggctgcaggttgcagtgagctgagatcacgccattgtactccagcctgggagacagaatgagaccctgcctcaaaaaaaaaa

SEQ ID NO: 715942 - DNA, 1437 bp, Homo sapiens
aaaacaatagataaagtgtttaaaaagcagtaaagggcaagaacagaaggtgtttgtgggaaagaaccctgtgatcatcgccaacagctcatccactctttctgcctcattctgccagccttgtcactccagctgagggtgtggcagccaaagcaagcctaggccayggactcactgtactgaccacagtctgtgaagaggacatgccaagggatgggcttgggctgggaagaggatagtggaactgggtctgtgaaacactcccaaatgcaagtgcaaactgctagtgatagatgactgaagtccagccaagcctattcaactgtgattattataaaaggcatgaagtttacattcaggatttaggcttatttatttgattagcaattgaagacttggccttgtgttcttggctgggctctaagcatgtcagctcacagaactaaaagcacctatcgagaaaagaaaaacaaaacaaatgaaactactttctcagtcttctcttagccaactgtcattgaatacatagtgcttctttgaggcatttaatttgttataccactccctctttcctaatggagataggctataaggaatctcaagctcaagagaaaaccacatcaaccaaaagatatctcataaatgcatttggaaagttcaatgtaaataaattaatgttgctgcaagtggttctacccagcactttgtcaaaaattattttctttgttcctttcttgttatttatttgtatttatttatttattttgcagggggtacagagccttgctctgtcggccaggctggggtgcagtggcacaatcttggctcactgcaacggccatctcccgggctcaagcaattcttctgcctcagcctcctgagtagctgggattacaggcatgtgccaccacgcccggctaatttttgtatttttagtagacacggggtttcaccatgttggccaggctggtctcaaactcctgacctcaggtaatctgcccatctcggccacacaaagtactgggattacaggcatgagccaccgcgcccagcctgttcctttctttaagataaccctcattcttcaaatggaaggacttcacatctgactagggatttgtacattggcccattaaattaaagggtgagggccaggcgcagtggctcacatctgtaatcccagcactttggtaggccaaggcaggcagatcacctgagctcaggagttttagactattctggtcaacatggtgaaaccctgtctctacaaaaaaaaaaaaaaacacacaaaaattagttgggcatcgtgccagctacttgagaggctgaggtgggagaatcacttgagcctaggaggctgcaggttgcagtgagctgagatcacgccattgtactccagcctgggagacagaatgagaccctgcctcaaaaaaaaaa

SEQ ID NO: 715943 - DNA, 3628 bp, Homo sapiens
tgcattaaggacatcttccctactcctgtgctggtggggggcgtcactgtgccaggcacaggaaatggatcaggttttaggctacctattatcaggcacatagagacagccagtacctctctttaggtagagacctcccttgctatttgaattgaatgagaagttttgatatagacacggctggactttctaacgcttgaaaatgagatatctggttaatagctgaaacgaacagcgaaagctatgattcctgcttaaactataacccaaaatctgggaaagggagatgtgataaagctcttttaagagccccaaactttcaataaactagttatcagtacttcttatttcttgtctcattggtatcttatatccctaatccttcttcaaagcaccaaaaattcagatcttccaacttttgccacaatacaagggtcaagccaaagcactctcctaattgagttatcccctttgaataaaatcttacatctcacttgatttttaccatttgtcccacaaaaaatcccaaacctcttataaagtgatctttaaaaagcatgttaaaatgtaatacagactgaaactgagggctccagtgcaagtgtgggtggggagaggcagcagagggtggagacaggcaatatgagtcaggctgcaggaggatgcaatgagctcagtctctgcagttacctgaagagttagctggggctggaggatttcagaaacctggacttctttatagggcttcatgactgtcttcaggacatgtcaaatggcttacccaagagcaagcgatccaagaggaatataaaggaaaatgcctccaggcgtccaggccacactcaaggagagaattaagcttcaccacttgaaggaaggagtaccaatgaatctgtagacatatttcaaaaccatcactttctcccattcatctgcttttcttgagtcaaacttgtgtacaccaaggttctccttccttagagtgacttccttctcataaggctccctagttcgttatgcaaatgaatcctagcatcctctctgccagctccccgaatttgtaggggcacacagtctttatcctagcccagcacacttgcttttgtatgccatcgtggcccagaacaaacttacaccgaaactccacttccctatccttttgaccatcctgtgcctcaggaatgaggccaaacatccatgtacacctgcatagaagaaaaatgggccaatttttcttcttagacacctacaactaaaaacatatcacccagtgggtaagcagagaggtcaaatcttagcatgcatcaggtcactcagagaatgttttaaaacaaagattttcaagtttctaactcagaaagtcttgggagttgggtgcggatttccatttcttatgtttccagatgatgctcctgctgctcgtccatgggccacactgcgagaatcactggtataagggttaattgagtgaaatgaatgcacctacagtgattgaattattggggcacatttatccaggtggccattttcagcagggtaatttggacaaacttacaacttccctggaatattatgttttgtggctatgttcttctggtctcttatctccttcctatgttcttccccttccattaaatatatccaccctaaaagcatatataacctattttttcttttagatttttgtttataactgcctttcactttattggtacacaaattctgagaactgacgccttggaggaagccctgtggtttgcaaattcaaaaacacattttgaattgaggccaacttaaaagcatatctcattacttttttttggattttcttacgtgctccaactttccattacatttctcccctttcctatcagtttgaatctgcaaagtacttgacttaggaacttcacaaactcaaagcaactaacaaatggtagcatctaatatgcaaatgaccttctaaagtaattttctgtttttattctgctctatttcagtcagtctgggagatttctggaaagagcctgttctaaaagcatttccatttatattagtaactggctccataaatagccaatttgttttacttttctctggatcattctcaaccctatttgttccagttgagtcaaattgtcaaagaaagctgaatggtttatattcctgatgtacaatttttaacatatttgcaagaaaaggaaaaagaaaactacaccagcatataacattgtttttattgataacctctctctccagccagctagtaatctatttctattaaaaatggagtctggcttttaaaaataatgaatgctggcagggtgcagtggcttatgcctgtaatcccaatactttgggaggctgaggtgggtggattgtttggggccaggagttcaagaccagcctggccaaatggcaaaaccccatctctactaaaaacacaaaaatcagatgggtgtggtggtgcacatctgtagtcccagctactcaggaggcttaggcagaagaatcacttgaacccaggaggtggagactgcagtgagctgatcatgctactgcactccagcctggacaacagagcaagactctgtctcaataataataataataaataatgaatgctgttgatagtggggaaggctatgcctgtatggaaaccagaggtgtatgagatatctctgtaccttcctctcaattttgctgtgaacttaaaactgctctttaaaaaataaagtcttttaaaacatgaatgtaaagtgtttattgcataatgacttaatggcaggatgaagatatattaaaatatccattgggaagaaattttcaaagatcccaataccaaagtctttggtgagcactttcatcccactggctggaactcatcaaagctccctcctgttgtgttgagttccgtgttgccacgactctgaggaggagattcagatgcacacctcatgcacactgccacgttattgttgcttaggtgctagatgtctcccctaagtggtcactgttcagcgccctgaagcctgtgtccctggagaagcccacctcacatctcctacaatttgaggagcaccatctcccctgctttctcttatttatcaatctcactgaatcaaatctcagccaatagtttgtctggtcgcccctttagctgttctgtgggaactgtgtctagtgtcttttctcagatgagcaatctagaggctcacatcttgctacacacaaggttagcaaagtgcatggcacacaacggtgactcagtagaagctgaatgatataaaagagttatgatctatctctttaccactttatcacygctcctccttgtactttgacattgcttgttctttaggtaatcctcagttttgtcacctaaatattaagcccagaattttgcaagaagatcaaaatggaaaaaattcaaaagttctcaacttaaaaacacagccccatttattctcttttgaatcttttctcttttaaaattgcactcttcaagataaaaccacaccatatgcgaccctgaaaaagccacttaatttccctgagcctctttccttacctggggaataataccactccctccaaaaggtttctgtgaagaatgaaataaaattatgtg

SEQ ID NO: 715944 - DNA, 576 bp, Homo sapiens
agtttgctaaggataatggcaatagctctacctatgtcctggcaaaggtcatgatcttgttatttttcatggctgcatagtattccatggtgtatatgcaccaattttctttatccagtctgtcattgatgaacatttaggttgattagcgaggaggccaagatggcctactagaagcagctayggtgcgtggttttcatggagagaaaaaaaaggggtgagtaaatacagcaccttcaattaaatttttgaaaagtatttagaatagagtctacctatagtgctaggaaggacttattaattgttcaagcttttcataattttcatgattgttgcttttattattattatacagttactagcatgttagttattcactctctctatatctcagtttttcgtctggataattggaactgtgcaatttaccccaaagcgttctttgtaagtatagataagtgatagctagctcaagggaaacattacacaaattacagccaatatttccattgttgtattattgtaaccattttttattactatttattatatttgtatttatttacttaccagcta

SEQ ID NO: 715945 - DNA, 571 bp, Homo sapiens
gagaatcactaccacctatgaaggcttatagggatttttccctgcacacaaactctcagtgtttgtgtgatgacttactaaagttatttacatttgccgagactcttcaaagggaaaaaaataaaagaacccaatggcctgttaataccttgtttgtgcaaataaagttataaagctatttatgacaactgaaccaatgttaaaaagaaaaatatttgtctgctcttgattrcgtgttattgaaattttaggatcaatcattttcaatatcctcagcatgttttactttattctcactcacaaaaacaaaaactgctaacttagctttgcattatgaacctggaagtctagcttaaatgaggagtcttcaaaaagttcccagaaaaatgtatattgtgacaaaactaagcattgatttcagacatttttgcaccaaaaaaaaaacttgtactaacttgttataacatgtctgagtaggatctagtttgaggtaccaagaaggttaagacaacagtttgaaagcctctaccagagcaatatgaattgtgctaaaattgaagtgagaagaaac

SEQ ID NO: 715946 - DNA, 571 bp, Homo sapiens
gagaatcactaccacctatgaaggcttatagggatttttccctgcacacaaactctcagtgtttgtgtgatgacttactaaagttatttacatttgccgagactcttcaaagggaaaaaaataaaagaacccaatggcctgttaataccttgtttgtgcaaataaagttataaagctatttatgacaactgaaccaatgttaaaaagaaaaatatttgtctgctcttgattacgtgttattgaaattttaggatcaatcattttcaatatcctcagcatgttttactttattctcactcacaaaaacaaaaactgctaacttagctttgcattatgaacctggaagtctagcttaaatgaggagtcttcaaaaagttcccagaaaaatgtatattgtgacaaaactaagcattgatttcagacatttttgcaccaaaaaaaaaacttgtactaacttgttataacatgtctgagtaggatctagtttgaggtaccaagaaggttaagacarcagtttgaaagcctctaccagagcaatatgaattgtgctaaaattgaagtgagaagaaac

SEQ ID NO: 715947 - DNA, 1107 bp, Homo sapiens
cctctaagtaaataaataaataacatttttttgagcactatgtgccaggcactttgtaaatccctgcgcatagatgcatattttaaaggactcaaagtactatgcacatggcctcatcgactgcagatgctcttcgatttagaaaggggatacttcccgataaatccaccttaaatagaaaatattgtaaattgaaaatgcatttggtacaccgataaatccatcgtaaagtagaaaaatcgtaagtcgagccattgtaaatccgtagtctagcccttctttttaaagacaaggcaattagggcccaggttaaatggtttttctttgatgagcaggccagggttagagctcaggtatcctattggtctttcaccgcatcttctttctgattaaccaaatcactccatttacatagcagtctctaaactcgttgtaccatctgtactttttgcaaatgtagcttctcatgattcagacccaaattcggaaaccaggaaccatgaggagtatgattgaggcacgtatacaagagaaccagatttaaggcctagtctttaacctctcagtaatgcagtgggtaaactcagctaagtttttttcatatgtaaaataaaggagttaaaactattatcacaactaaggtcccttrcaagtctaaggcattgtgatgtttttaaatgcctcaactggatggatcctcaaatagactgacaagaactgctctacttgcaaaagtgatggcaacaatgtatttttaaataaaaaggaaactaaatcaagcactctaaaaatcccccatgctgcaaatcaccatttcactagattgtaacctccctcactaaaaagtaagccgcacctctgaatcatgaacaaaaagcacaataacttttgttgcctttattgctgcatctccagcccctagaacagtgtgacacatagtgggcactcaataaatattctgagaataaatacatccacttatagtcaggttagcgcgcgcctgtattcccagctacttgggaggctgaggcaggaagataacttgggccccggagttccagaccagcctgagcaacaaagccaagaccctgtttctaaactaaataa

SEQ ID NO: 715948 - DNA, 1520 bp, Homo sapiens
ttttttttttttttttgacagagtcttgctttgtcactcaagctagagtgacgtggtacaatcttggctcactgaaacctccacctcccgagttcaagtgattctcctgcctcagcctcctgagtagctgggattacagatgtgcaccaccacacctggctaatttttgtatttttagtagagatgaggtttcaccatgttggccaggctgatcttgaattcctgacctcaagtgatccacccacctcagcctcccaaagtgctgggattacaggtgtgagccactgcacctggccatccactgccacttcttatgctaccatcatgcttgctaccacctgccttctcctcctttcaaataggttacttccatgttacttctacaggcagggaaaacagggactgactgaaaatcaaaagggctgtcttttcagccaagttcatgagcattagtgcagaaatattacaacttatcatttatcacagcgatcccccttatttcctacttcttgtttatattatagagaagagaagttgttggaccaaagtcttttagacaagtgaagtataatcacatactgcaataaaaaaaaaatttatgtcagctatggatatagtttctatgtggggaactagactatatataaatcaataatccaatacttaaatctgaataagttatgaatgactctctcattcatcccattttccactttacccccagccctttcttatcctacttttctatcactgcaatctcaagaataaaatagtgggtgcaggttattgtatataactgtaaaagagaagactagacaaagtgtaacccagctgggtgtggtggtacacgcctatagtcccaactactagggaagctgaagtgtgaggatcacttgagccttgggggtcgaggctgcagtgagctatgactgtgccactgaagtcaagcctgggagatgaagtgaaacactgtctcaaaaaataaaaataaaaaagaataagtataatgcctttactttcctatctaataatatttagtggcaagatcatgtgaaatcagttggctgggtatgtacttgtccctcctacccctgatataagtttactgaaataggaatatatttaagtagatatatcacttatactttttaaaggtctatcacaagctacttgaccccttcctgaaatgaaaacagaaactaaatcctatggacaaccctatatgcaagtgagctgattagctctgctaacatagggcaaatagtttttggaaacatcttaagtgacaatattctcaggagctgtccattagcctaggtaratgtgaagatacagacacaagagaaaagcaaataaccaattagaattggctgtgagagcctcgtgtggacaaatgcaacagaagcagtttccactggaactgaggtttgtttattctgcttatctggaggcagaaccaataatcccaatgatcccagaatgatgataactgtttttctacatttaaaaagagccaatta

SEQ ID NO: 715949 - DNA, 1520 bp, Homo sapiens
ttttttttttttttttgacagagtcttgctttgtcactcaagctagagtgacgtggtacaatcttggctcactgaaacctccacctcccgagttcaagtgattctcctgcctcagcctcctgagtagctgggattacagatgtgcaccaccacacctggctaatttttgtatttttagtagagatgaggtttcaccatgttggccaggctgatcttgaattcctgacctcaagtgatccacccacctcagcctcccaaagtgctgggattacaggtgtgagccactgcacctggccatccactgccacttcttatgctaccatcatgcttgctaccacctgccttctcctcctttcaaataggttacttccatgttacttctacaggcagggaaaacagggactgactgaaaatcaaaagggctgtcttttcagccaagttcatgagcattagtgcagaaatattacaacttatcatttatcacagcgatcccccttatttcctacttcttgtttatattatagagaagagaagttgttggaccaaagtcttttagacaagtgaagtataatcacatactgcaataaaaaaaaaatttatgtcagctatggatatagtttctatgtggggaactagactatatataaatcaataatccaatacttaaatctgaataagttatgaatgactctctcattcatcccattttccactttacccccagccctttcttatcctacttttctatcactgcaatctcaagaataaaatagtgggtgcaggttattgtatataactgtaaaagagaagactagacaaagtgtaacccagctgggtgtggtggtacacgcctatagtcccaactactagggaagctgaagtgtgaggatcacttgagccttgggggtcgaggctgcagtgagctatgactgtgccactgaagtcaagcctgggagatgaagtgaaacactgtctcaaaaaataaaaataaaaaagaataagtataatgcctttactttcctatctaataatatttagtggcaagatcatgtgaaatcagttggctgggtatgtacttgtccctcctacccctgatataagtttactgaaataggaatatatttaagtagatatatcacttatactttttaaaggtctatcacaagctacttgaccccttcctgaaatgaaaacagaaactaaatcctatggacaaccctatatgcaagtgagctgattagctctgctaacatagggcaaatagtttttggaaacatcttaagtgacaatattctcaggagctgtccattagcctaggtaaatgtgaagatacagacacaagagaaaagcaaataaccaattagaattggctgtgagagcctmgtgtggacaaatgcaacagaagcagtttccactggaactgaggtttgtttattctgcttatctggaggcagaaccaataatcccaatgatcccagaatgatgataactgtttttctacatttaaaaagagccaatta

SEQ ID NO: 715950 - DNA, 654 bp, Homo sapiens
ttcctcttggtccttgggaatgttctccttcagaggcccacagcagacccactgtgctggctgctggcaggaccctcgactctccagtgaagggattatgttaacagtcccaagaaggaaattgattccatgaaaatccccaatccctggggctgggaaacttaatgagtctcagcacaaacgagtccccgccagttctcgttccagttggatctttcttgcaatggcatggtttgtgcttcaaatgtgctccaaaagaaataaatgagtaaataacacaaaaaagatgggccttactctgcagccctatgtggaaatgtttgggaaattgtgatgaccatctttattcaaagatttggakatttgtgaaacatgcttgtataacttcttttgccaacttcttgttgagtttttttggcatattgaagtatgaaatatcacaaaagggaaaacaaaaacacgtagcccccaaatgacactggaacatacttattcaaaaagttcatctgcagagcaccccaaactttatcattttcactgaggtggatgtgggctgtgaacttaaggatggcaaaggtgagttgtaatctggctgggacagatcacttcccttcttgaattttctcatccactaagtatcaggcttggacctga

SEQ ID NO: 715951 - DNA, 1992 bp, Homo sapiens
aaattttctttcttacatttgggaaattcaatctttcaaaaaattccgagcactgaaaagaactatgtcgaatggaaaaaatggaaacagacagacaaaagaaactctacactcagctcatccaaaagtcatatgtgacaaaattcaacataaacacttctgtcaacactcaaactaacctattttcatttggtgcaaagaaatgctattataacaagtaacaccaaacgaacaagggttgctaaaccaaggactctgaaaaagaaaaggctctggacatccatctgtcataggttaaaacaagaatgctatgtgaaagggtactgatattttagtcttatatttctcccttgattctaacagtttctattgcatgaaaatgccatataygccagcatttatcgagatgtgtcctatgggcatattaatggctttagccctctagagtttattttaaacattgcataaacatttaattacatctcagaagcactgcacaaactaacaagtacttgcaagggacactgtagcataatactgcatactgagcaatagttttagctgaaattgtaggaaacaaggcaaacaactaaggaacattgagggttaggactagaaaggcagtgggagcggcatgcatttagcaaaacatttctctacctgcttcagagagctacacagaagttagcaagctgcctggcagagcggatctaaagcccgctcctgaggtgaagggggctgctgccagttagaagggaaggagagacacctgaggggaaaaaagaaatataagcagcaagggaagttgtgaggaagtgcaaacagcagagtagtttgatgaaggtagaaacagggattggtggaggacaaaaaggccaccattcagattcatcttgtttttgaccttaaaagtattggtactatggatgtgaaatggcttgtatagatacataggcagagatgactcagcctgtgtgagctgtaactgaagccaaccagagtgcccaggtacttggaacgctgtacttataaaaaccttgtacttgtagaacttacaaaaaatatttctcctttttaaggtactgtgggagcctgcatctatcaactcctgccttgagccaatcaggatgccaggcctttcacagtctgctcaggaaaaaggccaccaggtcaacaaacccttctgacaacgcagttcagagctacagcagcaccctgtgatcatttcccaccaccctcatattctctgaactttaggctgcagcatgattactgcaaaaccatccagtaggtgtcatcaaagatgtaacccttaacagtaagacctcaaacactccagactgtgtagtttctgagcaattctgattgtgggctcaacttggttcccatcaaaatagtaggttacaagaccaaaccatgaatgctgcatctagaaagtggattaatgacgcagttctcaaactgtgtgctgaggcaccctggggcattgctggatatttatttattccctttgcccctctgtgtgtgtgtgtatttaacagatgggggtctcactatgttgccttgaactcctgggctcaagcaactcccctatccaggccttgaactcctaggctcaagtgatcttcccaccccagcctactgagtagcggattcggcctgtccatgtggactacagttgcctgccacatcatccagctaactgctgggtattttaaatttgaaacacagcgccatctgctgaccaccatacaaacaactactttcaagttgtcttgcaattacttcataaactaaattattaggtatttcttttggcttggggacggatgaaaaaattactgagctattaagggcactgtgaactgagaaaatgtgggaacctctgagctaaaatctaaatggtgaaatgatgggcttagaaggaagaaaccaaattttagtaccatcatttgcctctttaggaaaggcaaatcaaaatcaattcccgga

SEQ ID NO: 715952 - DNA, 1992 bp, Homo sapiens
aaattttctttcttacatttgggaaattcaatctttcaaaaaattccgagcactgaaaagaactatgtcgaatggaaaaaatggaaacagacagacaaaagaaactctacactcagctcatccaaaagtcatatgtgacaaaattcaacataaacacttctgtcaacactcaaactaacctattttcatttggtgcaaagaaatgctattataacaagtaacaccaaacgaacaagggttgctaaaccaaggactctgaaaaagaaaaggctctggacatccatctgtcataggttaaaacaagaatgctatgtgaaagggtactgatattttagtcttatatttctcccttgattctaacagtttctattgcatgaaaatgccatatatgccagcatttatcgagatgtgtcctatgggcatattaatggctttagccctctagagtttattttaaacattgcataaacatttaattacatctcagaagcactgcacaaactaacaagtacttgcaagggacactgtagcataatactgcatactgagcaatagttttagctgaaattgtaggaaacaaggcaaacaactaaggaacattgagggttaggactagaaaggcagtgggagcggcatgcatttagcaaaacatttctctacctgcttcagagagctacacagaagttagcaagctgcctggcagagcggatctaaagcccgctcctgaggtgaagggggctgctgccagttagaagggaaggagagacacctgaggggaaaaaagaaatataagcagcaagggaagttgtgaggaagtgcaaacagcagagtagtttgatgaaggtagaaacagggattggtggaggacaaaaaggccaccattcagattcatcttgtttttgaccttaaaagtattggtactatggatgtgaaatggcttgtatagatacataggcagagatgactcagcctgtgtgagctgtaactgaagccaaccagagtgcccaggtacttggaacgctgtacttataaaaaccttgtacttgtagaacttacaaaaaatatttctcctttttaaggtactgtgggagcctgcatctatcaactcctgccttgagccaatcaggatgccaggcctttcacagtctgctcaggaaaaaggccaccaggtcaacaaacccttctgacaacgcagttcagagctacagyagcaccctgtgatcatttcccaccaccctcatattctctgaactttaggctgcagcatgattactgcaaaaccatccagtaggtgtcatcaaagatgtaacccttaacagtaagacctcaaacactccagactgtgtagtttctgagcaattctgattgtgggctcaacttggttcccatcaaaatagtaggttacaagaccaaaccatgaatgctgcatctagaaagtggattaatgacgcagttctcaaactgtgtgctgaggcaccctggggcattgctggatatttatttattccctttgcccctctgtgtgtgtgtgtatttaacagatgggggtctcactatgttgccttgaactcctgggctcaagcaactcccctatccaggccttgaactcctaggctcaagtgatcttcccaccccagcctactgagtagcggattcggcctgtccatgtggactacagttgcctgccacatcatccagctaactgctgggtattttaaatttgaaacacagcgccatctgctgaccaccatacaaacaactactttcaagttgtcttgcaattacttcataaactaaattattaggtatttcttttggcttggggacggatgaaaaaattactgagctattaagggcactgtgaactgagaaaatgtgggaacctctgagctaaaatctaaatggtgaaatgatgggcttagaaggaagaaaccaaattttagtaccatcatttgcctctttaggaaaggcaaatcaaaatcaattcccgga

SEQ ID NO: 715953 - DNA, 1992 bp, Homo sapiens
aaattttctttcttacatttgggaaattcaatctttcaaaaaattccgagcactgaaaagaactatgtcgaatggaaaaaatggaaacagacagacaaaagaaactctacactcagctcatccaaaagtcatatgtgacaaaattcaacataaacacttctgtcaacactcaaactaacctattttcatttggtgcaaagaaatgctattataacaagtaacaccaaacgaacaagggttgctaaaccaaggactctgaaaaagaaaaggctctggacatccatctgtcataggttaaaacaagaatgctatgtgaaagggtactgatattttagtcttatatttctcccttgattctaacagtttctattgcatgaaaatgccatatatgccagcatttatcgagatgtgtcctatgggcatattaatggctttagccctctagagtttattttaaacattgcataaacatttaattacatctcagaagcactgcacaaactaacaagtacttgcaagggacactgtagcataatactgcatactgagcaatagttttagctgaaattgtaggaaacaaggcaaacaactaaggaacattgagggttaggactagaaaggcagtgggagcggcatgcatttagcaaaacatttctctacctgcttcagagagctacacagaagttagcaagctgcctggcagagcggatctaaagcccgctcctgaggtgaagggggctgctgccagttagaagggaaggagagacacctgaggggaaaaaagaaatataagcagcaagggaagttgtgaggaagtgcaaacagcagagtagtttgatgaaggtagaaacagggattggtggaggacaaaaaggccaccattcagattcatcttgtttttgaccttaaaagtattggtactatggatgtgaaatggcttgtatagatacataggcagagatgactcagcctgtgtgagctgtaactgaagccaaccagagtgcccaggtacttggaacgctgtacttataaaaaccttgtacttgtagaacttacaaaaaatatttctcctttttaaggtactgtgggagcctgcatctatcaactcctgccttgagccaatcaggatgccaggcctttcacagtctgctcaggaaaaaggccaccaggtcaacaaacccttctgacaacgcagttcagagctacagcagcaccctgtgatcatttcccaccaccctcatattctctgaactttaggctgcagcatgattactgcaaaaccatccagtaggtgtcatcaaagatgtaacccttaacagtaagacctcaaacactccagactgtgtagtttctgagcaattctgattgtgggctcaacttggttcccatcaaaatagtaggttacaagaccaaaccatgaatgctgcatctagaaagtggattaatgacgcagttctcaaactgtgtgctgaggcaccctggggcaytgctggatatttatttattccctttgcccctctgtgtgtgtgtgtatttaacagatgggggtctcactatgttgccttgaactcctgggctcaagcaactcccctatccaggccttgaactcctaggctcaagtgatcttcccaccccagcctactgagtagcggattcggcctgtccatgtggactacagttgcctgccacatcatccagctaactgctgggtattttaaatttgaaacacagcgccatctgctgaccaccatacaaacaactactttcaagttgtcttgcaattacttcataaactaaattattaggtatttcttttggcttggggacggatgaaaaaattactgagctattaagggcactgtgaactgagaaaatgtgggaacctctgagctaaaatctaaatggtgaaatgatgggcttagaaggaagaaaccaaattttagtaccatcatttgcctctttaggaaaggcaaatcaaaatcaattcccgga

SEQ ID NO: 715954 - DNA, 1765 bp, Homo sapiens
aatcctgaagaaaaagcacctgtgtttgacatcatctggttaaagcaggactttcctgtcctgggcccaggagtccatgactcaggcagcttccatctatgtaggaagtgagagtgaatgctgggctgtgtctggggtgaggagtcagtttccacatctggctgttacaagtgttattgttgaggcctctctgtgcacagagcctgggtgggaaatggggtcagtgaggctggcccttgcctcaagcacggtcaggctggggccctgtgggaaggctgatctgtgtacccccaggtataatactgtatactgccatccacggaggaggggcagaggagagctgtcagtgtcttggagggagggcatggacaggggatgggggacaacacttgcatgcatgtcgcgtggaggagagcgctcaacccagtatcgatatacataccctgctttatctcattggttggcttatgagtagtgtccccatttgggctttgtcccaggctgcataactcacaagacagagcctgagctggtagaggtgctgagaaaacacttgagggattgartggatggcatggagagtgatagctgtttccaggtgtgaaagaggtggagggattttaggcagaggaggggcaggagcagaacaggcaggcatggaggtggtctgaatttgggaagatgatctgtggaaggcccttcttccttgccacctccctgtccccccacactggctagcgttttctgacttggattcatattctctgcacacgtgtagggtctgctcttctcaactgtggtagctcgagggcaagggctggggcttcctccgggtgacactgatggctgctctgggtgaactgagggaaggaacaaggcatgaatgtggggatctgttatgtgacccctttgtcacgggatgagagggcctcaccccgaagacacaggtgagagtctcaggctccaccatcatcatcactgtggttggcgcctactgactgaggacgtactctgtgccagccacagtgtagggctgtcactcacatgcgtacccttaagtcatgccatctagcagttgaagaaactgcagctctgagaagctaaactggcccagagtaccacagtacacagttgttagtgctgggtattgactcctcatgtggttctgctttctcaacctttccatatgctgagcatgtggatttttaaaaacgctttgtagctaaaggaagtgtgtgtaggtggggataagaccttgtgaagcagtatttccccccacaaaaaaatgtgccagttctgacttgtttaaatttggtttaattaggatttttatcacttgtagatcacaccagagagcagacagctgtcttacctttacttctcagattgtgacactccaagaagcagctgaccagaggttaaaatagcttctagtctaggagcttcagcacattttgttgctgtgtaaacctctgacttgcctggaaattgacttgtaaagaattttgcatttcatactggggtgcctgatgctggggtctggtatatttcatgctcagctgtgtgttggcatggagggaatggagagatggctcctagctcaggtaagggccttggcttacatcagtgactggcctttgtggtggtcaggagagttggggaggatgctgggaccaagctcatagaacacttaacaaacatcccgagtctcagctcctcctttcgcggagtgggcatcacaacctttgccctgcccttatcttgg

SEQ ID NO: 715955 - DNA, 1438 bp, Homo sapiens
tgtctctgtagccctttcacacagattatcccattagatctcacaataacccaatgagaatgaatgtgtacggactgtcattccccactggagacatgaagaaacccagctcagagagatgaagcaatgtgtcccaagtccaggtaaaaaagcaaactagggtttgcacacaggtagtgaacttcagaattcttcttcctctccattacgttggaaagatgaacaaagtagaaatggaacttttcatttgctgttaaacgacagcaaagaaaaatgcttccgaatatggcaattaataggctagtaggcccatccccaaagaaagaactaaggccctcttcttttttcccaattttttttttttttgagaccagtctcactctgtaacctaggctggagtgcagtggcgcgatctcggctcactgcaacctttgcctcccagttcaagaaatcctcctgcctcagcctcccgagtaactgggattacaggtgcctgccaccacacctggctaatttttgtattttcagtagaaatggggtttcaccatgttgatcaggctgatctcgaactcctgacccatctgcccgcctgggcctcccaaagtgcgggattacaggcaccagccattgtgcccggccctcgttcccaatttctaaggcccacccttagttagaaataaatcttttcttttttttttttttttttttttgagacggagtctcgctctgtcgcccaggctggagtgcagtggcaggatctcggctcactgcaagctccgcctcctgggttgacgccattctcctgcctcagcttcccaagtagctgggaccacaggcacccgccaccacgcccggctaatttttttgtatttttagtagagacagagtttcaccgtgttagccaggatggtctcgatctcctaacctcgtgatccgcccacctcggcctcccaaagtactgggcgcgtgagccaccgcgcccggctaaatcttttattttcgattttttttttttttttttttttgagacggagtctcgctctgttgcccaggctggagtacagtggcgagatctcggctcactacaacctctgcctcccaggctcaagcggttctcctgccatagcctcccgagaagctgggattacaggcgcgcaccaccacgcccggctaatttttgtatttttagtagaggcggggtttcaccatgttacccagcctggtctcgaactactaacctcaagtgatccgcctgcctcggcctcccaaagcactgggattacaggcgtgagccaccgtgcccggcctctttttgatttttgcacgaaacgactccggctgtatacccactgctrtcacttgctgccctgtccaaggagtgctgccggactggggagtctgtctgactcagaatcgaaggcgggggttaaagaccagc

SEQ ID NO: 715956 - DNA, 597 bp, Homo sapiens
atcattcatttgtcataagcattcatgaacatagagaatgttcttttactacatatggaaaatgttggggctggctacattaaaaaaaagtacaggcatgcctcattttattgtgctttgctttgttgtgcttcactgatatttygttgtttacaaattgaaggcttgtggcaaccttgccttgagaaagcctattggtgccatttttccaacaacatgtgctcacacacaaatgataagaaagtgaaacagtcttattgctgtttagtggtctggatagaagatcaaaccagccacaatattccctttaagccaaaacctaatccagagcaaaatcctaactctatttaattctataaaagctgagagaggtgaggaagttgcagaagaaaagctgaaagctagcagaggctggttcatgaggtttaaggaaagaagccatttctagaacataaaagtgcaatgtgaagcaggaagtgctaatgtggaagctacagcaagttatccagaagatctaactacaatcattgatgaaggtaactaaactgaataacagacttttagtgaaaatgaaacagccttctgttggaaaaaaaa

SEQ ID NO: 715957 - DNA, 607 bp, Homo sapiens
cccatttcacatgcctgaggattcggcagaatcctcctcatgtaatttcaccttctcattgcatctgtttctaaaggaaaacaagccctccaattatctgccatgtttggagcttgtatttcctatcaatctctaatatattgaggaaaactgcttttcccttaaaaaattatataataaagttatggrtaatcctcactgaatgttcatctctgtggcgcttagactgttaactcctgagcatttcatgttggactcatcacgtttggagttggtgaacttgaaagtgtttgaatctggatataggctctgttctctgagactttgctacttagcttgtccctagactggcagcattgatctcctgcaggagcttgttaggagtgcaagatctcaggccccactccagaactattgaatccaaatctgctttttaacaggattcccaggcaagtcatatgcaccttagcattggagaagtgttgcactgagggtgggtagaggaaatgtttaagggaatatcccaactgattggctggaagattcagttgaagaaaagaaaggaaaggcagaactctagcatggaaatgggaagaaaagtttctca

SEQ ID NO: 715958 - DNA, 607 bp, Homo sapiens
cccatttcacatgcctgaggattcggcagaatcctcctcatgtaatttcaccttctcattgcatctgtttctaaaggaaaacaagccctccaattatctgccatgtttggagcttgtatttcctatcaatctctaatatattgaggaaaactgcttttcccttaaaaaattatataataaagttatgggtaatcctcactgaatgttcatctctgtggcgcttagactgttaactcctgagcatttcatgttggaytcatcacgtttggagttggtgaacttgaaagtgtttgaatctggatataggctctgttctctgagactttgctacttagcttgtccctagactggcagcattgatctcctgcaggagcttgttaggagtgcaagatctcaggccccactccagaactattgaatccaaatctgctttttaacaggattcccaggcaagtcatatgcaccttagcattggagaagtgttgcactgagggtgggtagaggaaatgtttaagggaatatcccaactgattggctggaagattcagttgaagaaaagaaaggaaaggcagaactctagcatggaaatgggaagaaaagtttctca

SEQ ID NO: 715959 - DNA, 607 bp, Homo sapiens
cccatttcacatgcctgaggattcggcagaatcctcctcatgtaatttcaccttctcattgcatctgtttctaaaggaaaacaagccctccaattatctgccatgtttggagcttgtatttcctatcaatctctaatatattgaggaaaactgcttttcccttaaaaaattatataataaagttatgggtaatcctcactgaatgttcatctctgtggcgcttagactgttaactcctgagcatttcatgttggactcatcacgtttggagttggtgaacttgaaagtgtttgaatctggatataggctctgttctctgagactttgctacttagcttgtccctagactggcagcattgatctcctgcaggagcttgttaggagtgcaagatctcaggccccactccagaactattgartccaaatctgctttttaacaggattcccaggcaagtcatatgcaccttagcattggagaagtgttgcactgagggtgggtagaggaaatgtttaagggaatatcccaactgattggctggaagattcagttgaagaaaagaaaggaaaggcagaactctagcatggaaatgggaagaaaagtttctca

SEQ ID NO: 715960 - DNA, 894 bp, Homo sapiens
gctggctcacacctgtaatcccagcactttgggaggccaaggcgggcgaatcacgaggtcaagagatagagaccatcctggccaacacggtgaaaccccgtctctactaaaaatacaaacattagccgggcatggtggcatgcacccgtagtcccagctactcaggaggctgaggcaggagaatcacttaaacccaggaggtggacgttgcagtgagccaagatcgcaccactgcactccagcctgggcgacagagtgagactccatctcaaaaaaaaaaaaagtagatataattgattagggaataagaatttatctgctctttatttatatatgtaaaaattataaatgactatataccgataataaaattaataatgtgtattcagtcaattaaaatttttaaatgcttgaaacttttgacacaactgttcctcttcaggaaattttttcttatagggaaacttgttcccaggtattttataaacccagctatgatgactgtaatgatacatttttggcactcrcgtgagctttttcatggactaaatttctttaaagtataaatttttaatcaccggttatgaacattaaatattttaaactttttgttatggaaaatttcaaatatatacacgattattgaaagtagtataatgaatcttaggtacccattacatgtattcaactaccaactcctggacaatttttccaaccctccccacctggattatcatgaggcaaatctcagacatcatatcatttcatccataaaatcgcagtatgtctcccaggactgtcttttgaaaacaagatcacaaaaccattaccacacctaaaaaataaataaataattctttattatcaaaatgtagtgtttaagcttccccaatt

SEQ ID NO: 715961 - DNA, 3219 bp, Homo sapiens
tttttaaaatcctatctgtttttctcctatcctgtctttcattaaaattgattttctcagcttctcacatatttctatatgaggcaaagaattttagatagataccacaacctaagcatcagaggtagagatggaggacaactaagatctaagtaatgttattttaattgcaatttaaagccaaaaggcaaagacttagtaaagagctgttttcattacagttgttccatgcatgaaatgaaccattacacattggaaaagaagaaattattccagagtggcttagttataacaaacaaaatgagttccaacaagctgtttttagtcccatggccaaaaaatgcattctgttggtattttttctaatgtgacattatattttgaaatgttatttcatgttatactctctttatataacatatttgcattgaataatgagagaaatgaccagctggtctctagcaattataaaaacctttattggaggcagcaggatgatggcagatggcaattttaggttgaagtctcactaagaatagatttgtagcatcttgttgatgtggaatatagtacaacctttctctgagtctataagcaggatggtagggtggtttattgagatactaatttgcattttgatctcactgtatttttttcttccctcattaaaatagtaaaagcttttgggttcagtgtatttgagttccaaagccgaagaaagatgtgttcaaagataatgcctcttatcaacttttggttttgaaagcctgaattgattaaggaggtaataggccaatgagaggaggaaaggagaaagaaggtctttggggttgaacagcaggaagaacaattccatatctttaataaggcaaattctgcaagcctggggaaaggaaggtggtacttgatggagtagcaagattgaccctggctcatttgcaagctgtgtcatgcatcttgaaagactgtaccaaccatcaagaccctcactctgcccctaggtttggtacaggtatagccacaccacctagatctatggggccatcaactaaaagtagacattttgaggtgaaaaaaagaaaaaagaaaaaagaaagggaccattgataaggtgagtcatctgttttcataatgatcataaacatttgagtaataaactctgtgatcatattgaagacaagaaactctaatctttcagagactatatagacccctattctctcatgtgacctcggaagtacagggccttgaccatccccttctcagctccatattctatgatgrgtaataaatttccctcaagaatggagatttggaatctgttttaaaatgatatagaatgataatgtaatatatcttgcattggcaagtaacgaagtaaaatgtaaaccctttgcaaatgtaagatgccacgttatttaaggtagaataatataaaagaaagggtcttgaagatataattccagatcactctgtactttattataatatgtattagaagataagagcagtagaaaagcacagactttggtggggggaagggaaaagaactgattcctgaaacatagatttatgtctttaattggcaacccagcactatattacaatcagtgttcctgaaatcaaggggttaatttgatcaggtccacctgccctgcttgcttttggtcacttaacttttttcctttttccatgaagacgaaggtcctggtagctgaaggctactgctaaacactgaaacttaaccttcactggctactttatagataacattcatgtgtcatcatggtaatggtcatttcagtagtttttcaggaactggacccaactcctgtccggttcaaacctgttgagaccactaactcttcaaatgggcctgaacaagtgcccaagaagggggcttttgacatcagagagccaaaaactccaccctcagatcatgctaatgctgccattttctgtacatgtattttatggaatgccatgaaccctgattgtgcctgcacagaagggacctgttatttcactgttcctcactgccagtcacctttccccataccttagaccactccacttccctaacccataaatatctgtaagacttatatttggagaggtggacatgagagttgttctcccacctcctcacttggcagccttgcgaataaaacttttctcttttgtaaaacctgtgtcacagtgattgattactcagaatggactcagacctggctggtacattcctaggaacgttttcatttctgtcctgcgtccttcatctggagataagggtaaaccccagtgcttcagagcccagggtcattgtctttcaccactcaagcttgcacctaatcttccccttcaccagactaaatgatcccagttccaatagtttaagctcccaaagtctagttccaagggttttgttctcctctttgcactcattaaaggcatttctgctttcatatttcatcatctatttgtgcctaagatcattaaaggtcatgtggtataagggcaaaaaccaggcggctgtctaaaagtcaaagccatacaggattttcagaggcagcttgagctggttcatgtccaggctctgctacatcctatctgtgtgattctgggccagttctctaaacttttcatatctcagtgtcctcatttatattaatcatactgtctattttctttatcttatgatgttttgacatcttgaggtggggatagggcaggacttacagatgtgggagagatggcccctaccagggctagttaatccctaaaaatagtaaacaactcacttgggagcacacctttcacatgcaaagcaactaacgcagagtctgcctccccacccactctcttcatctaactcccagacactaagccaatattcctcctgtgctaaatcatcccagggccagatactaggcagcaaaaaattactcctacagcccagaacccaccagaattattcaaactaaccaagcttacactcttgactctgccctgccttgcctttcttgcagaaacccagttaagactctggtaggctttctcctcactcctgcctctgcctcctcatccagtctggctcttctcctgtggccctgtgtagtgaggcatgcccccttctcttgagaaatgtaagtaatatatatagattttttatggcattgacctatgtcaatcactcagtcacctccataaattaaaatc

SEQ ID NO: 715962 - DNA, 3219 bp, Homo sapiens
tttttaaaatcctatctgtttttctcctatcctgtctttcattaaaattgattttctcagcttctcacatatttctatatgaggcaaagaattttagatagataccacaacctaagcatcagaggtagagatggaggacaactaagatctaagtaatgttattttaattgcaatttaaagccaaaaggcaaagacttagtaaagagctgttttcattacagttgttccatgcatgaaatgaaccattacacattggaaaagaagaaattattccagagtggcttagttataacaaacaaaatgagttccaacaagctgtttttagtcccatggccaaaaaatgcattctgttggtattttttctaatgtgacattatattttgaaatgttatttcatgttatactctctttatataacatatttgcattgaataatgagagaaatgaccagctggtctctagcaattataaaaacctttattggaggcagcaggatgatggcagatggcaattttaggttgaagtctcactaagaatagatttgtagcatcttgttgatgtggaatatagtacaacctttctctgagtctataagcaggatggtagggtggtttattgagatactaatttgcattttgatctcactgtatttttttcttccctcattaaaatagtaaaagcttttgggttcagtgtatttgagttccaaagccgaagaaagatgtgttcaaagataatgcctcttatcaacttttggttttgaaagcctgaattgattaaggaggtaataggccaatgagaggaggaaaggagaaagaaggtctttggggttgaacagcaggaagaacaattccatatctttaataaggcaaattctgcaagcctggggaaaggaaggtggtacttgatggagtagcaagattgaccctggctcatttgcaagctgtgtcatgcatcttgaaagactgtaccaaccatcaagaccctcactctgcccctaggtttggtacaggtatagccacaccacctagatctatggggccatcaactaaaagtagacattttgaggtgaaaaaaagaaaaaagaaaaaagaaagggaccattgataaggtgagtcatctgttttcataatgatcataaacatttgagtaataaactctgtgatcatattgaagacaagaaactctaatctttcagagactatatagacccctattctctcatgtgacctcggaagtacagggccttgaccatccccttctcagctccatattctatgatgggtaataaatttccctcaagaatggagatttggaatctgttttaaaatgatatagaatgataatgtaatatatcttgcattggcaagtaacgaagtaaaatgtaaaccctttgcaaatgtaagatgccacgttatttaaggtagaataatataaaagaaagggtcttgaagatataattccagatcactctgtactttattataatatgtattagaagrtaagagcagtagaaaagcacagactttggtggggggaagggaaaagaactgattcctgaaacatagatttatgtctttaattggcaacccagcactatattacaatcagtgttcctgaaatcaaggggttaatttgatcaggtccacctgccctgcttgcttttggtcacttaacttttttcctttttccatgaagacgaaggtcctggtagctgaaggctactgctaaacactgaaacttaaccttcactggctactttatagataacattcatgtgtcatcatggtaatggtcatttcagtagtttttcaggaactggacccaactcctgtccggttcaaacctgttgagaccactaactcttcaaatgggcctgaacaagtgcccaagaagggggcttttgacatcagagagccaaaaactccaccctcagatcatgctaatgctgccattttctgtacatgtattttatggaatgccatgaaccctgattgtgcctgcacagaagggacctgttatttcactgttcctcactgccagtcacctttccccataccttagaccactccacttccctaacccataaatatctgtaagacttatatttggagaggtggacatgagagttgttctcccacctcctcacttggcagccttgcgaataaaacttttctcttttgtaaaacctgtgtcacagtgattgattactcagaatggactcagacctggctggtacattcctaggaacgttttcatttctgtcctgcgtccttcatctggagataagggtaaaccccagtgcttcagagcccagggtcattgtctttcaccactcaagcttgcacctaatcttccccttcaccagactaaatgatcccagttccaatagtttaagctcccaaagtctagttccaagggttttgttctcctctttgcactcattaaaggcatttctgctttcatatttcatcatctatttgtgcctaagatcattaaaggtcatgtggtataagggcaaaaaccaggcggctgtctaaaagtcaaagccatacaggattttcagaggcagcttgagctggttcatgtccaggctctgctacatcctatctgtgtgattctgggccagttctctaaacttttcatatctcagtgtcctcatttatattaatcatactgtctattttctttatcttatgatgttttgacatcttgaggtggggatagggcaggacttacagatgtgggagagatggcccctaccagggctagttaatccctaaaaatagtaaacaactcacttgggagcacacctttcacatgcaaagcaactaacgcagagtctgcctccccacccactctcttcatctaactcccagacactaagccaatattcctcctgtgctaaatcatcccagggccagatactaggcagcaaaaaattactcctacagcccagaacccaccagaattattcaaactaaccaagcttacactcttgactctgccctgccttgcctttcttgcagaaacccagttaagactctggtaggctttctcctcactcctgcctctgcctcctcatccagtctggctcttctcctgtggccctgtgtagtgaggcatgcccccttctcttgagaaatgtaagtaatatatatagattttttatggcattgacctatgtcaatcactcagtcacctccataaattaaaatc

SEQ ID NO: 715963 - DNA, 3219 bp, Homo sapiens
tttttaaaatcctatctgtttttctcctatcctgtctttcattaaaattgattttctcagcttctcacatatttctatatgaggcaaagaattttagatagataccacaacctaagcatcagaggtagagatggaggacaactaagatctaagtaatgttattttaattgcaatttaaagccaaaaggcaaagacttagtaaagagctgttttcattacagttgttccatgcatgaaatgaaccattacacattggaaaagaagaaattattccagagtggcttagttataacaaacaaaatgagttccaacaagctgtttttagtcccatggccaaaaaatgcattctgttggtattttttctaatgtgacattatattttgaaatgttatttcatgttatactctctttatataacatatttgcattgaataatgagagaaatgaccagctggtctctagcaattataaaaacctttattggaggcagcaggatgatggcagatggcaattttaggttgaagtctcactaagaatagatttgtagcatcttgttgatgtggaatatagtacaacctttctctgagtctataagcaggatggtagggtggtttattgagatactaatttgcattttgatctcactgtatttttttcttccctcattaaaatagtaaaagcttttgggttcagtgtatttgagttccaaagccgaagaaagatgtgttcaaagataatgcctcttatcaacttttggttttgaaagcctgaattgattaaggaggtaataggccaatgagaggaggaaaggagaaagaaggtctttggggttgaacagcaggaagaacaattccatatctttaataaggcaaattctgcaagcctggggaaaggaaggtggtacttgatggagtagcaagattgaccctggctcatttgcaagctgtgtcatgcatcttgaaagactgtaccaaccatcaagaccctcactctgcccctaggtttggtacaggtatagccacaccacctagatctatggggccatcaactaaaagtagacattttgaggtgaaaaaaagaaaaaagaaaaaagaaagggaccattgataaggtgagtcatctgttttcataatgatcataaacatttgagtaataaactctgtgatcatattgaagacaagaaactctaatctttcagagactatatagacccctattctctcatgtgacctcggaagtacagggccttgaccatccccttctcagctccatattctatgatgggtaataaatttccctcaagaatggagatttggaatctgttttaaaatgatatagaatgataatgtaatatatcttgcattggcaagtaacgaagtaaaatgtaaaccctttgcaaatgtaagatgccacgttatttaaggtagaataatataaaagaaagggtcttgaagatataattccagatcactctgtactttattataatatgtattagaagataagagcagtagaaaagcacagactttggtggggggaagggaaaagaactgattcctgaaacatagatttatgtctttaattggcaacccagcactatattacaatcagtgttcctgaaatcaaggggttaatttgatcaggtccacctgccctgcttgcttttggtcacttaacttttttcctttttccatgaagacgaaggtcctggtagctgaaggctactgctaaacactgaaacttamccttcactggctactttatagataacattcatgtgtcatcatggtaatggtcatttcagtagtttttcaggaactggacccaactcctgtccggttcaaacctgttgagaccactaactcttcaaatgggcctgaacaagtgcccaagaagggggcttttgacatcagagagccaaaaactccaccctcagatcatgctaatgctgccattttctgtacatgtattttatggaatgccatgaaccctgattgtgcctgcacagaagggacctgttatttcactgttcctcactgccagtcacctttccccataccttagaccactccacttccctaacccataaatatctgtaagacttatatttggagaggtggacatgagagttgttctcccacctcctcacttggcagccttgcgaataaaacttttctcttttgtaaaacctgtgtcacagtgattgattactcagaatggactcagacctggctggtacattcctaggaacgttttcatttctgtcctgcgtccttcatctggagataagggtaaaccccagtgcttcagagcccagggtcattgtctttcaccactcaagcttgcacctaatcttccccttcaccagactaaatgatcccagttccaatagtttaagctcccaaagtctagttccaagggttttgttctcctctttgcactcattaaaggcatttctgctttcatatttcatcatctatttgtgcctaagatcattaaaggtcatgtggtataagggcaaaaaccaggcggctgtctaaaagtcaaagccatacaggattttcagaggcagcttgagctggttcatgtccaggctctgctacatcctatctgtgtgattctgggccagttctctaaacttttcatatctcagtgtcctcatttatattaatcatactgtctattttctttatcttatgatgttttgacatcttgaggtggggatagggcaggacttacagatgtgggagagatggcccctaccagggctagttaatccctaaaaatagtaaacaactcacttgggagcacacctttcacatgcaaagcaactaacgcagagtctgcctccccacccactctcttcatctaactcccagacactaagccaatattcctcctgtgctaaatcatcccagggccagatactaggcagcaaaaaattactcctacagcccagaacccaccagaattattcaaactaaccaagcttacactcttgactctgccctgccttgcctttcttgcagaaacccagttaagactctggtaggctttctcctcactcctgcctctgcctcctcatccagtctggctcttctcctgtggccctgtgtagtgaggcatgcccccttctcttgagaaatgtaagtaatatatatagattttttatggcattgacctatgtcaatcactcagtcacctccataaattaaaatc

SEQ ID NO: 715964 - DNA, 926 bp, Homo sapiens
tgtcagaaattcactgcactaggaaattcacatccatagaatgtgacattaaagagtcaaacactatatattgtggttgggtagaatgtggtttaagaacttggacatgagggaaattagtaagaaatggtatatgaggaaaaagtcatggtccatactagggacagtaagatcaatcacatggattcagaccaaactcagagactacaattcagaattagtgagaattaggacagatgaagtgatggaaattgtggaagctgttgaatatcagggatgaggatttacttttctataaagggcctgagagtaaatattttaggttttgcacgctacataatctctgtcacagctactccactctgccattgtagggtcaaagcagacatagacaacacagaaaggaatgggtgtatttgtgttccaataaaactaattacaaaagcaagctggattcgggctgtgagccagtcattcaccagcccctgctgtaggggctccaaaacccccaaggtctaactggttcatcaaagagctgagtccacttccaatgtcaaaagagagagaattgaaaagcttctttttgcctgaggcatttttgctttatttgctgctgcatcctggtcctccacggtccagtgcaggttacctcgaggatgctgaggctctctccctcacttggagcctgacacagactccagtagtgccccaccttgggactgccaggttagagctctattatttcacaatcttaygctgattcatggttcctcaaagcacaacaccatacaaggtgctacagctgaggaaatgggagaggagtttcaaatctatcttcccaatcgatcaaaataaggggtttatatagtggggaaggaatgtagctaaagtgcaggaaaacaagaattggggaggggtaggtaaga

SEQ ID NO: 715965 - DNA, 926 bp, Homo sapiens
tgtcagaaattcactgcactaggaaattcacatccatagaatgtgacattaaagagtcaaacactatatattgtggttgggtagaatgtggtttaagaacttggacatgagggaaattagtaagaaatggtatatgaggaaaaagtcatggtccatactagggacagtaagatcaatcacatggattcagaccaaactcagagactacaattcagaattagtgagaattaggacagatgaagtgatggaaattgtggaagctgttgaatatcagggatgaggatttacttttctataaagggcctgagagtaaatattttaggttttgcacgctacataatctctgtcacagctactccactctgccattgtagggtcaaagcagacatagacaacacagaaaggaatgggtgtatttgtgttccaataaaactaattacaaaagcaagctggattcgggctgtgagccagtcattcaccagcccctgctgtaggggctccaaaacccccaaggtctaactggttcatcaaagagctgagtccacttccaatgtcaaaagagagagaattgaaaagcttctttttgcctgaggcatttttgctttatttgctgctgcatcctggtcctccacggtccagtgcaggttacctcgaggatgctgaggctctctccctcacttggagcctgacacagactccagtagtgccccaccttgggactgccaggttagagctctattatttcacaatcttatgctgattcatggttcctcaaagcacaacaccatacaaggtgctacagctgaggaaaygggagaggagtttcaaatctatcttcccaatcgatcaaaataaggggtttatatagtggggaaggaatgtagctaaagtgcaggaaaacaagaattggggaggggtaggtaaga

SEQ ID NO: 715966 - DNA, 1295 bp, Homo sapiens
tccagctcttaagagtaggtgaatgcaacatactttgctatggctgaaatgagtgttctcagctgagtcaggcagaatatctcaggggaaaataactggagagaaagcaaaaatgtcatcagcttattgccaagacaaactgagacaagaatctgagccagattcacctaagcatctcttttaggctaaaaaggcagtacaaggatggcaggcatttgttaaagaacagtcctcaatgtgtctgccctgtgagtcactgctctggtctggattggttttcctctgcatctggtgtacatacttcatcctgggatctctcttcactatcatcctgacaattaccttttcccatctcttacatatgatgatacatttccagggtctgatataycttcattgttttttagtttactgtttcattttggtgaagcatatcatttagctgtttcttgaggaaaaacataagtaagaaatttattttttaaaaccttgcttttctaaatatatctttattataccctcatatttaaatgatagtttggctgggtatggaattctatggagggaataattacctgtagaatattgaagatatttctccattattttctcactgtactgttgctgctataaaagtctaagatgattcttatttataatctttatcctttgattgtgacctttttccctcctccctctcttttctgcttgactctgttctgtaattttaaaatgatgtatatcttggtgaagatccattatgaactgctgagctgtgcatttttggacccttttatctggcaattcatatcctccagttgtgaaaatatgtattgaattatttgaggatcttcccccctctctgtttctggatgtcctattgttaggctgtttgatctcctaaacttgtcttctagcagtgctgtttcctctcctgccttcatctgtatctttctgctataattttttggggggagatttctttatttaccaaacctgtgtgaaattttgtatcttcttattgtacttttaatttctaagtgctcttcatttttgttttttgaatattctcatgtcctccatttaaaattattttttattgcatagtctctccttctaagattttgtgctgactttgctattttggcttctgtcttctatactagaagctttcctcaaataattgataattccaaactgtctactctgaaatctcttgtaaaaactgagactcaatgtagaatgatgcagtagggctcttgttggagaaccactagtgttaatacatttaggtt

SEQ ID NO: 715967 - DNA, 1302 bp, Homo sapiens
atagatcttatataatacacatgctgtctacaccaagggcatgtctgtcatatgtaaatactgccaataagatagttatatattagaagtgctttttacctgtagattaagagttatgatgtctctaaagaacaacattcatttttattcttgtaaggagaggtgttaaagagtggagaaggaatcgcatatggaaataacaaaggtgcaccacataatttttgatttttacaaactcagagaaagagcataaaagaaaagaaaataaaaacaaataaatgtggttttcatatagaatttttgattctattgccatcaatacattgcaatccccatcaaatttgttggttgttatataagtcacaagacatagacaagtttagaaaagaaagatatggagtgttggatctgattatataaaaataaaaattaaaaactttctgaagttttaatgtgaaaattaaaaaactttctaaattttaatgtaaaaattaaaaactttggtcacttaaaaaacattataaataaaattaaaatggtagaaataggcttcaaaagtatttatgacagataataaaataatagccttcatatgttaaaaatctttttcaaatcaataaggaataaaggtcagcagggaattcacaaagaaatacaaattctcaataaacatgtaaacactggttcaatttcactattaatttcctaaaagtatattataacaatgatatatatgtatttgtgtgtgtgtgtgtatatatatatatatatatatatatcaaattggcaacaattctaaatactaagtgctagctattttatggcaaaaagagatatataatgctttcaaataagctgttttgaactgctttcaaagaagcagtttggaactattttataagagctttgattttgttaaggaataagttactcagtgtaattgagattagcagtgattagttagtccccaggtggctttaagaaggaaattgtaaaatttaaaacacacacaaaatatatgaattcacccaactgttatggaaggctaaggccttttgtctgagatgggccctttgaatagagtttataatgtatcctctaaatttccaagttgggattcaagaatctaagacacttgcagaataatctgaatgcagattctttagcagattctttacactcaccattttaaaaatcttttatattttttcactcacatctaactcttcagaaatctatttttagtaacttgtctttgttgactcttactcargcatttcacattcaaatagcatcagtttt

SEQ ID NO: 715968 - DNA, 588 bp, Homo sapiens
ttatctttttctatggcgtctttcaaaaaacatttcttttcacattttgaaaatacttagactagagctcctcttttgacttgtagtaagacggtgctgcaccctgaaaagcattagaaacacccatctccctttaatttttcttaggttgtcattcaagatccttgttgctttgtcgtttgactccattttttctactaacctacttttttacccatcataaacccaacactcatctgaaagtgcagttttagcggtttccttattgccaaatattcttgatcttattgcccttacctttctcctcctcaaataccctgtttcactagccctttaaatccaatgtgtatcacacccagctattttctccmcacaaaccaatactgcctcttaaccctcctaatgttgttaatgataattctattccctttaatccaggttttaaacttcaaagtcgtttctgtttctctctatcaactgtctcacacaatcagttgctgtgcttattctagggtccacatccgcagtgtcttcattttctgtttggatcctcctttccattccagcctagttcaggccctcattatt

SEQ ID NO: 715969 - DNA, 588 bp, Homo sapiens
ttatctttttctatggcgtctttcaaaaaacatttcttttcacattttgaaaatacttagactagagctcctcttttgacttgtagtaagacggtgctgcaccctgaaaagcattagaaacacccatctccctttaatttttcttaggttgtcattcaagatccttgttgctttgtcgtttgactccattttttctactaacctacttttttacccatcataaacccaacactcatctgaaagtgcagttttagcggtttccttattgccaaatattcttgatcttattgcccttacctttctcctcctcaaataccctgtttcactagccctttaaatccaatgtgtatcacacccagctattttctccccacaaaccaatactgcctcttaaccctcctaatgttgttaatgataattctattccctttaatccaggttttaaacttcaaagtcgtttctgtttctctctatcaactgtctcacacaatcagttgctgtgcttattctagggtccacatcygcagtgtcttcattttctgtttggatcctcctttccattccagcctagttcaggccctcattatt

SEQ ID NO: 715970 - DNA, 1003 bp, Homo sapiens
tcaatatttatttcatggcaatccacagagagcactgactttccaggggctcctgtatctctatgaaaagaccaccagcagaccagcatcagtgaatgcattctgcatttttacactgcttttaagtaaattgattttcccaaggtgcttaaaagtggtttgttcttttaattaggtaaatattcctcttaagatctatttaaacttgatatttacagtaaaaccttttcatayagaataggcagccaaactttatcctagccttgcctagataattgcaaatccctaattagctacatctagaacaatggcgttatttttaatagagacccctctttcataggctatggggaatcttaaatcccttaaaaataaattaaaccattatatttcctgggatcttagaatcttcaattatttctaaaacatcccacctttgttcatgtataaagatcactttctacacaattatttcaacagaaagcttttcataattgtgagttaggatcatgtcaatttaagtaagtttttatgactagttggcctttatgaaaatctttactactctttccagggtcaaaacaaagatgtatccttacattctaatataatttagaagccttaaagtctaacacagcctgaaggtgctccaattttactatttctcaaatttcagaaggtagcaaagagttgaacttaccaccatccagccttaggagtttggtggtagacactgttctctatacaagattccaaaaacatcagaacagagtagaacattccattaacaaagaacctggtctagatctcaacaaatgcattctgagtcaataaacaagtaactgaaatgaaattacattttaagctcaaatagaatcatttaacacaagacacactttgatacttactagaacctcaaataacactgtgactcaacaccatctcagaaaaatcccctaccaccctgcaaaatggttatttgaaactgatgaggtattttaat

SEQ ID NO: 715971 - DNA, 673 bp, Homo sapiens
tgaggcatgaagttagaggtgaaggaagagatggcaatgcccagagttggatgatgagatctggagtctgcctgtggttcatctagcccaagaatcaaagctgcctgttctgtagtctggctcctgcagaaccccttctggatctgggagccactcaaaactagcccaaactagcaacattctgtgtcaactggaaaatgggtagaccagttgccacatgcagagtattatgcctccaaaaccgaaaaaccccactactcattgctttttttcctctcagacctagaagtccaaggtggaacaactcaccctttatttgcaagtgtaatacatcattccctagactcctgggctcctagaaacactacaaatgggacaggcccctgaatccttctaggtttatctcctaccctcaagagatcgtatcttccgtggtatcaagagaacttgtcacttcctgcccttcaggtctagttaccatgktatcaccaacacaatggaccagtgagctgctctgcggaaagttcatagagccccattcccttcctgaagaccatattatatcagaggacaggagaatcaacctaccccatgggcaaaactctgaatgtttgctttgtctaccacacgtgaatacaagctgcttctgaccctccttctgatgggtatggaa

SEQ ID NO: 715972 - DNA, 625 bp, Homo sapiens
caataaaagaccctgttaaaatcgaggcttagccaggcgcggtggctcacacctgtaatcccagtactttgggaggctgaggtgagcggatcacaaggtcaggagattgagaccatcctggctaacagggtgaaaccccgtctstactaaaaatgcaaaaaattagccgggcatggtggtgggcatctgtagtcccagccactcaggaggctgaggcaggagaatggcgtgaacctgagaggcggagtttgcagtgagccgagatcacaccactgcactccagcctgggcgacacagcgagactccgtctaaaaaaaaaaaaaaaaaaaaacgaggctcaaacatgcacagcccgccatggctctgtcctccatcgcactaacacttgggtggcaaacgcagaggaggactggcatctactggccaagtaaccttgtccatttgattacttagtgcctctcccgggtggattcaaacatccttacaccccgtgcgcaccctcatacgtctatccactacctcttccctggggccctttctgtccctgaacttctggcctcctcccaggctcctgaccataagcccagccactccccactgcccataatccacggatgtttttacc

SEQ ID NO: 715973 - DNA, 579 bp, Homo sapiens
tctcaaaaaagggaagaaaaaagttttggaactagatgaaggtgatgattgtacaacactgtgaagatacgaaacgccactgaaccgtttactgaaatatggctaattttatgttatgtgaatttctttttctttgagcagcagcaagatttattacgaagagtgaaagaacaagtttccacagtgtggaaggggacccgaacgggttgcccgtgaatttcatctcattaaaaaatgtaaaaactttgaggccaggtaccaacctaatttgtttttttgagacagagtctcactctgttgcccaggctggagtgcagtggtatgatcacagcttactgcagccttgaccycccaagctcaagtgttcctcccacctcagcctctcaagcagctgggactacaggcatgcaccacttttgtatttttttgtagagacaaggcttctccatattgctcaggctggtcttgaactcctggactcgagcaatccacccgccttgacctctcaaggtgctgggattacaggcatgagccaccatgcccggcccgtttttgtttttgttttttggaaacggagtc

SEQ ID NO: 715974 - DNA, 2201 bp, Homo sapiens
tctttcccaacttcaattctctacccacaccctacctttcccgtcttcccgttatcaacagaatgggccttgcctctcctctccaaagctaagtccttcacctgagcttggaacccaatctttcccagtccacaaatccttctccccatgcctgccttcccccaaacctctcactgttcccccagcccttccttccacaggtccttcccaatccttgtgacagaagcactcattggccagtctcctccacacacattcacatactccgcctgctccttcctgcaaccctgagagctgggggctggatgccactgctgctatttcaacatgcttttacggatgacttttagcttgccaaagtgtcttttcttgattcttgtacttcttcacctctctttgcaagtgacaatggtgcaaaagaatgcctttcctcatttctgatcatatcatgttcttgtttttatagtttttaatttttatttatttatttatttaaaaagagagatgggggggtcttgctatgttggctaggctggtctcgaacttttggtatcaggcaatcctctcacctcagcctcccaaagtgttaggattatgggcgtgagccactgcacccagccttttttctttttttagtgacagcattatgctgtctcccaggctggagtgcaggggggtgatcatagctcaccgcagcctcaaactcctgggctcaagtgatccttccacctcagtccacctgagcagctaggactataggtgcatgccaccatgtctggctaagttttaaaatttttttgtagagacggggtcttgctgtatttcctaggctggtcatgaactcctggcctcaagggatccttctgctttggtctcccaaagtgtggggattacaaggatgagctactgcgcttggccatgttttcaattcagaaattctctgactgctggatgtccccggcagctcctccactttgaccctgtcattctttccatagttttggtcttctggaaccatctctacaaatggacccctaatctcagctggaatatcagctgctcacattctccctgtcccagcctgtattaagtaatttgaatcacatgttgaaaatggaacccaccaactttctcaccaaaatagacctccttgctaactgcttcaagttgtggcttaaaaacaaggaggtacctttttgtcactcattatttgggtagtacaatattcccccatgattctaaatcatgacaggcgaattccctttcctttcttggtgttctaggaagtccagtagacctgggataaagcttctggatttttttgagacacagtctcgttctgttgcccaggctggagtgcagtggtgcgatcttggctcactgcaacctccacctcccgggttcaagcgattctcccacctcagcctcccaagtagctgggattaaaggcacccaccatcatgcctggctaatttttgtagagacagggtttcaccatgttggccaggctggtcttgaactcctgacctcaggtaatccgcccaccttggcctcccaaagtgctgggataacagccatgagccaccatrcccaggtcaaggttctggatttttaatatggcaactgagagtccttcacactgtgtctcagacaaaatggaaatgtggattaaggtgggttgggcaacaacaaaactggttggttttgatgctggcttcatactcttttattaaaagtttgactaatgggccaataaatgtgttgggtaaaaacatcaggactctgtcctcaccctatcctgatcatttttttatttttatttttttaacacaatcctcctcccctttgtttgcacctaatatgcccttatctcctccactctacagagacaagttcaccaaaaataactggtagcattagtgatttaaacagtacaaaaatatcatgtaaaagatgcactgtttttagtctggggaagaccatgtgaaaggtacaaactggaaactgactttagctaacttgctccagagaacgtgttttcctagaaaaggtatctttttgccaacaagactctgcggaggagacatgcctacagagcaggcacagaggcaaggctgggcgcaagttgggtctgggagcatgtccaggatcgccccacccacaccgggcagggtgcaggacagccagcaagtgctcagtga

SEQ ID NO: 715975 - DNA, 601 bp, Homo sapiens
gagacagggtttcaccgtgttaaccaggatggtctcgatctcctgacctcgtgatccacccacctcggcctcccaaagtgctgggattacaggcgtgagccaccacgcccagccggcttcgttttttttaactaggtcataatcagaacctctcgaagtgtgcgtgcgcgcgcgcgygcgcgcgtgtgtgtgtgttagagctgaatttcaggttttgtcatattggggaagttatattaaaccctctattctagaaactcgtttatggttctaaggggttgtatcatgattagcaccaatgagagcagttttctctgttctctttcccttgccaagttgtcacactccaagagcagcattaaccttcagtcagatccccttagcttagagatgtcaagtcactgttgtgcaattctgttctcaccactcttattccactgcgaacttaagaaaactttggaacgagagactcgccagtgccaggctctggtgatctggactgactgtgatagagaaggcgaaaacatcgggtttgagattatccacgtgtgtaaggctggtaagtgctgctgctgctgctgactttctctactttggaact

SEQ ID NO: 715976 - DNA, 601 bp, Homo sapiens
gagacagggtttcaccgtgttaaccaggatggtctcgatctcctgacctcgtgatccacccacctcggcctcccaaagtgctgggattacaggcgtgagccaccacgcccagccggcttcgttttttttaactaggtcataatcagaacctctcgaagtgtgcgtgcgcgcgcgcgcgygcgcgtgtgtgtgtgttagagctgaatttcaggttttgtcatattggggaagttatattaaaccctctattctagaaactcgtttatggttctaaggggttgtatcatgattagcaccaatgagagcagttttctctgttctctttcccttgccaagttgtcacactccaagagcagcattaaccttcagtcagatccccttagcttagagatgtcaagtcactgttgtgcaattctgttctcaccactcttattccactgcgaacttaagaaaactttggaacgagagactcgccagtgccaggctctggtgatctggactgactgtgatagagaaggcgaaaacatcgggtttgagattatccacgtgtgtaaggctggtaagtgctgctgctgctgctgactttctctactttggaact

SEQ ID NO: 715977 - DNA, 601 bp, Homo sapiens
gagacagggtttcaccgtgttaaccaggatggtctcgatctcctgacctcgtgatccacccacctcggcctcccaaagtgctgggattacaggcgtgagccaccacgcccagccggcttcgttttttttaactaggtcataatcagaacctctcgaagtgtgcgtgcgcgcgcgcgcgcgygcgtgtgtgtgtgttagagctgaatttcaggttttgtcatattggggaagttatattaaaccctctattctagaaactcgtttatggttctaaggggttgtatcatgattagcaccaatgagagcagttttctctgttctctttcccttgccaagttgtcacactccaagagcagcattaaccttcagtcagatccccttagcttagagatgtcaagtcactgttgtgcaattctgttctcaccactcttattccactgcgaacttaagaaaactttggaacgagagactcgccagtgccaggctctggtgatctggactgactgtgatagagaaggcgaaaacatcgggtttgagattatccacgtgtgtaaggctggtaagtgctgctgctgctgctgactttctctactttggaact

SEQ ID NO: 715978 - DNA, 601 bp, Homo sapiens
gagacagggtttcaccgtgttaaccaggatggtctcgatctcctgacctcgtgatccacccacctcggcctcccaaagtgctgggattacaggcgtgagccaccacgcccagccggcttcgttttttttaactaggtcataatcagaacctctcgaagtgtgcgtgcgcgcgcgcgcgcgcgygtgtgtgtgtgttagagctgaatttcaggttttgtcatattggggaagttatattaaaccctctattctagaaactcgtttatggttctaaggggttgtatcatgattagcaccaatgagagcagttttctctgttctctttcccttgccaagttgtcacactccaagagcagcattaaccttcagtcagatccccttagcttagagatgtcaagtcactgttgtgcaattctgttctcaccactcttattccactgcgaacttaagaaaactttggaacgagagactcgccagtgccaggctctggtgatctggactgactgtgatagagaaggcgaaaacatcgggtttgagattatccacgtgtgtaaggctggtaagtgctgctgctgctgctgactttctctactttggaact

SEQ ID NO: 715979 - DNA, 713 bp, Homo sapiens
ggggtcatttgtcacactgagagagaaggggctggagcagaaagctgctcaacctgcatgcagatggggttttctgtgaccgtccccacctgccagggacagtgcgagcccacgggcatcactggcaggatggacctcgtggcttccactgccagcacacaggtgagctgtggcaactcccagtgacccctgttcctgtgagacctgcaaactgtaaatgtgggcaggatagattctgctcctgcccctccgcagccacaaaggcccctccttgccacataagcgcttaatcagcataatgagcgactactgagctgatcgttwtcatctccctcctggttagaagtggaaccatgctggggccaaaccaggagccagccaggcagacccaggcaggagaaaacacacagagatgagtaaccaccgcaagctggcactcagtgaggcaggtgtctcttctttgtcccggggcggggcgaaggaagaggtggggtgctttgctcatcctgcagagccaggcccctcagcctgcacctctccccaccgtcagatgcattctacttagaaacagaacacagctaatcggaggctcagaaagaccaaggtttgatgttatctctactccttccacagtttactggccacaaatggcccaagccccactactgtaagtgactctccacagagttccatgagaaagacagagagacact

SEQ ID NO: 715980 - DNA, 569 bp, Homo sapiens
tttttttwaaggtgtttttggatgaggttaacatttaaattggtagacagagtaaagcaggtgtcctcccctggtgtgggttggctacctcccattagttgaaggcatgagtagaacaaaaatgctgaccatcttccacattcaagagaactcatcttgcctgacagccattgaattgggacatcatctttttcttgccttcaaactcaaactgaatcaccagatcttcctgggtctcgagcctgttggaatttggactggaactacaccatgagatctcctggttctcaggctttcggactcagactagaactacacatcggctctcctgggtctccagcttgctgactcaacctgaagatcttggaacttgtcagcttccataatcatgcaagccaattccttacaataaacatagctgtatatgcacactctattggttctgcttctctaaagagccctgacaaatagaaggacgaacaacggcctgcagatcacaccttgagtggcaccgcccaatctccagtctccatccccaggtcctggcatgctccctatacttagcaagc

SEQ ID NO: 715981 - DNA, 619 bp, Homo sapiens
tgaccaagtggtattaacaggaaattgaatgatggtttaaacaataaaaaatcaatgtaatttatcatattataaagataaaggataaaagtagatatagtgtcaattggcaaagataatacattgacaagagtcaaagttcactcaaagaaaaaaaaaataagcaaactgggaattaaaagtttctaggtctgatacaggctatatacaaaattaaaaaaaatgcaaatgaacacagaagctacccctaattttatagttaataatttaggagttgatactctgcctttaaaattgaaaatatgtgaataattaattttrccactttgatacagcattgtactggaggacttagcaagtgcaacaaaaagaagtataactaggaatgatggcttgtgactaaactcctaggtactcaggaggctcctgtgggaggattgcttcaacctggaatttcatggccagcctgtacaacattgttagacctcaattacaatattacttttgtaagagaataaagaatgacataagagtaagagtatgctactgaatgaattcaaacagtaatattaagatgctgatacaaatcagagttttaaatttaaaacaaaggtataag

SEQ ID NO: 715982 - DNA, 620 bp, Homo sapiens
agtagtcacatgagctagtggctactatactggacaacataattctagaggttttagataagaagatatatataaaaggagatctaggtacttgagaattttgtagaagagaaattagttcagtaagaattactctagcacaattgtaggtccactgttaatagcaatcttttaaatttgcagaccaaatataaattctccttaaagctcctaattttaaaaaattattttgtagggtgcttctttcttccctttctattggttttccccagagaagactacgtgtggatatctactataaaacatgtgtgcatggaaaattgtagggccagatgcttctggattaagagaacatgaccaggtgagtgygccaagcaagtgcttggagatattaatgtcttaattggagatacttacttgaaaaacagattgaatccacacattgtaaacatgatcgccaagtaacccacaacaccaaatgcatagctgagtttgtagatcaaaagaaaccatttgtagaccaatctgtggagtgaaaaatggggagaaacacagaacacagaaacacagaaaaatggggagaaacacagtaatattataaaatattttgtctttttcaa

SEQ ID NO: 715983 - DNA, 797 bp, Homo sapiens
gataattcccctgaaaggaatcttttaaactgaaatacacacaatttcatcctggttttccagtctatggaagttatctctggttctcctggattcgcctgtgggtggtcaaaagtatgaatataagggccagaaaggacaaaataaaatgctcttctcactaaagagaaattcacttgagtttacattatattcttgactcaagaagaaagaacgccttgctaaataaagtgtcaatatctacatgtaacataaacacacactgacaaaaagcaaatctgcacatgctcctatcagtagctatacattttcccaatacttggtaatttttggcaacaaggtcatcctgtgatcaagatctcaccaagaaataaatcaatgatcagtaacgcaaagattatacctcatacattcatattttgttattattagaaacactttcttcgtttacatttgtcttcagtctttccattatatcaaaaatgaaacaaacatcattaaggcattgtctttgtcagcctcatcaagaatgttttacaggaattccacatgtcatctgaaatgtctctgatgccatcctttttatgtaatacatgaaatgacagaatatagactcttttggtgtcaccacaggatagatttccatwcacctcagcaaatattacatgaaatagaggtaagtttcttggtctgggaaggcttttctctagctaggcattcatatgatagaatggaggtcctatttcattcaacaagtaactgttgaatgccttcgttgaactggcatggtgaaataa

SEQ ID NO: 715984 - DNA, 561 bp, Homo sapiens
attgcagccatattcttccactctttggattttgttctatttattcaacagttgccttcgattaataggtgtttgtaattttaatataatctgattcatcctgtttcttctataaagttaccacttcatgttctgcctaagaaagctgtcactattcaagaagatcatgtttctgaacaaactgtcttgtggcaaacataatgtgaacttttcttgattctgtcatgtatttggttgttgactgtaccacaaactggtttcattaggccagtgtgaaatttcccagactttctgaaacagtggaatgtgcccattttactcatcttgaaagggaatgtatcatagaacaacaacacrttagctgactgaaaaaaggcagaagtaaaaaagtggacttatctctaattctgcactggcttcactctgaatcacatatttcagatgaagattttacacagcacctcatttaagtaaacacaataattgttgagtattactatcagcactaatacggatacatgtaactagtgccttataacttgcaaagtaaaacctcattta

SEQ ID NO: 715985 - DNA, 648 bp, Homo sapiens
ggcctcccaaagtgctgggattatgggcataagccacagtgcctggccataaactgtgttgttaagcaattttttgtttgcttctagatttagaatattgcttgtacaacagtaatctcttaataacactttatcttcttttatgcattcctttatcttatctaagtcagtcagtcttcatgtagtccactataatggtgaacatttcacttttgctgataatgcaaatattcacatacaaaccaagtcctaggaatttctccccaagtaaagaaactttggtcataatgtctgtgttgcgatgagcagatgaaacatttccattcttaatatatttattaccataaagaggaaataatatgtttctacatttcagaaagtagtactaggttggtgtaaaagtaatggtggtttttgccattactttaaaattttcaaaacatgggagcttctgggcaagaatcatgttatctgtcgtggtttccagaaaagccagatagatataatgagtaatcttcaatgtcagcatgaagcaaattactcaattactaatggccacatttctttgaatttttatattttacgacttactttttgagataactggtaggaaaatccttcctttsagtaaatatatttgtacaacca

SEQ ID NO: 715986 - DNA, 793 bp, Homo sapiens
tgcatccatcttataaagttttgtatcctgctttctcgcttaggagcatcctcgagtttcatgaaaaaattcttcaaatactgtatcttactttttatggccacataaatcatagatcataccatattgatatacagcacatggatcatacctactgattaacttttaagttatttctcatttttgctattacagactcggcccaaacacactatctttgactacccttgctaaaaaaatcactcccatctgaccacttacaacagtgtgcgttaccactgacctagcacttatgctacattacctactttgttctgtagttaatctgtgttcttgctctaacttcccaaggagtttataagccaacagagggcaggaatgatgtcattcatacctgtcacccaacactatgcccagttcagcgtaagtacacaaaactctgctgaattaagaaataaaaacagcaatatatatatatatatwttttttttttaaaaagcaaacactagccaatcaaaagttagaagtctaaaaagaggttataaaaaaagggcaacttgagattaactacaagaaaaagcaataaaaatcatgccaactttgttacatgactgaaaaggccaggaagataaagttgttgacaataatataatataaaagagttacgaagcaagggcttcagtggaaaaacttcagtcatgtccaatatgaactgaaaatgaactatcctggaactattacaatgactgatgaaaataagcagttgatcagtgaaggagaagacagggttaag

SEQ ID NO: 715987 - DNA, 793 bp, Homo sapiens
tgcatccatcttataaagttttgtatcctgctttctcgcttaggagcatcctcgagtttcatgaaaaaattcttcaaatactgtatcttactttttatggccacataaatcatagatcataccatattgatatacagcacatggatcatacctactgattaacttttaagttatttctcatttttgctattacagactcggcccaaacacactatctttgactacccttgctaaaaaaatcactcccatctgaccacttacaacagtgtgcgttaccactgacctagcacttatgctacattacctactttgttctgtagttaatctgtgttcttgctctaacttcccaaggagtttataagccaacagagggcaggaatgatgtcattcatacctgtcacccaacactatgcccagttcagcgtaagtacacaaaactctgctgaattaagaaataaaaacagcaatatatatatatatatatttttttttwaaaaagcaaacactagccaatcaaaagttagaagtctaaaaagaggttataaaaaaagggcaacttgagattaactacaagaaaaagcaataaaaatcatgccaactttgttacatgactgaaaaggccaggaagataaagttgttgacaataatataatataaaagagttacgaagcaagggcttcagtggaaaaacttcagtcatgtccaatatgaactgaaaatgaactatcctggaactattacaatgactgatgaaaataagcagttgatcagtgaaggagaagacagggttaag

SEQ ID NO: 715988 - DNA, 237 bp, Homo sapiens
gggaggcagagcttgcagtgagctgagatccgcccctgcactccactgagatatmtcttgggtatagtgtctagcatagtgtaaactcaataatggttgtccaatgaagccataatggtggatttgatgttaaacaggcataggagttttctaggtcttcttaacccatgcctgggaagctgttgtagaatttcttagctctgggcaacagagcaagattccgtctgggggaaaaaa

SEQ ID NO: 715989 - DNA, 1527 bp, Homo sapiens
gaaaggtaaagcccaaacttcaggatggtgtctgagctctcgttggaacaatcactttgcagggcttctcctgcctccccattgtcacagcaccatcatgcgacatgctgtgctgttaccacctctcagggtctgctctgcctgcaattcccacctccaactctcttatctggcaaacacctgttggcctttcaagaatcagtcccagtgtctcctcttccaggaagccttcccagaacacctcagccctccaggtagaactgaccactcccttctttgtgtctccaccattagcttctatatctttaataaaatccattactatttttctttgctttcaagtccattcctcaaggacagaagcattgtgttacttcacatatctctgaagtctagccaagcaactgagtagtcactgagtaagcatcagaagaatgaatgataaaatatcctatatgacttgaattctttgcaggatggtcactatttgcaaaggaaatctatgctgttagacactgccattcttaggcggtgggtacaatgtaagacaccaatcttacatgaggcagaagtcagtttctgcatcgcctcaactcaggatctggttctatgcccaggactacgtggagttgcctcccaccactaagacagttggcaactccctgctaggatcctcttcaccagaccgaacatctccagctgcctttcctcttcctaacaggcatagttttaagatccctcacgtccctagaatatgcactgaattactaagcaaacccaaattgcactgggcctacagagaagctggtggcatctgggaagtttatgcagattcctgagatgatgcttaaagtgtacttcaaatcggaggtcccacgttcaagtgtctgtgggctcagacgggtcagatccatgaatgaagtaagcaggagatgatgaaacagacaggaggggctgtgggtggacaaagtatgcctggtctsagcctcacctccacaattgctgccacataggagaaaggcccagtcttgccagatctttgtttttttcttctttttttttaaaaagctagaaatttgcattttcatacaagctttttagataactgattttttttaaaacatatacaacaaggtattttccaaatcaactgcatctggggctggctctggctgcggcctatccatttgccgccttggctttcaataaagaattgcttgagcgattcctaaatttaagtttttgcatttagtgttggaagtgtgcacagatatatcgagagttgtggacatacaaaggcagaatttaaatctgaaattaaactaaaacactagggttaaaaataactttaaggcataaatcaccaaagagggtgagtgaaacagagaaaaacaaggagcctttctaaccagcgcctaaagccgaggcaaagactcaattaccggtcagcagatccatctccagcaatgcctggaacaagctggggtgtttgtctttcagctccttctcccaggggaaggctctgca

SEQ ID NO: 715990 - DNA, 1527 bp, Homo sapiens
gaaaggtaaagcccaaacttcaggatggtgtctgagctctcgttggaacaatcactttgcagggcttctcctgcctccccattgtcacagcaccatcatgcgacatgctgtgctgttaccacctctcagggtctgctctgcctgcaattcccacctccaactctcttatctggcaaacacctgttggcctttcaagaatcagtcccagtgtctcctcttccaggaagccttcccagaacacctcagccctccaggtagaactgaccactcccttctttgtgtctccaccattagcttctatatctttaataaaatccattactatttttctttgctttcaagtccattcctcaaggacagaagcattgtgttacttcacatatctctgaagtctagccaagcaactgagtagtcactgagtaagcatcagaagaatgaatgataaaatatcctatatgacttgaattctttgcaggatggtcactatttgcaaaggaaatctatgctgttagacactgccattcttaggcggtgggtacaatgtaagacaccaatcttacatgaggcagaagtcagtttctgcatcgcctcaactcaggatctggttctatgcccaggactacgtggagttgcctcccaccactaagacagttggcaactccctgctaggatcctcttcaccagaccgaacatctccagctgcctttcctcttcctaacaggcatagttttaagatccctcacgtccctagaatatgcactgaattactaagcaaacccaaattgcactgggcctacagagaagctggtggcatctgggaagtttatgcagattcctgagatgatgcttaaagtgtacttcaaatcggaggtcccacgttcaagtgtctgtgggctcagacgggtcagatccatgaatgaagtaagcaggagatgatgaaacagacaggaggggctgtgggtggacaaagtatgcctggtctcagcctcacctccacaattgctgccacataggagaaaggcccagtcttgccagatctttgtttttttcttctttttttttaaaaagctagaaatttgcattttcatacaagctttttagataactgatttttttwaaaacatatacaacaaggtattttccaaatcaactgcatctggggctggctctggctgcggcctatccatttgccgccttggctttcaataaagaattgcttgagcgattcctaaatttaagtttttgcatttagtgttggaagtgtgcacagatatatcgagagttgtggacatacaaaggcagaatttaaatctgaaattaaactaaaacactagggttaaaaataactttaaggcataaatcaccaaagagggtgagtgaaacagagaaaaacaaggagcctttctaaccagcgcctaaagccgaggcaaagactcaattaccggtcagcagatccatctccagcaatgcctggaacaagctggggtgtttgtctttcagctccttctcccaggggaaggctctgca

SEQ ID NO: 715991 - DNA, 524 bp, Homo sapiens
tgtatgctcacaggtattgacagtttgactggatatagaattctaggttgaaaattatcgtttttcttataattctgaagacattgctctattgtctttaagttcctagggttgctgtaaaatgccatccttagtcctcatcctttgtatatgacccttttttctcctctgtctctctctcaggaagcttttagtctttagccatttcacaaagatgcatttgttttcaccgattgtgctgggcattcagtgggtccttttgatcaagaagcttatgagtctggggaatgagcttcagtatgggctaaattgtctgtagaaaaaacataatcaccggtaatttagaacaggtragtgccatgtttgagctgagacttagagaattaatttagaactagtaatagaagggattagaggtagatataccatagacaggaaaatcaatttgaagctcacttttcaatatctggtttaatcaacaaatattatgccttctttacaagaagtgctgttttttgtgtttg

SEQ ID NO: 715992 - DNA, 524 bp, Homo sapiens
tgtatgctcacaggtattgacagtttgactggatatagaattctaggttgaaaattatcgtttttcttataattctgaagacattgctctattgtctttaagttcctagggttgctgtaaaatgccatccttagtcctcatcctttgtatatgacccttttttctcctctgtctctctctcaggaagcttttagtctttagccatttcacaaagatgcatttgttttcaccgattgtgctgggcattcagtgggtccttttgatcaagaagcttatgagtctggggaatgagcttcagtatgggctaaattgtctgtagaaaaaacataatcaccggtaatttagaacaggtamgtgccatgtttgagctgagacttagagaattaatttagaactagtaatagaagggattagaggtagatataccatagacaggaaaatcaatttgaagctcacttttcaatatctggtttaatcaacaaatattatgccttctttacaagaagtgctgttttttgtgtttg

SEQ ID NO: 715993 - DNA, 646 bp, Homo sapiens
ctggtgaacagaggtcaggtgatctgcagccgaccgagcagctgctaagtggccaacaggctggatctgcatctcacttgcagaggccctgcctggatgctggggctgccctgagactcccttctcctcctcttccctccacagctctccctgcttctatccacagctgtgctccaggtggggaacacctatggatgcaccagggtgcaactactcagagtcaagcatgcagaagggcccctgctctatgctgtttccatatccaagcccaagctcttctagagcttcagcaaatccaagcctccctgaattccctgcaagaccaaactgagccctacaacccccaccactctggttagctgccagtcccagcccctgttccctcctgggcccctgtctgtacagttctgaagtcctgcaagaatgttgagatcctaagcygactctcacccaaagaggtaaacaaccaggggcctccagaggtagagaacatactctgctgcctgtaggcttgatgtccttcccctacaacacaccttgcttgccaggctggaagaggggctccagaaactcgggaaacctgggcctgtagctggcatgtggaaaaaaggcctggaaaagcaccactcctgtccatgaagccccc

SEQ ID NO: 715994 - DNA, 1225 bp, Homo sapiens
cagctttggggkgtttctgtgtgtgcacccctttccagtgacatcagcacagtgtggatgcttctcagaaacagtttttggtcagagcataggtgtgcgcaagtcaaagaagcctgcgggcagcctgatcccacaacaaaggccagggacaggcaaacatagaatgcatttccagagtttctggtaaagctgaaaagacaagccatgattaacaagaagggaaggtagtggctgcatctgcagaggaggaagggagacccgagacggcttcggaagtgatggtgatgtgccgttcgtaaagctgggtgatgaatatatatagatacttggttttacttttctttaaaatatttatgcgtaatcttttatgtgatatgctttacgatttaaaaaagttaatgatctgagtaatccaagcaaaaaagctgaaacctgccatttaatcagaaaaatcagaaaagttgagtccccctagcactggtgttgtgtttcccagtggctgcctcctccctgtgcgtctcgcccggaagcatttagtcccagtgcgctttccgagaggcacaggtgggctgcattgctgattcctaagggcctcctccttggaaacagaaatctttattcatcaaatacagtgatggaaacattgagctcccagctgtaaggacacagcttggtggggaggggtggtttctgcgtgtgtgtgcctcctttccaagaggggcgggaactgctgactgctgagagggcacaaagtggagggtgcctggctgacgtcagagatgtgcagagagccccagtgcccagccgggctctagggaaacctccccacaccccaaagaggccctggtgtagggcagaggccttgatacaaggcagattcctgctgcagtgcaggcagccagactgacccacactccgtccctcagctgcgagacagtcgaggccgggctgtttgtggtcgtgtcagaccctggctcaagcaagccctccttggcagcccctgccaaccctggacacccagcaggttgggggcctgagagctgctggttggaaagctcagctgtcccctggccactcttgctcctggagcccaggtcatctcctgttctgcctggaggagaaaagatgaagggaaagccatcgtgtggactggtggtgctttgttttgtttgtgtgtctgtttttcatttggagccacttcatatgtttactttgtgaatgcact

SEQ ID NO: 715995 - DNA, 1234 bp, Homo sapiens
agtaattgaatttattgcttcgcagtacttgagaacacagtgcatcttacgttcaaatcagtttcccaaggtgatcaataagacacacaggaatttaaaaaataaaaacaataatgtctggaactataggattaaccattttataatggaaagaaaagagggcatagttttaagcccccttccgacgctggcctgctgtgttaggatgggcacatatcacagatctacagtcattcctgagccctcctttgccctcatgtactacagtccattgctcagcaggccctgctaatgtcactcatttaacatctcaagtctatttactcctccccacccctctgtctttatcttgtccctttctccacatctactctccacatagcagtggaaattccaaattgtaaatttgttttatttaatggtttaaaacttttcagtgaatccctcttactctctgaatcacattcagatgtcttagcctgcccttcgtggcctgccccacccactggagatttggctttcccaatctcacgtccagccacaccccgctttctgtccagcagctctgcccactgttgctgtgcacctttgcacaagccccagatatccttggctcttcccttccctttcccctgtgcgctctgtcacctgaaactcatccttccacacttggcgtggatatcgttctctctagggaggcttggctgcagccccttccctccccagcccaggtagaccctcttcccctgtgctcccctgatgatctgtgggttgctctccctgggacagcacagcacatgcttcttcttccaaagggaacactctttgagggaaggaactgtgtcttgctgactgtcccgatctgtattgtccagcacagtgtggcacatggggcatccataaatattcactgaatgaattaatatatagttgcgattttataataatagcatgaggtccccatgcccaagaaagagtatrggaaacacgagaccacattaaaataccatggcaagtaagctccagagaagttatattgaaagagagtcagggtttaagatcgtctcacaggcccgttccgtgggacttgaagtttttgagagtttccctgaagggtaaatgcaaacctctgcttgagtttttattaagaatgtctgggccgggcgcagctggctcacgcctgtaatcccagcactttgggaggcctaggcgggcagatcaggaggtcagaata

SEQ ID NO: 715996 - DNA, 746 bp, Homo sapiens
ggcttaattggaagcagtttatggtataattatgctactgtgaaatgtgacatccctagaaagtgtcacattaagctttactgaatctattcttatcatcactagagcctcctaaattgtatattatacatacataaacacacagagacacactayatgaaattgcactcgcagtctttctctctttgtatataaatatgtatgcatgtttaaatagattatatatacataaatatactgcacaagcttactctttatgcaatacggagaaaagcaacaagttttgaaagtcaagtaaacagaaagacaagcgtttactttgcccaaagcccagttgaatcacttcttagacttttagaaaagaggctagaattcaacagcaaattttctacacagtttattaaggcagaagataaaatacttcctccaataagaaagaaaaattgagagtgaaaaaatataaactctgacaagagctgtctgggatccttaatggagtctaagaaataaaagtatttccagagcatggaaaagggtagcagactcgcttcattgacatcctccctcctttcctacatgccttgttgtgaaccactctttttctctcctagtttagtttcgcatttcctcattctccagagaaatttgctggaactcccgttcttattcatttcttatgtgctcaattatccttgggcttcgtctgccctatatctctcctaggccttaccagtctactatgctgg

SEQ ID NO: 715997 - DNA, 1282 bp, Homo sapiens
tcaccataagaattccctcaagcctagctttgcttcggtcttggaaaaacaaatgaatactgaaaataactcaagggtaacacaaaagtactgctggagcaaggagctgatgtaaacagttatggaaagatgagcttccctcaggtattcattctttgcctcctctctgttccaaacaacaggttttacatcaaaccaaggaaatgaccttttctgaatctgcttctgtctaagatgactttaagggtgaatccttctgtgtctaatggtctatagactgggtctgtagtgcctggggctgtgtgcactggtctcctctcctgccctttccttaaacttacagagatgacaggtactaccaagcctttagcttttccccaatacacattacatgtcagaacaggaagacattctgagtatatagaattgcaaggcaatatgaatagactcaggagaacaatccttccaacaaagaaagcaaaaataacgatgaatatcacaaaacacagttacaaaaataaataattttagacaagcttgataaatattctcaaaaacaaaaagatgaatattagtagcgtgaagtaggaagaaatcataaataggaaatgaaaatgttagttctgccaagtaaaayagctgcaatagtttagaataattgtaggatgaaaatagttaagaaataaattaatgcacttagttatattgaagaactcttcccaaaggtagcatgaaaggtaaatgagaagtaatacattaaaaaaagctaagagatatggatgatagaaacagaactaccaacatatgaaaaatagaggtattagaaaaagatcatatgaggtaaaagtagaacttataatgaaatacaaggacattagaaagttctaaaagttttctacaaagaagacagaaccagatccatatgaaaattcttaacagtaactttagtggcaagaaagcaatgaagtaatatttttgaagtatttaaagaaatcaaatcaacctataatttttaaaccagtcagattttaatttaaatctgaagcatacacacagcaagactacctctccagctttctttgaggttaggtgttgccctgtagttatatttcagccaagaaaaaatgggcagaagtatgccactttcaggcctggaccttaaaagtcatgtgtgatgttcatgtcccacgtatgttggccaatattgatgctcaaggcaaatttgggagctatgtattggaggtagcattgactgtcagtcctggtctctgaatggccttga

SEQ ID NO: 715998 - DNA, 1282 bp, Homo sapiens
tcaccataagaattccctcaagcctagctttgcttcggtcttggaaaaacaaatgaatactgaaaataactcaagggtaacacaaaagtactgctggagcaaggagctgatgtaaacagttatggaaagatgagcttccctcaggtattcattctttgcctcctctctgttccaaacaacaggttttacatcaaaccaaggaaatgaccttttctgaatctgcttctgtctaagatgactttaagggtgaatccttctgtgtctaatggtctatagactgggtctgtagtgcctggggctgtgtgcactggtctcctctcctgccctttccttaaacttacagagatgacaggtactaccaagcctttagcttttccccaatacacattacatgtcagaacaggaagacattctgagtatatagaattgcaaggcaatatgaatagactcaggagaacaatccttccaacaaagaaagcaaaaataacgatgaatatcacaaaacacagttacaaaaataaataattttagacaagcttgataaatattctcaaaaacaaaaagatgaatattagtagcgtgaagtaggaagaaatcataaataggaaatgaaaatgttagttctgccaagtaaaacagctgcaatagtttagaataattgtaggatgaaaatagttaagaaataaattaatgcacttagttatattgaagaactcttcccaaaggtagcatgaaaggtaaatgagaagtaatacattaaaaaaagctaagagatatggatgatagaaacagaactrccaacatatgaaaaatagaggtattagaaaaagatcatatgaggtaaaagtagaacttataatgaaatacaaggacattagaaagttctaaaagttttctacaaagaagacagaaccagatccatatgaaaattcttaacagtaactttagtggcaagaaagcaatgaagtaatatttttgaagtatttaaagaaatcaaatcaacctataatttttaaaccagtcagattttaatttaaatctgaagcatacacacagcaagactacctctccagctttctttgaggttaggtgttgccctgtagttatatttcagccaagaaaaaatgggcagaagtatgccactttcaggcctggaccttaaaagtcatgtgtgatgttcatgtcccacgtatgttggccaatattgatgctcaaggcaaatttgggagctatgtattggaggtagcattgactgtcagtcctggtctctgaatggccttga

SEQ ID NO: 715999 - DNA, 1282 bp, Homo sapiens
tcaccataagaattccctcaagcctagctttgcttcggtcttggaaaaacaaatgaatactgaaaataactcaagggtaacacaaaagtactgctggagcaaggagctgatgtaaacagttatggaaagatgagcttccctcaggtattcattctttgcctcctctctgttccaaacaacaggttttacatcaaaccaaggaaatgaccttttctgaatctgcttctgtctaagatgactttaagggtgaatccttctgtgtctaatggtctatagactgggtctgtagtgcctggggctgtgtgcactggtctcctctcctgccctttccttaaacttacagagatgacaggtactaccaagcctttagcttttccccaatacacattacatgtcagaacaggaagacattctgagtatatagaattgcaaggcaatatgaatagactcaggagaacaatccttccaacaaagaaagcaaaaataacgatgaatatcacaaaacacagttacaaaaataaataattttagacaagcttgataaatattctcaaaaacaaaaagatgaatattagtagcgtgaagtaggaagaaatcataaataggaaatgaaaatgttagttctgccaagtaaaacagctgcaatagtttagaataattgtaggatgaaaatagttaagaaataaattaatgcacttagttatattgaagaactcttcccaaaggtagcatgaaaggtaaatgagaagtaatacattaaaaaaagctaagagatatggatgatagaaacagaactaccaacatatgaaaaatagaggtattagaaaaagatcatatgaggtaaaagtagaacttataatgaaatacaaggacattagaaagttctaaaagttttctacaaagaagacagaaccagatccatatgaaaattcttaacagtaactttagtggcaagaaagcaatgaagtaatatttttgaagtatttaaagaaatcaaatcaacctataatttttaaaccagtcagattttaatttaaatctgaagcatacacacagcaagactacctctccagctttctttgaggttaggtgttgccctgtagttatatttcagccaagaaaaaatgggcagaagtatgccactttcaggcctggaccttaaaagtcatgtgtgatgttcatgwcccacgtatgttggccaatattgatgctcaaggcaaatttgggagctatgtattggaggtagcattgactgtcagtcctggtctctgaatggccttga

SEQ ID NO: 716000 - DNA, 1706 bp, Homo sapiens
caaaatatttgatgcagaaaattgacattagttctgaaggttctgccctcctccccccacccggctcctggtagcattgagtggctcagccgctgcgcccatcgcctcaaaatagcaaatgggccgccagcctgtgcttggccaggcggacatgacgagccgcctgtggggctgaggctgcctggccctgctgggaccctgccctggctgcttgggcggcacacagctgcaccccaggcccgtcccccatttccagtgtccctggccctggtgggagcggccgtgctgggccgtcgtggagccttctgtgcgtttccatgcatgatgcacctggctagagcctgtctcccaacacctgggctgggggcacagcacagagcgccgagcttgcgggctggggattggggctgggtgaggccagcgtgtcctgccccctgggctgttgtcagggcctcacccatctgcagagcctctgaggggccctcctgggcaggggccaggccggcccagatggtggagccccctgcttgaggggcaaggtggggctctcacggccagccttgtgagcaggcctgtggcagggggaggaccaatactgggagcagcaggctcatggtacagagggggctgctgacctgcagggcccagcttgtgcccaggtgaagctcagcagccccttttagcctcagcgcagggctggctgggcccggccgatgctggcccctctgcaagcattttcatccactttccggcccatagcggggagagcgcttgctaggccctgtccaggccttagtgctgggatggtgtgtgcgtgtgtgtgtgggcacacacgtgtgtccctgagtgtgtgtgtgccctgggagccctgtacacgcgtgcatgtgcgtgtgcctgtgcttgtgtgtgaccgtcatacatgagtgcccgtgtgcrtgcctgtgtgtcccacacgtgcctgcgttggccctcgggtacccaccgtggacacccaccctgggtaattcatgttgaacctcatgttgacctcaagcccctcctaatctctccccagccccatccctcccatgtggttccaggtctgtgtctgtccatgggtgtgagtccatctctgagtccagaagtcagcgcctgctggctttggcttcctggtagagcagcgaagcttgggacccagcccttggtgtgggggcagccggagctgtgggcttttgagagggggctggtgcgtgagcgcccgggaggaacccctgtcttcttccccgccggctgcaccggcagacccagaactcatgtatttgctcctggttcccagtctcggggaccctggccggcacgcgtcctcaaatgcggcttttttcagatgccggataattttcaaaacagaaagtagtttcaaggttgagaagataccattatggaaaacaaatagcggtcaagcttagattcgtggcttttcacttgcaatcaatgtccctggtggagggaaaggacaaagggaaggagtcacaggctcagggagggcgctcgccctcatggcttcatgttcacctgcaggaaaaagaaaaaccgtcaggcccttggccttcatggatggtagcctgactccctgagccctgggccaggctcccaggaagcagcgttgctgtggaagctgacgtttgggtccctttctcgccacctagctggcctgtccagcgaaatcc

SEQ ID NO: 716001 - DNA, 947 bp, Homo sapiens
tagcttttctgttttaaatacactcttcttcagttcaagaacattatcttgactttttttttcccagccttccccccaccatataggacttggtgcagtaataagcacacatttatttaattttgtatattaggatattttcacatccttaaaggcaatayataaaataagcattgatgatgtactttatgtaaaacaaagagtcagatgtttgcttgaataaacaatttaacatcttatagtaggttaatatgagactgtgttattcaaaaagcaagtagaaataacttataattacaatgtaccattatgtggagttgttgattctgcagcactgaatacataaacatttactgaacattgattatattcgcacccctgcgttagtttattttgtttagtttcgaagagctttattgagatacaactcatgtatcatactttcatctatgtaaattgtgaaattctatgtttccaattatattcacaggtttgagtaagcatcatcacaatctcattttaaaatattgttatctcccttaaaaaattacccattagctgttactccctattctctcacacagacaatctcgtaactcctaatctaagcaaccataatataggtactctatagatttgcctatttttgtcacttcatagaaatgaaaacatatgaagcacatacaagtttctagtaggtttagcttaagatattgatgaattgttttatatatttctatagattatttccaatttctccattctcttcaaatacctaaccttttcactttcagcagatgtctttgattcctcctttaagaaggaaatagaaatatcagaaaagggttttccaacctccttctgccaaacttagcaacttacaagcagtgatagaattttttctcattcttttttgttgtaatatacattttccctctattgtcctt

SEQ ID NO: 716002 - DNA, 1290 bp, Homo sapiens
tgttctcacatatttgtgggagctaaaaattaaagcaattgaacttaggagaatagagagtaaaaggatggttaccagaccctggaaagtgctgtggaggagtggtgaggaagcacggatgcttaatgtgcacaaaaactagaaagaatgaataagacccaggatttgctaggataacagggtaactctagtaaaaaataatttaattgtacattttaaaataactaaaagagtgtaattggattgcttgaaacacaaaggataactttttgaggtgatagataagccatttaccctgatggcatcattatgcatcacattcttgtatcagaatatctcatgcaacccataaatatgtacacatactatgtacccacaaaaataaaaaataaaaaaattaattactgtcagaaaaaatcaataataaggagctaaagcactcaatagcaaagaagaaaactaaacaaataatccaattaaaaattggcaaaaggcctgagttgacatttctcaaaagaaaacatgcaaatgccttctttaatttctttcagtaatgttcatttctaatttttgtgtgtgcattgtagatgattatgttctctacgtattacattggatttaatcccaaatgtttgctttttttgttgctattgaacttaaactttaaaaatggaattcatttgctcttatttagacattaggttgagttttacatgttacataatattcaggcaccttgcaaaaggcattagttctaatagtttatatagagattttctataatattgcatcatacataattatggcatatgtacccaggcagagttttattgcttcttccaaattcttacatcttttatttgttttttttttttttttggtattgcttataagatagaacttttagcgtgtcaaacagaagtgttgatagcatacacttttatctcttcacattctgaaagaaatagccttcaccattacataatgacattacttgttattgctttaaaatatcccttatttttctactttgataaatgttttatttatttttaaaacataagtggatttttctcctccaacgttctgatcagataaatgttctcttttattctgttaatctgagaaattaatttaatggattttctcatacttagacaacattttattcctgagtcaccctaaacattccatattacctccttagaatgctgttggatccctttagtcataattagtaaaggtgattctcaattatgtaygtgagactgatttgaaatgtctattttt

SEQ ID NO: 716003 - DNA, 927 bp, Homo sapiens
tattcattaataagaacacttaattgaattaatcattttgatatgtgctacttgggtcataaggaggttaacatgaaattaaacaggttatctgcacataattcaaaatgactgacccttttgaaaactgttgtttttagagtaggataaaaatcaagtggaccaatcatgtcaggaaagtctttttttcccttcctcattctagaaatcagaatcttgactacattgccacacagagatcatgcagagcagggcattatttgctggaactaaagaaaggctctttaattcaagacttcaaataaaatagagtatattttttgagacaatccaaactctaaaattaaattaaacagcctcatacagagcatgatggtttagcagtgtacaccattgctatattgtacaggaacaytgtctatatcagttacgaaggctatctacgaggattctgctataaacttccagttcctcaagcaaatacaacccatgaactaggcagccaggcaactaaataatatatttgtgatataatctggctctgtctgtgttttccacactcttctcattccattctgttccggattgaaatagtaggagtctgttttagtactcttactacctagaattcatgcatcacaaatcctcaaagtcttcactatagcttgcaacaattaatttctatgaaacacctcgctccttgtattagttccttttcacactgctgataaagatatactggagactgggcaatttacaaaagaggtttaattggacttacagttccacgtggctggggaagcctcacaatcatggcggaaagcaaggaggagaaagtcacatcttacatgcatgatagcaggcaaaaagagaaagcttgtgcagggaaactcccttttatagaactatcagatctcctgagactta

SEQ ID NO: 716004 - DNA, 1633 bp, Homo sapiens
tgggcaaaggtatgttggctgcataaatgtcttcttttgaacaaacgtgtgagaaaaagctcatcatcactagtcattagagaaatgcaaatcaaaaccacaatgggataccatctcaagccagttagaatgaatggtgatcattaaaaagtcagaatttttaaaaataagtaagaccacatacatgaagggagaatcacagaaaaaatgtactgcgaagctgagactttgcaacaaaggctaaatgagttcccaatattcctaatttgcatatttatctgtattaaaaaatactgtaggtacttggaattatagaaagacctcaaaatatatttgtatattaattaagacaaatgtctggctaaccatttaagataagtattgtatacattgctaacactattccccaaatctcttaaatttgagtaagaaagtatcacttcatarcacatgcacgttgtccacatgtaccctaaaacttaaagtataattaaaaaaaaaaaaaagaaagtgtcactgtatgtgtacttgcagaaattatgcaagccattcatttttttttgtgctgccctcaaatggtatgttagttgttatgagaaaaaagctcagatgagacacaacaatcctggataaaggattatttgcatgtgtgcgtgcgtgcgtgtgtatgtgtgtgtgtgttttaagaagtttcctccttgaaacccagaactgatcaagataaatgtgcataagaaattcagagcctttggaaaagcagagaacaaggctaaaataatccacaatattttaaatttaaaatgaagattatcttggttgaatcaaggtgtcattgatgaagtctactgatactaaagaacgaaagacggaaatgtatatttgtgatggttagctggattaaaacaagggttctgaaacaagtattatcaaaaacaagttttatcagaagtgggccagtacctgaatagagtattggaagagaatatgaatgaagctaaaatgctcttgaaaccaaaccacactggcatgccatgtagtaagaaataatgattgagcaagagtcacctaagacagttcactactggaacatttaaattgcaacctgaaatgtagccttatgagataacagattctaagacaggaagagaaaaaaaataccacttagacaaatgtaataaaaagtaccttacaaaaaaaaaaagggtataccatagtcttctcaaaataatgaatcacgaagaagaattgtacatgcatctgtaaagacttcagaagaatacagtttaagtcaagaattatcttgtcaggaaagttgaataaaataaacaaatatttttaaattagttagaagtcttggaatatagaataatctcttattagaaatataaatctagccaaaaagaagacaaggtaaaagaatcatcattgagtactgtgtccatttaggtttactaatgagccaaggtgtaagtgaagaacagtggaaaaaataagattgcagataaatacggtgattgactcaactttttcttaatgcaaaggtaaaataatcaaataaaaattattaaatcaaaaatggtattaagaaaagtattggtcaggtgtgatggctcactcctgtaatctcagaact

SEQ ID NO: 716005 - DNA, 1633 bp, Homo sapiens
tgggcaaaggtatgttggctgcataaatgtcttcttttgaacaaacgtgtgagaaaaagctcatcatcactagtcattagagaaatgcaaatcaaaaccacaatgggataccatctcaagccagttagaatgaatggtgatcattaaaaagtcagaatttttaaaaataagtaagaccacatacatgaagggagaatcacagaaaaaatgtactgcgaagctgagactttgcaacaaaggctaaatgagttcccaatattcctaatttgcatatttatctgtattaaaaaatactgtaggtacttggaattatagaaagacctcaaaatatatttgtatattaattaagacaaatgtctggctaaccatttaagataagtattgtatacattgctaacactattccccaaatctcttaaatttgagtaagaaagtatcacttcataacacatgcacgttgtccacatgtaccctaaaacttaaagtataattaaaaaaaaaaaaaagaaagtgtcactgtatgtgtacttgcagaaattatgcaagccattcatttttwtttgtgctgccctcaaatggtatgttagttgttatgagaaaaaagctcagatgagacacaacaatcctggataaaggattatttgcatgtgtgcgtgcgtgcgtgtgtatgtgtgtgtgtgttttaagaagtttcctccttgaaacccagaactgatcaagataaatgtgcataagaaattcagagcctttggaaaagcagagaacaaggctaaaataatccacaatattttaaatttaaaatgaagattatcttggttgaatcaaggtgtcattgatgaagtctactgatactaaagaacgaaagacggaaatgtatatttgtgatggttagctggattaaaacaagggttctgaaacaagtattatcaaaaacaagttttatcagaagtgggccagtacctgaatagagtattggaagagaatatgaatgaagctaaaatgctcttgaaaccaaaccacactggcatgccatgtagtaagaaataatgattgagcaagagtcacctaagacagttcactactggaacatttaaattgcaacctgaaatgtagccttatgagataacagattctaagacaggaagagaaaaaaaataccacttagacaaatgtaataaaaagtaccttacaaaaaaaaaaagggtataccatagtcttctcaaaataatgaatcacgaagaagaattgtacatgcatctgtaaagacttcagaagaatacagtttaagtcaagaattatcttgtcaggaaagttgaataaaataaacaaatatttttaaattagttagaagtcttggaatatagaataatctcttattagaaatataaatctagccaaaaagaagacaaggtaaaagaatcatcattgagtactgtgtccatttaggtttactaatgagccaaggtgtaagtgaagaacagtggaaaaaataagattgcagataaatacggtgattgactcaactttttcttaatgcaaaggtaaaataatcaaataaaaattattaaatcaaaaatggtattaagaaaagtattggtcaggtgtgatggctcactcctgtaatctcagaact

SEQ ID NO: 716006 - DNA, 1633 bp, Homo sapiens
tgggcaaaggtatgttggctgcataaatgtcttcttttgaacaaacgtgtgagaaaaagctcatcatcactagtcattagagaaatgcaaatcaaaaccacaatgggataccatctcaagccagttagaatgaatggtgatcattaaaaagtcagaatttttaaaaataagtaagaccacatacatgaagggagaatcacagaaaaaatgtactgcgaagctgagactttgcaacaaaggctaaatgagttcccaatattcctaatttgcatatttatctgtattaaaaaatactgtaggtacttggaattatagaaagacctcaaaatatatttgtatattaattaagacaaatgtctggctaaccatttaagataagtattgtatacattgctaacactattccccaaatctcttaaatttgagtaagaaagtatcacttcataacacatgcacgttgtccacatgtaccctaaaacttaaagtataattaaaaaaaaaaaaaagaaagtgtcactgtatgtgtacttgcagaaattatgcaagccattcatttttttttgtgctgccctcaaatggtatgttagttgttatgagaaaaaagctcagatgagacacaacaatcctggataaaggattatttgcatgtgtgcgtgcgtgcgtgtgtatgtgtgtgtgtgttttaagaagtttcctccttgaaacccagaactgatcaagwtaaatgtgcataagaaattcagagcctttggaaaagcagagaacaaggctaaaataatccacaatattttaaatttaaaatgaagattatcttggttgaatcaaggtgtcattgatgaagtctactgatactaaagaacgaaagacggaaatgtatatttgtgatggttagctggattaaaacaagggttctgaaacaagtattatcaaaaacaagttttatcagaagtgggccagtacctgaatagagtattggaagagaatatgaatgaagctaaaatgctcttgaaaccaaaccacactggcatgccatgtagtaagaaataatgattgagcaagagtcacctaagacagttcactactggaacatttaaattgcaacctgaaatgtagccttatgagataacagattctaagacaggaagagaaaaaaaataccacttagacaaatgtaataaaaagtaccttacaaaaaaaaaaagggtataccatagtcttctcaaaataatgaatcacgaagaagaattgtacatgcatctgtaaagacttcagaagaatacagtttaagtcaagaattatcttgtcaggaaagttgaataaaataaacaaatatttttaaattagttagaagtcttggaatatagaataatctcttattagaaatataaatctagccaaaaagaagacaaggtaaaagaatcatcattgagtactgtgtccatttaggtttactaatgagccaaggtgtaagtgaagaacagtggaaaaaataagattgcagataaatacggtgattgactcaactttttcttaatgcaaaggtaaaataatcaaataaaaattattaaatcaaaaatggtattaagaaaagtattggtcaggtgtgatggctcactcctgtaatctcagaact

SEQ ID NO: 716007 - DNA, 1633 bp, Homo sapiens
tgggcaaaggtatgttggctgcataaatgtcttcttttgaacaaacgtgtgagaaaaagctcatcatcactagtcattagagaaatgcaaatcaaaaccacaatgggataccatctcaagccagttagaatgaatggtgatcattaaaaagtcagaatttttaaaaataagtaagaccacatacatgaagggagaatcacagaaaaaatgtactgcgaagctgagactttgcaacaaaggctaaatgagttcccaatattcctaatttgcatatttatctgtattaaaaaatactgtaggtacttggaattatagaaagacctcaaaatatatttgtatattaattaagacaaatgtctggctaaccatttaagataagtattgtatacattgctaacactattccccaaatctcttaaatttgagtaagaaagtatcacttcataacacatgcacgttgtccacatgtaccctaaaacttaaagtataattaaaaaaaaaaaaaagaaagtgtcactgtatgtgtacttgcagaaattatgcaagccattcatttttttttgtgctgccctcaaatggtatgttagttgttatgagaaaaaagctcagatgagacacaacaatcctggataaaggattatttgcatgtgtgcgtgcgtgcgtgtgtatgtgtgtgtgtgttttaagaagtttcctccttgaaacccagaactgatcaagataaatgtgcataagaaattcagagcctttggaaaagcagagaacaaggctaaaataatccacaatattttaaatttaaaatgaagattatcttggttgaatcaaggtgtcattgatgaagtctactgatactaaagaacgaaagacggaaatgtatatttgtgatggttagctggattaaaacaagggttctgaaacaagtattatcaaaaacaagttttatcagaagtgggccagtacctgaatagagtattggaagagaatatgaatgaagctaaaatgctcttgaaaccaaaccacactggcatgccatgtagtaagaaataatgattgagcaagagtcacctaagacagttcactactggaacatttaaattgcaacctgaaatgtagccttatgagataacagattctaagacaggaagagaaaaaaaataccacttagacaaatgtaataaaaagtaccttacaaaaaaaaaaagggtataccatagtcttctcaaaataatgaatcacgaagaagaattgtacatgcatctgtaaagacttcagaagaatacagtttaagtcaagaattatcttgtcaggaaagttgaataaaataaacaaatatttttaaattagttagaagtcttggaatatagaataatctcttattagaaatataaatcyagccaaaaagaagacaaggtaaaagaatcatcattgagtactgtgtccatttaggtttactaatgagccaaggtgtaagtgaagaacagtggaaaaaataagattgcagataaatacggtgattgactcaactttttcttaatgcaaaggtaaaataatcaaataaaaattattaaatcaaaaatggtattaagaaaagtattggtcaggtgtgatggctcactcctgtaatctcagaact

SEQ ID NO: 716008 - DNA, 588 bp, Homo sapiens
catgttctcattcataagtgggagttgaataattttaacacatggacacagggaggggaacatcacacactggtacctgtcaagggagtagggggctaggggagggatagcattaggagaaatatctaatgtagatgatgggttgatgggtgcaacaaaccaccatggcacatgtatacctatgtaacaaacctgcacattctgcaacatgtatcccagaacttagagtataataaaaatattaaaaaattaaattattgaagaaataactccaactattctgtttatcttatatatttttacttagcaaaggaaaactttagkaagaatgctacttgataagaagaaaagtaatttctcaagcacataccgaaacttgaaggtgattgaaccaaaaataataggtgggcaacaccgaatgagttggaggagtatgagaaagatgtgtgggccaaagctatctggttatattttgatgttgccaatatcacaaagtcaaaattttaattttcttatttaatatatttgttggccagagagctatttttgtatcaatgtgccttgcacgtacgttaaaaaaatttttga

SEQ ID NO: 716009 - DNA, 1044 bp, Homo sapiens
ttttaatggtttgcaaaaatactaattatcaggattacctgggggagcttttcaaaagcctggtctccaccctaaacccactcagtaaggatctctggaggttggtcaatgtgaaccaatggctagagcctgcatgatgctcaccctttctactaagcaaagagaaattcttacaggaatgaaatgaggccagcttctgtctcttgattctctaatgattttttatgttgtaggggaagaaaagggtggtgtgggacattgtgctaagaactaaaatctggacacatgttagggaacatgtataccataaaatgattcatggaatatactcagcaagcttataatgtataatatatccaaacaatatttgttgttagatatgtttagacataagttctatgtattgttctcacagtattttaataatacactagtgtgttattatgattctgttcttaaaaattaatacctgaggatgtggtattattgctgggagataatagctccttgttgcagagcagaattcaaatataaggtagtatgagcatctactgttcttatccattaggctccctctttccaccaggaaaaatgttctttcctgatccatgtgatatgggagtaagtgtcaattataattataggatctttcctgacatctggccacaagagtgagcaaatgatccagtccttggcttcccaattatgatattccatactgcaattgatccaaggatcaaacaagatcaaaccccgaagtagggggtcacactgtgatatcgaatatatggatcctgagtgactgtttttcttctttctgagattttgacttgggagaacyttgaaacctagaacttctcagaatccttttcatttgttcccaattaagtaggagccatggtttagaggaactagcccaaaattcagctccagggatggacacaaagtttcataactatattctcatctgcctggccacagtgaccatttccatcagtgtaatgtgcaggatttctatttggtgactagggtaaaagggaaccc

SEQ ID NO: 716010 - DNA, 630 bp, Homo sapiens
cctggtgagtaaagaattaattcttcaaacatatattgctttattcaatatgaaaattacttttatttaattttaattgacaagttattattgtgtatatttatgaggtaaaatgtgattttttaaaaaagatatggggtcttgctctatcacaaggttagagtgtaatggcatatcagagctgactgcagcctcaaattccttgactcaagtgatattcccatctcagtctcccaggtagctgggattacagacacaagttactgtgcctgggttattaaaataatcttcatagattaagaaaagatactctccagttgtttttgttgccctctcatttcaaactccaatgtatttttggtttcttctcatacataatactcaagctaatagttatgatgaattaatttatctgtaacatgtactgtctttattaatgttwtattgcctagcatgcattccaaacttagtattattaagtttatctgcaagtttgaatagctcatcaagatatgttttgaaatttggatagaccatcaattccttggaatagccaaccttgttactcttcctttagaatatactcaaaatccaacaatttctctgtaatttcactgtcatgaaccaatc

SEQ ID NO: 716011 - DNA, 645 bp, Homo sapiens
tttttaatagagacaggattttaccatgttagctaggcttgtctccaaatcctggcctcaagtgatctgaccgcctcagcctcccaaagtgctagaattacaggcgtgagccaccatgcccagccaatatgtgctcttaaaaaggagttgtattctacactaaggtgtactattatataaacgtaaaaacttctatcaaaggggttgctagtgttgttcacatcatcatctactgatttttttggtgtagatataagtaactataagagtcatgtcctaatctaactgtgattatagatttgtctgttttcttctttatttctgttttgctttatctattttgaatctctgttattaggcatatacctttctataattgtgtgtttgatgaaatgatccttctaacatttagaaatatcacttttgctttttgttcacatactagcttatatcttgctgttagaaatataaacactccactttcatgtgcttcaatctgcatatagtataacttccttttactttctttccctttgttcaattaatttctttttcagtatatattaacatttttattaaatgtaatatacatatagaaaaaagtatcgtaattcttcaaactgaaaaaacccacwtatagcttcc

SEQ ID NO: 716012 - DNA, 645 bp, Homo sapiens
tttttaatagagacaggattttaccatgttagctaggcttgtctccaaatcctggcctcaagtgatctgaccgcctcagcctcccaaagtgctagaattacaggcgtgagccaccatgcccagccaatatgtgctcttaaaaaggagttgtattctacactaaggtgtactattatataaacgtaaaaacttctatcaaaggggttgctagtgttgttcacatcatcatctactgatttttttggtgtagatataagtaactataagagtcatgtcctaatctaactgtgattatagatttgtctgttttcttctttatttctgttttgctttatctattttgaatctctgttattaggcatatacctttctataattgtgtgtttgatgaaatgatccttctaacatttagaaatatcacttttgctttttgttcacatactagcttatatcttgctgttagaaatataaacactccactttcatgtgcttcaatctgcatatagtataacttccttttactttctttccctttgttcaattaatttctttttcagtatatattaacatttttattaaatgtaatatacatatagaaaaaagtatcgtaattcttcaaactgaaaaaacccactyatagcttcc

SEQ ID NO: 716013 - DNA, 843 bp, Homo sapiens
ggcttagttgaagaaatgcattaatttcgtctaagttgaccaattaatgtcataaaacggctcataatatttccctaggatttgcctttcagatctgtagagatacgttatcttctactccaatatttatcagtattattaggtgcttattaatcatataaatcttgtcaaactaccaacttctggatttttaaatgattttctttcctatttcactaactttcacacatctttatttctccctgttgcttactttggctttaatttgctcaccttttctctgtcatcttaagatatacacatacataattaattctagagtcgtcttttttcctaatgttggcattttgctataaacatctctttaagtactactttagtatgatcctacaaattacaatatgtcgtgagattcaatcattcatttaaaaatactttttcactgtaatttcatctttggcagaggttatttagaagtctatttttttttaatttccaatatatgaagcttttattcatacgtgaaattttcattgtttttagggaatcaactcggccagccaccggtggctcawgcctgtaatcccagcactttgggaggccaatgtgggtggatcacgaagtcaagagatgagaccagcctggccaacatggtgaaaccccatctctactaaaaatacaaaaattagctgggcatggtggcaggcacctgtagtcccagctactcgggaggctaaggcagaagaatcacttgaaccggggaggcagagtttgcaatgagccaagatcacgccactgcactccaacctgggcgacagagtgagactccatctcaaaaaaaaa

SEQ ID NO: 716014 - DNA, 911 bp, Homo sapiens
tttttttttttttttttttttttttgagacagtcttgctctctcgcccaggctggagtgcaatggcgcgatctcagctcactgcaacctccgcctcccgggttcaagtgattctcctgcctcagcctcctgagtagctgggattacacgcacccaacatcatgcccagctaatttttgtatttttatagagaggggtttcaccatgttggccaccaggctggtcttgaactcctgacctcaggtgatctgcccacctcagtatcccaaagtgctgggattacaggtgtgagccactgtgcccagcctgtgcatctttttttaaagaagtgtctattcacatcctttgccaagttataattagggagtgtgtgtgtgtgtttaacatgcttctcaggaaagtattctttgtgggttgtttttattgttgaagtgtaagagttcttttctcttacttttctttcttttttttttttttttagagtgagtcttgctctgtcacccaggctggagtgcagtggcatgatctcagctcactgcatcctctgcctcctgggttcaagcarttctccctgtctcagcctccagagtagccgggattacagatgaccacaactgtgcccggctaatttttttctatttttagtagagacggggattcaccatattggccaggctggtctcgaactcctgacctcaggtgatccgcctgcctcggccttccaaaatgctgggattacaggcatgagccaccttttctattctttcttttcttttattttcagacggtctcgctgtgtcccccaagctagagtgcaatggtgcaatctcggctcactgcaacctctgcctctcaggctcaagagattcttatgcctcagcctcccaagtagctgggattacaggcaatgca

SEQ ID NO: 716015 - DNA, 601 bp, Homo sapiens
aaaaaaaaaaaaagattaaagtaaaatacttttattgtctgttttcatttgtattttgatattgtatctggttctctatgttaatggaatgaagaagtactcatgtagttcatttacaacctgaaattaaattttaataagtatcagcttgaaactaagtttatttttaaaacttttgctaagatagtctcttgtgttcatttagttatctaaatgcatcttcagagttagcctgggcttctgggagttctagatagatctttgaatgttgtcattttaagatatcttccagtatagagagctatatgataaaaatatatttctggccgggcgtggtggcccacgcctataatcccagcactttgggaggctgaggcagacggatcatgaggttgagaccatcctggctaacacggtgaaaccccgtctctactaaaaatacaaaaaattagccgggcgtggtggtgcctatagtcccagctgctcaggaagctgaggcaggagaatggcrtgaacccgggaggcggtgcttgcagtgagccaagatcgcgccactgcactccatcctgggcaacagagtgagactccgtctcaaaaaaaa

SEQ ID NO: 716016 - DNA, 601 bp, Homo sapiens
aaaaaaaaaaaaagattaaagtaaaatacttttattgtctgttttcatttgtattttgatattgtatctggttctctatgttaatggaatgaagaagtactcatgtagttcatttacaacctgaaattaaattttaataagtatcagcttgaaactaagtttatttttaaaacttttgctaagatagtctcttgtgttcatttagttatctaaatgcatcttcagagttagcctgggcttctgggagttctagatagatctttgaatgttgtcattttaagatatcttccagtatagagagctatatgataaaaatatatttctggccgggcgtggtggcccacgcctataatcccagcactttgggaggctgaggcagacggatcatgaggttgagaccatcctggctaacacggtgaaaccccgtctctactaaaaatacaaaaaattagccgggcgtggtggtgcctatagtcccagctgctcaggaagctgaggcaggagaatggcgtgaacccgggaggcggtgcttgcagtgagccragatcgcgccactgcactccatcctgggcaacagagtgagactccgtctcaaaaaaaa

SEQ ID NO: 716017 - DNA, 1400 bp, Homo sapiens
ctttgctctggttcccgcacctgtccgttcgtgtggtccctcccgtaagggattgagtggcagccgagaaaacgagccaccccctgtgccagtcctgagaagggtcaagggaactctccagtctcctatgcaggtttatatgcaygatttttgcatatgcttttatatattttatatgccacttgaaaaatttagagtgctgccaatatctttccatgccaataggcacactttaggacatcatttacaactgtacctgaatatgtaaaatcacctttcctaacgatcaacgggactgaacaggaacatggatgcagaaagatcgagtacaaatgggaattcagcacgttgtaaagaaggctctgtgagtcactggggaaaagatgtatgacttagtgaatgcgttgcatcgatagtgacgtgctcctcaaactcaaataaattccaagtatggcaggtcagaaatgtaccggggaaaaaatgtttgtgacactgatgacaaacagctaacatgacgcagcataagacaaagaaagggcccttcctaggtcgaagaaacatgggcccaggctaagggaaagccagttcaaaaggcagcagacaatgccaagaaacattagcaaagtggccgggagcggtggctcaggcttgtaatcccagcactttgagaggctgaggcgggctgatcacgaggtcaagagattgagaccatcctggccaacatggtgaaaccctgtctctactaaaaatacaaaaattacctgggcgtggtggcgcccgcctatagtcccagctacttgggaggctgaggcaggagaatcacttgaacccgggaggcagaggttgcagtgagccaattgagccgagatcgcgctactgcactccagcctggagacagagcgagactccgtctcaaaaaaaaaaaaaaaaaaaaaagagacattagcaaaatgactcagtgttacttaccattaaatatgtaagttaaagcagatgctgctttcccaccgaaaggctgatggtaaccaatgccgacaggacatgaagaaatagttcgcacaccctacggggcaaataaaactgctacggtcccttcagaggtcaactgagcagtatctcaaattaaaaaaggaattccatggtgaggatttcccccgtgggtgcactcactggagtacacaagacacaggacacagattgggtgaaagcggcatcgttcacaaagacagacccacagctcacatttcccacagcaggggaggggcacacacagagggggtgatttacaggtaaactacttaaagtcattcggtcactaaatacctaccgagtgcctgtaacacaccaaacactactgtaagcattgataacagaaggatctctactgtaagtgaaaaaag

SEQ ID NO: 716018 - DNA, 845 bp, Homo sapiens
tagaataaatcttacagtggacaaaggccggaattagcagttcaaacaggtaactaaaagtcaataaatatactaaaatgttctaggcatgtaacattcaacaaaacaagataaaaacgaaaaacgtatgttttgctgttgtttaaatatttaatttatgttcatttacatatatataaaatttgtgaaatgtaaagtattcaaataggtataaatgtaacaattaaatgaaacagaaaaattttcctttatcttacctaatgtcattatgctttttatctctccctaaaggcagcgtctgttaacattctgctatgcacattttaataagtacactttaaacgaacagtaggctcttaytcattttatggttttggatcttgcttttcatttgataagaagattgagagacattttcccaccccatatatgtgtttctgaatttataactttttccgaataccatcatgtgttatatattctagattctccattatgtattcaccattcctatagagatattgatttgccctcacttgattgccatgcaaaaaatttttggggagacaaccttattgatacaatttggttcagtagacatgtgtagttttagcactcaccctgtctcttgggacaaccttcctcctttttccaaacttcaattcagaaatcacagagttagtcatctatttttagaactttgtattattttatcgagtattgttcatgatatgaatgcaaatgcaagtaaccagtaaaaattaagtattgttgctttttgattccataattctgccttaatttggtcatatttccttattctaataaaatatcattctattaag

SEQ ID NO: 716019 - DNA, 595 bp, Homo sapiens
aattcatcttatgcaagtatgttacttaaaccatacagttattgcttgatattaaatgtttttttaattgtcagataaaagtgtatgtacttactktgtacataatgagctctgaaatatacatacattgcagaatgatttgatctagataactaacacatgcattacctcacatagctattattttcctggtaagaacacttaatattcactgttttagcattaccaagaatacagtatattaataactatagtcatttattttatgagatcaacattttaaaatttcacatatgagatctcacttatgaagtagttctctttctttgcctggcttatttcacttaccatagtgttctccaggtttgcccatactgtaaatgacataatttccttcttttccttggttgaatagtatgtaataggattgaattgtgtatatgacccacattttctttgtccgttcatctatggatacatacttaggtttagtccatatcttggctgttgtaaataaggctgcaataaacatgagagtgcaaatatttcttttatataatgcttttatttcctttgatgtatatccagcagtggg

SEQ ID NO: 716020 - DNA, 814 bp, Homo sapiens
gatgaaacccaatctctaccaaaaatacaaaaattagctgggtatggtggtgcatgcctgtaatcccagctacttgggaggctgaggcaggagaatcaaaccaacttgggaggcagaagttgcagtgagccaagattgtgccattgcacttgagcctgggtggcagagcaggactccatctcaaacaacaacaataacaaaaaacaaaaaaaaccaaaagggataggtttttaaattattttgatattaaatttttctgtagaaaatttgtgccaatttgtatctcactggtagtaatgttagtgcttcttttaagcacagctaagaaaacactcctttgtcatttttattttattttgggtgggggggacagaattttgctctgacacccaggctgaagtacagtgatcacagctcactgcagcctcaaactcctgggctcaagtgaatttcccactttgtcctcccaaagtgcttggattataggtgggagccatagtgcctggcctatttgtaaacatgtcagagatctcagttcatcctggggtttaatcttttgatgttatcttattattcttttacatttgtcattttacatttgtcattttacatttccatttttaaataagcccttttatttaaaagccaaccatagatgctttgggcaatcacatttatgtgttccatgtagagctgttttaatggctwtgttatagtgctgtgtgaagattgtggcagaaatagaaattataagtgtgaagatcatgcaattatttaaaaaatctgtattatttataaaaccatgtgcactatg

SEQ ID NO: 716021 - DNA, 814 bp, Homo sapiens
gatgaaacccaatctctaccaaaaatacaaaaattagctgggtatggtggtgcatgcctgtaatcccagctacttgggaggctgaggcaggagaatcaaaccaacttgggaggcagaagttgcagtgagccaagattgtgccattgcacttgagcctgggtggcagagcaggactccatctcaaacaacaacaataacaaaaaacaaaaaaaaccaaaagggataggtttttaaattattttgatattaaatttttctgtagaaaatttgtgccaatttgtatctcactggtagtaatgttagtgcttcttttaagcacagctaagaaaacactcctttgtcatttttattttattttgggtgggggggacagaattttgctctgacacccaggctgaagtacagtgatcacagctcactgcagcctcaaactcctgggctcaagtgaatttcccactttgtcctcccaaagtgcttggattataggtgggagccatagtgcctggcctatttgtaaacatgtcagagatctcagttcatcctggggtttaatcttttgatgttatcttattattcttttacatttgtcattttacatttgtcattttacatttccatttttaaataagcccttttatttaaaagccaaccatagatgctttgggcaatcacatttatgtgttccatgtagagctgttttaatggctatgtyatagtgctgtgtgaagattgtggcagaaatagaaattataagtgtgaagatcatgcaattatttaaaaaatctgtattatttataaaaccatgtgcactatg

SEQ ID NO: 716022 - DNA, 1142 bp, Homo sapiens
tgagtgatatgtgaaatttaagcattcttgattccaaggattatctaacaaagggtgcctcctttttctttgtccctacataggtttaaagtacctacctatcttttttatttgtgcattattatttcataatgttatatatgcttgtttgtgctatgcgagcactgaggtttgagaagtttaaggctgttagactggaaagggaataagggttacaatcttctctctatgaccttttgtaatttataagtccaaatggactgaacaacactgaataattaattcatgctgtgtttaagcccctatgcttgcatgttttacacgctaattattatgaattccttccttgtgcaaatctttgattccctaacctaaatcaggttaatacagactcatatgctccaattatggtgatatctttctcttaaccttggcagaaggaacattatagtaggtcaaaaagtatctttgagtttcattgagaaattaacccataagggaattgtgctcatggttgtagtgttaattagtttcaccatgaacatattttgtggcttagttaacattcagatactctctgcatttaaataaaaatatatgccccaatatgctaaagccagtcaaatgtgatttttatttaatgatttttttcttatgattcaagtaattagcacattgcacattttgactaattaagaaaaaataaccgtcaccacaccccagtgagtcatgctggtggtgtttccccagttctaaaggtagagaagctggagagtaagaatagcttttccaytaggttgtggaaagaggaggataagagacaacagaacagaaatctgagatatctaacccttgaaaatactttcttcaaaatccacgtgctaaaatgaaaagagaaagacagataatttggattaaaacacactcaagcaaatagtttggtaagtacattctctatacacattcccattgcatattcatggttaaatattattatcaagataggacattacaatgggtgtgttctccagaaaaaataaatgttgtgtatatgatcattgcatccattagtctgattccttattagagaaaaattctaagtgtcttatacttatagaatgaaaatacgaattctctcaatg

SEQ ID NO: 716023 - DNA, 883 bp, Homo sapiens
ttttttgagacattgtctcactctgtcacccaggctggagtgcagtggtgtgatcacagctcactgccatctcagcctccccagggtcaggtgattctcctgcctcaatgtcttgagtagctgggactacaggcgcgtgccaccacgtatgctaatttttgagtttttttgtagtgagtttctgccgtattgcccaagctggtcttgaactcctgggctcaagtgatccacccacttcagcctcccaaagtgttgggattacaggtgtgagccactgtgcctggccaggaacacttctataaataatagcaacaaatgaattgggctagtttactttatactttctattgtgtaatggtttataaccagcttatgttttgargtggtgacagtgcttggtagaggcactttttattcaaaatagttattggaactaagctgacataattatttgaataatcactcggcagtctgttctgtatctgtaataaaagatgttaactggtcatttttaattttcagcatatatttgcataatgtgaaaacatttctatgtattcttaatagccaaagtttttcctatttggaatactgatgattggacagtgtcattttccttaacagtgcaatgtgaggcttattatcaaattatagaaaagtaatttgtttttgtgtaactttaaacaattctttttaagtttggcagacctgatgcccagagtcaaggtacaatcagttgaaactgttgaagggtgtacacatgaggtaagcacaaacagcatacagaaggttagtgttacaaatgggatttttctttggactatctagtatgatgatcagcaaacagtttagccatgaggaccttggaaacaataaatagttt

SEQ ID NO: 716024 - DNA, 1617 bp, Homo sapiens
tgataaaggcattaatccattcatgaggaccctgtctcttaaaggccctacctctcaacactgtttcattgtggattaaggggtcagcacattaactttagggggacacattcaaaccaaaccactggccaagaattgcagtgtgctgaataccaacccgattatctttcaactctgccttttgcacatgtaatccagtacagtgaaaagtaaataatatcttaagccatccaaatttaaatttcagttgtattgttttctttatcaaggcaggttttgtttttttatctgtgcattttaaagctaattcctacttttccatgagtaaaagtaacaaatgacagatagctgacatagccttctaaagccactaatagtttgtgtttttttaaagactgaattgttctgcccataaatgttttctcttacctacaagtgccgaataaacttaaagttgcagggttgcatactgattaacaaatatttattcagtttaacaaatgcttaatacatattatttgatagacactgtacaagaaggcagtgcaatggttaagaaagagcatgggctttggaattgtttttctcacagttaatagtggtgctaattattaaaaactaagtttcactttacttagtagtaaaatgtagataataatagttcctgtgtcctgtaattgttagacttaaatgttgtatgtaaagcaccagatgtggttattgttactatttttgtaagatagtacttttttcatgaattaagtctactagatatgttttgaaaggcagagaattatattgattatgtggtaatttttatctactttctgcttgaccatcttaaatgccacctctttacttttgctctttaaagactctttttttttttttttttctgagatggggtctcactctgttgccaggactggagtgtagtggtgcgatcatggctcactgcagcctcagcctcctgggctcaggtagtcctcctgtctcagcctcccaggtagctgggactacaggtgcacgccgcaatgcctggctaatttttttgtattttttgtagagacagggcttcgccatgttgcccatgctgttctcaaacttctggcctcaagccagccacctgcctcagcctccctaagtgctaggattacaagcttgggacaccacgcctggcctttagattcttattctttgtaatgtgtgaagtttggtatcactaactcattttgatatttctgtacccttgaattttctcctagatgaagaaaaraagatggttgaagaagtattcagtaatgcaattgattgcttatccgatgaagataaaaaactccctcaggtgagttttcagtatcagtagataaaagtgtagataataatagattgcatatattcactttacattgcttggttttattactctattgcacttttcacacactgtagcatatgggttgtgatatgcccttaatgatactttgacttttactttaaacttcaaaaaggcaataggaagaaagatttgctgcctgaaggaacttttctctgagagctagtatggtgtgaaaattactgctagtgttctcagtattacagaatttttaatgctag

SEQ ID NO: 716025 - DNA, 929 bp, Homo sapiens
gggaatactccatattgaagtattattcatagaagaagaaagtatatctaattcccttcaaatgtttcaattttcataaagtcataaacccagaaggtacattaggagttgatctcctgaaatgtaaactttggaacatctttgaacaataccagacaaaggagcatcaataaggaaagatcatgacagaatagcctacattcctctcttactattcaccaattccctttttgtctttaaatcatggcaggtaaaaccataaaggacattatgtattttcaaattcggaaaacatatgctttttagatttaataaagtacaaaaacccacattaaaaaactaaggttttattccaaaattttagttgctgtcttcattttacaaggatataaaatacttcatagatattcagatccccaagaattagaagatttgtattgtatttctagttctgccattggtttcagacacacaatatttctatgtgcttcagccccctcatgagatggaaaaaatrgatttccccaaacaaattaggaattttttcccactaaagttgtaagcaacttcctgagtgtggacaacccaaaatccctttctatccaactgtggtggttttctttatattgaacttaaaaaaaagaataaattgaccttataaattcacctaaaataatagctaaagtattattttcaacttaagaagctcttcccatcctatttgcaactccgaacaatcgttcaaaataggcagaaaaggcatcacttttcttttcacagaccagataactgaggatcaggatgttaagcaagatttcctaaggccacattacaattctgatgcctggcctagtgctcattctgctgcaatatattatttatttacccataaaccatacttttgaaaattattttctacttgtcaaaca

SEQ ID NO: 716026 - DNA, 621 bp, Homo sapiens
tcttatagagttgaaaccttgatctactaagtcacacaaaagcctggttatagtgacaagttcacaagcattaacattagactgtttcttttatgtaaattgatgactaaaattaagggaaacagattaggttagctgagttctcccttctcttgcttaaaaatttatatgaaaatctaaatttattagaagattgattagcaatatgccaattgagccagaagagttgtttaaattatcttcatggctagtcactcaactatgcaagccttgtgtggtcaagtgtaacctaacttcagagattcttatgttcatagttycatgtgcatccatgtgaagagaccaccaaacaggctttgtgtgagcaataaagctgtttatttcacctgggtgcaggtgggctgagtccgaaaagagagtcagcgaagggtgatggattatcattagttcttataggttttgggttaggcggtgaagttaagagcaatgttttgtgggcagggtggatctcacaaagtacattctcaagggtggggagaattacaaagaaccttcttaagggtggggaagattacaaagtaccttcttaagggtgggggagattacaaagtacattgatca

SEQ ID NO: 716027 - DNA, 621 bp, Homo sapiens
tccacatcaccatcacaatctgtgcagggttagtattctcctacatgctgtgtggataaaattagattaaggtgattccagagtatcaatgccccagatgaccagtaaaataaaaacaaattccctttggaagaaaatattataccaaactgaaaattacttctacaacttttttttttcttcgagacagagtctcattctgttgcccaggctggagtgcagtggcatgatctcagctcactgcagcctccgcctcccgggttcaagtgattctcctgcctcagcctcccaagtagctgggactacagacacccatcaccagaccctgctaatttttgtatttttagtagggacagggtttcaccacgttggccaggctggtctcgaactcctgacttcaggtgatctacccacctcagcctcccaaagtgctgggattacagcatgagccaccatgcccagcctctacaacatttttgcaaatacaatgayacacagtaaaaaatagccaggcactcagagacaagaaaacaatcaaacagataactgaaaataaaactcgcatgcacttcagatgttagtttttagatatagaatttaaccatactttttttgttcaaa

SEQ ID NO: 716028 - DNA, 1519 bp, Homo sapiens
cttaaggtgttatccaagtctgttggaaccttctgtggcttaacatttagcaggtatgagtgcagtcctctcttgatcttccaattccactttaatgcctaggcctaaattactttatgtcctttcayagcaacaatgggccaggaaggcatgacatgcacaaatgatgacaggcaccacacttagcatcttggaaaatgaatatgtgagtttaacacctcaaggtttttaatagctgaaatattaggagacttttttgctggaaataaatattgattgaactgattcagtaaatgcctaatatatgaggaccgtaattccttatctccctgtcagaccaatttaagatctacattttagccatgtctgtccacctctcagctttagagtttaaattcactttcttctgcagtatttcgacaactgaaagactccagttggatgactaatttcagccctatttgatctgaggatgcaaccggtagctgctctcacatcctcaagttacatgacagttatactttttacttcctcagaacatttgccaacttaataaatgttcaatgccaacattaaattctcccctgagccttagtgtaggtacatgtgcatagatataatcaggattaaccatatttcatatgccgtttcttctcccagtcacttgaagacatcgtggaggcactttgcagaagagaaccaaaagtggtgttgaaatggtaacagatcccaaagcctaacagttgagctcttgcaagcagtggccctacagttcccctaatatagggtcctaatggttcatcctacttcctttcaggtaccccttcctgaaatgaagaatatgttgcaagggaaaggtttgtaacctaaaactgttgatctagtcttcaataatggcatacatatcatagccactttctctgtgacataaatctcagagaaattgttctttccttcctcagccattgatattatttaaaaccgtgattctatttttaccttcagcttgaacaatctctgcataacaggtatgtttgtatgcatacggcatttcttcctaaaacttcaaaaatcttcaaaaaatatgtaattcttctattttcaaattccgtgagagtctgctctcctcatgtgtatgctttaggagctctgctatttccctaaactaatattacagtggtgtgatgtaccattaactacatggccatggagattcagaggtgaaagcagggattgcctgcatcttttaagtcccagtttgattttgatttcatttcataatagatcttattaatgataaaagttggcggccgggcgcggtggctcacacctgtaatcccagcactttgggaggccgaggcgggcggatcacgaggttaggagattgagaccatcctggctaaaccaggaaccccagcaaaaccctatctctactaaaaatacaaaaaaattagccaggcgtggtggcgggcgcctttggcacagcacacaaatccccagatcattaaccacagggccc

SEQ ID NO: 716029 - DNA, 1519 bp, Homo sapiens
cttaaggtgttatccaagtctgttggaaccttctgtggcttaacatttagcaggtatgagtgcagtcctctcttgatcttccaattccactttaatgcctaggcctaaattactttatgtcctttcacagcaacaatgggccaggaaggcatgacatgcacaaatgatgacaggcaccacacttagcatcttggaaaatgaatatgtgagtttaacacctcaaggtttttaatagctgaaatattaggagacttttttgctggaaataaatattgattgaactgattcagtaaatgcctaatatatgaggaccgtaattccttatctccctgtcagaccaatttaagatctacattttagccatgtctgtccacctctcagctttagagtttaaattcactttcttctgcagtatttcgacaactgaaagactccagttggatgactaatttcagccctatttgatctgaggatgcaaccggtagctgctctcacatcctcaagttacatgacagttatactttttacttcctcagaacatttgccaayttaataaatgttcaatgccaacattaaattctcccctgagccttagtgtaggtacatgtgcatagatataatcaggattaaccatatttcatatgccgtttcttctcccagtcacttgaagacatcgtggaggcactttgcagaagagaaccaaaagtggtgttgaaatggtaacagatcccaaagcctaacagttgagctcttgcaagcagtggccctacagttcccctaatatagggtcctaatggttcatcctacttcctttcaggtaccccttcctgaaatgaagaatatgttgcaagggaaaggtttgtaacctaaaactgttgatctagtcttcaataatggcatacatatcatagccactttctctgtgacataaatctcagagaaattgttctttccttcctcagccattgatattatttaaaaccgtgattctatttttaccttcagcttgaacaatctctgcataacaggtatgtttgtatgcatacggcatttcttcctaaaacttcaaaaatcttcaaaaaatatgtaattcttctattttcaaattccgtgagagtctgctctcctcatgtgtatgctttaggagctctgctatttccctaaactaatattacagtggtgtgatgtaccattaactacatggccatggagattcagaggtgaaagcagggattgcctgcatcttttaagtcccagtttgattttgatttcatttcataatagatcttattaatgataaaagttggcggccgggcgcggtggctcacacctgtaatcccagcactttgggaggccgaggcgggcggatcacgaggttaggagattgagaccatcctggctaaaccaggaaccccagcaaaaccctatctctactaaaaatacaaaaaaattagccaggcgtggtggcgggcgcctttggcacagcacacaaatccccagatcattaaccacagggccc

SEQ ID NO: 716030 - DNA, 578 bp, Homo sapiens
tcaactttttctaacatgacaactgttgaaaaataagtatcatgtacaaaaggtaaataaaagtggccttcactttgttttcatttggagtatttattcatcttataatgccttaacatggatttttaacttaatgaaatcgcccttaaatttgtcattaacagactattgttttagttttagtgttttttaactatgaaaatattgtcattgtattaaaaaataagaatttccaagttacaaaatgacagtgaaaaaaaccagccataccattccaccctcacataacagctatcaggatgaagaataatttttctctttatcakttattagttctctaacctaattttttaaggaattcatttaaaatcatggtaaaataaaatgaaaatataactaataagatagtatttgaggtgataggatttcctcctcagcaatgaaaatcttacataatcatttaaagaccggtgaagtgctgaaaatcagacaaaattacaatgtgaaaatcatcaagaggaaacaagtctattttaaaggaatgccaattagactgacaacttaccgttcaacagaaa

SEQ ID NO: 716031 - DNA, 783 bp, Homo sapiens
attttctgcatcaagaaactgtatagygtagtgcttaagagcagaaactctggagcttgaacatccagagtgggacttcaactatgatatttaaaaatgatctcacctgagcaagtcacttaactgctcaggacctccgtttctccatctgagtatgggtataataatacagccttccttgtagggctgttatgatgaccatacaagttactctaagtgtttagaatgtgtcctggcacaaaaataatagctgtcagctattacattcaagattagtccagattccagttatattcacacctcaagctaaggattcctcctctataaaattcctcctagtttctgctttttgtgctgctttcttcttttcatgatttcagttacactcatgtcttatatatttttgcttggatgatgtccttaatgtctttattactctctaacttgtttgtataactataatatgtatattcaataatgttatcaactaccagagtacaaggattattccttaatatttctttcttatcttttagaatgttaagcatagcacttgtagcattaataaatatctgttgacttgaagtaaaaagttgagttgaacttgcttatgaaaatccaatttgaattcaatcattgaacctctaagatttgttactctgttcaaccattgtagatagatattcaggtatggtcagacgtgagctattcaggtaattccttgtttattctactttacttttacaagacattagctgttgaacagtggaatagaagtccaca

SEQ ID NO: 716032 - DNA, 1209 bp, Homo sapiens
aagtataataataaaattttaaaaataaaaataataaaaataaaaataaaatgtggcacayatacaccatggaatactatgcagccataaaaaaggatgagttcatgtcctttgtagggacatggatgaagctggaaaccattattctcagcaaactatcgcagggacaaaaaaccaaacacctcatattctcactcattgaacaatgagaacacttgaacacagaaaggggaatataacacaccggggcctgtcctggggtagggggagtggggagggatagcattaggagacacacctaatgtaaatgtcgacttaatgggtgcagcacaccaacatggctcatgtatacatatgtaacaaatctgcatgttgtgcacatgtaccctagaacttaaagtataccctagaacttaaagtattaaaagaaaaaaagaaagaaatggctttcaggaaaaacaaacatgcattaaagaacagtttttggttattactcatctttgtataattatatactactttcttttcttagtaattcaagtcttgagcctaagctctttcagacaatgaattcaaatgttttctgaacgtttttggtgaatagcaactatgcttaccgtcatatgatatactgattttcacaaatagtgcttttgacttctttattacctttaggatattggcaatgtaatttatgagttatattaaataaaacccttgtctgcaaaaaataaaaataaaacatgatgctttaaaaaaaaaagtcctcaaataacatgtgttacttttttgttcaattttgatttataattaaaatactacaaaaatgtacccattttaaatgtagagctcagtgagttttgacaaatgcatatccccatgtaaacagcacaacaatgaaaatataaaactcttccgcccccccaaagaatctactggtgctgtttggcagtaaggcctctcgatcccctagaccaaagcaacctctgacctgctttctgcctccatagattcccctttcctagaatttcatgtaaatggaaccagaatggcttttatcactcggcatatttttgagattcatttatattgttgtatgtacccatagtttatttttattgctgggtaatatttcattgcatggatatactacaaaatatttttccattcacttgctgatagacatgtagattgtttccaatgttttga

SEQ ID NO: 716033 - DNA, 1209 bp, Homo sapiens
aagtataataataaaattttaaaaataaaaataataaaaataaaaataaaatgtggcacacatacaccatggaatactatgcagccataaaaaaggatgagttcatgtcctttgtagggacatggatgaagctggaaaccattattctcagcaaactatcgcagggacaaaaaaccaaacacctcatattctcactcattgaacaatgagaacacttgaacacagaaaggggaatataacacaccggggcctgtcctggggtagggggagtggggagggatagcattaggagacacacctaatgtaaatgtcgacttaatgggtgcagcacaccaacatggctcatgtatacatatgtaacaaatctgcatgttgtgcacatgtaccctagaacttaaagtataccctagaacttaaagtattaaaagaaaaaaagaaagaaatggctttcaggaaaaacaaacatgcattaaagaacagtttttggttattactcatctttgtataattatatactactttcttttcttagtaattcaagtcttgagcctaagctctttcagacaatgaattmaaatgttttctgaacgtttttggtgaatagcaactatgcttaccgtcatatgatatactgattttcacaaatagtgcttttgacttctttattacctttaggatattggcaatgtaatttatgagttatattaaataaaacccttgtctgcaaaaaataaaaataaaacatgatgctttaaaaaaaaaagtcctcaaataacatgtgttacttttttgttcaattttgatttataattaaaatactacaaaaatgtacccattttaaatgtagagctcagtgagttttgacaaatgcatatccccatgtaaacagcacaacaatgaaaatataaaactcttccgcccccccaaagaatctactggtgctgtttggcagtaaggcctctcgatcccctagaccaaagcaacctctgacctgctttctgcctccatagattcccctttcctagaatttcatgtaaatggaaccagaatggcttttatcactcggcatatttttgagattcatttatattgttgtatgtacccatagtttatttttattgctgggtaatatttcattgcatggatatactacaaaatatttttccattcacttgctgatagacatgtagattgtttccaatgttttga

SEQ ID NO: 716034 - DNA, 1126 bp, Homo sapiens
tctacaaaagggtcaataataggtgttatccagcgaccgaaacccagctttgggccgcgtggataaatacctgtcctccctaccaagtgcactgtgagcctggaggtgctgctaacgctgggagaagcggtagtgaaatgaagcgaggcgacagcttttaccagtgtagggacatttaaaaacgggatagagagcacaaggagcgtagacagtgtgttaagggcaataaagagcgggaagggagccccgattcctcttctgtttgttctcatgatagtcttttcccctttaatttgagttctatgttttgtattgggctgatacttttagtcctcggcaatagggttgtgagtccttttttgactgcttagaattttccccctgggaattgctagtccgatttgcaatctttcagagggacaaatgaagtaactccatatacttaggactctgtacacctactcaaatttggtcatctcggtaagtacccaggacaagacgttgaaggagtgaaggtgtgccattccaaaatatgcctaattggtatattgattatttcgagcggaaaacattggagaaatggtagtttcagaaagggcaagctgacctgcctcttcgatgcagcaggccacaaagatttctctgggatgggcatcctctccctaccacggtgagaaaatagcctttatcaccaaaggcttggaattgaaggctgcagtggacctgaataaacattcttaacgaagtaaccctatcttccactaggagatataggagattttttacatatatcttctagtgactccctagaaaatgttactgcctttgtgagctgtggaagttaactcragtcacagggcaccaaaatatgttagcagctgcccatatccgagacacggccccaaagtatgttacaggcagtgaattcctacagatctgcagcaacctcaattcttgactcctcagaagaaagagttcgactgaggggcataaggcaaaaggagagaccaaggcaagtattagaacagaagtgaagtttattaaaaagctttgaatgaaaggaagtacacttggaagagggccaagccagtgacttgagagatctagtgcgtagtttgaccttttg

SEQ ID NO: 716035 - DNA, 2283 bp, Homo sapiens
ggatatcttttacatttgttttattgtactccatttctaccctttttgccccgcaaagattgggtgcaatgcatgaaaataaagcaytataaagattgattttttgtagtaccaggtttttgagtaaatataatattaaagacagaactaattaatataattacttatcttttagcttacagaaaattcttggcctggattccttagaagaagttttagacgtcaaacttgtcaattcgaagttcatcatccataatgtatatagtgttagcaagcagggagttgttattcttgatgacaagtcaagtaagtgcataaatataattttgttacttattgacataatatattggctgcacaggtccatcagctcctatctgacccttccctaaaccctgaataagtttgttccttcattacgtatattctttctaataccttttaacaaattgtttggaataagggaatgtcataggaagatgagtatctaggaatgagagcctcagcaaaatccatccagaagctagttcagtgttagccaccttgggcattaagtggtttcgtattcccagggaaatctctgaaaagtgagaatattcaagacataaccaagagttagagtcagttttcaggtgggccctgggtctgactgcatttagaattctcacgtttttgtttgggcttctctgtgttagattttctggaatagtcttggttctttttaataaggtagtttttgaaatgttgatattgctttgatttttttatatttcccaccctagaccagtttacaaatcagaaaaaacaaacaaacaaacaaacaaaagaaccatataacagccacctaacatggtttttggtttgtaaaaatgtggttagggtactgatagtggaccacagtccccacactgattttaaatctttctgtggataaggaccagatttggatgggctcattgatttgttcttcctttagttcaaaccctcgatgctgggaattggctggaacttgatgatctttggatgtgggaagatggcataatacttcttgactttttaaaaatatgattaaatttagggctggaggctcctgggaagcagacagaatgtagcagaatagcctgagcagtggtgagaggggaagagatttttctatgccatgtttcctgacagtagcagaacctgtcttcagacctgaaacacttctccttttatagtcactatatgaggaatggaggacaatgagagacaaataagtttgtggtgactttatgagttttgaggttaatatcaacatataaaattaagttccatagaatgaagggaagagtgcagcctttgaaatacatctaaaattcttccacattctctgagtgtagcaaattaatatttttagttatcagttagatgatcaatcatctttcattttattaagtaagatcttaagaaagaagagagcattttacaagactccagttcattagatctaacacaattcaacaagtgtctttgcagttttacagaaatagagaagatgaagtggcagcctgagtgctagcccatctcatcagatgtctgtggcagggcgtggagggaagagattctgtaccaaatggttcagctgggattttttttgtagcaatgttcagttactattatttaaaggttgtcctaatactaatagcctaacattaatatgtcagtggaactttcttggcctaaagcattttgaaaatggaaacatgtaaaatgatacttatattggacctacagaattaccctttttgaggggctggtggtgtttgatgaacttgtttcacaaatgtgtttgacgactaatattttttcttttctttttctttttgtaattcttaaaataattggtttgtcttttggtttgtttgtttgtttggagcaaactatacatttttttctttttactatagctttaaaaaggtgcattgtgtccttagagaaatctgtaggcattatttatgtaagtgcatgttataacactgctgacaaggaaaggtttccatcttttaaatgttctaataacataaattggtgatttgtgattagcagatatggttcatattacttgggcaagtaatacattcttatgataccaagtatgtatatgatgtcttgagttatatggaattgagtacaaattttctttttccttcagaagaacttcctcattgggtgctgtcagctatgaagtgtttggcaaattgtaagtactaattatctgccagttttgtgaaattaacagaaatt

SEQ ID NO: 716036 - DNA, 2283 bp, Homo sapiens
ggatatcttttacatttgttttattgtactccatttctaccctttttgccccgcaaagattgggtgcaatgcatgaaaataaagcactataaagattgattttttgtagtaccaggtttttgagtaaatataatattaaagacagaactaattaatataattacttatcttttagcttacagaaaattcttggcctggattccttagaagaagttttagacgtcaaacttgtcaattcgaagttcatcatccataatgtatatagtgttagcaagcagggagttgttattcttgatgacaagtcaagtaagtgcataaatataattttgttacttattgacataatatattggctgcacaggtccatcagctcctatctgacccttccctaaaccctgaataagtttgttccttcattacgtatattctttctaataccttttaacaaattgtttggaataagggaatgtcataggaagatgagtatctaggaatgagagcctcagcaaaatccatccagaagctagttcagtgttagccaccttgggcattaagtggtttcgtattcccagggaaatctctgaaaagtgagaatattcaagacataaccaagagttagagtcagttttcaggtgggccctgggtctgactgcatttagaattctcacgtttttgtttgggcttctctgtgttagattttctggaatagtcttggttctttttaataaggtagtttttgaaatgttgatattgctttgatttttttatatttcccaccctagaccagtttacaaatcagaaaaaacaaacaaacaaacaaacaaaagaaccatataacagccacctaacatggtttttggtttgtaaaaatgtggttagggtactgatagtggaccacagtccccacactgattttaaatctttctgtggataaggaccagatttggatgggctcattgatttgttcttcctttagttcaaaccctcgatgctgggaattggctggaacttgatgatctttggatgtgggaagatggcataatacttcttgactttttaaaaatatgattaaatttagggctggaggctcctgggaagcagacagaaygtagcagaatagcctgagcagtggtgagaggggaagagatttttctatgccatgtttcctgacagtagcagaacctgtcttcagacctgaaacacttctccttttatagtcactatatgaggaatggaggacaatgagagacaaataagtttgtggtgactttatgagttttgaggttaatatcaacatataaaattaagttccatagaatgaagggaagagtgcagcctttgaaatacatctaaaattcttccacattctctgagtgtagcaaattaatatttttagttatcagttagatgatcaatcatctttcattttattaagtaagatcttaagaaagaagagagcattttacaagactccagttcattagatctaacacaattcaacaagtgtctttgcagttttacagaaatagagaagatgaagtggcagcctgagtgctagcccatctcatcagatgtctgtggcagggcgtggagggaagagattctgtaccaaatggttcagctgggattttttttgtagcaatgttcagttactattatttaaaggttgtcctaatactaatagcctaacattaatatgtcagtggaactttcttggcctaaagcattttgaaaatggaaacatgtaaaatgatacttatattggacctacagaattaccctttttgaggggctggtggtgtttgatgaacttgtttcacaaatgtgtttgacgactaatattttttcttttctttttctttttgtaattcttaaaataattggtttgtcttttggtttgtttgtttgtttggagcaaactatacatttttttctttttactatagctttaaaaaggtgcattgtgtccttagagaaatctgtaggcattatttatgtaagtgcatgttataacactgctgacaaggaaaggtttccatcttttaaatgttctaataacataaattggtgatttgtgattagcagatatggttcatattacttgggcaagtaatacattcttatgataccaagtatgtatatgatgtcttgagttatatggaattgagtacaaattttctttttccttcagaagaacttcctcattgggtgctgtcagctatgaagtgtttggcaaattgtaagtactaattatctgccagttttgtgaaattaacagaaatt

SEQ ID NO: 716037 - DNA, 2283 bp, Homo sapiens
ggatatcttttacatttgttttattgtactccatttctaccctttttgccccgcaaagattgggtgcaatgcatgaaaataaagcactataaagattgattttttgtagtaccaggtttttgagtaaatataatattaaagacagaactaattaatataattacttatcttttagcttacagaaaattcttggcctggattccttagaagaagttttagacgtcaaacttgtcaattcgaagttcatcatccataatgtatatagtgttagcaagcagggagttgttattcttgatgacaagtcaagtaagtgcataaatataattttgttacttattgacataatatattggctgcacaggtccatcagctcctatctgacccttccctaaaccctgaataagtttgttccttcattacgtatattctttctaataccttttaacaaattgtttggaataagggaatgtcataggaagatgagtatctaggaatgagagcctcagcaaaatccatccagaagctagttcagtgttagccaccttgggcattaagtggtttcgtattcccagggaaatctctgaaaagtgagaatattcaagacataaccaagagttagagtcagttttcaggtgggccctgggtctgactgcatttagaattctcacgtttttgtttgggcttctctgtgttagattttctggaatagtcttggttctttttaataaggtagtttttgaaatgttgatattgctttgatttttttatatttcccaccctagaccagtttacaaatcagaaaaaacaaacaaacaaacaaacaaaagaaccatataacagccacctaacatggtttttggtttgtaaaaatgtggttagggtactgatagtggaccacagtccccacactgattttaaatctttctgtggataaggaccagatttggatgggctcattgatttgttcttcctttagttcaaaccctcgatgctgggaattggctggaacttgatgatctttggatgtgggaagatggcataatacttcttgactttttaaaaatatgattaaatttagggctggaggctcctgggaagcagacagaatgtagcagaatagcctgagcagtggtgagaggggaagagatttttctatgccatgtttcctgacagkagcagaacctgtcttcagacctgaaacacttctccttttatagtcactatatgaggaatggaggacaatgagagacaaataagtttgtggtgactttatgagttttgaggttaatatcaacatataaaattaagttccatagaatgaagggaagagtgcagcctttgaaatacatctaaaattcttccacattctctgagtgtagcaaattaatatttttagttatcagttagatgatcaatcatctttcattttattaagtaagatcttaagaaagaagagagcattttacaagactccagttcattagatctaacacaattcaacaagtgtctttgcagttttacagaaatagagaagatgaagtggcagcctgagtgctagcccatctcatcagatgtctgtggcagggcgtggagggaagagattctgtaccaaatggttcagctgggattttttttgtagcaatgttcagttactattatttaaaggttgtcctaatactaatagcctaacattaatatgtcagtggaactttcttggcctaaagcattttgaaaatggaaacatgtaaaatgatacttatattggacctacagaattaccctttttgaggggctggtggtgtttgatgaacttgtttcacaaatgtgtttgacgactaatattttttcttttctttttctttttgtaattcttaaaataattggtttgtcttttggtttgtttgtttgtttggagcaaactatacatttttttctttttactatagctttaaaaaggtgcattgtgtccttagagaaatctgtaggcattatttatgtaagtgcatgttataacactgctgacaaggaaaggtttccatcttttaaatgttctaataacataaattggtgatttgtgattagcagatatggttcatattacttgggcaagtaatacattcttatgataccaagtatgtatatgatgtcttgagttatatggaattgagtacaaattttctttttccttcagaagaacttcctcattgggtgctgtcagctatgaagtgtttggcaaattgtaagtactaattatctgccagttttgtgaaattaacagaaatt

SEQ ID NO: 716038 - DNA, 643 bp, Homo sapiens
ttggtttacaaagcaaacacctctaccaatgatgttaggccaaatctgaagaagttgaaagggaaggacatcagactcaagaaactcagatgccttcttgtgtagtgattgtttgaaagtgctagttacttggcagcagtcagacactagcagagaccacttaagacccaacagaaggccaagtctcacaactttcattcgacacagtgcttgtttggggtagggtaaggtggagaattattcatcacaattccagtaaatagctcctggccacagagcgttacattagtcaaaaatgagtctgagcacaagagaatatgaggacactcactgacagtaggattttataaaacagaattagccatttctatgtcaygtgcccttattcatttggcaaaatctattgatttgttgttgttaactatttttctcattcgtgaaatatcttgtgcttttctgagtcttaattttcaagattttataacttaccaagttaacagtgtgattaagttatcttataagtcaagctagaggctagtctcagaaaagaatgttgcattttataataccatagtgtctaataattgttcttctcctttgtttcttttctttacacaatcagaatattattctgacaatgcct

SEQ ID NO: 716039 - DNA, 643 bp, Homo sapiens
ttggtttacaaagcaaacacctctaccaatgatgttaggccaaatctgaagaagttgaaagggaaggacatcagactcaagaaactcagatgccttcttgtgtagtgattgtttgaaagtgctagttacttggcagcagtcagacactagcagagaccacttaagacccaacagaaggccaagtctcacaactttcattcgacacagtgcttgtttggggtagggtaaggtggagaattattcatcacaattccagtaaatagctcctggccacagagcgttacattagtcaaaaatgagtctgagcacaagagaatatgaggacactcactgacagtaggattttataaaacagaattagccatttctatgtcatgtgcccttattcatttggcaaaatctattgatttgttgttgttaactatttttctcattcgtgaaatatcttgtgcttttctgagtcttaattttcaagattttataacttaccaagttaacagtgtgattaagttatcttataagtcaagctagaggctagtctcagaaaagaatgttgcattttataatacyatagtgtctaataattgttcttctcctttgtttcttttctttacacaatcagaatattattctgacaatgcct

SEQ ID NO: 716040 - DNA, 954 bp, Homo sapiens
taaataaaggaaaccatatttcttttttwaaaaaatatagctattaattcaactaaattgatcttgttgagatcaattctttgagtaatatatcatgatagataacttgctgatactatgaaaggtgtattatattttggtccaaaaccaataaacctaggaataaatttaggctaatccttttgttcaaggatttgagatcacatcataaagattgagtgtactattatgagtcatttggtttataacagaaattctcaatttattctaaattttcagatctctccaagttacattgatttaataaggtccaatgccatgtgtaattgcagtttggcagtcaaatgggaaaaatattaaaaaccactgagccactttcatttagaagtatagattgtcgtacctctacctatgcaattgtagagaagatcttattcttcatgtgagacattcttgacaactatgtgcattaagccttacgctatttttggtatgtataaaatgccccttgagatagataaaagcactctgtgaaagcattttgttattggcttaaaaaagataaaactaacagcctagagttgcacaatctttcttttccttagatattaattatataacatagtatttttgctcttctaccagaggtgtttttggttatcttatttgccatatctaagtatcctgtatggaacactgaattgttagtaatgaccactgttttcatcctcatttccctccaaaagcagaaaaaaaaagaccaatacaataactagtatttcccatcttctaattattcatttcctgtgggataagatagtggcatagaaaagcaaattggatcataattatctcaggttcttccctcattccactacgccctcactcaagttatcttcactgaatttgttttgactttgtaacctaatcaattacagagagaaacaatgcaag

SEQ ID NO: 716041 - DNA, 954 bp, Homo sapiens
taaataaaggaaaccatatttctttttttaaaaaatatagctattaattcaactaaattgatcttgttgagatcaattctttgagtaatatatcatgatagataacttgctgatactatgaaaggtgtattatattttggtccaaaaccaataaacctaggaataaatttaggctaatccttttgttcaaggatttgagatcacatcataaagattgagtgtactattatgagtcatttggtttataacagaaattctcaatttattctaaattttcagatctctccaagttacattgatttaataaggtccaatgccatgtgtaattgcagtttggcagtcaaatgggaaaratattaaaaaccactgagccactttcatttagaagtatagattgtcgtacctctacctatgcaattgtagagaagatcttattcttcatgtgagacattcttgacaactatgtgcattaagccttacgctatttttggtatgtataaaatgccccttgagatagataaaagcactctgtgaaagcattttgttattggcttaaaaaagataaaactaacagcctagagttgcacaatctttcttttccttagatattaattatataacatagtatttttgctcttctaccagaggtgtttttggttatcttatttgccatatctaagtatcctgtatggaacactgaattgttagtaatgaccactgttttcatcctcatttccctccaaaagcagaaaaaaaaagaccaatacaataactagtatttcccatcttctaattattcatttcctgtgggataagatagtggcatagaaaagcaaattggatcataattatctcaggttcttccctcattccactacgccctcactcaagttatcttcactgaatttgttttgactttgtaacctaatcaattacagagagaaacaatgcaag

SEQ ID NO: 716042 - DNA, 954 bp, Homo sapiens
taaataaaggaaaccatatttctttttttaaaaaatatagctattaattcaactaaattgatcttgttgagatcaattctttgagtaatatatcatgatagataacttgctgatactatgaaaggtgtattatattttggtccaaaaccaataaacctaggaataaatttaggctaatccttttgttcaaggatttgagatcacatcataaagattgagtgtactattatgagtcatttggtttataacagaaattctcaatttattctaaattttcagatctctccaagttacattgatttaataaggtccaatgccatgtgtaattgcagtttggcagtcaaatgggaaaaatattaaaaaccactgagccactttyatttagaagtatagattgtcgtacctctacctatgcaattgtagagaagatcttattcttcatgtgagacattcttgacaactatgtgcattaagccttacgctatttttggtatgtataaaatgccccttgagatagataaaagcactctgtgaaagcattttgttattggcttaaaaaagataaaactaacagcctagagttgcacaatctttcttttccttagatattaattatataacatagtatttttgctcttctaccagaggtgtttttggttatcttatttgccatatctaagtatcctgtatggaacactgaattgttagtaatgaccactgttttcatcctcatttccctccaaaagcagaaaaaaaaagaccaatacaataactagtatttcccatcttctaattattcatttcctgtgggataagatagtggcatagaaaagcaaattggatcataattatctcaggttcttccctcattccactacgccctcactcaagttatcttcactgaatttgttttgactttgtaacctaatcaattacagagagaaacaatgcaag

SEQ ID NO: 716043 - DNA, 355 bp, Homo sapiens
aaggaaggaagggaaatctctgaccccttgcttaggaaaagaaacctctgaccccttgcctaagtgactaagctatccctgcgtaaaggtgtataaaggaccaaatgtggcttgacggtcacagcgctgagacttgagtgcttgccatcacctctccatgcatcctgaccatcagtgaaggcagaatcggttttaaaatattcaagacgtggtccctagtactacaatagtaccagcgcataaaaccgaggtgtgtcagtgattcattctatgcstgtagcggataatatacggagtagccagctgaagaactgtgcttgtctctaaagagttcaacagcaggcatcaccagccc

SEQ ID NO: 716044 - DNA, 2126 bp, Homo sapiens
aactgagctttcacttgacagccatgtagctttaggcaggtgacctgaccacactgagtttccatttctttatttgcaaattagaaaaaatgtacatgcccatatgagaccacttttggaagaattcagatatcgaactttattgattatctggaacccactgactacataatcagtgatggtattcacaatggttgctttattaggactgccagcaatgataatcattcaagtttttttttaattattttttatttttgagacggagtctcgctctgtcaccacgctagagtgctgtggtgctagagtgctgtggtgcaatctcggctcactgcaacctccaactccctggttcaagggattctcctgcctccgcctcccgagtagctgggattacaggcatatgccaccatgcccggctaatttttgtgtttttagtagagatggggtttcactatgttggccaggatggtcttgatctcctgacctcgttatccgcccacctcggcctcccaaagtgctgggattacaagcgtgagccaccacgcccggcctcaaattatgttttaatattattatatattccatttgtctatgctatccctgaccttgagagggccaagaaatgacccccgccacctttgataattactttgttcatgtagtatattgtaaatctgaaatttattggacctatgagaagataggaacgaacagtgaaaaaatttgagaagttaatttttgctaaattacccatgtgttgcatgagaaaatccttggagttttagaattatcggggccatttgaattgtcaggttatagttatttctctagaatttggtgcagaaggtatttttttcttatccccaaaaatgaagaggtacagttgatttactgtttcatttgtggaagactaggacattctcacaagattctacttaactttccttcactacagtaactcttatatcacagcccaagaacccagtttggaagttacctcaacttccaagtatgtccctccttcacagactgggaaaatgaacactgaaaactttgcttacccagtggatacatttgaagccagactttagctaaactccatttatgcgtgttccccagatttaccaccagaccgcttaggttgacatatgccctgtattctaactgggggaccttgatgacacttcaggtctctgagcatcagcatcaactcagctgctcttcctagtcatcctcagaatatctggctactctcccttctccactgtacagttaactgagtacatggccatagatacctctagggatagataggagaaatcttcacagtgtatacttgccaaggtgttgcaggatctacctcttcagtcagtttgctccatatctaaatattggctcccactggggaactgagcaaggtattgtgactatttttgtggcacagtcatattcagcttctgcgttttcattcttgccttcctattgtcartgttaagaagcaccctcactggcggaccatctgtgttttttccagcatggccatactcttgtttccttgagagttaggtccctttggctgcatgtccatcattgtctgtctacagtaattgctgtctattggcatcttgtgtttaactatgtggcctctattatttcagtgtcccattgtccccacatatattgagaccagctctgtcatggttaagtcattcctggacttcagaggagagagacctctgaccgcttatgcaagtacccctccgaataacacagttcttattgccatagtgcactccgggatctcctgtgaaacataatcctgggtcttctggcctcattataacatattctttccagtatggccacctcctggaatctctttttatctctttattttttaagaaaaaattaggcattttttcctcactcatcagagaccattcttactccagacttctaagagtcaccttagcagcaagtttgctttatcttctggaactcttgtcaggcgttacatgctgtcttcagaagccgtcctcaaatcagtgagatatagtatatttagtcatactttctggcacctttaatgaaacatgaccaaaattcaattttatagatattcc

SEQ ID NO: 716045 - DNA, 600 bp, Homo sapiens
tttttaaaataaatttggtgtagcctaagtgtacggtgtttataaaatctacaatagtgtacagtaatgccccaggccttcacattcactcagcactcctttactgactcacttattgaaacttccagccctgcaagctccatttagggtaaatgccctacataggcattctatcctttaaaaaaagtctatatcctattctcactgaaaattttatatggttagaatgtttaaatacataagtgtctctgtgttccaattggccacagtattcagtacagtaacatgatgtacaagtttgtagcttaggagaaataaactacaccatataggttaggtatgtagaaggctaccccatgtaggtttttagagtacactctgtgatgtttggacaacaatgaaaccacttaagggtgcatttctcrgaacatatttctgtcattaagcaacctgttactgtatataatttgtgttcgccaattaaatattttaaaatttaaaaaactcagattggatttgaaagctggtgcttatgttgatttacagcttttgtttgttttgcccaaagactccaaataatttgtttttcctctgtatttt

SEQ ID NO: 716046 - DNA, 2350 bp, Homo sapiens
aaaataatgagttgtagagatatctattaagggatttcatgagaaataactttattctcactatgagactaaatgtaagcagcagcacagcattgttcaagataaaatgactgtttgataggatgattataccaggagggataaccttctctgtggtgtacataacttctcagtctcagaaatccagccaaatacaagtagcaatatccctaagagaccttttctggcaatggatgagagctttctcctttaggacattcagaggtcagtgcttacggtttcagcagtaaccaaagtctatttaaagtgtcccgtgttagagaaatgatgaggataaaaattttcctctaatttaattctaacagatcagaagcattgtcaagaacaagcaaaaagaatgcagcgaatgtgtgcgaagatataaaaaactgaccacaagttctcctaccatatacttataggtgaagccttcacagatgaaaatgaatatggtagcctagtacagatcagggcctcaagctcaagatctgaattatatcctgtgtgcagagaatcggcttcaccttttccttttgagaagcaatcacacacatgacacaactctgaaggactattttttcaagtcactttatgtcttcttaatcgcagacattggaggattgatagatagagctggtaagaaacagaataaagatagtaacaaataggcacaataaactattattaaacagtgataataataatttcgaaaaacgttactagtcacgtatgtatataatcccatatcattttaagtttcttaacttgcttatacaccaggggatctgtgataagcaggattttttttttttctgaaacttattagcagacatgtttatgtgtattttgatggttgaaaaagatcaagagatggctaggtaaggagtgcagtaaatttggagccatttttcaaacattcgaggtatatgagttcagttattgcagtagtgagttctgggctgtcctgcagaaaatgtggatactctttcgagaaatgtgaaaagcctaatgtatttgagaattccatttttcttagtgccacattggttacatatgcattatttatgaagaaaatagggtgatttattaatttttaagtgaatggtaattgcaggaatctaaatgtaactaaaataacttggggtgaaggggatacaatctccataatcataaaaagggtttttcaatgaaatacagttatctgctgagttttataaaaatgaaatttctaaatgattattcctcaaatccatgttgcttgtcattgttgtttttacaaatgaggtagttgacattgtcttcatcctgcttctatgctgggaactgaatggmcatttgccaaataacagcagattattgcatttttcaacacaaatatcctcatacatatattcaatagtttataaatctttacccagcttacaggtcacagttacaaaaaccatttttagttgtacattctctctctcgctcactcactcgcttgttctagctccctcttgttctagtgctctctttttctggctttacgctctatcttccaaatccaagtgattctatttaaaataattgggccaggtgaattttcaagctgtttattttctctgcactttttccgtacaacaagcaaaacagacacatctgcctatgcaaaacagggtcaaatcagaatgtttcatttgtttataaaagacttatttattcattgaagaatgatccaagttggtcagaaagatccagaatctcacaaaatgactaattcttcagataattctaaatagttttatactcagaacacatctgatgtcaggacacttggaaatttagccatgaaaactcagatttctctgaattctgtggatgatcatgatcctttaaaacaataaacataaggaaatgaaagtttttccacttattcaattaagatatgtttttactccacaaaactatattttcaaaagttgcactttctactgagaatttagactgtcagtaaatttcataaattctttcaagattttattttcaaagctaagtacataacatcctcccaaacttcctgtatttacaatttctgtaaggtattattataagttttctgttttgttgttcacaagtttaaaatttggaaatgcaaataccattctcttcattttacatgtgtttttttttttaagagacttggtttaagtagtttgtctccgtttacactagaaagcacttgtcctgcttcctagccagtgctattcactatgcaattaatttcattttatattttggaatcttatttatgcaggctcaaccacatata

SEQ ID NO: 716047 - DNA, 3354 bp, Homo sapiens
ttgcatttctctgatgataagtgatattgagctttttttcatgtacctgtctgccatttgggtgcggtctttaaaaaatgtctattcagacctttttgttcatttattaaaaatctgattactagattttttcgtattgtttttgtgtgagctccttatatattctggttattaatcccttggcagatggatcgtttgcaaatatttaggggagatttggggggtggttgtctcttcactttgtagattgtttcctttgctgtgcagaagattttttacactgttagtgcataccaggagctattggtattcaacctacttttaataatggttctcattgtcagcctgatagcagctattccatcttcaaaaacctattttagagatttcatcctagaaacactcccattaccaactgctttagatgtattccctggaacagtctctgaggcatgaaaatgcatgacagaagtttctaggaagaagatctgaaaaacaacatttgtggtgagtgagaaaaactaaaatgaagtacaggaagatgttcaactgcaatgtgttacagtggaagtgtgtgatgattccatcgcatttcatctctagagttgagagatggaattcattctcaactatagagggaggctcctttagattggtcccaaattgaagtaacagggcttcgccattgtacctcacttggtattatgtgtaggttgcctccatcgagaaggtgtaaccttgggtgttttccctccaaggacaattctctgagagggatacatctgtgagctgtccgcagccaaaattcatggctaccatgggaataattgctttagtttgaaagggggaacagatagcccaacgtaggatccactgttttacttttttttatagttccaacttcctacaatccttaaaaaggcaaaactaatccatagcaatagaaatcagtatagaagttaacttttagaggatgatgattaggatagggcatgaaaggggtttctgtgttgttggtaatgttctatttatgatatgaggatttgattatatgaataagttcaatttatggaaattcttcatgctacaaaattataaattgttcatttttgtatgtaagtgatatttcataaaagtttactttaaaaagtaatgtgaaacacagacatacaaaactttccaaaataagaataaaaaggctgattttataatttaatctttggttttactttcatacaagttcgtgttttagaataacttttatactcttttatctataatttattactcaattttccatagtaaatatggataattattaaacctgaatattaaaaatacagccagtttgatagatttgtataaatgcttaactgatgtctccaacactctttttccaaattactaaactaagaaaaataaatagcagagtaattacaaaagtaccaatgacaactgctatacaatataaacactttggtagttaaaagttacttagctcaaccactttgcctgaacaggatttaggagctagagttgactaaattaaaagaaagacaatataattgctttgtgattgccatgcaaataccccaacattacgttgtggatatgcaattgttttcatttttaaagaaaactctgatttatatggtgtttacttaggaagtattaaatgtaattagagggtacaactcaggagaagggaaaaaaagtgatatttggttttgatgcctatgtgctcttggagttaataattattttccaaaagtcatttcctttggatataaaagcattgcttgttcctgtccttaaccaattcataaaattacacagtttccccagaagaattttttggaatgacataacttgcttaatgtcttgcatatcttatttttaaaatataagaatattatctctgaggagtaaaattattaactctgagtggtcaggaaatgtattaataatgataacacatatttgttatgcagtttttattataatgaggtttaagcggacaatacataggaagtaagaatctgtagcagatattctgtgctcatgaaatgtgcctctacatcctggtgagtaagcagactatattttccagcatcccttacatttacttgtggctatgactgagtcatggctaaagacttgaaattgaagcacattacttccaggctttgtcccttcacactcctacaagtagtctctatgtcctctcttcccctaactgccttccagaggcaatccatcttaagcctcagagaaacacagcacagcagagcaaaacagtctgagtgcctagatgaaaaagtccaaggctgcacaaagactgggaaaatccatattgtactttatgtgtgtgagaaataacttcttattgtgttatttgaattcagagaattcactttgaattcagagaaatatttggtacaattcttacctcctggccataacagttaccctaaatactacagaatattgaacagtaattgatgtggtgccagcaaaaacacaaaaatttgtggcatttatttagtagtcatggaatggaccaaaaaagcctagagagttctcttgagctgtgatgaaacttctatctgccataacgtggaaggcaggttatataaatagtgagcctattgctctaaagaaagtgggaaaaaacagagtgaaaatgtgtctgtcactatgggctgcctttagcaaggcattcaagaaagctaagagttacaaagtttcaaaagaactggagagtatccagagataaaaaggctttaagaattgaaaaggcaatcattttagactcatctctaaaagaactaagtgaaaaacaaacttgaaaaaggttcagtgaaaatcacattgctaaaaaatttaaatagttaaaaaaaatctacgactcaccttagtggtattcctagtgctattccttcccacgttagtcttttagtttaaatcacgtcaacatagctgccatgaagttgagagaaagagagggtaaaaggcctaggaaactcagaagtaaaagtaagaagtatgtcttgggtatgcctactggcccatggaactgactggactcaacgaaatcataagcttagcaagttagtgtggaaattatacaggcaaaataaactaagagtgtctgacaatgcctgcgactttcaagtcttaaaaaaaatcctgactctaacagattctatccaggacatactcttctttgttcacataagatatgatcacgaatgataacaaataaaaaaggccctaagaatggttgagccaagacccagacagaggaatggawaggaaaacaacaatatttttccaagaggtaaaaatcagtct

SEQ ID NO: 716048 - DNA, 1498 bp, Homo sapiens
atctgtaataacttgtttcccttttgctgccctayttgatctttaacactgctttatcattaaaaaagttaagcttttttatgtttttgataaggaaggaaaataatttgcatatttcacatatatacattttacatattttacacatatagtacatgtaccagtatatgcattatatatgtatacattatcacaataatggaaactattgttgcatatgaatgcatacatctttcttagctaatggagaagggaaacatttaaaaggacacttaatttaggaactatttgattaataataagagaaaataatggatatacaataattgtagttgattgattttgaaaaaacactagtaagccagagaatacagaaaaaaaagggatttgtggttgccataatcaatgatccatagttctattattaaagcaaaacagattgttttgttgttttttgagacagggtctcactctgtcacccaggctggagtgcagtggtgcaatcttggctcactgcagccttgacctcccaggctaaagtgatctgcccacctcagcctcctgaggaacggagactacaggtgcaggccactaggctctgctaatttttgcattttttgtagagaaggggtttttccacatttcccagctggtctcgaactctgagctcaagcaatacgcccgcgtcgtcctcccaaaggcactcgccaccgtgctctgccgcaaatagatcttgaagacccacagcttggttttctgtgaccatttgagcaaggtagtaacttcctttgaaaatcagtactcttacattattcttccattttaataacagtatattgcaaaaagaatgctaaaatttgtacccagtgtattagactactatataatatgtattaaatgcaagttcagaaaaacaagaatataaaaccttatagacactaacttctctgtgggaactgaagggtctatcaaagataccttttcttttgcatgactagagtgctacttttccaaattaattgaacgttttgaggacttaagaagaaaaaaggaagaagtgtattcataagtgggagctaagtaatgtgtatacaaggacagagtgtgaaataataaacattggaaactcaagggtctgagaaggatgagaaagtagtaagggagtgagtaatgagaaattacatcatggtacaatgtacactattcacgtgatggttacactagaagaccagacttcaccactaaacaatatatccatgtaaccaaactgcacttgtaaccccttaaattcatacaaatggaaaaaaaaaaaagaaataattgtagactctttttttgaaacatatacatttttaagtacccatatttctctggagtaccacatacctaaatcgttaactcatttatttaaatcttagcttacatacgaaaagtgtcttttaaagaaatgaactaaagcaatataatttagtgtgtgtgtgtgtgtgtgtgtgtgcgc

SEQ ID NO: 716049 - DNA, 1133 bp, Homo sapiens
  misc_feature 62: n = A,T,C or G
caataaatcttactttaatatttattacacatcaaatgccactagcatgttagattaccttngtttttcattatatcaaatcagttttatagctaaaagtcttattatatatatttgtaaagaatctggtaaacaaagcaaaacctatacataaaatataatgtgatatttgattagaactcaatgtcaacattaattgtttaaatccaagttaatattaaaatcatgtatgctatggagagttatctcttcaatagcttctgctttcctaaaagaaaacatatctagaaaagcaatacaagtttaaaagtgaaacattttgtgtcttactctccctatctttgttcaaaaatacttttgtctacttaaaaaaaaaawttttatcataatttgagtgatctttaaatgctaatatcaaaaagtaagttctttggagataattcaaaattacacatcatttatattgttttcagggaaatttagaaaattagtatatcatttattacgtgctatgaagggatattagcattatactagtaataatttcacactacctataatataaattaagaaatctatgctggcttcaatgtataatttatttgctacattggggatatactagtcctcagtaatacacgtttctagctttacaggaccctggaagactctatgcttttcctctccttgaggtaattataatcttccctgttccccatcccctgtgaataactcagaagtatctatttagatcctttgctcatgttgaattgggttatttgggttatttttcccattgagttgtgtgagttccgtatgtattttaaataagaacccattaccagatataagatttgcaaatattttcttccatttcataggttgtcttttcatttagttgattgtttccttttctgtgcagaagcttttttgcttgatgtagtttgacttattttcgcttttgtttcctgtgcttttattgtcacataaaaaaaaaaaaaacatcgataagaccaatgtcagggatatttgccctatgttttcttcccaaagttttgcagtttcacatctcatttttaagttttcaattcattttgaattgatttttatgtataatgcaaaatgaaagccca

SEQ ID NO: 716050 - DNA, 1133 bp, Homo sapiens
  misc_feature 62: n = A,T,C or G
caataaatcttactttaatatttattacacatcaaatgccactagcatgttagattaccttngtttttcattatatcaaatcagttttatagctaaaagtcttattatatatatttgtaaagaatctggtaaacaaagcaaaacctatacataaaatataatgtgatatttgattagaactcaatgtcaacattaattgtttaaatccaagttaatattaaaatcatgtatgctatggagagttatctcttcaatagcttctgctttcctaaaagaaaacatatctagaaaagcaatacaagtttaaaagtgaaacattttgtgtcttactctccctatctttgttcaaaaatacttttgtctacttaaaaaaaaaatttttatcataatttgagtgatctttaaatgctaatatcaaaaagtaagttctttggagataattcaaaattacacatcatttatattgttttcagggaaatttagaaaattagtatatcatttattacgtgctatgaagggatattagcattatactagtaataatttcacactacctataatataaattaagaaatctatgctggcttcaatgtataatttatttgctacattggggatatactagtcctcagtaatacacgtttctagctttacaggaccctggaagactctatgcttttcctctccttgaggtaattataatcttccctgttccccatcccctgtgaataactcagaagtatctatttagatcctttgctcatgttgaattgggttatttgggttatttttcccattgagttgtgtgagttccgtatgtattttaaataagaacccattaccagatataagatttgcaaatattttcttccatttcataggttgtcttttcatttagttgattgtttccttttctgtgcagaagcttttttgcttgatgtagtttgacttattttcgcttttgtttcctgtgcttttaytgtcacataaaaaaaaaaaaaacatcgataagaccaatgtcagggatatttgccctatgttttcttcccaaagttttgcagtttcacatctcatttttaagttttcaattcattttgaattgatttttatgtataatgcaaaatgaaagccca

SEQ ID NO: 716051 - DNA, 1133 bp, Homo sapiens
  misc_feature 62: n = A,T,C or G
caataaatcttactttaatatttattacacatcaaatgccactagcatgttagattaccttngtttttcattatatcaaatcagttttatagctaaaagtcttattatatatatttgtaaagaatctggtaaacaaagcaaaacctatacataaaatataatgtgatatttgattagaactcaatgtcaacattaattgtttaaatccaagttaatattaaaatcatgtatgctatggagagttatctcttcaatagcttctgctttcctaaaagaaaacatatctagaaaagcaatacaagtttaaaagtgaaacattttgtgtcttactctccctatctttgttcaaaaatacttttgtctacttaaaaaaaaaatttttatcataatttgagtgatctttaaatgctaatatcaaaaagtaagttctttggagataattcaaaattacacatcatttatattgttttcagggaaatttagaaaattagtatatcatttattacgtgctatgaagggatattagcattatactagtaataatttcacactacctataatataaattaagaaatctatgctggcttcaatgtataatttatttgctacattggggatatactagtcctcagtaatacacgtttctagctttacaggaccctggaagactctatgcttttcctctccttgaggtaattataatcttccctgttccccatcccctgtgaataactcagaagtatctatttagatcctttgctcatgttgaattgggttatttgggttatttttcccattgagttgtgtgagttccgtatgtattttaaataagaacccattaccagatataagatttgcaaatattttcttccatttcataggttgtcttttcatttagttgattgtttccttttctgtgcagaagcttttttgcttgatgtagtttgacttattttcgcttttgtttcctgtgcttttattgtcacataaaaaaaaaaaaaacatcgmtaagaccaatgtcagggatatttgccctatgttttcttcccaaagttttgcagtttcacatctcatttttaagttttcaattcattttgaattgatttttatgtataatgcaaaatgaaagccca

SEQ ID NO: 716052 - DNA, 1133 bp, Homo sapiens
  misc_feature 62: n = A,T,C or G
caataaatcttactttaatatttattacacatcaaatgccactagcatgttagattaccttngtttttcattatatcaaatcagttttatagctaaaagtcttattatatatatttgtaaagaatctggtaaacaaagcaaaacctatacataaaatataatgtgatatttgattagaactcaatgtcaacattaattgtttaaatccaagttaatattaaaatcatgtatgctatggagagttatctcttcaatagcttctgctttcctaaaagaaaacatatctagaaaagcaatacaagtttaaaagtgaaacattttgtgtcttactctccctatctttgttcaaaaatacttttgtctacttaaaaaaaaaatttttatcataatttgagtgatctttaaatgctaatatcaaaaagtaagttctttggagataattcaaaattacacatcatttatattgttttcagggaaatttagaaaattagtatatcatttattacgtgctatgaagggatattagcattatactagtaataatttcacactacctataatataaattaagaaatctatgctggcttcaatgtataatttatttgctacattggggatatactagtcctcagtaatacacgtttctagctttacaggaccctggaagactctatgcttttcctctccttgaggtaattataatcttccctgttccccatcccctgtgaataactcagaagtatctatttagatcctttgctcatgttgaattgggttatttgggttatttttcccattgagttgtgtgagttccgtatgtattttaaataagaacccattaccagatataagatttgcaaatattttcttccatttcataggttgtcttttcatttagttgattgtttccttttctgtgcagaagcttttttgcttgatgtagtttgacttattttcgcttttgtttcctgtgcttttattgtcacataaaaaaaaaaaaaacatcgataagaccaatgtcagggatatttgccctatgttttcttcycaaagttttgcagtttcacatctcatttttaagttttcaattcattttgaattgatttttatgtataatgcaaaatgaaagccca

SEQ ID NO: 716053 - DNA, 578 bp, Homo sapiens
caawcttgactctaagattatttttgaaattatcccattgaatttttgttatgttttgtttcttttgctttctcctctgaaaattgacctgtacactgtaaattttctgctatagccttggcaatccactctctttttctgctctaagttttctattcactctgatacacactgaaaaaaaatccacctacctatgttcacaaaacttgcattttgacactttgcttgtttttatataagttttattggtccttgaaagggttttatgctgcttatatatgactctgaaattcctcaacacagaaagtcatttcttcactctaaatagacatatttctttttaacttttattttaggttcagggttaaatgtgaaggtttgttatataacaaatgtgtgtgcacagaggttttttctagagattatttcatcacccaggtgttaagcccagtacccaatagttatcttttctgctcctctccctcctcccactcttcacccttaagtagacctcggtgcttgattgttcccctctttgtgttcatgagttctcatcatttagctcccacttataaatg

SEQ ID NO: 716054 - DNA, 578 bp, Homo sapiens
caatcttgactctaagattatttttgaaattatcccattgaatttttgttatgttttgtttcttttgctttctcctctgaaaattgacctgtacactgtaaattttctgctatagccttggcaatccactctctttttctgctctaagttttctattcactctgatacacactgaaaaaaaatccacctacctatgttcacaaaacttgcattttgacactttgcttgtttttatataagttttattggtccttgaaagggttttatgctgctyatatatgactctgaaattcctcaacacagaaagtcatttcttcactctaaatagacatatttctttttaacttttattttaggttcagggttaaatgtgaaggtttgttatataacaaatgtgtgtgcacagaggttttttctagagattatttcatcacccaggtgttaagcccagtacccaatagttatcttttctgctcctctccctcctcccactcttcacccttaagtagacctcggtgcttgattgttcccctctttgtgttcatgagttctcatcatttagctcccacttataaatg

SEQ ID NO: 716055 - DNA, 628 bp, Homo sapiens
ttttccttctgtgaacttggttaattgtttccaaactttatttcacatgtgaggctcaaattatctgtcatattacattataggtcattattttaatttgagtagcttctataagatcacaatgtagtattatctaaactctgaactgccagaaatgaatataagaaaaaatagaattaaaatgaaacacaaaaaatattatttgaaattaagtgacatttttcaggctatccttgtgttaccacaattgtctaagcttaaaaattatttcaagataactgagaaattaaaggtgtgaagtaaattttttgtacattttgctgcatacccagtaataatgattttttttgtttgtttgggttttatttttccccctgaactgaaaaagagaggaattattttgmgtgcttttctttctcattttaaaactttccaccaggtcaaaagatcatgattttctttttatcttgctatgtcatgtactttcaaatttgacaaaaccaacagggaaatagtggtcatttaacattctcagcaaccttgaagaacatatgttctatagtcatttaatatcaatttatagagaaatttctatgacaaatatatttatgacaatcagtccttgaca

SEQ ID NO: 716056 - DNA, 2214 bp, Homo sapiens
ggataaggttctcttcattctaaccctggttttgccattaacttgctctgagacccaggacacaccacacagtctccctggattgtagtrttctcatttgtccaattagcaagaacagcactagattatccataaatgaccttcttgatctaaaaaaatatgatgttgcaattctgtgatggtcttgggtcattgagaagaaaaagttagttggcctctgtgtttagtatactctgtcagaagtcaatgatatgcacatttttaaagaccttaaaaaaatacttaaagaaaaacagttttggtgcctgacagaaatccactaagtaatccagaagcttaaatattatagaatcattaatttttgtaatgtttttcaaaattttaatattaaaaaacttttagatgtaatttagattaagcaaatacaagagtaaatgtaaactcatttcctcatttttttagtataatgagattttattgagaattacatttttcaatttttttcagaatttaaaatgtcaataataatttagagcctttacttaattatgaaacacaggctttattataaattatcatttttttcagggtgaatatacatttttaaaagtttcaagcttatatacttacaagaaaaggagacattaaaaatattacttttacttctattggtgtaatgcagaacattaagtaccatctttcaaatgctaatttgaaatgctaatgaatatcatcataactcttgaagaggaatgaagaataaaatatgtcaattttaatttactttaaaataaatcatttatttagtacatattgtattagtgtctggtgtgcataagacctcggctgtgttgtggagtaataatgtcataccatctggagaaaattggaagtctagttggggctacagaaacatgtactgctagctgtatgataatatgacaagtactctaataggaacatgaggaatagagagtaattaattcttaacaaaattctttgtgaaaactttgcagaatttatagcatataaaaagggtcttattagtggagaacagagaatggtcattctaagagtacggtcatggtaagaccatattatttattatagaataatgaataatctcttttggagagaatataattttcctgagtgatagagtattggataaagaagcaaacaagaggaaatttaaggacatattaggaaaaatctttttatattattatgtgtttagtagggacctaagtatacatatcatattgttctcttaaagaataagatctctaaagagtgtaagacatacattaaagatgggataaaatgatcagataaaaatctgagatggatggctggatcggatagctacagtattctttgaactgttcccaaaatgcagtgccctgagcactgatgaaaagttcaaatgacaaactccccttactgaacttttacacaaaccattgaaatatatacatttagaatttatttggcccaggaataccacactttttcttctttaaaacattacaaatttacacttaaatataaaaaaaaattacgtatcttccctatccatccaatatacaatacatgtagttgttttcccttgatttctaaaatgtgtttgtggaagagaatttaagtgctttaaaaaaagaaataaagaaattggattgcttggtttggcttactgctgccttgaatgttctgagaacaataatgcaattagctaaaatgtttattcacaaaatttaattcctggggagtatattctcaaattgcctcttacaagtgtaatggaagcaagcagttgtttgttggctttgctgccaaaattctgaatggctagatttttataaaacttgggtataatgtatgtataatcttgtaaactctccattttaaaacgaagaaactaaatttatgaagaaactaaataatgaagaaactaaattttacacatacttttgttaattgtgttctcagccacaaatgaagaaatcttcagtgttattaattccacaaataaaaattttaatagattacgtttcatttcaatttaatttcatacctgattaaatatgctgaattaatagtattcttggattgtcagttccgggacaatctagtgataaggtggttgaaaatataagtgtggtatttattctagacaaagtataaatatccaagaaaaatgaatgcttcttctca

SEQ ID NO: 716057 - DNA, 2214 bp, Homo sapiens
ggataaggttctcttcattctaaccctggttttgccattaacttgctctgagacccaggacacaccacacagtctccctggattgtagtattctcatttgtccaattagcaagaacagcactagattatccataaatgaccttcttgatctaaaaaaatatgatgttgcaattctgtgatggtcttgggtcattgagaagaaaaagttagttggcctctgtgtttagtatactctgtcagaagtcaatgatatgcacatttttaaagaccttaaaaaaatacttaaagaaaaacagttttggtgcctgacagaaatccactaagtaatccagaagcttaaatattatagaatcattaatttttgtaatgtttttcaaaattttaatattaaaaaacttttagatgtaatttagattaagcaaatacaaragtaaatgtaaactcatttcctcatttttttagtataatgagattttattgagaattacatttttcaatttttttcagaatttaaaatgtcaataataatttagagcctttacttaattatgaaacacaggctttattataaattatcatttttttcagggtgaatatacatttttaaaagtttcaagcttatatacttacaagaaaaggagacattaaaaatattacttttacttctattggtgtaatgcagaacattaagtaccatctttcaaatgctaatttgaaatgctaatgaatatcatcataactcttgaagaggaatgaagaataaaatatgtcaattttaatttactttaaaataaatcatttatttagtacatattgtattagtgtctggtgtgcataagacctcggctgtgttgtggagtaataatgtcataccatctggagaaaattggaagtctagttggggctacagaaacatgtactgctagctgtatgataatatgacaagtactctaataggaacatgaggaatagagagtaattaattcttaacaaaattctttgtgaaaactttgcagaatttatagcatataaaaagggtcttattagtggagaacagagaatggtcattctaagagtacggtcatggtaagaccatattatttattatagaataatgaataatctcttttggagagaatataattttcctgagtgatagagtattggataaagaagcaaacaagaggaaatttaaggacatattaggaaaaatctttttatattattatgtgtttagtagggacctaagtatacatatcatattgttctcttaaagaataagatctctaaagagtgtaagacatacattaaagatgggataaaatgatcagataaaaatctgagatggatggctggatcggatagctacagtattctttgaactgttcccaaaatgcagtgccctgagcactgatgaaaagttcaaatgacaaactccccttactgaacttttacacaaaccattgaaatatatacatttagaatttatttggcccaggaataccacactttttcttctttaaaacattacaaatttacacttaaatataaaaaaaaattacgtatcttccctatccatccaatatacaatacatgtagttgttttcccttgatttctaaaatgtgtttgtggaagagaatttaagtgctttaaaaaaagaaataaagaaattggattgcttggtttggcttactgctgccttgaatgttctgagaacaataatgcaattagctaaaatgtttattcacaaaatttaattcctggggagtatattctcaaattgcctcttacaagtgtaatggaagcaagcagttgtttgttggctttgctgccaaaattctgaatggctagatttttataaaacttgggtataatgtatgtataatcttgtaaactctccattttaaaacgaagaaactaaatttatgaagaaactaaataatgaagaaactaaattttacacatacttttgttaattgtgttctcagccacaaatgaagaaatcttcagtgttattaattccacaaataaaaattttaatagattacgtttcatttcaatttaatttcatacctgattaaatatgctgaattaatagtattcttggattgtcagttccgggacaatctagtgataaggtggttgaaaatataagtgtggtatttattctagacaaagtataaatatccaagaaaaatgaatgcttcttctca

SEQ ID NO: 716058 - DNA, 604 bp, Homo sapiens
aaaggcaccaggtcgcacagggctttagagctctgcttcaaacttagacttgagcctgttggccccggggaaccttggcagggttaaaacaggaaaggaaaaagttacctttgtaaagttcagtagagccaatggcagagcctggattagagaatacggaattgggaggccaggagaccagttggggacagttcagaaattcccgtgaaaaggcagcactgcacagtgggccagaaaggagagttgggaaattggctttcaatacacagaagagatgggctgcctcccagactccccattcacatgccttgttattccccatggctgctatcagggaccatgaacttcaacactcatgttccagggggagcttgggttattttgaagcaagaatgcagkttgtaaaagaagacctttcacctccctgatacgcacatccccaacactggcccactggagactcacactggacagagggagcatcatggccattaatgcagggaaggcttcttcctcgaatctcgcctgaggggtgcacttgaccctggagtgaggacggagcctgcaaaggcagggctgcgtgagcatgcggctaagtccccca

SEQ ID NO: 716059 - DNA, 1984 bp, Homo sapiens
tcggctgggtgcagtggctcacatctgtaatcccagcactttgggaggccgaggcgggtggatcacaatgtcaggagatcgagaccatcctagctaacacggtgaaaccccgtctctactaaaaaaatacaaaaaattagctgggcatggtggtgggcgcctatagtgccagctactcgggaggctgaggcaggagaatggcgtgaacccgggaggcggagcttgcagtgagcccacatcgagccactgcactacagcctgggcgacagatcgagactccacctcaaaaaataaataaataaataaataaaataaaataaaataaaatgatttagtaaacatctcccaaggtttctctgaccttacccatacgtgtacaaatttccataaacagggatcatgtgtttgtctatttgtgtttcactcagcatgttttcctgtctattagtattgatccacatggtttttaataagttcatagtattgcagacataaatgtgccataatgtaccaaatcattctcttatttgatagccactttggatttttgctcatacaaataatgtgacatgaatgtttctgaacataaacctcttgcctattccaatattctttgaatctgtgtatcttcccagtccctagcatgttttggagaatgttctgaactaaatattcttaatatgaatgtgaggtggttcttctttacacaaagtacacatctaggcagaggatctttattaattctacttctgacactcctattggagaaaaaagaggaagaagatttgactgtgtgatcacatctgtaatgtctttagtcagggccttgcacatagtatgtgctcaataaataatagctgtgactattattgttgttgatgttatttcttttgcttggtccaagtgtccttcctgaaaaagacctgaacacggcatagggtgacctgaacaacagaaaatgtgaagaaaactacatttgtagtcactaaaagtttctgactctggctgtaattgtcagttgtagaaacaactaatcacccagagaatgcagttcactcaagcatcctctttagacatacagtgcaatggctgtgaaacggagacacagaccacatgttccatggaagccatgataatgatcagatatatttactcatttgtgatgaagaaagggagcacaatttttctggcttttgacacattattatctcggttccaactttcttatcccaaggaaatagtaagacatgttggacttttatcaatggcattccctgtcagatcctgtgggctaccactccatgttggatcactcccagagccttccacaaaagcctctaaaactgtctgctttaaacccttcaattataaagcagttaaaaaaacaaaaccctcagacataactgcttctgcctaaatctaccatgctgtttgtaagactgtatgtttatgatatgattttgaacatcatcttcaggaaaaaattcttactggtttatgctcagatttatgggtctattctttgccccaaggtgagatgaaagcaaaatcaataaggttagttttggattgcttgaagtaagtaacacaagccaattttcagtaacctcagatcagtgaagtaggagaaaattagataaagagagaaaaatcaagagggcacgcttgtgtctctaggcacatcatttgtgtcgatgacagaattcatttaaaaattataagcaatcgtgttttagtagcattagagaaaacagcataggttgtattaaatttgatactagaagtaytagaaataacaacaaaaatgttttgccctggcacctccctgacccccaatcagtaaccagcctcattagtcatggcacctctcacatgaggcccctatcaccgctttcataaatatagtaagattctctgaatcaaaatcctgtgttgtctcaaaaaataattataaataataattatgattatcatttattgagca

SEQ ID NO: 716060 - DNA, 591 bp, Homo sapiens
tcatattgttcaaacacatgttttacaatcaatctgtacagttaacacaattatcacagtgtcctgaggtgacgtacatcctcagcttacgaagataacaggattaagagattaaagtaaagacagacataagaaatgataaaagtgttatttgggaattgataaatgtccatgaaatcttcacaatttatgttcctctgccgcagctccagctggtccctccgttcagggtccctgacttcccgcaacaaacatacacaaaaggactggcatagaagagttactgggaggtgctagattttgatcatccaagcttgctccatttgcttgttggcacaccaarttgaaaactgacaatacagttccagaaccctaggtcaagaagcttctgtagatttacaagcagtattgtctctgggcaaggaagtgaagtgctgccttcagaatgctctctgtgtctccaccttcttctgtctctattctagaatcttgaaacctcaagaatggaaaagcttagctatttccttcttcacccctcaggtcaaagcctgctttcagaaaaggatctgacacctatagaatttcagacgg

SEQ ID NO: 716061 - DNA, 591 bp, Homo sapiens
tcatattgttcaaacacatgttttacaatcaatctgtacagttaacacaattatcacagtgtcctgaggtgacgtacatcctcagcttacgaagataacaggattaagagattaaagtaaagacagacataagaaatgataaaagtgttatttgggaattgataaatgtccatgaaatcttcacaatttatgttcctctgccgcagctccagctggtccctccgttcagggtccctgacttcccgcaacaaacatacacaaaaggactggcatagaagagttactgggaggtgctagattttgatcatccaagcttgctccatttgcttgttggcacaccaaattgaaaactgacaatacagttccagaaycctaggtcaagaagcttctgtagatttacaagcagtattgtctctgggcaaggaagtgaagtgctgccttcagaatgctctctgtgtctccaccttcttctgtctctattctagaatcttgaaacctcaagaatggaaaagcttagctatttccttcttcacccctcaggtcaaagcctgctttcagaaaaggatctgacacctatagaatttcagacgg

SEQ ID NO: 716062 - DNA, 1148 bp, Homo sapiens
aacataggaagacccccacctctacaaaaagtcaaaaaattagccatgcatggtggcgtgcacctatggtcccagctactcgggaggctgaggtgggaggattgcttgggcccaggaagtcaatgctgcagtaagctatgatcacgccactgcactcttgcctgggggaaagagtaaaaccctgtctcaaaaaaaaaagtaaaaccaggtactttcctgtatgactccttagggtcatggacttgtattctaaatctcctaatggcaaatattaggcataatttaggaaacatttttcaagttcttgcaggccacttgcctgcttctttttacatcaggaatccaggacctgtggtgtaattgctgatcctatttccagatagctgataaagtatctcaaagcactaactctgagtcattgcatctttgctgctctccacyctgaggaacttggttaagtaaaacctgtaaataatgcaggaagaaaagaacagccagtcacatctccattggctaaatcaatgctatacccatcccaattaaaatgcaacttcaatctgattcaaggactttgtgatctcatatttgaaacaagaatctcttctggataagtaaatgatatttggatctgaggcaatcgtcatcagttccttagggtaaaaggctatttccaatgatttccatataattagatgtttaaggtcttcttccctccaaccaccccacataaaaccgatgctcaaactgaatgttcatgaaaaataaatatcagaaatatgtttgtatgcaatttcaagaatatctgctacatgggcctctcatccttttattcttggtttaagtaacttctccaaagtcactcaaagccatttctcaaaaaccatcatggaattccaagtccttggtgtcggtgaaggtactgggatggtgcaaagtggtaatggagccaggtgggaaagggtgattgagagccctttatgctttctaggtgaggttgagtgatggtcattaatacggtgttactgggaaaaattaaatcaggcagaccaaatggaacaatcctttaaacaagaagaaattgtttgcaggtgtaaagaagcatgaaataggattctgctaatgagttttcattactagctaaatacata

SEQ ID NO: 716063 - DNA, 1148 bp, Homo sapiens
aacataggaagacccccacctctacaaaaagtcaaaaaattagccatgcatggtggcgtgcacctatggtcccagctactcgggaggctgaggtgggaggattgcttgggcccaggaagtcaatgctgcagtaagctatgatcacgccactgcactcttgcctgggggaaagagtaaaaccctgtctcaaaaaaaaaagtaaaaccaggtactttcctgtatgactccttagggtcatggacttgtattctaaatctcctaatggcaaatattaggcataatttaggaaacatttttcaagttcttgcaggccacttgcctgcttctttttacatcaggaatccaggacctgtggtgtaattgctgatcctatttccagatagctgataaagtatctcaaagcactaactctgagtcattgcatctttgctgctctccaccctgaggaacttggttaagtaaaacctgtaaatratgcaggaagaaaagaacagccagtcacatctccattggctaaatcaatgctatacccatcccaattaaaatgcaacttcaatctgattcaaggactttgtgatctcatatttgaaacaagaatctcttctggataagtaaatgatatttggatctgaggcaatcgtcatcagttccttagggtaaaaggctatttccaatgatttccatataattagatgtttaaggtcttcttccctccaaccaccccacataaaaccgatgctcaaactgaatgttcatgaaaaataaatatcagaaatatgtttgtatgcaatttcaagaatatctgctacatgggcctctcatccttttattcttggtttaagtaacttctccaaagtcactcaaagccatttctcaaaaaccatcatggaattccaagtccttggtgtcggtgaaggtactgggatggtgcaaagtggtaatggagccaggtgggaaagggtgattgagagccctttatgctttctaggtgaggttgagtgatggtcattaatacggtgttactgggaaaaattaaatcaggcagaccaaatggaacaatcctttaaacaagaagaaattgtttgcaggtgtaaagaagcatgaaataggattctgctaatgagttttcattactagctaaatacata

SEQ ID NO: 716064 - DNA, 1148 bp, Homo sapiens
aacataggaagacccccacctctacaaaaagtcaaaaaattagccatgcatggtggcgtgcacctatggtcccagctactcgggaggctgaggtgggaggattgcttgggcccaggaagtcaatgctgcagtaagctatgatcacgccactgcactcttgcctgggggaaagagtaaaaccctgtctcaaaaaaaaaagtaaaaccaggtactttcctgtatgactccttagggtcatggacttgtattctaaatctcctaatggcaaatattaggcataatttaggaaacatttttcaagttcttgcaggccacttgcctgcttctttttacatcaggaatccaggacctgtggtgtaattgctgatcctatttccagatagctgataaagtatctcaaagcactaactctgagtcattgcatctttgctgctctccaccctgaggaacttggttaagtaaaacctgtaaataatgcaggaagaaaagaacagccagtcacatctccattggctaaatcaatgctatacccatcccaattaaaatgcaacttcaatctgattcaaggactttgtgatctcatatttgaaacaagaatctcttctggataagtaaatgatatttggatctgaggcaatcgtcatcagttccttagggtaaaaggctatttccaatgatttccatataattagatgtttaaggtcttcttccctccaaccaccccacataaaaccgatgctcaaactgaatgttcatgaaaaataaatatcagaaatatrtttgtatgcaatttcaagaatatctgctacatgggcctctcatccttttattcttggtttaagtaacttctccaaagtcactcaaagccatttctcaaaaaccatcatggaattccaagtccttggtgtcggtgaaggtactgggatggtgcaaagtggtaatggagccaggtgggaaagggtgattgagagccctttatgctttctaggtgaggttgagtgatggtcattaatacggtgttactgggaaaaattaaatcaggcagaccaaatggaacaatcctttaaacaagaagaaattgtttgcaggtgtaaagaagcatgaaataggattctgctaatgagttttcattactagctaaatacata

SEQ ID NO: 716065 - DNA, 1148 bp, Homo sapiens
aacataggaagacccccacctctacaaaaagtcaaaaaattagccatgcatggtggcgtgcacctatggtcccagctactcgggaggctgaggtgggaggattgcttgggcccaggaagtcaatgctgcagtaagctatgatcacgccactgcactcttgcctgggggaaagagtaaaaccctgtctcaaaaaaaaaagtaaaaccaggtactttcctgtatgactccttagggtcatggacttgtattctaaatctcctaatggcaaatattaggcataatttaggaaacatttttcaagttcttgcaggccacttgcctgcttctttttacatcaggaatccaggacctgtggtgtaattgctgatcctatttccagatagctgataaagtatctcaaagcactaactctgagtcattgcatctttgctgctctccaccctgaggaacttggttaagtaaaacctgtaaataatgcaggaagaaaagaacagccagtcacatctccattggctaaatcaatgctatacccatcccaattaaaatgcaacttcaatctgattcaaggactttgtgatctcatatttgaaacaagaatctcttctggataagtaaatgatatttggatctgaggcaatcgtcatcagttccttagggtaaaaggctatttccaatgatttccatataattagatgtttaaggtcttcttccctccaaccaccccacataaaaccgatgctcaaactgaatgttcatgaaaaataaatatcagaaatatgtttgtatgcaatttcaagaatatctgctacatgggcctctcatccttttattcttggtttaagtaacttctccaaagtcactcaaagccatttctcaaaaaccatcatggaattccaagtccttggtgtcggtgaaggtactgggatggtgcaaagtggtaatggagccaggtgggaaagggtgattgagagccctttatgctttctaggtgaggttgagtgatggtcattaatacggtgttactgggaaaaattaaatcaggcagaccaaatggaacaatcctttaaacaagaagaaaktgtttgcaggtgtaaagaagcatgaaataggattctgctaatgagttttcattactagctaaatacata

SEQ ID NO: 716066 - DNA, 1888 bp, Homo sapiens
ttagccattatctgctcattaacagctctctgtctctcattatccttctgcagtgtgcagcttagccatacctggcctactctactgcctttgtaggctttgttctccatgtatttttcaaatacttacatcattgcacctcctacagcattccccctaatgtgggacatttttttcagttcaccaccagcaaaatctagcaattgagccatcaccttgtgcctcgtcaatcacccaagatgatatcctccactcctgctaggagatccagtcccagacccccatcttaccacctgtcttccgagaccactttcgttggtctgagaaggattaaacgtgcaaaggagctgacatcaaaacaggattaaacatgcaaagattttattaggggagatgcctatggatgggaattggggagggagccgggaaagtccaggagagctgccagactgtgatagaatctgcaaaggagagataacaagaaggttgggtaaaagcatcctaggctaccatgaagactaaagaaggtccagcaagtgtgtcagggagccgggaagcctatgtcaatcactagaggagtcttgagtctcccagaaatgggtctgcccttgtatccctgctacactcgtttgttagctaggagcagcctgtgggaagcatggccttgatgtaaatgttgtgacagacttcagcagcaaggagctggtgccctggttcaatgattggaagccatagttggaagcccgcaaagttcattctcatggccactacctactatgggatatcaagtgaataggcaaccagagccgcccattatgagctgagtattttcagatccagcaacaagatgaggcaagcacatttggtacattagaaatagtgactgagcaagtctggctagcacaagaaagttacacacacatggctgaccccacgttgtctccctctactgcaccaatgcttcccctcaatcacatccgtccactgcctcatggcaggttccccacggctagctggtggaagaggcaaacaggcctggtttacatatggactgccctaagaagatgagctaaaattcaactgttacataccagccactctcaggagtgacctcaaaagatagtgatgagaaaaacatcctcctggtgtccaattttaagcaatatacttggttgccactttaaatagtcacaaaagtgagctgaggtaaagacatacatgatgacttctgaacagtggtgaatggcttggccaattactcaggggcctgggaagtgacagataggatcctaaatcagtgacaaagagatgtgagaaagaatcatgaggattcatctatgggagtgggacagtgtgtagatctttgtgttttatgttaatgcccaataagaaactctacaaacagagggacaaaactcatccaagtcatgtcaaccagcctccctcctcagccatgcagttcttgcacaacgaacccatgaacagaatagctatggtggctaagcatgggctctgattcaccaaggctgatcttggcaatactgctccgaatgcccactggccagcagcagaaactaatatgagccctcaccatagcactatcctaagtgggaatcaaactctctttggtaacaagttggttatgtcagactcctaactctgggacatggggagacatggtgactcatccttaccagaattgayacctactcaggatatggatttatgggtttgccttccctgctcacagcatcctttgtcaacaataccacctgagggctcttgcctaatctgtatcatgggatcctatgtaatcccatgattacataggatgtaatcacatcaacaaaatggagctattttgtggttaaggatgggtctgtgaaca

SEQ ID NO: 716067 - DNA, 2092 bp, Homo sapiens
ccacctctgtttcagagagggggtaacccaagcacggaatagcgcagtcccttgcctaaggacacacagcgaggaagcgcccagcggggactcgaacccacgcactctggctccagagtcgatgctcttaatattatgttgagccgctctccgtgatccagccgtaaggggactaattaagggacagcaaactgagctgcctaaatttctcgtgtgtgcggcctgaggtgggccggctgtcggcctgcatttgggcgagcagtacagggcgatctcaggatgttcaccctccctgcgtctccgcgcgggccaggctggccgggctcagctgctccaagtccaagtcctaatatggaagtcgtgccccgccgcagagccggacctgttgtgtctttgcctttctacgcatctgcgcccacctcggcccagaacaaggatttcaaaaagtgccccgcatatttgacttcagaaggactcaccccaagccgcggaagcagcgagagtggccaggacaagagcagggagccacatcctggaagggcgacagttccgggggcctgcgaggtctccgtgcagctcagagggactgtgctgtccagccctggcgcccagccccgcccagagttaccgccctgcgctgccaattgcctaatcctctaattgggagagatcagaaaagccctccctttcctcagatctccctgggcttctagtgggggcctcaggccacgcccacccacagtttaccctctttcatcaaaccagtctggactctactgtcagattacagagagctgtaaacttgcccaactacttgttacataagggttcacccttgcaggactctaacctcagtgcactgtgacggccccccaagggcccacaccagcaggcagatgcttttaggcaaagggaagctttgatctgaggtcctcagaaacaactggaaaatgttagagccactcacacctcacagctcagctgggtaagttaggacatatctcagctcccagggcttgtgttttcatagctttccaggctctcaagcttggaagcgatcttaaatttcatcgagtcccctttctgaggcctgaattagcttcacaatatcctgccaactggtccagcctcctgtcacacaccatcggtgtcagagaactcactactttccaaagcagggatttttggacagaatgtaaaaatgaactccgtccccccatagtccctggctgttatcatccatccatccaagtacccatccattttgtgaacatttaccaaaatgcttggcacctggccatgtataatggatacaaagaccaattcaagacatggttcagcttctcaaggggctcaccattgtagacaagacagatggggtggaggagcagtaggggtgatgtcaaggcaatgtgaaatcaccaaattaaggggatacagagtgctgtgggcacacctggaaaactgtcatttacaagctgctggggacacaaggaagtcactcaaagcctctttcatgggattattaaatgtccaacaatagggaattcactaaacacactgtggtaccgctggctaaggaaatacgatgtattcactcaaaatagtgatgtgcacagctatttattaacaatgaagacaggatgcgttgtgaaaggagaaaataayaggttataaactgttgtgcggtgtaggcagttcctcaaaaagttcaacacagagtttccatatgacccagcaattcccctcctaggtgtctaccgaagagaactgaaagcatgtccacacaaaagcttgtacacaaagagcagtgtcattcatcctagtcaaaaagtgggcacaacccgcatgtccatgacctgatgaatgtgtaaatgaagtgtggtgtatgcgtgcagaggcatatcatccagccataagaagaacatgctacaacgtggatgaagctggaaaacatcatggtaaaggaaagaagccagccacaaaaggccacatgtcgtatgatgctttttatatgtaatttccaaaatagtcaaatccatggagacagaaagtgtttgacagggtctggggaaggggaaagagacgggga

SEQ ID NO: 716068 - DNA, 1394 bp, Homo sapiens
caccatggtctgacagccaagtcaccaccacgaacccgggagccaggatgctcccacgcacttttgccggagttaacattgcagtttctccaaggaaatacacttttggaggagtctgcaaaggggctgaaggtggacacaaatcaaaggcagggaagcagaggcacgtgmgctcagtgtgacaatgagcttttgcctggcctgcaggccctttcctcttccatccccaccaggacacttggtccttgggagtgtggtcaggggagaggaaaagcgcaggccagatttggtcccattcccaactctctcccccagccctttggcactacagcatcatggtgggagggcaccagcaaacaggaggggtcccaaggggagcctaggtccacaactgaggacctgggagccaaacccagtctcaggcgcccagagctgactcctcctacagcccccataagggatacgctaatgcaggaagaccaaagtggaagaaccatggccaaggccactttgcaatttgggtttatctaccagagtgggagggaggccttgtccctgctctttcccatcttcggttcacgtaagccattaaagtctccccgcagcactgaagggggcaacctgtaaccctaagatagtaagctactgctttcccagcgcctctgcaccaggaggtgggcaggatggcaggtgacaccaccatagctcccactgcggggcacgaggctgcagccattcccagcctgctcagagggcagggttcaaccacctccccctccccagcagaaaagagaggaaacaggtgcttcagctgttgtttattgacatacaggtaggctctatagcaacaggcctggaggtgctgcagtagtgggggaaaatggaaggtggagggtggagtgtttgctgcaggacagctgagtggagggtggggacaggtgcaaactggagaggcctagagagctagagaagcaagtaagggccagggccagagtcggcttcaatggaacaacagcccagtgccctaaggcccctaactcttgctggctgtttcttgaccccaagccagggttgggagtcctctgggcatccattttttctaaaggaactggacagagtacacacaggaaaggaagctgtcaccctcttgccatctggctccaggggcctccagtccagcattcctccttcttcccttgattgggtggggccacatgatgggcagccaggctctgggctgtcccactagagcaggctgcaaacacagccatgtttcagtgaggcgttgatcttcttccctggtgtcccaacctaccagtgccacgttacagcccagagtgagttctacaagcgttgctggcctaatggatgggctgggggaagggggtgggaca

SEQ ID NO: 716069 - DNA, 641 bp, Homo sapiens
tgtctcctgggcacagagctagactacttttcctagcctgccttgatgtgaccgtctgggtgcaagtgggttcagccctctgagtttggcctttagaaatcttctgtgatcgcccatactcttcttccatctctgagatccatgcagaggaattggccgagaactctaggaacctaggggatggcagagccgcagatggaaggcgtctggaccctttagctgctgcccacctcgaatatttgyatttaactttgcatgagtgaaaaacagatgtgtactaagatcatgggatttgttacttgctctaatgcatgttaccaactttttatttctatttgtcaaaatacattttttcttagttgaaattaatgtatgaagcatattttatagtctgctttcttctttcaacctttgcatcaacttatttttgtatgtaaagaatgttgacatgctaacagttttgaacacctatattagtatttcatgttgttaatattctcttgaattacccagcctcaactgttttccattagaattccactttttcaccataataaattatgctattcaatacttttgtaccaattatttgggaaacttatccaaaatgaaattatctggccaaataaatgaatggttga

SEQ ID NO: 716070 - DNA, 641 bp, Homo sapiens
tgtctcctgggcacagagctagactacttttcctagcctgccttgatgtgaccgtctgggtgcaagtgggttcagccctctgagtttggcctttagaaatcttctgtgatcgcccatactcttcttccatctctgagatccatgcagaggaattggccgagaactctaggaacctaggggatggcagagccgcagatggaaggcgtctggaccctttagctgctgcccacctcgaatatttgtatttaactttgcatgagtgaaaaacagatgtgtactaagatcatgggatttgttacttgctctaatgcatgttaccaactttytatttctatttgtcaaaatacattttttcttagttgaaattaatgtatgaagcatattttatagtctgctttcttctttcaacctttgcatcaacttatttttgtatgtaaagaatgttgacatgctaacagttttgaacacctatattagtatttcatgttgttaatattctcttgaattacccagcctcaactgttttccattagaattccactttttcaccataataaattatgctattcaatacttttgtaccaattatttgggaaacttatccaaaatgaaattatctggccaaataaatgaatggttga

SEQ ID NO: 716071 - DNA, 1740 bp, Homo sapiens
  misc_feature 1276, 1279, 1280, 1281: n = A,T,C or G
accatggaatactatgcagccataaaaaatgatgagttcatgtcctttgtagggacatggatgaaactggaaattatcattctcagcaaactatcgcaagaacaaaaaaccaaacaccgcatattctcactcakaggtgggaattgaacaatgagaacacatggacacaggaaggggaacatcacactctggggactgttgtggggtagggggaggggagagggatagcattgggagatatacctaatgctagatgacgagttagtgggtgcagcgcaccagcatggcacatgtatacatatgtaactaacctgcacattgtgcacatgtaccctaaaacttaaagtataataataataaataaataaataaataaatgaatgaatgaataaataaataaataaataaataaataaaaaatgaaaacatacatacagggtctcactgtgttgcctaggctggtctcgagctcctgagctcaagttatccactcgtcttggcctcccaaagtgttggggttacagatgtaagccaccacacccagccttattagcctttttgcaagcagaattgtgattatttcatgcccaaagtactttatacaccaatttgagtattcatacatcagcttctaaaagcatggttgaagccatggtgcggtgcacagtctctcgaacaacatttgcacttttgtatgattaaccatcttgatcattcagtctgggatggaattactagaatagtgctctgaagtttaaagaaatgatggaaatggagaaaataagatgatactaagaaaaatataaataagacaacataaaaatgattaatgtatagagattaaggatatacatatatccttaattggatgttacttagttttaatgtggtcatttacacattcaattttaaatggaaaagcaaacataaacacataaaatactagaactatatagagataagtgtgtctgaaaggtgagatgtaatcacagatttcaataaagtattagagactcactcttgtaatcctagcactttgagtcaggaagattgcttgagtccaggagtttgagaccagcctggacgacacaggaaaactccatctcttacaaaaaaatacaaaaattagccaggcttggtggcacatgcttatactcccagccactcaggaggctaatgtgggagaatcatttgacaccgggaagtcaaggatgcagtgggccatgatcatgccactcccactgcagcctgggcaacagagtgataccctgtctcnatnnnaaaccaccaataaaaagaaaatattaaagattcagtggtgttctgatacaatggtgtttaccccttgcactggactccaagttccttacaagaggatcccagcttaattggtctttatacccctagtgcctaggatgggtgctgcctcttggtagacattcaagagacctatgttgaaccaactcatttaattgtgtacaagcctctaactttattaacagcagatattcaataccactctctttatataaaaatttaaagtacttcttagtggttagagtttccctttgtttctgtgcacccacaagaaagcattcctttctaaacttcatgtataaccctaaccaagattaaaccactcagatggtctaaacagatgctggctcttctgtacatgccaaaattcagctttgtactattcttactttttatatctctactatttcactaaccagccac

SEQ ID NO: 716072 - DNA, 1740 bp, Homo sapiens
  misc_feature 1276, 1279, 1280, 1281: n = A,T,C or G
accatggaatactatgcagccataaaaaatgatgagttcatgtcctttgtagggacatggatgaaactggaaattatcattctcagcaaactatcgcaagaacaaaaaaccaaacaccgcatattctcactcagaggtgggaattgaacaatgagaacacatggacacaggaaggggaacatcacactctggggactgttgtggggtagggggaggggagagggatagcaytgggagatatacctaatgctagatgacgagttagtgggtgcagcgcaccagcatggcacatgtatacatatgtaactaacctgcacattgtgcacatgtaccctaaaacttaaagtataataataataaataaataaataaataaatgaatgaatgaataaataaataaataaataaataaataaaaaatgaaaacatacatacagggtctcactgtgttgcctaggctggtctcgagctcctgagctcaagttatccactcgtcttggcctcccaaagtgttggggttacagatgtaagccaccacacccagccttattagcctttttgcaagcagaattgtgattatttcatgcccaaagtactttatacaccaatttgagtattcatacatcagcttctaaaagcatggttgaagccatggtgcggtgcacagtctctcgaacaacatttgcacttttgtatgattaaccatcttgatcattcagtctgggatggaattactagaatagtgctctgaagtttaaagaaatgatggaaatggagaaaataagatgatactaagaaaaatataaataagacaacataaaaatgattaatgtatagagattaaggatatacatatatccttaattggatgttacttagttttaatgtggtcatttacacattcaattttaaatggaaaagcaaacataaacacataaaatactagaactatatagagataagtgtgtctgaaaggtgagatgtaatcacagatttcaataaagtattagagactcactcttgtaatcctagcactttgagtcaggaagattgcttgagtccaggagtttgagaccagcctggacgacacaggaaaactccatctcttacaaaaaaatacaaaaattagccaggcttggtggcacatgcttatactcccagccactcaggaggctaatgtgggagaatcatttgacaccgggaagtcaaggatgcagtgggccatgatcatgccactcccactgcagcctgggcaacagagtgataccctgtctcnatnnnaaaccaccaataaaaagaaaatattaaagattcagtggtgttctgatacaatggtgtttaccccttgcactggactccaagttccttacaagaggatcccagcttaattggtctttatacccctagtgcctaggatgggtgctgcctcttggtagacattcaagagacctatgttgaaccaactcatttaattgtgtacaagcctctaactttattaacagcagatattcaataccactctctttatataaaaatttaaagtacttcttagtggttagagtttccctttgtttctgtgcacccacaagaaagcattcctttctaaacttcatgtataaccctaaccaagattaaaccactcagatggtctaaacagatgctggctcttctgtacatgccaaaattcagctttgtactattcttactttttatatctctactatttcactaaccagccac

SEQ ID NO: 716073 - DNA, 1740 bp, Homo sapiens
  misc_feature 1276, 1279, 1280, 1281: n = A,T,C or G
accatggaatactatgcagccataaaaaatgatgagttcatgtcctttgtagggacatggatgaaactggaaattatcattctcagcaaactatcgcaagaacaaaaaaccaaacaccgcatattctcactcagaggtgggaattgaacaatgagaacacatggacacaggaaggggaacatcacactctggggactgttgtggggtagggggaggggagagggatagcattgggagatatacctaatgctagatgacgagttagtgggtgcagcgcaccagcatggcacatgtatacatatgtaactaacctgcacattgtgcacatgtaccctaaaacttaaagtataataataataaataaataaataaataaatgaatraatgaataaataaataaataaataaataaataaaaaatgaaaacatacatacagggtctcactgtgttgcctaggctggtctcgagctcctgagctcaagttatccactcgtcttggcctcccaaagtgttggggttacagatgtaagccaccacacccagccttattagcctttttgcaagcagaattgtgattatttcatgcccaaagtactttatacaccaatttgagtattcatacatcagcttctaaaagcatggttgaagccatggtgcggtgcacagtctctcgaacaacatttgcacttttgtatgattaaccatcttgatcattcagtctgggatggaattactagaatagtgctctgaagtttaaagaaatgatggaaatggagaaaataagatgatactaagaaaaatataaataagacaacataaaaatgattaatgtatagagattaaggatatacatatatccttaattggatgttacttagttttaatgtggtcatttacacattcaattttaaatggaaaagcaaacataaacacataaaatactagaactatatagagataagtgtgtctgaaaggtgagatgtaatcacagatttcaataaagtattagagactcactcttgtaatcctagcactttgagtcaggaagattgcttgagtccaggagtttgagaccagcctggacgacacaggaaaactccatctcttacaaaaaaatacaaaaattagccaggcttggtggcacatgcttatactcccagccactcaggaggctaatgtgggagaatcatttgacaccgggaagtcaaggatgcagtgggccatgatcatgccactcccactgcagcctgggcaacagagtgataccctgtctcnatnnnaaaccaccaataaaaagaaaatattaaagattcagtggtgttctgatacaatggtgtttaccccttgcactggactccaagttccttacaagaggatcccagcttaattggtctttatacccctagtgcctaggatgggtgctgcctcttggtagacattcaagagacctatgttgaaccaactcatttaattgtgtacaagcctctaactttattaacagcagatattcaataccactctctttatataaaaatttaaagtacttcttagtggttagagtttccctttgtttctgtgcacccacaagaaagcattcctttctaaacttcatgtataaccctaaccaagattaaaccactcagatggtctaaacagatgctggctcttctgtacatgccaaaattcagctttgtactattcttactttttatatctctactatttcactaaccagccac

SEQ ID NO: 716074 - DNA, 1740 bp, Homo sapiens
  misc_feature 1276, 1279, 1280, 1281: n = A,T,C or G
accatggaatactatgcagccataaaaaatgatgagttcatgtcctttgtagggacatggatgaaactggaaattatcattctcagcaaactatcgcaagaacaaaaaaccaaacaccgcatattctcactcagaggtgggaattgaacaatgagaacacatggacacaggaaggggaacatcacactctggggactgttgtggggtagggggaggggagagggatagcattgggagatatacctaatgctagatgacgagttagtgggtgcagcgcaccagcatggcacatgtatacatatgtaactaacctgcacattgtgcacatgtaccctaaaacttaaagtataataataataaataaataaataaataaatgaatgaatraataaataaataaataaataaataaataaaaaatgaaaacatacatacagggtctcactgtgttgcctaggctggtctcgagctcctgagctcaagttatccactcgtcttggcctcccaaagtgttggggttacagatgtaagccaccacacccagccttattagcctttttgcaagcagaattgtgattatttcatgcccaaagtactttatacaccaatttgagtattcatacatcagcttctaaaagcatggttgaagccatggtgcggtgcacagtctctcgaacaacatttgcacttttgtatgattaaccatcttgatcattcagtctgggatggaattactagaatagtgctctgaagtttaaagaaatgatggaaatggagaaaataagatgatactaagaaaaatataaataagacaacataaaaatgattaatgtatagagattaaggatatacatatatccttaattggatgttacttagttttaatgtggtcatttacacattcaattttaaatggaaaagcaaacataaacacataaaatactagaactatatagagataagtgtgtctgaaaggtgagatgtaatcacagatttcaataaagtattagagactcactcttgtaatcctagcactttgagtcaggaagattgcttgagtccaggagtttgagaccagcctggacgacacaggaaaactccatctcttacaaaaaaatacaaaaattagccaggcttggtggcacatgcttatactcccagccactcaggaggctaatgtgggagaatcatttgacaccgggaagtcaaggatgcagtgggccatgatcatgccactcccactgcagcctgggcaacagagtgataccctgtctcnatnnnaaaccaccaataaaaagaaaatattaaagattcagtggtgttctgatacaatggtgtttaccccttgcactggactccaagttccttacaagaggatcccagcttaattggtctttatacccctagtgcctaggatgggtgctgcctcttggtagacattcaagagacctatgttgaaccaactcatttaattgtgtacaagcctctaactttattaacagcagatattcaataccactctctttatataaaaatttaaagtacttcttagtggttagagtttccctttgtttctgtgcacccacaagaaagcattcctttctaaacttcatgtataaccctaaccaagattaaaccactcagatggtctaaacagatgctggctcttctgtacatgccaaaattcagctttgtactattcttactttttatatctctactatttcactaaccagccac

SEQ ID NO: 716075 - DNA, 1219 bp, Homo sapiens
tctaacaacacagtaatagaaattgtagcttattaataatattttacatgagggaaatacactaaggaactataatcaaaagttattgactaagtttctgtcaattaatacttacctatgtgaaaaatttgtctagacacataagacaaagaagagaaggaatttactagaaaaccatyctcaaggagcttgtcacttagttgggccaaaaatacatagaaagatgataactctaacaagcagaatacaaatgactaagaagtggcagagacaataaatgctgggcatcaaaggatcactttgggccaggaatgtcagtaattatttccagaaaggtaaatattagcaacactgagctttgtgattcagaagcacaagcttcaccttctggtaattcccctgggcaaattccttgatcatgaatatgatcatttaaaaatcaattagtaggccactctattcacatgatttcacagtctcccaccttcttttgcaagggtcaagtaaaactaacatcatgttcaataaaacatcgtattaacacttctaaatagttgtggaaataatccatagtgcctattttgagctaaacccaaaaacaaatataataaaaataacaaaacacaaatgtattttttgaaactatgaatattagaaaaaaaaactcttaagcttccattaaactatttgcctccttgaggtaaacagcagaaaagaggaaaatgatgaagatactctcatgagtagaattgtgcttaagataaactggcacaaccaagtcaacttacagctaaagacacaagcagataatgacagagagacagagagaataagaatgaagtactccaacccccaaatgatagagataccagaggaaatgaaaagagctagcgatactcaagggaataaaattcaactggacaggagaatccactatagatattatagaagaactacgaatttctgtggcaatgatgcaggtcttgagagaatgaatggcatgaacatttaacaacacataattctaaaaacaaacaaaacagggccaatgaagaaaaaaatgactggaaatgaaatgtttagagtattggatgtttgtatgaagaagaattaaattagatataaatgtcatgtcataaaccacaataaattccaaatgagttaaacgtgaaacacacactgaaaactatgtgtccagtaaaatagaaaaataaatttg

SEQ ID NO: 716076 - DNA, 2511 bp, Homo sapiens
  misc_feature 1174, 1175, 1176, 1177, 1178, 1179, 1180, 1181, 1182, 1183,1184, 1185, 1186, 1187, 1188, 1189, 1190, 1191, 1192, 1193,1194, 1195, 1196, 1197, 1198, 1199, 1200, 1201, 1202, 1203,1204, 1205, 1206, 1207, 1208, 1209, 1210, 1211, 1212: n = A,T,C or G
  misc_feature 1213, 1214, 1215, 1216, 1217, 1218, 1219, 1220, 1221, 1222,1223, 1224, 1225, 1226, 1227, 1228, 1229, 1230, 1231, 1232,1233, 1234, 1235, 1236, 1237, 1238, 1239, 1240, 1241, 1242,1243, 1244, 1245, 1246, 1247, 1248, 1249, 1250, 1251: n = A,T,C or G
  misc_feature 1252, 1253, 1254, 1255, 1256, 1257, 1258, 1259, 1260, 1261,1262, 1263, 1264, 1265, 1266, 1267, 1268, 1269, 1270, 1271,1272, 1273: n = A,T,C or G
cacaggtgaaagcaggcagagaaagaaaaagaaattaactttttctgtttactggcaactctagagaaagatttagacaagaaagtaactctctaaaatgtgattttaggatcctctgaatatgttattctttgctttgcctcaatatcaaataaatgtatatgtagagagtatcactcaattgctagaaactgtagtgaagatacataataactgtacatattagagaattataagttaacagttccaatacattgcaaaccaagggaaaaaaatgacaaaggaaatcaaatgttcatgacaacaaaaaaaacactaaatgatttgtttttgacagaataaactctggcacacttaaaaattatttagcagttattactgcttttgtttttttgttgttgtttcttttctttgagacacagtctcactctgtcccccaggatggagtgcaatggtgcaatcttggctcactgcaacctccgcctcccaggttcaagccattctcctgcctcagcctcccaagtagctgggattacaggcacacgccaccacacctggctaatttttatatttttagtagagacggggtttcaccatgttggccaggccagtcttgaactcttgacctccagtgatccacccgcctcggcctccaaatgtgctaggattacaggcgtgagccaccccgcctggcctattactgcttttaaaattgtctctaaatgtgacaaatataataaagtgagtctaaaaaaataaaatgacataaatcaagctaatgatttcattttggttaaaaaaatcagattgagaaaaatgggagaaagccaactattacactttaaataagcaattcagataagcaatgaattgaaagttgttatatatccgttctggaaagctcacttttacatttgagagaaactaagtgactgacacaatttacattaagatatataaactatatgggacaacgaaaatatcttgatgttagttacacaacatgatagcctcagaaaatgagatgtttcaatgtaatacctccttaaatgttaatctctaaggagtttatcagtctaagactggaatggagagagcgatccttgagacatctgtaactgttgttgcatgacgaatctcaatagctcactcaactgccaactcgtctggtccnnnnnnnnnnnnnnnnnnnnnnnnnnnnnnnnnnnnnnnnnnnnnnnnnnnnnnnnnnnnnnnnnnnnnnnnnnnnnnnnnnnnnnnnnnnnnnnnnnnnaatacaaatctgggtcttttcaacatctcattggcatggccaaacaatagtattatgactagtcattttttcgtgaaaatcagtaaaatgtaacttataatcaagacaaatttatctaaataaaagtggagataatttgttggcagtacacttggagtacataaaactgctcaaggaggttattcaggctgaagggaaacatacctgatagaaattcagatctacaggaaagaagcacaatggaaactgaaaatatgtgagtaaataaatatattatgtttcttaagttctttaatattcaattgactatttaaagagaaaatttcttaagggcagagattacacaataaggagacatgatagctccttaatattttctggctatgacattgtcataaatttttttttgtggtaaaaaacatatatcataaaatttatcatcttagtcattttaagtgtatagttcaatagtgttaagtatttatattcacattgctgtgaaacagatctccagaacttttttaacttgcaaaactgtaagtctatacccattaaacaactctcctttcccccacctctcttaagttaatttttacacacaggatagaataacatttactcaagtttctaacatttccactctgtctcaactgcatttccttttctttctttttttttttttttctgagataaggccttgctctgttacccaagctggagtatgcagtggcgtgatctcagctcactttagcctctgcctcctgggctcaagtgatgttcccacctcagcctcctaagtagttggaactatagggacatgccatcacacccatctaatttttgtatttttagtggagatggggtttcaccatgttgcccaggctggtcttgaactcctgggctcaagcaatccatcctccttagcctcccaaagtgctgggattataggtgtgagccaatgtgcccagcttggaattttttttaacaaggagaaattaaaggcatctgttgggtgaagcacttctatgccttgaattaaaaaaaaaaaaacwtcttcttttttttttttgttttttagagacagagtcttgctctgtcacccaagctagagtgcagtagagccatcataattcactgcagcctccaattcctgggctcaagcaatccttcccactcagcattccaagtagctaggactacaggcgtgtgtccccatgcttggttaattaaaaaaaaaa

SEQ ID NO: 716077 - DNA, 2511 bp, Homo sapiens
  misc_feature 1174, 1175, 1176, 1177, 1178, 1179, 1180, 1181, 1182, 1183,1184, 1185, 1186, 1187, 1188, 1189, 1190, 1191, 1192, 1193,1194, 1195, 1196, 1197, 1198, 1199, 1200, 1201, 1202, 1203,1204, 1205, 1206, 1207, 1208, 1209, 1210, 1211, 1212: n = A,T,C or G
  misc_feature 1213, 1214, 1215, 1216, 1217, 1218, 1219, 1220, 1221, 1222,1223, 1224, 1225, 1226, 1227, 1228, 1229, 1230, 1231, 1232,1233, 1234, 1235, 1236, 1237, 1238, 1239, 1240, 1241, 1242,1243, 1244, 1245, 1246, 1247, 1248, 1249, 1250, 1251: n = A,T,C or G
  misc_feature 1252, 1253, 1254, 1255, 1256, 1257, 1258, 1259, 1260, 1261,1262, 1263, 1264, 1265, 1266, 1267, 1268, 1269, 1270, 1271,1272, 1273: n = A,T,C or G
cacaggtgaaagcaggcagagaaagaaaaagaaattaactttttctgtttactggcaactctagagaaagatttagacaagaaagtaactctctaaaatgtgattttaggatcctctgaatatgttattctttgctttgcctcaatatcaaataaatgtatatgtagagagtatcactcaattgctagaaactgtagtgaagatacataataactgtacatattagagaattataagttaacagttccaatacattgcaaaccaagggaaaaaaatgacaaaggaaatcaaatgttcatgacaacaaaaaaaacactaaatgatttgtttttgacagaataaactctggcacacttaaaaattatttagcagttattactgcttttgtttttttgttgttgtttcttttctttgagacacagtctcactctgtcccccaggatggagtgcaatggtgcaatcttggctcactgcaacctccgcctcccaggttcaagccattctcctgcctcagcctcccaagtagctgggattacaggcacacgccaccacacctggctaatttttatatttttagtagagacggggtttcaccatgttggccaggccagtcttgaactcttgacctccagtgatccacccgcctcggcctccaaatgtgctaggattacaggcgtgagccaccccgcctggcctattactgcttttaaaattgtctctaaatgtgacaaatataataaagtgagtctaaaaaaataaaatgacataaatcaagctaatgatttcattttggttaaaaaaatcagattgagaaaaatgggagaaagccaactattacactttaaataagcaattcagataagcaatgaattgaaagttgttatatatccgttctggaaagctcacttttacatttgagagaaactaagtgactgacacaatttacattaagatatataaactatatgggacaacgaaaatatcttgatgttagttacacaacatgatagcctcagaaaatgagatgtttcaatgtaatacctccttaaatgttaatctctaaggagtttatcagtctaagactggaatggagagagcgatccttgagacatctgtaactgttgttgcatgacgaatctcaatagctcactcaactgccaactcgtctggtccnnnnnnnnnnnnnnnnnnnnnnnnnnnnnnnnnnnnnnnnnnnnnnnnnnnnnnnnnnnnnnnnnnnnnnnnnnnnnnnnnnnnnnnnnnnnnnnnnnnnaatacaaatctgggtcttttcaacatctcattggcatggccaaacaatagtattatgactagtcattttttcgtgaaaatcagtaaaatgtaacttataatcaagacaaatttatctaaataaaagtggagataatttgttggcagtacacttggagtacataaaactgctcaaggaggttattcaggctgaagggaaacatacctgatagaaattcagatctacaggaaagaagcacaatggaaactgaaaatatgtgagtaaataaatatattatgtttcttaagttctttaatattcaattgactatttaaagagaaaatttcttaagggcagagattacacaataaggagacatgatagctccttaatattttctggctatgacattgtcataaatttttttttgtggtaaaaaacatatatcataaaatttatcatcttagtcattttaagtgtatagttcaatagtgttaagtatttatattcacattgctgtgaaacagatctccagaacttttttaacttgcaaaactgtaagtctatacccattaaacaactctcctttcccccacctctcttaagttaatttttacacacaggatagaataacatttactcaagtttctaacatttccactctgtctcaactgcatttccttttctttctttttttttttttttctgagataaggccttgctctgttacccaagctggagtatgcagtggcgtgatctcagctcactttagcctctgcctcctgggctcaagtgatgttcccacctcagcctcctaagtagttggaactatagggacatgccatcacacccatctaatttttgtatttttagtggagatggggtttcaccatgttgcccaggctggtcttgaactcctgggctcaagcaatccatcctccttagcctcccaaagtgctgggattataggtgtgagccaatgtgcccagcttggaattttttttaacaaggagaaattaaaggcatctgttgggtgaagcacttctatgccttgaattaaaaaaaaaaaaactwcttcttttttttttttgttttttagagacagagtcttgctctgtcacccaagctagagtgcagtagagccatcataattcactgcagcctccaattcctgggctcaagcaatccttcccactcagcattccaagtagctaggactacaggcgtgtgtccccatgcttggttaattaaaaaaaaaa

SEQ ID NO: 716078 - DNA, 522 bp, Homo sapiens
gaccctaaaattggaatcatttcctttagtataaagtaagggtggacaggccattgtgaataccaaatttttcccactagtaatgagtccatccctcgagtgctgctatgtgtcaggagcttaacaatgtattagacacatcttattatactcattatcagatgaggaaacaggctaaaaggtcaagccacagctagcatttgatgacatgaggccttaaaaagtgaacattagcttctatagagtgcttactatggagcaaactcagtggggagtactttttataattcccacacagcaaacttatgaggttggtactatyactattattaatttttgcagatgaggaagtagagtcacagaggaatcaagttggaattctaagattgtttagctctcaacgcttgcttcttccacatggctgtattcctagatgaaatggaaattgacatttccaagattaaacactagttattgagagaagccagggttctaggaagtagtagggaagaagaattgatg

SEQ ID NO: 716079 - DNA, 632 bp, Homo sapiens
ttatcatgtgctagacaccatgttaaacattttacatatattgagtccattggtccttaccagagcctgatagtgtcaatattattattatcttcatcttacaaaaagggaaactgagccagaacttcgaaattgtgcccatgttaagctttactttaaagatagtggatctagaatttgaacayatgtgcttaaactccagaccttgtcctggaaactttcccagttcatttaatgtctcaaaatatgtttataatagagaaagaactgagtgttttgagaagagccccctcctttgaacagaaattgtcaagcaagtaatcatattaaaccttattaccaaagattcaattcaaatacaactcctggcatcaacctcctcccagccaaaaaaatacagtaaaaaaaaaaaaagaataagagaagaaaattatccaattctgaaaagaataaaatacacttaaatgctctaagtttaataaagacttttttaaggtggggcgttctgaaggacagccataaaaaccattaaaggtttgggcaatatatgcactaatcattctaacagcgatttctcaggctctgttcctttcacccttacttttctgtctttccctaacttgtgattttgg

SEQ ID NO: 716080 - DNA, 632 bp, Homo sapiens
ttatcatgtgctagacaccatgttaaacattttacatatattgagtccattggtccttaccagagcctgatagtgtcaatattattattatcttcatcttacaaaaagggaaactgagccagaacttcgaaattgtgcccatgttaagctttactttaaagatagtggatctagaatttgaacatatgtgcttaaactccagaccttgtcctggaaactttcccagttcatttaatgtctcaaaatatgtttataatagagaaagaastgagtgttttgagaagagccccctcctttgaacagaaattgtcaagcaagtaatcatattaaaccttattaccaaagattcaattcaaatacaactcctggcatcaacctcctcccagccaaaaaaatacagtaaaaaaaaaaaaagaataagagaagaaaattatccaattctgaaaagaataaaatacacttaaatgctctaagtttaataaagacttttttaaggtggggcgttctgaaggacagccataaaaaccattaaaggtttgggcaatatatgcactaatcattctaacagcgatttctcaggctctgttcctttcacccttacttttctgtctttccctaacttgtgattttgg

SEQ ID NO: 716081 - DNA, 632 bp, Homo sapiens
ttatcatgtgctagacaccatgttaaacattttacatatattgagtccattggtccttaccagagcctgatagtgtcaatattattattatcttcatcttacaaaaagggaaactgagccagaacttcgaaattgtgcccatgttaagctttactttaaagatagtggatctagaatttgaacatatgtgcttaaactccagaccttgtcctggaaactttcccagttcatttaatgtctcaaaatatgtttataatagagaaagaactgagtgttttgagaagagccccctcctttgaacagaaattgtcaagcaagtaatcatattaaaccttattaccaaagattcaattcaaatacaactcctggcatcaacctcctcccagccaaaaaaatacagtaaaaaraaaaaaagaataagagaagaaaattatccaattctgaaaagaataaaatacacttaaatgctctaagtttaataaagacttttttaaggtggggcgttctgaaggacagccataaaaaccattaaaggtttgggcaatatatgcactaatcattctaacagcgatttctcaggctctgttcctttcacccttacttttctgtctttccctaacttgtgattttgg

SEQ ID NO: 716082 - DNA, 445 bp, Homo sapiens
cccaagtaktggggaccacaggtgtgtaccaccacacccagctaattttttgtattttttttgtagagatggagttttgctgtgttgcccagactggtcctgcactcctggactcaagcaatccgcccaccttggcctctcaaagtgctaggattacaggcgtgagccactgtgcctggccttactctgggtttctttctaatcctctcagatgcctccataaaaaacaatcctccccaagccctaatggataaactccaagctccttagatgacaaaaatctttctaatcttttaccttgacatttgaatatggagggaagattaaactctaataattagaggctggaagataattaaagtgtgacaatagcactgtggtgctggaagagaaaagtcctttttcttgggacttgccgaaggtgtctgtgggtgtgcaactccat

SEQ ID NO: 716083 - DNA, 445 bp, Homo sapiens
cccaagtagtggggaccacaggtgtgtaccaccacacccagctaattttttgtattttttttgtagagatggagttttgctgtgttgcccagactggtcctgcactcctggackcaagcaatccgcccaccttggcctctcaaagtgctaggattacaggcgtgagccactgtgcctggccttactctgggtttctttctaatcctctcagatgcctccataaaaaacaatcctccccaagccctaatggataaactccaagctccttagatgacaaaaatctttctaatcttttaccttgacatttgaatatggagggaagattaaactctaataattagaggctggaagataattaaagtgtgacaatagcactgtggtgctggaagagaaaagtcctttttcttgggacttgccgaaggtgtctgtgggtgtgcaactccat

SEQ ID NO: 716084 - DNA, 789 bp, Homo sapiens
catgagagattgaggaaatactgagaaactgtcacaggttggtggagactaaggaggcgtgaagactaaatgcacgtgagatcctggctgggtcatggcaaggaaaaggtccttaaaggaaaggctgatgaaacctcaataaagtctatagtttagttgatggtaatgccagcgttaatttcttagctttgacaaatataccaaagtaatataagatttggtagtagaggagttggatgaaagatacatgggaaytctgtgctacctttgaaactgatggtcagtaggataaaatctaagtatttgcagtggcatgaaaaccctcaccatcgtagcccctgctgttgctatctgtctggttctgtctgtcgtgatcccagatgaaaggttctccccctcaacatacactccccacacccagacactcacatgccatcactattcaaccccaccctatccacacaggcccgtaaaagcaggacgctgcttcacgcccaagggcctagcctttcattgccccttcatcttggattctgttcctcagccaattcctctctcaaaattcaaacctgataaattcacctctgcatgaggctcctgagcccccacttccaccgcagcagagcaaactcctccctcctcatgtcccccactcctgtgtgccctgtgctcacatctactgtggtccccgtcacatggtcttgctgctttgtctgcagaagacacccccaactagactctaggtgccttcaagcaggaacagtgtccatttatcttcacagtcctcag

SEQ ID NO: 716085 - DNA, 984 bp, Homo sapiens
tccagggttgagtaaagtagcatgaaactgaggactttaatgtctgttacacccacctgaaaccatcacataaatctctacattacattccgctaaacatgtcagaaatgcaactgtgcttgcaaataattgctgccattgaatgaatccgccctggcacatccatttgggctcaaaataacccctgtaacctaagagtaaatcagtgactggacacccagtgccaagcataatctcaagcaacatttaactaggttcaatatttatttccctgccttgagtcactttgaaatgatctggactcagttcagacaggaccagccctaattttatggtgctcttggaatcattccagcaacatgagggctcagatgtcagggagttccagaaaaatgagatccctcacagaagatttcacaatttaaggcaccgtccttccaacattttgcaatatgtgggctttctactgaagatgtaactttttcagaggctttgaggacccttaagaagtatgcctcacccacactgaactcctacttcatccctagggatggggtgggcaatgttaacctggttaacagcttgcataaataaaatctcttaatatctgcaaataggaaaagacaggccctcaatttacccccatttttcaagcaaatgacatttcccaaacaattatggaagccagatttgggaagcttcaagccacattcaaacagcagataacactcctacaagtttgacagacacaggaacacatcaaacaaatagcagccaattctcaagcttttgtatctcaaatgctcaatcaatagaaaatcaaccagttttattgtacaccagagataaatctgaagatggcaggattgacttatagctccctgttaaagggatattgagctgacaytgagtgacctcacactcagccgtaacatttatcataaaagtctgacatggttaagtgaagtgattgatattggccca

SEQ ID NO: 716086 - DNA, 879 bp, Homo sapiens
gaaatgcgtatgagatttctcaggtgaaatagagcctttgatgtggtactcaaaagggataactatgactcagaggaaccatttctaaaagatggcactctttctccttccagttctttctgttcaatagtagggctggggaaaggcagaggcagtttttgttatttcaaatgacagcatcaaagatagtaatccacggtgctcaacaaaagtcgaatgaccttttttccttctccattcataaatacataagagctgatgcttcattatgtttaaatacaaaatgcacactcctactttgttttcctatatgtgagttctcatgtattcttcaaatgctcatctaattactgttacctactattccaaatgcaaatgacaaggtcccagtttactgttgatcctatattacaagagtcatcaattttggttgagaaacacaaaggacaaatatttcattattgtgctaaccatgcctattattagttttgtgcccccataacataagtaatagccccaaatacatggcacttatcacacaccaggcataattctaaatggcatgttctccatgttatggaagaagagactgaggcatggagagagtgagtaacttggccaaactcacaaggctacaaaggcagagaatcaggttttgaactcagggctgcctagaccctgtgttcttaactatcatcatatagtgtctctcttactgtttctcactgaagatgagagaggattaaaatctcaggaataaatgtaacctccacaggtaggcttatgcataaaattcagatgcaatgaataacaaaatgactgcctcccacaaaattaagaagyaaacatataatgaggacttactctgtgcacacactg

SEQ ID NO: 716087 - DNA, 909 bp, Homo sapiens
atagatttgactcccctctcaacccagtcctggaaaaatcagttttgtctcaattagcaactcatctcaacatttctttaccctacataaatctgtgctgtttgacttgtcctttgaactggttataacatttgcctggctcccttatatcagatgagtaaaatccttcaatacatgtttattgtatatctatgctagagtcaatgtatctttttctggaaaatttcttttaaccattttggaggtccccttgagacatcctatagatttatcaaccaaaggcaggcaaacttcatcatcgaagaaatggtgtaccttatgcttaagcctgcatacctcttttcttggctctaaaaggtgaatccaaagcagtaagagaactctgctgactctgactctggtcttttgctctctactaatctggggaattggttttgcaatctgaccatctgatgatccctgtaaatggattaatggtttatagaggtctattctctattgggtgagaaaaaatggagaatctagtttgttaatctattttggactcaaatcaattaataatttgtcctcagaaaagaacagctctttggtatttcatcattttgtattattaattcatggctgaaagtttagaactgaagttataaaytctgtgtgactgtatgtctatcaatgtctgtatagagaaaagccttattgtgcgtgtagataaggcttttctaccttcaggtggcactgattagattataaagtctttttagggaactctgggcctggcgtggtggctcacgcctgcaatcccagcactttgggaggccaaggcgggcggatcacgaggtcaggaaatcgagaccatcctggctaacaaggtgaaaccccgtctctactaaaaatacaaaaaattagctg

SEQ ID NO: 716088 - DNA, 602 bp, Homo sapiens
gaaatagtactacacacctgttagaacgactgcaatccaaaatactgaccacaccaaatgctggcaaggatgaagagagcaagaagtctcatttattgttggtgacaatgcaaaatggtacagcactttggaagagagtctggcagtttcctacaaagctaaaacatagtcttaacrtatgatcagcagttgtgctcctgggtatttacccaaacaagtggcaaatttaatgtccacacaaaaacctgcacatgaatgtttttagcaaaataaccccaatgttcatcagtggatgaagaaagaaagaaaatgtgtatatgtatggttttgaaagatttttttaaagaaaaacagattattatgtgagttgggtgattcttgcataggatttccacgggattattaaaacaaagtagaactatcgtcagttccacttactagaatcaaatagactgtcatcactagaagaaactttagagcaacaagttcctcattttatgttttcaaaaaataaaatataaaggcagaggagttgagattttctcatctacagcaaaagatgtttatataaataaatatactgataaaaatttatctcatat

SEQ ID NO: 716089 - DNA, 631 bp, Homo sapiens
gctatgttctttaagataacagaataggaagtgattataatttagatgtggactgtaagagaccttagacatcaagaaacccaggattttcatggagagatgagaaaacttgacctcaagaagccaaattgcatatcaatatatagagcaagtgaacacctgcagtgagattataacacaagttcttcatcagcactggtcacaccaacactagggattatgagaccttttagtttttaatccccaagtgtataataattttgccttataacactcataacaataggcttctttccactgttgaaaatgcccagcaaaaggacaaatcaaccaattaccttgctctgctcctagaaaaatgacctctttactccctcagacactgtgctctttttaaaaagagagaatcaatgtaaaccttatgtgcaaagaaaatgtcacccaattatatttcattattttaagtgttatggatataggaaagaaaacaaaagccatgaaaattctatcaaaatgttaaccctaaatattctcccattatgartcaattgaataaaattacaacgttaatttttttcagccacaccagttacatcttggcaaggatcaaattacagttgatatatctgtt

SEQ ID NO: 716090 - DNA, 581 bp, Homo sapiens
ggtggcgggcgcctgtagtcccagctactcgggaggctgagacaggagaatggtgtgaacccgggaagcggagcttgcagtgaggagagatcgtgccactgcactccagcctgggcgacagagcgagactccatttcaaaaaaacaaataaaaaaaaaaagaataaaggaaatgaataaatgaatagagacggagaagttgctgattttcttggtttttgtgcataatgctttatctaaagaaataagagccgtaacgagaaatgtctcccttgagaaaggctttcctgtgactaaaccgtgctttgtttccagtcattcctgaggcaaccagggccagtgttcctgcctattggggtgattttactcatttaggaaggcttgggagttctatstcatggttttaaagttctaggcccaagacgctaacgaatgaagagtatggagggtctgtgggtcttgactcctgctgagagagaccattaccagctgtaacctgcttttgatttgcccatatgagaaaccatgagatggcttcgagtagcatttaactttccgagctgtaactgaaagttaaagaga

SEQ ID NO: 716091 - DNA, 630 bp, Homo sapiens
aaatacacaggatattcaattttatatcattcaaatttttggtgtaatagtaacagtaattaacataattactgtattttgattgatgtctttacaaacttttcttatgttagaaaaaatgagaagcatcagtgtagtctgcatgttcgagggtacatgcatcgctttcgaaagctgcatgcatagttcattttaccagtccaggtctgttgaatgtttgagtactttcttacacaggttaaagtttctaatgctggaaagagcattctaatacttatctctttgcatattgtcacttttttttttaaagagacattcctatacgtaaaatttccaggtcaaatgtaaagctttttgacatgtaatgccaattttgtttttaataaatattgtattgataatctccaaagcagtgaaaataaagtcccaatttttcagatacttgtgtgagtgcccagggaytacttttttttttttttttttttttttttttttgagacggagtcttgctctctcacacaggctgcagtgcagtggtgcaatctcagctcactgcaacctccgcctcctgggttcaagcaattctcctgccccaggctctagagtagctggggctacaggcacacacca

SEQ ID NO: 716092 - DNA, 659 bp, Homo sapiens
tggagagtgaatttggagggcagatcaagaatggccgatgcaaacagttgctgaatttttactttggtctgaggtcttactttatcttttcatttatttatggcatctgtgatatacagaggttatatgaaactttaggcagccaaaatgattatttttcttctcccagtttctacttttgaagttctactaatgaggtttttatcagcataatgttacatacmtattaataaatgtaagtttctacttttttttaacaaattggtatttttctgaaaattagtttggtgtatggtggaagactggtatagttttcttgaaagaattgaccaggttttagacgaatttttattgaaaaagcattccaacacacagtgtggtaactttttgagagtttattttccaccttagcttgcctgtgactagttgtcagatactaacctgtctgttcacatatcagagtaagcaattttcaattctgtactttttaatagacattttatatattgcaaaatctcatctcctttttaaaaataaaatatctcccttaaaaattagaatatttttagtcattaaaaatgcacatatacaccatggaatactatgcagccataaaaaaggatgagttcatgtcctttgtagggacatggatgaagcta

SEQ ID NO: 716093 - DNA, 611 bp, Homo sapiens
tagctattatttattgtcattatcattatatttaaatgttaaatttaaactttcagagttaaccagaagaatcctgcaccttccttgatattaatgtctaatgtgattacaaatgagcattctaaactaaaaggcaatttggcaatctgaagcaggaagcagaaggccaaaacaaccaaacacttctgacatttattatacagaaacaataataacaaacagtwcagtgagagaaaaggataaacaaaagcctcacaattgaatttaaagggattgcatagattcatttgaaaattggtacagctttaaaaatggcgagaggaaattcagctttgagataatgctagaaaacatttaatatcttctacattgaaaagtggtctctctattcttagagaccttacagaacctattgcattttcatgcaattttccacattctactgtttaataattttttgagtacttgtattttttgttgtattttgagtacttgtattttttttcttctggatcataagaatttgaaggccttgaataatgttattcatttttggctttccccatttatctaccacgccttgtacatagttgaaactcattaaaattgct

SEQ ID NO: 716094 - DNA, 629 bp, Homo sapiens
ccagaaatgacagataccagtagttgccttaaaaaaattaattaattaaaaaaactttttttatactctagcgtaggctgtacttctcccagcccccggaagtaaatatacattgttcttagctaatcatgggggcttctccaactttgccaagtcataggtttagttatgagcataggatgtaattttgaccaattatattttaggagatggcagttatggagtttctgggagggatttactcacactatttaaaaaatcatttctcttctttcccatcaggtaatgtgtttcgaaaacacaatacttcttactcattaccaaaacataatgcttcttacccattattttatgattctaagaggacaagtctttggaatcacaaaacaaaaggacaataaggaaaggatttcttttcagaaaggtagaaagaattagaatcctaccatcatcgagctgcagaattaactgtggaactgaacaaactctgggtgtttatgtggggtgatacgcatttgctatagccacttttagatggatttactgttattttcagccaaaaacactgtagctgatactgtctktatgatatgaagtcattcatggctctctctcctcccaatacatta

SEQ ID NO: 716095 - DNA, 586 bp, Homo sapiens
taagaaatcagtttcactggggacaatttttgtctttgtctttccagttggtagtcatgaaatgtgttgagattgtttcattttgttttcactcattgacatgattcatttaacatttcctacaaagaatctctctaaatactaaaaacatttaccaagtaaaattcctgttgtgcttgttttaaaaaacggataaggatcatttgtacttagcagaatttatttgcatagaaataattaatgttttaaagtttttcaatctgccattttcacaggaaaaataataaatacacatgctgcaattatatttgcattattatttgcttcctttaagacatccattgtcatattgtatcaggagatgttgatttgagaataagaaagaaaggaagggaagaggaaggaaaggcagagaggaagggaatctggaaaagagtgtgggakgaaaaaaagaagaaagaagctacaaaataatatgataaaatctccccttttttgcaatagctccactttgacattcatcctccattcactcattcattaaatatcaaaaaaaatagatatgctcacagagatggaagaaacc

SEQ ID NO: 716096 - DNA, 3646 bp, Homo sapiens
gggataaattttccagtttcttgcccctcactgactaaaagacaacatgcggctatcctcactgatattgtaatatgaaaaggcagagtatgtgattaaagaatatacacatttggggaatactactgatcaaatgtttggggaaaacattcatgtcgaaatttagaaatttaggtcaaggaatagtagtgagtaatgaactgttaagagtttttagagaatagttttccaattgacattagaattctaggttcccgtctccctctttctctccccctgcacccccacctacaccwccacagcattgttctaagaagtcacttaaattctctgtaccatatttccccaagtgttaaatggggaaaatatgacaatctcagactgctgcttcagaaatcaaatctatttttttttttttttttttttttggagacggagtctcgctctgtcgcccaggctagagtgcagtggtgcgatcttggctcactgcaagctgcgcctcctgggttcacaccattctcctgcctcagcctcccgagtagttgggactacaggcgcccaccaccacgcccggctaaatttttgtattttttagtagagatggggtttcactgtgttagccaggatggtctccatctcctgacctcgtgatccaccgcctcggcctcccaaaatgctgggattataggcgtgagccaacgtgcccggcctctatttcatacattagttggcacccactgtgttataggcaccgtgctatcaggaaacagagataataaaccaggtctggacctgaggattgtgcaagaaagacagacagatgtaagaaaacatatttctacatagagatgcacaagaacacatctgtgtatgcaactgaagggaaagacaattgcttcagagcctggcagaggtcaaagaaggctctctgggggcagtaatgactgaactggcttttcaaggataatgaagagtttctcagcaggctaggaaggaaggatattccaggcagagggaataacatgtgcacaagcatagcagcctcatggtctgttcaggaaaagcagctggatacataggggtctattgaggagatcatgcatgtccaaagagctctgaaattttttcctggttttacaagagttagctgttttctttgaatgtcactagcattttataaatgacaaaaaataagccaaaggttaacaagcaccaaccaagccatacctgactagttgttacccatggaacatgaaaggatggcctgattcaaggactatcattcactgcaaatcctatgtggctactgttctggtctgggtccctcctttctgaggctgtggctgagaatagaatgagctgcctgtattgctttaccagcaccaggatttttgagaagttggggaggttctgggatcatgggattcatagcagatctaacttcccacatgtcccaccgtccacctatgctctggtgggaacctctgaggatggtgagaatcgagctggggcaacttgttaatcccacattagaaaatgtgcactgctttcaccaagtgtatgttatttcacatgtattacactagttgttgcttcgttctcctacttatagccctgaaaacagtacagagtgcaggttacacaccaagacagttgacatggagtattcattcttgctgtccaagtgacagagcccgtcattaggaatgacgatgcctgctagtttgctgtccattccaaaatgagaatcagcatcactcacaaagaccaggaggtggagggagtcattccgccagccaattttttcctacagtgagaaagaaacatttgtgtgatattggagggaggcaggcatttattgagtgtggatcaattatgcttggacacatttaggttataaaaataatattgctagtctattttagcctttttatctatcgtgaattgataatattaatgtttttaataaaacatgaaattctgtgacatttgctttttcctggataacattttcatatgatttatgcttcagaaaaatatagctccactacaatcggtatgcagttaatcttgacttttacatagttcaattatttttactatccagctttcaattctccaaaaaaattgagcagaggaggtcatagatggtcccaaatccaaattgaagccaaactcatcaaaatgcaatgttaaaggggctcagagtaagcctgtttcattaaaatgtcacccaacatttaggcacatatttctctttccaatgatgtcatccaaaaattatgaacctaatacaaggataagaattgcttatgaaagtatggcccgaaggtcctgttaattaaaattgtctgttgttggtgtttagtaaagccctcccctttaattaatattagtccaggaactaattgggtaaaaacgcatcctggctcttccatcccaccttatccctttccttcctcctctaattccttggccctcccaccttctaggagcttcagccctgtttatttcctgatatttttcatgaagggctgttgcctaaagacaggggaataattcttgtggatacttgtcagacagtcaaggaggagcagtgttcctgtaatgttgtagagacagcaaacttccgaagcttattgttggttcaaaacaatagctatgtagtcatatgtatgaacatatactgacgtagagcattttaactttttaaaataaatgttctacccttgatttttttatcatgattaatccaaaaactaatctgatcttgatctttgaaaatcaatcatgcatagctattgtttcaactaaattttcccaacacgacaattttcttagattattcaaatagtaggcagaaaggacagtccccatttcaacatgatttaattaaacatttggtaaaaattgtgtattttaagaaaaatatgaaatatagaaatttagagatcaaaggaaaggaaattagctaatctttttgaagtagaattattaataagagatgaattttatgttaacagagtgaaacagcactcccttcagcataccttacacacagcagcttgcataattgcatcaaatccaccttcgggtgtgtcaatattagcagaaattttctgattcttcacaatttcattgaatctttcagcatcatttgtcaatggcaaaatgtgcttgaatccaaatgtaggtaaacagaagtatggaatactactgcaaaagtaagatgcaaaaatactgttgatgaaatatgatgccacacacaattaatggatctaatagcttagcaacattctcctaaatgaagattagtttttctaaagggcctgactctgcaactcagctatgaatctcactgttaaggttgttgacatcatccccaaccctttctatgttgaccatattcgctgacacttatttagagcttattgtgtgtcttgcactggctcaaactcagataacagataatcaggtgatcagactccagtgtgtgtgtgtgtgtaatcactaccttctatgggctcccaaccaaaattcaccactaagttaatacaacgacaattcctttgtattctgatatctcaggctgtcatcaagtgtgaatcaccctgtagcaagacaagagaggaacctgtcttctttt

SEQ ID NO: 716097 - DNA, 3646 bp, Homo sapiens
gggataaattttccagtttcttgcccctcactgactaaaagacaacatgcggctatcctcactgatattgtaatatgaaaaggcagagtatgtgattaaagaatatacacatttggggaatactactgatcaaatgtttggggaaaacattcatgtcgaaatttagaaatttaggtcaaggaatagtagtgagtaatgaactgttaagagtttttagagaatagttttccaattgacattagaattctaggttcccgtctccctctttctctccccctgcacccccacctacaccaccacagcattgttctaagaagtcacttaaattctctgtaccatatttccccaagtgttaaatggggaaaatatgacaatctcagactgctgcttcagaaatcaaatctatttttttwtttttttttttttttggagacggagtctcgctctgtcgcccaggctagagtgcagtggtgcgatcttggctcactgcaagctgcgcctcctgggttcacaccattctcctgcctcagcctcccgagtagttgggactacaggcgcccaccaccacgcccggctaaatttttgtattttttagtagagatggggtttcactgtgttagccaggatggtctccatctcctgacctcgtgatccaccgcctcggcctcccaaaatgctgggattataggcgtgagccaacgtgcccggcctctatttcatacattagttggcacccactgtgttataggcaccgtgctatcaggaaacagagataataaaccaggtctggacctgaggattgtgcaagaaagacagacagatgtaagaaaacatatttctacatagagatgcacaagaacacatctgtgtatgcaactgaagggaaagacaattgcttcagagcctggcagaggtcaaagaaggctctctgggggcagtaatgactgaactggcttttcaaggataatgaagagtttctcagcaggctaggaaggaaggatattccaggcagagggaataacatgtgcacaagcatagcagcctcatggtctgttcaggaaaagcagctggatacataggggtctattgaggagatcatgcatgtccaaagagctctgaaattttttcctggttttacaagagttagctgttttctttgaatgtcactagcattttataaatgacaaaaaataagccaaaggttaacaagcaccaaccaagccatacctgactagttgttacccatggaacatgaaaggatggcctgattcaaggactatcattcactgcaaatcctatgtggctactgttctggtctgggtccctcctttctgaggctgtggctgagaatagaatgagctgcctgtattgctttaccagcaccaggatttttgagaagttggggaggttctgggatcatgggattcatagcagatctaacttcccacatgtcccaccgtccacctatgctctggtgggaacctctgaggatggtgagaatcgagctggggcaacttgttaatcccacattagaaaatgtgcactgctttcaccaagtgtatgttatttcacatgtattacactagttgttgcttcgttctcctacttatagccctgaaaacagtacagagtgcaggttacacaccaagacagttgacatggagtattcattcttgctgtccaagtgacagagcccgtcattaggaatgacgatgcctgctagtttgctgtccattccaaaatgagaatcagcatcactcacaaagaccaggaggtggagggagtcattccgccagccaattttttcctacagtgagaaagaaacatttgtgtgatattggagggaggcaggcatttattgagtgtggatcaattatgcttggacacatttaggttataaaaataatattgctagtctattttagcctttttatctatcgtgaattgataatattaatgtttttaataaaacatgaaattctgtgacatttgctttttcctggataacattttcatatgatttatgcttcagaaaaatatagctccactacaatcggtatgcagttaatcttgacttttacatagttcaattatttttactatccagctttcaattctccaaaaaaattgagcagaggaggtcatagatggtcccaaatccaaattgaagccaaactcatcaaaatgcaatgttaaaggggctcagagtaagcctgtttcattaaaatgtcacccaacatttaggcacatatttctctttccaatgatgtcatccaaaaattatgaacctaatacaaggataagaattgcttatgaaagtatggcccgaaggtcctgttaattaaaattgtctgttgttggtgtttagtaaagccctcccctttaattaatattagtccaggaactaattgggtaaaaacgcatcctggctcttccatcccaccttatccctttccttcctcctctaattccttggccctcccaccttctaggagcttcagccctgtttatttcctgatatttttcatgaagggctgttgcctaaagacaggggaataattcttgtggatacttgtcagacagtcaaggaggagcagtgttcctgtaatgttgtagagacagcaaacttccgaagcttattgttggttcaaaacaatagctatgtagtcatatgtatgaacatatactgacgtagagcattttaactttttaaaataaatgttctacccttgatttttttatcatgattaatccaaaaactaatctgatcttgatctttgaaaatcaatcatgcatagctattgtttcaactaaattttcccaacacgacaattttcttagattattcaaatagtaggcagaaaggacagtccccatttcaacatgatttaattaaacatttggtaaaaattgtgtattttaagaaaaatatgaaatatagaaatttagagatcaaaggaaaggaaattagctaatctttttgaagtagaattattaataagagatgaattttatgttaacagagtgaaacagcactcccttcagcataccttacacacagcagcttgcataattgcatcaaatccaccttcgggtgtgtcaatattagcagaaattttctgattcttcacaatttcattgaatctttcagcatcatttgtcaatggcaaaatgtgcttgaatccaaatgtaggtaaacagaagtatggaatactactgcaaaagtaagatgcaaaaatactgttgatgaaatatgatgccacacacaattaatggatctaatagcttagcaacattctcctaaatgaagattagtttttctaaagggcctgactctgcaactcagctatgaatctcactgttaaggttgttgacatcatccccaaccctttctatgttgaccatattcgctgacacttatttagagcttattgtgtgtcttgcactggctcaaactcagataacagataatcaggtgatcagactccagtgtgtgtgtgtgtgtaatcactaccttctatgggctcccaaccaaaattcaccactaagttaatacaacgacaattcctttgtattctgatatctcaggctgtcatcaagtgtgaatcaccctgtagcaagacaagagaggaacctgtcttctttt

SEQ ID NO: 716098 - DNA, 379 bp, Homo sapiens
taatggcaaccaaagaaaggcgccaaagagcatgggtggtaaagaagcaggagagaattgaaagctaagatcgtctttctgcctytttgcctctgtgagcctatagataggaatgaatcagtaaggtcaggctataaacttctagataagaaagaagcttgtctgtttcccctgaaaagctactgactgcatgtgggtgtcatccgtctacctccagggcattccttctgtgtggctggtattgtaatggagaggcgatctgatgttatcagtgtgggacatcagctctacttccccacactagtctctagcagaaacgtgacattgtgattctggataatcaggactgagaaagaggtaagcgagagattgatgttcc

SEQ ID NO: 716099 - DNA, 641 bp, Homo sapiens
tcccccaggtgactagactgagcagccagatggatgatgtggcttttcactgaactggaatggaagctagctcatggtcactgccgtgtcaccaatgcctggcacagagtaggacctgattattgaaacagaggaggagaagcagctttgggtggggaagatgatgagttcacttttggccctgaggagctcaaggggcctgtgggacatcctagtaggaggctgaatatatatatgggcctgaagtttggggtttgggatccrttagggaaaggtggtacttgaagctgtcatggatcaggtcatctagggcaagcaggtagagtgagaaaaactctggagagcttcaggacttaaaatgtgatcagaaaaaaggatccttatagaagagactgagaggtaggaagggaacagaagtgatattgcagaggcctgaggcagacactgttaaagagggaggcacctggacacttttgctgtagacaagtagcccatctaatcctaaagagcccctttgatatggccacttaatgacgtatgaaatacttcaaaaatgattttaaaagtgtttaaaataatgggcttctgtgtcatttccataatattattctgggtgcctgccatgcgcaagacactaacat

SEQ ID NO: 716100 - DNA, 1465 bp, Homo sapiens
cctctgctcctgggttcgagtagttctcctgcctcagcctcccaagtagctgggacaataggcacgtgccaccatgcctgactaatttttgtattttttgtagagatggggattcaccatgttggccaggctagtctcgaattcctgacctcaaatgatccacctgccttggcctcccaaagtgctgggattacaggtgtgagccaccacatctggcctgcatttcttttcttaaagaaggcctcccaaaaggtataatctttaggccccacaaaacctggactcatcccaaaatggtgtaatgaaatcttcgccatattactgaaaggtggatattatccctttttcatagtctcaaaagtaaagtgttcagagataaacactctccccacagatagacaggaggacctggcaggactgcaattttgaacccaggactccctacgtccaaaaccaaactcttcccactacactcagcttcctcccattatgggcatcatgatggctttaaaaagtaagtgccggactcaaatggatatccctatgccaatgttcatcgcagtactcttcacaagggccaaaagctggaaacagcacatccaytgacagatgattaagccatcaaaatgtggtatatccatacagcggaatattattcagcctttaaaaggaaggaaatgctgacacataccactacatggatgaaccctaaagacattatgctaacatgaaataggccattcccacaaaaggacaaatatgtttccacttatgtgatgcacctggagtagtcagactcatggagacagaaagtagaatgctgggtgctgggggttggtggaggggaaatggacagttattgtttaatgggtgaagagtttcagtttgggctgatgaaaaagttctggagatggtcagtggtgaggatggcacaacagtgtgaatgctcttaatgccaccaaatcatatacttaaaaatggttaaaatgctacattttatgttatgtaaattttaccaaaataaacaaaaaaggaaactccagcctagaatgtaaggcctaggccacaaaacatttctttagcacttagcatcctgtgggcattgtgaacaaggatgacaggaaagtcttctttaagggaatctttctgaaggtcacaaaaaaaggaacaactgtatctacttccaggttgcttgctccccctgttatgtacaaccacaagtcagccacagaattctgcaaacaacccactgtgcaaggctttggagctacctcagagtgagacccagagacaaagcagccatttaccttgccttcttttagctactcgcaatgaaacgttttcacagaaagacacctggaggtggaagacttgtcaccggtacttcagatgaagcaggtagcacagcaaggcccgcccaagagcagacagccatgactaaagtccctggtttccagttggttcc

SEQ ID NO: 716101 - DNA, 1465 bp, Homo sapiens
cctctgctcctgggttcgagtagttctcctgcctcagcctcccaagtagctgggacaataggcacgtgccaccatgcctgactaatttttgtattttttgtagagatggggattcaccatgttggccaggctagtctcgaattcctgacctcaaatgatccacctgccttggcctcccaaagtgctgggattacaggtgtgagccaccacatctggcctgcatttcttttcttaaagaaggcctcccaaaaggtataatctttaggccccacaaaacctggactcatcccaaaatggtgtaatgaaatcttcgccatattactgaaaggtggatattatccctttttcatagtctcaaaagtaaagtgttcagagataaacactctccccacagatagacaggaggacctggcaggactgcaattttgaacccaggactccctacgtccaaaaccaaactcttcccactacactcagcttcctcccattatgggcatcatgatggctttaaaaagtaagtgccggactcaaatggatatccctatgccaatgttcatcgcagtactcttcacaagggccaaaagctggaaacagcacatccattgacagatgattaagccatcaaaatgtggtatatccatacagcrgaatattattcagcctttaaaaggaaggaaatgctgacacataccactacatggatgaaccctaaagacattatgctaacatgaaataggccattcccacaaaaggacaaatatgtttccacttatgtgatgcacctggagtagtcagactcatggagacagaaagtagaatgctgggtgctgggggttggtggaggggaaatggacagttattgtttaatgggtgaagagtttcagtttgggctgatgaaaaagttctggagatggtcagtggtgaggatggcacaacagtgtgaatgctcttaatgccaccaaatcatatacttaaaaatggttaaaatgctacattttatgttatgtaaattttaccaaaataaacaaaaaaggaaactccagcctagaatgtaaggcctaggccacaaaacatttctttagcacttagcatcctgtgggcattgtgaacaaggatgacaggaaagtcttctttaagggaatctttctgaaggtcacaaaaaaaggaacaactgtatctacttccaggttgcttgctccccctgttatgtacaaccacaagtcagccacagaattctgcaaacaacccactgtgcaaggctttggagctacctcagagtgagacccagagacaaagcagccatttaccttgccttcttttagctactcgcaatgaaacgttttcacagaaagacacctggaggtggaagacttgtcaccggtacttcagatgaagcaggtagcacagcaaggcccgcccaagagcagacagccatgactaaagtccctggtttccagttggttcc

SEQ ID NO: 716102 - DNA, 652 bp, Homo sapiens
gctcaaacccggcaggcggaggttgcagtgaaccaagatcatgtcactgcactccagcttggacgacagagtgaaactcattctcaaaaataaataaataaaataaaatagaataaacacagtaaaaacggacaacatraatattaaaagcattctgctgaaagaaataattctgatacaaaagagtacactgtataagattgattccatttatgtgaagcactggaacatgcagaactaaactatggtaaaaaaccacaacaatggttggtttggggagagtgggggcagggactgactgagaaggcacaagagtgaactttcaggtttaacagtaatgtattttatatatcttgatggggtctgaattactcaagtgcatacatttgtcaaaactcactgaatggttcccttaagatttatgtatttttcaaccagtggacttgctaagtgaaaaaagaaaaaaaaaagatttgtatatttaactgcatatacattttattacccaaaaatgcaaataaataatattaaactctaattaattatgtacatgtatatatgttcaggggcaaagttactgatgactgcaacttattctgatatgcaatgaaaaaataagacctcagataaaaaaaaagaaagaaaaaataag

SEQ ID NO: 716103 - DNA, 1184 bp, Homo sapiens
gcttgcggggaccctgaatgtagcgaaggagcactttgtcttccttcctccaggtgccaggtggtgccctttttgtctctggcacagctgtctctctcattctaccaggactccatctctccaggacttatcctttctcatgtgcttgcctgtggcccccgattctgccctcgtaatttcagcacgcttgtcattcactggcactgctaatctgggcctctgcggatttggggtactcatggatttctctgctttctctgcacagctcacagtgcaggcttccagcagcaggaggcaggattttctttttcttgtgtgttctccttcagcctctggctcctgactctctgtgtagtggctgtggtcttctgccacatcttccccaggcctcaaggctgacccagggagcagctgtgaacctagccaaagcttggggaagcttcactgtgcagtagatcaaccttctgttctacgtcccgtatggtcccatcttctggagagcaacttctcagtgctttcgtctaagcttgagagccagcaggaggatggagggacccaaatgcagtccctccaacacaaactttttattgcttctctcctacaggcccagcaaccactgggaatagaagacaaggatgacagccagtccagccaagatgagctgcagagcaagcagtccaaaggcctggaggagaggtaccataggtgggaggctatccccagcgctgtgccttcagggtggtgtggacttgggcagaattcttggctttggtggccggcctggctcagtgtacasttgcttggcagcaggtgatgaactggctggatggccttgcagggtctgtgtgtgcacatgcgtgtgtatatgtgtgtgcacgtgtgtgtactggcaatgtgtgtatatgtttgcatgcatgagcagaccctttgtttcttcaccaagatgggaatgtgaagtgccactgggtacaattggcaggactctgggcaccattgtggggccagggctgatgaagctgtgtgtgtgcctggttatgggccagggctgaagaaaccttgtggaggtctggaggagtcgcattggagggttggtactgcagctcaagagttctgagccagggccctgccacatcagaaatggctgtagctatctgtgagagtgcaactgtgtgtgatgtgacagg

SEQ ID NO: 716104 - DNA, 1061 bp, Homo sapiens
aaatcaagaaacacatttgaataaaattatagagaatgaccaattataaattaaaccaataaactaatatcacttccaccaataaaaataaattgaaaatattttaaaatataaacttaaagcttataaataccacacagtaatttaatgacaggaaaaarccttactcttttcctttctgcagatgaatatcatctgatctttgtgttggactggaaaaataactgttggcattagcagaatgatatgcaatcctcacctaatccgagagagacagagacagagaaaagggagaatttattaatagaccttttcaacatttatttatttatcatttattatttcagttttagaagtttcataagtagaaaaatgtaaaactactttatatttttcttttaagatctgttatctactatgctataaattttttttaaattatcaaagttcacttcattccttctaccattcactaacatcaacactactgtactaagtatactacgcagatcatagcttttccataattagaactgcagtggaaactaagaagatacttaccaggaaaaaggtagttattgacaaataaaatattcttttgctctgtggagaactttgagagatttaatccaaattagattgccaaagattgctaaatggttctgcacactagagtgagaggactttgggcttcccattaggaatgattataccacctttggagtacacatgctttggagtacaaactatgataaaaattagaattcataaattacagatagcaatttaaacttacacaaccagtttgggaagcaatcttgccacataagttgagtcataaaatgttactttgatttgatctgttagtttcatatttgtgaaactgtcctaacaaagtaaccccaaatacagaaaagtctaatgatcatagatgttcaatagagtattatttgtggtcataaaacaccagaagtaaataaaaacttatcagtagggagatggttatctaagcttggtaaacccaagtaataacactgcttagtcattaaaactagtgatta

SEQ ID NO: 716105 - DNA, 1061 bp, Homo sapiens
aaatcaagaaacacatttgaataaaattatagagaatgaccaattataaattaaaccaataaactaatatcacttccaccaataaaaataaattgaaaatattttaaaatataaacttaaagcttataaataccacacagtaatttaatgacaggaaaaagccttactcttttcctttctgcagatgaatatcatctgatctttgtgttggactggaaaaataactgttggcattagcagaatgatatgcaatcctcacctaatccgagagagacagagacagagaaaagggagaatttattaatagaccttttcaacatttatttatttatcatttattatttcagttttagaagtttcataagtagaaaaatgtaaaactactttatatttttcttttaagatctgttatctactatgctataaattttttttaaattatcaaagttcacttcattccttctaccattcactaacatcaacactactgtactaagtatactacgcagatcatagcttttccataattagaactgcagtggaaactaagaagatacttaccaggaaaaaggtagttattgacaaataaaatattcttttgctctgtggagaactttgagagatttaatccaaattagattgccaaagattgctaaatggttctgcacactagagtgagaggactttgggcttcccattaggaatgattataccacctttggagtacacatgctttggagtacaaactatgataaaaattagaattcataaattacagatagcaatttaaacttacacaaccagtttgggaagcaatcttgccacataagttgagtcataaaatgttactttgatttgatctgttagtttcatatttgtgaaactgtcctaacaaagtaaccccaaatacagaaaagtctaatgatcatagatgttcaatagagtattatttgtggtcataaaacaccagaagtaaataaaaacttatcagtagggagatggttatytaagcttggtaaacccaagtaataacactgcttagtcattaaaactagtgatta

SEQ ID NO: 716106 - DNA, 1061 bp, Homo sapiens
aaatcaagaaacacatttgaataaaattatagagaatgaccaattataaattaaaccaataaactaatatcacttccaccaataaaaataaattgaaaatattttaaaatataaacttaaagcttataaataccacacagtaatttaatgacaggaaaaagccttactcttttcctttctgcagatgaatatcatctgatctttgtgttggactggaaaaataactgttggcattagcagaatgatatgcaatcctcacctaatccgagagagacagagacagagaaaagggagaatttattaatagaccttttcaacatttatttatttatcatttattatttcagttttagaagtttcataagtagaaaaatgtaaaactactttatatttttcttttaagatctgttatctactatgctataaattttttttaaattatcaaagttcacttcattccttctaccattcactaacatcaacactactgtactaagtatactacgcagatcatagcttttccataattagaactgcagtggaaactaagaagatacttaccaggaaaaaggtagttattgacaaataaaatattcttttgctctgtggagaactttgagagatttaatccaaattagattgccaaagattgctaaatggttctgcacactagagtgagaggactttgggcttcccattaggaatgattataccacctttggagtacacatgctttggagtacaaactatgataaaaattagaattcataaattacagatagcaatttaaacttacacaaccagtttgggaagcaatcttgccacataagttgagtcataaaatgttactttgatttgatctgttagtttcatatttgtgaaactgtcctaacaaagtaaccccaaatacagaaaagtctaatgatcatagatgttcaatagagtattatttgtggtcataaaacaccagaagtaaataaaaacttatcagtagggagatggttatctaagcttggtaaacccaagtaataacactrcttagtcattaaaactagtgatta

SEQ ID NO: 716107 - DNA, 1871 bp, Homo sapiens
atgtgtaaggcttcacatatatcctttaacctttctttacaccaaattcatgaattagtattattatccttatttcacaggtgagaaaactaatggtgaaagaggtcaaataacttacccatggttacccaactaaaaaacaataaggtaaaattcagttgtaattttaatttaccttaaagccatatgtctaatcaaaatacaatgcacttttaaaatattaataaccaagtttctggactttattccttttctcaaagaaataataataatgctaactgcttattattttaatgctgcttaatagctttttggctaagcaattctttttcatgaacaatattacaagactgacaggacaatcgagctgattaagctggtacaggttcaagaccatctggggtttacaaggaatgtggggattgttccgaataactgtaacattttgatttattttctcttgctttcacaattccatctatgtccctttggttttttttttaaatactgtttgttttatttaaagaacaaaaggcttaaattcttttacttgtttcagaactcctaggactctttgttggaacaagctgttggtttagcctgacctcataatgacatagatattctatacacaatggaaactgggccaactgcagactcaagaatcctatagtaactactcctaagaaatgtttagtccataatttaaaggagaacagaaatatattggacttaactgagacttgcatttaatgggatagagccagttgtgtttttattcacaccaattgaatatgcttctttcttattatttgagtaaatacacattttagaattagattaataaagatataaactacaaggccctcactcttacctgcagtgatatgtaggtagcattcaaaacaacttctctgtaagaagattctgcagctcctacattgtatttatcttccagttctagaaccccccaaataatgagtctttccattgatggcatatctatgtcagctacaatccatgttcctataaaacaatactttaagaaatataacataatccataaactacaacttatagcaaaacattgacaagcttatcagtgagtcctagttttgagtgtttatgacatgtcttttcatataatacctgattcctatctctcccagaaaatctgctcttgttaattaatggtcaggtttaaatccacagaaaccccagaaggctaggtttagtatccgggatgcattaatagagtccacttctccacacttgctctttyggaaaggtgtgctgataaaactgtgacatctaccctgccatagtgttaatattgcagaaaacaaacatttcattcatttgtgtttacgcatttaccttcaggtataatcacatttgcccctgggtgaggtacagtataattattttctcgtgatgattgccaaaaagaatcatttgaccataaactgaaaagagaagagaaatacttccatgaattactacttgtgatattccctaattttgtctaaaatgtaaaccgttccatttccccataagattttacatggtagagaagaaaaaaaatgcacgctttgtccttttaaagacccttgacacatggtgctatttcatggggagtaggggtagaggatatagttggctagattctgtgaagaaaggggtagaaggatggtctctgagttgacgaggatgcaccaatgccattaagcccctgggctgggatgggggtggcaggtctgtatccaaagtgaaagctaggttaaattgaaataatttcatcaagtgtatgggaggacagacggtcttcagttttcatcactatgccttctagaaaataccttttaatgcaa

SEQ ID NO: 716108 - DNA, 1871 bp, Homo sapiens
atgtgtaaggcttcacatatatcctttaacctttctttacaccaaattcatgaattagtattattatccttatttcacaggtgagaaaactaatggtgaaagaggtcaaataacttacccatggttacccaactaaaaaacaataaggtaaaattcagttgtaattttaatttaccttaaagccatatgtctaatcaaaatacaatgcacttttaaaatattaataaccaagtttctggactttattccttttctcaaagaaataataataatgctaactgcttattattttaatgctgcttaatagctttttggctaagcaattctttttcatgaacaatattacaagactgacaggacaatcgagctgattaagctggtacaggttcaagaccatctggggtttacaaggaatgtggggattgttccgaataactgtaacattttgatttattttctcttgctttcacaattccatctatgtccctttggttttttttttaaatactgtttgttttatttaaagaacaaaaggcttaaattcttttacttgtttcagaactcctaggactctttgttggaacaagctgttggtttagcctgacctcataatgacatagatattctatacacaatggaaactgggccaactgcagactcaagaatcctatagtaactactcctaagaaatgtttagtccataatttaaaggagaacagaaatatattggacttaactgagacttgcatttaatgggatagagccagttgtgtttttattcacaccaattgaatatgcttctttcttattatttgagtaaatacacattttagaattagattaataaagatataaactacaaggccctcactcttacctgcagtgatatgtaggtagcattcaaaacaacttctctgtaagaagattctgcagctcctacattgtatttatcttccagttctagaaccccccaaataatgagtctttccattgatggcatatctatgtcagctacaatccatgttcctataaaacaatactttaagaaatataacataatccataaactacaacttatagcaaaacattgacaagcttatcagtgagtcctagttttgagtgtttatgacatgtcttttcatataatacctgattcctatctctcccagaaaatctgctcttgttaattaatggtcaggtttaaatccacagaaaccccagaaggctaggtttagtatccgggatgcattaatagagtccacttctccacacttgctcttttrgaaaggtgtgctgataaaactgtgacatctaccctgccatagtgttaatattgcagaaaacaaacatttcattcatttgtgtttacgcatttaccttcaggtataatcacatttgcccctgggtgaggtacagtataattattttctcgtgatgattgccaaaaagaatcatttgaccataaactgaaaagagaagagaaatacttccatgaattactacttgtgatattccctaattttgtctaaaatgtaaaccgttccatttccccataagattttacatggtagagaagaaaaaaaatgcacgctttgtccttttaaagacccttgacacatggtgctatttcatggggagtaggggtagaggatatagttggctagattctgtgaagaaaggggtagaaggatggtctctgagttgacgaggatgcaccaatgccattaagcccctgggctgggatgggggtggcaggtctgtatccaaagtgaaagctaggttaaattgaaataatttcatcaagtgtatgggaggacagacggtcttcagttttcatcactatgccttctagaaaataccttttaatgcaa

SEQ ID NO: 716109 - DNA, 1871 bp, Homo sapiens
atgtgtaaggcttcacatatatcctttaacctttctttacaccaaattcatgaattagtattattatccttatttcacaggtgagaaaactaatggtgaaagaggtcaaataacttacccatggttacccaactaaaaaacaataaggtaaaattcagttgtaattttaatttaccttaaagccatatgtctaatcaaaatacaatgcacttttaaaatattaataaccaagtttctggactttattccttttctcaaagaaataataataatgctaactgcttattattttaatgctgcttaatagctttttggctaagcaattctttttcatgaacaatattacaagactgacaggacaatcgagctgattaagctggtacaggttcaagaccatctggggtttacaaggaatgtggggattgttccgaataactgtaacattttgatttattttctcttgctttcacaattccatctatgtccctttggttttttttttaaatactgtttgttttatttaaagaacaaaaggcttaaattcttttacttgtttcagaactcctaggactctttgttggaacaagctgttggtttagcctgacctcataatgacatagatattctatacacaatggaaactgggccaactgcagactcaagaatcctatagtaactactcctaagaaatgtttagtccataatttaaaggagaacagaaatatattggacttaactgagacttgcatttaatgggatagagccagttgtgtttttattcacaccaattgaatatgcttctttcttattatttgagtaaatacacattttagaattagattaataaagatataaactacaaggccctcactcttacctgcagtgatatgtaggtagcattcaaaacaacttctctgtaagaagattctgcagctcctacattgtatttatcttccagttctagaaccccccaaataatgagtctttccattgatggcatatctatgtcagctacaatccatgttcctataaaacaatactttaagaaatataacataatccataaactacaacttatagcaaaacattgacaagcttatcagtgagtcctagttttgagtgtttatgacatgtcttttcatataatacctgattcctatctctcccagaaaatctgctcttgttaattaatggtcaggtttaaatccacagaaaccccagaaggctaggtttagtatccgggatgcattaatagagtccacttctccacacttgctcttttggaaaggtgtgctgataaaactgtgacatctaccctgccatagtgttaatattgcagaaaacaaacatttcattcatttgtgtttaygcatttaccttcaggtataatcacatttgcccctgggtgaggtacagtataattattttctcgtgatgattgccaaaaagaatcatttgaccataaactgaaaagagaagagaaatacttccatgaattactacttgtgatattccctaattttgtctaaaatgtaaaccgttccatttccccataagattttacatggtagagaagaaaaaaaatgcacgctttgtccttttaaagacccttgacacatggtgctatttcatggggagtaggggtagaggatatagttggctagattctgtgaagaaaggggtagaaggatggtctctgagttgacgaggatgcaccaatgccattaagcccctgggctgggatgggggtggcaggtctgtatccaaagtgaaagctaggttaaattgaaataatttcatcaagtgtatgggaggacagacggtcttcagttttcatcactatgccttctagaaaataccttttaatgcaa

SEQ ID NO: 716110 - DNA, 552 bp, Homo sapiens
cacaaaattaaattatatttagtgtactcatccaataagcattcgagacttatggaataactattttcttagcatcatgcttagtgctggtatgtaaggacgaatgagacaaagtggttttctgaaagaacctgtccccctagtgggggagacagaaatgtaaacaaatgactacaggataatgtgttaagtgctcacagaaataagaatcaggtgctaaggaagcccgagaggaggaggagccacaagaaatgctgtgcaaggccgggtgcggtggctcatgcctatcatcccagcactttgggaggctgaggcgggtggatcacctgaggtcaggagttcgagaccagcctggccaacatggtgagaccctgtctctactaaaatacacaaaattagctgggtgtgttggygcacgcctgtaatcccagctactcgggaggctgaggcaggagaatcgcttgaacccgggaggcggaggctgcagtgaggcgagatcatgccactgcactccagcctggtcagcctagtgagactcggtctcaaaaaaaa

SEQ ID NO: 716111 - DNA, 2739 bp, Homo sapiens
ttattaaaaataagtattaaaaaataaagtagatgaactgctgtttatctgtgtatctcagatgtgatttgttgcatctcagatacaaaatgyattaaacagcttgtgctatgtaaagaaaagtataatcctggaaacttgggtaatttaatcatacagcttgtcttaggggaaaatcatagaatgcaatcaagaaataaagaacgaaaagacattataaacctgacaggaaagtcactggaggagggattcaggaggccggtgggagggccctatgcagacccattctgaaagtttttaacctttaggaactctgtgaccataaaaaataaatttaggcttgatatttgtgtttacttgtttgctttcacatggtgtaaaccatgcctggaagccaaggctgccagggtcttgcagggtctcaatgaaggtggaacgctgatgacggcaaaagacggaagacagtgtcttcacacttccttccgggtaaaactcagaaaacagtcacccaggatgctcatacaaggctctttctacccaaggtaacaatccctatacaactctctagtcatttcaaaggttctagactgtaaagtgcttgaaggttttgatcaaatcgtagattttgaagaaaatggacagtgaaaagtgctgcctctagcacactgtaccaatatacacagcagccaaggtcactactaaaaacaaattaaaatactaactgtggcacaatccttgaaataaatatttgaagtaaaaatatctcacggaaatagttctgcctcatcttcattctgctatagatagcggctgtcctctggcatggagaaccttataaacagtgttgaacacagactcatttcaattgggtttagaagtagaacaagcctgttcagactaaactttaagaagtggacaataataacctttctgaagattcaagtatgtcaaaaccaatgtcagtaatgacctcctgtgagacaacaggagagatggtattcttcagcttctcccatcgataataagttcttataacatttacagcagctgatcttcaagaccatgtactttatccgtggaagtattgttcagctcactgtcagacctaaaagttcacttctgcagttgatatagaggctcctaaggaaagcatgagtaaattcagagaattacagcaataaaaacttgagaaatgaaatatatgtgtgtccaaatatatagatacatatacacacatgtatgtttctatatataatatacataaatcttgaaaacatagaatggactgctgaaattttatgctcttagtaccattctttaaaaataaacattttctaactcttcaaaacattgacaataaaaatatacatttctccagcatcacagaaatcatcaagcctgtcttaaatactttaatatgctatcaggtttttcttctctccaaacccaaacaattaaaagtcatacacataaccactgccacaacatctatctgtttttaccaacaagagatgaaaaaagaaatacatctgttttctgcctctggatatagaggaaataaaggttggctatagactaaaatgggtttaaatacagacattcattttaaacagccactaaaaatctctggggagtttcagctattagatgagacttcacttaatcaagtgtaggtcattttggaatgagtcaagtaacaccaccagggacttactttggaatggcaaatgccatttttaaaaagcaaagaggttacacttagggcttctctacaaaatctattctaagtaatttacacaaaatactactgtcccatatattccacttaagctggaaaatattcaaatgtacgagagagactggaacacagagatcaaattttgaatatgatagtacctagaagccttgaattctcttctggaatccaattatcatagtcacttgagggatactgaattattatttatccaataaagacgaagatggacacatctgagtgattgttcaatacagacagacattaaaaccatctgtgactacagaaaggtaaaatgtctgatgaattagtcagtgaagattaaatcccgagtgtgagcttgctactacttgtcattttcacaagttaaatttatgaactgaataaagaagtatgtatatgtatgcagatagatgttctggtttctaataatgcaagctaccaaagtatcaatcttttaagagctacaaaatgctttctaaatttcctctagtattatggcatttcagtctaacattattaggcatataaaaacacacccccgtcatcaatgatatgatttgttcactacaacttccatcaagtcattctgttgagtaagttacactttcacaaaactgacccagaaaaaaaaaaattgatcagttttaaataagtaatatacaccaatagtagacacacccattctccattccacgaccagttttgtatttacataatttgataatcactgatatattttaaaaagaatattttttaaaaaataaccaactttcaaataagacggcaacttaggcataggcatctaacagtcttccgttctaatatgaaatgaaacgacttaaagataccaaaccagggggtaacctaccactaaaggagtcctcctattccagaaatagtgaggaatttctgctggatccacagcagttgtgactagtggaaggaaggtacctccaataagtgtgcactgcccatcttca

SEQ ID NO: 716112 - DNA, 634 bp, Homo sapiens
gtctcactgatgtattgtggtcctatgttaaattaaaattttctaaaggtacctagaaatctgagtacaggaagaagagaaattagcagcccatttacttagctaacatgcttgacacgatactaagctctgggaacatcacaacaaataaaaattggttcctcttctccagggctcaagtgctgtatctgaggaggcccatacctttaaacaagtagttaaaatcaagaccatctgtactgtgatggcagtaggtataaagcacgcaagcccccctgtatttgcatagccgtatgcttgtattttgggctttcttcttgctaagccttagcctcctctgctataacagttgctttggcgaggtgacaatggrtggacgctggagtaaggaacataacgggcctgtcacagtagagagagagacagttttggataggagtctagaagttgtatgtgttctaatcctggtttatacacgtttagcttatttgtatgtcctttgtttatactcattctcacacatgtgcgactcttctgattctcttctgatgttcccgctattttaaaaatatatgcatggcaccatttgctcttagagtgccatcgtgttttgaagcagtgtgaatacaggtat

SEQ ID NO: 716113 - DNA, 643 bp, Homo sapiens
aaattatgaagctggagaggggaacaaattcagaaaaattatttgtacatctcagaaatatgagatgtcattgctcccatataaaccagaataggacacaatatacctctgtacagcattcagagaatacaaataagccactgaaaatctaacattttaaagtttgcctttaaaaaatattttgtagaggtattgaaaagacatatcccaataagtaaacaaagaataagtagatgaaaataaaatatttaagaatgcgaaatttagatgattagtctattatcttaataataaacttttcagaaggaaaaagcaggttttagctgtctcttgttttctaggacagtcatactttccatgttaaaagaaagtatgttactttttttttttacatgttttgtttgtccttgttggcttttttcgtgcaactcaaggcctgttatgtacagcttcatcatgaaatatgagaatgcagctgataaaaagtataytctaaaagcttctaggaaaaaaatgtgacaagcaaaataattaaaatcagaatagcaccgtacttttggagagcaacattgaaaaccataaaacaatggtgttattgaaattctgaagaaaaatatttccagcctagaactctattcaacaa

SEQ ID NO: 716114 - DNA, 664 bp, Homo sapiens
ataatgttgtaaatctaaaactgttctataataaaaggcttatttaaaaaactaaatgaccagttggaactcataagtattaactaggctgagaaagatggactatgacttgtgtcagttcttgtttcccttgaccttgatggcatgggtgtcctgcagaagctaggggcccttccccttggagctaaacacccacacctggcacaagagtcagagaatctgaaggaggatcctagggaagaaggaactattgcacgccctttctcggctctgtgcccatgaagtgggtcagtaggtaactggcgtgtatgagcttccacagggctgctgcttcacctctacacttcaaatctcacacaagaatctgcagttaacccatgcaaaaggaaaagagaagtgaaattgtagaaaatgtggttcagcatagccaagctggcacataacaaatccaccacacaattgcacatagacattgttcaatagggcagcgatgtcacaatataaactaaacacacaaccccgagaaggrtagagcagacttaaatgcatattaaagtatttattataaattttcattgtttctttggaatagattttgatagaaagaggatagccagagacaatgcgaatttaatagtgtccctgatggaaaatagaaagaaag

SEQ ID NO: 716115 - DNA, 593 bp, Homo sapiens
tagcttataaatgaaaagacttttcccagagttttaacctgcaatctgaaaactcaagctgtgttcttctctcagatttcaaagctgatgatagtgattctacagtataaatttatttgacagttctgaggatgattgataagggacattccgagcatcttagctctgcagccttaagcaacacggtcatttggttgaaatatgcagttctaaggtcaaatgagtaagaatactttttattaatgacaaaagyttaagagatgattttcctagctactttctctaagattttaaggtgttaaaaattctcaaaaatattctttccattgtatttgtcatttcttagatatatctgcagtgccctcttaatgctctttcaaaatacagtgcaataatataatgctttaaagcaactatttctccaggctttttacaggagctagccaaataggaaccatgggtccaggaatttctaacattcctattaaaaaaggttaccccactctcattcaaggtaaatgatgaggcattgggttatttaataaatgttaaattggccagtaatattttaaattgtctatgaatgatgggca

SEQ ID NO: 716116 - DNA, 593 bp, Homo sapiens
tagcttataaatgaaaagacttttcccagagttttaacctgcaatctgaaaactcaagctgtgttcttctctcagatttcaaagctgatgatagtgattctacagtataaatttatttgacagttctgaggatgattgataagggacattccgagcatcttagctctgcagccttaagcaacacggtcatttggttgaaatatgcagttctaaggtcaaatgagtaagaatactttttattaatgacaaaagcttaagagatgattttcytagctactttctctaagattttaaggtgttaaaaattctcaaaaatattctttccattgtatttgtcatttcttagatatatctgcagtgccctcttaatgctctttcaaaatacagtgcaataatataatgctttaaagcaactatttctccaggctttttacaggagctagccaaataggaaccatgggtccaggaatttctaacattcctattaaaaaaggttaccccactctcattcaaggtaaatgatgaggcattgggttatttaataaatgttaaattggccagtaatattttaaattgtctatgaatgatgggca

SEQ ID NO: 716117 - DNA, 593 bp, Homo sapiens
tagcttataaatgaaaagacttttcccagagttttaacctgcaatctgaaaactcaagctgtgttcttctctcagatttcaaagctgatgatagtgattctacagtataaatttatttgacagttctgaggatgattgataagggacattccgagcatcttagctctgcagccttaagcaacacggtcatttggttgaaatatgcagttctaaggtcaaatgagtaagaatactttttattaatgacaaaagcttaagagatgattttcctagctactttctctaagattttaaggtgttaaaaattctcaaaaatattctttccattgtatttgtcatttcttagatatatctgcagtgccctcttaatgctctttcaaaatacagtrcaataatataatgctttaaagcaactatttctccaggctttttacaggagctagccaaataggaaccatgggtccaggaatttctaacattcctattaaaaaaggttaccccactctcattcaaggtaaatgatgaggcattgggttatttaataaatgttaaattggccagtaatattttaaattgtctatgaatgatgggca

SEQ ID NO: 716118 - DNA, 1109 bp, Homo sapiens
tacgaaatatttatataatgaaatattttatagtaattgtatgtatataacctcttgattataaggctttgaagagggagcaccattttgcctgtttctcatgtgtgagcagacggactcagaaggcactggttccaatccagatttgctgttaagcacagcgccctccacaaccatccatgaagtggagcagaagaacttccgcctttcagagcaagcctcctgggattcattgattttgtaattccttgcctctatttgtgttataatacattgaaaccaaagctagcatttcaaaaatcaggaccaagtattttagttactcgggaccaagaacataaagttccwgtgaatgaaattaacataaggacagagccgttcgaccaagaaaaagaaaaggttagtcatattttaaaatttgtatctctttcaaaacacattgtttttgttttttgttttgttttgttttgtttttggcaaagaaactataggtgcctgtgcttaactatttaagtggtaaaaatagagtttggtggtttgcggtggtaccactggcggcaggtgggatgcctgatttgaaaggtgtgtgttcgccgcccatgcccctgcctgggctgtgcggagggtgccctgcagacagccgcaccctgagagggaccttgacaggtacacagtatgggtttgtcttctttgaaaggccatggagagccctggttgggggatgcagtaaccctgggactccataataaagagctgtgctgagatgaagacagatccgggttcaaatcctgcctccacacatcacgggaataattgaataattacatttgtgctttaaacctgtgcttccctgtcagcgtttgggcgtaggagattccaagtaaataactcctgggctggtggatacgatggttacatcgtgcctgtcacacggctggcaccgggtcagccctgaagagtgcttacgggtgtgtgtgcaattgcacgcttggggtgggtctgaccatgacaagcgtgttggagacaggagtgaaatctcgagagtgagcacaatctgtcatagcacagaagctgatcgttcacaacatttgaaagtatagttaagcatt

SEQ ID NO: 716119 - DNA, 608 bp, Homo sapiens
gacccgtgcaacaagccctgcctgtagagcaaatatatcttgccttacgcatgtaygttctactatttttcaaatgcatatttcacacttctatgttctactgtttttcaaatatatataaatactactgtgattacaataaagggattgattacaaagtgtggaattcagagtgaattgtcattcctctgctactcttgcctcaaaccacaaccaatgtcaaatcagtcgcctagcttgcttccgatttcttcctacttccacctcttcagtcaagaaccaggccttgtcagttactccttcacagtctcacatatgtgtcctttcttcagcctttgtcacccaacgctagcccttatcactcctccactcacggggaccagggctgcccacgtggtcccgaggcctgaatccagagcgtccctcccactgccaccaagtacatcttcctactggcccacacaagtccttggtgtcaaaatatttagggcttccagtctccttaacctgatatcccacctgctttacagtgtggcatgaagaactatctcttgaacacaaaacaagtcaccttatcatttacattgtctaatatttaaaaaacaact

SEQ ID NO: 716120 - DNA, 985 bp, Homo sapiens
tatgtctaagtggcagtttttcagaaccttctttaagaaagtccagagtgattgtttggtctcttctttgtcccttttatttcttgtcacctagaatgtggatgttrtcatcttggagtacaacatgagatcaaagttatttgtggctgagcaccaacacagttaaaacctggatccctgacagcatgcggtgaactgttacatgtgggagaaataaacttccaccttgtttaactcacaagagatatcatcattggtgcctatacctaattctaagtatgtaatgagaatacgttcaatttttaaatttacattgaccttttgtacattgcctagcttattgttaataattatttaattataaaatataaatgaatagttcatattattttaatgttctaagctcaaaatcacatataatattatctacaatatgaactaatatcctgtgaaagaaagaaaaaatgtaaatttccttaaacttcttgaattttgacattattttaaaataatggtttcttaccaatactaattgaattattttaatatgaatatcccctgcaattaagattattgttttacttaatactgtttctcttaaggatttttgtgatacattttaattttttgcacaaatttctaaacaatgcacaataactcaaaacattatatatgaaaataacttttctagaaaataaaaacattccttttgctatattctatgaaatatatttttcattttttagcaattttgaaacattttacaatattttaatgtcatgtcagcataaaattaataaaatatgcttaggtcttatcaattgcaagctgattacttttgattctcatatataaattataatttgatttagctttcaatgtctgtaactttattattttaagcttgtagtttctattgtttcatgttagttctttttaaacttaattatcatgaaaattaaaagaaataatactgggtctatgt

SEQ ID NO: 716121 - DNA, 1124 bp, Homo sapiens
ggatcacttgaggtcaggagtttgagatcagcctggccaatatagtgaaactccgtctctactagaaatacaaaaattatctgggcacggttgtgcatgcctgtattcccaactactgggaagctgaggcaggagaatcgcttgagcccaggaggcagaggttgcagtgagctgagattgcaccactgcactccagcctgggtgacaaagaaagattttatctcaaaaaaaaaaaaaaagttttacatatacatatatatatgyatatatatgaaaactattgaaaagaattgaatgtgtggtattaagaaaagaagaaaattggtatctcatctagtatcatagttggtttcatgctgctttcttatggatccattgctttgggagaaaataactttttcccctaagtgaaatcataaaaacagccagagcctttttattttaaacattctttcaaaacacacaaaaaaacaggtattagaaattatgagaaaacttggaagtatatttttcttttactctgaagtaaacagttgaaatccacgcattcatagcctgctacaaaatacttttcaacttcaatgagttggtggtctctgttggatcccactagactagtgtccattagagcaattagttcttattagcacacttattgtcaaggttttataagagcctgagaatggatgggcagaaaaaataatccctttatctccactagtgctgaacccttcagaagagaagactgaaagattcttatgaatctgtgaggtaatttcactgccactagcccattggcagcagtaacagagatctgtctcctgattcccgcctacagctctcatgagcatgatcttcattccagaaatggaaaataagattccaaagaaatgatcatgttatttaccttcatggttgaaagctcccgaggaattctaatgcacattttacattttaacacaatgaaaaccactaagttctcttgcatttctcattaatatggttcaatgaaataagcaaagtgtttcttacgcaatgtattaataagtttgcaaaatgtcctcaagtttaatagccaataatgtttctcaaaccttttcttatacatctaatcagaaaaatat

SEQ ID NO: 716122 - DNA, 1617 bp, Homo sapiens
tattgtgaatagtgctgccatgaacattcacatgcatgtgtctttgtggcggaatgatttatattcctctgggcatatacccagtaatgagattcctaggttgaatggcagttctgcttttagctctttgaggaatcgtcatactgcttcccacaatgaatatcttaaaaccatatgtttctattggcttttgttccttctatgttttgctctcccaggccccccagttctgttctctgggatcgttttccaaaataaattaccttcatggaaggccttatctcaaatgccacctggaggactcattaagaaaggcaaaaaatgtgtttagcaaatttaggaatgcaaacagtctagttttcyataatataaaaatatgttcattgtatctcatattatagtttcaactgtaaaattcattgatttgaacagttaatcattattacttcatcagtatcctttggttcaagctattaaatcttcaacttgccatattgcacacaataaaaattatatttgatatgaaaaaccttaagatttcagcatatgctctttaaggtagcagcatagagaggacctttgtgggtgggccccaaggtaaaggcaggattttctcagcatgctaagcagctggttgatttttgtcaccttctgccctcactatgcagatacttaatgctgtccttggaccactctgccagtgacacctcaccagagccacaccccacatgggatgcaattgttactgaagcacataaatggaattatccacaaatagaagtatccagagaaaacctacatttccattcccaagcagggagcctgttagggttcagaagtcaactacattttgcacaaagagcataaacagagctctgaaaagctgtcagtctgtaggagtgaatagcaagcagatatcaaacgtcccgagagagtgttacaggctttatcttctccaaatgcaggttctggcctctgcggaaaaaaaattttttttttcctttttttgagacagagtctcactctgtcacccaggctggagagcagtggcgcaatctctgctcattgcaagttccgcctcccgggttcacgccattctcctgcctcagcctccctagtagctgggactacaggcgcctgcccccacggctggctaattttttttgtattttcagtagagacgggttttcaccgtgttagccaggatggtctcgatctcctgacctcgtgatccgcctgcctcggcctcccaaagtgctgggattacaggcttgagccaccgtgcccggcctgtggaaatcttaacctaagattttagctcattcctatcctttaggcatgccctttggcttggctatctataatctcaaagccttaactgtcctctaactaacattatgtcttagtcatcattgaaggaagatgttaatgaatgagcatataatccaaaaaggaaaccctaacatgagttgtttttttttttttaattcatctgggctagtctggtaagaaaaggagaatggatattttacaaaaaaaggtcatatcgtgaccctctgtctaactgaatataagcaaccagaatcacatgcgtagctattatattgcaaggatatt

SEQ ID NO: 716123 - DNA, 1248 bp, Homo sapiens
taagaaagagatttttctcccttctccccagagcctgcacctggcagaaccagcacaccactggtacagcacaccactcactgcaagacatatccctcccctgagcctctgccccgtcattccatggtgttgctatgaatgttaaatgagaaaatgccttcacggtatcgacacacactaagtgcccaattaggactccattacaaccataatttcaccattgttgtatctctagaataacaataacaaaaatcatagcaactaagcagcaatttaatttagtaaaaagcaaatcatttttcactacgcttttgctcatccgtcttatttattctcctttcagttctgactgttgcaggctaagtggaggtgtgtttacaggatgcgaaattatttttttaaaaatatagaaaacagccaactcttttaattggcaacataaacactgaaaacatggcagcttcgctggatacttatttttatgaaaagagatcaagaaaagataaccatgtctttgctgaacctatcttgaatgggatggcctctaatgacattcatttcagaaacttaagttcttagagtagtcaatcagaaaatcttcagatcactttgtgaagtcttcacagaaattgaaactactatttaggactcactactctatgattcatgctgataatggtttagagcttattctcctaagaaaagactctctgacctatgacagaattctctgagatggaagttgttctatctacaaaatgtgctgcagaattgaaacaaaacaggtctctgtttttccttgcttaataccaggaggtggtacatgcatggaaggtatgggaactctccttagccagatagtaaaggatgaagttattacaggcatagaattgacggggcactatgctgatcacatatctacaacactacgttcagttctgattgtcacatttgttttagaagacacacctacaggagttcatcccgtggagagtcactakaatgttctgggggtttaaatgcctgctgtaagaggaacactgaaagcaaaactaagtaacacaaagaaaagggtctggagaatttcatctctaaaatatctcaagcttgttattgtcagagcaatgtgtttgttctaggtgtacctagttgtaggttaagggtaagtaggtagaattatgaaggaagaaacttgcatcagtctaaggcaggtatttcctatctcacagttgcccaagaacatgttgg

SEQ ID NO: 716124 - DNA, 1248 bp, Homo sapiens
taagaaagagatttttctcccttctccccagagcctgcacctggcagaaccagcacaccactggtacagcacaccactcactgcaagacatatccctcccctgagcctctgccccgtcattccatggtgttgctatgaatgttaaatgagaaaatgccttcacggtatcgacacacactaagtgcccaattaggactccattacaaccataatttcaccattgttgtatctctagaataacaataacaaaaatcatagcaactaagcagcaatttaatttagtaaaaagcaaatcatttttcactacgcttttgctcatccgtcttatttattctcctttcagttctgactgttgcaggctaagtggaggtgtgtttacaggatgcgaaattatttttttaaaaatatagaaaacagccaactcttttaattggcaacataaacactgaaaacatggcagcttcgctggatacttatttttatgaaaagagatcaagaaaagataaccatgtctttgctgaacctatcttgaatgggatggcctctaatgacattcatttcagaaacttaagttcttagagtagtcaatcagaaaatcttcagatcactttgtgaagtcttcacagaaattgaaactactatttaggactcactactctatgattcatgctgataatggtttagagcttattctcctaagaaaagactctctgacctatgacagaattctctgagatggaagttgttctatctacaaaatgtgctgcagaattgaaacaaaacaggtctctgtttttccttgcttaataccaggaggtggtacatgcatggaaggtatgggaactctccttagccagatagtaaaggatgaagttattacaggcatagaattgacggggcactatgctgatcacatatctacaacactacgttcagttctgattgtcacatttgttttagaagacacacctacaggagttcatcccgtggagagtcactataatgttctgggggtttaaatgcctgctgtaagaggaacactgaaagcaaaactaagtaacacaaagaaaagggtctggagaatttcatctctaaaatatctcaagcwtgttattgtcagagcaatgtgtttgttctaggtgtacctagttgtaggttaagggtaagtaggtagaattatgaaggaagaaacttgcatcagtctaaggcaggtatttcctatctcacagttgcccaagaacatgttgg

SEQ ID NO: 716125 - DNA, 1704 bp, Homo sapiens
gagtctcaaaaagatcatccctaaaaacaaatcagataacttggattatgaattaattgaattaactgcacattttaggaaatcaaaactgcctttgatagtgttcatctgttgattccagcaatacaataattatgacaagcagagattaggggacagacacaatcataatctggaagaattaatctgttgatatctagcaaatatttatatttcagattatgtaaagtgttttagttacacatagaataaaccatacattttaaagcactgccattagccaaagcaataatgttagtcacaatttttcagttctattgtatcaaaggtgaaatcartatctcctgaggctgactataaagaaagaaaaaatatagatttgaattgatttaacaaagaaaatgaatataattatgatggtctgataaacccaaaattaggaagcaacttatcagataaatattctcatcggcatgtctgtctcatgctctaagcaacataacctataccaattggggccactgttccacagaaaggaagtactgccacttttttttctttcttttcttccttgaggaaatgatgttaactatatggagcaagtgaatatgaaagatgaaaaaacaatttctgacaccacatgtaacaatgcagaagatggtgtgtatttagtctttcttttttcttttttttgagacggagtctcactttgtcgcccaggctggagtgcagtggcgcaatctcggtcagcgcaagccgcctcccaggttcatgccattctcctgcctcagcctctccagtagctgggactacaggcgcccgccaccacgcccggctaattttttttgtatttttagtagagacggggtttcaccgtgttagccaggatggtctcgatcttctgacctcttgatccgcccgcctcggcctcccaaagtgctgggattacaggcgtgaggcaccgcgcccggcctttagtcattttttaattgagaatattctctactagtaagtgatgctcttgagaaacagaatgaactttaaccaatttaacttttcctgaaggtaagactgcgggacaggcatacatgagtgcaagtctccatcacaggggatgagatacaaagtaaaacacagtagacttccctattcacagaccactcacctctcacaggcaaggaccaagcttgtccacctcatgctgccattgcctgacctaagagattggcatttagtagggacgcagcaagtaagtttgaatgcatgaataaagtgttatggcaaactggatttcctgactagctaagacaatatgaaccctaggttgccaaatttcaaggaattcatatacttgaaactgcatttagccccacagcatttctgatcacttggtcacttaaaatattccttcggaacttcagagtcattcagtgcctcagggctttttcttaatttttttttatttcaagttctgggatacatgtgcaggacgtgcaggtttgttacaaaggtaaatgtgtgccacggtggtttgctgcacctatcaacccatcatctaggtattaagcccccatgctttagctatttgtcctgatgctctccctcccccaggccccacggagaggccccagggtatgttattcccctccctgtgtccatgtgttctcactgttcagctcccacttataagtgagaacatgtggt

SEQ ID NO: 716126 - DNA, 644 bp, Homo sapiens
atgtccaacaatggataaatggataaaggaaatgtggtagatagatacagtggaatactattcatccattaaaaagaatgaaatcctgtcatttgtgacaacatggatgaacctggaggacattatgataagtgaaataagccaggcacagaaagataaatagcatatgatctcacttatatgaggaatctaaaaaagttgaacttacagaagcaaagagtggaatgatagttaccaggggttggagttgaggggaggaactgaggagatattggtcaaacatacaatatttcatttagacagaaggaataaattcaaagagatatattgcgcaacatggtgactatagttaacagcaatgtattgtatacttgaaaattgctgagagtagattttaagtattctcaccacaaataaacgatawaagtatgtaaggtaaggcatgttactgggaagtgcagggatcctcagttctttgtcttatttggagaaagcattctgccaagcaactgatttagccaaaaagagaatttactgaagcaaaatagagagcagagagttacttacagagacagtacattctgcaaagatgaagcagagtgggcaaatgaaggaggtaagccagcagcagctcgagagttctg

SEQ ID NO: 716127 - DNA, 622 bp, Homo sapiens
ttttaattagtttaatattctaatattcttcactaartctcttttatgcaatgattaaacattgcttaaaccacaattcaaatagcaaagcataaattctaacaaatcagctttttttttaattaagggagaagaacaaaaaacatgaataaaaattatcctgaaatcaactagttctatcatgtaatatcaactctacagtacgttgtatttagatacttacctagctgaaattattacccaatatccaaatccttgtatttccaaaggagaaacacttaaaaaaccttgcactttaaatattattaaaacataagttagtattctcattatttcccttttatcccaaaaaaggacggggtggaagaagattctgttactattagatgaaaatgtaatttggataccatacactttaagtatccctcatcttaaatggctgggactagaagtgttttggatttcagaattttttggacttttggtatatttggtatatttggtatattttggtatatttggtatattttttggacttttggtatatttggtatattgagcatccctaatctgaaaatccaacatctgaaatgctccaagagagatgaaacaagatggtgga

SEQ ID NO: 716128 - DNA, 673 bp, Homo sapiens
aaaacctggaaaatatggagccttttcagggagccatctgaataaatcatctccattagtttccttctttcttcacttttcacttttcttgtgctgctgatctagggcccaaacttggaaaccacaaggctacagaagtcaaagtaccaaaatagtacaaaggctgcctctttgccttgtaaatgtaacttagttttaatgatacaaatttcacacacacacacacacacacacacacacacacacacgcatatcccatacacaagtagaaatttgaagwtatttagaatgagaaagatcacagaaacatcaaatcaccataccaaccagcatttcccttttttccaaaagtgaggacacagtacaagtctaacatgaaagtattatccaagtttgcaagattccattactttttaagttatcaaaagcataaactgatgcttatgtataccccagatgtgtctccctgaacaacttaaatttccaaaaagttgttttcatagtgaatttctaaaaaaacgaaggcatatcctgcccccactttgatccttttaactatagatgctttccttttaaaattgtttattccaaatcttaataaaaatggaaaaataagattaaacattcaggtaaaaagaatgttttcaaaaagtggatttgtgtgatgttttta

SEQ ID NO: 716129 - DNA, 673 bp, Homo sapiens
aaaacctggaaaatatggagccttttcagggagccatctgaataaatcatctccattagtttccttctttcttcacttttcacttttcttgtgctgctgatctagggcccaaacttggaaaccacaaggctacagaagtcaaagtaccaaaatagtacaaaggctgcctctttgccttgtaaatgtaacttagttttaatgatacaaatttcacacacacacacacacacacacacacacacacacacgcatatcccatacacaagtagaaatttgaagttatttagaatgagaaagatcacagaaacatcaaatcaccataccaaccagcatttcccttttttccaaaagtgaggacacagtacaagtctaacatgaaagtattatccaagtttgcaagattccattactttttaagttatcaaaagcataaactgatgcttatgtataccccagatgtgtctccctgaacaayttaaatttccaaaaagttgttttcatagtgaatttctaaaaaaacgaaggcatatcctgcccccactttgatccttttaactatagatgctttccttttaaaattgtttattccaaatcttaataaaaatggaaaaataagattaaacattcaggtaaaaagaatgttttcaaaaagtggatttgtgtgatgttttta

SEQ ID NO: 716130 - DNA, 650 bp, Homo sapiens
ctattgcaataggggagagagtcctggaaaccaagctcttcctaggtttttgcaggagtgactgaacattttaaagggagaactagggagtaggaatggaactagccaggacagcagcagaggcagggaggtagaaatttacataaagcaggaaagtggagatggtggttggtcaatgtgattagtcgtttcttagggaagttaggtccctgtcctcccacagagactgggagacgcggccctgtcttccggtattggctggaatgaacagcaagttttttgggcggccttggggtttcccaggcaggaatttaagagggaactgaagctgttgtcctagagacatggccttgagctattagasattatgctagtgttttcaagtctcttaatgtgttggtaggtgagaggagtggacaaaaacatttgtattgacagtctgtagttcttataggctaagtttgaggctggttgagaagagggctcagaggaggctgtctttggtcaaaacttaccctgttctagtgccacataattgaagaaaaggtaaattgtcatagtaaatatagattttgtactgcaaattagacataaagttaaatcagaaagtgaattctgagaaaaataaataagattgcccattgttcaca

SEQ ID NO: 716131 - DNA, 643 bp, Homo sapiens
attatttttaaaaattcaaaaatgtttttaacttttattttaagttcaggggtacaggtgcaggtttgttacgtaggtaaacttgtgtcatgggaatttgttgtacagactatttcatcacccaggtattaagcctagtacttagggctccagtaaccacaacaatatggtattgtacattcaaaatttaaataaatcctatagcgtttaaagttctagtctcatgagtttaaatattatcaattctgctgaaaaygcacccatttccatctcctgtttaatttcaccctttatattgcagattatgcctacttgagccctgtcctgggctttttctcagatttctgagagttaacatgttcaaaggttgaattctccactcccacccccagcctcacatccctgagtcttcctcatccgagcaaatggcaactccactcttccagatactcaggacctaaaacttgaggctacacttttcctaatcctctgttgtatcctgtgagcaaatcaccagcaaagcctgttaatatacatgttttcaaaatatattagggttatgagaccttcccactccctttattactaaaccttcagccatcattttctggctttactattgtgataacctctcaataaaccc

SEQ ID NO: 716132 - DNA, 643 bp, Homo sapiens
attatttttaaaaattcaaaaatgtttttaacttttattttaagttcaggggtacaggtgcaggtttgttacgtaggtaaacttgtgtcatgggaatttgttgtacagactatttcatcacccaggtattaagcctagtacttagggctccagtaaccacaacaatatggtattgtacattcaaaatttaaataaatcctatagcgtttaaagttctagtctcatgagtttaaatattatcaattctgctgaaaatgcacccatttccatctcctgtttaatttcaccctttayattgcagattatgcctacttgagccctgtcctgggctttttctcagatttctgagagttaacatgttcaaaggttgaattctccactcccacccccagcctcacatccctgagtcttcctcatccgagcaaatggcaactccactcttccagatactcaggacctaaaacttgaggctacacttttcctaatcctctgttgtatcctgtgagcaaatcaccagcaaagcctgttaatatacatgttttcaaaatatattagggttatgagaccttcccactccctttattactaaaccttcagccatcattttctggctttactattgtgataacctctcaataaaccc

SEQ ID NO: 716133 - DNA, 611 bp, Homo sapiens
tcttccgtgttggctttaacaagtctaagatatttggcaaggctgataattatgttataatgtgctgccaatttttttgtttgtttgtttttgttttttgagacagagtctctctctgccgcctaggctggagtgcagtggtgcaatctcagctcactgcaacctccacctcctgggttcaagtgattctcatgcctcagcctcscgagtagctgggattacaggtgcccaccaccatgcctggctgatttttgtatttttagtagagatggggtttcacccttcaccctgttggccaggctggtaactcattaatattttagtattgtcctcccagactttgttcctgtgtatgtgtgtacgtatgtatttgttttgtttatttgtttaagcaaaataggatcacacagcttttaaagagggggtacaattcagtgaccatttagtacatttacaatgttgtgcaactaccacctctatttccaaaatgtttttgtcacccccaagggaaaccctgtatatacgcattaaactcctcattggttacccccctgtccctgctcgtggcaaccaccaatctgtcttgtgtctctgtggatttacctatttag

SEQ ID NO: 716134 - DNA, 378 bp, Homo sapiens
tttttgtatttttagtagagacggggtttcaccatgttggtcaggctggtcttgaacccctgacctcgtgatccacccgcctcggcctccmaaagtggtgggattataggcatgagccaccgcgcccggccttgtgctagtagtttttagtccagccaaaatagtgggttgcacctggtgggtataagcggttaactggtgtgtcaaacttttgatttgcatttttttctgagggctaataatgttgagtatctttccttgtgcttatgatatcctctttgttgtgatgtctattcagatcctttcccatttttaagatgagttatttgccttttttattattgagttgtaaaatttatttatgtagctagatacatg

SEQ ID NO: 716135 - DNA, 606 bp, Homo sapiens
tgcagtgagccaagatcatgccattgcactccagcctaggcaacaagagcaaaactccgtctcaaaaaaaaaaaaaaaaagtatatggggactgggtgtagtgattgacacctgtaatcccagcactttggcaggccgatggggaaggattagcctgagaccaagaattctagactggcctgggcaacatgaccagctcctgtctctattttttaaaaaagaagtgtatggtttcttccaacctcttgtacttataccattccctcaaagagaaagagaattaagaggaaatgtcttaaacacaaaggaatttaatgttatggtgccctgggtctgaatgctctgaagagggcaacattctggaggtgccaaytttcagatgagcatttaaaatgtcagcgttgggcaaacattttattttgtcttgaactcatccccccttaatatcttgggtacgaccattctctacattttctctctgtgctactaaacttagaggatgcaagtcaggattgggaggagactgattttgtgtgtgtttggcctttactgcagaagaaaaagaactgcaactaggccgggcgcggtggcccatgcctgtaatcc

SEQ ID NO: 716136 - DNA, 1692 bp, Homo sapiens
ggctgttccttgctgagaaaaagaattcagcgatatttctcctatttgcttttgcaaggagagaaatatgactctgttctgcccggccccacaggcagtcagaccttatgattatctcgcttgctccctgaaaatcactgttatcctgttcttttaggatgcccagatttcatattgttcaaacacacatgtttcacaaacaattggtaaagataacgcaatcatcacagggtactgaggtgacacacatcctcagtttacaaagatgacgagattaagagattaaaataaagacaggcataggaaattataagagtattgattggggaagtgataaatgtccatgaaatcttcacaatctatgttcagagatggcagtaaagacaggcgtaagtaattataaaagtattaatttggggaactaataaatgtccatgaaatcttcacaatttatgttcttctgctgtggcttcagccggtccctccgttcagggtccctgacttcctgcaacacccaggtatttagcccagacaatgacgtcgcttcattgggagtgtaagagatcataatgtgactttatgttaaaatgacactatgtatagataagataattacagtaagatgtaaattatatgggattaatttagactctggatagaagatgagaaccatgtgtctacctagataaaggcataaagagatcatggtgcagatgagttggtagagggaatcctttgggaattttgggagcagcagaacagtatatacttccagactcattcagagctagcatgtaacctcaacccaagtgaaaaagacgacttttttttggccaaagaaacttgaaactgggcacagtggctcatgcctgtaatcccagcactttgggaggccaaggtgggcagatcacctgacgtcaggagttcaagatcagcctggccaacatagcraaaccctatctctacttaaaaaaaaaaactacaaaagatctagccaggcatggtggcacacgcctgtagtcccagctgtttgggaggctgaggcacaaggattgcttgaacccaggaggcagaggttgcagtgagccaagatggtgccactgtactccagcctgggtgacagagcaagactttgtctcaaaaaaaaaaaaaaaaagaaacttgagaacttattttgaaccagatatacatgtaggttgaaatacagaagaaaacgccaaattttaacttataaagagaatgaataaacaaatctgttaacaaggtggccttgactgggctgacacaattatagtaaacagatgcataactgctgttgccacatgggtgttaacacccatctgcttatccccatacctaaaggtgatttgaaattgagactgatggtatcacacacacaccaagaaaatgtgaaaagattcattattcatgtatgaggctttctgggaagacaagggctggtctgaaatggctttggtttttgctgtgattaaggggtgggggcaggtttttgtggtttgaacttccccctgagctaaaacagggagatggagctttctcattagttttcctagaagtgggacaagtcagaaggggagagagctaggacttgaaaactttcagcagcaaaacatcaaaaatggaatgagactctaatgataacatccatctcctcactttcatacttttaaa

SEQ ID NO: 716137 - DNA, 1692 bp, Homo sapiens
ggctgttccttgctgagaaaaagaattcagcgatatttctcctatttgcttttgcaaggagagaaatatgactctgttctgcccggccccacaggcagtcagaccttatgattatctcgcttgctccctgaaaatcactgttatcctgttcttttaggatgcccagatttcatattgttcaaacacacatgtttcacaaacaattggtaaagataacgcaatcatcacagggtactgaggtgacacacatcctcagtttacaaagatgacgagattaagagattaaaataaagacaggcataggaaattataagagtattgattggggaagtgataaatgtccatgaaatcttcacaatctatgttcagagatggcagtaaagacaggcgtaagtaattataaaagtattaatttggggaactaataaatgtccatgaaatcttcacaatttatgttcttctgctgtggcttcagccggtccctccgttcagggtccctgacttcctgcaacacccaggtatttagcccagacaatgacgtcgcttcattgggagtgtaagagatcataatgtgactttatgttaaaatgacactatgtatagataagataattacagtaagatgtaaattatatgggattaatttagactctggatagaagatgagaaccatgtgtctacctagataaaggcataaagagatcatggtgcagatgagttggtagagggaatcctttgggaattttgggagcagcagaacagtatatacttccagactcattcagagctagcatgtaacctcaacccaagtgaaaaagacgacttttttttggccaaagaaacttgaaactgggcacagtggctcatgcctgtaatcccagcactttgggaggccaaggtgggcagatcacctgacgtcaggagttcaagatcagcctggccaacatagcgaaaccctatctctacttaaaaaaaaaaactacaaaagatctagccaggcatggtggcacacgcctgtagtcccagctgtttgggaggctgaggcacaaggattgcttgaacccaggaggcagaggttgcagtgagccaagatggtgycactgtactccagcctgggtgacagagcaagactttgtctcaaaaaaaaaaaaaaaaagaaacttgagaacttattttgaaccagatatacatgtaggttgaaatacagaagaaaacgccaaattttaacttataaagagaatgaataaacaaatctgttaacaaggtggccttgactgggctgacacaattatagtaaacagatgcataactgctgttgccacatgggtgttaacacccatctgcttatccccatacctaaaggtgatttgaaattgagactgatggtatcacacacacaccaagaaaatgtgaaaagattcattattcatgtatgaggctttctgggaagacaagggctggtctgaaatggctttggtttttgctgtgattaaggggtgggggcaggtttttgtggtttgaacttccccctgagctaaaacagggagatggagctttctcattagttttcctagaagtgggacaagtcagaaggggagagagctaggacttgaaaactttcagcagcaaaacatcaaaaatggaatgagactctaatgataacatccatctcctcactttcatacttttaaa

SEQ ID NO: 716138 - DNA, 859 bp, Homo sapiens
tcaaagctttctgtccaggtggttccagtatctaaccacacatagcatggagctataaattattagttctgatggaacttaaaaattttcctatcttggttttctcagcccttactatacaccaatattactagagagtagaaaaaatcagatagtcttcgcccctaaacttactgaatccagatctccagagatagtatctgagcatttgtgtttttacagaattatccaggtaatgctaatatttgggttgataaactacttattcttctcactgatcaacagctacaggaatcactttaaagcattcctggtctcactttgctctgcatttgggagaaagacataagtaatgaatagatgtcaaatatgakcacccttatgggagatatccataaactaaaatattatcttctatctctttgtttgatactatatcacacatgggactatggaatgaatttttactgaatttgaaaggtatatttgggatggccaattaaagcacaggctatgtggcatgtggcatgcacacaatttatgttggaagcctctgggagcccctcaaagaggtaggcacattttcagagtggcagaactgaggaacacaaggagagagctgtgtgtctgccttaggggggacatgggttgtatataaagatgctgtggacagagaagactgaaaacaaattcaaatatgagccttaaataaaaagctaggagggagaaacggaattgcagtcattgatttgtgattgtgctgcctctcacaagagcaatcttgagtagttttgcttcaggtgtaatgttagatgctcaataaatgtttatagtagatgtttaataaatgcttattgct

SEQ ID NO: 716139 - DNA, 859 bp, Homo sapiens
tcaaagctttctgtccaggtggttccagtatctaaccacacatagcatggagctataaattattagttctgatggaacttaaaaattttcctatcttggttttctcagcccttactatacaccaatattactagagagtagaaaaaatcagatagtcttcgcccctaaacttactgaatccagatctccagagatagtatctgagcatttgtgtttttacagaattatccaggtaatgctaatatttgggttgataaactacttattcttctcactgatcaacagctacaggaatcactttaaagcattcctggtctcactttgctctgcatttgggagaaagacataagtaatgaatagatgtcaaatatgagcacccttatgggagatatccataaactaaaatattatcttctatctctttgtttgatactatatcacacatgggactatggaatgaatttttactgaatttgaaaggtatatttgggatggccaattaaagcacaggctatgtggcatgtggcatgcacacaatttatgttggaagcctctgggagcmcctcaaagaggtaggcacattttcagagtggcagaactgaggaacacaaggagagagctgtgtgtctgccttaggggggacatgggttgtatataaagatgctgtggacagagaagactgaaaacaaattcaaatatgagccttaaataaaaagctaggagggagaaacggaattgcagtcattgatttgtgattgtgctgcctctcacaagagcaatcttgagtagttttgcttcaggtgtaatgttagatgctcaataaatgtttatagtagatgtttaataaatgcttattgct

SEQ ID NO: 716140 - DNA, 859 bp, Homo sapiens
tcaaagctttctgtccaggtggttccagtatctaaccacacatagcatggagctataaattattagttctgatggaacttaaaaattttcctatcttggttttctcagcccttactatacaccaatattactagagagtagaaaaaatcagatagtcttcgcccctaaacttactgaatccagatctccagagatagtatctgagcatttgtgtttttacagaattatccaggtaatgctaatatttgggttgataaactacttattcttctcactgatcaacagctacaggaatcactttaaagcattcctggtctcactttgctctgcatttgggagaaagacataagtaatgaatagatgtcaaatatgagcacccttatgggagatatccataaactaaaatattatcttctatctctttgtttgatactatatcacacatgggactatggaatgaatttttactgaatttgaaaggtatatttgggatggccaattaaagcacaggctatgtggcatgtggcatgcacacaatttatgttggaagcctctgggagcccctcaaagaggtaggcacattttcagagtggcagaactgaggaacacaaggagagagctgtgtgtctgccttaggggggacatgggttgtatataaagatgctgtggacagagaagactgaaaacaaattcaaatatgagccttaaataaaaagctaggagggagaaacggaattgcagtcattgatttgtgattgtgctgcctctcacaagagcaatcttragtagttttgcttcaggtgtaatgttagatgctcaataaatgtttatagtagatgtttaataaatgcttattgct

SEQ ID NO: 716141 - DNA, 859 bp, Homo sapiens
tcaaagctttctgtccaggtggttccagtatctaaccacacatagcatggagctataaattattagttctgatggaacttaaaaattttcctatcttggttttctcagcccttactatacaccaatattactagagagtagaaaaaatcagatagtcttcgcccctaaacttactgaatccagatctccagagatagtatctgagcatttgtgtttttacagaattatccaggtaatgctaatatttgggttgataaactacttattcttctcactgatcaacagctacaggaatcactttaaagcattcctggtctcactttgctctgcatttgggagaaagacataagtaatgaatagatgtcaaatatgagcacccttatgggagatatccataaactaaaatattatcttctatctctttgtttgatactatatcacacatgggactatggaatgaatttttactgaatttgaaaggtatatttgggatggccaattaaagcacaggctatgtggcatgtggcatgcacacaatttatgttggaagcctctgggagcccctcaaagaggtaggcacattttcagagtggcagaactgaggaacacaaggagagagctgtgtgtctgccttaggggggacatgggttgtatataaagatgctgtggacagagaagactgaaaacaaattcaaatatgagccttaaataaaaagctaggagggagaaacggaattgcagtcattgatttgtgattgtgctgcctctcacaagagcaatcttgmgtagttttgcttcaggtgtaatgttagatgctcaataaatgtttatagtagatgtttaataaatgcttattgct

SEQ ID NO: 716142 - DNA, 549 bp, Homo sapiens
  misc_feature 2, 3, 4, 5, 6, 7, 8, 9, 10, 11, 12, 13, 14, 15, 16, 17, 18,19, 20, 21, 22, 23, 24, 25, 26, 27, 28, 29, 30, 31, 32,33, 34, 35, 36, 37, 38, 39, 40, 41, 42, 43, 44, 45, 46,47, 48, 49, 50, 51, 52, 53, 54, 55, 56, 57, 58, 59, 60,61: n = A,T,C or G
  misc_feature 62, 63, 64, 65, 66, 67, 68, 69, 70, 71, 72, 73, 74, 75, 76,77, 78, 79, 80, 81, 82, 83, 84, 85, 86, 87, 88, 89, 90,91, 92, 93, 94, 95, 96, 97, 98, 99, 100, 101: n = A,T,C or G
annnnnnnnnnnnnnnnnnnnnnnnnnnnnnnnnnnnnnnnnnnnnnnnnnnnnnnnnnnnnnnnnnnnnnnnnnnnnnnnnnnnnnnnnnnnnnnnnnnntatttatgccagcagtaaaaacaaagacattttgcaactaaaagctctaaaattatttaagaaagtccctggctctgactctgagactttctgtcatatcttatcaagaacaaaaatcaaaagctttttccccatctattgaaatgattatatggtttttcattctgtttaagtggtgaatcacatttattgatttgcattatgttgaaacaaccttgcatcccaggaatgaagtctacttgattatggtgaactaacgttttgatatgatgctagatgtggattgctagtatttttggggggattttttttgtccacgttcatcagagatactggcctgtagttttttttgtcgtgtccttgccagattttggtaccaggctgatgctggcttcacggaatsagttagggaggagcacttcctcctcgattttttggaatagtttcg

SEQ ID NO: 716143 - DNA, 719 bp, Homo sapiens
tttcagttagaaaaaatcaattgaagagatttgttgtaaaatgtggtgacaatagttaataacagtgtattgtattcttgaaaaaatgcagtgaggagttttaaatattcttaccacaaaaagtgatatgtgaggtaacacctatgttaattagctcgatttagccattgtatacatatccacaatatatacatctttcaaaaaacaacatactgtacatgataagtatatacaattttatttctattaaaaataacttttaaaaaggatataacytaaaatattaaacacaaaactattcaaaacaatgaaacaagaaaacatcaaaggaattaaaaatagtacactagaaaaattctacttaacccacaagaaataataaaacaagactagaagattacaaaagaattagacacacagaaagcaaatagactgtcacctggcagcatatacaaaaataagtcaaattaaatcatagatccaaatataagcacccaaactataaactttccagaagaaaacaggaagggaaatcttcatgatttggggttagccaacagtttttggacacactaaaatcaaaatctataaaagaatggtcatggttaaattacactttatcaaaattaagaactctggtgcttctaaagaccacattagaaaattaaaaataacacaatctgatagaaaatatttgtaaaaattatatctgataatga

SEQ ID NO: 716144 - DNA, 719 bp, Homo sapiens
tttcagttagaaaaaatcaattgaagagatttgttgtaaaatgtggtgacaatagttaataacagtgtattgtattcttgaaaaaatgcagtgaggagttttaaatattcttaccacaaaaagtgatatgtgaggtaacacctatgttaattagctcgatttagccattgtatacatatccacaatatatacatctttcaaaaaacaacatactgtacatgataagtatatacaattttatttctattaaaaataacttttaaaaaggatataacttaaaatattaaacacaaaactattcaaaacaatgaaacaagaaaacatcaaaggaattaaaaatagtacactagaaaaattctacttaacccacaagaaataataaaacaagactagaagattacaaaagaattagacacacagaaagcaaatagactgtcacctggcagcatatacaaaaataagtcaaattaaatcatagatccaaatataagcacccaaactataaactttccagaagaaaacaggaagggaaatcttcatgatttggggttagccaacagttttkggacacactaaaatcaaaatctataaaagaatggtcatggttaaattacactttatcaaaattaagaactctggtgcttctaaagaccacattagaaaattaaaaataacacaatctgatagaaaatatttgtaaaaattatatctgataatga

SEQ ID NO: 716145 - DNA, 719 bp, Homo sapiens
tttcagttagaaaaaatcaattgaagagatttgttgtaaaatgtggtgacaatagttaataacagtgtattgtattcttgaaaaaatgcagtgaggagttttaaatattcttaccacaaaaagtgatatgtgaggtaacacctatgttaattagctcgatttagccattgtatacatatccacaatatatacatctttcaaaaaacaacatactgtacatgataagtatatacaattttatttctattaaaaataacttttaaaaaggatataacttaaaatattaaacacaaaactattcaaaacaatgaaacaagaaaacatcaaaggaattaaaaatagtacactagaaaaattctacttaacccacaagaaataataaaacaagactagaagattacaaaagaattagacacacagaaagcaaatagactgtcacctggcagcatatacaaaaataagtcaaattaaatcatagatccaaatataagcacccaaactataaactttccagaagaaaacaggaagggaaatcttcatgatttggggttagccaacagtttttggacacactaaaatcaaaatctataaaagaatggtcatggttaaattacactttatcaaaattaaraactctggtgcttctaaagaccacattagaaaattaaaaataacacaatctgatagaaaatatttgtaaaaattatatctgataatga

SEQ ID NO: 716146 - DNA, 1329 bp, Homo sapiens
ttgaacaggcaattcataggagacaaaataaaaatggctattaaacatatgacaatgttttcaacctgacatataataagcaaaaataaattcaaactttattggaataccatttctcacctattagattagcagatatccaagaatttgacaatatacttggctagtgagactacagagtgacacacactctcgtgaatttctggtcaaaatgcaaaacattaccacccctctgtaaatctggcaaaatctagcaaatttgcatatgggtttattctttaatacaaaactcacttatatgaccatatctcaaaaatataccagaaaaattactaaggaactaggttgttaattgcagtattatttgcagcagcaaaatacaggaaataacctcaacatcttttaagaggatattgtttaagtaaatcatgctatgttcttacagtgggatactatgtaatcacacaaggaaatatggatggtttctatgtaattgctctccagaatatatcattaagtgataagaacaagaggcagaaagtggggagaatacaagtatacaaatagtctgtatagctgtatcgtcagtatgtcctatgaatatgataaccagacatattgtcctcctaatactatatgttatgaagaacagagaaccgccaatgaaatatgatattcttgtccaacatgaaacctgaattcaatcaagcctttagtactaatatccagtgcatattaaatgcctagaatagaaagctacaaaattattgacctgatttcttcaaaacctaatataaaaatattaagagaaaatcccattatagattatggagatccaagagtcataagaaccttgtttgaatctcaattagaacaaaccagttgaagacattttaagacaattagtgaaattttaatatgaaacatttcttaatttgtcttgaaagatgtaacataaactgcagttacatgagaaaatgtccctaaatttagagatgcatgctaaagaacaaagggtagaaatgacatgatgaatgaaatttgctttaaaatacttcagtcaaaaatatggactaattaaaacaagtaragcaacaacaaacaaacaaaaccattattcagtatttaggatccaaatatagagaaacagaaccttgcaacatttccctaatccttgatcacacagatttcataggaaaaatttttgaatgccatctgttgagaaacaatttttccacttactggaagctttcagggaatgcagagctagaaaattctttcttgcaacactttgcttgctttgttgggatctcctaaacataaatgttc

SEQ ID NO: 716147 - DNA, 609 bp, Homo sapiens
agactaggacgtttttattttatacttttgtatgtggagaaaccctgtctctactaaaaatacaaaattagccaggcatggtggcacaygcttgtaatcccagctactcaggaggctgagacaggataatcgcttgaacccaggacgaggaggttgctgtgagtcgagatcatgccattgcactccagcctgggcaacaagggtgaaactccgtcagagaaaaaaaaaaaaaaagcttcccaaattgtaggtgcctcagaaccttaaaaatctggatccatttctgtctgcagctaattctttatatctctctttatctgcaatttcacctcaaggagaatattgagttattttacatacacaagaatttttagatccatttcagcattttccatcttcaactctacagtagcagtttaaagcatcatcatctgttacctggaggactgaaacagcttcctactgatctgcccacactcaatgtatattcacatcaaattaattattcatataatctgcaattattgaataaaaataaaattttaaaagctctacaaataccaccttgcgaatttgctacttaattctgatctataattttaggagaca

SEQ ID NO: 716148 - DNA, 609 bp, Homo sapiens
agactaggacgtttttattttatacttttgtatgtggagaaaccctgtctctactaaaaatacaaaattagccaggcatggtggcacacgcytgtaatcccagctactcaggaggctgagacaggataatcgcttgaacccaggacgaggaggttgctgtgagtcgagatcatgccattgcactccagcctgggcaacaagggtgaaactccgtcagagaaaaaaaaaaaaaaagcttcccaaattgtaggtgcctcagaaccttaaaaatctggatccatttctgtctgcagctaattctttatatctctctttatctgcaatttcacctcaaggagaatattgagttattttacatacacaagaatttttagatccatttcagcattttccatcttcaactctacagtagcagtttaaagcatcatcatctgttacctggaggactgaaacagcttcctactgatctgcccacactcaatgtatattcacatcaaattaattattcatataatctgcaattattgaataaaaataaaattttaaaagctctacaaataccaccttgcgaatttgctacttaattctgatctataattttaggagaca

SEQ ID NO: 716149 - DNA, 609 bp, Homo sapiens
agactaggacgtttttattttatacttttgtatgtggagaaaccctgtctctactaaaaatacaaaattagccaggcatggtggcacacgcttgtaatcccagctactcaggaggctgagacaggataatcgcttgaacccaggacgaggaggttgctgtgagtcgagatcatgccattgcactccagcctgggcaacaaggktgaaactccgtcagagaaaaaaaaaaaaaaagcttcccaaattgtaggtgcctcagaaccttaaaaatctggatccatttctgtctgcagctaattctttatatctctctttatctgcaatttcacctcaaggagaatattgagttattttacatacacaagaatttttagatccatttcagcattttccatcttcaactctacagtagcagtttaaagcatcatcatctgttacctggaggactgaaacagcttcctactgatctgcccacactcaatgtatattcacatcaaattaattattcatataatctgcaattattgaataaaaataaaattttaaaagctctacaaataccaccttgcgaatttgctacttaattctgatctataattttaggagaca

SEQ ID NO: 716150 - DNA, 1733 bp, Homo sapiens
tgaatttaccagactaatggtggacatgtccaaattgatgtccactagaatgtaaactacatgtgtctttgctgctaagtcgtcacagccttaacattgattagcactttgtatgtgttcagtacttgtttgttaaatcaatgaaaggataaaacatatgtatggatttggatacaattttgtgtatccaaaaagggaagcctgcaaaaaataattctgggaaacatgagttgaaatgcagagtaaactcagtactgcaatccatagcaatattttgcatattattattttttcttttaaatttttttcttgatcagatttatcatattcattgaacattattttattgcacttggctcctggcttccccccatcctgtgctctgaagtcagagtattatttgtggctctatgaaatgtccattgcttgtatacggtataaatttaattatcttttgtagtttttctcacagtatagactgaaaaggtttggttaattttgcaataacagaccactgcatatttcacaattaagtgttttcaacagtattaaggcaagatttacagtaacacttttaaagtgccagatgtacattgacagaaattttcttagtcaatcctagattgatcatgatttgtgatttctatgcaggccttggtatgattgccttttaattgctgtacaatttcttttttttttttaacttctctggtataaaatattctaaatttgaatgacagcttttgtcaaccttcttatccaatattcttccaccaacgctatgaaacaggaagagaaaatggagtttggtaatttcatcaaatatattcattattgggggcaggagtaacatttaaatcctcctctttattgctggcmgtaaaaatatgtcttttggagagcagaacatgccagaatgtataaggtgcaactgtttgatatgaaaaccataggataggaaactatgcctatgacactaaaactccaaaaagtagaagaccacattgatgatgtcactgcattttaaaatggaaagaacaagtgttcaagaacaggaatttgtgtgaattgcatttattcctataataatatgaactcaatgagatgatgacatagacacaataacaaaaggagaaaaacaatgtggctttttttagccttcataacctaatcaaataaatatctttgtgtgttttatgttcttttgagtgtttacatactgtgtaaatgaatatttttactgatctttgctggcaatgagtgtttgcaggcatttttccattttatacttccatgcatttttaatttttttatgccacgatcttttaaacaaccagctcttgtgtgaattaagagtgcgaactcattcattaccatggtggggacaccaatgtttatgaaggatctgcttccatgaccaagcaccttccaatagtcccgacctccaacactggaggtcatacttcaacatgagatttggaggggatacatattcaaactattgtcagatgttaattcatcaggtatacaccatagtaatatcttaagtgtgttaagttaaagtgatatattttctaaggtatagaacaaatagggcttatcacccccctacaagcaaagaaaatgtcacaatgcttagtgtgccatttttgatattggatgcaacttattgtttcgattgtgctactctgacttttatgagtgacccaaaaactttgacttgtcccagacaa

SEQ ID NO: 716151 - DNA, 1733 bp, Homo sapiens
tgaatttaccagactaatggtggacatgtccaaattgatgtccactagaatgtaaactacatgtgtctttgctgctaagtcgtcacagccttaacattgattagcactttgtatgtgttcagtacttgtttgttaaatcaatgaaaggataaaacatatgtatggatttggatacaattttgtgtatccaaaaagggaagcctgcaaaaaataattctgggaaacatgagttgaaatgcagagtaaactcagtactgcaatccatagcaatattttgcatattattattttttcttttaaatttttttcttgatcagatttatcatattcattgaacattattttattgcacttggctcctggcttccccccatcctgtgctctgaagtcagagtattatttgtggctctatgaaatgtccattgcttgtatacggtataaatttaattatcttttgtagtttttctcacagtatagactgaaaaggtttggttaattttgcaataacagaccactgcatatttcacaattaagtgttttcaacagtattaaggcaagatttacagtaacacttttaaagtgccagatgtacattgacagaaattttcttagtcaatcctagattgatcatgatttgtgatttctatgcaggccttggtatgattgccttttaattgctgtacaatttcttttttttttttaacttctctggtataaaatattctaaatttgaatgacagcttttgtcaaccttcttatccaatattcttccaccaacgctatgaaacaggaagagaaaatggagtttggtaatttcatcaaatatattcattattgggggcaggagtaacatttaaatcctcctctttattgctggcagtaaaaatatgtcttttggagagcagaacatgccagaatgtataaggtgcaactgtttgatatgaaaaccataggataggaaactatgcctatgacactaaaactccaaaaagtagaagaccacattgatgatgtcactgcattttaaaatggaaagaacaagtgttcaagaacaggaatttgtgtgaattgcatttattcctataataatatgaactcaatgagatgatgacatagacacaataacaaaaggagaaaaacaatgtggctttttttagccttcataacctaatcaaataaatatctttgtgtgttttatgttcttttgagtgtttacatactgtgtaaatgaatatttttactgatctttgctggcaatgagtgtttgcaggcatttttccattttatacttccatgcatttttaatttttttatgccacgatcttttaaacaaccagctcttgtgtgaattaagagtgcgaactcattcattaccatggtggggacaccaatgtttatgaaggatctgcttccatgaccaagcacyttccaatagtcccgacctccaacactggaggtcatacttcaacatgagatttggaggggatacatattcaaactattgtcagatgttaattcatcaggtatacaccatagtaatatcttaagtgtgttaagttaaagtgatatattttctaaggtatagaacaaatagggcttatcacccccctacaagcaaagaaaatgtcacaatgcttagtgtgccatttttgatattggatgcaacttattgtttcgattgtgctactctgacttttatgagtgacccaaaaactttgacttgtcccagacaa

SEQ ID NO: 716152 - DNA, 561 bp, Homo sapiens
gagacagggtttcaccgtgttaaccaggatggtctcgatctcctgacctcgtgatccacccacctcggcctcccaaagtgctgggattacaggcgtgagccaccacgcccagccggcttcgttttttttaactaggtcataatcagaacctctcgaagtgtgcgtgcgcgcgcgcgygcgcgcgtgtgtgtgtgttagagctgaatttcaggttttgtcatattggggaagttatattaaaccctctattctagaaactcgtttatggttctaaggggttgtatcatgattagcaccaatgagagcagttttctctgttctctttcccttgccaagttgtcacactccaagagcagcattaaccttcagtcagatccccttagcttagagatgtcaagtcactgttgtgcaattctgttctcaccactcttattccactgcgaacttaagaaaactttggaacgagagactcgccagtgccaggctctggtgatctggactgactgtgatagagaaggcgaaaacatcgggtttgagattatccacgtgtgtaaggctggt

SEQ ID NO: 716153 - DNA, 561 bp, Homo sapiens
gagacagggtttcaccgtgttaaccaggatggtctcgatctcctgacctcgtgatccacccacctcggcctcccaaagtgctgggattacaggcgtgagccaccacgcccagccggcttcgttttttttaactaggtcataatcagaacctctcgaagtgtgcgtgcgcgcgcgcgcgygcgcgtgtgtgtgtgttagagctgaatttcaggttttgtcatattggggaagttatattaaaccctctattctagaaactcgtttatggttctaaggggttgtatcatgattagcaccaatgagagcagttttctctgttctctttcccttgccaagttgtcacactccaagagcagcattaaccttcagtcagatccccttagcttagagatgtcaagtcactgttgtgcaattctgttctcaccactcttattccactgcgaacttaagaaaactttggaacgagagactcgccagtgccaggctctggtgatctggactgactgtgatagagaaggcgaaaacatcgggtttgagattatccacgtgtgtaaggctggt

SEQ ID NO: 716154 - DNA, 561 bp, Homo sapiens
gagacagggtttcaccgtgttaaccaggatggtctcgatctcctgacctcgtgatccacccacctcggcctcccaaagtgctgggattacaggcgtgagccaccacgcccagccggcttcgttttttttaactaggtcataatcagaacctctcgaagtgtgcgtgcgcgcgcgcgcgcgygcgtgtgtgtgtgttagagctgaatttcaggttttgtcatattggggaagttatattaaaccctctattctagaaactcgtttatggttctaaggggttgtatcatgattagcaccaatgagagcagttttctctgttctctttcccttgccaagttgtcacactccaagagcagcattaaccttcagtcagatccccttagcttagagatgtcaagtcactgttgtgcaattctgttctcaccactcttattccactgcgaacttaagaaaactttggaacgagagactcgccagtgccaggctctggtgatctggactgactgtgatagagaaggcgaaaacatcgggtttgagattatccacgtgtgtaaggctggt

SEQ ID NO: 716155 - DNA, 561 bp, Homo sapiens
gagacagggtttcaccgtgttaaccaggatggtctcgatctcctgacctcgtgatccacccacctcggcctcccaaagtgctgggattacaggcgtgagccaccacgcccagccggcttcgttttttttaactaggtcataatcagaacctctcgaagtgtgcgtgcgcgcgcgcgcgcgcgygtgtgtgtgtgttagagctgaatttcaggttttgtcatattggggaagttatattaaaccctctattctagaaactcgtttatggttctaaggggttgtatcatgattagcaccaatgagagcagttttctctgttctctttcccttgccaagttgtcacactccaagagcagcattaaccttcagtcagatccccttagcttagagatgtcaagtcactgttgtgcaattctgttctcaccactcttattccactgcgaacttaagaaaactttggaacgagagactcgccagtgccaggctctggtgatctggactgactgtgatagagaaggcgaaaacatcgggtttgagattatccacgtgtgtaaggctggt

SEQ ID NO: 716156 - DNA, 1571 bp, Homo sapiens
tgtgtgatctgggtattctgtaatttgcagcacatgacccttccagagactctgagtctgatttatgatacattgcacagctgtggattagtgtgggacactgaacaggtgaagggatgctgaggaaaggcaaggatgtggttttaatcacccaaacatccagtaatcacatagcttcttatgtgaggcttgtttaggaaggcgaaggaaacactttgcaatgttgacctatgcaccagggaacatctttttgaaaggcttaatgaataccagacctattacagaacaacagtctcttccaaagcagaggcaatgaaatgcatagatactcgctcatagattgctgaattctgcaatcagggaagccccatgatccctttgaaagattgcaggaattcctgaattcctaaaactcaagatatatcctaaagtggcatgccagctagagccacggtaaccacacagtcgttagttcattcagcagatttccttggtcatccgtttctaggtactgttgtacactctaagctcacattctctaggakagacagagggtagacagacaaacaaattgacaatgtaatgctgggtagtaagaagtcttacagcaacaaatacatagaagcagggcatgggaatagagtaacagggttggtggtgtagagccatcaggtgaatgacgtgctttttggttctttatgagaggatgagggtggttcgctttaggaaaggagaatgcacagatcctagggccagaaggtagctgttttttttttttttttttcccatggaggagtctgtgtttggtgtctgagagaccttgagaccccttgagggacagccagtagcagagaaggggtctggggaggcttcccctactgggaatccctaccagctgccagtgggggctgtggggccagcctttgaagcctattacggggattctctctagacttgtcaagagccaaatttgactaaaagggacattctgggaattatttcatcttggcttgaaagaatgcatttttgaccagctgtgttatgtgatggggaataagatttgtaccattaagtaaattggtctttctctcatggatatgtgaattactatgagcagccttaagaataaaatgtagctaaatcactgttggagttgagtttctaagggtaaagggaattttctaccattagttcaaaaaggaaaggagcaaactgggaaggggcacctgtggtccatttgaaacaggacacagcccttcattgcattattccattctgagtattcactacaatgaaaatgcaacctgaagacacagtgaactgaggttggctgagacctaccctcctaggctagacactcacccacctgtgatgctgtggggaggagacagtcacagccaccagtgctggggctgggtccagtacacagagtgccaggaccgtcgggggctggcccaggcaggttccttggctcatgagagggcagtggtgtgattgagacctgtttgtgctgggattcagttgtaaaaaagatgcctcttatgctcatggagaactttacccaggggagc

SEQ ID NO: 716157 - DNA, 1571 bp, Homo sapiens
tgtgtgatctgggtattctgtaatttgcagcacatgacccttccagagactctgagtctgatttatgatacattgcacagctgtggattagtgtgggacactgaacaggtgaagggatgctgaggaaaggcaaggatgtggttttaatcacccaaacatccagtaatcacatagcttcttatgtgaggcttgtttaggaaggcgaaggaaacactttgcaatgttgacctatgcaccagggaacatctttttgaaaggcttaatgaataccagacctattacagaacaacagtctcttccaaagcagaggcaatgaaatgcatagatactcgctcatagattgctgaattctgcaatcagggaagccccatgatccctttgaaagattgcaggaattcctgaattcctaaaactcaagatatatcctaaagtggcatgccagctagagccacggtaaccacacagtcgttagttcattcagcagatttccttggtcatccgtttctaggtactgttgtacactctaagctcacattctctaggatagacagagggtagacagacaaacaaattgacaatgtaatgctgggtagtaagaagtcttacagcaacaaatacatagaagcagggcatgggaatagagtaacagggttggtggtgtagagccatcaggtgaatgacgtgctttttggttctttatgagaggatgagggtggttcgctttaggaaaggagaatgcacagatcctagggccagaaggtagctgtttttttttttttttttycccatggaggagtctgtgtttggtgtctgagagaccttgagaccccttgagggacagccagtagcagagaaggggtctggggaggcttcccctactgggaatccctaccagctgccagtgggggctgtggggccagcctttgaagcctattacggggattctctctagacttgtcaagagccaaatttgactaaaagggacattctgggaattatttcatcttggcttgaaagaatgcatttttgaccagctgtgttatgtgatggggaataagatttgtaccattaagtaaattggtctttctctcatggatatgtgaattactatgagcagccttaagaataaaatgtagctaaatcactgttggagttgagtttctaagggtaaagggaattttctaccattagttcaaaaaggaaaggagcaaactgggaaggggcacctgtggtccatttgaaacaggacacagcccttcattgcattattccattctgagtattcactacaatgaaaatgcaacctgaagacacagtgaactgaggttggctgagacctaccctcctaggctagacactcacccacctgtgatgctgtggggaggagacagtcacagccaccagtgctggggctgggtccagtacacagagtgccaggaccgtcgggggctggcccaggcaggttccttggctcatgagagggcagtggtgtgattgagacctgtttgtgctgggattcagttgtaaaaaagatgcctcttatgctcatggagaactttacccaggggagc

SEQ ID NO: 716158 - DNA, 1571 bp, Homo sapiens
tgtgtgatctgggtattctgtaatttgcagcacatgacccttccagagactctgagtctgatttatgatacattgcacagctgtggattagtgtgggacactgaacaggtgaagggatgctgaggaaaggcaaggatgtggttttaatcacccaaacatccagtaatcacatagcttcttatgtgaggcttgtttaggaaggcgaaggaaacactttgcaatgttgacctatgcaccagggaacatctttttgaaaggcttaatgaataccagacctattacagaacaacagtctcttccaaagcagaggcaatgaaatgcatagatactcgctcatagattgctgaattctgcaatcagggaagccccatgatccctttgaaagattgcaggaattcctgaattcctaaaactcaagatatatcctaaagtggcatgccagctagagccacggtaaccacacagtcgttagttcattcagcagatttccttggtcatccgtttctaggtactgttgtacactctaagctcacattctctaggatagacagagggtagacagacaaacaaattgacaatgtaatgctgggtagtaagaagtcttacagcaacaaatacatagaagcagggcatgggaatagagtaacagggttggtggtgtagagccatcaggtgaatgacgtgctttttggttctttatgagaggatgagggtggttcgctttaggaaaggagaatgcacagatcctagggccagaaggtagctgttttttttttttttttttcccatggaggagtctgtgtttggtgtctgagagaccttgagaccccttgagggacagccagtagcagagaaggggtctggggaggcttcccctactgggaatccctaccagctgccagtgggggctgtggggccagcctttgaagcctattayggggattctctctagacttgtcaagagccaaatttgactaaaagggacattctgggaattatttcatcttggcttgaaagaatgcatttttgaccagctgtgttatgtgatggggaataagatttgtaccattaagtaaattggtctttctctcatggatatgtgaattactatgagcagccttaagaataaaatgtagctaaatcactgttggagttgagtttctaagggtaaagggaattttctaccattagttcaaaaaggaaaggagcaaactgggaaggggcacctgtggtccatttgaaacaggacacagcccttcattgcattattccattctgagtattcactacaatgaaaatgcaacctgaagacacagtgaactgaggttggctgagacctaccctcctaggctagacactcacccacctgtgatgctgtggggaggagacagtcacagccaccagtgctggggctgggtccagtacacagagtgccaggaccgtcgggggctggcccaggcaggttccttggctcatgagagggcagtggtgtgattgagacctgtttgtgctgggattcagttgtaaaaaagatgcctcttatgctcatggagaactttacccaggggagc

SEQ ID NO: 716159 - DNA, 621 bp, Homo sapiens
tttctcccataaatccaacagttcagttacacttttttcaagtatgtttaaatattggattgaaaatcatgtaccctgaaacctcataaaactctgtcaccaaagagcatgtcatcagattgagtgggatacaatacagacctggattatataaaaattatacgaaattrtacacaagcaattaagtctaaaatacatttctttactgctgaattataagcacggtattgtgctaggtactgtaagggttgataataagctgaataaaccataatctctgttttcaaggaccatatagttcattggaggaagcaaacatatatattcacatatttttattacactatatattcatatttcacaatagaggtaaaactgaattatatggacatatggaggagagaaggattgaattttactagggacatctcagaagcattaagggcagaaaaagtatttgaattgggccctaaatgaatgcaggaaacgtcagtaggtaaaaatgggctaggaggatagggaggtatttcagatagagggggcataaagatggaaaagcatgcaatgtttacaagtagcccagtgcaactagagtgagaagtcagatcctggaaggccaaa

SEQ ID NO: 716160 - DNA, 2049 bp, Homo sapiens
tgcagaggtccccttgccaccctcagcgtagccatgcccccagacccccctgtggccctgcctgtcggctcacctggtccttcagcattcaccccaggcccaggctgctgtgtgcagtctctgatgggacaatgatcttcccaggcctcagggtgcccatctaagaaatggccttgaagccccagtcttggggaatgggggtctgcaggtggcccacgtgctgcctgggctccctgatgccctcctgtctcagctgcatccttctgggcctgatcttggaagcataacggggctgccagggccctgcgggaggccccttgcagcctcacctgccgcctctggaaatgcacgcagccctgtgggagtgggaggccctgcccaccctctgcgtcctcgcctcgccctgctgtcctcccgagctgagttagggattcggggtgcatkctgccctccctctccctcctcgggcccttttcctccctttgaactgtctgtctgtctcgctgccgaggaggaagctattcatagccaaggtgatgcaaaattcatcaagtgtggctgctggggctgaggctgcccctgtgcgtggccagcgcaccccgaccactcagcactcttcctcagcaggtgcgagtgagtgtgtgactctttgtgagaatgtgagtgtgtgtaagtgtgtaactgtgattgtgtaactatgagtatgtgtgactctgtgtgtgattctgtgtctctgtgtgagtgtgtgactctcagtgtgtgtgagtgagtttgtgagtgtgcgagcgagtgtgggggcacctcctcggtcctctcccgagctgcctctctcctggcctctcctctgggtctccactccggacaccgagctcagcacagcttcttaggagggagcagagctggtggcattagcccatgtactcttcacgttctggccaattctgggcagggcttctttctccccttacctggataacagtttgttgttctaattctcaacagtgagaattagacacaacagtggtcatacctctggagcccacaccatgagccaggcgttgttctcacagactcattccatcttcacaataccctacggggtagtggcgattactacctgaattttacaggtgggtaaactgaggcacggaaaggctggctagggcagctggggcctgagggtggagggctgggaggtggaagagctgggatttgaacccctgtctgtcagcttaatcaccactgcttacccaatgcaccattctgcctccctctccattggtcctgtgggtagatccatagattgattgattgattgtcttccccagagactccaggtgcagaaagattctggtgctggaagcttcctagaggactggtctctatccccttcccagaggtaggtgaggaccagggaggagacatgaactagccagggagggagggccgaccccacctgactccccactctggctctgctcttggccactgctggggctgtggccacaggcatggcctgggttggcccggcacctcccctggcagggcagccagcctgagccgcatgggccgccctgcagaagcatggtctggggatggtaatgaacacagcaaatgtttcacttgctctgcttctgggcccccgtgctcagcgctcctccctcacagcagccccgggggcatgggtgtccttttcctccccagcaggtccggatccagagccctgcctctcagccttgtctctgcgtgggctgctgtttctcctgtgtccctggttggggattcccccgtttttattgaggtaaaattcatgtaaggtaaaatggcccttcttttttttttttttttttttttgagacagagtcttgctctgttgcacaagctggagtgcagtggcgcagtctcagctgtctgcaacctctgcctcctgggctcaagcgattctcctgcctcagcctcccgagtagctgggattacaggcaagctccaccacccccggctaatttttgtatttttagtagagacagggtttcaccatgttgcccaggc

SEQ ID NO: 716161 - DNA, 2561 bp, Homo sapiens
  misc_feature 211, 212, 213, 214, 215, 216, 217, 218, 219, 220, 221, 222,223, 224, 225, 226, 227, 228, 229, 230, 231, 232, 233, 234,235, 236, 237, 238, 239, 240, 241, 242, 243, 244, 245, 246,247, 248, 249, 250, 251, 252, 253, 254, 255, 256, 257: n = A,T,C or G
  misc_feature 258, 259, 260, 261, 262, 263, 264, 265, 266, 267, 268, 269,270, 271, 272, 273, 274, 275, 276, 277, 278, 279, 280, 281,282, 283, 284, 285, 286, 287, 288, 289, 290, 291, 292, 293,294, 295, 296, 297, 298, 299, 300, 301, 302, 303, 304: n = A,T,C or G
  misc_feature 305, 306, 307, 308, 309, 310: n = A,T,C or G
attgtgaactttatgactctaatagagattaaaagagggaataataaaaaataattttattggttatgtatgcaatataaaggtctatctgtggctatttgtatgtccacttttatgcttataaatatatatatattatatatatataatcttcataattctgctgtgtataccttcataattctgctgtgcatagattgatctttatatnnnnnnnnnnnnnnnnnnnnnnnnnnnnnnnnnnnnnnnnnnnnnnnnnnnnnnnnnnnnnnnnnnnnnnnnnnnnnnnnnnnnnnnnnnnnnnnnnnnntacttagggaagataactttcgggatcatttggttcaatcacttcacttggtaggcttgatacaggactgaaaataaagaaataatttgctaacagttatatagctacttactcgttgtttcctaaagccattttaagtaattttggggtcagggtagaaatagttcagaaaaattatattttaaaaaggcattaagttataattaataatttaatagttaaatcttccagaaaaatggaatacaggaattacaagcattagaattgttctttttaaaaaaattttcagaaatgaatgactttggcataagctaggggtttatatattataataaatagtagaaaacaagttatatattatggatttaactatatactaaatgaacagaggctaaattcaactgaaacaattgtcttttattaggccaaagattacttatatttatcccttatgaaagaatataattcagcatctaatggacctaggtgaaaattttgtctctgttctttgtcactacatgtggtagggctagttaccagtaacttttctcagttttagttttcctgtcaataatgtgaatataataatgcttttcttttcttttttttttttttttttgcaatggagtcccactctgtagccaggctagagtgcagtggtgtgatctcggttcactgcaacctccgcctcccgggttcaagcggttatcctccctcatcctcccgagtagctgggattacaggtatgtgccaccacacccagctaatttttgtatttttagtagagatggggtttcaccatgttggccaggctggtctccaactcctgagctcatgatccacctgcctcagcctcccaaagtgctgggattacagaagtaagccaccatgccaggccaataaagcttcttttaaaagatttttgtacagaataaatgagataaagattgtggagtgtcttatataaataaatattatagtatgtattataattacaacaactactactaccatagctgctaccataataatataatttactaaataggtagctgaatagattgatgacattaaacaaatctgctcttagcctgcattaaaaaaatattgattgaacacaggtaatgaagatatttgaattccagtacaattcacttagatttttatactatagaattttagtgtccacattagtgttttgttttgttttataaaatgaataattatatgaatttaatactttagaaaaatatatgtagtgatactaaaaattgagtatagatgcaaagagactgattatgaaacaaatggcagaatccaggagtgatttaataattaactgagcagtggaatacgatacaaagtttcctcaaaaaattgaaaataaaactactatatgatccagtaatttcacttctcagtacaagtccatagtaaataaaatcagtaaatcaaagagatgtctgcactcccatgttctctgccatatcttggctattatgtctaagagtgagtatgagtgggagtatattattctgagtatgactaatgttactcataatagccaagatatggaatcaatataaatgttcatcaatggatcaatgaataaagaaaatgtggcatattacacaatggaataatatttagcattagaaaagagtatcctggatattaaaaaaatattcctctcaattaaatgtaattatataacctttgaccarcatctctttatcctcccaacccactagccatcaaagcctctggtaaccaccattctactctctacttctataagatacactttttttagattccacatgtgagtgaggtcatgcagtatttgtctttctgtgcctgttggtcaaaggatataactacagttagggaggaaaaacatattttaaatgtccagaatagacaaatatatgagacagaaagtagataagtgattgcttggggccatgcagtaaggaagagaagataggggagaggaatgaggaaccactactagtggttatgaagtttcttttatgggtgatgaaaatgttttaaaatggactggggtgatggttgaacaactgctgtgaacttacaaaaaaccacgggattatacattttaaatggatagattgcataaaatgtaaattatatctcaataaagctgctcagtcttttaagacaaatattctgttatttgcaacaacatagataaacatggatgacattatgcttagtgaagtaaagtggg

SEQ ID NO: 716162 - DNA, 669 bp, Homo sapiens
caacagaatggattctgcaaacaattcgagtgagtttggaagcagattcttccccaggtgaggcctcagttgatacagtagcttgcctgacatcttgattgcaaccagaattatgctgataaatttgtggcaacttttatatagcaatggaaaatgaatgcacacacggtaagttacttttgatttagatggatacttgtgaggcttgctttgaaaggttttataaagatcctggaacagcatttagtctaggtataattatcttccatgaagatatgaccctcttgaggccttggttgaatgcactgggtagtaaaaagtctcttcattctctctggtgggaacacaaacgattccctatgcaagttctaggaattatgtggcctaccactttcacctgcttattcctcagcttcatggagctttaccccacaatgkcacagaataatactctaccaaataatgagaagatccttctgtgatcccaagctatttctttgcacggtccctccctgtggcgtactctgctcaacaaattctacccatctcctgaattctctcatctgtcttttgaattcaatggattgctaagctctgttcactgaatcgtggaatttgcctttttaaaatttttttttatattttaagttctaggatacctgtacagaa

SEQ ID NO: 716163 - DNA, 619 bp, Homo sapiens
gtcatctcaacactctgtgaggcgaggcaggaggattgcttgagcctgaaagttgaagaccagtctgggtaacataacaagaccctgtttctgcccaagaaaaagttttaaatttcttgggcatggtggtgcacacctgttgtcccagccattcaggaggctgaggctggaagatggcttgagcctgggaggttgaggctgcaatgagctgtgatcgcacatggtggcctgtagagctttgggaggttgaggtggaggattgcttgagctcaggaattcaagagcagcctgggcaacatagggaaaccctgtctctacaaaaaaaaaaaaaaaawttttttaatttaaaaaattagtcctggtggcttgtgcctgttgtcccagctactcagggggctgaggtgggaagattgcttgagcccagaagttttaggctgcagtgagcttatagttgcaccactacactctagcctgggcaacagagcaagactaaaagaaaaaagaatcaggtatgactcaggattttatttggattatacctaaaatcaacatacgttatttctttcagataacagatagcacattaatccaactttctatacactgtcctcgacttcaa

SEQ ID NO: 716164 - DNA, 619 bp, Homo sapiens
gtcatctcaacactctgtgaggcgaggcaggaggattgcttgagcctgaaagttgaagaccagtctgggtaacataacaagaccctgtttctgcccaagaaaaagttttaaatttcttgggcatggtggtgcacacctgttgtcccagccattcaggaggctgaggctggaagatggcttgagcctgggaggttgaggctgcaatgagctgtgatcgcacatggtggcctgtagagctttgggaggttgaggtggaggattgcttgagctcaggaattcaagagcagcctgggcaacatagggaaaccctgtctctacaaaaaaaaaaaaaaaatttttttaatttaaaaaattagtcctggtggcttgtgcctgttgtcccagctactcagggggctgaggtgggaagattgcttgagcccagaagttttaggctgcagtgagcttatagttgcaccactacactctagcctgggcaacagagcaagactaaaagaaaaaagaatcrggtatgactcaggattttatttggattatacctaaaatcaacatacgttatttctttcagataacagatagcacattaatccaactttctatacactgtcctcgacttcaa

SEQ ID NO: 716165 - DNA, 626 bp, Homo sapiens
cattgtaggctgcttggagggtgaggacctgactggtcctgctggtgcctttttactgctttcggtgcagaatccagatggctactacttggttctgacctaggccaggggaactccactgctcaagagactgatagcttgtcttcaccagaaaccttgttaaaacacttggctgactcaacaggctccaggtgagccaaagtatcttgcatctcaccccgagaggaggcaagtagcctccagcttcacttttctttytggtcagcagcaatggctgttggaagtcttccttacccattcgttcttctgagctggccaagtttatgaggcaaaaaaaaaaaaaaaaaaactggcaatgtggaaagagcttttgccatgagcagtgttggctggtgatcactgagagtgttaattcatttaaaaattttaagccctttttaaattaaaagttaatttttaaaaggtatatacacttaatgtgttgtccaatgtgttgaacatttaatgtggtgttcagttttcttggctttattgtccccaaggggaaatgtcttctgcttaaactataaactagggcaaaggatggggtctggaacaagggaataaatcaatccagctggatcttt

SEQ ID NO: 716166 - DNA, 626 bp, Homo sapiens
cattgtaggctgcttggagggtgaggacctgactggtcctgctggtgcctttttactgctttcggtgcagaatccagatggctactacttggttctgacctaggccaggggaactccactgctcaagagactgatagcttgtcttcaccagaaaccttgttaaaacacttggctgactcaacaggctccaggtgagccaaagtatcttgcatctcaccccgagaggaggcaagtagcctccagcttcacttttctttctggtcagcagcaatggctgttggaagtyttccttacccattcgttcttctgagctggccaagtttatgaggcaaaaaaaaaaaaaaaaaaactggcaatgtggaaagagcttttgccatgagcagtgttggctggtgatcactgagagtgttaattcatttaaaaattttaagccctttttaaattaaaagttaatttttaaaaggtatatacacttaatgtgttgtccaatgtgttgaacatttaatgtggtgttcagttttcttggctttattgtccccaaggggaaatgtcttctgcttaaactataaactagggcaaaggatggggtctggaacaagggaataaatcaatccagctggatcttt

SEQ ID NO: 716167 - DNA, 626 bp, Homo sapiens
cattgtaggctgcttggagggtgaggacctgactggtcctgctggtgcctttttactgctttcggtgcagaatccagatggctactacttggttctgacctaggccaggggaactccactgctcaagagactgatagcttgtcttcaccagaaaccttgttaaaacacttggctgactcaacaggctccaggtgagccaaagtatcttgcatctcaccccgagaggaggcaagtagcctccagcttcacttttctttctggtcagcagcaatggctgttggaagtcttccttacccattcgttcttytgagctggccaagtttatgaggcaaaaaaaaaaaaaaaaaaactggcaatgtggaaagagcttttgccatgagcagtgttggctggtgatcactgagagtgttaattcatttaaaaattttaagccctttttaaattaaaagttaatttttaaaaggtatatacacttaatgtgttgtccaatgtgttgaacatttaatgtggtgttcagttttcttggctttattgtccccaaggggaaatgtcttctgcttaaactataaactagggcaaaggatggggtctggaacaagggaataaatcaatccagctggatcttt

SEQ ID NO: 716168 - DNA, 626 bp, Homo sapiens
cattgtaggctgcttggagggtgaggacctgactggtcctgctggtgcctttttactgctttcggtgcagaatccagatggctactacttggttctgacctaggccaggggaactccactgctcaagagactgatagcttgtcttcaccagaaaccttgttaaaacacttggctgactcaacaggctccaggtgagccaaagtatcttgcatctcaccccgagaggaggcaagtagcctccagcttcacttttctttctggtcagcagcaatggctgttggaagtcttccttacccattcgttcttctgagctggccaagtttatgaggcaaaaaaaaaaaaaaaaaaactggcaatgtggaaagagcttttgccatgagcagtgttggctggtgatcactgagagtgttaattcatttaaaaaktttaagccctttttaaattaaaagttaatttttaaaaggtatatacacttaatgtgttgtccaatgtgttgaacatttaatgtggtgttcagttttcttggctttattgtccccaaggggaaatgtcttctgcttaaactataaactagggcaaaggatggggtctggaacaagggaataaatcaatccagctggatcttt

SEQ ID NO: 716169 - DNA, 770 bp, Homo sapiens
ctgggcaacagagcgagactctgtctcaaaaaaaaaaagaaagaaagaaaaaaagaaaaaccaccacctaatccaaacctcaaagattaactctwtattttctaaaagttgtatagccttacctcttctatttaggtgtttgcttcattttgagtgaatttttttgcatgtggatatccatctctcctagcactagttgttggaaagcaggataaatttttaaagggaatgcttttctctgaagaaaaaaatggccaagatgcaaagtaaaaattataaccaaactgccctaaatcaaatatgaatgaataatttatttcactgtaaagtgtattgtatctggtataagactccaagccctttcacaagtgcaggagcaattaactgggctaaatgtagtgatgagactattcttatctaagagaaatctgtgaccttccaatttttgaatattcactgtctcaatcgaccatctctttccaatttacctagcacttgaaagaataatgcacaacactaaaatacagacatttgtattttagtcaaatgtaacaccaaagggcattagatactacacatatgaatcttgctttacataaagatcaggtacagagcttggatttatataagcaataagttaaagttggtgattttcaaacaggcttcctttaaataagatttatcctggtgtatttaaattcaattctatttacaaacaacaaaaagcacaatattcagacttctcagcaataagttttgtataaaatgaa

SEQ ID NO: 716170 - DNA, 770 bp, Homo sapiens
ctgggcaacagagcgagactctgtctcaaaaaaaaaaagaaagaaagaaaaaaagaaaaaccaccacctaatccaaacctcaaagattaactctatattttctaaaagttgtatagccttacctcttctatttaggtgtttgcttcattttgagtgaatttttttgcatgtggatatccatctctcctagcactagttgttggaaagcaggataaatttttaaagggaatgcttttctctraagaaaaaaatggccaagatgcaaagtaaaaattataaccaaactgccctaaatcaaatatgaatgaataatttatttcactgtaaagtgtattgtatctggtataagactccaagccctttcacaagtgcaggagcaattaactgggctaaatgtagtgatgagactattcttatctaagagaaatctgtgaccttccaatttttgaatattcactgtctcaatcgaccatctctttccaatttacctagcacttgaaagaataatgcacaacactaaaatacagacatttgtattttagtcaaatgtaacaccaaagggcattagatactacacatatgaatcttgctttacataaagatcaggtacagagcttggatttatataagcaataagttaaagttggtgattttcaaacaggcttcctttaaataagatttatcctggtgtatttaaattcaattctatttacaaacaacaaaaagcacaatattcagacttctcagcaataagttttgtataaaatgaa

SEQ ID NO: 716171 - DNA, 577 bp, Homo sapiens
caaagaaaattgatattttctgtgttcatattcaggatgatacgttaattgataaacagaaatttcgtacccattattcttcataatataaaagataaaagaaataaaattttgactagtatatttaatatcattttatctttaaaatgttctctttgatcacagaattttcgttctttcatctcaaaaactgtggcagaacgtgtactaggtcacccagggacattagacaaaatacttttgatttgaaactgcaaaataatactaaaattcattcattcatttgttgttcattcactcggcaagtatttacaaagcactgtactatgtcaggcactgctttaggcactgaggattcagctatgttctgggaaaacaaaaaaaaaaaactctgtgatccagagcatgtattctagtggaacataaacaaatcaataggtgcatggcatggcatagtgttgaaaaagttaaggcaagagcataggctagcagtgcccartggaactttctgcgatgacgtatctgtgttgccaatatgcccagttgccacacatggctactgagcttttgaaatgtg

SEQ ID NO: 716172 - DNA, 577 bp, Homo sapiens
caaagaaaattgatattttctgtgttcatattcaggatgatacgttaattgataaacagaaatttcgtacccattattcttcataatataaaagataaaagaaataaaattttgactagtatatttaatatcattttatctttaaaatgttctctttgatcacagaattttcgttctttcatctcaaaaactgtggcagaacgtgtactaggtcacccagggacattagacaaaatacttttgatttgaaactgcaaaataatactaaaattcattcattcatttgttgttcattcactcggcaagtatttacaaagcactgtactatgtcaggcactgctttaggcactgaggattcagctatgttctgggaaaacaaaaaaaaaaaactctgtgatccagagcatgtattctagtggaacataaacaaatcaataggtgcatggcatggcatagtgttgaaaaagttaaggcaagagcataggctagcagtgcccagtggaactttctgcgatgacgtatctgtgttgccaatatgcccagttgccacacatggctaytgagcttttgaaatgtg

SEQ ID NO: 716173 - DNA, 1514 bp, Homo sapiens
aataaaaataatgtggcctaaattttgttttctacataaaacatccaaatcagatcttttctaaactaaaatttcaaattcagtaggacttccatggtgtctttcttaaatatcatttcaatttaattactaaaacacctttgtcctaagttaatccatagtcacagaaccttagtctggtgcaagacatgagcaccaaaatatggccatcactttcacccttgggcctccttctctcaagcttttctttcytttacttgttcatagatgttttatatatttattctttcacttgtttcaccaaggtcacatgtctttttgtttcccaaaggatgttcgttctgtaatctgtgggctattcacgttggacataaaatgggtgatttattttccagagcataaagtggaggaatgtgcaaaggcaaagaacatttgaatattattgcgtattttcttctcaattttaatgcggagaaaaaggtggttatatgtaatgatgtgagaggcatcacatcattacatgatgtgaagcagagtttgagagattgcaggatcagatgaaagtcagagctatgatgagaaaggatggattagaaatagataatgagtagaaagaacagttctcctatgccttagtaagaagcagtaaagtgttgttacatatcctcattcacagatttgtggatgaaagcttaaattctcatctcattgcttgagtctatgaacagtatgcaaaaacatctgctaaaaatgaagtttgattaataggatatgaaaaatgttatgagaagaatggaacatttaaaattatctaccatgtagaaaaggagataaaataaatatagtgggattgccaggtccaatttatgttggagactatgaatatgtagaagcacttgtattagtcagggttctccagagaaataaaaccaaaggaggtaggtagatacatagaaagacaaatagatacttattttgagggattggctcacatgattttggatgctgagaagccccatgatctgcaatatgcaaactggaggcccaggaaatccactggaatagttccagtccaaactcaaaggctggagaaccagaagtgtcaatgtgtacatccaatttctaatccaaaggcacaagaaccgggggtgcttctgtctcatggtaggagaagaatgaggtcccaactcgagcagagacaaaatttgcccttcctccacctttttgttctatctgggcccctggtagattggaagatacccaccaacaatggtgaggacagatcttctttactaaatctactgattcaagtgcaaatctatcaatagttcagaaatagcctcccacatatttccgtaaataatgctttccagttatttgggtatcccttaacccattcaagttgacacataaaattaaccatcagagcacccatctgtgagtgtgggtagatttctccctggactatgcttaggtttagagatgatagaaagattgatacaggattggaattt

SEQ ID NO: 716174 - DNA, 1514 bp, Homo sapiens
aataaaaataatgtggcctaaattttgttttctacataaaacatccaaatcagatcttttctaaactaaaatttcaaattcagtaggacttccatggtgtctttcttaaatatcatttcaatttaattactaaaacacctttgtcctaagttaatccatagtcacagaaccttagtctggtgcaagacatgagcaccaaaatatggccatcactttcacccttgggcctccttctctcaagcttttctttcctttacttgttcatagatgttttatatatttattctttcacttgtttcaccaaggtcacatgtctttttgtttcccaaaggatgttcgttctgtaatctgtgggctattcacgttggayataaaatgggtgatttattttccagagcataaagtggaggaatgtgcaaaggcaaagaacatttgaatattattgcgtattttcttctcaattttaatgcggagaaaaaggtggttatatgtaatgatgtgagaggcatcacatcattacatgatgtgaagcagagtttgagagattgcaggatcagatgaaagtcagagctatgatgagaaaggatggattagaaatagataatgagtagaaagaacagttctcctatgccttagtaagaagcagtaaagtgttgttacatatcctcattcacagatttgtggatgaaagcttaaattctcatctcattgcttgagtctatgaacagtatgcaaaaacatctgctaaaaatgaagtttgattaataggatatgaaaaatgttatgagaagaatggaacatttaaaattatctaccatgtagaaaaggagataaaataaatatagtgggattgccaggtccaatttatgttggagactatgaatatgtagaagcacttgtattagtcagggttctccagagaaataaaaccaaaggaggtaggtagatacatagaaagacaaatagatacttattttgagggattggctcacatgattttggatgctgagaagccccatgatctgcaatatgcaaactggaggcccaggaaatccactggaatagttccagtccaaactcaaaggctggagaaccagaagtgtcaatgtgtacatccaatttctaatccaaaggcacaagaaccgggggtgcttctgtctcatggtaggagaagaatgaggtcccaactcgagcagagacaaaatttgcccttcctccacctttttgttctatctgggcccctggtagattggaagatacccaccaacaatggtgaggacagatcttctttactaaatctactgattcaagtgcaaatctatcaatagttcagaaatagcctcccacatatttccgtaaataatgctttccagttatttgggtatcccttaacccattcaagttgacacataaaattaaccatcagagcacccatctgtgagtgtgggtagatttctccctggactatgcttaggtttagagatgatagaaagattgatacaggattggaattt

SEQ ID NO: 716175 - DNA, 1514 bp, Homo sapiens
aataaaaataatgtggcctaaattttgttttctacataaaacatccaaatcagatcttttctaaactaaaatttcaaattcagtaggacttccatggtgtctttcttaaatatcatttcaatttaattactaaaacacctttgtcctaagttaatccatagtcacagaaccttagtctggtgcaagacatgagcaccaaaatatggccatcactttcacccttgggcctccttctctcaagcttttctttcctttacttgttcatagatgttttatatatttattctttcacttgtttcaccaaggtcacatgtctttttgtttcccaaaggatgttcgttctgtaatctgtgggctattcacgttggacataaaatgggtgatttattttccagagcataaagtggaggaatgtgcaaaggcaaagaacatttgaatattattgcgtattttcttctcaattttaatgcggagaaaaaggtggttatatgtaatgatgtgagaggcatcacatcattacatgatgtgaagcagagtttgagagattgcaggatcagatgaaagtcagagctatgatgagaaaggatggattagaaatagataatgagtagaaagaacagttctcctatgccttagtaagaagcagtaaagtgttgttacatatcctcattcacagatttgtggatgaaagcttaaattctcatctcattgcttgagtctatgaacagtatgcaaaaacatctgctaaaaatgaagtttgattaataggatatgaaaaatgttatgagaagaatggaacatttaaaattatctaccatgtagaaaaggagataaaataaatatagtgggattgccaggtccaatttatgttggagactatgaatatgtagaagcacttgtattagtcagggttctccagagaaataaaaccaaaggaggtaggtagatacatagaaagacaaatagatacttattttgagggattggctcacatgattttggatgctgagaagccccatgatctgcaatatgcaaactggaggcccaggaaatccactggaatagttccagtccaaactcaaaggctggagaaccagaagtgtcaatgtgtacatccaatttctaatccaaaggcacaagaaccgggggtgcttctgtctcatggtaggagaagaatgaggtcccaactcgagcagagacaaaatttgcccttcctccacctttttgttctatctgggcccctggtagattggaagatacccaccaacaatggtgaggacagatcttctttactaaatctactgattcaagtgcaaatctatcaatagttcagaaatagcctcccacatatttccgtaaataatgctttccagttatttgggtatcccttaacccattcaagttgacacataaaattaaccatcagagcacccatctgtgagtgtgggtagatttckccctggactatgcttaggtttagagatgatagaaagattgatacaggattggaattt

SEQ ID NO: 716176 - DNA, 658 bp, Homo sapiens
tgatccacattataaattataaatgtaatgaaagggtgaaacccatatcccataagtcattaatttttagccatgtgactagaggagcgttagtgatcatagttgttttttggaaatgtgatgtatgagaatgttgtggaacaatttatcatttaagaagatgcaggatttcttttgattggggtaggggaaggtgaaattcggtaattatcattaaattatgaatcatttataagaacttgaattttwatgattgcagatcccacattcagcattcaggttgaaaatattttattattcaattattaaacatgttatgctgtattgcattcaaattgaaaaattatcctgtgtaaactattatgcaagtatattagtatggtctgtatgtgagcatttatgctagattatacagtttgaggatttattttttaaaatataaaaattaatagagaatgcttcacattataaaaatttctgctgattatccagcatatgcagtccttgtgaatatacccacttcataaagataaaatttaatcataaccttcattatttttgtaactagaggaagcattgcttgtcatttcagattcttacactttaaaatggggactcctacatgaagcggatcgtattaccagattgtaacaaaatt

SEQ ID NO: 716177 - DNA, 573 bp, Homo sapiens
tttcttaatccagtctatcattgttggacatttgggttggttccaagtctttgctattgtgaatagtgccrcaataaacatacgtgtgcatgtgtctttatagcagcatgatttatagtcctttgggtatatacccagtaatgggatggctgggtcaaatggtatttctacttctagatccctgaggaatcgccacactgacttccacaatggttgaactagtttacagtcccaccaacagtgtaaaagtgttcctatttctccacatcctctccagcacctgttgtttcctgactttttaatgattgccattatgcgaaaacacttgaaaatgttcctgttaatctattgtttagctgaaaggaagaaaaaaggaaataagacaaaacataaagaaagaaaacaggccaatatattaatttcacatggttcaatctagtaaatatttttgtttgtttgtttttctccttttcatagagacaggatcttgctatttgtataggcttgtctagaactcttgatatcaactgattcttccacctcagcctccatagtgctgggattacagacatg

SEQ ID NO: 716178 - DNA, 573 bp, Homo sapiens
tttcttaatccagtctatcattgttggacatttgggttggttccaagtctttgctattgtgaatagtgccgcaataaacatacgtgtgcatgtgtctttatagcagcatgatttatagtcctttgggtatatacccagtaatgggatggctgggtcaaatggtatttctasttctagatccctgaggaatcgccacactgacttccacaatggttgaactagtttacagtcccaccaacagtgtaaaagtgttcctatttctccacatcctctccagcacctgttgtttcctgactttttaatgattgccattatgcgaaaacacttgaaaatgttcctgttaatctattgtttagctgaaaggaagaaaaaaggaaataagacaaaacataaagaaagaaaacaggccaatatattaatttcacatggttcaatctagtaaatatttttgtttgtttgtttttctccttttcatagagacaggatcttgctatttgtataggcttgtctagaactcttgatatcaactgattcttccacctcagcctccatagtgctgggattacagacatg

SEQ ID NO: 716179 - DNA, 573 bp, Homo sapiens
tttcttaatccagtctatcattgttggacatttgggttggttccaagtctttgctattgtgaatagtgccgcaataaacatacgtgtgcatgtgtctttatagcagcatgatttatagtcctttgggtatatacccagtaatgggatggctgggtcaaatggtatttctacttctagatccctgaggaatcgccacactgacttccacaatggttgaactrgtttacagtcccaccaacagtgtaaaagtgttcctatttctccacatcctctccagcacctgttgtttcctgactttttaatgattgccattatgcgaaaacacttgaaaatgttcctgttaatctattgtttagctgaaaggaagaaaaaaggaaataagacaaaacataaagaaagaaaacaggccaatatattaatttcacatggttcaatctagtaaatatttttgtttgtttgtttttctccttttcatagagacaggatcttgctatttgtataggcttgtctagaactcttgatatcaactgattcttccacctcagcctccatagtgctgggattacagacatg

SEQ ID NO: 716180 - DNA, 1830 bp, Homo sapiens
gcctttacataatcactctaacttttgattaaaatggagagaacaatactaaagacatttagtcagaattcattttgcaattgtctaagtgagatgtataaatgaaatatatataaagttcatccaataggaaaagcatgagagtagtacaaaaataataactaatgtttactgagtacttcactatgtattatgatctgtcctgtgtttgagatgcatttgctcagttaacctgcacaataacctttttaatggaagtactgtgtaataattatatagcaaataactttctgtatattgtgctagtcaatgtccaaaacctggctaggcacagtagctcatgcctgtggtcccagcactttgggtggccaaggcaggcggatcacccgaggtcaggagttcaagaccagcctggctaacatggtgaaaccctgtctctactaaaaatacaaaaattagccaggcgtggtggcaggcgcctgtagtcctagttactcgggaggcagaggcaagagaatcgcttgaacccaggaggtggcggttgcagtgagccgagatagcctattgcactccagcctgggggacaaggcgagacttcgtctcaaaaaaaaaaaaaaaaaaaawgtccaaaacctaaaaataaaataaaataaaatagaacagagactaattcccaagtaatctgactctagaacctacacgcataagcatagatatatgcttcagaaagcattgattgcttcctgagtagaattaatgaatgaagaagaatgaagtgaatcttcatctttctgactgggaagcataggaggcttttcaacatttcacgaatcaaatagtataattatgaaagtaatcttcagaaacattaaactcagaaatatttgattgaaattccctctgggtaacgatgctctaagatcacaaaaggaaaattggcagatgttgtcttaagaccaaactttcatagtcatctgagagttaatgccacttcatagttttactaggctcacccacttttggggaagcattctaattagtagacataggcaatatttaagggctgcaatgatactctgtctcatctatcacaagtagaaggactttatgaatgttagtgaaatcataatttataaaaggattttataaaagacagtactaatctgtaatgtaatcccaactattttgctgtttgaaagatttttaaataaagataattggtgtagtgtttttatagccttttgagagttaacattaactgtagaattactgagctacagatatctgtctgcatgattttgtgagagaacataggaggcactaagaagttgggccaagagattatttaacagtgtcagctagcacccgctcagagtttctggctgagtattcctgcatttattttcagagatttcaataaaaggagctgtccaagcctagaataattcattgtgaactcttgggtgatatgtaaaacagagaagttccaatttggcagaagaaatagcaacacaagtaatcttgtgaccccaatttctcatttcaaattcatgagaaatatgtatagataattttattttttattttaacattatactgcagatgaaagtatgaacttttaaaaaaggtaaaacaactctattgtattcatttctataatctataacatttttcaaacaagtaattcagggtgatcttcttgaaacacttcctcatactcttattatgtcctgtgcctacaacctattctgttagaacctgcttaagtaaagacagatggtcaaataacttttgaaaactcaacagtttcttaatatagctccagccaga

SEQ ID NO: 716181 - DNA, 1398 bp, Homo sapiens
tctgaacttgaaatgtggttcacactgcctgttctctgaagactttctgatctctcagcagtccacggtaacttgtgcttccatgtcgtattttgtggatctattattgttactatccaaatgtgcgtatttaaagaaatcagttcacatatttactgaaatgtgactctacgctgggtattgtgccagactctggcatattgtggcgaaaggtatatttcttttgctcaagaaagtcatgcagccagtggaaatgtgatgcagtgcgagcggtggtggaggcgctggtgactggagatgccttggcagagcagctcatcccatcacaggattttcagtgtggatgcttggggagctggcactcactggaggacagccacagagtgttccagagggcctcctgtcccagcagttactgaatagatggtttgttgaattgaactacatgctcgagggttacccatacaacattttttaaaaaaaattaattatttcacatgagaatctttgacaaattaactttgtagttttctgtttttggaacttccatacaagatgatttgaaattttcttgatgactcaggattatcattttgtatatgttatcatgccaagctctaaaaaaatcaatgttcttagcatattttgacctggagaaggctgttttcaaatacctgcttgctccctgattactttacattttcgtaatcctgtctgcctcttgtttcttgtctcttttcccattttacactattgttgatcttgtctgtagtcatgcaattgctgtccattatttcccatccrtaagaagccagtgaaccagctttagcagtatagatcaggaaagggtgctgggtttgagtagagtagggaacttagagactctcccttattcagagtactgaagtgcaaacatagttttttcaaatagatattttgctgctccaagcccttttggcaggtttttaatttttagttgtatcttgagaggtgatgctgctacattcgtgaggttttgatagctgagaagttaatgtttctctcagttcatattgtttcagttgctctcatgacatgatgtgacctgttttgccttattgtgggaatgtttttaggtggtttatgttttaacagtacacaaggcttattttattcatttgttcttatattcctcttatttctagtatcacagcagacattttgtgtgtgtgtgattgactttgaatacattaaggtacatcagttttatttattaatggaggcgggttcacaaatgctgaggttaggagtcagtgacaccctgtgaactaattgctctgtttatctagcagtaaggcaactctaggacagcctcagcagtcaatatttaacttatccgtggagttttacatgtaaaac

SEQ ID NO: 716182 - DNA, 1398 bp, Homo sapiens
tctgaacttgaaatgtggttcacactgcctgttctctgaagactttctgatctctcagcagtccacggtaacttgtgcttccatgtcgtattttgtggatctattattgttactatccaaatgtgcgtatttaaagaaatcagttcacatatttactgaaatgtgactctacgctgggtattgtgccagactctggcatattgtggcgaaaggtatatttcttttgctcaagaaagtcatgcagccagtggaaatgtgatgcagtgcgagcggtggtggaggcgctggtgactggagatgccttggcagagcagctcatcccatcacaggattttcagtgtggatgcttggggagctggcactcactggaggacagccacagagtgttccagagggcctcctgtcccagcagttactgaatagatggtttgttgaattgaactacatgctcgagggttacccatacaacattttttaaaaaaaattaattatttcacatgagaatctttgacaaattaactttgtagttttctgtttttggaacttccatacaagatgatttgaaattttcttgatgactcaggattatcattttgtatatgttatcatgccaagctctaaaaaaatcaatgttcttagcatattttgacctggagaaggctgttttcaaatacctgcttgctccctgattactttacattttcgtaatcctgtctgcctcttgtttcttgtctcttttcccattttacactattgttgatcttgtctgtagtcatgcaattgctgtccattatttcccatccgtaagaagccagtgaaccagctttagcagtatagatcaggaaagggtgctgggtttgagtagagtagggaacttagagactctcccttattcagagtactgaagtgcaaacatagttttttcaaatagatattttgctgctccaagcccttttggcaggtttttaatttttagttgtatcttgagaggtgatgctgctacattcgtgaggttttgatagctgagaagttaatgtttctctcagttcatattgtttcagttgctctcatgacatgatgtgacctgttttgccttattgtgggaatgtttttaggtggtttatgttttaacagtacacaaggcttattttattcatttgttcttatattcctcttatttctagtatcacagcagacattttktgtgtgtgtgattgactttgaatacattaaggtacatcagttttatttattaatggaggcgggttcacaaatgctgaggttaggagtcagtgacaccctgtgaactaattgctctgtttatctagcagtaaggcaactctaggacagcctcagcagtcaatatttaacttatccgtggagttttacatgtaaaac

SEQ ID NO: 716183 - DNA, 611 bp, Homo sapiens
aaatatttgaacatttttgaaattgtgatgtgttttagagttaattggtacattaatttgttttttcttttaaaacttttagaaaagcttttattaaatcaattaactgcctcaaaatggatggtctcttagaataacataaatactgtatgttaaattattataatgtactacataagacattcattgttctcatgggaccttttgattagttgattccaattttggctctcaagttatttcttatataggaatttagtgtttgaacttcggcctcaaacactgatttttgtgacctgcaggcaatacattgagaatttattaatgaacttattattcctccagaaattttctctttatgtgtcatctacttygctgttatgttctgaattctttgacaagtggggcacctccccaagatttggataccttcttcatgtccctgtttccagtgctctgtcatgaagggacgtcctctgatgccagggagtggattgatggcttatgacctttgacctgactcatggcctagtcaacttttctttgtgctagcctgggtttgctttgtgcttggatggttatccacttctgtagtcaatagctaatttgga

SEQ ID NO: 716184 - DNA, 611 bp, Homo sapiens
aaatatttgaacatttttgaaattgtgatgtgttttagagttaattggtacattaatttgttttttcttttaaaacttttagaaaagcttttattaaatcaattaactgcctcaaaatggatggtctcttagaataacataaatactgtatgttaaattattataatgtactacataagacattcattgttctcatgggaccttttgattagttgattccaattttggctctcaagttatttcttatataggaatttagtgtttgaacttcggcctcaaacactgatttttgtgacctgcaggcaatacattgagaatttattaatgaacttattattcctccagaaattttctctttatgtgtcatctacttcgctgttatgttctgaattctttgacaagtggggcacctccccargatttggataccttcttcatgtccctgtttccagtgctctgtcatgaagggacgtcctctgatgccagggagtggattgatggcttatgacctttgacctgactcatggcctagtcaacttttctttgtgctagcctgggtttgctttgtgcttggatggttatccacttctgtagtcaatagctaatttgga

SEQ ID NO: 716185 - DNA, 1011 bp, Homo sapiens
tgaacctttgtgcagtgtccttgtaaaaaaaaaaatcctccaagaatactttgttgaaattgaagcactcagtaaaaaattttagagtcttaaatttcaatttaattcccaaaagctgacaaaaaaagtgaagcatttaattttaatcttccaacagaaataaaaaagtcaacagtactaagcaccggcagacaaggttgaatatttcacagttcaatgacaatgaagccagatctcttaatatttccatttctgctgttagaagtagatgtaaaatatatttagcacctgaatggttgtatctagtcaggtttatatgtttaaatgtcaaaagcaggttgagactgcagcttacagcaatcacattctatcagtcacattagaaaatacagtttatttaaatgattctgataaaaccaagcctatcactactttgaacatttcactaagacatagaattctataatgggacttttgtaaggtgtgtgaagaaccaatttaccaacactttaaatttcaatgctccaaagataatagggtaattaggacattattaagtaacaataatatcaggactcgaaacaaagaagatcaacctctcccaatatttgtattacaattttggtgaatggatgtaaaaggtctcatgggtttgagttttcattttgctcacacagcacctgccatgtgactagctcctcctcctgtggcacagatgccacagagaaagggacgtggggtctctggtgtgttcaatttactgtccatggctcctttgtggaaaactctagtttctgcaggtctcagtgatcacagcacagcatgctgacaatacataaatgagttattttgttgactgcttcacccagaatcatggaggccttgactattcttcacatcttatattcagagtagactgtgttaacatctcctttctgtgccataaaaattcawatactagcagaggtaatacttctccgcattaaagaaaaaaaaagggcccttttttcc

SEQ ID NO: 716186 - DNA, 626 bp, Homo sapiens
actgcgcctggccaaaaaatttttctttttagagatgaggtcacgctatgttgctcagactagtctcaaactcctagccttaagaaatcctcccatctcagcctaaccctaaacaattctattaaacctgtaaagaagtattaacagcaattatatacaatttgtcccagaaggcagaagaggagggactacttcccaacttaatttatgaaatcattattatggtttgccaaaastaggcaaaggaattagaaaaaaaaaaagtctaaaaactaaatttcacatgaaaaaaatcgcaaaattcttaagaaaatattagcaatagaaatcaacaatatataaaaagatttgtactccatgatttaatggggtttatttgaggatggaaggctgtttaatcatttaaaattcaatcagtgttctgtctactacactgcgttatgagaagaaaaaaataaaatttgatcaatgtaatccacgatattaacatgataaaaagatttaaaaaatcataggactctatcaatagaggcagaaaaaaacacaacaaaattcaacacttgtctatggtctgactttcaaaactgataatagagcaaaactttttcatcttcctgaagaacacc

SEQ ID NO: 716187 - DNA, 608 bp, Homo sapiens
aattaataaatactgaagactgggtcatgggaatcctcaatttatatccagtagcttagaagttcaggttccaatctgggacttgtaaccgacatctgaagtggagaagtcttgtggactgagcctttaatctgtgggatccgatgcttacwccaggtacagctgtcagaagtgaggtaaattatgggacaccgagttgatgtctgatagagaactgcttgttagtggggagaaatccccacacattcggtgaccacaagtgaagtattctgggttcagtgtttactaccgtgttgagtttcagaggaggaaagaataaatcaatcgtttttcctctggaagagcacattttccagcgggtgcaatttggaacggaaaaacactgagtgtcaaaagccaggccccgtcacctccctcaatgcggggtaaggaatgtgggttgtgaaggggaaacctggggaacacaagggcccagcccaaggaggacaaggttgggggtggattaggagaggggtggggtttccaaaatcccagggccgggcagaggacacggcgctgatgcatcgagactgcgggaccgagctccaagaggccagaagggcgaggct

SEQ ID NO: 716188 - DNA, 608 bp, Homo sapiens
aattaataaatactgaagactgggtcatgggaatcctcaatttatatccagtagcttagaagttcaggttccaatctgggacttgtaaccgacatctgaagtggagaagtcttgtggactgagcctttaatctgtgggatccgatgcttacaccaggtacagctgtcagaagtgaggtaaattatgggacaccgagttgatgtctgatagagaactgcttgttagtggggagaaatccccacacattcggtgaccacaagtgaagtattctgggttcagtgtttactaccstgttgagtttcagaggaggaaagaataaatcaatcgtttttcctctggaagagcacattttccagcgggtgcaatttggaacggaaaaacactgagtgtcaaaagccaggccccgtcacctccctcaatgcggggtaaggaatgtgggttgtgaaggggaaacctggggaacacaagggcccagcccaaggaggacaaggttgggggtggattaggagaggggtggggtttccaaaatcccagggccgggcagaggacacggcgctgatgcatcgagactgcgggaccgagctccaagaggccagaagggcgaggct

SEQ ID NO: 716189 - DNA, 608 bp, Homo sapiens
aattaataaatactgaagactgggtcatgggaatcctcaatttatatccagtagcttagaagttcaggttccaatctgggacttgtaaccgacatctgaagtggagaagtcttgtggactgagcctttaatctgtgggatccgatgcttacaccaggtacagctgtcagaagtgaggtaaattatgggacaccgagttgatgtctgatagagaactgcttgttagtggggagaaatccccacacattcggtgaccacaagtgaagtattctgggttcagtgtttactaccgtgttgartttcagaggaggaaagaataaatcaatcgtttttcctctggaagagcacattttccagcgggtgcaatttggaacggaaaaacactgagtgtcaaaagccaggccccgtcacctccctcaatgcggggtaaggaatgtgggttgtgaaggggaaacctggggaacacaagggcccagcccaaggaggacaaggttgggggtggattaggagaggggtggggtttccaaaatcccagggccgggcagaggacacggcgctgatgcatcgagactgcgggaccgagctccaagaggccagaagggcgaggct

SEQ ID NO: 716190 - DNA, 903 bp, Homo sapiens
catatttacaataaacctagtttatacctgccgtgatcttatgtgcatactcatgcatattttttttctccaaataacagcttcatttatgtgccccctaaacttttcactayagtaacaaagggaagaaatgcatgaaacatagaatgtagactgcaacatatggaaaaggaaactttttaaaattgtgtacaaaaacaaaaaataattttattacaattaaagaaccagagaacattttgcttaataccataatcaaaaatgacatttccgtagcttttggaaaaatgctcttctagtagagtcctatttattatatataacaattagataatgataaattatattatgtaaataaacacttcacaataattttcactgaactgatatgaaaaatatcttaggcaattttactaaacagtatttcacaagcattttcaacagtcatattgtgcaatgggacctatgtgtccagccacaagaggaatgtaataagctattaccatgaagaaaattgaagtctctcctaaccaagtctggagtttcaagagtaaacattcagtgttatcctaaagagttagacttcattttgtgatgtctgagtaatgtgatggttaatattaggtgtcaacttgagtgagttgaaggatatctagatggctgataaagtattgtttctgggtgtgtctgtgagggtgttgccgaggagattgacatttgagtcagtggactaggagaggaagacccaccctcagtgtgagtgggcaccatccgattggctgccagtgtggctagaacaaagcaggtggaagaaggtgggataaccttgcttgctgagtcttctggttctctttcttcttcccatgctggatgcttgtttatgcttctcctgcccttggacat

SEQ ID NO: 716191 - DNA, 708 bp, Homo sapiens
tctccattattgccaaatgtctccagaaggaccaaatcctccatattcccattgagaactagtggcatacagcaaagtgctagatactgaatttgtcattgaaaggatgaaggggaataaataycaggagctgcaaagccacttggcattgaatgggcctctaaaattgaacaatacacttataaaatgattcccatacagactaagtcaaatacaacttccccagattgtgtaaacctagcttgtgtaaatctcatatcaatcccaagaattgtggagtgggggactattgagaatgtcttttcataaaccctgccaggtggaggagattaagacagatctgatttgatttagacacctaaagaaatctatccattattttatgtaggtgtcatggtgaaatctgtacctgttacatgtgtttaaaaaaaacttagcaatttttctaacatacggaaaacactcaacaaatgttaatcatgttattatcacccctactttatagatgataaaagtcacaaagaagcaaaactacatttctgagaaccagagctaataaacaaaatgaggaccaaaataaattactcctggtgtccccactctatgtaactctgttgcttatattaatgataaattttttattggagtgcctggaaactattattttatctcttctcagttcaatttagaaaatacaggtatccatca

SEQ ID NO: 716192 - DNA, 708 bp, Homo sapiens
tctccattattgccaaatgtctccagaaggaccaaatcctccatattcccattgagaactagtggcatacagcaaagtgctagatactgaatttgtcattgaaaggatgaaggggaataaataccaggagctgcaaagccacttggcattgaatgggcctctaaaattgaacaatacacttataaaatgattcccatacagactaagtcaaatacaacttccccagattgtgtaaacctagcttgtgtaaatctcatatcaatcccaagaattgtggagtgggggactattgagaatgtcttttcataaaccctgccaggtggaggagattaagacagatctgatttgatttagacacctaaagaaatctatccattattttatgtaggtgtcatggtgaaatctgtacctgttacatgtgtttaaaaaaaacttagcaatttttctaacatacggaaaacactcaacaaatgttaatcatgktattatcacccctactttatagatgataaaagtcacaaagaagcaaaactacatttctgagaaccagagctaataaacaaaatgaggaccaaaataaattactcctggtgtccccactctatgtaactctgttgcttatattaatgataaattttttattggagtgcctggaaactattattttatctcttctcagttcaatttagaaaatacaggtatccatca

SEQ ID NO: 716193 - DNA, 708 bp, Homo sapiens
tctccattattgccaaatgtctccagaaggaccaaatcctccatattcccattgagaactagtggcatacagcaaagtgctagatactgaatttgtcattgaaaggatgaaggggaataaataccaggagctgcaaagccacttggcattgaatgggcctctaaaattgaacaatacacttataaaatgattcccatacagactaagtcaaatacaacttccccagattgtgtaaacctagcttgtgtaaatctcatatcaatcccaagaattgtggagtgggggactattgagaatgtcttttcataaaccctgccaggtggaggagattaagacagatctgatttgatttagacacctaaagaaatctatccattattttatgtaggtgtcatggtgaaatctgtacctgttacatgtgtttaaaaaaaacttagcaatttttctaacatacggaaaacactcaacaaatgttaatcatgttattatcacccctactttatagatgataaaagtcacaaagaagcaaaactacatttctgagaaccagagctaataaacaaaatgaggaccaaaataaattactcctggtgtccccactstatgtaactctgttgcttatattaatgataaattttttattggagtgcctggaaactattattttatctcttctcagttcaatttagaaaatacaggtatccatca

SEQ ID NO: 716194 - DNA, 708 bp, Homo sapiens
tctccattattgccaaatgtctccagaaggaccaaatcctccatattcccattgagaactagtggcatacagcaaagtgctagatactgaatttgtcattgaaaggatgaaggggaataaataccaggagctgcaaagccacttggcattgaatgggcctctaaaattgaacaatacacttataaaatgattcccatacagactaagtcaaatacaacttccccagattgtgtaaacctagcttgtgtaaatctcatatcaatcccaagaattgtggagtgggggactattgagaatgtcttttcataaaccctgccaggtggaggagattaagacagatctgatttgatttagacacctaaagaaatctatccattattttatgtaggtgtcatggtgaaatctgtacctgttacatgtgtttaaaaaaaacttagcaatttttctaacatacggaaaacactcaacaaatgttaatcatgttattatcacccctactttatagatgataaaagtcacaaagaagcaaaactacatttctgagaaccagagctaataaacaaaatgaggaccaaaataaattactcctggtgtccccactctatgtaactctgttgcttatattaatgataaattttttattggagtgcctggaaactattattttatctcttctcagttcaatttagaaaatacrggtatccatca

SEQ ID NO: 716195 - DNA, 1316 bp, Homo sapiens
tgctttaaacaattcttaaaaacagaaaatgtgagacaaatgtgaacacaaaatatgtttagtgatattaagacatcattaattgtgttaattacattattggtattatggctatgtttaaaaattttttgaaatatttacagatacaataatatgatacttgtgttttgcttaaccattatcagaagtaggtgagacagggcagtttgtgggtgtatagaattcagaattggtcacaaattgataattgttgaaattggttgatggagatatagaaatccattgcactttttgctctactcttaaaatattttaaaaaggaactgaaggaaggtaaagaagagatggtagtaaagttaaacttttattatatgaaatgaaaacattgtaggttctagaatccccccagggctgtgaacccatagctacaattgccaatgctaaattatctcgtagtcagcctaggtattggtttaagtcactagcaaagtagaagatcaaagatccctctttaatgaagatttttatatttgatatttctgaatgagatcgtaatagtcctaataagaaaaagagtacattgttggacttccttacattttacatccttacattttacactatcagttcttgaattgacaatttttagtaaaattaaatataaactaatttagattcatgatatttaaatatttttctttctaattaggttttaaaatattcttataactatgactgaaaacaagacagtttcctcttcttccactagagatgatcaaaccaatataggtaagtttatcataaattgattttctttgaaaatagttcatagataaatggaattcacatcacttacagaggagggcaactgcaaagatagtaatcttttccaagataatggtcacaaaaccaaaacttactgggaccagtaaagtgagctaagagaaaagagtgagtcagcgtaacaaaaacacattatctgaattataatcagtttattttataattatggatgaactgtgttataggtaataaaataggtaagcagtacaacaatggtgtgctgkaatcagctcttgtatatatctcttctcgattccattccactggtaacttcaaattggccatggtgttagtatttattaccaactaacagctggatattaaacttttactatcacatcgctgaagctaaacatggaatattaaaaatgaaaatactaatataattctatttttaaaattatatgattttattgcattactttactctatttttttgcatcttgagctctgacatcttttattctgtatca

SEQ ID NO: 716196 - DNA, 1316 bp, Homo sapiens
tgctttaaacaattcttaaaaacagaaaatgtgagacaaatgtgaacacaaaatatgtttagtgatattaagacatcattaattgtgttaattacattattggtattatggctatgtttaaaaattttttgaaatatttacagatacaataatatgatacttgtgttttgcttaaccattatcagaagtaggtgagacagggcagtttgtgggtgtatagaattcagaattggtcacaaattgataattgttgaaattggttgatggagatatagaaatccattgcactttttgctctactcttaaaatattttaaaaaggaactgaaggaaggtaaagaagagatggtagtaaagttaaacttttattatatgaaatgaaaacattgtaggttctagaatccccccagggctgtgaacccatagctacaattgccaatgctaaattatctcgtagtcagcctaggtattggtttaagtcactagcaaagtagaagatcaaagatccctctttaatgaagatttttatatttgatatttctgaatgagatcgtaatagtcctaataagaaaaagagtacattgttggacttccttacattttacatccttacattttacactatcagttcttgaattgacaatttttagtaaaattaaatataaactaatttagattcatgatatttaaatatttttctttctaattaggttttaaaatattcttataactatgactgaaaacaagacagtttcctcttcttccactagagatgatcaaaccaatataggtaagtttatcataaattgattttctttgaaaatagttcatagataaatggaattcacatcacttacagaggagggcaactgcaaagatagtaatcttttccaagataatggtcacaaaaccaaaacttactgggaccagtaaagtgagctaagagaaaagagtgagtcagcgtaacaaaaacacattatctgaattataatcagtttattttataattatggatgaactgtgttataggtaataaaataggtaagcagtacaacaatggtgtgctggaatcagctcttgtatatatctcttctcgattccattccactggtaacttcaaattggccatggtgttagtatttattaccaactaacagctggatattaaacttttactatcacatcrctgaagctaaacatggaatattaaaaatgaaaatactaatataattctatttttaaaattatatgattttattgcattactttactctatttttttgcatcttgagctctgacatcttttattctgtatca

SEQ ID NO: 716197 - DNA, 1062 bp, Homo sapiens
tatgccagtgtttattgctatgtctttgaagattttaattatgtattatatactaacttttgaaaaagtttgtcattaattctatcacaagaacaccatgggaggtcatatttactaacttctgtgaaagtacattcagcataataacacttttaaaattatccgaaataaaatcattttttgatgttctttcgttcatgatgtaactactgcaatcatayggaaactctcaccattctaaaaataattaatggggccaggcgcagtggctcatgcctgtaatcccaacacttcaggagggtgaggtgggtggatcacttgagaccaggagttggagaccagcttgggaaacagagtgaaaccctgtctttacaaaaaatacgaaaattagccaggcctgatggtatatgcctgtagtcccagctactgggaagctgtgagataggaggatcccttgaaccaaggaggcagatgtcgcatgcggctctgcactccagcttgggtgaagaacaagaccctgtctcaaaaaacaaacaataaaaataaaaataattaactggatgattattctgtgttctcagttgacataaatcataaaacaaattaccaatctttttcaaattgttctgtaaaattacagccatatatcttaaacaagctgaccaatagtattttcagatgagtcacatttacaaatggttagctctgtttgggctaacaatttttattgcaattaacaggaccttttaacaaactataattttttggctttgcaggcagtattttctctaaatacaaaactgcatttcatggcagcatcacatttatttgtatcaaaatactgatagtgcgtttatttattaaggtttttccaatgtgtcttttccataacatgttttctgtataacaggcagagaatgaatttttttacagaatagtgttttgatattttaaaatagaaaatactttgcatgtgtaaacatatctggaaaatacatgtaaagtttaaagaatattgataaaattatatatttgtgcacttataatttggcttaaagaata

SEQ ID NO: 716198 - DNA, 1062 bp, Homo sapiens
tatgccagtgtttattgctatgtctttgaagattttaattatgtattatatactaacttttgaaaaagtttgtcattaattctatcacaagaacaccatgggaggtcatatttactaacttctgtgaaagtacattcagcataataacacttttaaaattatccgaaataaaatcattttttgatgttctttcgttcatgatgtaactactgcaatcatacggaaactctcaccattctaaaaataattaatggggccaggcgcagtggctcatgcctgtaatcccaacacttcaggagggtgaggtgggtggatcacttgagaccaggagttggagaccagcttgggaaacagagtgaaaccctgtctttacaaaaaatacgaaaattagccaggcctgatggtatatgcctgtagtcccagctactgggaagctgtgagataggaggatcccttgaaccaaggaggcagatgtcgcatgcggctctgcactccagcttgggtgaagarcaagaccctgtctcaaaaaacaaacaataaaaataaaaataattaactggatgattattctgtgttctcagttgacataaatcataaaacaaattaccaatctttttcaaattgttctgtaaaattacagccatatatcttaaacaagctgaccaatagtattttcagatgagtcacatttacaaatggttagctctgtttgggctaacaatttttattgcaattaacaggaccttttaacaaactataattttttggctttgcaggcagtattttctctaaatacaaaactgcatttcatggcagcatcacatttatttgtatcaaaatactgatagtgcgtttatttattaaggtttttccaatgtgtcttttccataacatgttttctgtataacaggcagagaatgaatttttttacagaatagtgttttgatattttaaaatagaaaatactttgcatgtgtaaacatatctggaaaatacatgtaaagtttaaagaatattgataaaattatatatttgtgcacttataatttggcttaaagaata

SEQ ID NO: 716199 - DNA, 1412 bp, Homo sapiens
agtatattgaattgtaaatattgttcactggcttgataaatgatgaatgaacaaataatatctcctggtttgtaatgagcatggaaagtttcgtaatggttctaggaactgaactcagtgctcatgaactactaggaatccagatatagagagtgccatgaaaaagacacagaagacagaatgaactcagcatagtagtgggaccttagtttagtgcaggtacagagataggcatgaccttagaatctgtcatctctagccaatttaatcacaggggtacatttttctttctaatgagaaagagtaatttgcaaccacttttttttctatttttacaacctaatacttgtagtgaaggcgtcaagtcttttgggctcctggtgactattaaggtggaggttgcaaagcaatgtgtgtaaataaaagaaaaacctgaaaggacacatctatcacagctcaattaaaagtcttattagaaataaagctcttttattcaaacagctttattaaatattgagaaaatgtatataactaggaaggcactatgtagataacatgaaatatgctggttaattagttatactttcagatggcaaaaaactttcttattgtaaaatgtcatctggaatgttatcatttaaaagtcagtaatgaaaacaaaaattaataagaactttaatgcaataccaaagtgtgcaggaaataaatgtcaccagtctgcagaaacaagatctcttctggcatttatcatttaatttggttttccatcaatcttagctttaaaaaaaactgaaaagcccctagtcacaatttgttagcctatttaggaagccactgtctttaataacagagacaataagaaggccaagtggttctagcagtcatctacacccttgatggttgtctgagccttccagacctgagactgagttatgagcttagtattactttttcaaaaaatttcaagatatttcatgatattctcaaggcattatcctctctccccagaaatctactgaataccttagaatcaccctatactgcccctcctctctcacatctgcccttacagcacacacttccggggcaaacaartattttcaagtcttcagaagatgctatgccataagtttttgttctccatccctactgccacagatcatatttattttctgagatctggactgttttcatctcagctttctaatgaatctctttatctttggcaccttttccaggggcaaaatgtgtgtgtgtgtgtgtgtgtgtgtgtgtgtgtagaatattaattttacaacaaataaattggtgtgtagagggattgccaatattgctctgatcaccaccatttcttctttattcatttagcaaatcatgtctggttcctgtgccaggcattagggctatagcac

SEQ ID NO: 716200 - DNA, 1108 bp, Homo sapiens
tgcagttaatgtaacttacatgtccatgtggtgggccctgatagtttggactttgttgatgtggatacccaagaggcagaagtagcaggaaaatgtcaacatggtttcccctgcctggtttctgtatacatacactgccccacatgtgcaaacgtgtgtacacaccacagactgaatgtgaaccccgggaggggccaaggacacactcaaccctcctctctttacatctgatttgccccaagacaccggacttaggaaaagacacagtgtgaggcgtgaggtctctctctctctcttttttttttttttttttttttttagatggagtttcactcctgctgcccgggctggagtgcaatgtcatgatctcagctctctaccacctctgcctcctgggttcaagtgattctcctgtctcagcctcccaagtagctgggattacaggcgcccgccaccacacccagctactttttgtatttttagtagagatggggttttaccatatcggccaggctggtctcagactcctgacctcaggtgatccacccatcttggcctcccaaagtgctggtggcattacaggcatgagccaccacacccagccgaggtctcttactacaagtccaagccaagaaacagggcaaagtgctattggcttcatctcttcctgcagccaatctaaagtaggccaggtataattccttgcctcggtaaatagaacatacgaataaaaccatcatacctttcgaggattcaagatctagcagggcctcagagtttgaaagtatccattttccactttcatccacgtgctgggtacacaaccagctccagctggagcctacgtggaccaggatgtcatgtcaacagcagagcaggagcacctagagtctctaaacactctcagcttgcgtatgccaagttcaggaatattcttcatgtccacaagtgaattggatctattctgtttttcttgaaacagtctcacrtctatctttgcttttcccaccctttttttttttttttttttttttagacagcgtctcagtctgtcacccaggctggagcgcggtggtacgatctcggctcattgcagcctctgcctccc

SEQ ID NO: 716201 - DNA, 1387 bp, Homo sapiens
cttcaatcatacatttgcttgactctcaagcccatggtcctaacttgatcaagctataaaagaggtaggcatagcttggtcttgttggaatgtcattaaaggaaaaattttcaaaatcatgaagagagaatgactaatactccgacaaaaaggacaagagaaattttaagaaacttacctatgaagagaacgtagacaaggcattaagatacaggattgtttgcaaaactaagagctgttttatattactttatatctgtaactattacaatgtcatctttcctattctccgttaaatgttctcttatttccccgaatcttctccacacagcacttaccacagtttaacttgttatttgaaaatgaaaaactctcctattaaactgcagactgggtaaaggtagaccatgactttccctcaccatttctgccccaatacttagcataccatgggtgsggaagacagtgttgggagcaggggaaggagatcttggacacacaatctagagagcttgcaggcctccattctttatactaaaacaaaacaaaacaaaacaaaaaacgggcgtgctggatcacgcctgtaatctcagcacttttagaggccgaggcgggcagatcacgaggtcaagagatcaacaccatcctggccaaaatggtgaaaccctgtctctactaaaaatacaaaaaattagccaggcgtggcagtgcgtgcctgtagtcccagctacttgggaggctgaggcaggagaattgcttgaacctgggaggcggaggcagcagtcagccgagatggcgccactggactccagcctgggcaacagagcgaggctccgtctcaaaaataaataaataaaataaaaaataaaatgtgacaaagcagtgtggactaatgaagaaaatatagaaggggaaaaagtagaacatataatgtaagctaaacctagctgtaaaagggaaagctgtttgctgccttggggtcatcccagcactttgctgcgttgaactatgctagttgaaaaccttattcttcaatagttgcaatgcctcctgtgagtctgtacatgatctggtctatggcaacacaatcattaatagcaaattgattctgactatcaaatcttaagaattaattacttagatcaccttttgaggtatacaattttgaatgtgatgtgatagattgctatgaagttagtatttagttctcttcaatctagttatagatttcctgtggcatattgccttttcaaaccattatacagaaatttcataaatcatggagaatatttagtaagaatgtaagttataacaatttggtttgttgtgtttgctcctatgtcctcctgcctttactctttgctgcctttttcaggggctccagctc

SEQ ID NO: 716202 - DNA, 1387 bp, Homo sapiens
cttcaatcatacatttgcttgactctcaagcccatggtcctaacttgatcaagctataaaagaggtaggcatagcttggtcttgttggaatgtcattaaaggaaaaattttcaaaatcatgaagagagaatgactaatactccgacaaaaaggacaagagaaattttaagaaacttacctatgaagagaacgtagacaaggcattaagatacaggattgtttgcaaaactaagagctgttttatattactttatatctgtaactattacaatgtcatctttcctattctccgttaaatgttctcttatttccccgaatcttctccacacagcacttaccacagtttaacttgttatttgaaaatgaaaaactctcctattaaactgcagactgggtaaaggtagaccatgactttccctcaccatttctgccccaatacttagcataccatgggtggggwagacagtgttgggagcaggggaaggagatcttggacacacaatctagagagcttgcaggcctccattctttatactaaaacaaaacaaaacaaaacaaaaaacgggcgtgctggatcacgcctgtaatctcagcacttttagaggccgaggcgggcagatcacgaggtcaagagatcaacaccatcctggccaaaatggtgaaaccctgtctctactaaaaatacaaaaaattagccaggcgtggcagtgcgtgcctgtagtcccagctacttgggaggctgaggcaggagaattgcttgaacctgggaggcggaggcagcagtcagccgagatggcgccactggactccagcctgggcaacagagcgaggctccgtctcaaaaataaataaataaaataaaaaataaaatgtgacaaagcagtgtggactaatgaagaaaatatagaaggggaaaaagtagaacatataatgtaagctaaacctagctgtaaaagggaaagctgtttgctgccttggggtcatcccagcactttgctgcgttgaactatgctagttgaaaaccttattcttcaatagttgcaatgcctcctgtgagtctgtacatgatctggtctatggcaacacaatcattaatagcaaattgattctgactatcaaatcttaagaattaattacttagatcaccttttgaggtatacaattttgaatgtgatgtgatagattgctatgaagttagtatttagttctcttcaatctagttatagatttcctgtggcatattgccttttcaaaccattatacagaaatttcataaatcatggagaatatttagtaagaatgtaagttataacaatttggtttgttgtgtttgctcctatgtcctcctgcctttactctttgctgcctttttcaggggctccagctc

SEQ ID NO: 716203 - DNA, 614 bp, Homo sapiens
tgcctgtgtgagatatgaggaggaagagtacagagaagagaggccccaagaagagggggaggattaggctataatcatcagctgaaatacactaaaccaaaaatgagaataaacccttagagaatgtgtttgttagggctgccaaaacaaaatatctcagackgggtggcttaaacaacagaaatattttttatcgttctagagactggaagttcaacagcaatgtgttggcagcattggtttacttgagggcttctctccttggcttgcagatggccatcttctccctgtcctcatgtggttgtccctctgtgtccacgtccaaatcatttcgtcttataaggacatcagtcatattagattagggcccatcccactgtcctcattttaacttatatacctctttaaaaaccctatctcaaaatccagttacattctgaggtactgggggttaggacttcaacataggaatttcagggtgggtgacattattcagcccataacagagagatatcttttaatgatttctatgaaggcatggaaatagagacttaactcatcccggttgatccaggactatcttgcttttagcacagagagtcccttgcgcagga

SEQ ID NO: 716204 - DNA, 621 bp, Homo sapiens
gttttgtattcatactgcccactgcccatccttttcagcattgcataaatctctgctgttaacctttcttgggaactatgtggcaagtgaaaacccagatactcatgtgacactgaaataagagaattcctaactcacccctccaacatcctggttctctratgagcagtattcacttcttcaaggctccttgcttggttttcatttgttgttttgtgaagcacttaaattatttgttgtactgcctcccatgccacctcttcagccatgaataaaatcttgccctgaccccaaaccatttgatgtaggcctgagaatcctaatagtccctttctgaggctggatggctggtactgttgcacataatccactctcccaatggttagactatgggtctgggtgaaactatgtcatcaagctttttatgttttatgccaaatgatttcaagtaggtcttctgattcattacaaagtggccaatactcactctgtgtaaaaacagtcagagtcgccgggcgcggtggctcacgcctgtaatcccagcactttgggaggccgaggcgggtggatcatgaggtcaggagatcgagaccatcctggctaacaaggtgaaaccccgtc

SEQ ID NO: 716205 - DNA, 2191 bp, Homo sapiens
ttttttctgaaactaattttcagaaaaatatgattgaaaaaggcaataaaacaaagtgtctcaaaatagccattcaattcttcatttatatcagtatagccctgaaggtacaaaatacttagggcaacatttaattggaggggccataatgcttgccaaattgtaatacatgtacacatcttccttctttcttccacttgtttgaattgagaattttttttcccattccacgtatttttatttctgtgaatttgaaagttactcttattgtttgccctaaaatgtcaggcgcatatttaactcttgaaagattaaattattatttttatcttctcaaatgaaataatacaactttaacatccaaccattgatatcacctgaaagatatatttctctctctcatttattaagcactatggatcgctttttttaaccaccattcattttattgcactttgcgaaagaaattatactgaatatgtaaaaataactgtaaaatgttcaaataataaattaatagaattaaaaagtacatccttctttatcttcctccctacckcccgccccttctagtaataatccctgttaacaatttagtttgtatccatctggatttactcttctacatttacaaacaggtagatatagatgcagatatgcatatgtatgatttgaaatgattattattttgaaggttttaataaattggatcatgttttctttttctttttcctttacatcttcaagagatttttctgtctgtacaatacatcatttcactgaagaggaaataaagacccagaaaggtgaagtgacttgcccaaagtcacacagctattagccccaaagatctttatgaaagattttcctcgcttatcagtcaggataggctagattgtacttccggaaacaattaatctttaaaatcacaggggcctgccactacaaagatgtgtttcacactcatttaataagtccatcactgtctctccactcaccttacctccaggactcagaagcagcctctgccagtctcacagcagagggagaaggaagatgccaaatcattacctggcccagaaagcttcctcaataacattccattggttagagcaaattacaggaacaaacctgacatcaagatggaagtataattgtcaacaacaagaggagccataatgcttggcaaattgtaatacatgtgcatgtcctccttctttcttccatttgtttgaattgattgagaacttttttcctatcccatttttttctctctgtgaatttgaaagttactcttagtttttaccttaaaatgttagaagcatatttaattcttcaaagattattatttttatcctctcaaacaaaattatttaactgtaatgtctaagcattgacttacatgctattattctctactattttagttatttttattatttcacaaatcatattctattgctttgggttttacagacaacatttgtggtgatttatccatttttatcacatattctagtaactctttccttttttaattacagatattcattgtggaattattttctagcctttcagagtgtatcctttagaatatctttcggtaaggagccattagtaataaactctctgtttgactctcactgaaaatgtctttgtatctccctcttccttggttatactattccaggttaagatttatttttgtatcacactttgaaaatgttattttgctattttttggctccattattgaggatgagaaatatttggctgatctaaatgttgtttccagtatttaatctgtcttttccttctgggtgcttctaagattttcttctttgtctttgatcatcttcagtttcagtaggatggatcttaggtttgaccacaaatctcacaagagttatagttagattgtcttaagagagattatattttctcccgaacccagaacctcagcaaagagtaattactccttgttggccgggcgtggtggctcacgcctgtaatcccagcactttgggaggccaaggtgggcggatcacgaggtcaggagatcgagaccatcctggctaacatggtgaaaccccatctctactaaaaatgcaaaaaattagccgggcgtggtggtgggtgcctgtagtccccgctactcgggacgctaaggcaggagaatgatgtgaacctg

SEQ ID NO: 716206 - DNA, 2191 bp, Homo sapiens
ttttttctgaaactaattttcagaaaaatatgattgaaaaaggcaataaaacaaagtgtctcaaaatagccattcaattcttcatttatatcagtatagccctgaaggtacaaaatacttagggcaacatttaattggaggggccataatgcttgccaaattgtaatacatgtacacatcttccttctttcttccacttgtttgaattgagaattttttttcccattccacgtatttttatttctgtgaatttgaaagttactcttattgtttgccctaaaatgtcaggcgcatatttaactcttgaaagattaaattattatttttatcttctcaaatgaaataatacaactttaacatccaaccattgatatcacctgaaagatatatttctctctctcatttattaagcactatggatcgctttttttaaccaccattcattttattgcactttgcgaaagaaattatactgaatatgtaaaaataactgtaaaatgttcaaataataaattaatagaattaaaaagtacatccttctttatcttcctccctaccgcccgccccttctagtaataatccctgttaacaatttagtttgtatccatctggatttactcttctacatttacaaacaggtagatatagatgcagatatgcatatgtatgatttgaaatgattattattttgaaggttttaataaattggatcatgttttctttttctttttcctttacatcttcaagagatttttctgtctgtacaatacatcatttcactgaagaggaaataaagacccagaaaggtgaagtgacttgcccaaagtcacacagctattagccccaaagatctttatgaaagattttcctcgcttatcagtcaggataggctagattgtacttccggmaacaattaatctttaaaatcacaggggcctgccactacaaagatgtgtttcacactcatttaataagtccatcactgtctctccactcaccttacctccaggactcagaagcagcctctgccagtctcacagcagagggagaaggaagatgccaaatcattacctggcccagaaagcttcctcaataacattccattggttagagcaaattacaggaacaaacctgacatcaagatggaagtataattgtcaacaacaagaggagccataatgcttggcaaattgtaatacatgtgcatgtcctccttctttcttccatttgtttgaattgattgagaacttttttcctatcccatttttttctctctgtgaatttgaaagttactcttagtttttaccttaaaatgttagaagcatatttaattcttcaaagattattatttttatcctctcaaacaaaattatttaactgtaatgtctaagcattgacttacatgctattattctctactattttagttatttttattatttcacaaatcatattctattgctttgggttttacagacaacatttgtggtgatttatccatttttatcacatattctagtaactctttccttttttaattacagatattcattgtggaattattttctagcctttcagagtgtatcctttagaatatctttcggtaaggagccattagtaataaactctctgtttgactctcactgaaaatgtctttgtatctccctcttccttggttatactattccaggttaagatttatttttgtatcacactttgaaaatgttattttgctattttttggctccattattgaggatgagaaatatttggctgatctaaatgttgtttccagtatttaatctgtcttttccttctgggtgcttctaagattttcttctttgtctttgatcatcttcagtttcagtaggatggatcttaggtttgaccacaaatctcacaagagttatagttagattgtcttaagagagattatattttctcccgaacccagaacctcagcaaagagtaattactccttgttggccgggcgtggtggctcacgcctgtaatcccagcactttgggaggccaaggtgggcggatcacgaggtcaggagatcgagaccatcctggctaacatggtgaaaccccatctctactaaaaatgcaaaaaattagccgggcgtggtggtgggtgcctgtagtccccgctactcgggacgctaaggcaggagaatgatgtgaacctg

SEQ ID NO: 716207 - DNA, 636 bp, Homo sapiens
tatcttgtatgattttagcaacctatgataaagaagctgttatttactttttctaggttaaggagctcaggcttagagggatcaatgaaatttcaaagaatataagaactgtaggcaaatgatagcataattctaaattgttttaaacgaaattatttcatttggagtttcgttaatgtcctagtgaaagaagtcaatgctttggcaaagaaatctggaaattgatacttgctggtgaaaagggagggctgctgggtatgacacaagggctgagacatacatgaagtcttctagcagatggaagtagattcaattcttttctgataatagggggagacaagttccacatacttggtatatttcttttcttggtttgcatataacttgagggtctctttggaagaaatgaatgtttaagtagctagaaacaagcaacagcaatatcagaaaaaaaaaaagttgaaggagggatggtttagaatgtgcacaccatrtgtaacagatagttttggggaagaagcccatagacaattgtccaggaaaggtgtggggctgctagtagacagagtcaacacagaaacacagtgaaatgttgggaaagtcagataacttaacaccaatggaaatgctgcaaaa

SEQ ID NO: 716208 - DNA, 1335 bp, Homo sapiens
atatccatgggcgataagaagttcagcctagatgtgcacccacgtctacttcattttactgtttaaaacatatgaacatttaaaactaataacaaccagaaggtagtattggatgagcacaaaagtaaagcctatagtagggtttgattacaactacagcatctgttcttttgtacaggaaagactaagcaatgacttccatgaagctttcagccataaccaccagcccaaactttattggcctaaatatagcttttttcacacaaaaagaagtggagagaagtgctgcccaatagaaatataatgtgagaaacaagcacaggccatatatagaaaacattctagcagacacatttaaaaaaagtaaaggaaacagataaaattagttttaataataccttttatttaacctaatatatccaaatatgatcatttcaacatgcaatcgatattaaaattattaaggtaattttcttcctttttttcatactaaggctttaaaattcagtgcacattttacacctgcagcccatccccattcagactagctggacttgaagggctcattagccagctggrgctagtgactaccatattggggcacacaggtacagggaattggctgctggggttggattcctagtactctggatcttttcctcatatttactaccacaggttcacaaaatagcttccaaagtaccaaacattatatcagtatcaacaaaaagaacaaggaaggtgtgccaccagtaaaatctttcccagaatacctgtacttgcatctgtgaactgtgtcccatagtgactcttgatcataggggaagctaggaaagtgagaattaagattttttctgattccttttttttttttttttaagggagtttcacttttgttgcccaagctggagtacagtggtgcaatctcggctcgttgcaacccctgcctcctgggttcaagcgattctcctgccccagcctcccaagtagctgggatttcaggtgtcttccaccacgcccagctaattttttgtatttttagtagagacagggtctcactacgttggccaggctggcctcgaactcctgacctcaggtgatccacccatctcagcctcccaaagtgctgggattacaggcgtgaaccaccatgcctggcctgatttttctgatttctaatggatgcataagaaaggggttggagatagaaatgtatttgccaaccaagattgccacggacattggttttcaaacatatatatatatttaaaactaacaaaaatttccagaatcatgaaaatgtgctctccttcattttacaatatttacatagca

SEQ ID NO: 716209 - DNA, 1335 bp, Homo sapiens
atatccatgggcgataagaagttcagcctagatgtgcacccacgtctacttcattttactgtttaaaacatatgaacatttaaaactaataacaaccagaaggtagtattggatgagcacaaaagtaaagcctatagtagggtttgattacaactacagcatctgttcttttgtacaggaaagactaagcaatgacttccatgaagctttcagccataaccaccagcccaaactttattggcctaaatatagcttttttcacacaaaaagaagtggagagaagtgctgcccaatagaaatataatgtgagaaacaagcacaggccatatatagaaaacattctagcagacacatttaaaaaaagtaaaggaaacagataaaattagttttaataataccttttatttaacctaatatatccaaatatgatcatttcaacatgcaatcgatattaaaattattaaggtaattttcttcctttttttcatactaaggctttaaaattcagtgcacattttacacctgcagcccatccccattcagactagctggacttgaagggctcattagccagctggagctagtgactaccatattggggcacacaggtacagggaattggctgctggggttggattcctagtactctggatcttttcctcatatttactaccacaggttcacaaaatagcttccaaagtaccaaacattatatcagtatcaacaaaaagaacaaggaaggtgtgccaccagtaaaatctttcccagaatacctgtacttgcatctgtgaactgtgtcccatagtgactcttgatcataggggaagctaggaaagtgagaattaagattttttctgattccttttttttttttttttaagggagtttcacttttgttgcccaagctggagtacagtggtgcaatctcggctcgttgcaacccctgcctcctgggttcaagcgattctcctgccccagcctcccaagtagctgggatttcaggtgtcttccaccacgcccagctaattttttgtatttttagtagagacagggtctcactacgttggccagkctggcctcgaactcctgacctcaggtgatccacccatctcagcctcccaaagtgctgggattacaggcgtgaaccaccatgcctggcctgatttttctgatttctaatggatgcataagaaaggggttggagatagaaatgtatttgccaaccaagattgccacggacattggttttcaaacatatatatatatttaaaactaacaaaaatttccagaatcatgaaaatgtgctctccttcattttacaatatttacatagca

SEQ ID NO: 716210 - DNA, 756 bp, Homo sapiens
ctggaggggcgatattgcagcaatgcaggatgcatagccctagggtccagtcctgagcagctggtcagggtagcagctgttagttcccagatggagatcctgatgcgagcccgggtagaggtctcacacgctgtgggtcctcttggtgagttggggctcctcatccaccagcttggacttgaggtgcaacttgtaagccaggatgtctccaggccacttggtgattgtctgcttctcacacacccaaatttcctgtgcaacctgctgaatgagtctgaagtcatggctgaccagcatcatactaccctgaaacccattgatggcatctgccagggcgttgatggtctcaatatccaggtgattggtgggctcatccaggaagagcatgtrggggttctgccaggccagccaggccagacacacttggcacttctgcccatctgacaagttctggattgggctcacctgttgtttcccagtgagaccatatggcccaatgatcttcctcatttattccttttccttgatctctgggtagcacttcatgtactccaaagtcaagagatctaagtccagctgctcttgtaaatgctgatggtaatgccctatcttgacatgagagtgttttcagatcatgccatctgggggtagtagctctctagttaacagcttcagaagagttgactttcttgctccatggggccctaccagagccactcgtgtgtcaaggtcaattccaaattctagatcattgca

SEQ ID NO: 716211 - DNA, 1547 bp, Homo sapiens
gaaagtgacacttggtcacattcttctattttcctactctactttaaaaagtgtgtgggctggttctcagggaagggtgcagagaaattactacctttgccccatatgacctcaagcctctaaaattattgattcytcaatacagtgagaattcataaccctgattatatttgcaacaatgaaagtcacatggtcatttcagaattattacatatttatagagtatggattacatgatatttatagtcctaattcaatagcaaacacacagtttccatgctacaaatggctatgaaaattacaagaaccatggaaattagatttatatgggcttctgtggctgcctgaattccacaagaggaatgccagattattttttattgccagaccccatacttaggaaaaccatgaaaaatttggaatttttaaataactgtcacaaagatacagttcaatttagactaaaaattcattattaggcaatccttccatcacaccccaaacaattctctgtcttcctttctctccaacccctagtacttttgccatgctactgatattttattggcttcatgtttaacataaaattctaaaaatattatgaccatggattactagttcaaaagtcatagctaaatgttatcattttgatgtcttttattggctggcctagattcttaaagaggaatcttaagctacgtctgtcggtaagtatttagaaatcacctgttatgagttcaaagctgttgttaggttggtgagcatacaacaaacttccaggcattattcttattttcaaagaacttataataacaggtgtgacaaatggcttagaggagagattgatgttaaaaaacagctcttaggaaattattgtggatctataaactttgggtaacaatgctttctattagtttagtacatttacaagaggaatatagacctgagaatcagagatacattgatggctacaggtgagttgtgttatgtatgaaggtcaaaagtgataggaatgactttgggattgagttcacgtacgtgcataaattaatctgaataatgacctcatgagtagattttactatctcattgagccctgagaagtttacatcacatctaatagaaattatctttaaaagtataagatatatgtatatgtgtgtgcataaatatgtaaaaatgtatgcattcatatctatttatctatcacctatctatcacctatctacatttctttttgtctacagatgtatgtacatatctattgcttatctatctacactcgtacatagacaaacagacattatacagacagcctattaaatagctctagtgaccttaatccagagcttaaaaatacccggggatatttataaataaatatatctattaatcttccttcattttttagatcactgcccatgtgggtgcaagtgaatccttctccctgaagatttctattctttatccatgtcatttatttctatggaatgcactatggatgtcagcctcatttaggtattccatacttcattagtaagaaatca

SEQ ID NO: 716212 - DNA, 1547 bp, Homo sapiens
gaaagtgacacttggtcacattcttctattttcctactctactttaaaaagtgtgtgggctggttctcagggaagggtgcagagaaattactacctttgccccatatgacctcaagcctctaaaattattgattcttcaatacagtgagaattcataaccctgattatatttgcaacaatgaaagtcacatggtcatttcagaattattacatatttatagagtatggattacatgatatttatagtcctaattcaatagcaaacacacagtttccatgctacaaatggctatgaaaattacaagaaccatggaaattagatttatatgggcttctgtggctgcctgaattccacaagaggaatgccagattattttttattgccagaccccatacttaggaaaaccatgaaaaatttggaatttttaaataactgtcacaaagatacagttcaatttagactaaaaattcattattaggcaatccttccatcacaccccaaacaattctctgtcttcctttctctccaacccctagtacttttgccatgctactgatattttattggcttcatgtttaacataaaattctaaaaatattatgaccatggattactagttcaaaagtcatagctaaatgttatcattttgatgtcttttattggctggcctagattcttaaagaggaatcttaagctacgtctgtcggtaagtatttagaaatcacctgttatgagttcaaagctgttgttaggttggtgagcatacaacaaacttccaggcattattcttattttcaaagaacttataataacaggtgtgacaaatggcttagaggagagattgatgttaaaaaacagctcttaggaaattattgtggatctataaactttgggtaacaatgctttctattagtttagtacatttacaagaggaatatagacctgagaatcagagatacattgatggctacaggtgagttgtgttatgtatgaaggtcaaaagtgataggaatgactttgggattgagttcacgtacgtgcataaattaatctgaataatgacctcatgagtagattttactatctcattgagccctgagaagtttacatcacatctaatagaaattatctttaaaagtataagatatatgtatatgtgtgtgcataaatatgtaaaaatgtatgcattcatatctatttatctatcacctatctatcacctatctacatttctttttgtctacagatgtatgtacatatctattrcttatctatctacactcgtacatagacaaacagacattatacagacagcctattaaatagctctagtgaccttaatccagagcttaaaaatacccggggatatttataaataaatatatctattaatcttccttcattttttagatcactgcccatgtgggtgcaagtgaatccttctccctgaagatttctattctttatccatgtcatttatttctatggaatgcactatggatgtcagcctcatttaggtattccatacttcattagtaagaaatca

SEQ ID NO: 716213 - DNA, 627 bp, Homo sapiens
aaagtagaaaactgacaaaactggaaacttcaggaggaaaagacaagatgcacaggatagtcttgacatacttctagctgaaatacacttgaagtagaaagaggaagaacaagaattgagagtggccctttctccctttctgtaattctcactaaaatcattgtatcttcacctaagatttcacctgacagctatttcctattgggcggtaaatgtttatcttctactcagacctatttactgagcaccaagcacacttatcatatatctatttcacatgccctcttgtttttcttaaaaatatcactgtcatacgtttggcacactgacgccatccctcaactcctcccttttccttacctgccatattcaagctatcactaactctgttagtattttttctctaaattacctcctgaatatatccaattctytccatttccaattcaccatgctagttcaagccaccactttggactattgctgtacccgcttaactgtcctctctaattcaactatggctttactccaatccactcttcacatggcagccatactgatctttttaaaatgtaactattataatcttatgctcctgcataaagccatttagaatagagatttggc

SEQ ID NO: 716214 - DNA, 1052 bp, Homo sapiens
ccacgcaccccrtgctcagcctcaccaccctcctccccacgctccccgtgctcggcctcaccgctctcctccccacgcaccccgtgctcggcctcaccgctctcctccccacgcaccccgtgctcgggcctcaccgctctcctccccacgcaccccgtgctcggcctcaccgctctcctccccacgctccccgtgctcggcctcaccgctctcctccccacgcaccccgtgctcggcctcaccgctctcctccccacgcaccccgtgctcggcctcaccgctctcctccccacgcaccccgtgctcggcctcaccgctctcctcggaaccaggtccctctcggtggctctcggtgtgtagggcttgctgtgcttggtcagacaggcaggaaggctctcggtggggactggagccacgtatactgccgtgtgtcacgtgggtgctggtaatgactgtgtggtgaggagacatccgtggtccagtcaccgcagcagtcctgagttaaatggagctaaacaggtttcttccctgcaggacttatcagtgcctttagcatgctggtgggcaccatgagcttctagaaggggcttagagcaggctgagtgtttaaaaacctgtctgtctactacagaatcggtcgttttttcccccaaagcacatcttctcaggccagtgtcctaaggacactcagagaacagcagcagcccgacacgagaccgttggtgtctgtctgccgcatggggtgcggacctcggtggtggcctgggtcctggctgggcgagggtgcgcctgccatctcagtgtgaccaccttcatgctgtcactgcatctcctctggcccaggaagctgcccctcggttgagaatcacaccgtgtggtcttctgtaacaggcacttgagccagacatacccatcaacacgcggggctgagtctggtgtttgtaaacgaccgctgtttcttcactgtttcttagtcttttgccctcccaatggcctccagaggcagccatccccttcaagtggccccacgaggatggggggggctccagtgg

SEQ ID NO: 716215 - DNA, 1052 bp, Homo sapiens
ccacgcaccccatgctcrgcctcaccaccctcctccccacgctccccgtgctcggcctcaccgctctcctccccacgcaccccgtgctcggcctcaccgctctcctccccacgcaccccgtgctcgggcctcaccgctctcctccccacgcaccccgtgctcggcctcaccgctctcctccccacgctccccgtgctcggcctcaccgctctcctccccacgcaccccgtgctcggcctcaccgctctcctccccacgcaccccgtgctcggcctcaccgctctcctccccacgcaccccgtgctcggcctcaccgctctcctcggaaccaggtccctctcggtggctctcggtgtgtagggcttgctgtgcttggtcagacaggcaggaaggctctcggtggggactggagccacgtatactgccgtgtgtcacgtgggtgctggtaatgactgtgtggtgaggagacatccgtggtccagtcaccgcagcagtcctgagttaaatggagctaaacaggtttcttccctgcaggacttatcagtgcctttagcatgctggtgggcaccatgagcttctagaaggggcttagagcaggctgagtgtttaaaaacctgtctgtctactacagaatcggtcgttttttcccccaaagcacatcttctcaggccagtgtcctaaggacactcagagaacagcagcagcccgacacgagaccgttggtgtctgtctgccgcatggggtgcggacctcggtggtggcctgggtcctggctgggcgagggtgcgcctgccatctcagtgtgaccaccttcatgctgtcactgcatctcctctggcccaggaagctgcccctcggttgagaatcacaccgtgtggtcttctgtaacaggcacttgagccagacatacccatcaacacgcggggctgagtctggtgtttgtaaacgaccgctgtttcttcactgtttcttagtcttttgccctcccaatggcctccagaggcagccatccccttcaagtggccccacgaggatggggggggctccagtgg

SEQ ID NO: 716216 - DNA, 1052 bp, Homo sapiens
ccacgcaccccatgctcagcctcaccrccctcctccccacgctccccgtgctcggcctcaccgctctcctccccacgcaccccgtgctcggcctcaccgctctcctccccacgcaccccgtgctcgggcctcaccgctctcctccccacgcaccccgtgctcggcctcaccgctctcctccccacgctccccgtgctcggcctcaccgctctcctccccacgcaccccgtgctcggcctcaccgctctcctccccacgcaccccgtgctcggcctcaccgctctcctccccacgcaccccgtgctcggcctcaccgctctcctcggaaccaggtccctctcggtggctctcggtgtgtagggcttgctgtgcttggtcagacaggcaggaaggctctcggtggggactggagccacgtatactgccgtgtgtcacgtgggtgctggtaatgactgtgtggtgaggagacatccgtggtccagtcaccgcagcagtcctgagttaaatggagctaaacaggtttcttccctgcaggacttatcagtgcctttagcatgctggtgggcaccatgagcttctagaaggggcttagagcaggctgagtgtttaaaaacctgtctgtctactacagaatcggtcgttttttcccccaaagcacatcttctcaggccagtgtcctaaggacactcagagaacagcagcagcccgacacgagaccgttggtgtctgtctgccgcatggggtgcggacctcggtggtggcctgggtcctggctgggcgagggtgcgcctgccatctcagtgtgaccaccttcatgctgtcactgcatctcctctggcccaggaagctgcccctcggttgagaatcacaccgtgtggtcttctgtaacaggcacttgagccagacatacccatcaacacgcggggctgagtctggtgtttgtaaacgaccgctgtttcttcactgtttcttagtcttttgccctcccaatggcctccagaggcagccatccccttcaagtggccccacgaggatggggggggctccagtgg

SEQ ID NO: 716217 - DNA, 1052 bp, Homo sapiens
ccacgcaccccatgctcagcctcaccacyctcctccccacgctccccgtgctcggcctcaccgctctcctccccacgcaccccgtgctcggcctcaccgctctcctccccacgcaccccgtgctcgggcctcaccgctctcctccccacgcaccccgtgctcggcctcaccgctctcctccccacgctccccgtgctcggcctcaccgctctcctccccacgcaccccgtgctcggcctcaccgctctcctccccacgcaccccgtgctcggcctcaccgctctcctccccacgcaccccgtgctcggcctcaccgctctcctcggaaccaggtccctctcggtggctctcggtgtgtagggcttgctgtgcttggtcagacaggcaggaaggctctcggtggggactggagccacgtatactgccgtgtgtcacgtgggtgctggtaatgactgtgtggtgaggagacatccgtggtccagtcaccgcagcagtcctgagttaaatggagctaaacaggtttcttccctgcaggacttatcagtgcctttagcatgctggtgggcaccatgagcttctagaaggggcttagagcaggctgagtgtttaaaaacctgtctgtctactacagaatcggtcgttttttcccccaaagcacatcttctcaggccagtgtcctaaggacactcagagaacagcagcagcccgacacgagaccgttggtgtctgtctgccgcatggggtgcggacctcggtggtggcctgggtcctggctgggcgagggtgcgcctgccatctcagtgtgaccaccttcatgctgtcactgcatctcctctggcccaggaagctgcccctcggttgagaatcacaccgtgtggtcttctgtaacaggcacttgagccagacatacccatcaacacgcggggctgagtctggtgtttgtaaacgaccgctgtttcttcactgtttcttagtcttttgccctcccaatggcctccagaggcagccatccccttcaagtggccccacgaggatggggggggctccagtgg

SEQ ID NO: 716218 - DNA, 1052 bp, Homo sapiens
ccacgcaccccatgctcagcctcaccaccctcctccccacgcwccccgtgctcggcctcaccgctctcctccccacgcaccccgtgctcggcctcaccgctctcctccccacgcaccccgtgctcgggcctcaccgctctcctccccacgcaccccgtgctcggcctcaccgctctcctccccacgctccccgtgctcggcctcaccgctctcctccccacgcaccccgtgctcggcctcaccgctctcctccccacgcaccccgtgctcggcctcaccgctctcctccccacgcaccccgtgctcggcctcaccgctctcctcggaaccaggtccctctcggtggctctcggtgtgtagggcttgctgtgcttggtcagacaggcaggaaggctctcggtggggactggagccacgtatactgccgtgtgtcacgtgggtgctggtaatgactgtgtggtgaggagacatccgtggtccagtcaccgcagcagtcctgagttaaatggagctaaacaggtttcttccctgcaggacttatcagtgcctttagcatgctggtgggcaccatgagcttctagaaggggcttagagcaggctgagtgtttaaaaacctgtctgtctactacagaatcggtcgttttttcccccaaagcacatcttctcaggccagtgtcctaaggacactcagagaacagcagcagcccgacacgagaccgttggtgtctgtctgccgcatggggtgcggacctcggtggtggcctgggtcctggctgggcgagggtgcgcctgccatctcagtgtgaccaccttcatgctgtcactgcatctcctctggcccaggaagctgcccctcggttgagaatcacaccgtgtggtcttctgtaacaggcacttgagccagacatacccatcaacacgcggggctgagtctggtgtttgtaaacgaccgctgtttcttcactgtttcttagtcttttgccctcccaatggcctccagaggcagccatccccttcaagtggccccacgaggatggggggggctccagtgg

SEQ ID NO: 716219 - DNA, 3081 bp, Homo sapiens
ctgaaaagaagatgaaagcacatcaaacatttatctcaagagtttcattttctaagaaatagcaggtgtgtcatacgatttctcagaggggcaaacactcctctaaagcctctctggtactcacggagatggatggcatggagtatgtagcgtgggatgaatagctgaagataaatattctatttagagaaaatggggccaggtagtccatttctcactgactaaaagtctcagaaacagttaaattattgtgaacaaaacaaaagagaaaaatcctatagcaggcagtattaaaaatgacgtaaactcaagctacaatatctttaaatcacgctactgaaaatcaagcaacaattgcctccatctgagacttgtatcttctctctcctgggtgcctccaccccaccactgatacaagcacatccatacattcataaaaatggaaaacacttaagcacgctgctgctgctgtcactattttttaatatttatttttgctattaaatatgctcagtacccacatacataaaaagaataacgcatttaaaatgtctccagtataaagtgtttttaattattttgtaacaaataaagcatccttccatatatgtagagcaatggttgtcaaatgtattttatctgtggatttccttcaaataataattttaataggcaatgttttctgtacacttatctactaactaaatgtcattctaatttctttccaggaactaaattatctcaccctcagatttttatgagatgagactatcagctgcttttaaaaaaattataaatgaagaaactgaggctgtgagagatgaaatrtcctagagttaaatagctagtaagcactgaagctaagacttgaacccagaccccaaacagtctatttctagaaactttactcctaacactacctggcctaaaaaaggtaaaagcagagaggtgctgatcaatttatttattcaacacatgattatttagttactactatgaattatgctggtgtttttattagaagtagagcaatgtgtacaaccttgttcttctgaggcttgcattactgtaaaaaaacagacaatgaaactagcaagaaatggtcaaagaaagaaatgcatagtaattgtgataatcaactctgaattcttatttcagacgtgtattttctataccccagtgattcctaatacaatatatatatagttctatgattcaccaagtttagtccccaaatgttagaatcatttataactcaaatgcaacaaaaaattttgtcagctctataattattgaaattacaacttcaatacaaatggaaaatttgtattttcaatcggatgctttctcagtgcctctataacacaattctaaaacaggccacagccacgtctcacctagatcattctctaatctcccactgcccttcatgccttccctctttccctcttctcacatttctttctgtatttaatgggacacagagttctgcttagtctaccttctgaatcacagtcaatctgcattttccttgtttttgccctaattcaagtccacatcttcgactctgtcagagctaagtcaaggactgtggatcactgcgacgttaagtgttactatattagattggtaagaaagtaattgtggtttttgccattaaacgagtgggaaagctgcaattacttttgcaccaacctattataaattttccagaaatatatgtgcaggtaaaacactgaagttttcatagatacaactaccaccaagtgggaataaggaaaaaacatatatttaaatggtcttctaacttgaaaaggtaggaaccactgacttagacctcttgactaatggccctcagttcttgtttgaccctttttacatccattgcatattttcttcactcacaacactgttctctttcaagtgcagagacctgataaagtcactagtgtgctaaaacattgatgtctttctattttttaaggtaaaacatcataactccttagcctgttgcagtaagtgctttgggatcctttttttaacaccatgctatcattcttgcacccttcgtaagttcattattatatctgtaaatttgctgctcattaaatataaaattaaatcttcataaggttttagttcatgatttagctctaatatttttgtaatttttaaaatctttttgacaaaatatttcaagacccagctcaactactataatacttatatgaagacttcctcatgccttctagacagattaattattctatcagatatgcctctatagtacatagtaagtgctaacaaaattagatatataattgtttcctcccgatagaaaaatctaagagaaggaactttgaaaattgaaagtatctctggactctagcatatattctgatgcttaattggaatgtaaatatttggtatgtaaataatacctatacttatgttactcaaattcagactgataaagtatgcaaactatgtactttcaaatatcatccccttttcaattcttgcttacaaattttgaaagcaagtatattaatatttattaatattaatgccttaacaactcttgattcatattcattcttaattagggtaaatagcctcctatttgttcatcttgccttaggcttacccttccccctttcagtctctactttatagccaagagctattccaaaatcaaaagtctaattatgttcttcccttgcttaaatctctgtaacgactgtgtgtgtccatgataaagttcaaattctttgccatggcttgccagatctttccattctagcccctacaaatctcttcagtcctatctctctgcattctcaactcaatctaactaaaacccctaaaatgtcattttgcactctacacctgtcatcacttgttttagtttcctttttagcatagacctttttgaatgttgcttattctatacctcttttgtaaatatcccctatcatctcctttcagttctttggtgtcctttcaggttagggattggcttaaatgtcaactagccctatatgcctttcttcaccaactctacactctttcctcctgcaa

SEQ ID NO: 716220 - DNA, 3081 bp, Homo sapiens
ctgaaaagaagatgaaagcacatcaaacatttatctcaagagtttcattttctaagaaatagcaggtgtgtcatacgatttctcagaggggcaaacactcctctaaagcctctctggtactcacggagatggatggcatggagtatgtagcgtgggatgaatagctgaagataaatattctatttagagaaaatggggccaggtagtccatttctcactgactaaaagtctcagaaacagttaaattattgtgaacaaaacaaaagagaaaaatcctatagcaggcagtattaaaaatgacgtaaactcaagctacaatatctttaaatcacgctactgaaaatcaagcaacaattgcctccatctgagacttgtatcttctctctcctgggtgcctccaccccaccactgatacaagcacatccatacattcataaaaatggaaaacacttaagcacgctgctgctgctgtcactattttttaatatttatttttgctattaaatatgctcagtacccacatacataaaaagaataacgcatttaaaatgtctccagtataaagtgtttttaattattttgtaacaaataaagcatccttccatatatgtagagcaatggttgtcaaatgtattttatctgtggatttccttcaaataataattttaataggcaatgttttctgtacacttatctactaactaaatgtcattctaatttctttccaggaactaaattatctcaccctcagatttttatgagatgagactatcagctgcttttaaaaaaattataaatgaagaaactgaggctgtgagagatgaaatgtcctagagttaaatagctagtaagcactgaagctaagacttgaacccagaccccaaacagtctatttctagaaactttactcctaacactacctggcctaaaaaaggtaaaagcagagaggtgctgatcaatttatttattcaacacatgattatttagttactactatgaattatgctggtgtttttattagaagtagagcaatgtgtacaaccttgttcttctgaggcttgcattactgtaaaaaracagacaatgaaactagcaagaaatggtcaaagaaagaaatgcatagtaattgtgataatcaactctgaattcttatttcagacgtgtattttctataccccagtgattcctaatacaatatatatatagttctatgattcaccaagtttagtccccaaatgttagaatcatttataactcaaatgcaacaaaaaattttgtcagctctataattattgaaattacaacttcaatacaaatggaaaatttgtattttcaatcggatgctttctcagtgcctctataacacaattctaaaacaggccacagccacgtctcacctagatcattctctaatctcccactgcccttcatgccttccctctttccctcttctcacatttctttctgtatttaatgggacacagagttctgcttagtctaccttctgaatcacagtcaatctgcattttccttgtttttgccctaattcaagtccacatcttcgactctgtcagagctaagtcaaggactgtggatcactgcgacgttaagtgttactatattagattggtaagaaagtaattgtggtttttgccattaaacgagtgggaaagctgcaattacttttgcaccaacctattataaattttccagaaatatatgtgcaggtaaaacactgaagttttcatagatacaactaccaccaagtgggaataaggaaaaaacatatatttaaatggtcttctaacttgaaaaggtaggaaccactgacttagacctcttgactaatggccctcagttcttgtttgaccctttttacatccattgcatattttcttcactcacaacactgttctctttcaagtgcagagacctgataaagtcactagtgtgctaaaacattgatgtctttctattttttaaggtaaaacatcataactccttagcctgttgcagtaagtgctttgggatcctttttttaacaccatgctatcattcttgcacccttcgtaagttcattattatatctgtaaatttgctgctcattaaatataaaattaaatcttcataaggttttagttcatgatttagctctaatatttttgtaatttttaaaatctttttgacaaaatatttcaagacccagctcaactactataatacttatatgaagacttcctcatgccttctagacagattaattattctatcagatatgcctctatagtacatagtaagtgctaacaaaattagatatataattgtttcctcccgatagaaaaatctaagagaaggaactttgaaaattgaaagtatctctggactctagcatatattctgatgcttaattggaatgtaaatatttggtatgtaaataatacctatacttatgttactcaaattcagactgataaagtatgcaaactatgtactttcaaatatcatccccttttcaattcttgcttacaaattttgaaagcaagtatattaatatttattaatattaatgccttaacaactcttgattcatattcattcttaattagggtaaatagcctcctatttgttcatcttgccttaggcttacccttccccctttcagtctctactttatagccaagagctattccaaaatcaaaagtctaattatgttcttcccttgcttaaatctctgtaacgactgtgtgtgtccatgataaagttcaaattctttgccatggcttgccagatctttccattctagcccctacaaatctcttcagtcctatctctctgcattctcaactcaatctaactaaaacccctaaaatgtcattttgcactctacacctgtcatcacttgttttagtttcctttttagcatagacctttttgaatgttgcttattctatacctcttttgtaaatatcccctatcatctcctttcagttctttggtgtcctttcaggttagggattggcttaaatgtcaactagccctatatgcctttcttcaccaactctacactctttcctcctgcaa

SEQ ID NO: 716221 - DNA, 3081 bp, Homo sapiens
ctgaaaagaagatgaaagcacatcaaacatttatctcaagagtttcattttctaagaaatagcaggtgtgtcatacgatttctcagaggggcaaacactcctctaaagcctctctggtactcacggagatggatggcatggagtatgtagcgtgggatgaatagctgaagataaatattctatttagagaaaatggggccaggtagtccatttctcactgactaaaagtctcagaaacagttaaattattgtgaacaaaacaaaagagaaaaatcctatagcaggcagtattaaaaatgacgtaaactcaagctacaatatctttaaatcacgctactgaaaatcaagcaacaattgcctccatctgagacttgtatcttctctctcctgggtgcctccaccccaccactgatacaagcacatccatacattcataaaaatggaaaacacttaagcacgctgctgctgctgtcactattttttaatatttatttttgctattaaatatgctcagtacccacatacataaaaagaataacgcatttaaaatgtctccagtataaagtgtttttaattattttgtaacaaataaagcatccttccatatatgtagagcaatggttgtcaaatgtattttatctgtggatttccttcaaataataattttaataggcaatgttttctgtacacttatctactaactaaatgtcattctaatttctttccaggaactaaattatctcaccctcagatttttatgagatgagactatcagctgcttttaaaaaaattataaatgaagaaactgaggctgtgagagatgaaatgtcctagagttaaatagctagtaagcactgaagctaagacttgaacccagaccccaaacagtctatttctagaaactttactcctaacactacctggcctaaaaaaggtaaaagcagagaggtgctgatcaatttatttattcaacacatgattatttagttactactatgaattatgctggtgtttttattagaagtagagcaatgtgtacaaccttgttcttctgaggcttgcattactgtaaaaaaacagacaatgaaactagcaagaaatggtcaaagaaagaaatgcatagtaattgtgataatcaactctgaattcttatttcagacgtgtattttctataccccagtgattcctaatacaatatatatatagttctatgattcaccaagtttagtccccaaatgttagaatcatttataactcaaatgcaacaaaaaattttgtcagctctataattattgaaattacaacttcaatacaaatggaaaatttgtattttcaatcggatgctttctcagtgcctctataacacaattctaaaacaggccacagccacgtctcacctagatcattctctaatctcccactgcccttcatgccttccctctttccctcttctcacatttctttctgtatttaatgggacacagagttctgcttagtctaccttctgaatcacagtcaatctgcattttccttgtttttgccctaattcaagtccacatcttcgactctgtcagagctaagtcaaggactgtggatcactgcgacgttaagtgttactatattagattggtaagaaagtaattgtggtttttgccattaaacgagtgggaaagctgcaattacttttgcaccaacctattataaattttccagaaatatatgtgcaggtaaaacactgaagttttcatagatacaactaccaccaagtgggaataaggaaaaaacatatatttaaatggtcttctaacttgaaaaggtaggaaccactgacttagacctcttgactaatggccctcagttcttgtttgaccctttttacatccattgcatattttcttcactcacaacactgttctctttcaagtgcagagacctgataaagtcactagtgtgctaaaacattgatgtctttctattttttaaggtaaaacatcataactccttagcctgttgcagtaagtgctttgggatcctttttttaacaccatgctatcattcttgcacccttcgtaagttcattattatatctgtaaatttgctgctcattaaatataaaattaaatcttcataaggttttagttcatgatttagctctaatatttttgtawtttttaaaatctttttgacaaaatatttcaagacccagctcaactactataatacttatatgaagacttcctcatgccttctagacagattaattattctatcagatatgcctctatagtacatagtaagtgctaacaaaattagatatataattgtttcctcccgatagaaaaatctaagagaaggaactttgaaaattgaaagtatctctggactctagcatatattctgatgcttaattggaatgtaaatatttggtatgtaaataatacctatacttatgttactcaaattcagactgataaagtatgcaaactatgtactttcaaatatcatccccttttcaattcttgcttacaaattttgaaagcaagtatattaatatttattaatattaatgccttaacaactcttgattcatattcattcttaattagggtaaatagcctcctatttgttcatcttgccttaggcttacccttccccctttcagtctctactttatagccaagagctattccaaaatcaaaagtctaattatgttcttcccttgcttaaatctctgtaacgactgtgtgtgtccatgataaagttcaaattctttgccatggcttgccagatctttccattctagcccctacaaatctcttcagtcctatctctctgcattctcaactcaatctaactaaaacccctaaaatgtcattttgcactctacacctgtcatcacttgttttagtttcctttttagcatagacctttttgaatgttgcttattctatacctcttttgtaaatatcccctatcatctcctttcagttctttggtgtcctttcaggttagggattggcttaaatgtcaactagccctatatgcctttcttcaccaactctacactctttcctcctgcaa

SEQ ID NO: 716222 - DNA, 1435 bp, Homo sapiens
gcaaagacctttatttgttgattaaaaaaggactcagaatatgtctatagaatatgtctcttctttctcccttttttgagagtttattcaaaacgtgaatgaaagtgttttattgtgtcttattagtattacatgaaatttatgtgcaaaagagaaaactaaatttgtattcttttattagtgtattatcaattctaaagctkattttaataaaaacttatatacaaatctcatttcagtcagcttttaatcacacaagattttaaaataaactttgtaatctcataacaattttgaagttttctaactttctacaatttatttagttttatctatatcttttagttcttttaatttgaaacaatctttaaataacttctttttttctcacatttttatgcctttataactttcctcaccaaaaatatatcttgcttttttaatagactctttatttagaattctcttacatttagtagttttaattatattatgttagctataattttgactcttagtaacccaaatttctagtaaaaacctagaaattaattttgaactgttttatatcaatatttgtagatgaaaatcatttataatttttagatattttaattttattaacaaatctaaatatatttagcttttttatatcatgtaaaaataagatgtcaaagtacataaacaaacatatgtttgataattaattttagtattttaacttatttaggaatgactcagacattttattattatttaacatgacttaaagatttttaattattggaaaataaattatgacacaggtaccctccttaatgtctttctcagttgtccttagtcctgagtacccatgtggcacctgatgcctataaaaggcagggctcttttgggtcctaaatttacataccagatgtcaggacagaagacagagctgtgaagaggatgtctggtggatctgaccactcccagcatggccatgaggcaaatctgggccaagcaaggaggaacaaggggccctgcagcaggtggcctaagcattgacgacatgcctccaggccttaccatggccacctgtccagaccccagaatcttgaagctcaaaaccaaagaccagcttatagtaagatgtgtgcaaagctctagggaagctcaacagccagctttagcccacagacaaatcaagcaagtgccaaaaatattatagaaaattagcagttttatgaccttaaaacatgtaaagacagcataaacctgtctgaccagtagatccaggcaaaaatatctgaattatatttaagttacactcttgaagccatttttattttactttgttaacaactttgaaactagatttaccaaatatcacacatacataacacatatagacatagagacatccagacagaagcagattttatggcttttatacaaa

SEQ ID NO: 716223 - DNA, 1974 bp, Homo sapiens
cagtgccacacacttttaaacaaccagatctcaggggaactctctgtcacaagaacagcaagggggaaatctgccaccatgattcaatcaccttccatcaggaccttcctccaacaatggggattataatttgacatgagatttgggtggagacacagatccaaactatatcagtatcttacttctagtgtgcctctcttctttacataccaacatggatgtgtgaatctaattatttcttacttttccattgttcacttcatgttcctctttaccttacattaatatttgattgttcataataaggtatgggacatatcttgcatattttcagactctgactggcatattctctgcccagaggtaagatccacaggaagatacattataccatttttattttgccttgccttgtaagaggtagtcacagcagtagtacaaagggaggtaggtgatggtgatttatagctttaaaaaatcttattagaaaatgacaaagattaaaaacaagccggctacacattcaatttacaaaattaggaatagagaattgaacaaacccaaataagcaggcaagaaataaataattaagggcatagatctgtgaaatataatacaaaataataggtacatgtaactaaactccagacatattcttgagatgattgatcacataatgagatctctgacaagactgacaaacagaaaaaaagaaaaacaacatgtaaataggcaaaacagaatgaaaaaagaaaaaatatcattcacaacagattaataatagactattaagatattatactttagttaatttaaaatttaatatgaaacatatgcctacttgaaaaaacataaaagaccacaaaattaaaagatataaaatattaattatactaatatttgtgtaaattatttgttatcatattcaaaggctccctttctgaaacttctgggccaaagttctagcaaatcttgaagaaactgttattccaaacataaaacttcttctagaacatgaaaaattagcaaaatctgcctacgtattttatgtcgttagattaagcctgatttcaaactcgatggagagagcacaagagaaaatgtctacttacaaacacagatgtgaaactccttaataaaatgttaatcaacagaattcaaaagtgtatcaaaaataatacatcatgaaaaatagtttatctaggaatacagtaaagtttcaatattaaaaacactctaagaattaaatwtgcccattaattgactaaatgtaaaaaaaaaatcttaacaattgcaaaaaacccacatttgataaattctatttattataatacccttatgagatgagagatatttaaaagtcttcattttgagagattatgtaacacgttttattaattccacctgctctgtgtcttcacccaaatcttatcttgtagctcccataattctcacgtgttgtggaggggacctggtgggagattattgaattacgggggtgggtctttcctgtgctcttctcatgatagtgaattgccttgcacaagctctctctgtgcttgcttccatccacataagatgtgatttgcttctccttgccttctgccatgattatgaggcctccccagacatgtggaactgtaagtccaataaacctcctccttttgtaaattgcccagtctcgggtaagtctttctcagcagcgtgaaaatgaactaatacagtacattgataccagtagagtggggcgctgctgaaaagatagccaaaactgtggaagcgactttggaactgggtaacaggcagaggttggaacagtttggagggctcagtaaaagacaggaaaatgtggaaaagtttggaattcgctagagacttgctgaatggctttgaccaaaatgctgataatgatatggacaatgaaatcaaggctgaggcgatctcagatggagatgaggaacttgttgggaactg

SEQ ID NO: 716224 - DNA, 630 bp, Homo sapiens
actatcttcaaatgtttgaaaaactggtacctgaatgagggattagattgtttttgtagtaggaaaaaaaaaacccagcttttcccagtaggtagaattaacagagataactcgttgttgttgttgttgttcaatataatcactgacagacttattcttatcctaagatagaatgttcagatataagctgggcaagcacttgaatcattgatagtggggcacttgtgagtatggactttggtttagacagacgtcaatttgaaaactagctctaatactcactagttttatgacttttggcaaattccttagtagctctcaggtttattttccaattttataacatgagagatracatatatattaaccactcgactttttgtgagatttaaaagaggtaattactcagcaaagcaagtactcaataagtttttatatttaggaatgagtgacttaaggattgcatgggagggtgtttggctgtcctgtagataaataagaataaaacccaaatatggccgatctcaccaccctaaagattcacatcaatatgaaaaaaagtaatttaatgcacatttttagataactcaaacaatacaaaaagacataatataaaaaataagtttcccg

SEQ ID NO: 716225 - DNA, 1506 bp, Homo sapiens
atttcaaaaagaacacattgacttctttaataacaagatttttttcgtgtaaaatcaaaacagtaagtggagggaaaaacataaatctagatttataacaggcaaattttccaggagacttattattaaaatatattggagagcaggtggaggtagataattttcttttgctgaattactctcacttcaccatgcctattttctttttttttaaaaaaagaaaaaagaggtcttccatgtttagaaaatggctaggcactggaaggagcaaattttacaaagtaatttgtcattagttaacaaacattttttgctatctacttaggggaaatgtacaatattaagcattagagttgaaagtagaattatataggggaaaggagagagagatatttgctgtagtcttggaaattaggattggcagaaaaaggcaaattcctatacataagcaaataaacagtaacaaaccggcagagtattataaagcagatatataggtaacatgggagtttatgatgggggcttaactaagtctaacagttcacacttccaaaggaaattagaaaaaaaaaattcagacctgaaggctctgtaagatctttagatatttgctagattaagaataggaggggagatattctagtttagggagcaggatgtgttaaagctctgtagaagctagcacaacatgcaaagttctaggtgcctagaatacatgtgcaagaatgactgtcaaaatatgaggctacgagagaccagagaagctagatcacacatgacctgtagtcacataatatatgtttaagaatgtcttgctatcactaaaaaatggtatttcaatttcagaaaacacccttcagcatttatatttgaaaattattttattctggtaagaatgcctaacatgaggactatgctgttgacaaatattttggtgtacaaccaaatacaacaatattcgacagtattgttgaccatactgctgacaatgttgtattgcagatcgctaggttttattcatcttgtttaacttaaactttatcccctttggttagtaacttctcatttcccccttcactaggccctgtcaatcaccattccattctttgattctatgaatttgactattttagatacctaatttaagtgaaatcatgcagtatttgtcattttgtgactggcttatttcacttagcatgaggtcctcaaggctcatctatgttgccccgtatggcagaatttctttctaagtctgaataatatttcattgtatgtatacatcacatttgctttatgcaytcatctgtttatagatatttaggttgtttccacgtcttggatattgtgaacagtgctgcaaaataaattgaataataaaatttttatatcaatcattcttactctctagagctatatgtttttcagaatatctgctgaaaatataaaaggctagggggctgctaaacattaaagcccataattttcatactccttccttgtcttgga

SEQ ID NO: 716226 - DNA, 547 bp, Homo sapiens
tgtttttaattcactttctgtctttattgaatactactttttatgtttacttgactttatttatatatatatattttaagctccaaattgctgtaaagtatgtttttgcttatatattatgtatgtgatgtatataatgtatacatacataaaattatgtattggcatcaatacatatgtacagtcttgtgcacatacccagaagagtaactgccagatcataaggaatatacatttttcatttcactagattctgccagatcacttagaagcatgagaatattatttgtggtcacagagagagctactgaatttctttctctctacttccttgaaaataaattctaagaccccctctaattttcatggttctgatacatataggtaattgtttaatttgcattctctcatcattagtaagtctgagcatatcttcttatattttactagcatttgagygctgcttctgtgaattgactttttatattcctttccatgctctactggtgttctagtcattgtatttttggctcactagagttcctta

SEQ ID NO: 716227 - DNA, 1079 bp, Homo sapiens
tgacatgtcaaattagtcaaaataaatcaattgaaagtttacacaggacatactgcagttaacttttttttaatatgaacactttcatactgcttactatgttgtaggcatgaagaactctcaaaaccaagaaaattctcaaagctactatatgaattaagtcttacagatgacaagatcactcaataaattactgatagggcttggatttgaacctaggaagtctagctctaaattctatgctgttacttattacacaatgcagcttccaatgtgaggtattgcaatacagctaaatgtcactaagtgatttacatattacctatgttagattttatattttctgtttcagtaatatattgagaagcacagatgtaagaaataataatatggattccatatacagaaatgtcacaattctaatcatagtataagaatctctgaaattcaaagtacttagtctaacataaaaatttaaggtgtttggtggtaaaggattttctccatggcctgaattaacaccattagaaagcaccaagccatgggggtagtaaccatctgatgactgttctcatgtatcccgtgtccagggacatggggcaacgtgcctcttctgtgttagagggtggaacggatatgtttggtactgcaggggatctggtgctcttcttctggattcgcatcctcacccagggcccacttttactaagtgttctgccctagcctggttcaaggaggtcatccacctgactttgtcaaatggaattgggatatatttgatatacatttttctaacaacatggaaaagggttttcctccttctttccctgcaaggtacatcctactgctttgaacttccaagtatgcctagtcaccttttaaaatgtaaaacttttcagaaaaatgaggattgctttccttgcatgcccttattatctcgactacctgaattgcaagggatttttatatattcatatgttccaaagtcagcaactctcctgttggttcattrttgactgtgctgtaaatgaagtcttttgcaattaaaatgagatttgcctatgtccaaaaaaaattaa

SEQ ID NO: 716228 - DNA, 645 bp, Homo sapiens
atggtcttttggagaagagagaagacagggaagagattccacagtggagcacggactgggggaagatgagtaaaggcttggaattgagaatcctagatataatgtgttttgggggacagtgaaggcacctgccttcaggaatgaaggactgatgtttgcacgtagggggaggtgagaaggatgggtggagggagtcagttacaaatgaagcgggggacttgattctgtaggtcttcaaacatttttattgtgcaactgtcagaatttctttagcacaatcccccatacatatttatttatattttataagtgtaatgtataaattatgtatttcaaggaactgaccaactcttactacctgcactgctgccagcctgatccacttggattatgtaattcctctcaactgctttctctgctttctttttgccccgcttcccccagtctctttcatcccagcagagagatcccttagaattggaatcagattttgtcagtcctctcctcaaatccctccaaataactgcccttttcttwccttctttctttatttttctttctttccttctttcttctttctgtctgtctgtctttctgtctttctttctctctctctcttttctttctttcttttttatttttttt

SEQ ID NO: 716229 - DNA, 650 bp, Homo sapiens
gcccaatgaccgctgggatgtttctcatcaaagagcacctcctggccagaccccaggccaggtgagcctatgaaagtcctcatctgttcagcattgtccagatgcttcctgagtgcctcttaagaagtagggactggccaggcatggtggctcacgcctgtaatcccagcaccttgggaggccgaggtgggcagatcacttgaggtcaggagtttgagaccagcctggccaatgtggtgaaaccccgtctctactaaaaatacaaaaaaattaacagggtgcggtggtgcacacctgtaatcccagctactggggaggctggggcactagaattgcttgaacccggaaggcggaggttgcagtgagccgagactgtgccactgcactgcagcctgggcaacagagcaagactctaactcaagaaaaaaaaaaaagaagtaggaactgagctactgagctgagcttytgggacctggggaagttcagtgactggtcagggagacagacacagagagaaaaatgccaaatccggctcctactactgcagaatagcctggcagtttcctctccatccacctctcaatctccagagggaaaagtaacccctattcagggctgacccaccccagggtttctaagctcagggctta

SEQ ID NO: 716230 - DNA, 573 bp, Homo sapiens
catcttttatttctttaaatctgattctttttaaaaatcccgtatattataattacagaatctaaagtctttgtgggtctaaatcagatgattattgtttctgctgactattgcccwtggtgtctcatttccttgtgtgtttgctgatctttgattgtgaagtcatgtttgtttgatcttactctgggaaacctaagtgaacatgcttatccctagagaggagcaggagttggttattctgggaccccttgaggtctcagcctaatggagaattctcatgttgagtaacatccaccctgccccttgtccaagttttagtctctttgttgagtgtagaattgatactgacgtctgctttcagggaaatccttcatggtctccttgctttttgtttaccattcactgttaggttttagctaatggtttttgtttttgtttgagatggagtctcactctgtcacccaggctggagtgcaatggtgcaatcttggctcactgcaaactccacctcccaggttcaagcaattctcatgtctcagtctctcgaatagcaaggattacaggcacctgcca

SEQ ID NO: 716231 - DNA, 3169 bp, Homo sapiens
atgggtaggtagaacgaccgcataatttgccaaattgggacagagaacagtaaacacaggcactattaaatacacttcaagcctgtaatcctagcactttgggagctcgagtttgagaccaacctgggcaacatatggagaccccgtctctaaaaagtaaatacaccagctgggcgcagtggctcacacctgtaatcccagcactttgggaggccgaggtgggcagatgacgaggtcaagagatggagaccatcctggccaacatggtgaaaccccgtctctactaaaaatacaaaaattagctgggcatggtggtgtttgcctgtagtcccagcaactcaggaggctgaggcaggagaatcactggaacctgagaggcgggggttgcagtgagccaagatcgcgccactgtactccagcctggtgacagagcaagactccgtctcaaaataaataaatacaccacttcagcaggcacagactggcactgtcctgggccaactgtcactgaggtcacctcaatagggagcttccttattattgaatgcgcacgtcccagccccagatgaatcagaagtcagtgctttttggacattgccccaaactttttgaaagacattatcatttgaatgaaaaccattgagaaatgagaaaatcttaacttcaaaaattttattttagtctcatccatcaagggcataggatacctgcatcagctgcaacttctgcttttctcctttgcctctgctcctttacccttaccgagggatatcccatacaggaagccgcctacaaccaaaagctatcttcgccttctgggttgagtgctcaagccaagtgtggaaatgcaagtcactgcttcggcagattgcaagctgcccaatataatctaagagccttctatgccagcctgcagactggagaaggttcactagtgtcacccacttgggttgtcacaggtagtaagcagaagctaactcatcaccgtagccaggtttstgtactttgtttccagacacgctacagcatagcacgttccaacatctgatcttaatctcattctgaagcacagtgaggaatcaagtgtgcttgttccagagctgattatgaactttctagaaaagcgggtcattatattgcatcctttcataggagctcattatcacgacctgaaagatacctactttaccttccctccaaaatatcacatttgaaactaacccaaacttttgagaaagcaattttaatggggtataactttaagcagttgctaacttcaaacgtggaacgctttgatgactgctggctctcatgctgtctcactgacatccacgtactatgctttagtggccatcatcgcacaaggaaactggtttcatactgaagtttaagactgagttctacacctgtgggcttctacactacggaacgggagtgggggggctgaaaagcttattaatatactttgtcttagcccacactgcaaatacagcactattatggcatcttaatcaagcagagagctgttcacatgctttctacagtatctttataaataaaaggttcctttatccaccaaacaacacctgaaatgatctaagttcaaaacattagtatacaaggacctagataatgggacatgtgaaaacttagtacattcaatttaggttttggacacttagttggataaacaagtttatttgtaaatttagtcaacatacataattgacctaaaaacttcagtaaattttaaaaccacttggaaggccatctctataaaaatgattttcccaggacagtaaccagatgtaacctaacccaacaccatcttaattggcagaggttcagtgggctggagttttgtgctcctcccccacaccaagtttttataatacaaatgccacaagaaaaagaacttcggtactgtttcctcagcagaggagaaaaactcaacctagttatgagaccaaccacacaacacaatgaaaagctgcactaactagttcagaatgttagttaagatgatgctggtgtgaataactcgttttttctagagcccttataaataaaatcccccagttagtgtttgcattatcagctagagggttaacatgtggtagaatgaggacttatgcaaggtataaatgcgcatagcattttactactatgagaacaagtgcagtcagaagaaaaccaactggactctaaattacacacaccttaatgacaagactccccaccacttgtgaatgtaaaacatttaatttaaaaatgttgatactacaatatataaaatagctattataaatgcacatagtgtattctatagctgccaggtttactttttttttttttaaaggaaactgtaagttacactgtggttaagacttgtatcttcacccttgaaaaagcccacattctatcacagtgatgtatggtcagacttaacagccccaattgttaaacacttggatcaagtcataaccagttttattgcaaaaggaccctgtacacatttatcaactctagtaccttaatagctacccaacaagtcattaacatacagaaacatgcatcatgagaagcaagaagtatcacccatcccttctgcatattagcaacttgtcactcctgagcaacagtgctcacatcactgaggtctgtgaacagtcacttttcgcattcatcctgagtgaaagatggaatgacttaagtacaaatgcaacatattataaacaatttcttacaaaaaaagtcacaaattaaaccaaagtattttacagaatttactacaaaacgccataaaaactgccttcacttaagctctctctccccgtatccggcgagccaactggatgtctttgggcatgatggtgactctcttagcgtggatggcacacaggttggtatcttcgaacagacccaccaggtacgcttcgctagcctcctgttgaggacgagagccgcactattaatcccactcggggagcggaaaccgcccagccctcccccggctccaggcctttgtcttacctgcagcgcaccgatggctgcgctctgaaacctcaggtcggttttgaaatcctgcgcgatctccctcaccaacctctggaagggcagcttccggatgagcagctcggtcgacttctgataacgacgaatctctcga

SEQ ID NO: 716232 - DNA, 3169 bp, Homo sapiens
atgggtaggtagaacgaccgcataatttgccaaattgggacagagaacagtaaacacaggcactattaaatacacttcaagcctgtaatcctagcactttgggagctcgagtttgagaccaacctgggcaacatatggagaccccgtctctaaaaagtaaatacaccagctgggcgcagtggctcacacctgtaatcccagcactttgggaggccgaggtgggcagatgacgaggtcaagagatggagaccatcctggccaacatggtgaaaccccgtctctactaaaaatacaaaaattagctgggcatggtggtgtttgcctgtagtcccagcaactcaggaggctgaggcaggagaatcactggaacctgagaggcgggggttgcagtgagccaagatcgcgccactgtactccagcctggtgacagagcaagactccgtctcaaaataaataaatacaccacttcagcaggcacagactggcactgtcctgggccaactgtcactgaggtcacctcaatagggagcttccttattattgaatgcgcacgtcccagccccagatgaatcagaagtcagtgctttttggacattgccccaaactttttgaaagacattatcatttgaatgaaaaccattgagaaatgagaaaatcttaacttcaaaaattttattttagtctcatccatcaagggcataggatacctgcatcagctgcaacttctgcttttctcctttgcctctgctcctttacccttaccgagggatatcccatacaggaagccgcctacaaccaaaagctatcttcgccttctgggttgagtgctcaagccaagtgtggaaatgcaagtcactgcttcggcagattgcaagctgcccaatataatctaagagccttctatgccagcctgcagactggagaaggttcactagtgtcacccacttgggttgtcacaggtagtaagcagaagctaactcatcaccgtagccaggtttgtgtactttgtttccagacacgctacagcatagcacgttccaacatctgatcttaatctcattctgaagcacagtgaggaatcaagtgtgcttgttccagagctgattatgaactttctagaaaagcgggtcattatattgcatyctttcataggagctcattatcacgacctgaaagatacctactttaccttccctccaaaatatcacatttgaaactaacccaaacttttgagaaagcaattttaatggggtataactttaagcagttgctaacttcaaacgtggaacgctttgatgactgctggctctcatgctgtctcactgacatccacgtactatgctttagtggccatcatcgcacaaggaaactggtttcatactgaagtttaagactgagttctacacctgtgggcttctacactacggaacgggagtgggggggctgaaaagcttattaatatactttgtcttagcccacactgcaaatacagcactattatggcatcttaatcaagcagagagctgttcacatgctttctacagtatctttataaataaaaggttcctttatccaccaaacaacacctgaaatgatctaagttcaaaacattagtatacaaggacctagataatgggacatgtgaaaacttagtacattcaatttaggttttggacacttagttggataaacaagtttatttgtaaatttagtcaacatacataattgacctaaaaacttcagtaaattttaaaaccacttggaaggccatctctataaaaatgattttcccaggacagtaaccagatgtaacctaacccaacaccatcttaattggcagaggttcagtgggctggagttttgtgctcctcccccacaccaagtttttataatacaaatgccacaagaaaaagaacttcggtactgtttcctcagcagaggagaaaaactcaacctagttatgagaccaaccacacaacacaatgaaaagctgcactaactagttcagaatgttagttaagatgatgctggtgtgaataactcgttttttctagagcccttataaataaaatcccccagttagtgtttgcattatcagctagagggttaacatgtggtagaatgaggacttatgcaaggtataaatgcgcatagcattttactactatgagaacaagtgcagtcagaagaaaaccaactggactctaaattacacacaccttaatgacaagactccccaccacttgtgaatgtaaaacatttaatttaaaaatgttgatactacaatatataaaatagctattataaatgcacatagtgtattctatagctgccaggtttactttttttttttttaaaggaaactgtaagttacactgtggttaagacttgtatcttcacccttgaaaaagcccacattctatcacagtgatgtatggtcagacttaacagccccaattgttaaacacttggatcaagtcataaccagttttattgcaaaaggaccctgtacacatttatcaactctagtaccttaatagctacccaacaagtcattaacatacagaaacatgcatcatgagaagcaagaagtatcacccatcccttctgcatattagcaacttgtcactcctgagcaacagtgctcacatcactgaggtctgtgaacagtcacttttcgcattcatcctgagtgaaagatggaatgacttaagtacaaatgcaacatattataaacaatttcttacaaaaaaagtcacaaattaaaccaaagtattttacagaatttactacaaaacgccataaaaactgccttcacttaagctctctctccccgtatccggcgagccaactggatgtctttgggcatgatggtgactctcttagcgtggatggcacacaggttggtatcttcgaacagacccaccaggtacgcttcgctagcctcctgttgaggacgagagccgcactattaatcccactcggggagcggaaaccgcccagccctcccccggctccaggcctttgtcttacctgcagcgcaccgatggctgcgctctgaaacctcaggtcggttttgaaatcctgcgcgatctccctcaccaacctctggaagggcagcttccggatgagcagctcggtcgacttctgataacgacgaatctctcga

SEQ ID NO: 716233 - DNA, 396 bp, Homo sapiens
tctttttttttttttttgagacagagcctcgctgtgtcgcccaggctggagtgcagtggtgtgatctcaggtcactgcaacctccacctcccgggttcaagtgattctcgtgcctcaccctcccgagtagctgggattacagacatgcgcccccacacctgactaatttttctatattttgtagagacrggatttcaccatgttggccaggctggtctcaaactcctgacttcaagtgatctgcctgtctcggcctcccaaagtgctgggattccaggcgcgacgaccgtgcccggccggctatgtcccatctctgccctactcacatgcactggaatggctgtgaccccctgtgccctccccggcattcctaggacttgacgtgagttgccctca

SEQ ID NO: 716234 - DNA, 433 bp, Homo sapiens
acaggtgtgagccacagcacctggctgttttttatttgtaggtacagggtctcactctgtctcccaggctgccgcacagtagcacaatcaaggctcactgcagcctcaaccttctaggctcaagtgatcttcctgcctcagcctctcaagtagctgggattacaggcgtgcaccaccacaccyggctaagttttatttttcatagagatgaggtgtcactatgttgcccagactggtctctaactcctggcctcaagcaatcctactggctcagcctctcaaagtgctgggattaaaggcgtgagccactgcgcctggcccatgtttgtcttaatacaaaacagttttcaaatactaaaagtcccttggtcctgtggcttttagactccattgtataactctgagggtgccgtgcactgcagtttgagaagca

SEQ ID NO: 716235 - DNA, 609 bp, Homo sapiens
gtagaagcctctgccgttgtcctggctgcccagtaggaayaggggttggaatctgttttcagattggtgcccatccctgatactgagcaaaacctaggttcctgaaccttgagcctgccttgtccaaattctctaggagtaattattctcttttcagattggtggtggacacatgtttagccctacttgctgggcagaatagaggaagaaccatagagttctgattgtttttcttcaacagtttcaactagttcttttgttttcagccccataccgtactcaggcctcctgaattgtctgatgccttgaattcctaatattttctggggttttgtaatgggaattgactcttgttgacttctctgcatgtgggcttagatttcagtatttgtcttttgggtcttacacttccaaatgttttaagtgcttcttgtttgctgtcatctaaattattttgccctaggcagatgcctgatgcctaccacgtgtaaacccttgctgggctggctctggtgatacaaaatgttatagttcctctgtctgcctacaagaagtgcatgtcagcttggggtgacagatatatgaagacatatttatatttgaacatgt

SEQ ID NO: 716236 - DNA, 631 bp, Homo sapiens
aaattccagctccactacttcttgctatgtgacccgaggcaacttgcttaatttttcccaacctccatttccttctctgttgattaggctcatgattccttttcacaggattttccttcccttacataaagctgaaggctgcctgtgttggaaaaagactgagttaagatattatgtgcaagtttgtacaaggcagcctcttctcaattgtggcagcactgtgcttgctctaagccctggatttgagagagagagaagcaaagctcttggagggagaagttaaagccccagttggttaatttccagcagtaaagccaagtctccctgagcccctttcctgtctaggaaaaggcgatcctaacacctttcctaggggtgctttgggtattcactgagattgtgcatataaaagmcctctgtggattttaaataatcatatagatgttcattctcactatcagaataatctcattatttccaaatcaggcctctcagcttagacttttctaagtccacatgaggtctccattttctcctctactaggagcagcagattaccaaagaaagaaaaggtagagatatgaacgtgcttcccattcactactccctacctgtttcttgcaatcgtgta

SEQ ID NO: 716237 - DNA, 631 bp, Homo sapiens
aaattccagctccactacttcttgctatgtgacccgaggcaacttgcttaatttttcccaacctccatttccttctctgttgattaggctcatgattccttttcacaggattttccttcccttacataaagctgaaggctgcctgtgttggaaaaagactgagttaagatattatgtgcaagtttgtacaaggcagcctcttctcaattgtggcagcactgtgcttgctctaagccctggatttgagagagagagaagcaaagctcttggagggagaagttaaagccccagttggttaatttccagcagtaaagccaagtctccctgagcccctttcctgtctaggaaaaggcgatcctaacacctttcctaggggtgctttgggtattcactgagattgtgcatataaaagccctctgtggattttaaataatcatatagatgttcattctcaytatcagaataatctcattatttccaaatcaggcctctcagcttagacttttctaagtccacatgaggtctccattttctcctctactaggagcagcagattaccaaagaaagaaaaggtagagatatgaacgtgcttcccattcactactccctacctgtttcttgcaatcgtgta

SEQ ID NO: 716238 - DNA, 1274 bp, Homo sapiens
cgattattactccaagtatctgaattacagctgccaaaaatcgttaaaattgttatatttgacaattgttttatgatactgagtccaaaagaagaaagataaaatagaagaagtttaccaaataggattctatgtagttcagtagcacacatcaaatcatatcacatttaatgttagattgttttagtgcctgggtaaactttttattcttgcactttactctgaatataaatatttgattttttttttttgagtcttgctctgttgcctaggctgaagtgcagaggaatgatcatacctcaatgcagcctccaactcctggactcaaggcatcctcttgcctcagcctcatgaataaataggctcamaggcctgtgctaagatgcccagctattttttttttgttgtttacttttgtagagacagcgtctcccaggctgttctcgaactcctgggctcaagcagtccttcctcctctgcctcccaaagtgctggaattacaggtatgagccactgtgacagacctgaagatttaattatatttgtcctctcattagtctgttttctttgatgaagtgagtaattggcccttttggaccccaggtggcggtgggaagtgtgagaagttgtttctgggtgggaggatgggagtaggcctctgaggtcacctgagagaagccatttactccagggcaggagtggccaaggaagtgtctacacactcaatcacatgtgaactcattctggggctggcctggggctcctccatagctctatgagaacagcctggaaggactttcccacatgaggcttgagacccagacctgcagaaggtgaggggaagctggtaccaggcaatgtccagtctgagcacaagagagcctcccaagaagacaagagagaacaaaatcaccatgggatattagccacatccagaggtcaccaccaggcttgcatctgtgtctggccctcagccccttccctcctcctgtcccccttctcatggagaaaactcagagccactatagggaagggagtagcaaagaagaagggcaaggatgcctactcttcccggctcccagagttcctcctccaacccacactcccagaagcaggcctcagctgggagtgagagggagtctcaaatgggaaaactatggaattgactccataggacttttaattcaaaaacaagaaggttgcttgtctgaaaatgaccctaagtctttttgtcatctgtctctgactggaaaagttatgaaacctcggcaaat

SEQ ID NO: 716239 - DNA, 1274 bp, Homo sapiens
cgattattactccaagtatctgaattacagctgccaaaaatcgttaaaattgttatatttgacaattgttttatgatactgagtccaaaagaagaaagataaaatagaagaagtttaccaaataggattctatgtagttcagtagcacacatcaaatcatatcacatttaatgttagattgttttagtgcctgggtaaactttttattcttgcactttactctgaatataaatatttgattttttttttttgagtcttgctctgttgcctaggctgaagtgcagaggaatgatcatacctcaatgcagcctccaactcctggactcaaggcatcctcttgcctcagcctcatgaataaataggctcaaaggcctgtgctaagatgcccagctattttttttttgttgtttacttttgtagagacagcgtctcccaggctgttctcgaactcctgggctcaagcagtccttcctcctctgcctcccaaagtgctggaattacaggtatgagccactgtgacagacctgaagatttaattatatttgtcctctcattagtctgttttctttgatgaagtgagtaattggcccttttggaccccaggtggcggtgggaagtgtgagaagttgtttctgggtgggaggatgggagtaggcctctgaggtcacctgagagaagccatttactccagggcaggagtggccaaggaagtgtctacacactcaatcacatgtgaactcattctggggctggcctggggctcctccatagctctatgagaacagcctggaaggaytttcccacatgaggcttgagacccagacctgcagaaggtgaggggaagctggtaccaggcaatgtccagtctgagcacaagagagcctcccaagaagacaagagagaacaaaatcaccatgggatattagccacatccagaggtcaccaccaggcttgcatctgtgtctggccctcagccccttccctcctcctgtcccccttctcatggagaaaactcagagccactatagggaagggagtagcaaagaagaagggcaaggatgcctactcttcccggctcccagagttcctcctccaacccacactcccagaagcaggcctcagctgggagtgagagggagtctcaaatgggaaaactatggaattgactccataggacttttaattcaaaaacaagaaggttgcttgtctgaaaatgaccctaagtctttttgtcatctgtctctgactggaaaagttatgaaacctcggcaaat

SEQ ID NO: 716240 - DNA, 1274 bp, Homo sapiens
cgattattactccaagtatctgaattacagctgccaaaaatcgttaaaattgttatatttgacaattgttttatgatactgagtccaaaagaagaaagataaaatagaagaagtttaccaaataggattctatgtagttcagtagcacacatcaaatcatatcacatttaatgttagattgttttagtgcctgggtaaactttttattcttgcactttactctgaatataaatatttgattttttttttttgagtcttgctctgttgcctaggctgaagtgcagaggaatgatcatacctcaatgcagcctccaactcctggactcaaggcatcctcttgcctcagcctcatgaataaataggctcaaaggcctgtgctaagatgcccagctattttttttttgttgtttacttttgtagagacagcgtctcccaggctgttctcgaactcctgggctcaagcagtccttcctcctctgcctcccaaagtgctggaattacaggtatgagccactgtgacagacctgaagatttaattatatttgtcctctcattagtctgttttctttgatgaagtgagtaattggcccttttggaccccaggtggcggtgggaagtgtgagaagttgtttctgggtgggaggatgggagtaggcctctgaggtcacctgagagaagccatttactccagggcaggagtggccaaggaagtgtctacacactcaatcacatgtgaactcattctggggctggcctggggctcctccatagctctatgagaacagcctggaaggactttcccacatgaggcttgagacccagacctgcagaaggtgaggggaagctggtaccaggcaatgtccagtctgagcacaagagagcmtcccaagaagacaagagagaacaaaatcaccatgggatattagccacatccagaggtcaccaccaggcttgcatctgtgtctggccctcagccccttccctcctcctgtcccccttctcatggagaaaactcagagccactatagggaagggagtagcaaagaagaagggcaaggatgcctactcttcccggctcccagagttcctcctccaacccacactcccagaagcaggcctcagctgggagtgagagggagtctcaaatgggaaaactatggaattgactccataggacttttaattcaaaaacaagaaggttgcttgtctgaaaatgaccctaagtctttttgtcatctgtctctgactggaaaagttatgaaacctcggcaaat

SEQ ID NO: 716241 - DNA, 912 bp, Homo sapiens
tgtatttccaaaaattaaaacattttttcaacaaagtgagtaaatgaatatggtctaaatcatatgtattagaagataaattaaggaataatataagaccagttttttattgtcactgaccaataaattcatgttcaaagcattgcacaatgagtccacctcaacgatttttatactgtctcccaaaatgaaatacctcattttcagtctttgttctccttaatgttctctacccactccagtrtcactctcaagtttgtacagaatacacgttctgaaattgatttactcattaaaatgaaatccttgaagctctcattttattacccataaataagccaaatcttgcctcttgctttgttgtgaaaattaaatgaatgaatcagtctatgataagcaaatggctctatgcctggcaaatagggagcaattagtaaatgatggtgaacatgagtcatgacattagaatatctctttcacctctgctgttttcgtcggcttgctatatcaaaacacacttattatctgattgcgcatatcttattcagtcatcaagacacctagaagataccattttgccagtgagctttttcatattcatttctttcaaataatcattaactaaatttctcctacatgcaggtaattatatcatgcagactaatcatgagaatttacagggatctccatttggtaaactggttgtgtttcatgctttcactgaatttttaggaatttgaaaatacatcacattcagattacagagtcaggtagcttacctttttgtcatatttcatcatgtctatatatttatatgctttgtctactccatacaatgtgttgctttagtttatatgttgataaagttatctaacattattttccatattctctgagattgtgtctatgtac

SEQ ID NO: 716242 - DNA, 912 bp, Homo sapiens
tgtatttccaaaaattaaaacattttttcaacaaagtgagtaaatgaatatggtctaaatcatatgtattagaagataaattaaggaataatataagaccagttttttattgtcactgaccaataaattcatgttcaaagcattgcacaatgagtccacctcaacgatttttatactgtctcccaaaatgaaatacctcattttcagtctttgttctccttaatgttctctacccactccagtgtcactctcaagtttgtacagaatacacgttctgaaattgatttactcattaaaatgaaatccttgaagctctcattttattacccataaataagccaaatcttgcctcttgctttgttgtgaaaattaaatgaatgaatcagtctatgataagcaaatggctctatgcctggcaaatagggagcaattagtaaatgatggtgaacatgagtcatgacattagaatatctctttcacctctgctgttttcgtcggcttgctatatcaaaacacacttattatctgattgcgcatatyttattcagtcatcaagacacctagaagataccattttgccagtgagctttttcatattcatttctttcaaataatcattaactaaatttctcctacatgcaggtaattatatcatgcagactaatcatgagaatttacagggatctccatttggtaaactggttgtgtttcatgctttcactgaatttttaggaatttgaaaatacatcacattcagattacagagtcaggtagcttacctttttgtcatatttcatcatgtctatatatttatatgctttgtctactccatacaatgtgttgctttagtttatatgttgataaagttatctaacattattttccatattctctgagattgtgtctatgtac

SEQ ID NO: 716243 - DNA, 912 bp, Homo sapiens
tgtatttccaaaaattaaaacattttttcaacaaagtgagtaaatgaatatggtctaaatcatatgtattagaagataaattaaggaataatataagaccagttttttattgtcactgaccaataaattcatgttcaaagcattgcacaatgagtccacctcaacgatttttatactgtctcccaaaatgaaatacctcattttcagtctttgttctccttaatgttctctacccactccagtgtcactctcaagtttgtacagaatacacgttctgaaattgatttactcattaaaatgaaatccttgaagctctcattttattacccataaataagccaaatcttgcctcttgctttgttgtgaaaattaaatgaatgaatcagtctatgataagcaaatggctctatgcctggcaaatagggagcaattagtaaatgatggtgaacatgagtcatgacattagaatatctctttcacctctgctgttttcgtcggcttgctatatcaaaacacacttattatctgattgcgcatatcttattcagtcatcaagacacctagaagataccattttgccagtgagctttttcatattcatttctttcaaataatcattaactaaatttctccyacatgcaggtaattatatcatgcagactaatcatgagaatttacagggatctccatttggtaaactggttgtgtttcatgctttcactgaatttttaggaatttgaaaatacatcacattcagattacagagtcaggtagcttacctttttgtcatatttcatcatgtctatatatttatatgctttgtctactccatacaatgtgttgctttagtttatatgttgataaagttatctaacattattttccatattctctgagattgtgtctatgtac

SEQ ID NO: 716244 - DNA, 1270 bp, Homo sapiens
gggtccctttatttttttaagtatttagctggtaattattaaaccacatctttacatacaatataacacacacacacacaaacacacaaatctcaaaaataaaaactaattattagagatgctgcagtctaaaccagagtgcaaaaaagtccaattatgaacttcaagattgttttatttaatctcatatgattctaaagaatcaaatagaggtttaaaaatcagaaatttcacatgaaagtcaggatagtggcatttcttaaattttatgttgcattgtgataacattttcagcgatagcaagcagatggatctaagtagttgtacactaggcttgagctctccattttgacagcttcattactcacacaatgtatgtgcatgccctcttgaccagctaactgtcacttcattctcttggtccttaaaacatttttttttctccttgtaggttgagatttggttaacctatgctgataaaaataaatctttctatatgcctgataattgcaatataatttattaattgcactgtggaaaatgcagagttgccttttccacagtgacattaataaaatgcactacttcataattagttcctctctttttccctgtctatctctgcctagaaaaagtataatggttccttagactcctcttaatgattgcacctgaaaamcgtaagacaaagctttgaaatgactgcatttaaaatttgattaggatactggacaagttctccctcatgtagaagaagttctgtttatgtgtttgagggaagaggggacaattttttataattcttctatttatacatactcacgtaagatgctttataaatgcaattcaattgacttacctcaatagttgtaattatgaagaatatgctttaaagtctatttcattttatctaaatttaattatattctctataaacagataccaggactaacagcacttttgttttcatatcatacattcagaattgtagtgccagtcaaaataaaggctgtgcataattattcatgtttgacttgaattatgaaaactgaatacatggatgtaaagtagacaaggaaaagttagtttaggtggggatagcagcgtgtgcacaggcatagggctgtgaaaggtacgctatgtctcaggaagagaaagcatttttatcatagactaaagtaaacgatagtgagagagtgatggacactgcaactgtttgctgaagaatcaatggacacagagacattgctctcaaaataaacctcatgta

SEQ ID NO: 716245 - DNA, 1270 bp, Homo sapiens
gggtccctttatttttttaagtatttagctggtaattattaaaccacatctttacatacaatataacacacacacacacaaacacacaaatctcaaaaataaaaactaattattagagatgctgcagtctaaaccagagtgcaaaaaagtccaattatgaacttcaagattgttttatttaatctcatatgattctaaagaatcaaatagaggtttaaaaatcagaaatttcacatgaaagtcaggatagtggcatttcttaaattttatgttgcattgtgataacattttcagcgatagcaagcagatggatctaagtagttgtacactaggcttgagctctccattttgacagcttcattactcacacaatgtatgtgcatgccctcttgaccagctaactgtcacttcattctcttggtccttaaaacatttttttttctccttgtaggttgagatttggttaacctatgctgataaaaataaatctttctatatgcctgataattgcaatataatttattaattgcactgtggaaaatgcagagttgccttttccacagtgacattaataaaatgcactacttcataattagttcctctctttttccctgtctatctctgcctagaaaaagtataatggttccttagactcctcttaatgattgcacctgaaaaccgtaagacaaagctttgaaatgactgcatttaaaatttgattaggatactggacaagttctccctcatgtagaagaagttctgtttatgygtttgagggaagaggggacaattttttataattcttctatttatacatactcacgtaagatgctttataaatgcaattcaattgacttacctcaatagttgtaattatgaagaatatgctttaaagtctatttcattttatctaaatttaattatattctctataaacagataccaggactaacagcacttttgttttcatatcatacattcagaattgtagtgccagtcaaaataaaggctgtgcataattattcatgtttgacttgaattatgaaaactgaatacatggatgtaaagtagacaaggaaaagttagtttaggtggggatagcagcgtgtgcacaggcatagggctgtgaaaggtacgctatgtctcaggaagagaaagcatttttatcatagactaaagtaaacgatagtgagagagtgatggacactgcaactgtttgctgaagaatcaatggacacagagacattgctctcaaaataaacctcatgta

SEQ ID NO: 716246 - DNA, 586 bp, Homo sapiens
ttgactttatattattgaccctattccacatattaggagtaaaaatccatttatgactaaagagcaagtattaaaatgagaatgatgtccttcacaggacacaaagataaccactgataataaacagaatataagtccagagctcaaaaacaaaaattccccaaaaacgtctggtttgaatctggaaatcataagamtatacatggcaattaaagtcaggtttgtatatgagatttcctaaggagagaaacagaaagaaatagagagagaaaagaagagaaggacactgcagagggccctggtaactcaagcttttaaggaatatctaaagaggtaaggaaaaaattgaagaggttgaagaaggaacggaaagcagttgtaccaaagtctaagaagagaatttcaagggatgatacactaaatgtgaccacatgagatcattgcagtcctatcaagaggaggagaagtgtagtgtcttcatatgaagatgtcctggagaatatatatatattttgctttgtaagataaactgtctaatatctttcaattgaaaggattatgtaggttataaaaacttaaaaattgg

SEQ ID NO: 716247 - DNA, 586 bp, Homo sapiens
ttgactttatattattgaccctattccacatattaggagtaaaaatccatttatgactaaagagcaagtattaaaatgagaatgatgtccttcacaggacacaaagataaccactgataataaacagaatataagtccagagctcaaaaacaaaaattccccaaaaacgtctggtttgaatctggaaatcataagactatacatggcaattaaagtcaggtttgtatatgagatttcctaaggagagaaacagaaagaaatagagagagaraagaagagaaggacactgcagagggccctggtaactcaagcttttaaggaatatctaaagaggtaaggaaaaaattgaagaggttgaagaaggaacggaaagcagttgtaccaaagtctaagaagagaatttcaagggatgatacactaaatgtgaccacatgagatcattgcagtcctatcaagaggaggagaagtgtagtgtcttcatatgaagatgtcctggagaatatatatatattttgctttgtaagataaactgtctaatatctttcaattgaaaggattatgtaggttataaaaacttaaaaattgg

SEQ ID NO: 716248 - DNA, 586 bp, Homo sapiens
ttgactttatattattgaccctattccacatattaggagtaaaaatccatttatgactaaagagcaagtattaaaatgagaatgatgtccttcacaggacacaaagataaccactgataataaacagaatataagtccagagctcaaaaacaaaaattccccaaaaacgtctggtttgaatctggaaatcataagactatacatggcaattaaagtcaggtttgtatatgagatttcctaaggagagaaacagaaagaaatagagagagaaaagaagagaaggacactgcagagggccctggtaactcaagcttttaaggaatatctaaagaggtaaggaaaaaattgaagargttgaagaaggaacggaaagcagttgtaccaaagtctaagaagagaatttcaagggatgatacactaaatgtgaccacatgagatcattgcagtcctatcaagaggaggagaagtgtagtgtcttcatatgaagatgtcctggagaatatatatatattttgctttgtaagataaactgtctaatatctttcaattgaaaggattatgtaggttataaaaacttaaaaattgg

SEQ ID NO: 716249 - DNA, 586 bp, Homo sapiens
ttgactttatattattgaccctattccacatattaggagtaaaaatccatttatgactaaagagcaagtattaaaatgagaatgatgtccttcacaggacacaaagataaccactgataataaacagaatataagtccagagctcaaaaacaaaaattccccaaaaacgtctggtttgaatctggaaatcataagactatacatggcaattaaagtcaggtttgtatatgagatttcctaaggagagaaacagaaagaaatagagagagaaaagaagagaaggacactgcagagggccctggtaactcaagcttttaaggaatatctaaagaggtaaggaaaaaattgaagaggttgaagaaggaacggaaagcagttgtaccaaagtctaagaagagaatttcaagggatgatacactaaatgtgaccacatgagatcattgcagtcctatcaagaggaggagaagtgtagtgtcttcatatgamgatgtcctggagaatatatatatattttgctttgtaagataaactgtctaatatctttcaattgaaaggattatgtaggttataaaaacttaaaaattgg

SEQ ID NO: 716250 - DNA, 2030 bp, Homo sapiens
gtaatatatttctgttaggttcactgacttcctgtagttcctctagtcaattgttttgtttattttttacatctatctcttcctactctttacccaaaataactttccctccaatgggaggcataagagagggccatgggacaagagtgattttcactgcgacctgggctttctcttatggagcatggggaagcatgagagaagacaggacaccagctcagggctcgcgtaatttacaaagttaagatgaacttcactccagggggagcagttttgctgtactttagccctcagtggagctatggacctgcatttattggtttacttttctatgctgaatcctactagtcctctttccaagcccaacagccacatcatatgtcttccacggtctttagaaagcagctttcttgtgtcttaacacaggtcaggccaagtgctgcagccagagctctgtaaactcgggtagtggagagggaaattgggaggatttaccttcctggtattttctgtatgatacagacaaccctctgattagctctgctgatggctgccctctagacaactccactgggatgattaggaccggctcactctgaacttaatgcagtttcagaacctatggctcctatctctgcttacagctttctcacctgtaagtttcatctgtggtttcctgtgtcccatatatccattaataaaatcttaccttttctgcctttcaggaattctccaaaatatgttatctactggtgacagccactagggttttcacgactgatatgaattatttcatggcaaacaaaaatttttatacttatatcactggtgtgttgagagaacctatagatagatacgtgctctcaatacattattttacrctgaatgcatatacacccacacatatacacatatcgatatgctcacatatatatctaatagaacacatgaagtagtttatgcaaaatttccttagataatgatagcattggactgaaataaggacaacattattctgattgaacaattatgtcaaggaaaaaatttttaatccttgtgaggcacagtcacttattttatgtatcactttaaacaagggaacatgcaaatcaaggtgatgggatcaaagtgatgacaaaacataaactatgacagaaaatagcatgaaaacagtaatattaacagacgtatcctgcaaaatttgagcaaatttttgcaaattactcaaaaaattttgcaaattactcaaaaaattttgcaaattactcaaaaaaaaatttgagtaatcctgcaaaatttgagcaaactttaataacataaaaaagagaaaaaaaaacaccaagctgtagaaagatcatgttattccatacacataaagttcaatcccaagaaatatcaaggtctttcttatattttatttttctcatttagcaagagaaaaccaggagtagttgctgatctgggtaatgtcgtacagaaattcgcattcatttttttagtatcactggttgctatgcactttgtcataaaagtttaatatactgactggcagcaaataaaaaattgcagggagccaataccattccttcctcatctagagactaaaagctagactaagccatccaataaaactcagagctgttcctttaattttctcatgagtcccttcagatgacttaaacaaatggatgtatttgcacatgattatgtaaagttagatagaacctacattaggccagttacagtggctcacacctatcctttcaacattttgggagaccaaggtgggaggattacttgagcacaggagttcaagagcagcctgggcaacatagtgagaccccatctctgcaaaaaataaaaattagctgggcatggtggcacatgtctgcaacttcagttactccagaggctgagatgggagcattgcttgagcccaggaggtcgaggctgcagtgagttgtattcctaccactgcactccagccacagagcaagaatctgtctcaaaacaaaaaacgaacaaataga

SEQ ID NO: 716251 - DNA, 3770 bp, Homo sapiens
acaggaagatgggtgacttttctaattagtatcctggggcaaaggctacagcttgcaggtgatccacattcttggcttcagttttctctttttcactttccttatcatcagtgtgcccaccagggatttgtgttcactctcaccactcctgcacttamcgcaggaagtctgcatgaattagaatgaggcagcattctctcagccctgtcttgctaaattctagagtggatgaaaggttattctctatgtggttcaacaggtaaatccctgctcaaacaaactcccaacactgctcaacactcccagcaaaaacgctccaaggtcaagttgggaaagctagatgaaataggaagtcttactttgctgtcaaagcccaaactttttcacctaatataatactaacaatatttagaacgtattttaacatttaatatttaaattctcacctcattttttgtagttgttctcaatttggttagagctcagaagacaggagtggaataaatattagcacttcaccaatccttaacaaaaaaataagaaaaaacatttttaaaaatctgccataacaaagatattatgcaaactcacaaagggaataaaagtcccactcacataactaaaaatgtgtcctaactacaagcccatacaattaaaaaaaaatagtcacacacccccactggattttaattttcagaatatagtataaaaaaataaagttatttatgtttcaaagcatcattctgtggcagaattgtctcttatttggattagtacaagcaaaacgagatcatgatcctttttgtagatttgttataggcgaaaactacttggttcagaagtacaattatttttcccctttggcgaatcaaagactctgcatataaacactttgagggttaaagctccaatgctcattttgctttgaaagcttcaagagtcttttgcagaccttctgcccataggccagtatttgatagaaaccttgtgctttagggagttttaaatgtgtccagtaactttctccaattatcccttgttgaattagcggaatcaatagggcacccaaagaggcccttgtgaatctctgcttgataccttggggtttcttttttaagtttcttaaaccttccagacttgcttaatcctgcgattttcaagctaaaatggctgttgtgtgtaatgcattgttgtacaacgctttcaaggtctctgataactaactttccgcaatgtcctttgttttattaaccagaccactggggctatcccatattatgcctgtatttgctgtgctttccctataggctcaaaggcagccatttaagtcacccttaaatgtttcaattatatacaagatccactttagctctgcgattgtagggccatcagcctttccaagagttgacatacctagagaccaactgggaagttgcaggagataatagtcatgggtctgctaattcagtgagaaacaactgtgcaaaactgagaggtattttcattgtatgctggtcaccttttctcactgccttgaattgtactttccttcttacctaatcatgcttagtgtagtgtcctacttcagttttctaacattaacttgtaacttagtaaaccccaggaacccaaaaataatcctagacctaatattttcacaaaaatgttcttctagcttgtaagaaaaactttgaagcttcattttaaatgtccatcttattaaacctgtagatatttttggctttccagagaagtatagaaaattctgataattacaaagtgtgaagtaagacctgaagcagaggctaatgagagagtgcattaatagcatacatttcttcctggtgtattttattttttctgaccctaagaagctgcacctgcgagttggaggggccaaagagggaaattattacttagattttgctttcgtaaatgattttctatagataaaataccatggagagcaacttccatgatactttatacttatatcttatgtcagaggaggatatttgaatgattagttgttagaaaaaatatattgaggaaaaactatggtccctttagctctgtgcacccatgacaatctactgcttttcccaaaaattatttacaaactttatgaagagtaatgttgtaattatttacataatttatataaattttaacttgcatattagtgtagagaaataaattctgaaatacaactgtcatattttatatttttcataccctttgagaactttgggactcactgaatcaacatgtaaagtatgtgcacgtattcagagtaagactgcttagctttgctattctaagtgattatggatgcttctggttgttataaatttgcatatgtaccagtctgttttcacactgctaataaagacatacgtgagactgggtaatttataaaggaaagaggtttaatggactcagaggcctcattatcatggcagaagagaaatgaggcccaaagtcacatcttacatggcagcaggcaagagagcttgggtaggggaactcccctttttaaaactgtcagatctcctgagacttatccactatcatgagaacagcatggggaagacctgcccctatgattcaattacttccaccaggtccctcccacgacacatgggaattatggaagctacaattcaagatgagatttgggtggggacacagccaaaccatatcagcctctatggcattttctttttcttggtattactcctgatgattgtatgtgtgtgtgtgttgatgtcctggtctgaagtaaacttggcaataggacatgagatcaagtttataattattctaattattttgaaatatccataaataaattatggggggaaaatatttttggagcagaaacgatttttaatataaatgtatgttttctagggtaattttctcaggtttctttgcataaaatgagctaatcactagaaccaaatcaccatctgccaagttttacaatgtgcaaaatcccaagtactatattagtttctgtggaatatcttaaacatgccctgggaccactgtcataataatatatatgccaattataagcaaatctaccagccaacacagcaatttttcctacatttgttagcactttttgttactttgcattataattatctttttacatacctgtcttctcccttagactcagaagtcagatgtaaaaaggtttagcacataacatgcactcaatggtttctttgtttaatgaataaataaaattatcaaatgaatgtatcattttatttttactgaaataaaatttgtatttattttcaaatagtacttatttcatgttgaaatgcaatttgtattttttctccaacaactcatggaacgaagggaaacacaacctattttcagagatgataagattatttggcaaaagctttgccacagatgtttcacccaatccttgacttttcactcttcccctaattcatctttattattcatctcagcatctgatcacacatttgacttctgctctaaaacttactccacaattctaaagtggttttagagagccttttctggtttgtatatttcacaagtaacaattcaatgattacacctaaaaaaaatccaagagctgcttccttgtcccatttcagcaaattcttccttgcttcctaggtttgtatgtatgccatataaagtttggatttaaatttcaaaactcaccatttttagttaaaatattaatagtctttagtatccatttcttcagtaat

SEQ ID NO: 716252 - DNA, 634 bp, Homo sapiens
atgggcataatgagaatacctatggctttgagtaatttggaggattaaaagcaaacatatatgaaaagatttttttccctaaagaggtggctcaatgagcattcagtaaatactagctattattattattttttttttctgcctgcttgtcagtagggaaggagctaagtttctgatcctagtttaaaagcccttaaaggtgtttttaggacatttaaaaaaagtaatacctgcacataatacaaaattcaggtagcacaaataataaaaataagcagctcacaaaatgatgtatcctggactgttcaaggcagcagtattcatagtagccctaaactggaaatgacccaaatgcccaccactagtggaatgaaaaaagcaactgtagtatgttcacacagtagaacaccattcaataaggatagtaaactgtctgcaactatacgcagcaatgttgatgaatctcctgaatctaatgctgagcaaaagaagtcagaaacaaaagcacacatactgtaaggttctatttatgtaaagaattaaatcattctacrtatttgctactttgtatccttgacctaaatctctgcattcctccctcccaccctgactgactctggtaaccactgtttca

SEQ ID NO: 716253 - DNA, 907 bp, Homo sapiens
ggctctacattaaacaaacgacaaaggcatgtttgtttttatcaaaatgttttagggtagatttgtatgtatgcgttatttctttaaccaatgttttaatcagttaaacagctgctattattaatgtgctggttgaaagtgtttttcttaaagtacaaatttaaaatagaatgagaaaagatcagacttgagaagaaggaaagtcacagtaggacatttggaatttattctctagaccagaggtctgcaaactccagcctacaggccaaatccatcctgcagcttatttttataaataaagttttattggaatacagccaggcccatccagttacagaattgtctatggttgcttccactctacaatggcagatttgagtagctgttacagagactatacgcaagtgtgcaggagagtttagaccacacctacaggaaaggtrtgaaatactaccctccttcctagacacttccccaaacaaaaaacttaagtcagtgtgggaacaaacactgttgccccacagagcactaataaaggcagataaatgactgagaaaaccctatcccttggggacggaggccagaaatggcaacaccaataccattggaagtctcctacttctaggtaaggacatgaaattctctcatatgcaacacccatcacagatacaaggcaggagtttgattttcatggggaggaggaattggaacactgagaataccccacccctaaggcccaggcacactggcctatatgggtctgtggctgaactgggacaaaagagaagccctaaaaccaccagtagcaagcattgagtaacaagcagtagcagtattacagcaaaacaggcacagctgaaagcagagagtggggcattaaaacccttcagcgtctcagctactatgc

SEQ ID NO: 716254 - DNA, 658 bp, Homo sapiens
ttatattgtacacgtgattataaatcttgtatctaagaatccttgcttcatttcagcttcagtagtcaattaaaaaattctgaaacttggctccaagtagcagagagtgaaacactgtaagggaacaaacacatgttcaggaagtaattggagtgccctttatgaagtgcaaacacaggatagttatgactgcatttttgctggctggacttcagaaatgaagtcagtcatatttaattgcagattagataccttgaagggcaatggttacagttaatgttgttgaacactgattcatgattaatattgctgaaagtctgattctcatgaaatgcactattgtaagacaatattaaattataaagtgttctttgacaagtgtcacaaggcacaaactttctgccacaagtgcagagagctgcagagaaatgttacgagccttgtaaaacaatgaatttctsccagagagatggacagacatgcaacaagatggacagcgatgatgtggggacaatgagagcgcacggctgtcctggcttctgtagtatctctaagggtgggcagtacagggttcccttgggtcagtactttccaaggacctgaagagagaaaactgacacattaaaaaattatactattttagagtcagacttcaatc

SEQ ID NO: 716255 - DNA, 616 bp, Homo sapiens
aaaagacaatctctggatacccaaccaaaactggtcacccagcctcttgctatcacatcaccctatttcagtcacaaaacagtgctggtcatagagaaggcactcaataaatatctgctgaatgtatgaggattatgaaaagcttattacagttactagaattttagcactagacagtccccttgaaaaagtatatttcatcttccttgtttacatctgagaaaacctggatgaaaagacataaaacttaaatgagtaacttccaaaatctacctcagcccccagattttcctctaatataatataattacggttgcccatctttagattcttatggatggctcctggaaaatagtagaggagatgaggctatacaagcaccaaatcattaaaggctttgaatgccatggaaaagaaaatatcactaaataaaggtcttggaaacaagagagagatgatctgagagagagagakatatatatatatgatacataataatcagatatatatcagatatatagatacactatatatatttgatagatgatatatttgatatatctatataatacatatctgatatatctatattttagccttaataaatttcaaaaat

SEQ ID NO: 716256 - DNA, 677 bp, Homo sapiens
ctatcctggctaacatggtgtaaccccatctttactaaaaatacaaaaaaattagccgggcgtggtggctggcgcctatagtcccagctactcggtaggccgaggcaggagaatggcgtgaacccgggaggcagagcttgcagtgagccgagatcgcgccactgcactccagcctgggtgacagagcaagaccccacctcaaaaaaaaaataattatayacacacacacacacacacacacacacacacacacacacacacacacacatataacaaatatgtatagctttactgcttaatagtcatgtatcatttttgagcctcagtttttgtcatctgttacaatgggaatggtactcttcaaatggttattttgagaaatattttcagtatattgaagcccctcggtcacattttgtttgtatgctggtgtatatgactgttttcttggattcttaaattattcctctcagactatacgttcaaaatgaactgaatgaaatgctgttggatttacatcgccataaaaatgaaacaatcaactacctaccactgaaccaaattttattttgaactttattggtataatatgtcagtgacagaagagaaaagatttcagtgcaaccgctttacattccaaacaatgcataattagggctcagagcaagaatcaaaat

SEQ ID NO: 716257 - DNA, 677 bp, Homo sapiens
ctatcctggctaacatggtgtaaccccatctttactaaaaatacaaaaaaattagccgggcgtggtggctggcgcctatagtcccagctactcggtaggccgaggcaggagaatggcgtgaacccgggaggcagagcttgcagtgagccgagatcgcgccactgcactccagcctgggtgacagagcaagaccccacctcaaaaaaaaaataattatacacacacacacacacacacacacacacacacacacacacacacacacayatataacaaatatgtatagctttactgcttaatagtcatgtatcatttttgagcctcagtttttgtcatctgttacaatgggaatggtactcttcaaatggttattttgagaaatattttcagtatattgaagcccctcggtcacattttgtttgtatgctggtgtatatgactgttttcttggattcttaaattattcctctcagactatacgttcaaaatgaactgaatgaaatgctgttggatttacatcgccataaaaatgaaacaatcaactacctaccactgaaccaaattttattttgaactttattggtataatatgtcagtgacagaagagaaaagatttcagtgcaaccgctttacattccaaacaatgcataattagggctcagagcaagaatcaaaat

SEQ ID NO: 716258 - DNA, 677 bp, Homo sapiens
ctatcctggctaacatggtgtaaccccatctttactaaaaatacaaaaaaattagccgggcgtggtggctggcgcctatagtcccagctactcggtaggccgaggcaggagaatggcgtgaacccgggaggcagagcttgcagtgagccgagatcgcgccactgcactccagcctgggtgacagagcaagaccccacctcaaaaaaaaaataattatacacacacacacacacacacacacacacacacacacacacacacacacacatataacaaatatrtatagctttactgcttaatagtcatgtatcatttttgagcctcagtttttgtcatctgttacaatgggaatggtactcttcaaatggttattttgagaaatattttcagtatattgaagcccctcggtcacattttgtttgtatgctggtgtatatgactgttttcttggattcttaaattattcctctcagactatacgttcaaaatgaactgaatgaaatgctgttggatttacatcgccataaaaatgaaacaatcaactacctaccactgaaccaaattttattttgaactttattggtataatatgtcagtgacagaagagaaaagatttcagtgcaaccgctttacattccaaacaatgcataattagggctcagagcaagaatcaaaat

SEQ ID NO: 716259 - DNA, 1571 bp, Homo sapiens
ggttaaggcttcaatatatgaattgtggggagggagagacaattcagtccatagcacctgcccctttactttctccttgaaatgttgtcatttgaagatacaatgtatggagctattgcaaccaacagggttccatgagggggaactttgctgagacacagaggacggccaagtggcagaatgaagaacattggtctttgataacaataaggatccaccaaaccaaccctggagctaccatcctccatccttcttgtcatttataaaattgtttaagtcactttttaatcatctccattggcaatattaacacaataatgttatgtaacaaccaaactcaaaatctcagtgtcttacaacaacaaaaacattctctagtatgtgggtctgcaggttgggaggtctctactgagccgagctgagcacctctgcatcaggccacagtcacctgggcagggctctaggctatggtttaggcttcaggtggtgccacttgcctcccaaattcctgggaccaagagctacccaccctgggcttgttcttatgacaaagcaagtcaatggccaaacaaccattttaatgggttggaaaagtatactccacctgcagtggggaaggtattgcaaagttaagtgacaaaaggtgtggctgtataatcccataacaggggagtgaagaattggcaccagtaatttaatctaccatttcagctattatgttaagcaatagactttaatttcttcatgattctggaggctggaagtccaagatcaaggtgccagcagggttgctattaccggggagtaaagaattggcaccagtaatttaatctaccacttcagctattatagtacctacagtggagagcatcatgactagttcactatcatgtgtatgactactagatgaagcaccctaaagcagaaaggacacagaccttctatttacatagagctctgttcaaacccagctcctggcatttctaactaaatggcttcagtccatttatctacattctctgagccttggtttcctcagctataaaagaagttttacaaatcraatgagaaagcattaaaagacagctcgcagaggccctggtacacaggaggtaaacaataaatctgtttgccttccattcttttattaatggaagcactcaaagtacactttatagaaaaacatggttagactgactgagcaactccctttgttttccctctatgtattatttggaaaacctgacttgcttacttgggcactagcctcacagaactattagcagtcagctatgtctgtaattctttatttgtcttccaagtatgaatgacgggtaatgataagcataagccccctaaggaaaaaaaagcactgcttaagtgctagcatttactgaaacaagccacagaaatggctgttattcccaatcttccattaaaaatatagtgaccaaccttgtgcaacatagcgataccctgtttcaaatggaagtgagatatatatataaaagatatatatatttatatatataaaagatatatatatttatatatataaaagatatatatta

SEQ ID NO: 716260 - DNA, 930 bp, Homo sapiens
tttttttctttctcagggtatttttttatttagttacctatgcctggacaccattttcccaccactgtgcacaagggattctttttaatgtttaagttttatcttgcaatttacttttctataacaattcacggtttattctcttcataccatttatgataatctgaagttatatagtttcttatccatttgctttttatattacaccagtgacaaagtaagtgctgagaggtaagaaacttgggtgtcttttcattactgtatgctcatgatttgaagcagtactttgtgcatagtaagccctcaataaataattgttaagtagataacacaaagtattctaaaataagttctttgcaaaaatgagttaaataaaattgttcagacactgtttctgtttgtcttatgtcattactaaattaaaacaggcaaaccatactttttttgagtaacctttagcaaatggtaacagagaaatgcttttagaaatggcagccaaaaaatgcagatcatctagaatgtctagaaaaatggacaaaatataaacacaaaattgcttgaaagcacatagagtcaacaggtagtgaggaattatgaagtcagattcagggatagataaaaactcagagaagtaagcctgacacttggggtagtatttcaagaagagatacctgtcaattctagaaaaaaaggcttagaaggaaataacagagcaaaayctagatagacttgtaggactatgggaaaatattggtatccagaatttatcaagaagggatagcactagtcaatttcccacctttggattgggatttgaaaggttacaccatagaaataagattgaacaactagtagaaatcccttcaaaagacgttagcccagatcaagtcacccttatctctgtaaaaggatccaagtgatctatcatta

SEQ ID NO: 716261 - DNA, 648 bp, Homo sapiens
cattaaatagtaggcgagttctatagtctttttcatatctcagagaaaatggggttcttcttattgtgtattttgtcctaaaatgttgaatgcctcagactttgcatccatccctcattcttcccttatttatagattttctaaccttgggtctggccacagggaaaattatatgaaaataatactaaatggatgtcaggagacctaactccttattatctctgtgaatctgaccaaatcaattcaccacaatggcacttaattttaaaggctctttaaatgttaaaatatctgattttattggatgacaaatgaaaaggaagaaaatgtaattttccaagccacttatgacattgaatttaaattatatcattaagaagatcttaaaattttataaacctttaacttttcaaatgctttatttacattactatcatatattctaaaaggttcacaaggttactatcatatattctaaaaattgtttttaacttcatgtattcatctattcatcaatgtaacttattagtgagaacttactagttaataggttaaggaagagtaaactcatcctgtatattrtcaatatgttatgatttatgatgtttcttgaattttctagacaacagtagttatatttctacagat

SEQ ID NO: 716262 - DNA, 629 bp, Homo sapiens
tgggaggtagaggttacagtgagccaaaatcgtgccactgcactccagcctgagtgacagagcgagactccatttcaaaaaaaaaagaaaagaaaagaaagaaatcatgtaagacttcattcactctcacaacacagtgttagggcttccagcttctactggaatatagaaatttgcaacccatctgtcatttctgttgtaacagagaaactacgaaatacaaattatctagttttaacactgttagagaactgtggtcataaagaagtctaatggaagtatatcttaaggataaaacatttccaagtaagcagggtttatttgccactttcctccacatggcctgcctagtttaggtttgggcaggctgaaaatcagactgccatgggaagagccacttttcttggttratgagaaacaagaggatttaatgacatggtgggctcgctggctgacatattagggctatggattcccaaacacaaagctaattatctctccttgccgatctttttcccattggacttttgttgggtatttggctatggcagcatggaagataagagtctgggctggaaagcaataatagccttctgtagtctcacagttcttagatcttgcaagaggga

SEQ ID NO: 716263 - DNA, 627 bp, Homo sapiens
aacagaccaactgagccaccctaaatgaaaccttagttccttacttttaggaacaagaacatgatgagatgaatagatttttactaaagtaggtattattctgcattatgtaagcagtaattgtaagaatataaaataattgtgctattctataatcatcaaaaagttgatctgtaggagcccgaagttttaacacatgcaagaaatgtttatgcagttattagtttgctaaaagagtgataccgacatacactcaactgatcagattttaatttagcaagcatcatttctcttcaataaatttacataaaawtatgaaaaaaaatgtagtgacaaacctttacaattccacttagagtgggtctgctggtgacaaattcagttctgtttgtctgaaaatgtctttattttactctcacttttgaaagacatttttgcagtgtgtagaattctagactgtaagttacttccttttgcaagtttaaaaataccattctaatatttctggccctcattgtttctattgagaagtcatccttcagtaatattatggctctgtaattttctttttatccttggcttttataggccttcttgaatccatagctttatgttttccatcagttt

SEQ ID NO: 716264 - DNA, 585 bp, Homo sapiens
tattaagacagctcagcagtttgtcaagttataaatgcaggagtatgagaattactttgtgagctgtttttaaatatagtaatttgtgagcataattgtatttcatatgtggtaattcacaaagttaagcccagcacttcccagttcatcttaaagctatctattcaagcaactcttgactctataacaaaaactatccactatccattatatctgaatttttctcagcatatgtgcccatccagaatagtatttcaaaactggaattatccaggccacactggagcatataatcaacttggaattagccatttttttcttttttattatttcttccccatattggctgcagttgtatgaattacagattttatctccctcagacttttttgcttatggagtggggtgactgattttggtgctttctcttttattgcctgtctgacgttaaaaatcctatcaaccgttcggaaactaatctaattcatttcgagaataatgttgtgaactctatttacrgaatccaaagccataaagcttctaatgctacgtgaaacagcaccccctactggcaatgttgtcaca

SEQ ID NO: 716265 - DNA, 585 bp, Homo sapiens
tattaagacagctcagcagtttgtcaagttataaatgcaggagtatgagaattactttgtgagctgtttttaaatatagtaatttgtgagcataattgtatttcatatgtggtaattcacaaagttaagcccagcacttcccagttcatcttaaagctatctattcaagcaactcttgactctataacaaaaactatccactatccattatatctgaatttttctcagcatatgtgcccatccagaatagtatttcaaaactggaattatccaggccacactggagcatataatcaacttggaattagccatttttttcttttttattatttcttccccatattggctgcagttgtatgaattacagattttatctccctcagacttttttgcttatggagtggggtgactgattttggtgctttctcttttattgcctgtctgacgttaaaaatcctatcaaccgttcggaaactaatctaattcatttcgagaataatgttgtgaactctatttacagaatccaaagccataaagcttctaatgctacgtgaaacagcaccmcctactggcaatgttgtcaca

SEQ ID NO: 716266 - DNA, 571 bp, Homo sapiens
taacctgaaactaaccatgagaaaacatcagaaacatcaaattaaaggagctactaaaaaaatgcctggcctgtaattctcaaaattgttaagggcatgwaagtcaaggaagaattgaggaatgatcacaaatttgcctgttctttggcaaatattgatcaagcttatagtgtggtgggggtgtgtaaaactaacaaataatgttcaaaaataagtactaatgggaaaaaagcaggatgggagatagggagtggcaggagctactctattaggtgggatggccagggaactcctgtgaggaggggatatttgggcagacaaatgaagaaaaaggagctttgcaaatatctaggagatcattccaagctgaagtagcaagtgccaaggccctgagcacaaaaattcatagtggtttcaaaaaaagaacaaaagggccagagtactgcaggagtttgagccagggaaagcatgatagaaatcaggctagaagactgatcagtggtcagattgtttcaaggcttcgaatactggggtaaggaatttaatctttatcctctgtgtaatgggaagc

SEQ ID NO: 716267 - DNA, 590 bp, Homo sapiens
tgtgtaactacacaggtaacacactcaagaatccagtcttgaaagagaatttttaatttgtatgaattagctggtatcaggcttctcctcctcctttttttccctacaggtgctatgttcaattaaatactgcagggaacgactctctgcaggcctagccccacaactaccagctgcggcccctccattgtccctatgacttgggagtcccatcacccccacagtgtcaccatttctcttaaaaagccttaaattctcaaaagagcattttaccattcaacattgcacttcctagaaactgaactaaaccaaactttattttccttaaaaagtagttatttcrccaagattccaaatttatttgtgtggaactctgctggtctttactagtgtcatgtggctattgaggacttgaaatgtggctcgtctaacttgagatttgctgtaagtgtaaaataagcactaaatgtgtaacatagatgctcttcaacttatgatggagtttgcagagccttaggaacctttgggactataacaaagatttaacatttatatcataggagtctgaaaaagagatgagaaagagagta

SEQ ID NO: 716268 - DNA, 590 bp, Homo sapiens
tgtgtaactacacaggtaacacactcaagaatccagtcttgaaagagaatttttaatttgtatgaattagctggtatcaggcttctcctcctcctttttttccctacaggtgctatgttcaattaaatactgcagggaacgactctctgcaggcctagccccacaactaccagctgcggcccctccattgtccctatgacttgggagtcccatcacccccacagtgtcaccatttctcttaaaaagccttaaattctcaaaagagcattttaccattcaacattgcacttcctagaaactgaactaaaccaaactttattttccttaaaaagtagttatttcaccaagattccaaatttatttgtgtggaactctgctggtctttactagtgtcatgtggctattgaggacttgaaatgtggctcgtctaacttgagatttgctgtaagtgtaaaataagcactaaatktgtaacatagatgctcttcaacttatgatggagtttgcagagccttaggaacctttgggactataacaaagatttaacatttatatcataggagtctgaaaaagagatgagaaagagagta

SEQ ID NO: 716269 - DNA, 646 bp, Homo sapiens
atggtttgtgggaaattcaaatgaagacgtaaggagatgaaagtttggctcttggacaaagcctcatttcacaatcccacttcatacatgtggcttgacccttcttccactcccccttggttcaaaatgaaagcaagaggaaaaaatgactctcagtcttaagacatggacattttataattcatcagtttaatgattcattcattgattcactgaacaaatgattacgcaccacctgctatgtgttaggatttgggttatatttttggagaaaaaaaaacaaacaaaaatccgtaagattcctaatctcatgatgtccactgtttagtggggaaaatagatattagtggagagaacagatattaaaataacacatgttaagtttcaaactgagataaacacactgaaagcacattaccaaggaaattgagtctgcttgattttttaaagggaaagaagagggactgcaargaagacgtccttataaaaatgatccctgaaatgagatttgcaggatgactagttaactagaaaagagactggagaaagaggatttctgttgaagggtcagcagtagctacgtcccataatcaggttcatgttaccagaatcatgatgagccagttgacatggtgaggtgctgaca

SEQ ID NO: 716270 - DNA, 1067 bp, Homo sapiens
ggaataagtcttagctcagccgctaatgtaacctgagaccttgggtcaattaccttgtttctgtgggcctcaatttttctcatctgcaaaatgggctaacagtcacacccatcttatagaggccacacaaggttactatgaggattgagtgaggtgaggggagtgaaaacyatctgcaggtgggaaaggctgggcacctgtgggccttttaggtgcaactcaggccgcagtgttacagttagagagacagactctggggccagaaggcctgtgttcaaactcagctccaccatgactagctgtgaagtgacttcacccctctgtgactgtggttccttctgtagggtggaagcacagtagagctgctttcacagagtggccatgtgaatgaaatgagctaattaaacatgtaaacttagaagagtgctttggtaagtcttaataaatgttagctattagtatatttattttatccatctatctacccatccatccatgcatcatctgtattcatccaccatccatccatccatccatccatccaaccatcaagccatccattcatccaccatccatattcatcctccatccatccatccatccatccatccacccatcccccatacatcttcattcatccatcctcctcatccatcttgaggtaaaaatgtgaggcctgggaaggctgttgaaagggctgttttgggagtcagaagccctgagttttagtccaggctcctctcacatatagactgtttgaccttgtaagtcacctccccactctgagcgttggtatcccagattgtaaaatgaaggggtctcatgatgtcttaggggccctctaagctgcagtcatccataaatctaagacctgctacttgctggagaacaggcacatggaggtgctggactcttccctgctaggttcaagaagggtcaaagtccccgaacagataacagatgctctgggaagccactgggtaggggagtgagatgttgggggtgccgatctgtgtgggggaactgtggggttgtaggcagacctcttgtacatggctctggacaga

SEQ ID NO: 716271 - DNA, 1067 bp, Homo sapiens
ggaataagtcttagctcagccgctaatgtaacctgagaccttgggtcaattaccttgtttctgtgggcctcaatttttctcatctgcaaaatgggctaacagtcacacccatcttatagaggccacacaaggttactatgaggattgagtgaggtgaggggagtgaaaaccatctgcaggtgggaaaggctgggcacctgtgggccttttaggtgcaactcaggccgcagtgttacagttagagagacagactctggggccagaaggcctgtgttcaaactcagctccaccatgactagctgtgaagtgacttcacccctctgtgactgtggttccttctgtagggtggaagcacagtagagctgctttcacagagtggccatgwgaatgaaatgagctaattaaacatgtaaacttagaagagtgctttggtaagtcttaataaatgttagctattagtatatttattttatccatctatctacccatccatccatgcatcatctgtattcatccaccatccatccatccatccatccatccaaccatcaagccatccattcatccaccatccatattcatcctccatccatccatccatccatccatccacccatcccccatacatcttcattcatccatcctcctcatccatcttgaggtaaaaatgtgaggcctgggaaggctgttgaaagggctgttttgggagtcagaagccctgagttttagtccaggctcctctcacatatagactgtttgaccttgtaagtcacctccccactctgagcgttggtatcccagattgtaaaatgaaggggtctcatgatgtcttaggggccctctaagctgcagtcatccataaatctaagacctgctacttgctggagaacaggcacatggaggtgctggactcttccctgctaggttcaagaagggtcaaagtccccgaacagataacagatgctctgggaagccactgggtaggggagtgagatgttgggggtgccgatctgtgtgggggaactgtggggttgtaggcagacctcttgtacatggctctggacaga

SEQ ID NO: 716272 - DNA, 2061 bp, Homo sapiens
  misc_feature 224, 225, 226, 227, 228, 229, 230, 231, 232, 233, 234, 235,236, 237, 238, 239, 240, 241, 242, 243, 244, 245, 246, 247,248, 249: n = A,T,C or G
tagaagtttgagaccagactgggccacakagtgagaccccatctctgcaaaactaaaaataaattaggcatgatggcatgcatctgtagtcctagccactcgggaggtgaggtgggaggactgctttagccaagaatttgggaggctgcagtgagctatgagctatggtcatgtcactgcactccagcctgggtgacagagcaactctgtctcaaaaaaaaatnnnnnnnnnnnnnnnnnnnnnnnnnntgaatgtgtatatatatgtatatataaaaatgtatatatatatacacatttatatacatatacacacacacacacccctacttgaatataccttttaaaaagtatccttttatagaaggtacaaagcacatataggatccaaagtagaaagaatacaaaagagcagatatgtcagctgtgtaagtctagagatctaatataaatgtacaacatgaagactagagttaacattggagatttctgcttctagcaaaatctcttgtagtggattttagttgtttttgccacacacacaaaaagggcaagtgtgagatgatggaaatgttaattggctggcctatggtaagcatttcactatctatatgtctatcaaaacatcatgttgatttttaaagctatgtgatatggaggagctggatggatggggaagtcagaaggaataaagctagacttgggagagaaggaggaacggaacccagcgaccccctcctctggcttcagagactggggctgcctgggctgcggaaatcatgagacatggttcagagccaaggcaccggagttggccagacctggtgtcctcccacctccacctctttgcaagtctgtgaccttggacaagttattgtgtccctggatctcggtttcttcatctggacaatgggatacaacaaaccctacttcacagggccattgtgaggagtaccacacactaattctcaggaatgtcacctgtcaacaccactgtcaatcacattctccggggtggctccacataagggcatgagaagccagggctggagcctggctggggatgtttccaaagggagggctgggagagcaccttccattccagaggcctctgggaaggcccaagaggaaagccctggcggccccagcctcacagccaacagcagtacaacgagcctcctgctctttctccccttcagtttggcccagatcccagagaggactggtcggcccttactcacgtggtcaaacacttgactcttggtggcgttgtacttctgtgcgatggcatcggccacggcattcggccccatgaatagtgtgttccagttgtgagagctaagaggcagaggcagaacagggagatcagaccgcagctggatgaggggaactcgttctcagacacgaatcctgtaagaaatgggctcctaggcctgcctatctacatgcccccaatttccctatcatgggctacgtatacagggcctgaagacaacaagacggatgatgacaggaaccatccctaacagtgcttcatctgtgtcagggactaagaacttcacatacattcactcatttaaaccttacagcaccataaaagtaaggcactactattattctcccattttacagatgagaaaactgaagctcggtaaggtatgaactaaacccatcaggagtcagaagacccaggtggcttagaaagggcagggtgagggtggcagagggttggggttggagctcagtggtttcaggggcactgaggacctggcactgttggctttgtcctgggcctccttcttcttcttgtaggacgacgatcccagggcactggcatcctcgctggcttccttcttgatggtagatggtaacacgtggagcatcctgccctggatgggaatgacgggaagggagtaaacagaagccttgcctgtaagccctgcttcctgccgaaggatgttggcttctgccacgagtaagctggacccagcactgaaaccctgaccagagggtgggagggaggtcaggtagaacgtggccactctcttcccacctgacaca

SEQ ID NO: 716273 - DNA, 2061 bp, Homo sapiens
  misc_feature 224, 225, 226, 227, 228, 229, 230, 231, 232, 233, 234, 235,236, 237, 238, 239, 240, 241, 242, 243, 244, 245, 246, 247,248, 249: n = A,T,C or G
tagaagtttgagaccagactgggccacatagtgagaccccatctctgcaaaactaaaaataaattaggcatgatggcatgcatctgtagtcctagccactcgggaggtgaggtgggaggactgctttagccaagaatttgggaggctgcagtgagctatgagctatggtcatgtcactgcactccagcctgggtgacagagcaactctgtctcaaaaaaaaatnnnnnnnnnnnnnnnnnnnnnnnnnntgaatgtgtatatatatgtatatataaaaatgtatatatatatacacatttatatacatatacacacacacacacccctacttgaatataccttttaaaaagtatccttttatagaaggtacaaagcacatataggatccaaagtagaaagaatacaaaagagcagatatgtcagctgtgtaagtctagagatctaatataaatgtacaacatgaagactagagttaacattggagatttctgcttctagcaaaatctcttgtagtggattttagttgtttttgccacacacacaaaaagggcaagtgtgagatgatggaaatgttaattggctggcctatggtaagcatttcactatctatatgtctatcaaaacatcatgttgatttttaaagctatgtgatatggaggagctggatggatggggaagtcagaaggaataaagctagacttgggagagaaggaggaacggaacccagcgaccccctcctctggcttcagagactggggctgcctgggctgcggaaatcatgagacatggttcagagccaaggcaccggagttggccagacctggtgtcctcccacctccacctctttgcaagtctgtgaccttggacaagttattgtgtccctggatctcggtttcttcatctggacaatgggatacaacaaaccctacttcacagggccattgtgaggagtaccacacactaattctcaggaatgtcacctgtcaacaccactgtcaatcacattctccggggtggctccacataagggcatgagaagccagggctggagcctggctggggatgtttccaaagggagggctgggagagcaccttccattccagaggcctctgggaaggcccaagaggaaagccctggcggccccagcctcacagccaacagcagtrcaacgagcctcctgctctttctccccttcagtttggcccagatcccagagaggactggtcggcccttactcacgtggtcaaacacttgactcttggtggcgttgtacttctgtgcgatggcatcggccacggcattcggccccatgaatagtgtgttccagttgtgagagctaagaggcagaggcagaacagggagatcagaccgcagctggatgaggggaactcgttctcagacacgaatcctgtaagaaatgggctcctaggcctgcctatctacatgcccccaatttccctatcatgggctacgtatacagggcctgaagacaacaagacggatgatgacaggaaccatccctaacagtgcttcatctgtgtcagggactaagaacttcacatacattcactcatttaaaccttacagcaccataaaagtaaggcactactattattctcccattttacagatgagaaaactgaagctcggtaaggtatgaactaaacccatcaggagtcagaagacccaggtggcttagaaagggcagggtgagggtggcagagggttggggttggagctcagtggtttcaggggcactgaggacctggcactgttggctttgtcctgggcctccttcttcttcttgtaggacgacgatcccagggcactggcatcctcgctggcttccttcttgatggtagatggtaacacgtggagcatcctgccctggatgggaatgacgggaagggagtaaacagaagccttgcctgtaagccctgcttcctgccgaaggatgttggcttctgccacgagtaagctggacccagcactgaaaccctgaccagagggtgggagggaggtcaggtagaacgtggccactctcttcccacctgacaca

SEQ ID NO: 716274 - DNA, 591 bp, Homo sapiens
tgggagtatttacacctcagaaattggtaaacgcgataaatcagaactggttgttaaatacttaccagcatacctcgaatgtctgaaagatggaagtagaactggacagggagagcctcagcctgcagagtagacctgacacagcatcagttaacaaggagctgacaaagactgcttatgagaagagtcctgcactggggagaaatggccaggccttagtacccctctgtgctgagtctcctggccagcagcttggttgtgttccaagatagaacacaacctcatccatgaaacctgggatttcattgtgttcrctgctatatccccaacaacagaatgggttacccagtgcaatgcgtctttgacaggtctcaaagtgggttctctgaaaggcaccctggatttgtgcagtgtatacctatatggcccatcatggtggctgatgaggaagaccccagccatgggggaaaatgccaggaaattcaaagggaatctaacatggagagccagtttcaaagcccttaagccatccctagagcaaacagtatgtgagatcacccagagattagcaacagctggaagccactacta

SEQ ID NO: 716275 - DNA, 580 bp, Homo sapiens
gaaaggagtgacagaaggtgatgtcccagaggccatatcctgaggcctctccctcgatcccgtgatgtttcagaaggtccctctggctgacgggtggagaatgagctgttgggccaggggagaaagtagatggctcgggytgattccccgggcaagatgaaggtggctcggcagagttggagggggctggtgaaacgaggaggaattgcaggctgggcaaagtgttcctgcaaagagcggctttgcaagccataaggtctgtgttgcaaccactgaactctgcctttgtgtccccaaagcagccttaagatgagatgtgacaaatgggcacaggcatgtgccattaactttatttatggacaccaaaatttgaatttcctagagctttcacatgtcacaaaatatttttcttttaatattctcccaaattttataaaatgtaaaaaggccagcccaggcaacatagggagaccccatctctatgaaaagaaaaagaattaggcagtcatggtggtgcacacctgtggtcccagctactcgggaggctgaggcaggagggtggcttgggcccaggaggttg

SEQ ID NO: 716276 - DNA, 1117 bp, Homo sapiens
tacagttaggacctaataaacrcatttaatgaatatactaattcattttccttgataaaagtgccatttgaacttaatgaaaaacgacaacaaaattgttttacttctaaggacggcaccaagccaggagcctgggcacttgttgcaggttccccaagtacaaagtaaagcacctagtccaatgcctggtataaagtgggagtgcaggaagtgtgtagtgaagaagacagctctggatgctaaggagattgctcttggcattcttccatgccttgatcatccttaagggtaggccagattctagggattggcatctacctcaaataggaatcacctagaacattataaagtcaccagaatggggaaaggaaggctagaagggctcaaagaaccaaactaaccctcatcgttattctgctgaagaagagccatagtctgtctgtaagtatgtggtgtgtgggggaaagatctttagaatagacttcagaaaacccggaaccccttattagtcttggatctctgggccttcttcatctatacaatcagcagactgagttaagaaatctcagaggttcctttttgctttggcattctgtggaattgggatgattactattaatcagaatactaaccaccacttgtcagatactcattgcgtgtttgacatgatgctaagtacattattcttttatttaggcctcataacaaccctatgaggtagatactcttattgtcatttcatgttttacaaaaaggaaggccacacagaggtcgagggtgcagttaagactcaaatccagatctgtctaaatcaaaggcctgcttctttactattattatttgattagtatatttatatatttattttaaaaataatttattgaggtgaaatttacaaaataccaaactagtcattttaaagtgagtaattcagtgacaattaggatattcccaatgtgtaaaatcaccacctctatctaactacaaaacattttggtttctccagagtaaaaagctataccttaatcagtttcttcacattactccttacctcagaccctggtaaccgccaatgtgggttctgtctttatggatttaactattctggctattttat

SEQ ID NO: 716277 - DNA, 1706 bp, Homo sapiens
agatacagaaaaaaatttctacatactaagttcacaaataggatgtttctaaattttccattatattatatgttcaataattgactcttttattaataatgaagtttacaataatctattattttgccttcagtataattgggttctattaatcataaaactatatgttgtttatggaaagatatccctgatactgtttttgcaaaattatgacagtgagataaatctgacaagggaaatttatgacagtgaaagaaatctgacataactggctctatcttgcttcttgcctccaagctgcccttgttcatgcctgggcataggtcaagctagctttggaaggaatttagttcatagtttaactttgaaagaaagaaggtaacagcctattcttgcaacaaactccctcggtgcttggtgatcaaactgcatgtataaaactaataaattatccacaagaatataaattatggctcaggagtcatgcagccagaggccgcacagttcctaaactccctaattgctcctatagataacatcactattgtaaacctgagattagggtttgaggtatttttcagaccctgcattctggtggaccagctggcaccactgagactggtaaacaggctcatctggtcttgctggccccattcaggaactgattcagtgcaagaagacaagttattactccctatgatttcatcccaacccgacaaataaggattctctaatcccaacccccatctgccaaattattcttaaaaatctctagcctcaaaattctcaaggaggctaatttgagtaaaaataaactcctgtcctctcacttagttggctgtatatttattacattctttctctattgcaaaaacctgctgttctcagtacattagcttttccgggcagagggtaagatgcaatctggacatttatatctcctcatacagtgctttctttccaggcttaattgaacattgtaatctctgatataatgatgttttaagaaattatttgtccaagaaaaaaatctgtaaataattgtgcttgaaacagctgttttcttatagaagttactcttgtttcaaagccattttctcatgagatgattatttttccattttctttcacattcatagggggaaactaagtctgttttataatgttccaaaatctctaagggtaggtaataatttataaagttttgtgtgaatcaataaaacaggttttgggttttatttcattttagtgaaaccaactggattttacattaacacgataattttcatagttttatcatttctcaatcctagtactgctcttttcacaataaaatagcagtatttttaaatagtaagaataatccatgatttaaatacatccttctgtttatactataggaaatggatttttaaaaagactggccataagcaaagaacaaaaagaaaaaaaccaacacacatacagagataattttattatttattctaaaatgcaatctgtttgcttagcttaaatactgatattaaagagataaagataagacaagatgctacatgctacatttagcacaatggtaaacagagtagtagcaaatrttcttttgattttataaagatatattcatgctttttctttccaggtttattattcaccctcctctgtaatgaactcctaaatatgtcatattgatttctttgaaaaaa

SEQ ID NO: 716278 - DNA, 582 bp, Homo sapiens
gtcaaacatagtattcctgcttgaataggaaaaattgtaacwatgcatttggtatttgtattttatccccaaattagtgagttgcctttttgacatttttttcaaggtagctttatatttatgtatagcttgcttttaaaaaataagctgttcttatacttcccaacattatatacctaactgttccttaatttaaagctcagctcatgtacaagttttattttgcaatcaagttttatttacttgtttatagagtttggcttgtcattgctttttgtcagctctgcaaggtttgagccatttgtaatctttgaatatttacatagtatctatctacctacacctattttttatataatgtatggcagttgtaacctaaaagagtaaaacaaagatttcaagtgccatggaagtctaggtcaagaagagatgagttagcatttggtgaacaaaagtattctagtgggcatctactgtctgtctttcttgcatcattttcttctttctctggatagcagaactccatgttgatctttccactccactttgtcttaatagagctacaagtctcagagccctgcc

SEQ ID NO: 716279 - DNA, 582 bp, Homo sapiens
gtcaaacatagtattcctgcttgaataggaaaaattgtaacaatgcatttggtatttgtattttatccccaaattagtgagttgcctttttgacatttttttcaaggtagctttatatttatgtatagcttgcttttaaaaaataagctgttcttatacttcccaacattatatacctaactgttccttaatttaaagctcagctcatgtacaagttttattttgcaatcaagttttatttacttgtttatagagtttggcttgtcattgctttttgtcagctctgcaaggtttgagccatttgtaatctttgaatatttacatagtatctatctacctacacctattttttatataatgtatggcagttgtaacctaaaagagtaaaacaaagatttcaagtgccatggaagtctaggtcaagaagagatgagttagcatttggtgaacaaaagtattctagtgggcatctactgtctgtctttcttgcatcattttcttstttctctggatagcagaactccatgttgatctttccactccactttgtcttaatagagctacaagtctcagagccctgcc

SEQ ID NO: 716280 - DNA, 663 bp, Homo sapiens
ccggctaattttttatatttttagtagagacagggtttcgcaatgttggccaggctggtttcaaactcctgacctcagctgatcccctcagcccgcctcagcctcccaaagtgctgggattacaggcatgagccatcgtgcctggcctattactgttatttttatcctgtcttctgttttgcagtgtaacttagatcagaataagragcccatctcctatgttctacctctttaaaagagtatttaataaatatctttaataaactagtagtgttggctgacaaagtctctgatgagatgaagaatgatatgtttatttttcccccacaaagcctttaaaaagcaactgagaaaaaggtgttccttccagcaataattataaaataagtggcaattattctactgaataactagaggaacaaatgcaaatcctgtgtgtttgcattttaaaccattaagtatggtgatgatcaaattaaataaaaataacataaggcataaaggccatatcttttaaaagaaataaccattttagaggctttttaaattcctcccctccttaagcctgcaaataagaattttaaaaatctttttgtaataactactgtcatttttgcatgctgaaataacatttgggcagatgatgcaggatttccaaatgca

SEQ ID NO: 716281 - DNA, 648 bp, Homo sapiens
cagtctcttcaaaaccaaaaggagctttacctcctaatttccaaacaaagaaggataagtgagattcataaaaacggcagcgagaagggagacaacacagtttaattgtacacgtttatcctgaaattaraaaaaaagaatgctgcttctttcctgctcttaaaatttgaacagctaaaaaaaatgtaaaaaatgtaaaaaaagtttaccccagtttcataatgtacacaaaacttgctgcaataacatctatgatagatcaataatgcatgttatagttagctgcttaattattcatttagggtgtactataaatatggcattaacacaaattccggatgtgacaaaagctgggaaattcaggcaatgtaaccaaaattaagtcattttttccctacataaatgctaaaataaggcaaacaaaaagaatgttcatttgggggacaaatcaaaacagaagacttccttttgtttgcctttcttttcactttttattacctatctttggttaatgttttgtgctagcatttatttttatttgtcacctatgactttttgatattgtcttatatgtcattttcatatacagtaagtatttggaaatgaagggagtatttatagcatttaattttagcatttgtaataaat

SEQ ID NO: 716282 - DNA, 648 bp, Homo sapiens
cagtctcttcaaaaccaaaaggagctttacctcctaatttccaaacaaagaaggataagtgagattcataaaaacggcagcgagaagggagacaacacagtttaattgtacacgtttatcctgaaattagaaaaaaagaatgctgcttctttcctgctcttaaaatttgaacagctaaaaaaaatgtaaaaaatgtaaaaaaagtttaccccagtttcataatgtacacaaaacttgctgcaataacatctatgatagatcaataatgcatgttatagttagctgcttaattattcatttagggtgtactataaatatggcattaacacaaattccggatgtgacaaaagctgggaaattcaggcaatgtaaccaaaattaagtcattttttccctacataaatgctaaaataaggcaaacaaaaagaatgttcatttgggggacaaatcaaaacagaagacttccttttgtttgcctttcttttcactttttattacctatctttggttaatgttttgtgctagcatttatttttatttgtcacctatgactttttgatattgtcttatatgtcattttcatatacagtaagtatttggaaatgaagggagtatttayagcatttaattttagcatttgtaataaat

SEQ ID NO: 716283 - DNA, 1205 bp, Homo sapiens
tacaaggttttagagacaacagaaaatgagataaattctgactcatttatgggactaggataaccttgaattgtccaaggatggtataagatatgatggaaacctaaataaaacattagcttaaccacatccaacagagtattgaacagtaatacaacattgtctaacacagtttatgacagaaatacaaagaaggttcaaggacaggaaatcagtaacagatggaattcgctatgctaatggactataggagaccagaggataatctcaatagatgcaaaaaaaaatgtaggatagtttgacccgatatctaatattgttgaatctattttgacacaatcaatgggaaaagttacatattatacttcacaattagaagaaactactggcttccattctaggaattttggcatacatttggcaccaaaatcaaatatgatataaaatctaattttaatgattttttagacaaataatacctgtagagtgtaaaataaaatctacatttatgtatatatattatggatagtatatatgtcattaaattagtggtatgtagttttaataacatgttgatgtacaataaatatattggcttaaaataactttttaacatatgctacgcaaaaacatgggggaaaaatgtaaaaagtttctaagagagtgcataagattgtatattattatgaaagtcataagccaaaatacatcaggaaatgatattctaagggagaccatctctcagacagtccaagcactcaataaattttatgtggttagttgatatcttgtatgcagtcttttgccttgcttctgttttagcattccttccatctacctcttgttcctacatcctccagggaggggagagttagaggagacggaattgaaaattgactgcagtggctcatgcctgtaatcccaacactttcagaggctgagacaggcrgatcgcttgagcgtaggagtttaagaccaatctggccaacatggcgaaacctcatctctataaaaagtacaaaaattagccaggcatgatggctcattcctgtagtcccagctactcaggaggctgaggctggaggatcacttgagcctgggaagcagaggttgcagtatgactcgatggcaccgtttcgctccagcctgggagacacagccagattctgtctctctctctctctctttctctctctctctctcca

SEQ ID NO: 716284 - DNA, 927 bp, Homo sapiens
attttcattatcttaactgctatatttcaccaaaatgcttaaaagtggaataacaagcatgtcttgtgttttttactgttcaatggaatgtaaaaaaaaagataatcaaggttatattcaatgccaacatcctagatgaaatagtaccaataaattttgaattattgactgcattttcttcgttccactaattacactcttcagtgcaattttgggctcttggaaaaaaatgtatgcttagcaataccaaagagacaaatgaaaattttttgaaaggactatcagtttaggggtttataccacaaaaactagtgaattttagtgactacttattccaaatcatggtattaatagtcaattattgaagcattgaaatagcatactttttaaaggtagattgtctattcctattctacataacagtataattattttgctaaaatgacaataacagtatcatctctcagcctcactttttctagcttttcaatgaatggtatttttgctacaatacatgtatgaagattattgattagattatgttatagtagaaaaccacaggttttaaaagaggagagaccttggttcgaatattggctctccttacacaagtcattaaatctttctgattctgatttctcactttwaaaatagagccacactttttctcttggattagcttatgcataaaataaaataattgattaagtattaggcatcatattgcaaaatagagatgtactatggtttgaatgtgtcctctaaaaacatatgttggaaacttaatccccattgtatcagtattgggaggtgaggcctagtacaaggctattaggccatgagggctttacccctcatgaatagattaatgctgttatcacagaagtgggtttgttttaaaagggcaaattcagtccccttttctct

SEQ ID NO: 716285 - DNA, 1419 bp, Homo sapiens
  misc_feature 206, 207, 208, 209, 210, 211, 212, 213, 214, 215, 216, 217,218, 219, 220, 221, 222, 223, 224, 225, 226, 227, 228, 229,230, 231, 232, 233, 234, 235, 236, 237, 238, 239, 240, 241,242, 243, 244, 245, 246, 247, 248, 249, 250, 251, 252: n = A,T,C or G
  misc_feature 253, 254, 255, 256, 257, 258, 259, 260, 261, 262, 263, 264,265, 266, 267, 268, 269, 270, 271, 272, 273, 274, 275, 276,277, 278, 279, 280, 281, 282, 283, 284, 285, 286, 287, 288,289, 290, 291, 292, 293, 294, 295, 296, 297, 298, 299: n = A,T,C or G
  misc_feature 300, 301, 302, 303, 304, 305: n = A,T,C or G
gacaactgcagaacaaacttcaatcacaaagataattttttgaaatagatgagttcaagttaccagaatagagaactagcactaacccatctaataggttacaagcatcttttcagttttacgggattaagtgattgataaatttttaaattatggctagcctgaaaaacattaaatacttgcctctcttgcaggttgctattttnnnnnnnnnnnnnnnnnnnnnnnnnnnnnnnnnnnnnnnnnnnnnnnnnnnnnnnnnnnnnnnnnnnnnnnnnnnnnnnnnnnnnnnnnnnnnnnnnnnngtatgtattcctgatgactctcacgatctaacccaggccatgcaggccttaaatacccatatttccactacagaatctaagtcttaaaaccctataaccacgtgttttaatcaactcctaagcccttgaaaaactttctatacagtatgattgttattatatttgttattcttttttgttattgtagtttatattgctactgcagcatctggctgcaatgctcctccacatacctggccccagggatctcatgacagaaaggcataagaatgtgagggccacgcaagggtatgctggtgcggagtatatggcagatgcacctgaaagcaataacttaagaaaggaggttgccatgtggaagttgctggggggaggatgctaagtgaaaatgctatacaagctgcatgctttttgcaagtgattgcagttctcctgtccagcccatcaccactgggccgccctgtaagtaagttctgccaaataagccctaagtttcatttattggctctgggtcccttctttggcctctcaaacttggtaccatcccactgaagttaataggggtccagcatgacactcaattttaaggaaaattgtgattctccagtttacacttctccctgatttccacagcacagcacaatatatcaataaatattgtcatcatcaataccgccaccaatggatctgattacatgtccgtgtgtgtgtgtgtgtgtgtgtgtgtgtgtgtgtgtgtgtgtgtgtatactctggagaagtctagtaggatatagtcatcccttagtatctatggagtatttgttccaggacccctaagataccaaaatctaaggactgctcaagcccgttaatggcatagtacttgcatatagactacacacatcctcccgtataatttaaataatctctagattacttttacctgatcccatgtaaatgctatgtaaatacagttgacccctcaacaacttgggggtcagggacaccaatccctgtgcagtcaaaaaactatgcataacttctgactccccaaaaactaactactaatagcctattgttgacctgaagccttgccaataatatamacagctgattaaccatattttttata

SEQ ID NO: 716286 - DNA, 404 bp, Homo sapiens
cactctaaatagtattctcttacggatacttttgttctctttaagtttgctacgtatagcacttggcagactgcattttttttttctggaattgcaaatttgctttattcaaatctaagtataatgaaatttacttctatataccttttcagtacccaagagaattttggttccaaaagatattaattgcacaagataaaaatctctcctatgagagctgaaacacatgctttactagcttttcctcccttgactttaaactyctggaaagttgattccctgtccccccaactatttctggtagtccccaagggatgttgtatatgttgtattcagtttccatgtgtctttctccctgattcttatcttttttttttttttttttttttctattccaacatcct

SEQ ID NO: 716287 - DNA, 1088 bp, Homo sapiens
  misc_feature 2, 3, 4, 5, 6, 7, 8, 9, 10, 11, 12, 13, 14, 15, 16, 17, 18,19, 20, 21, 22, 23, 24, 25, 26, 27, 28, 29, 30, 31, 32,33, 34, 35, 36, 37, 38, 39, 40, 41, 42, 43, 44, 45, 46,47, 48, 49, 50, 51, 52, 53, 54, 55, 56, 57, 58, 59, 60,61: n = A,T,C or G
  misc_feature 62, 63, 64, 65, 66, 67, 68, 69, 70, 71, 72, 73, 74, 75, 76,77, 78, 79, 80, 81, 82, 83, 84, 85, 86, 87, 88, 89, 90,91, 92, 93, 94, 95, 96, 97, 98, 99, 100, 101: n = A,T,C or G
tnnnnnnnnnnnnnnnnnnnnnnnnnnnnnnnnnnnnnnnnnnnnnnnnnnnnnnnnnnnnnnnnnnnnnnnnnnnnnnnnnnnnnnnnnnnnnnnnnnnnatcactaaaactaaataacttatttttaaatgtagtgagccctcccacattttatttggttaaaaatcaaaatggagcaagtactgtaaaaaaaaaatgaaagcagatctcctctgaaaaagattgcatatcaaaataagctgctgttgtcatgtttttattatacaatttatggtatttttccacccatgcttataagtaatgaatggtaattaaataagcacatatagtatccatatgagtatgaatagatatgttcaataaatatttaaattagtagagtggtttggctctaatttgtatcaacctaagcctccaaaagaaaaatgactcccattagcatcttatccttataggtacactctaagactatttttcataagtagaaaaaaaatgaaaagaatctcaggccaaaaaaatgctcaccactgacgttacaacagttaagggcttcattraagtcctcctcagttaaattaacattcaaacatttcaaggcatgctccaaatcaggtataccaatcttgccattatcgacatgtgacaagatgttagcagcttctttaatctctacaaagataaatgtacacaagctattatggtgtaaaaaacattcaaaataatttgtccaaaatctaccataggtaaacctcaaattaaatatttatctgaatcaaaatctctccaaaggaaacacaatattttctatttgtaactgatggcccacttccctcaagcagcacttgaaactaaaaaacattatggcaaagagaataatatgatgggctattgacatgtattataataagactttgtcttcattcattcatccattaaaaactgaatgagctacatgcctccctgtacatgtagatctaaagatttctaccacctgatgatgtaaacaaaggctaaaatttgagattgaagctcttgatccccagggcctcagatagttcatactgtgcttttgtgtgaattgggaaa

SEQ ID NO: 716288 - DNA, 2429 bp, Homo sapiens
gtgtgcaaatacacacacactgatgcctcagatcacctcaaggagatgaaaccagaactctggggataaaacttatgttctagaattttacaatttgtctagcatttttagatagtttcaatgtgtagctagcattgtgaattgctgaactaagattacagtcaactttggaggaagatatagatgggaagagaggtagttactttttttctgtttctactgatgtttcatacatttcgagaaatccattgagaaaactctttaaacactttctgctctctctacttcccctaggaataggagtggcagagaattggctctcagtcaccaaatctcagtatcctacatacagaataaagtgccttgctttagagcaaagacttggtcaattagcattagataaattttctgtgtttccaaaggtagaaatattctcaccatcctcccactttaatcaagccaccaattgccattttacctatttaattacaggcttccttttgaaaggttggctgctgaggaattagtttccagggtcactgaacccctgtgagcagcctcgcctctgaatgccacagagggtgctcattctcaattcaaaggcttgtctacttagatctctgcttcaagctctggatgtagtcagcctacaaaacattgctcagaaagaaagttacaagtgcttgatcagcccctgtgaggatattgaattcagttcttatttttaatcatgtttaaaggtgggatctcttcatttgttatgataaaacccatctttcattctgaaaagtaaatcaaagcaagaacaaaacagtgtaatcagtgcctctgatggtttatacaggatatggagatatttcagaattgtaaatatgaatgtgaatttttgtatcagtgtaaactgatactgatactaagaaaaatttcccccttccattgtcaaagagaagagagttaaagttgtttctctctatcattgttcttttcttctgacataagcagttgttttagcctctgaagactctggtagatatgcataaactgatctgggtttcattctatttcacaaatcaatgaacaaagctgtcctcctgaaaaattattgaaagctcttcattacaaatgacaatgaaggaaactagaagaaccagatgaagttctaaatcctaagtgggttttctgagcatcagaataggctgaggtaaaataaataaataaaaaataaagccaactctgtttgacttgcaaatttgttatgaaatacatatggaatgcttcaatgctggcttaaccagcccttcttctctgaaataatagtgcaaatttatttagcttctttcctccttgaagattctcaaacattctataagttatgagtagagatgttccctagagagatagaaaaagaacatagcagaaaggggcagtaaacatttccagcccttcaatgatgttagaaactatttgaattcaggatagtgacaatattccttcctccaacatatgtattagacagtttcccaggttttatagttgaatagtacatgttggaatagtgagtcaccatacaaaaaaagtctttatttagaattttttggtaaaaaggaagaaaaaacatttttttatattattaaaaaagggaacagttttctaaaaagtgactactctttgacactatctaatttgaaagagttttgaaaacattttggcacatttcaatatttcagttggattggagaagacattcttcaattagtaaacatttatttcagagccttccccaagagaaagagttgctccctcactttgttttctttttctttaggaatctaagggagtgatacatctttctgtcttataatctctgtagatccaaattcacaaatatttagcctatggaattcagcactatgttttgtgttttgctcaaattggatttcagtgagcttttctagaacaagttggatctttatctccttcctttcctggacttgaaggctttgtaatcacccaattgggttcttcttgccttctgcccagaaaaagctaatacactgagaacagcaggaatgtttgcagtaaagaaagagtttwatgatcacagggccagccaagtggaaggacaggagataattctcaaatctgcctctccaagaatttggggactaggggttttcaaggatagcttggcagtcagaggactagggaatgaggattgctgatgaggtgggtctgggatgaaatcatagggggttgacactgtcttattgtgctgagtcagttactggttgggggttacaactacaagatgttagttggtccgtatagaatgcaaggtctgaaaaatgtctcaaacactagtcttaaagtatttacagtagtgatgttatccataggggcaactgaggaagttaatcttgtgactattg

SEQ ID NO: 716289 - DNA, 1352 bp, Homo sapiens
tacttgatatacagaaacatcttaataaatattaattctcaatatcatggaaagagaaaatgaaaacatgagaatagatgtctgaacattatgctgaccaaggaatgctggtttgtatggaaacttgatgtttagcgttttcggaactgtcaaactattttccaaagtggacacattttacatttccacaattagtgtttgagggttcctatttctccatgttgccactaatgtttattattgcctgtttttcttaatatagccatactaataggcataaaattgtatctcattgtggttttgattggcattttcctaattactaattgttttgagcatttttttatgtgcttattagtcatctgtgtagcatcttagaagaaatttctattgaaattcttcatttatttttaattgggttatttatctttttacatattcaggttattagatcctaatcaaatttatgatacgtatatattttctatattttttgcctttataatttttgatagtgcctttgaagtacaaacatatttaattttgattatatccaatttatttttctttggttgattatactttagatgtcataggtaagaaattattacctaattatatgatctgaaacttcatcacaaacattaatagttaagtgatattgtttattctaattgtatttgattatatttccagatctaggactaaataaggaaattcatcttgcaatcttcagtaatgataataaaacttgttattttttaaaaaamaaattattacctaatccaacatcacaaagatatatacctatgttttcgtctaagagttttacaattttatcttttccatttatgtctttgatctattatgagttaatttttggacatggtatgaaacagtagttcaacttcattctttcacatgtggctacccacttatctttgtaccatttgcttaaaaggctattccttcctcttgaattgtctcggcacaattgtcaaaaatctattgagcataaacatatgacctcatttctagactctcaattctattccattgatctatttttctactatcatgtaagtgcctcataatcttgattagtgtagctttgtagtaagttttgaaatcaggaagtataagtccattgacttagttcatattttttaagattgttttggctattctgagtcacttgcatttccttattaattttagattcagcttatcaatttctaaaaaaaaaacgagggattttgatagggttttttgaaaaatgttgatcaatttggagagtactaaatcttaataacattgatttttttaactcatgaatatagatgtcttttcat

SEQ ID NO: 716290 - DNA, 603 bp, Homo sapiens
gccctcagcattccttctgggcggcagacgcagcttgtcagtttgccaatattctgcatttatgagaacagtttaatgtttactcatataacctccagtggtatacagagttgatcacgaccctcactcttttggcctgcaacagatctctctgtctggtttgttttaacatttctcagcatgcacataattggataaatgagcactgttcacagaagtgcctggtgggaaaaggtagaaacaaagagtttcagaatatgtttcaaggctgaacacaagaaaggaaaacaagttttagaatgcattttgaggttcgtatacttgattacaatacaagtcttaagtggcagaattattatttaaactcaagtgtgttgattcttaaatatctgagatttctattaccatattgcttttctaaagcactaaaattcaaacccaaacggtactatcttcatcataatctcaaatcataaaagctcaaatcagagaaagtatttttcttctaaacatttctttttctttaatgctattctcccatcaygcccagatctactttttttttctttttgtcccagcattaataatgttttaatgtctttc

SEQ ID NO: 716291 - DNA, 948 bp, Homo sapiens
aagctccttggtaacctcacaggccagggctataccagcaagtgactgtgcttcctcaccctcttcagacaagtgttctatgtagtggttcagaacatccataacaggctttatctcagtaataagcaaggtgtaagagaataaatgtcagaatttatcctgaagcatatccttcctcatcttttctgcatacacaaaataaaatttttaaaattttcttttaaagcttatgaaaaggaatctacataatgttaagagaatgacttcacacccagtccatcaatactgtaagtatttatgacctaataattgtaagtgtcctcatttggaggttgatttatagaatagaaaatattggaactctttaatttcttatttcctgctttttctcttgtgtttcagatcttacaggtgctcaggacggcagtgtacgaatgtttgaatggacgcggcctcagcaacttgtctgctttcgtcaagctggcaatgcaagagttactagattatattttaattcacaaggcaacaaggttagtttctgggggctactgctgaattcatctgaaaatagttgtggatatttaggagtaagtgataaaagtgcatcgaaaaatgaattcagtgaccctggatttaaactgagtagrcagtttgttggagtctattcatacactctcttttcttccaatagaagcaaaaatctacaaaatttagtatggattaatcatctatttaaagatactaaatatactgtgagagtaaaaaaactgcctgtgttgagtgtgttggtgattcctgtaagcacagtaaagttcttgagagaaacctagtttcttactaaatttcatcagtaagaggttagaggaaaacagtgaaacaggtaagcagttaagaagtaatggaagggccagtcacagtggttcacacctgtaattacaacactttagg

SEQ ID NO: 716292 - DNA, 568 bp, Homo sapiens
ttttcagcaagttttcccagtaccacttagagtggcttactagcaagtgtaacttatacctcagggggtggcttcccagggagtctcatcagcaccaaagtatgcagtttccgctttgccagtcccagtctgtcacagctcagataactaatactcagtcaggtagtgtataccttagcttttttcctaagctttcccartggaacatgtagtcatttataacagtgactatacactggggaaaaggaactacacagatattttgggaattagcagacattgtctctgtattgactaactcctagagacctcagatgtgactgtgctcacaagtcaaagtgaaggcttatagcagtcaggtggcagattaagccttagcccaaatctgattcacagtgggaccaactggtctatgctccctttccctcaattgttttttcctcacctcttggatgtatatttggaattgatatacttgtcactctcagaatccccaagttctttctctgacccataggtaagggccattatggtaggagggactaagtagaagtccatagaaagttcc

SEQ ID NO: 716293 - DNA, 1039 bp, Homo sapiens
tgttaataattgcttgtaggaactaatggatcagatctgtctcatagaaagtaaaacaaaaatataggtagtcagacgtctgcaatttacttagagtaaataatcggacttgacacctcatcttatttgactgcacagtaaaacaaaggcattgttctccagtgaaaccratacttaagctatatatacaattttttaaaagattagaccattattgtttaccaacagcaatgtcattaaaaatgaatacacccttaaaagagaagtggccatatttcttacctagctgaagacttaaagaaaaaaaaagcttaccatcaatatgttttttcctgttgtaacaccacacattgctgtgttacaaataggattaaagtatcctgtattgattgcttttgtttttgagacaaatgtttagtgaatgatatacaggttacccattccttccattatgctcctggaatcaaataaactgagtatatgagttatgaaagtaaaactatgtaaataaaaatgaataaatgcatgagagttgtagtaattatttatatgtcaaaattggagttttaacaatataaaggaaaaaattgcctttattagagaagtttgtagagaaacattcacattcattgttagataatcagtactgttaagtattgtgcagtctgtaaaagtttttttcccccctgtgggacaacagtctcctttctagatcccttcatctccctgttatctatttctccagggttttcaactggattcctcattcttcttgatagagaaaaataaatagatgaatattcttacctctaagacattgggaaattttagttctcccttcccaggatgcttgcatcttaagcaaatggatatttaacagtgggacttctgatattcgtagccaacaagcagaggaaaatgattttttcaggtggtttctttcccaacctcttcaaatttcagtgcacagtatcacctcctaccccaatttataagaatctacaggtttcaaagagaataccttttacaaaagatatat

SEQ ID NO: 716294 - DNA, 1684 bp, Homo sapiens
  misc_feature 642, 643, 644, 645, 646, 647, 648, 649, 650, 651, 652, 653,654, 655, 656, 657, 658, 659, 660, 661, 662, 663, 664, 665,666, 667, 668, 669, 670, 671, 672, 673, 674, 675, 676, 677,678, 679, 680, 681, 682, 683, 684, 685, 686, 687, 688: n = A,T,C or G
  misc_feature 689, 690, 691, 692, 693, 694, 695, 696, 697, 698, 699, 700,701, 702, 703, 704, 705, 706, 707, 708, 709, 710, 711, 712,713, 714, 715, 716, 717, 718, 719, 720, 721, 722, 723, 724,725, 726, 727, 728, 729, 730, 731, 732, 733, 734, 735: n = A,T,C or G
  misc_feature 736, 737, 738, 739, 740, 741: n = A,T,C or G
tgcattattaatatataccagatgcaacttatccaaatgataattgatacaatgaattcatagacctaagaaaataaaatacaaaataattgagaggtaggtgtctctcacagaaagtgaccctgatcataataaaatacacacatccatattcagcgattataggaaaggaatcaatcttttgtagtattaatatacttttgtggtataatctgaaattttttccattttttataaatattaatctaaaatattctaaaaataatttatttcttggttattctcattttgagattgccttgattaacaataatccaaagaatacaattgataaatgaataagtattcgtcacaggataaatagtaagggcacatctcccagtttatttatataataaataattctagcaaaagtcaactattccattttataaatgaacagaatacataaggggatataggaagacagggctctactagattaagactgtatgtaatttggggtgaaacttattttttgtgagatttacaagtgactgtgataattctctggattgtcagccaaaacccaggaaaacatggataaagaatgactgaattttcacagcctgaaagggaagttaaggtacatggtgccatgannnnnnnnnnnnnnnnnnnnnnnnnnnnnnnnnnnnnnnnnnnnnnnnnnnnnnnnnnnnnnnnnnnnnnnnnnnnnnnnnnnnnnnnnnnnnnnnnnnnaatctaaaaaaatatattacacttcctcctctcaagatttttgtgaagagaaaatcagataatatgtatgaaaacacgttaaacagcagactaactcataaatgcaaaacaatcataatattgtaatmtttcaaggagaataaaattgatggtttgtgtgatattacgttagtaatagaagaattatatcccctaatcacattgaaaataataatagcaattttttaaaagacgctgaagtttagtgattttattctaagtcttggggacagtaggaagttaggtattatcactagctagttaaaaattatttattgccttcttatgtgcacaaaatattctgctgtaatctaaaaagctctttatctcaggaaataagttactcagtttcctcatctgaaaattaaaatggttaaactacacgttcctcatgttgttttctggacaaaatccatatgattttttagcttttctgggttgtataagccaaacaactattcacagtacatttttatgttgtcataaaatgataattactattaactttattaaacatttatttacagagcaaattactacaagttcagtgctctactaatcatttttgccatctataataaaataaactcctgcttaataccaacacctaatccatatggtatcataaaagatgctggtgaaacacaaaaccactggtataactgataaaatgttatattcaacaatcatattaggagccaaacacagaacaggtaaaacatttcctgcaaaattgatacagatgactgctttgaatgtgactgtaaaaatcctgaaaagaacatcaaaagtttattggaaagcacttttataataaaatatagaataatattaagatatcaatgttagcttctcagggttcaaagtagaagaaagaacaatataacaaaatatacataaaaaa

SEQ ID NO: 716295 - DNA, 794 bp, Homo sapiens
ttttctaagcttattgctgctgaagggatgtattgaaaaataaaaatgtcttgctaaacagtgcagtacacacatagctggagattgatatcacacaataaatgacaaaaatcctctagcaagaacccctgtctttctctacaccttctatgatagacttgctaaacttgtatttctccaatatacacacrgtgtataacttcccccattttgcttattctgcagattaatggcctggtaactttttgtgtcttgcaggctgtgatgcaggccatggcacaattgactaaggcaccaagtactaggcagagacttcacccaccaccacccaataaccaggaagagttagttgcctatacacactttgttttaatcagtgagccccctgcatctatacttgaaatataggtgttaggttgcttctggaaaagatcagaaaaagactgcgtcttaggacactccagcaaaataccataaactaggctcataaacaacagaaatttatttcttacagttctggaggctggtaagtccaagatcaaggtgctggcagattcagtgtcgggtgagcccactttctggctcatagatggagcctccctgctatgtccttacatgatggaagaaattaatgaattactctgggccccttttatatggacatggatcacattcctgagagctctctcctcatgacctaatcacttcccaaacaccccacctcctaatactgtcaccttgagggttaggattttaacatatgaattttgagagatgtcaacattcaggccata

SEQ ID NO: 716296 - DNA, 794 bp, Homo sapiens
ttttctaagcttattgctgctgaagggatgtattgaaaaataaaaatgtcttgctaaacagtgcagtacacacatagctggagattgatatcacacaataaatgacaaaaatcctctagcaagaacccctgtctttctctacaccttctatgatagacttgctaaacttgtatttctccaatatacacacggtgtataacttcccscattttgcttattctgcagattaatggcctggtaactttttgtgtcttgcaggctgtgatgcaggccatggcacaattgactaaggcaccaagtactaggcagagacttcacccaccaccacccaataaccaggaagagttagttgcctatacacactttgttttaatcagtgagccccctgcatctatacttgaaatataggtgttaggttgcttctggaaaagatcagaaaaagactgcgtcttaggacactccagcaaaataccataaactaggctcataaacaacagaaatttatttcttacagttctggaggctggtaagtccaagatcaaggtgctggcagattcagtgtcgggtgagcccactttctggctcatagatggagcctccctgctatgtccttacatgatggaagaaattaatgaattactctgggccccttttatatggacatggatcacattcctgagagctctctcctcatgacctaatcacttcccaaacaccccacctcctaatactgtcaccttgagggttaggattttaacatatgaattttgagagatgtcaacattcaggccata

SEQ ID NO: 716297 - DNA, 794 bp, Homo sapiens
ttttctaagcttattgctgctgaagggatgtattgaaaaataaaaatgtcttgctaaacagtgcagtacacacatagctggagattgatatcacacaataaatgacaaaaatcctctagcaagaacccctgtctttctctacaccttctatgatagacttgctaaacttgtatttctccaatatacacacggtgtataacttcccccattttgcttattctgcagattaatggcctggtaactttttgtgtcttgcaggctgtgatgcaggccatggcacaattgactaaggcaycaagtactaggcagagacttcacccaccaccacccaataaccaggaagagttagttgcctatacacactttgttttaatcagtgagccccctgcatctatacttgaaatataggtgttaggttgcttctggaaaagatcagaaaaagactgcgtcttaggacactccagcaaaataccataaactaggctcataaacaacagaaatttatttcttacagttctggaggctggtaagtccaagatcaaggtgctggcagattcagtgtcgggtgagcccactttctggctcatagatggagcctccctgctatgtccttacatgatggaagaaattaatgaattactctgggccccttttatatggacatggatcacattcctgagagctctctcctcatgacctaatcacttcccaaacaccccacctcctaatactgtcaccttgagggttaggattttaacatatgaattttgagagatgtcaacattcaggccata

SEQ ID NO: 716298 - DNA, 794 bp, Homo sapiens
ttttctaagcttattgctgctgaagggatgtattgaaaaataaaaatgtcttgctaaacagtgcagtacacacatagctggagattgatatcacacaataaatgacaaaaatcctctagcaagaacccctgtctttctctacaccttctatgatagacttgctaaacttgtatttctccaatatacacacggtgtataacttcccccattttgcttattctgcagattaatggcctggtaactttttgtgtcttgcaggctgtgatgcaggccatggcacaattgactaaggcaccaagtactaggcagagacttcacccaccaccacccaataaccaggaagagttagttgcctatacacactttgttttaatcagtgagccccctgcatctatacttgaaatataggtgttaggttgcttctggaaaagatcagaaaaagactgcgtcttaggacactccagcaaaataccataaactaggctcataaacaacagaaatttatttcttacagttctggaggctggtaagtccaagatcaaggtgctggcagattcagtgtcgggtgagcccactttctggctcatagatggagcctccctgctatgtccttacatgatggaagaaattaatgaattactytgggccccttttatatggacatggatcacattcctgagagctctctcctcatgacctaatcacttcccaaacaccccacctcctaatactgtcaccttgagggttaggattttaacatatgaattttgagagatgtcaacattcaggccata

SEQ ID NO: 716299 - DNA, 615 bp, Homo sapiens
agtgcaatggtgtgacctcagctcactgcaacttccacctaccaggttcaagtgattctcctgcctcagcctcccaagtagctgggactacatacaggtgcctgccatcatgcccagctattttttgtatttttagtagagatgaggtttcactatgttggccaggttggtctcgaactcctggcctcaagtgatctgcctgccttggcctcccaaagtgctgggattacaggtgtgagccaccatgcccagcctacctccaggatttttaatttcttggcagggataatatgacatcaaaaacaagcttctgttttattaataaggagaagatttattcacaactaatttctgcttcaaatcacttccaagcrtataacgaatgccaaccttaaaagagggattccctatttgattgtctcagtttattagaatatggatggtcttttcattctagataacatgctctttgtttgcttgtttttgtgtaggaattatcttggaatctgataattctgagactctactaatgacgaggcactgcatgtctacattatgtgctcatttccactcattccttaaaatattatgaaacactgttacatacaaaatatg

SEQ ID NO: 716300 - DNA, 596 bp, Homo sapiens
tttatctccttgtagtcctggggaggaatggaggagtagygttggtgccactagggtgtcgttctcttaagacagatacaatgctgtttctttacaatactggctaagttgctgtcacaaaaatactccaaatatgcagtagctcaaacaagataaagcatatttctttctcacttagcagcctgaaagtgggcaggtggttctgggtgagtaggtgtttttgttccatttcatccagggacacccttttgtcttggggcctgcagctgcaccagggtgtgccatctgctacagggtggaggtgactcaaagcccatgagtaaggaaaatggtaggatgcagtaagtaagttgtttccctttttgaggacctgacctggaagttgcaatcatcaaatctacttacattccattggctagaaatgagtgtcatggccactcccagatgcaagggtgtgcactccagctggatggctggccagaatcaaatcctgggaattgacacaggaagacaattagccttctctgcttccaatgccaactccagcaatatctttccagaattgagacctctcatactgttctggtctgtagggc

SEQ ID NO: 716301 - DNA, 421 bp, Homo sapiens
agtgaggaatgtgcctgaaacagctgcgctagaagatatgaactcctactgcttataaattgtgcatagtgaaattattcattcactacttttttgagacggagtctcgctctgtcgcccagactggagaacagtggtgcgatcttggctcgttgcaaattctgcctctcaggttcaaacaattctcctgccttagcctcctgagtagctgggattacaggcaaacgccaccacacctggctaatttttgtatttttagtagagacagggtttcaccatgttggtcaggctggtctcgaactcctgatctcatgatctgcctgccttggcctgcaaaagtgctgagattacaggagtgagccaccacgcccggcctcattcactccttaactaaatacactgaaaaactactrtatgtcag

SEQ ID NO: 716302 - DNA, 2715 bp, Homo sapiens
  misc_feature 75, 144, 1974, 1975, 1976, 1977, 1978, 1979, 1980, 1981,1982, 1983, 1984, 1985, 1986, 1987, 1988, 1989, 1990, 1991,1992, 1993, 1994, 1995, 1996, 1997, 1998, 1999, 2000, 2001,2002, 2003, 2004, 2005, 2006, 2007, 2008, 2009, 2010: n = A,T,C or G
  misc_feature 2011, 2012, 2013, 2014, 2015, 2016, 2017, 2018, 2019, 2020,2021, 2022, 2023, 2024, 2025, 2026, 2027, 2028, 2029, 2030,2031, 2032, 2033, 2034, 2035, 2036, 2037, 2038, 2039, 2040,2041, 2042, 2043, 2044, 2045, 2046, 2047, 2048, 2049: n = A,T,C or G
  misc_feature 2050, 2051, 2052, 2053, 2054, 2055, 2056, 2057, 2058, 2059,2060, 2061, 2062, 2063, 2064, 2065, 2066, 2067, 2068, 2069,2070, 2071, 2072, 2073: n = A,T,C or G
aagaagcttatcaaggaatctcaacccaggcagtatcttttagaagagatctagaaaatagaatgttctctattntgtacatttccagcaatgttcaagtatctcatgattttctgctattccatttaactccaccttaaatcntacagctcataaaacatggcttatgtcactagtttagcaataaaacacctttactatgacatctctagtgctattattttattttacatattttgtaacctcaactcaagtttacattctttgaaggcagaagccctgtgttacttacattttttaaattactttcagcatcttgtgctgtgttgttgacatagtggtagatacttagcatttgtagtaaactgatcataatcaaagaacaacattactactgttattctgtgattggacatcaagagaaagcttccttaaccctcacacccagcatcttatcactataaagaccactgaaacaatagttgatggtccaggcccagccatgagattggtacacgttttttttaatctgatgtatcaaaatacaataacctctatcccttgctccttcttcttcttcaataagcaattacacacattttagggaaaagaagataattcaaaaattcaatactttttggtccagctaacagtgagaaatgttaaggccttagggccacgttatactgaatggatatttttttttatagctcacatacctttttatttttatatataaccaaagataatgcatgtgacggttttccatatctatggtatgaytggcagtttccactctcctcaaagtgaaaggaaaacactggttataccaagggtaggtcatatagccaatgggttccaatggcccaagtacaaaatataatgtacaaaagtgtccagtgactgcactaatctaatgaggctggtgtgccatgtttgtcaagtgtggagctctcttgcacaggtactgacagctggtaatgagatacagaaactttttccacatcagtagcccaatccctcctggcttggagctgtcccaagatctgtgccctctgctaccgtgtttatgacacacagcacagcatgggctgctgaacgtgcccatttttcagttcaaggggtgctcaaccatttcttccacatctttactcatgagaagtgattttccaaattcttggatcctggaaatgacccaaacatagctcactaaactaatttctctcagagtttttaaacgcatgtgcatttgagcataaacactatccatatgtttctgattcatttacactgaactcatcaaaggactgtgttgtaagagttgtttgatgtccaagaatacttgaggggtttttttaagatggaattttatactttctttcaccattttccttaggaagccgaatgttgttgagagtaaacaaacatggacccccaaggatctggggtttattcttatattcaaaattcagaaggaggtaactcggcaggaaaggcatccctggcctctggtgtaacctggcactattccccaaagtgtaggaagtgcttagggtgaacagggatactcctttcaggagaccttcttttacttggagatttattcattggatcccaaaaggccattacaaaacctaaaacaaatacaactcttggaagctagctggggtctcttgcttcccagtttgaggagaaagctttaaaatgtttctactgcaattgttcttcattattggaagagaaccagagaaggctttttaggaaacccagtatttattcacctgaaagcatccgtgtcctacatttatatgctaaagagacaagacaagcatctgtggctacagctgagaactaattaaggttgctctttaacaaacattatgtggttcattccattcttccttgattaagaacaaaagagaaggagagtcatttattgtcatgagtcacttgaggtacaatggaaggaattcnnnnnnnnnnnnnnnnnnnnnnnnnnnnnnnnnnnnnnnnnnnnnnnnnnnnnnnnnnnnnnnnnnnnnnnnnnnnnnnnnnnnnnnnnnnnnnnnnnnntttatatgaaggaagggtatcttatttcaaaccgagtaagttgaatgagagcaaacggcttccttctttaatagtatctgatatttagtttgtacctgacataaccctttcaaatacattatgttttttggctttgcaacaaaccttatgagataagtacgattaagccaaatttacagaaagagaaacaaactcagaaagattatacagctggtaagatcacctaggtaggaaatggcaaagttagactcaaactcaggtttctaattccacatcctgtgcctttcactttccttccaggccatacggaagcctatctctcacaccacatctttcagggtggtttgtcaactgggtttatgttacaataaaatataactttcctgcataatcccttgatcttgaactgttgtaattgatcaaggcctatttgttgcctgagtataaatggaggcaaataatatactttgatctccttacacaggatctgcttccaagtatgttgcacaaacttgctaaatatcatctaatattaaagtggcagaaaaacattttattccatttatttttatttttttgctcagctagaatggccaagaagaagccaatgaattatagttgaatttgtatttataaatgtta

SEQ ID NO: 716303 - DNA, 2715 bp, Homo sapiens
  misc_feature 75, 144, 1974, 1975, 1976, 1977, 1978, 1979, 1980, 1981,1982, 1983, 1984, 1985, 1986, 1987, 1988, 1989, 1990, 1991,1992, 1993, 1994, 1995, 1996, 1997, 1998, 1999, 2000, 2001,2002, 2003, 2004, 2005, 2006, 2007, 2008, 2009, 2010: n = A,T,C or G
  misc_feature 2011, 2012, 2013, 2014, 2015, 2016, 2017, 2018, 2019, 2020,2021, 2022, 2023, 2024, 2025, 2026, 2027, 2028, 2029, 2030,2031, 2032, 2033, 2034, 2035, 2036, 2037, 2038, 2039, 2040,2041, 2042, 2043, 2044, 2045, 2046, 2047, 2048, 2049: n = A,T,C or G
  misc_feature 2050, 2051, 2052, 2053, 2054, 2055, 2056, 2057, 2058, 2059,2060, 2061, 2062, 2063, 2064, 2065, 2066, 2067, 2068, 2069,2070, 2071, 2072, 2073: n = A,T,C or G
aagaagcttatcaaggaatctcaacccaggcagtatcttttagaagagatctagaaaatagaatgttctctattntgtacatttccagcaatgttcaagtatctcatgattttctgctattccatttaactccaccttaaatcntacagctcataaaacatggcttatgtcactagtttagcaataaaacacctttactatgacatctctagtgctattattttattttacatattttgtaacctcaactcaagtttacattctttgaaggcagaagccctgtgttacttacattttttaaattactttcagcatcttgtgctgtgttgttgacatagtggtagatacttagcatttgtagtaaactgatcataatcaaagaacaacattactactgttattctgtgattggacatcaagagaaagcttccttaaccctcacacccagcatcttatcactataaagaccactgaaacaatagttgatggtccaggcccagccatgagattggtacacgttttttttaatctgatgtatcaaaatacaataacctctatcccttgctccttcttcttcttcaataagcaattacacacattttagggaaaagaagataattcaaaaattcaatactttttggtccagctaacagtgagaaatgttaaggccttagggccacgttatactgaatggatatttttttttatagctcacatacctttttatttttatatataaccaaagataatgcatgtgacggttttccatatctatggtatgactggcagtttccactctcctcaaagtgaaaggaaaacactggttataccaagggtaggtcatatagccaatgggttccaatggcccaagtacaaaatataatgtacaaaagtgtccagtgactgcactaatctaatgaggctggtgtgccatgtttgtcaagtgtggagctctcttgcacaggtactgacagctggtaatgagatacagaaactttttccacatcagtagcccaatccctcctggcttggagctgtcccaagatctgtgccctctgctaccgtgtttatgacacacagcacagcatgggctgctgaacgtgcccatttttcagttcaaggggtgctcaaccatttcttccacatctttactcatgagaagtgattttccaaattcttggatcctggaaatgacccaaacatagctcactaaactaatttctctcagagtttttaaacgcatgtgcatttgagcataaacactatccatatgtttctgattcatttacactgaactcatcaaaggactgtgttgtaagagttgtttgatgtccaagaatacttgaggggtttttttaagatggaattttatactttctttcaccattttccttaggaagccgaatgttgttgagagtaaacaaacatggacccccaaggatctggggtttattcttatattcaaaattcagaaggaggtaactcggcaggaaaggcatccctggcctctggtgtaacctggcactattccccaaagtgtaggaagtgcttagggtgaacagggatactcctttcaggagaccttcttttacttggagatttattcattggatcccaaaaggccattacaaaacctaaaacaaatacaactcttggaagctagctggggtctcttgcttcccagtttgaggagaaagctttaaaatgtttctactgcaattgttcttcattattggaagagaaccagagwaggctttttaggaaacccagtatttattcacctgaaagcatccgtgtcctacatttatatgctaaagagacaagacaagcatctgtggctacagctgagaactaattaaggttgctctttaacaaacattatgtggttcattccattcttccttgattaagaacaaaagagaaggagagtcatttattgtcatgagtcacttgaggtacaatggaaggaattcnnnnnnnnnnnnnnnnnnnnnnnnnnnnnnnnnnnnnnnnnnnnnnnnnnnnnnnnnnnnnnnnnnnnnnnnnnnnnnnnnnnnnnnnnnnnnnnnnnnntttatatgaaggaagggtatcttatttcaaaccgagtaagttgaatgagagcaaacggcttccttctttaatagtatctgatatttagtttgtacctgacataaccctttcaaatacattatgttttttggctttgcaacaaaccttatgagataagtacgattaagccaaatttacagaaagagaaacaaactcagaaagattatacagctggtaagatcacctaggtaggaaatggcaaagttagactcaaactcaggtttctaattccacatcctgtgcctttcactttccttccaggccatacggaagcctatctctcacaccacatctttcagggtggtttgtcaactgggtttatgttacaataaaatataactttcctgcataatcccttgatcttgaactgttgtaattgatcaaggcctatttgttgcctgagtataaatggaggcaaataatatactttgatctccttacacaggatctgcttccaagtatgttgcacaaacttgctaaatatcatctaatattaaagtggcagaaaaacattttattccatttatttttatttttttgctcagctagaatggccaagaagaagccaatgaattatagttgaatttgtatttataaatgtta

SEQ ID NO: 716304 - DNA, 1068 bp, Homo sapiens
ggacccttgcaattacctgagtctcacctgaataactcagaataatctcctcatctcaagatctttcattccaatcacatctgcgagagttttctcttgctttgttttcgtttggattttgccatcttaatgtaatrtattcacagattctaggagttgagatatgaacatctttgaggagagggggcattgttctgtctaccacaccaggtagacatcctgcagcccgcacaacaaaggatcatccagcttaaaatgtcaggagtacagaggttgagaagcctgcatgctctgatactaccagatttcccacagaccctaattcaatgccactgcttaatgtgcatgacaactgcagaccccctattccttgataccatccatccaaaacactccctacaatgttttttaaatatgtgtgagtgttattcagtccaagtaagtgacagaaatcctgtttccctaaaaagtttgataacaggaaaaaacagtcatttattaggcttgacatgattcttgtgacttctaagtttggggcttcaggtgtttgaaagttactcagaagccaggcacggtggctcacacctgtaatcccagcactttgggaggccaaggtgggcggatcacttgaggtcaggagttcgataccagcctgaccaacatgttgaaaccctgtctctactcaaaaaatacaaaaatcagctgggagtggtggtgcacgcctgtagtcccagctgctagggaggctgaggcaggagactagcttgaacctgggaggcggagcttgcagtgagcctagaccatgccactgcactccagcctgggcaacagagcaagactctgtctcaaaaaaaaaaaaaattttttttactcagaagggaaaaaatgaactcctcaaactttgggacagaaaatgggaagtaaaagcagagaagaactatcaccaacccggtgcctcatacctgcccattttctgcttccacttcctgggagtaaaagtctttaggaagggaaggtgaattagtattgattatacatgcaccaaaagacaaacactgggctgtatgc

SEQ ID NO: 716305 - DNA, 1068 bp, Homo sapiens
ggacccttgcaattacctgagtctcacctgaataactcagaataatctcctcatctcaagatctttcattccaatcacatctgcgagagttttctcttgctttgttttcgtttggattttgccatcttaatgtaatatattcacagattctaggagttgagatatgaacatctttgaggagagggggcattgttctgtctaccacaccaggtagacatcctgcagcccgcacaacaaaggatcatccagcttaaaatgtcaggagtacagaggttgagaagcctgcatgctctgatactaccagatttcccacagaccctaattcaatgccactgcttaatgtgcatgacaactgcagaccccctattccttgataccatccatccaaaacactccctacaatgttttttaaatatgtgtgagtgttattsagtccaagtaagtgacagaaatcctgtttccctaaaaagtttgataacaggaaaaaacagtcatttattaggcttgacatgattcttgtgacttctaagtttggggcttcaggtgtttgaaagttactcagaagccaggcacggtggctcacacctgtaatcccagcactttgggaggccaaggtgggcggatcacttgaggtcaggagttcgataccagcctgaccaacatgttgaaaccctgtctctactcaaaaaatacaaaaatcagctgggagtggtggtgcacgcctgtagtcccagctgctagggaggctgaggcaggagactagcttgaacctgggaggcggagcttgcagtgagcctagaccatgccactgcactccagcctgggcaacagagcaagactctgtctcaaaaaaaaaaaaaattttttttactcagaagggaaaaaatgaactcctcaaactttgggacagaaaatgggaagtaaaagcagagaagaactatcaccaacccggtgcctcatacctgcccattttctgcttccacttcctgggagtaaaagtctttaggaagggaaggtgaattagtattgattatacatgcaccaaaagacaaacactgggctgtatgc

SEQ ID NO: 716306 - DNA, 1068 bp, Homo sapiens
ggacccttgcaattacctgagtctcacctgaataactcagaataatctcctcatctcaagatctttcattccaatcacatctgcgagagttttctcttgctttgttttcgtttggattttgccatcttaatgtaatatattcacagattctaggagttgagatatgaacatctttgaggagagggggcattgttctgtctaccacaccaggtagacatcctgcagcccgcacaacaaaggatcatccagcttaaaatgtcaggagtacagaggttgagaagcctgcatgctctgatactaccagatttcccacagaccctaattcaatgccactgcttaatgtgcatgacaactgcagaccccctattccttgataccatccatccaaaacactccctacaatgttttttaaatatgtgtgagtgttattcagtccaagtaagtgacagaaatcctgtttccctaaaaagtttgataacaggaaaaaacagtcatttattaggcttgacatgattcttgtgacttctaagtttggggcttcaggtgtttgaaagttactcagaagccaggcacggtggctcacacctgtaatcccagcactttgggaggccaaggtgggcggatcacttgaggtcaggagttcgataccagcctgaccaacatgttgaaaccctgtctctactcaaaaaatacaaaaatcagctgggagtggtggtgcacgcctgtagtcccagctrctagggaggctgaggcaggagactagcttgaacctgggaggcggagcttgcagtgagcctagaccatgccactgcactccagcctgggcaacagagcaagactctgtctcaaaaaaaaaaaaaattttttttactcagaagggaaaaaatgaactcctcaaactttgggacagaaaatgggaagtaaaagcagagaagaactatcaccaacccggtgcctcatacctgcccattttctgcttccacttcctgggagtaaaagtctttaggaagggaaggtgaattagtattgattatacatgcaccaaaagacaaacactgggctgtatgc

SEQ ID NO: 716307 - DNA, 1068 bp, Homo sapiens
ggacccttgcaattacctgagtctcacctgaataactcagaataatctcctcatctcaagatctttcattccaatcacatctgcgagagttttctcttgctttgttttcgtttggattttgccatcttaatgtaatatattcacagattctaggagttgagatatgaacatctttgaggagagggggcattgttctgtctaccacaccaggtagacatcctgcagcccgcacaacaaaggatcatccagcttaaaatgtcaggagtacagaggttgagaagcctgcatgctctgatactaccagatttcccacagaccctaattcaatgccactgcttaatgtgcatgacaactgcagaccccctattccttgataccatccatccaaaacactccctacaatgttttttaaatatgtgtgagtgttattcagtccaagtaagtgacagaaatcctgtttccctaaaaagtttgataacaggaaaaaacagtcatttattaggcttgacatgattcttgtgacttctaagtttggggcttcaggtgtttgaaagttactcagaagccaggcacggtggctcacacctgtaatcccagcactttgggaggccaaggtgggcggatcacttgaggtcaggagttcgataccagcctgaccaacatgttgaaaccctgtctctactcaaaaaatacaaaaatcagctgggagtggtggtgcacgcctgtagtcccagctgctagggaggctgaggcaggagactagcttgaacctgggaggcggagcttgcagtgagcctagaccatgccactgcactccagcctgggcaacagagcaagactctgtctcaaaaaaaaaaaaaattttttttactcagaagggaaaaaatgaactcctcaaactttgggacagaaaatgggaagtaaaagcagagaaraactatcaccaacccggtgcctcatacctgcccattttctgcttccacttcctgggagtaaaagtctttaggaagggaaggtgaattagtattgattatacatgcaccaaaagacaaacactgggctgtatgc

SEQ ID NO: 716308 - DNA, 1068 bp, Homo sapiens
ggacccttgcaattacctgagtctcacctgaataactcagaataatctcctcatctcaagatctttcattccaatcacatctgcgagagttttctcttgctttgttttcgtttggattttgccatcttaatgtaatatattcacagattctaggagttgagatatgaacatctttgaggagagggggcattgttctgtctaccacaccaggtagacatcctgcagcccgcacaacaaaggatcatccagcttaaaatgtcaggagtacagaggttgagaagcctgcatgctctgatactaccagatttcccacagaccctaattcaatgccactgcttaatgtgcatgacaactgcagaccccctattccttgataccatccatccaaaacactccctacaatgttttttaaatatgtgtgagtgttattcagtccaagtaagtgacagaaatcctgtttccctaaaaagtttgataacaggaaaaaacagtcatttattaggcttgacatgattcttgtgacttctaagtttggggcttcaggtgtttgaaagttactcagaagccaggcacggtggctcacacctgtaatcccagcactttgggaggccaaggtgggcggatcacttgaggtcaggagttcgataccagcctgaccaacatgttgaaaccctgtctctactcaaaaaatacaaaaatcagctgggagtggtggtgcacgcctgtagtcccagctgctagggaggctgaggcaggagactagcttgaacctgggaggcggagcttgcagtgagcctagaccatgccactgcactccagcctgggcaacagagcaagactctgtctcaaaaaaaaaaaaaattttttttactcagaagggaaaaaatgaactcctcaaactttgggacagaaaatgggaagtaaaagcagagaagarctatcaccaacccggtgcctcatacctgcccattttctgcttccacttcctgggagtaaaagtctttaggaagggaaggtgaattagtattgattatacatgcaccaaaagacaaacactgggctgtatgc

SEQ ID NO: 716309 - DNA, 603 bp, Homo sapiens
tgcataattgatgcataataatatataattattatgcatcaatttttaaaacatggtaaattggaatttgaaatatcaggagtaaattcaaacttatcaataggcacaataaacataaatgggttaaatttctctaataaaagacaatgcctttcagtttggagtgcttcttttaaaaaaaatccagttaaatactgtagacaagactatgcaatacaataaacaacaaataaaacaagacaacatagaaacattgaaaacaaaaatgtatatcacaaaaattctaacaaaaagaaagcagcagacrcaaaagaaaagtaaaaacaaatttccctataatcattatctggttgtcactccagagaagtaggcataaaactggttaatgggagttggcaagataagtcagttaagtatttaagagactcatttttaaattcgatatggtggtggtggtggtgagtctgtgggtggtggaacacgtccatgaccagatctagacagtagcaacagccatcaatgtctgtcactaagctcctgtggattttagatctaacataaagattgcaaacggctcattctggagggatgaccagaagtgac

SEQ ID NO: 716310 - DNA, 1288 bp, Homo sapiens
atggaaagtcgcgctgagcagtgagtgctacagtctagaacttgaatcatatttaatagagcctttactagcctgttgaattgatggctgatagacaaaaatcggaaaggaatggaaggtaaggggaataatgaataggtcaaaatggaacagcataataaaggttatatgaaaaaacataaagcatcatggaaggaaaaaatattgtttaaaatattgtctgactttgtttaaagggtgttgcttcttaggagttgaccataatctcctttgatttaggcatcagcttcaggagcattgcctgtattaattgatattatgtcaagatggtttgcttcaactaaggtgtttctggttttgaagtcaacactttttggtcatagtagaaaattaaaacattgttatttctttaggatattaaaaaaatatgccttttgagttttaagaaggtagcctataaactaaacagtgtctagttacttaacaatgctaatcatgtaatgtaggtactttgtaaatgcttaaaatatggaaagattttcaaacatttattgagctgtttgtgatgggaaagaaacaaatgaataacacttcatttattgaagtgttaatgtgttaattaagaagtcagcaaaatttgaatagaaattctataaaagtgataaaatcaattagcacaaagattttatatccaaatcacctctggaacattaagggttgactgagctgactttggaagtcttaacatcttggtgaattagagatcaccctttaagtggacaacagggctgggcgcagtggctcatgcctataatcccagcactttgggaggccaaggcaggcagatcacttgaggtcaggagttcgagaccagcctgaasaacatggtgaaaccctgtctctactaaaaagaatacaaaattagccaggtgtggtggcacacgcctgtaatcccagctacttgggaggctgaggaaggagaattgcttgaacccgggaggcagaggttgcagtgagctgagattgcatcattgcaccccagcctgggtaacaagagcaaagctccgtctctaaatacataaataattaaatacaaataaataaataaacaacagatcctacttttaatggaaataccatgcagttttattaaatctgtttgttagagtctccctagcagttatcaaaatgcctgaaaggtgcttaagtactcaataaataaattttgaatgaaagaataaataaattttattttatttttaaaaatctttttaattttaaaattttt

SEQ ID NO: 716311 - DNA, 1431 bp, Homo sapiens
gattttcttcaggttagctctctgggggacagttattctcccaggtacaaattcacctgattctagcataatttcctctacatttctccatcttagctataaatacagccatttttgacctctcctctctactccccaagttgtatcaaaagctccttccaaatgtctgcttgggtctgacatcccgctgcagtgttcctgcctgttgacttccctgtgctcccctctcctgccttagtgctgctcactgttgtatccttgtgcctagcacactgctcttcattacatatgcaataattttgaatgaataagttcatttagcgtctagttgaaataaagatatacatttcctccgagagtctcctaatctgccagtcaggcagctgaacaggaaaggcaatgaagcccatttgcatggctagttcttggtagacacatgcaggtttctggatgttttctrctgttcttagagtccagcagccaagtttttaataatccttgccaaatttttgcatctgtgacagttttagaaaacccacgtgggggttgccatcctgttacacaatgtgcttgaactatttactcaagttgaataaaggttaatttttattttatctctcaattatcaggcacataaattccaggtgattcatgtcatgtgaaagtccagccagagacagtcttttaattcagttattatttccaacaatgggtcacgttacttccgtttgaaataactgattagattcttcttgggtcagtgtaaaactatctgcacaaggagactgggagattcccaggattccaggttgttaggtggagtttttcttgggggcagtgccctgctgctcacttctatctccaagagtacagaagagtacatggccccatgcagataaactcatgctccttccccggctcctcatccagttctctcatatttgctatttcaagtgaccagcatgaccatcaagacagggactggggaatcacctagatttcttacagtcagtcacaaaattcaatggcttatcctcccaaatactagccacatacagtgatgtggtaaatgtttaatgagcaactctctagttttgggggaagggtaagttgggaagcagccctgatttgtagcatttgctcatttccatggtgtaaatgctctcactatggctgatttcaagctactcacatgatgttaaatatgaagttggaagagatgtgcacaagcttgtacaacctggctccagcacattgctgcacattcttccactttcctgaccacaccacaccaggtcagactttcacagcattcaaggccctaggatctgtttctgttgatagttgtagccttgttgacccccgctcttagaagcttttcctggcatctttttgctcctgttgagtcattaaagtgccccacaatgccct

SEQ ID NO: 716312 - DNA, 577 bp, Homo sapiens
caaatccacatattcaaacaaagaagtttgtagaagttcctttagcaagccaccagttacttagctaacaacactgactcactctccttccctttaagtcatgtaccaaccgaggacccgaaaataactctggaaacttctatacaatgcctgcacttctgctcccaactgatgggtcagttgtttgtccccctaatgatattttacttacaactatgcaatttatttaaataatattacggaagtgaaatgtgagtttagaaagaaatagacttgtggtcatggtttcaatgaaaaccaaatagaattctttrtagacacatgataaaggtgagttgctaacaaaaatggtaagataactaccaaagaggaaaatgctgtgcaagtgtagaataatcttgcacccagatttcttcacaagtgaccaaattctcattcctccttagagaaacagaaactgggaagttgtattagtccattctcacactgctgataaagacatacccaagactgggtaatttataaaggaaaagaggtttaatgaactcacatggctgaggaagcctcacaatcatgg

SEQ ID NO: 716313 - DNA, 1315 bp, Homo sapiens
  misc_feature 829, 830, 831, 832, 833, 834, 835, 836, 837, 838, 839, 840,841, 842, 843, 844, 845, 846, 847, 848, 849, 850, 851, 852,853, 854, 855, 856, 857, 858, 859, 860, 861, 862, 863, 864,865, 866, 867, 868, 869, 870, 871, 872, 873, 874, 875: n = A,T,C or G
  misc_feature 876, 877, 878, 879, 880, 881, 882, 883, 884, 885, 886, 887,888, 889, 890, 891, 892, 893, 894, 895, 896, 897, 898, 899,900, 901, 902, 903, 904, 905, 906, 907, 908, 909, 910, 911,912, 913, 914, 915, 916, 917, 918, 919, 920, 921, 922: n = A,T,C or G
  misc_feature 923, 924, 925, 926, 927, 928: n = A,T,C or G
ttttgaatcaatttttataattattttctccaatgactacrcatttcattagaatattctttttcatatttattagcatagagttgtatgtaatattctcctggttcttagcacttccttttcattcctcattttgtcttttatcttttttttttttttcttgattggctttgccagtgttttgtctgcttcagtattaattttttgtaaatttcattttgtttttgtgaggtttttcctccttcacctccccacaacacccttctttcctcctgcatcccccccacacacccaaaaatactcttggatgagtaattgtgcctatttttatattttatatttttgtaatattttatattacttcttcatttcttagggtgtggatgttgttggagttgttcctctttttctaaatgctaaagttgaatgtggtgtttgtttgttttttaattcttccatgcgtaatggtctgatcttttctatttttcaatcgacttgtttggactttaattcagtgcttatttaggaaagtgttttaaattttcatatgtgctatttttataagttaatcattaagttttggatagtagaatcctaggttcatttgttcaagaagtttgaccattatagggagaaatgaacatgcattgacactcattgatgagaagagaagcttgagggtccacattttctattttgtttaggtcaaaaactacttactgattacctactgtgctcgaggacctgtgctaggtagtggggctataactgaaagtttcctttctcatggaaattttggtctaccagagaatgcagatgaatacacaannnnnnnnnnnnnnnnnnnnnnnnnnnnnnnnnnnnnnnnnnnnnnnnnnnnnnnnnnnnnnnnnnnnnnnnnnnnnnnnnnnnnnnnnnnnnnnnnnnnggagtgcagtggtgtgatcttggctcactgcaacctccgcctcccgggttcaagtgactctcctgcttcagcctcccgagtagctgggattacaggcatgtgccaccacgcccagctaatttttgtatttttagtagaaatggggtttcaccatgttgtctgggctggtcttgaactcctggcctcaggtgatccacccacctcggcctcccaaagtgctgggattacaggtatgagccaccgtgcctggcccacaattatattttaatctctccagtataaacttcaggaagcacctcctaaggtaagcatccctaacaggaactgctgcatcagaccttcataagaaggaatgagcaaaggtggcccctcaggctttgtaatgca

SEQ ID NO: 716314 - DNA, 952 bp, Homo sapiens
agtttaggattacaaataatcattcattttttctggtttccaactgatggtaaagtcatacaatgagaatgtacacattttaacacttgcctcccaaattatccacctatcctgggaatgttagattcaaaattaatgtcttcagaagagaacgaataaacctttaaaacgtttcaaattacaaatatctacaactcatctttttggttttcctcgagcttttgctctagtgaattagtacgagctgaacatcccaaatccaaaaatctgaaatctaaatacttcaatgagcatttccattgtgcatcatgttgtcacttaaaaagtttcagattttggagcattttggatttcaggatttgggatggtcaacctgtatcatgcaaatattccaaaatctgaaaaaatacagaatctgaatacttctggtcccaagcatttcttataagggatatgcagcctgtatctttgattatttatttccacttccatttctgtgttttaatttaaactggtttattattgtctaggtttttttttcctctccatatctaattctttgtgaaaatcttcatgtactaccatgttgcttccattgctgcagattgctcctaggctagtaaattaaaatcccttccatgtagcatagtgctaaatgaaagtatcttaatttgtaaatggcttgcatttttgcaaagcaattttttctttaactagaatatgcagttcaaattayagaatattactgagatccagttgctataatcctagtgacctttaaagccaaacagaccttgatcttcaattatgacatgaaaactatagggatgctgaattactatgttgctctctttaactccttaggagaaatgactttaaaggctgcttttagagactctgattatctgtgacacacttagaaggtcagccagaatatgagatataagaccca

SEQ ID NO: 716315 - DNA, 1236 bp, Homo sapiens
attaaatttttaaattaaattctgattttcggaattaattaaagaaggaagagagagaagacaaacaaaatgtgtatttgtgtgtgtttgtgtgcacgtgtgtgtgtttgtagttattctctttaaaaaaaaatagtgccttacaaagtggaaatgaaatagtaagcatgatggacggtgaggattagccattgtagagaaatataattttagtggattgaaatttatttggaaaccttttcctatagacaaacgtatctcattttacgaggcctccttgatttagtttggtttaaaagtcaatggagaaatatattccatttgatcaaattgtcaagtacagcttgttaatgtgtctgtgtgagtttcaacatmtcaccactcaagtgttggatttgtccttgtgtgtaagccacagcaatgtccctccttccttctccactttcctcttcaagcacaagtctcttggcctacaagtttcttagactacagactcccatgatggaggttttccccctatatgacctacagcttagtatggtatttctagatgtttgtataagaacctgtttaactgatttcagagtcttttctctcttcccatgtttttcccccaaattactttttactttgtatttgaaatatttttatgaattttctaaattttaaaggactcttgaatgtttacttatattctgacatgttgaaaatatattccattatcatgtttaatcccaggacttatgatgctggaagcacggaatgatttaatgctttgcctagtcttacctagcaagccagaagagacataggcttaagccggaccagctgatcgtcagtcctatgcactgcccctgagctgattaatagttccttttattactgttgaacatttggttcttctagggggcctctgggtcagtcactaccaccatattaggccacactctgacaagtagttttgttcctacaaagaatctaatttctttctccaacgtgtggcctcctaagaccactgtgctccgctggtgatgcttgagttactcagggaaagaggcagatagccaaaaattcaccaattttagcagaaaaccctgccatcagcgacagctggagcatcacaaaatctataaacacacttgttactcatctgctgtgcctgtaggacaagccaggcatgtgaccactgaacatcttgtagaggagaggtttcctaggcgggtctcctgacagaaa

SEQ ID NO: 716316 - DNA, 1236 bp, Homo sapiens
attaaatttttaaattaaattctgattttcggaattaattaaagaaggaagagagagaagacaaacaaaatgtgtatttgtgtgtgtttgtgtgcacgtgtgtgtgtttgtagttattctctttaaaaaaaaatagtgccttacaaagtggaaatgaaatagtaagcatgatggacggtgaggattagccattgtagagaaatataattttagtggattgaaatttatttggaaaccttttcctatagacaaacgtatctcattttacgaggcctccttgatttagtttggtttaaaagtcaatggagaaatatattccatttgatcaaattgtcaagtacagcttgttaatgtgtctgtgtgagtttcaacatatcaccactcaagtgttggatttgtccttgtgtgtaagccacagcaatgtccctccttccttctccactttcctcttcaagcacaagtctcttggcctacaagtttcttrgactacagactcccatgatggaggttttccccctatatgacctacagcttagtatggtatttctagatgtttgtataagaacctgtttaactgatttcagagtcttttctctcttcccatgtttttcccccaaattactttttactttgtatttgaaatatttttatgaattttctaaattttaaaggactcttgaatgtttacttatattctgacatgttgaaaatatattccattatcatgtttaatcccaggacttatgatgctggaagcacggaatgatttaatgctttgcctagtcttacctagcaagccagaagagacataggcttaagccggaccagctgatcgtcagtcctatgcactgcccctgagctgattaatagttccttttattactgttgaacatttggttcttctagggggcctctgggtcagtcactaccaccatattaggccacactctgacaagtagttttgttcctacaaagaatctaatttctttctccaacgtgtggcctcctaagaccactgtgctccgctggtgatgcttgagttactcagggaaagaggcagatagccaaaaattcaccaattttagcagaaaaccctgccatcagcgacagctggagcatcacaaaatctataaacacacttgttactcatctgctgtgcctgtaggacaagccaggcatgtgaccactgaacatcttgtagaggagaggtttcctaggcgggtctcctgacagaaa

SEQ ID NO: 716317 - DNA, 3395 bp, Homo sapiens
  misc_feature 1413: n = A,T,C or G
attttacatatatcttctttatctgtagttttatttatgagaaaactagaagaataaatggattcatctagttgagacaaatgcagacttcatatgtctagagctatagaaaaacagggcactcagacaggtatatttgttgggtacatgagatgtttatatctgaaactaaacagtttcagaaaaaaaagcaatacaagcaaggtatctgggaccttacattatggattccaattcatttcctttactttattaatgcagaaatgcctcaggttcaattatacctttagatatcagaacctcatttagctatttgggatgtactcgttcctaaagatatcacgtgttcttctgcatctaatcagtctgctaaaaatgatataaacattttaaatgtcttgggatcattattattaatgcccattattttactcgaatagagcagaggcattaaatcctattgagcatatgagagttttttacaccttcagtgagtggcccaatcttctgagcctttttgttgttgttaagattttcatgtgtttttaaatttggcttttactccctaactttggcatttgtattaactttgccattttcctttatacaggatacatgattttctccccacttctaattttctaaaccaaataacgatggtaaatagaatygtataaaattgatgaaatagactgaggataggatccatatactttcagtaatgtccagaagttttagtgaactttatttttaactgtattttgaccattcaaaagactgttgagagcttacttgtaagttctttaggtaactaattcttattagcatgttaatttctcagttaaaagttgtatgtccagtatacgaggtcaggagttcgagaccagcctggccaacatggcaaaaccccatctctactaaaaatacaaaaattagctgtgcgtggtggtgggagcctgccagctacttgggaggctgaggcaggagtattgcttgaacctgggaggcagaggttacagtgagcagagattgtgccattgcactccagcctgggcaacaagagcaagactccatttcaaaaaaaaaaaaaaatcaactaaaatttaggaaacccaaatagttctagttctgctctcttttcttagtaattcttattaaaaagagtatttacatagatgcttttaaattttacatgtgcttttattaggagttttttaaaaagtattttttcatattctgcacaaatgtttataaaaataatctgcctgtaattcaaagacctctgtgcaatctttcatgatttatccagcaaaaagtagacaggcacatgtcctgctaggctctgctctatcagtgtttgcctgaaagagctaggatgtttacattcttaggaaagaaagaaaagcagagaantaccattccatatttgtacttagttttctagcatcatgatggctgctttataacagctcatagcagttatattgcagcatcgtttctgcctgtggaatcactttggtatgaagattcttaagtatgcagccccacaaattagggctctcattcctgtcaaagatagttattactccaggaacctttccaaggttgctaccatgaatactttttacttttatggtgacttggtctctgagagtaaagacaattatccaaaagaaaacgtttttgtctggatatatcttggtgacaagaggaagaaaggtcatgatcttcaaaccaaaacccaacatgagaacaggttatgagcttgaattgaggtactgagtgtagaataaccaaaaattgtagtgtctgtttgaatttacacctgtcaccagatttgaatacacagttttaactttattttcattatttagacacatgatttgtagaactgaatcccaaggactgaggttggtgtttaggatctggatagcaagccctctgaaaatggaattatgaacttatttccaagatcttagctactatcatcttgctctgcctcctctgaccattcctctggtattagttgaagaatacagacctacctaaggctttggtttaagatccagttggggtaagggaatgcttattaaaccttgtcttacaggtatgaggcagttttgagaaatgcctgaagtggaaaattgaggaaaggcgggagcttccaaaagaactactagaacatgtagtgtacattttctgtcaaaaaaaaaaaaaatctctaaaactttaattgttgcctgagatcacaatcatctctctcatcctctcttagttattgccaggtccctgagacttcatcatatggattgagaatagccccacatgtgataggcaaatgtatgctaattttctctttttcattgatttcaatagattataatagtggatttaaggaagagattgtcttgtttctatcacccactctgacattttccaacagtacttgtcaatgaattatacatgaaaatgcagctcctgagacaaaatttagttctgacagcaagctggcatgattgataggccatatacacaacacaaaataatttatgtactaggtcgatgagaaatcaaatctgagacctgctttctagtcagtcttggaagacctggaaatgaagagagaacaacacaagagaaaaacgaggtttttttaattttgcaaggaattatttattcataaaactaaattagcatagccgaaagtcttctcagatttagtctatgaaatgtaaataatgtcgttaaatttccccgagaagtcttaactttccaatttcacttggtgttggtaaaacaaatctttcctggcatggatcaagaaatggaaatcctcacatgtgagtgagaatgagcaatatttgtctttttgcacatggcttgtttcacttaagataatgccctccacctccatccatgttgttgcaaatgacaggatttcattttttatgactgaataatattccactgtgtatatgtaccgctttttctttatccactcatccactgatggacacttgggttgattccatatcttggctattgtgaatagtgctgcaataaacttgggagtgcagatatcccttcaatatactgatttcctttatattggatatataaccagcaatgggattgctggctagttctagttttaattttctgaggaacctccatatggttctccatagtgactggactaatttgcattcccaccaacagggtatgtgggttcccctttctccacatccttgccagcattcattattacctctctttttgataaaagatagagagtagaatgatggttaccagagactgggaagggtagtagagaggagagggggataaactggagatggttgatgggtacaaaaatacaattagaagaaataaga

SEQ ID NO: 716318 - DNA, 3395 bp, Homo sapiens
  misc_feature 1413: n = A,T,C or G
attttacatatatcttctttatctgtagttttatttatgagaaaactagaagaataaatggattcatctagttgagacaaatgcagacttcatatgtctagagctatagaaaaacagggcactcagacaggtatatttgttgggtacatgagatgtttatatctgaaactaaacagtttcagaaaaaaaagcaatacaagcaaggtatctgggaccttacattatggattccaattcatttcctttactttattaatgcagaaatgcctcaggttcaattatacctttagatatcagaacctcatttagctatttgggatgtactcgttcctaaagatatcacgtgttcttctgcatctaatcagtctgctaaaaatgatataaacattttaaatgtcttgggatcattattattaatgcccattattttactcgaatagagcagaggcattaaatcctattgagcatatgagagttttttacaccttcagtgagtggcccaatcttctgagcctttttgttgttgttaagattttcatgtgtttttaaatttggcttttactccctaactttggcatttgtattaactttgccattttcctttatacaggatacatgattttctccccacttctaattttctaaaccaaataacgatggtaaatagaattgtataaaattgatgaaatagactgaggataggatccatatactttcagtaatgtccagaagttttagtgaactttatttttaactgtattttgaccattcaaaagactgttgagagcttacttgtaagttctttaggtaactaattcttattagcatgttaatttctcagttaaaagttgtatgtccagtatacgaggtcaggagttcgagaccagcctggccaacatggcaaaacccmatctctactaaaaatacaaaaattagctgtgcgtggtggtgggagcctgccagctacttgggaggctgaggcaggagtattgcttgaacctgggaggcagaggttacagtgagcagagattgtgccattgcactccagcctgggcaacaagagcaagactccatttcaaaaaaaaaaaaaaatcaactaaaatttaggaaacccaaatagttctagttctgctctcttttcttagtaattcttattaaaaagagtatttacatagatgcttttaaattttacatgtgcttttattaggagttttttaaaaagtattttttcatattctgcacaaatgtttataaaaataatctgcctgtaattcaaagacctctgtgcaatctttcatgatttatccagcaaaaagtagacaggcacatgtcctgctaggctctgctctatcagtgtttgcctgaaagagctaggatgtttacattcttaggaaagaaagaaaagcagagaantaccattccatatttgtacttagttttctagcatcatgatggctgctttataacagctcatagcagttatattgcagcatcgtttctgcctgtggaatcactttggtatgaagattcttaagtatgcagccccacaaattagggctctcattcctgtcaaagatagttattactccaggaacctttccaaggttgctaccatgaatactttttacttttatggtgacttggtctctgagagtaaagacaattatccaaaagaaaacgtttttgtctggatatatcttggtgacaagaggaagaaaggtcatgatcttcaaaccaaaacccaacatgagaacaggttatgagcttgaattgaggtactgagtgtagaataaccaaaaattgtagtgtctgtttgaatttacacctgtcaccagatttgaatacacagttttaactttattttcattatttagacacatgatttgtagaactgaatcccaaggactgaggttggtgtttaggatctggatagcaagccctctgaaaatggaattatgaacttatttccaagatcttagctactatcatcttgctctgcctcctctgaccattcctctggtattagttgaagaatacagacctacctaaggctttggtttaagatccagttggggtaagggaatgcttattaaaccttgtcttacaggtatgaggcagttttgagaaatgcctgaagtggaaaattgaggaaaggcgggagcttccaaaagaactactagaacatgtagtgtacattttctgtcaaaaaaaaaaaaaatctctaaaactttaattgttgcctgagatcacaatcatctctctcatcctctcttagttattgccaggtccctgagacttcatcatatggattgagaatagccccacatgtgataggcaaatgtatgctaattttctctttttcattgatttcaatagattataatagtggatttaaggaagagattgtcttgtttctatcacccactctgacattttccaacagtacttgtcaatgaattatacatgaaaatgcagctcctgagacaaaatttagttctgacagcaagctggcatgattgataggccatatacacaacacaaaataatttatgtactaggtcgatgagaaatcaaatctgagacctgctttctagtcagtcttggaagacctggaaatgaagagagaacaacacaagagaaaaacgaggtttttttaattttgcaaggaattatttattcataaaactaaattagcatagccgaaagtcttctcagatttagtctatgaaatgtaaataatgtcgttaaatttccccgagaagtcttaactttccaatttcacttggtgttggtaaaacaaatctttcctggcatggatcaagaaatggaaatcctcacatgtgagtgagaatgagcaatatttgtctttttgcacatggcttgtttcacttaagataatgccctccacctccatccatgttgttgcaaatgacaggatttcattttttatgactgaataatattccactgtgtatatgtaccgctttttctttatccactcatccactgatggacacttgggttgattccatatcttggctattgtgaatagtgctgcaataaacttgggagtgcagatatcccttcaatatactgatttcctttatattggatatataaccagcaatgggattgctggctagttctagttttaattttctgaggaacctccatatggttctccatagtgactggactaatttgcattcccaccaacagggtatgtgggttcccctttctccacatccttgccagcattcattattacctctctttttgataaaagatagagagtagaatgatggttaccagagactgggaagggtagtagagaggagagggggataaactggagatggttgatgggtacaaaaatacaattagaagaaataaga

SEQ ID NO: 716319 - DNA, 3395 bp, Homo sapiens
  misc_feature 1413: n = A,T,C or G
attttacatatatcttctttatctgtagttttatttatgagaaaactagaagaataaatggattcatctagttgagacaaatgcagacttcatatgtctagagctatagaaaaacagggcactcagacaggtatatttgttgggtacatgagatgtttatatctgaaactaaacagtttcagaaaaaaaagcaatacaagcaaggtatctgggaccttacattatggattccaattcatttcctttactttattaatgcagaaatgcctcaggttcaattatacctttagatatcagaacctcatttagctatttgggatgtactcgttcctaaagatatcacgtgttcttctgcatctaatcagtctgctaaaaatgatataaacattttaaatgtcttgggatcattattattaatgcccattattttactcgaatagagcagaggcattaaatcctattgagcatatgagagttttttacaccttcagtgagtggcccaatcttctgagcctttttgttgttgttaagattttcatgtgtttttaaatttggcttttactccctaactttggcatttgtattaactttgccattttcctttatacaggatacatgattttctccccacttctaattttctaaaccaaataacgatggtaaatagaattgtataaaattgatgaaatagactgaggataggatccatatactttcagtaatgtccagaagttttagtgaactttatttttaactgtattttgaccattcaaaagactgttgagagcttacttgtaagttctttaggtaactaattcttattagcatgttaatttctcagttaaaagttgtatgtccagtatacgaggtcaggagttcgagaccagcctggccaacatggcaaaaccccatctctactaaaaatacaaaaattagctgtgcgtggtggtgggagcctgccagctacttgggaggctgaggcaggagtattgcttgaacctgggaggcagaggttacagtgagcagagattgtgccattgcactccagcctgggcaacaagagcaagactccatttcaaaaaaaaaaaaaaatcaactaaaatttaggaaacccaaatagttctagttctgctctcttttcttagtaattcttattaaaaagagtatttacatagatgcttttaaattttacatgtgcttttattaggagttttttaaaaagtattttttcatattctgcacaaatgtttataaaaataatctgcctgtaattcaaagacctctgtgcaatctttcatgatttatccagcaaaaagtagacaggcacatgtcctgctaggctctgctctatcagtgtttgcctgaaagagctaggatgtttacattcttaggaaagaaagaaaagcagagaantaccattccatatttgtacttagttttctagcatcatgatggctgctttataacagctcatagcagttatattgcagcatcgtttctgcctgtggaatcactttggtatgaagattcttaagtatgcagccccacaaattagggctctcattcctgtcaaagatagttattactccaggaacctttccaaggttgctaccatgaatactttttacttttatggtgacttggtctctgagagtaaagacaattatccaaaagaaaacgtttttgtctggatatatcttggtgacaagaggaagaaaggtcatgatcttcaaaccaaaacccaacatgagaacaggttatgagcttgaattgaggtactgagtgtagaataaccaaaaattgtagtgtctgtttgaatttacacctgtcaccwgatttgaatacacagttttaactttattttcattatttagacacatgatttgtagaactgaatcccaaggactgaggttggtgtttaggatctggatagcaagccctctgaaaatggaattatgaacttatttccaagatcttagctactatcatcttgctctgcctcctctgaccattcctctggtattagttgaagaatacagacctacctaaggctttggtttaagatccagttggggtaagggaatgcttattaaaccttgtcttacaggtatgaggcagttttgagaaatgcctgaagtggaaaattgaggaaaggcgggagcttccaaaagaactactagaacatgtagtgtacattttctgtcaaaaaaaaaaaaaatctctaaaactttaattgttgcctgagatcacaatcatctctctcatcctctcttagttattgccaggtccctgagacttcatcatatggattgagaatagccccacatgtgataggcaaatgtatgctaattttctctttttcattgatttcaatagattataatagtggatttaaggaagagattgtcttgtttctatcacccactctgacattttccaacagtacttgtcaatgaattatacatgaaaatgcagctcctgagacaaaatttagttctgacagcaagctggcatgattgataggccatatacacaacacaaaataatttatgtactaggtcgatgagaaatcaaatctgagacctgctttctagtcagtcttggaagacctggaaatgaagagagaacaacacaagagaaaaacgaggtttttttaattttgcaaggaattatttattcataaaactaaattagcatagccgaaagtcttctcagatttagtctatgaaatgtaaataatgtcgttaaatttccccgagaagtcttaactttccaatttcacttggtgttggtaaaacaaatctttcctggcatggatcaagaaatggaaatcctcacatgtgagtgagaatgagcaatatttgtctttttgcacatggcttgtttcacttaagataatgccctccacctccatccatgttgttgcaaatgacaggatttcattttttatgactgaataatattccactgtgtatatgtaccgctttttctttatccactcatccactgatggacacttgggttgattccatatcttggctattgtgaatagtgctgcaataaacttgggagtgcagatatcccttcaatatactgatttcctttatattggatatataaccagcaatgggattgctggctagttctagttttaattttctgaggaacctccatatggttctccatagtgactggactaatttgcattcccaccaacagggtatgtgggttcccctttctccacatccttgccagcattcattattacctctctttttgataaaagatagagagtagaatgatggttaccagagactgggaagggtagtagagaggagagggggataaactggagatggttgatgggtacaaaaatacaattagaagaaataaga

SEQ ID NO: 716320 - DNA, 959 bp, Homo sapiens
tgcccgaggaggttgcaaacaaacaatacatttagctttcactttttacagtatgaataaatattttttctcaaaaataagtcttatatgaatttgtaacatgttcctattttatcattactctgctatagaattgtcttagtctgttcctgctgctataacagaatacctcgattatctatgaagaacagaaatatgttttctgagttctggagttggagtccaagatcaaggcactaggaaacttggtatctcacaagagctgcactctgcttccaatatggcacctctagctgcatccacacatggcagaaagaatggaagasttgaactcacctcttcaagccttcttataaaacacgaatcccatcaatgagggtgaaccctcatcacttcctaaggctaatcacttcctaaaggctccacctcttaatattgttacattggggattaagtttcacatgaattttggaggggacaaacttccaaatcaaagcaatggaacaatttaagaattattcttaaaacaaaacacatttaaaaataactaatacaaatatatagttagataaaagaaataagatgtagtgttagatcaatagggtggctatatttacaataatctattgtacttttcaaaatagctggagagaatagtttgaatgtttcaagcaaaacgaaatgacaaatatttaaggtgataaatatgcaaagtacactgattcgatctttacaaattatttgaatgtattatcacatgtaccccaaaactatgtgcatctatcatgcatcattaaaaaaacttttaaaaaatttaaaaatagtcattccagaattaaaaaaaggtgtggggtacagtgaggagttctgaggaagactgaattttagccataagtataaaacaaatgtttttactaacatgaaaagattgatatttatttcacaaatatttaaataaa

SEQ ID NO: 716321 - DNA, 572 bp, Homo sapiens
ttctttattatttttatcctcttctataacttcagtctcctcctcctcttctgccttcaggaggagaaatctatagctccaaatatgtgctcagtcccttcttgcatttgcaacagtgaggggaacacatcycccttgaatcatcccccttgaatatctggtcagtatgtcaaagctggaattcatcctatccttcccccaaaccaccaagcaactatagcttctgacttctgttagtagtattcctattattccaggtaaccagcctcacagtctcattccatttgactcctctccatgtctctctttccttaattgctatcctttctatgtatgcctttatttgtacttccctttgcatttctactgccacagtcgtcactcacatcaggtctttcggacctgaaatagtgaaataatattcctctgagtcatctaacttctccctctttcgcttttattacaggttaaaaagctacaagattaattttctggagtacaactctgatcatttgatgtctgggctcccaacattagctatgtgataaagtctcaactctttggcttgactt

SEQ ID NO: 716322 - DNA, 606 bp, Homo sapiens
caatgccttgctgggcrcggtggctcacacctgtaatcccagcactttgggaggctgaggcaggtggatcacttgaggccaggagttcaagagaaacaatgccttctagattttacctttttactgattgccctcaagtctcatctgtcaatctttgaaggtagatatagctttagccttttagggagacatgactcttgactgatatttccctactaatacaaatttcaagaatacttaaaatatgtagaactacatcaaaaatgtatgaaattatattattgaccctcaaattttccataatcctctgtatgattatttagtgaactttgatgaaaatctagcctaaaacatcagctttctaattagacatttgtttacattatttagagaaacgtcttttccttagccattgctttatgtgctgtactaaattacttgtctagttaaagctgaaaagtgaggtacaaatttgttccctccaattacatgattcctcaaacaatctgaccatgtgtaggtatcacaagactccacaaaagggccgaggagattcatttgggtcaggacatatttcctttgaagacttagatttgaaaaaaaaaa

SEQ ID NO: 716323 - DNA, 598 bp, Homo sapiens
aggctggtctcaaactcctgacctcaggtgatctgcccgcctcagcctcccaaagtgctgggattacagtcctgagccactgcaccctgcctacacatttatttaatataagttttaggtgacgtgggagtcttcagaaattaagactcaaagaaacaggaaaaactgtatttttatgcttaggtttgataaagagtggacagttgtacagaagcatgataggataaaagggggtatgatctaatggtaataaactgggttgwggggaaactcaacaaggcctctttgtttagattcttacttgtgtctctgtgtcttcattcttttcttctgggtaggggaaggaccactctggaatgagggtcttatctactttcgaggaaggttagagaattcttttatggcctgctacagggaagaatgttgagagaaggtcagaaagatctcctgcttctgctgttttctcaaatgccaaggtaccatattttgaggtagcatgttctgaactgggtcattctgattatagagatgtcccattgtgaagagaaaatgcccctaactatcagtgtcattaagacaagcgtggagttgaagtcca

SEQ ID NO: 716324 - DNA, 598 bp, Homo sapiens
aggctggtctcaaactcctgacctcaggtgatctgcccgcctcagcctcccaaagtgctgggattacagtcctgagccactgcaccctgcctacacatttatttaatataagttttaggtgacgtgggagtcttcagaaattaagactcaaagaaacaggaaaaactgtatttttatgcttaggtttgataaagagtggacagttgtacagaagcatgataggataaaagggggtatgatctaatggtaataaactgggttgaggggaaactcaacaaggcctctttgtttagattcttacttgtgtctctgtgtcttcattcttttcttctgggtaggggaaggaccactctggaatgagggtcttatctactttcgaggaaggttagagaattcttttatggcctgctacagggaagaatgttgagagaaggtcagaaagatctcctgcttctgctgttttctcaaatgccaaggtaccatattttgaggtagcatgttctgaactgggtcattctgattatagagatgtcccattgtgaagagaaaatgcccctaactaycagtgtcattaagacaagcgtggagttgaagtcca

SEQ ID NO: 716325 - DNA, 1079 bp, Homo sapiens
aggatataaaagaagatctgaataatgggtaagaggtctcaaaagcataaacatgtcaattctgcccaaattatctataaatttaagtaaattccaaataaaatctcagcagaacttttctgttcatttgtaacgtgattctaaaattcatatggaaaagtgaattatcattgccaagataatttcgaaaaataagaacaatgggtgggcaggagcagttggcctgcggattctgaaacattctagacagtcacagaaattaaaatatagttgtctgagcagaggaagaggcagcggacagaatagagagcctggtgcaaatccatgttcatgcaggattcacatgtaggggctacgtgggatgtggaatatgatagcggtggcactagagatcagcagggaaagatgagcttgtgccatcattgatgatggaagcattggcttttcatataaaagactcctacactaattatacaaaaattaattccagaagaattaaagacctcagcacgaaaaatcgcaactaaacactactgagacgtgagacctcaaccacatcttgaatgcaaaatttcatcgaatgtgaatatcataattctatgtatggaaaatttttaaataagacaaagcataactgtatgttgttcatgaagatattttttagtttagtttcttttatttttatttttttatttttaagtttgaagaatatctttatggcccaaagtgaatctgccaagctttttaggccaccttgcgtgcattttagttgtttccccaagggagaatctgaatcggtgccttccctgactctttcccagccaaaatgcgggcacgtgaccaggcctgccaatcagacacgggggcctcgggccgcgggagggagctggctggctgcgcgtctccsggagccgctgtcatttcagtggcgcattctgggcaaaggcggtgtggtcccggggtgggcagcagattccggaaagggtcagttggttctgggagtgtccctttcattgtctcaggcctcttttcccatctgtcccaaacgttgtgtgaactcccttctgtctctcctaagt

SEQ ID NO: 716326 - DNA, 1165 bp, Homo sapiens
ggctttgtgtactagctctggtctaacattctatcttgtgtggtgctgggcttaacctttgccaccaggggcatagcctcttaaaacccaaggtcaagcccaccatggatgacaaatgcctgtggaacaaacaacaactttggtcttctcttctgtcatttgggggatttgatggcttccttttcttttgccatacaagctattatataagagggatttcattatataaaagaagtttctccagataccttggctgccatatgcccacctatgatttcctactaatggcttctgtctttttttgttgttgttcctactgtagtctctctctctctctttctctctctttccctcagcctttccaatccaatgctcctataaccaattcctgtgttaaatcctctctgtttgaaatacttgatttctcttttcctgactggacatgatccctctgtgtctctggcacagacaccatccctgagtctgacttagctcctcagccctgaccttccatcttcctactcagctaagagagagctaatgaaaagaaagaaaagctatcataggaaatcttatgtgggcaatatagcagctgagaaactgccggtgcaaagggggttgtgggaaagaaaatacaaagcttaaatgaacctaagtaaattgtacacatcaatcaatgcaattgcataaattagtgtacagaaaagaaaaggagtttgggagtcagcattggattcaaattttctctgccacttgcaggtagggttatcttaagcaagatattttccttatgtttaacgagttgaattgtgtctcccaaaagacacgttgaagacctaatccccagtatctcagaatgtggccttatttggaaayggggtcattgagatattaattaagtagataaagtcttactagggtagggtggatccttaattcaacatgactggtgttcttatgaggagacacagatacctcataagagagaagaatgccacggtggcagaggcagagatggaactgacgcagctgcaaaccaaaaagtgtcgagggtcaacaacaaccaccgggagccaggaagaggcaaggaaaggttccatctagagtcggtgagagcatggccctgctggcaccttgctttctggcttccaacctccagaactat

SEQ ID NO: 716327 - DNA, 588 bp, Homo sapiens
gatctcatgagactcactcattatcacaagaacagtaagggagaaaatgcccctatgatccaatcacttccacctggtcctgccctagacatgtggggattatggggtttacaattcaaggtgagatttgggtggggacacagagccaaaccatatcaaggggagaatagagaatgactgggttaatggatacagagttttcttttggggtaataaagtgttttagaactacatagaggtgccggctgcacattatagtgaatatactaaatgatgttgaactgtacactttaaaatggttagttctattttatataaacttcaccacagttttttcaaaaaatccgttaggtggaaggaaagaaattttacatcactgaaattagttctgtacttacattaggtaagcacaagaggaaaacatatgtagtatgaagtastgaataaacaaaagctattatttttgttgttgtaaaaacaaacaaaaagcaaatagcaacaaagcaggttgtggttgagccaatcatcgagttaggcagtcatgattcaatcacatgctgagggttacaaagcagaaagatggaaaaa

SEQ ID NO: 716328 - DNA, 545 bp, Homo sapiens
tagattattgcaaataaacattctaaatgatagaaaagagttgtaatcatataatttgctttcagtgtttttgtattaactcattagtcaaacccttcagtgaaacatagtttacaaaaacatatccatttttttgtaagcatattatgaataacatagagatgctttactaatttgataattaagacccaatatttagctggagaggaccaattaagtaagaayaatttaactctctctctctgtctctctttctctttctctcttgcttggctgactaagcttgggggagcataaaagaataaagtaatcgtactgcattagaactagtagaacacattagagattaacttgggggccatgactactgaggaattcagtgagttggcttcatgggcagtctgcgtaatccttaagttagatgcaaaatgttataggaatgtgcataagtgtatttttgggggtagtgagaatgtataatcctagaagatcaagaaaccaatgtgctgaagagtgacgggtgaggacagttgtcctgggacttt

SEQ ID NO: 716329 - DNA, 545 bp, Homo sapiens
tagattattgcaaataaacattctaaatgatagaaaagagttgtaatcatataatttgctttcagtgtttttgtattaactcattagtcaaacccttcagtgaaacatagtttacaaaaacatatccatttttttgtaagcatattatgaataacatagagatgctttactaatttgataattaagacccaatatttagctggagaggaccaattaagtaagaacaatttaactctctctctctgtctctctttctctttctctcttgcttggctgactaagcttgggggagcataaaagaataaagtaatcgtactgcattagaactagtagaasacattagagattaacttgggggccatgactactgaggaattcagtgagttggcttcatgggcagtctgcgtaatccttaagttagatgcaaaatgttataggaatgtgcataagtgtatttttgggggtagtgagaatgtataatcctagaagatcaagaaaccaatgtgctgaagagtgacgggtgaggacagttgtcctgggacttt

SEQ ID NO: 716330 - DNA, 1182 bp, Homo sapiens
tgcatgcaatcctagcactttgggaggccgaggcgggtggatcacctgaggtcgggagttcaagacagcccgaccaacatggagaaatcctatgttccccctatcccccataaaaaatgcaaaattagccgggcatggtggcgcatgcctataatcccagctactcaggaggctgaggcaggagaatcgcttgaacctgtgaggcggaggttgtgttgagctgagacgcaccattacactccagcctgggcaacaagagtgaaactccgactcaaaacaaacaaacaaacaaaaaagagctgttgcatagaggtaatgattaggcttaattgtgttagagagcttgggtttggaaggaattctggaacacatagactagttctatccaacagaaaggcaaagaaagacctccatctgtatggttctgacctcatctgaattgttctgggtaaatcagacaatctaggtaacaaacatcaccagcacgttaaccctgtttgagctggtttgcctgtctttgtagtccaggcagtgcatcgtcctctgatatttaccccaacactgtttctctgtgttctgtgggtctgggcttggtgttctcagcaggacatcaatcacatcagcaataagagaggtgttgtgcccaaaacacaaaggagttgtggaagggctcgtgatctaaaaattactgctgctgcattgtttacagggcctttaaaaagtccaacagaaccttctccccttctggcccagggctttgtttgcacacagacaaggacaagaagccaattctctgccagrtcattgcattcagactttcatctttcaggggatgctagaaactcttatcaggggaataatcttgtagcccattaaactgagagcagcagttttttgccttgaagtgccttttaagaaattcgttgactgaaatccatccatattctcattacgaatattatatagtccccaaaatattttctaggaacagctctccccattagtgttatgaaagaccacagcagagggtccctgcctcagacaagtgaaggccaaggtgcctgaaggaaggaaagtgagtcataaaagaagtaagtcataaaatcacataaaaatgtgatgtgttgtttgggtttatgtgttttcctatagttgtgtttttttattcagatgatttattca

SEQ ID NO: 716331 - DNA, 1182 bp, Homo sapiens
tgcatgcaatcctagcactttgggaggccgaggcgggtggatcacctgaggtcgggagttcaagacagcccgaccaacatggagaaatcctatgttccccctatcccccataaaaaatgcaaaattagccgggcatggtggcgcatgcctataatcccagctactcaggaggctgaggcaggagaatcgcttgaacctgtgaggcggaggttgtgttgagctgagacgcaccattacactccagcctgggcaacaagagtgaaactccgactcaaaacaaacaaacaaacaaaaaagagctgttgcatagaggtaatgattaggcttaattgtgttagagagcttgggtttggaaggaattctggaacacatagactagttctatccaacagaaaggcaaagaaagacctccatctgtatggttctgacctcatctgaattgttctgggtaaatcagacaatctaggtaacaaacatcaccagcacgttaaccctgtttgagctggtttgcctgtctttgtagtccaggcagtgcatcgtcctctgatatttaccccaacactgtttctctgtgttctgtgggtctgggcttggtgttctcagcaggacatcaatcacatcagcaataagagaggtgttgtgcccaaaacacaaaggagttgtggaagggctcgtgatctaaaaattactgctgctgcattgtttacagggcctttaaaaagtccaacagaaccttctccccttctggcccagggctttgtttgcacacagacaaggacaagaagccaattctctgccagatcattgcattcagactttcatctttcaggggatgctagaaactcttatcaggggaataatcttgtagcccattaaactgagagcagcagttttttgccttgaagtgccttttaagaaattckttgactgaaatccatccatattctcattacgaatattatatagtccccaaaatattttctaggaacagctctccccattagtgttatgaaagaccacagcagagggtccctgcctcagacaagtgaaggccaaggtgcctgaaggaaggaaagtgagtcataaaagaagtaagtcataaaatcacataaaaatgtgatgtgttgtttgggtttatgtgttttcctatagttgtgtttttttattcagatgatttattca

SEQ ID NO: 716332 - DNA, 1230 bp, Homo sapiens
gcattatttaatcatagtcatcaaaggcctgtatatgtattagcacagtttttaagagatggaagcaaaggatcttgagaaaggaaacgacattttccaactcacataaagacatcttgtggacaagtattggccctgaaaagtcatccatctaatggtagttcctcctggtggcgagagttccaatgctgttcatataagtggggtttttctttttttggtactttcattttgtttatttatttttaatggtggtataacctacatgcaataaaatgcattaatcttaagtayacagcttaatgaatttttacatatggatatgctcatgtaaccacctttatatcaagttatcacctgaatggcttagctcaattcttttttgtttgttttttgttttgagatagagactctcttcattgcccaggctggagtgcagtggcacaatctcagctcaccacaacctccacatcccaggtacaagtgatttttctgcctcagcctcccaagtagctgggactaaaggtgcccaccaccacatctggctaatttttgtattattattagtagtagtagagatggggtttcaccatcttggccaggctggtctcgaactcctgacctcaagagatctgcctgccttggcctcccaaagtgctgggaatacaggcttaagacaccacacctggccaggtcaattctttatggtcaaaaaattaatgaatctagaatggaagctgtacatagcaatggccatgtaggccccagatagcttctctccaattttggacaagtgtagtcatttttctttaaaccataaccacaattactgagatccaagtctatgttttacagtgctcgctgacagtcctattctataccctcccctctcttgagttctttattgctggattatgtcttcaagtacatatttttcttctaggaagggaactgggtgcagtattctttggacccttacatatctgacaatagccttcgcacataggtggcaatttggctggtttgtgtttccattgtaggaccgtactgaataattttgttgccgtaaaaatcctctgtgatttgcccattcatctcgctctccctcctaacctctggcaaccactgatctgtttactgtttccatagttttgccttttccagaatgttatatagttgcagtcatatagcatgtagccttttcagactggcttctttcacttaataata

SEQ ID NO: 716333 - DNA, 740 bp, Homo sapiens
taataaagatagcagttttatccaaatgggtttctacatttaatgcagttcctatcaaaatccagcaagatttttttgtagacaaagacaagcttattctaaagtttgtatggaaggcacaggccctagaataactaaaacaatcttcagaaagaagacttgtgtgagaatcattaactcagttccatgctgaacatcttccagtacttttctaaaagaaaaaatgtggatcacaaactcttacctgcaaaactaaaaactgtaaatatcactatactttctgttggcaattagtgttgcagatcaggagtctgaagtcatcytaacttgtagataatctattttttcacttcttaattcctatagaatattttatcccagtaaatattattatatcctttttagaattttatgattatataattttatgagttaatatcctatttaatagaattacttttaaaatttgtctagacgagatctccttttattaaatcatctagaatacagtaaaacatttctgaacacatacttggattcctttttggcttctaagaaattaaaaaggaattgttttgactgatcactgcctttgttccagttaacctgcttttcccccaacagcaatacctattagagttatcctcagtatctgcagggattggttccagaacactccccccagatactgaaattggcagatgctcaagtctcttatatataatggtgtagtacttgca

SEQ ID NO: 716334 - DNA, 668 bp, Homo sapiens
atgccatatgagttggagagaaggctccaagcaggtcctgaatcagaatagaacctacatgaatgatggtacatggtcaaggatttgcagatttggatttgtacatctctatctcttttatcaaacacaactggtcaaactatcacagagcatagacaatgaggtgtctaagaaagatccctgagagccaatgaggtacagactaagagaatgggttttgaagtcatgtaaacaaaagtctgaactccagctttccaatttactagttattcacccacaaaatattttcttggcctctctgagtctcaaagccatctatataaccctaaaatattgtgggaaaaaagttacaaataatacaagtgagatatttggcatgtgtttgacattcaacatgtatgaactattatyacatgaacatcatctaggaatgtaagtgagttacaacactaaagtgcaatatttctgcatgttgcttgcggagcaattcatcactttgtggagcaattcatcactttacataggctcagtgagggccttttttttttttaacctcttcagtatctttaaatctttaaagttctgaaaaaaataccgtatttccctctgttggtctaaaagttactattaaattcttggatttcacatataattttatgctcatttag

SEQ ID NO: 716335 - DNA, 629 bp, Homo sapiens
acatcgtggttgagctcacatagatttcttctctgtacacttcccatgcttctacccaggcagggacgcaattagcatatgccttccttcaactgaagaaacattttaaagacccattaattattgttaaatttttcattattcttaaactcrctgatatggagagactggaagtgaaactaaaatttccaaggttgaaagccatgactattttattatttctgtagctttgtcagaattttaagaaaaagttgagccaattctgtaacgcatatttgtgtattcatagaaaaggttatttcaatcttattttcacagttaagttttatgacttcttttaattttgttttgttaataaaatttttattctttggatagttaagaaagttacaaatttttgttattcatcataatgcctttgttggttttgtaaaacctgggtattagatacaccaatattttagtcaatttcataattgtttaccaattttttataagcctacagcacccagtctcccatccaagtactaaccaggccagactctccttaacttctgagttcagatgagactgggcacattcagagtggtatggtcatagacagtaaattattcacttttaaatgatca

SEQ ID NO: 716336 - DNA, 629 bp, Homo sapiens
acatcgtggttgagctcacatagatttcttctctgtacacttcccatgcttctacccaggcagggacgcaattagcatatgccttccttcaactgaagaaacattttaaagacccattaattattgttaaatttttcattattcttaaactcgctgatatggagagactggaagtgaaactaaaatttccaaggttgaaagccatgactattttattatttctgtagctttgtcagaattttaagaaaaagttgagccaattctgtaacgcatatttgtgtattcatagaaaaggttatttcaatcttattttcacagttaagttttatgacttcttttaattttgttttgttaataaaatttttattctttggatagttaagaaagttacaaatttttgttattcatcataatgcctttgttggttttgtaaaacctgggtattagatacaccaatattttagtcaatttcataattgtttaccawttttttataagcctacagcacccagtctcccatccaagtactaaccaggccagactctccttaacttctgagttcagatgagactgggcacattcagagtggtatggtcatagacagtaaattattcacttttaaatgatca

SEQ ID NO: 716337 - DNA, 625 bp, Homo sapiens
ggcagactggaatgaagtaatctaggattagtcatttacttgttctaagtccttcattaatctttctgaatacaatccattgtgggtgaaatttttttattacaatcagtgcagtacatcctaagtgctcaatatatactttagaagtggygatggtggcagtaggggtggtggtagtaattcagtaatttcctttgaggagaaacaaagacttctgtttttactcagagccatttaaacttgctgtagccaaagctgtgaaaatagaattcatctgtggcattcttgaaccatttagcttttctgatacagctactaattcctcttttttctgcacataattctgacctgaggaggtaaaatggtaacctttgaccactactagaatgctaagagaattgtaaagccataagagatggcatcttgaacttttagtaattccaccaataactaacttgaggaaatttatattttaatccactcttgtcaaatgtttctgctacttccagctgaatgtattcctaaagaatatattcctttcccgtttaatttctctacttaccacttactagtatgtaaaattttctacaaatacatacatatgaatatatgtatagataattta

SEQ ID NO: 716338 - DNA, 672 bp, Homo sapiens
aaagttcacaatgtgagtctccacaagctactctctgtctgagtgggagctgcaatttagtcctgcttcctatccaccatttgcctattactaatttgttgacagccatcttcttctttttaatggaactttgtttttcaagtaatatgagactgtgggagacttcccttcactttgccagctatgcctattagaattcctatctgtccccagaaatcagcaaatgtttaatggtgagaaccaactatgaatttggagttccgcgtagttccaatctttcataccagccccgtccacctatcagattattattgttttgttgtgtttttctaaccataaaggctctttgcctgggtaaaacccagcttctgccaatactaaaaaatggcaaatgcttcaagattttaagttcatcttttctgaatttatctaatagttcttcaaactttttcaaatatatagttatacagtttatttatttgtcttttgwagcagttgcattaagagtgctggcttgccatgaacttctacaccttacaccataatatgaatactttccatgtaaagtttagtactgtaatagatcatctacttttagttttgatttctcctacttaagcccttatctgatcagagcagttcttaagaaatataaatttttaaagattacaa

SEQ ID NO: 716339 - DNA, 747 bp, Homo sapiens
gaggaataactactgatataacaatgacataaaaaggttctcagaaatagtatcttcaatgaaagaagccagacacaaagaagcccacactgtattatttcatttttgtgaagtccargaataaggaaaactaatctatagtgagaggaatctgaacagtgtagtccatggaggtgaagattgactggaatagggcaaaaggaaactttctaggaggatggagatattcttgattgggagcttgctaacatgggtgtctacatttctcaaaactcatcaaattctccatttaatatattctcctgtgtgtaaattttaataaaataaaataaatttcaataaaataatacttttactatagttttaatgaagtttagagagtaaatgaaaataataaatccaaaccacctctttacctggaggtcaggtttttgctaactttttaccattgtaagtaatgctgctgtgactagccattggggcaaataattgtatagattattggttaaattcccaaaagtagaattttatttattaaagatttcacttagtttaagacttttgagacatattgcaaaactttcttcccaaaataataatccaatatataatttcacctacaatgtatgaaaatactcatttcccccacttagccaacattaggtattgtcattttataaacatttaagaataatataaatactaaacagcaataataacagtaatttctaaaactcacacaattat

SEQ ID NO: 716340 - DNA, 2258 bp, Homo sapiens
tggttttataaggggaaacccctttcgcttggttctcattctctcttgtctgctgctatataagacgtgcctgctgccttccaccatgattgtgaggcctccctagccatgtggaactgtgaatccattaaacctctttttcctttgtaaattacacagtctcagatatgtctttatcagcagcatgaaaatggattaatacagttgtagcacagttaaaggaaaagaggaagggtctcttcccaaatctcactgtgtctcattgactctgactaggtagtgtacctgtgcttgagccaatctctatggccagggtgattcgatgttctgattggccagtcctgagccacctactctagtttgcagtcggggcggagtcaattccataggaagcagataaattaagaacaggagaggggatagtcttcaggaaaaaataaaactcatgtttccaaaaagaaggtttacaaatgctctgcaacaaatactacagacaaaccaccatgaacacaagagtagattctgtttatctccaaagactcagcacctggtatagcacttgactaacattaggtgtgaaaatgtttgttgaatttttatttgtaaggtgttgctttctgacaaaaagatatactttatgataaagtatatatcttaaatattgacattttaaaattaaatcacccagttcaaatgagttcaaattgtttaagatatgtctgaaaaatgaactgaatttttatagttggatataaattctaatcatactaaatttgcaaagtaaaattctgtcacagttttatatatactgtagttttgtctgaactgagaaagtcatgaaaaatctatcccaaagtagttgacattttggagggctttttatttttatttttttaaatctttcttaacctaaggagtgcttggaaacctatgctttaattgaaaatgctgctttggcaataagttttacataattctccaagtgcctaaataaactcttggatcaagggattcataacagaaaaaaaatctttctttttaaatgtaataaaaagtacatctgaagatttattctcaaaagtgtgtgcaaaccagacttctctgaggaataaaggtgtgctaacaagtattctatcttagcatttgagagtcccccaacagcatgacgcaactatttcattagctgcgtgtgggtaacttgatttttctcactccctctattctttgtagaacctatctgggcagccatttaatgctaacaagccaaattctttcttcacttcttcctgccaagtagtaccataattgtcatcaagacaggatcatctgtttcatattgcttttacttatgctgaatgaaagcaccagtgtgatttgccattttatttcagctcttattcttgaaaagtagaaaattgaaaagtagaaaagtggtaaaaagaacacttcttttcccttttccaaattataagactgtgaataaattaacattgtcctgtttgatacattgtactactttattggaagcataaaaattactagaagggaaagggaaggtttttaagaggagaaattggttgaaggagggagaaaaagaaaactctacttagtagtatatgagatctttcacagtccagaactgctttgccaaatatagcctctagccactgagattacgaaatatggttaatctgaattgaagtgtactgttttgtacaatacatataaaatttcaaagacaatacagaaaaaaaagtaaaatatcacagtaataactttcatatttatgtttttaaatgatgttttagatatgttgtattaaataaaatatattcttaaaattaatttcacttttactttttaaaggcggctactagaaaactttaaattccacatgtggcttgcatttgygtcttacattatgtttctgttgagcagtgctagtacacaatgtacatgccaagaagctagaatgttcagagatgagatataatgaggttgaagtcatatttaacagtatactcagtgctattttgttttgaaaggcttctttggagaaatatttgtctctctagtagaggtcaagataaagtaggtgcagtttttcaataaagttgctaattgtttttgcctgctgggtagatatattctctttttctgttaacagtgtactggtcttctctgaggaactctctccctccttgattttgagaccctgtggtttggctgaggctgacccatgattctagagctgaatg

SEQ ID NO: 716341 - DNA, 911 bp, Homo sapiens
atcaacacctcatatattgaaaatttaattatttcatgaaaaacatttagtaaaacagatatgttccagatactgaattaatttgcatggaacttcttgaaaaaatgtaatgcaataaacaaatgctagatgctgtcagaaactagaaatatacaattcaaatgtgtgaaccagatttactcatgcctaagttcttaggcacaaattcaggagatatattccaaccaggatatatccatattatttccctttatcttttaccagctctgtaaattattacttataaagttgtaatactagaatttttatatttatagcactgatatgtatcattttatgcaaatgtagctaaataatctagatgtatagagaaatgaaaggacaaaatctggggttaatagcatgctttaaaagaagaaacaatttaaataggaggtttgtttagcaaaataatcagacacagaaaaactcttataaaagatacctagtaaataaagtataactgattcattatactgaaataacttatagaaaacagactatgaatactttatagaagactgatagtgagtgaaaaatatatacctccaggatggaagaaagggaaatggactggcaaatgacagatgggaatttcaatttcatctgtcatattttattcctttaaatgcaaggtagttgaacatacactatattcctctgtaaaatttccagaggcctgacatatttcataaattgaaaaaaaaagttttataattccaaacagtaagcttgatacattaaagattcaactctgttgaacatctttctcagcagtacagaaaattccaggttcactaaaacctctctctmaaggcttttataatggatatcagaatcattgttctaaccaacttttaccattcagaaag

SEQ ID NO: 716342 - DNA, 607 bp, Homo sapiens
aatatatacaaccataatttgttaatttacaataataaaagaaagtactcaagatggaaaagtaaaatggttagacataaataaaatagagaagttggaaaaaagccaatgtgactattgccatataatagtttcaagacattagtctattcactgtaaggaatgtttaaacaataacagcataattatgacagaaacacaaaaatattttcttctatttcttcaagaaatctaaaattttgactgctttattagatcatttaaaaagttaaatctgagtctgtgcaattatacacatggaagatgttgctagaatttcctggaaatatattcacaagtgctcaaaagagattgctaacatagtactgccgataattttgyaacatcgttattcttgttttagaacagttttttaagtatcacattggccctagccatctaactagagagaaacaatatagctctatgctagcacccacaatatcacaatagtatcttctaggtaatcaaaatgagagagaattccacaattgtattttttaaattatgctttagaagaagtgtgaaatgttttcatattctgtaacaggttttaacccatggtatt

SEQ ID NO: 716343 - DNA, 603 bp, Homo sapiens
atctgccggaaacttgctcttggactgtctaatgcctccaaactgtgagaattaaattcctgttgtttttaagctacctagactatggtgctttattataggggcccaagtaaatgaagatagcattctactatttacgttaagaagtttttraaaatataatttaaaaaattcaaatgcaatgtgaggctaattagatctcactcccaacttattctataggtttgatcaagctgttaatctggtagccatatctccagaagcccaagctattttaatattttttagaaaactctgattcaactaagtttggagcaccaacaggtgtttattctattacttattttatcaattgatatttggtattaatccagttgtattaaacagattttgttatataattactaatatttcatgcaactctaaattcgtatttttttttattattatactttaagttttagggtacatgtgcacaatgtgcaggttagttacgtatgtatgcatgtgacatgctggtgcgctgcacccactaactcgtcatctagcattaggtatatctcccaatgctatccctcctccctccccccaccccacaacagt

SEQ ID NO: 716344 - DNA, 641 bp, Homo sapiens
gaattgacctgactcatgtaataggactgccaataagattgagcacttgaattatccaatgcagcccagattaagcatggaggaagtctctggtagaattagttcatctaggtttctgttttgctagatggatacaataaaaagagtgagaggcagggaggttaggttactgaaagaaggtttagtaaaatagagtaatgtaatcccagctgggtaagggggagaagagaactaaaagaagtttaataaatgagaaaatgttcagaagttaaaagcttaaagttcctttttaggtaagcaaatactcattatgggcatagcaagtgtacaggaattggctgaaaagttatagcaagrcacaggaggagaggatgggtccagacgtagatatgtttatatgtttcataaaggaaagtgacacagatgactgatttgagtgttgctggggaaggttctcaatttttcagtcacgcattcacattcatgcattcattcaacatataatgagtggttaacatgtgtttggcaatattccaggtactggaagtccaccagtgaataaaacaggcaagaatccctgatattatgtggcttacctttagttgtgaaaatagggagaacagactttaatgaaaaatcag

SEQ ID NO: 716345 - DNA, 641 bp, Homo sapiens
gaattgacctgactcatgtaataggactgccaataagattgagcacttgaattatccaatgcagcccagattaagcatggaggaagtctctggtagaattagttcatctaggtttctgttttgctagatggatacaataaaaagagtgagaggcagggaggttaggttactgaaagaaggtttagtaaaatagagtaatgtaatcccagctgggtaagggggagaagagaactaaaagaagtttaataaatgagaaaatgttcagaagttaaaagcttaaagttcctttttaggtaagcaaatactcattatgggcatagcaagtgtacaggaattggctgaaaagttatagcaaggcacaggaggagaggatgggtccagacgtagatatgtttatatgtttcataaaggaaagtgacacagatgactgatttgagtgttgctggggaaggttctcaatttttcagtcacgcattcacattcatgcattcattcaacatataatgagtggttaacatgtgtttggcaatattccaggtactggaagtccaccrgtgaataaaacaggcaagaatccctgatattatgtggcttacctttagttgtgaaaatagggagaacagactttaatgaaaaatcag

SEQ ID NO: 716346 - DNA, 1929 bp, Homo sapiens
taacaatactctttctaggtatctacctaagagaaatgaaatatgtctacacaaagatttgtayatgaatgttcacagcagcattcttcataatagcccaaaactagaaacgacccaagtgtctatcatagggttaagggataaacacattgtggtttatccatttggtgtggaatattactcagtaatgaaaagggacaacttatggatacagaaaacaacacggataaatctcaaaaacatcatgctaaatgaaagaagacaggcacagaagattgcatgatgagtattccatttatgagattctaggaaaggcaaactatagtgacaaaagtaggtggccaggggccagggttaggggagaggataggctgcatcagagcatgagaggactttggagtgatgaagtgttctacgtcagaattgggtggagcttatacaactgtgtacctgtgcccaactcacagaacctaagatgggtgaattttattgcatacaaattatacctctattgtgcctcccaaagtcaagaataatttctggacaaataaggacttaggcaggatatttacaaaaaaattattcattcttccttgctgtatatacacagcctggaaagggataggtagatttttgcttaagatcagaagacgtgggtcagattctgttaatcccaccatgactttgggatgtcagagggggttttccccaggatctcccataatcatgtgtagcagtggtgactgctctttcctttctcctaccaacagctacaacccttataaaccgtggcttagattggattgtttgtaacacaaaggatcaatgcctggggggaaggataccccattctccatgatgtgatgatttctcattgtatacctgtatcaaaacacctcatgtgccccataaatatacacacctactatgtacccacaaatcttcaaaattaaaaaataaataaaccatgggggcttagaatgagttgtatacctgcatcttttccttgctgtctagcatgacaccttcaggcaggaccaacccaatgagactattttattttaacagtgtacagcgggacatttgaacttcctgtggtacccagttccctttccatccatcatcatcatctacaagttcctccttatctaatccaaattcctaatgcttccatcttctctcatcctcttctcttttacttcccacagggtcaatgaagcaaagctcataaccatctgtaaaacaaccttttctacccttgaggagaatcattaaatcatactccattcttgcacactgagataaataaatactcttcatgtttgtgagtttcctacttccttatatttctccccagagacaggctcccggggcctctggatgggagcacactataggaaaaggcattgtttgccaggagcttaaaatctggtgttctagaaagtgggaaataggttcaacttatgcttctactacttactcattgataatcctggggcaagtggcctccgagtctcagtctctctatctgattattgggtgttctatatttacaagaagtgctgacgatgagcagatgctcactaattccctccccaacccctgctccccaatccagaaacctgctgactctgcttatcccttggaaagtgtcccttggagaatgctatgatggaattctacttatctggatgattaaggtattgcttagacaccgtatttttgaaaattaatgatgcaagataataatacctagtattgatatagtctttggtctgttatcttaattatgctttatgaagctactataaaactgttaagtaagattactgaaaattaattaatatttatcacactcctggaagcaaagtagagcccttataaatcaggtatggcgaactaaagaaaattcttcctgaatttgcagga

SEQ ID NO: 716347 - DNA, 1273 bp, Homo sapiens
ctggctaatttttggcatttttagtagagacagggttttaccaccttggccaggctggtctcaaacttctggcctcaagtgatccacctgcctcagcttcccaaagtgctgrgattacaagcatgaggtacctcacctggccaagatgcccccacgttctttacaaagttttggttttctagataaggttctaattcaagtcccccatgatgaaaatttaattaaaaaccataaaaaagaaatgcaaggagtaaatcagtgacggtgccattggtgtgagcacattgtctctcttagaatggcagggtctctctctgacatgcagtctgaggatttgtggcatgaaggattgacaatcatttttgaagatgaaactgcaaaaaaaaaatgtgtagtgatgccttctcggaaccagctgattcataaccaggatgaaaatggaaggacagaattaatgatacacgccaagatttatgtacaggggtatttatcactgtgttttcacagtgcccaaaatttggaaacagtctaacttcctaaaatagggacatgattaaatcatgtcactttcacgtgctggacttgcatgtagttattaaaaatcaaaactctcagattgcctaacagagagaggctctgccattttcaaagaaaaggacatactcacatgcacccaccctcactgatttgctccccacatttgctttttacggtttttatttaaacgttcaaaaatatttaacaagaaatacctatcactcaatgctcagcttaagaaagcagaattcaaaactctatatattgcatgatcccaatttagtgttaaaagtacaaaggaaaaaaagaccgggagaaaatcctcccatatgataacaatgaaaatgatgtcttcaccactgagattgttggtgtattttattttcttctctacattttctttaccaaccttttgcaaatgaatatatattccattttttcttagaaagcaattttaaggacttttaaaatcacaggaaataacatcgggacacatcaaggcctcagtacacattgccagtagattaaaagcctggacagttatcttgagaatcctcactgagttgcaagaaaataaaaagaccaagccttctctatactaaaaaaatctttcctccactctacttctccctgatgactccaaacttttgccttcctccttcctttgccatccagcctgcttgagttttctccatgccatctctctgtgcacctccattcctctcctcagctccat

SEQ ID NO: 716348 - DNA, 653 bp, Homo sapiens
ttttgcaccagaattactttctgtgaaggttttttctaaaaatttctaattaggttgcattaactrtgttggggcaatgcaatcactctgtttcttcttgagacaatttttgtaagttgtatttgttctttggaacatattaatttcttataagtttttatatttactgccatgaacttattcatgttaaccatctatgtgttggtttctactaagtgattacaaacatatgttcatttctgtgggtatgtgagatcctctacctagtgttgcattcaggtaattttctttgctattctttactgtatagtgaggcttatttaaattatcccccaattatgactgtgatcatctggagttaatgccgtatatgggattctcgtaagattacattccaaactttctattagccagcgaatttccttcctgtctcctctgtttagtgcatctatcatttcagaatcttcagtttcacaggagctgtcagaagtcctcagtgtgagaataggtgggttgtttgtttccaacccatggtttttgctttatttttgtttgtgcgtcccaagacatttttactcttttgctaattctttgttaaatgtaataaaagtttgttctattttatcaaaaatttaatatgttgttattttgtt

SEQ ID NO: 716349 - DNA, 626 bp, Homo sapiens
tttctttgtgatcaaaataaagtagagaaagaactcagtttaccagtgacacaaagacatcacgtcctaatccttaaaacttttgtacattttatcatatttggaaaaagaacctgtgcagatataattaaagatcttgagctgaagagatcactgtggattatatggctggaacataaataaacttacagatctaataagagctttgagagaaacagaagaggcaatgtgatgatgaaatccaggctggcaatggagtgatgcagccagaagccaaggagtgcctggggccatcagaacctgagagaggcctggatcccattcttccctaaagtccctggagggagatggytcctgcaaaattttgagtttcttgccaacaaagctgtggaagaataaatttgtattgatttaagccacccagtttgtagtaacttgttacaatagtctcaggacactgatccagaaaccatgtcctgatttccctctggaccatctccccttccccaccctctgcccatgtgcttcgcattggaagtggctgctcccttttctctaggagtggtatatttgaccctgtcctaagccagttcaactttacatttctttggcctcaagattagctc

SEQ ID NO: 716350 - DNA, 653 bp, Homo sapiens
tgctctgtcgccaaggctggagtgcagtggtgcgatcttgatcttggctcactgcaacctctaactcccgggttcagagattctcctgccttagccttgcgagtagctgggattacaggtgcccgccaccacgcacagctaatcttccttatttttagtagagacggggtttcaccatgttggccaagctggtcttgaactcctgatgtcatgattggcccgccttggcctcccaaattgctcggattacaagcgtaagccaccgcgcctggccaagaagtggaagttttcagaggyggttatgctatggaggctccactagtgggtaatactcgtgctgtgataaaaggggaatttggccccctcttgccctctgtcaccctcttaccatctgccatattatcatataatgcagcaaaaaggctctctccagatgcttgcagctagatactggattttccaacctccagaattgtgagccaataattttctgttcattataaattacgcaatctcaggtattttgtgatagcaatacaaaacaaactaatatagggaatgttcgtggttgtgactaatcatgcttctagaagaatctcaaagcctttagacaggtgatgatatttatccagtgattaatacagattatagaa

SEQ ID NO: 716351 - DNA, 2425 bp, Homo sapiens
gcatatattcagcaaactacattgtctctttaaaccaatctgttaaacaatctttaaaactatcttgtggttaagtaaaatttggagatattaaagaacttattcaagattgcacagattgcacaactagtcaagtcagttttcaaaatagctctaattccactatcttaacacttaaaacctatagtatacttccttctctactgcaatgactctctccttccagtccttttacagcttagaaaaagtacaagaaacagaaacccttttaatattattgttagtttgtgctttttatttttcttaaagtcgatcaaattgaactactctcatctttgattctctttagtctctttcccatatattacctcttctcaagccataatcctcaccagtacatagcaaaatccaaactttaaaatgtttgtatcatctcatcttctgcttttgggaaggtggtatagacatatttttgactattccttccaattaatactatgaaaaacattatatataacagacacatgagaagactctgaaagttggagagaagaaggaagaccagctaggcactccagtatcaaggaacggtgtaacacagtttctcggttttctttttgcctcaaatattcctgacttgggagtgaaaaagccccaaacttgaaaatgacctatttacttcaaaatattacttaaagtgtcacggtaggtaatatgttcccacagttttataaatggcatgtgtgtaatttggtattcttgtgttttttatcagcaaataaatacagtaaatgtttaatcaataaatgtcaaatgagtgataaaaattagtaattaaaccagtttaccatatatacattaaggatataagaatagcttttattttcatgtactcataatggatattcagtaagaaagaagctgttgaacaaaaggtcattatggtaactttttaatgagtgattttgataacataatatattttcttgatgcatttttttttctccattgaagtggccattcacttgagaactacagtaattagagttctttttaactaagtcttgttttctaaaaatggatcactttctttcatttttttattaataatttctgacatacaacctttactcaaaaggcgcttatgagaataaaaggaacttcctataaatgagctcagtgctgtttattctctgacacttatgtactkctcaaaagtgcttgtcagaattcaagagacatttgacaaatgagccttgtatgattttagactctgaggacatcttactttttgatgaattctccacagtgcttagaacaatgtggataaattaatacttcctgactggttggacttagtaattcctcattacagaaattttctgtactatcagtgaatataagtttttgaaaaagaaatatttatgaaatatatgatgtttaaatgttgaggtgaattactcattttgaagcgagcattaaatcagttccacagctttaatattttacatttctaatgcactgtttatgacatcgtagttcaaatccaaaagctagtaagctagtggtttgttatatacatttaaaccaatttctccaactaaattttttcatttgtgaaaaaaatgcagccatattcaatacaaagggatgttatttacaaatctccatctgattgctaaaatgctgatttacaatgagaaaaaacaataaagaattaactgaaaaaacacattgtactattaagtgcaaagagatctagatacacagaatgtaagttaagatgaagaaccaaattattcaatttttggaaatatatattccagttagtgttgtctggcagtccagaaaaaaatgcatcattacttactaaacttttaaatgctgtagaaagttatttgctgaaatactgaagaaaaagtttgccatgcgcaagaaaagcctaaatatgtcactgtaactattggtagaaaataatttaatcaactttcactttttaacatgtgaattatttacaatggattttcccctgtcattttttacccattgatgtgaaagcaaagaaaacaaacaaaaatgaatgttaacctagacaaagtatagccagaaaaaatttatttcaattcattactggattcccaaattaaattatttttgtatcactaaattggcatgtataaagttaattctctttaattttaaaaatacatttattaaaatgagtgagttaaattcattagaaagaaagaaaatcgcctgtaaaattctttgatgttgacataataagtaaggtcaatttttccataatatgtaatagtaagaaattccctgactgtgtgcatcaatattgacactgtcttttgggttagtgtaaatatctgaaaagtaactgtataaatgtttacaagaatgttttagtttaaaa

SEQ ID NO: 716352 - DNA, 1232 bp, Homo sapiens
tgagaaaattgagatgcaaggacgttgtgacattttcctagaatattaccacttttcattgggaaaaataaactgtaaatattattttagacaagaagacccttaatgtagtgattatcataatggaaaaaggtctgaaaccagagtgtcagaaaaagtccattaggctatgtttgtgaagaaggaacaaaatggggctaattaaataaattctgttatatctacataatggaattctatgcagttgttaagaagaatgttgcaggtatattaaaaatcactaaagagaaatcactgtagctgaatcttctgcaaggctgcaatcaaggtgttatctgaggctggattctctactagaagctcaactagggaagtgcctgcttccaagcatactcaggttatggaaaaattcatatggaattacaaagtatgtttgagtaacctayaggaaggaaagacaaggaaaacaaacaaataaaaataagagatcttaaacaaaacaaacaaaataaaatggcagacaaaccctaatatatcgataactttactaactgtaaataatctaaatataccaattaaaagagagagtttgagagagtgaatgaaaaatatcaaactatgcagccatccctcagtatctttggatttgttccagggtgcctgtggatcccaaaatctgaggattttgcatgtaacgtatgcatatcctcctgtaggatttaaataatctctatattactttttataccaggtatagtgcaaacgttatgtgattagttgttatactgtattattttttaattgctattatttcttattgctgtattgttgctgttatttttattttttgagggttcttgaacagttggttaaatctgctgatgcagaacctgtgaatccagaggaccagctgtattctggctgtaagaaattcactccaaatataatgatatgggtagactgaaagtaaaatgatgaaaaatatgtataccatgcaaatattaatcaagagaaagcaggagtggctgtattaatatcagataaattggacttcagaacaaagtaaattaccagagacagaaagcaatatgacataatgacaaaggatcagtccaccaggaagatatagcaatgataaatgtatatgcactgaacaaccttcatatcctaaaacctcttgtttaataggaatgcttttgtataactaaagatatcagctatttagaatacct

SEQ ID NO: 716353 - DNA, 1232 bp, Homo sapiens
tgagaaaattgagatgcaaggacgttgtgacattttcctagaatattaccacttttcattgggaaaaataaactgtaaatattattttagacaagaagacccttaatgtagtgattatcataatggaaaaaggtctgaaaccagagtgtcagaaaaagtccattaggctatgtttgtgaagaaggaacaaaatggggctaattaaataaattctgttatatctacataatggaattctatgcagttgttaagaagaatgttgcaggtatattaaaaatcactaaagagaaatcactgtagctgaatcttctgcaaggctgcaatcaaggtgttatctgaggctggattctctactagaagctcaactagggaagtgcctgcttccaagcatactcaggttatggaaaaattcatatggaattacaaagtatgtttgagtaacctacaggaaggaaagacaaggaaaacaaacaaataaaaataagagatcttaaacaaaacaaacaaaataaaatggcagacaaaccctaatatatcgataactttactaactgtaaataatctaaatataccaattaaaagagagagtttgagagagtgaatgaaaaatatcaaactatgcagccatccctcagtatctttggatttgttccagggtgcctgtggatcccaaaatctgaggattttgcatgtaacgtatgcatatcctcctgtaggatttaaataatctctatattactttttataccaggtatagtgcaaacgytatgtgattagttgttatactgtattattttttaattgctattatttcttattgctgtattgttgctgttatttttattttttgagggttcttgaacagttggttaaatctgctgatgcagaacctgtgaatccagaggaccagctgtattctggctgtaagaaattcactccaaatataatgatatgggtagactgaaagtaaaatgatgaaaaatatgtataccatgcaaatattaatcaagagaaagcaggagtggctgtattaatatcagataaattggacttcagaacaaagtaaattaccagagacagaaagcaatatgacataatgacaaaggatcagtccaccaggaagatatagcaatgataaatgtatatgcactgaacaaccttcatatcctaaaacctcttgtttaataggaatgcttttgtataactaaagatatcagctatttagaatacct

SEQ ID NO: 716354 - DNA, 1524 bp, Homo sapiens
taagtagtgacatggaacatgtgaaataaaccaaagtaatctctagaagtgcaaagtatgagatgaaaaatacacaggatgagattaacagtagattagatattacataagaaaagagtagtgaatttaaagaagtaacaataaaaacaacccaaaattaaacacggaaagaaaactactttaaaaaaagaacaaaacataagttatttggacaatgccaagtggcctgatatatttaattagagtccctaaasaaggggggaacaaaaaaccttttttaaaaaaaaaaaaagtctaaaaataacccaaatttgttgaaactataaacacacatatcaaaaagttattaagcacaaacacaaggaacatagaagaaatatacatgaccacattgcttacaaccagtaaaaagagaggaaagcgtaacagcaaacaaaggtaaaaaacatgacatacagagaaaaaaagataaaaatagcaacaaatcttcatgtaacaatgcaaccagaagacagttgtaaaatttgaaaatatttcaaatcactggctgtcctcacttttgacaccaatttcaagtgtgggagtccccaagatgaccctcaattttgataatttacatagtggactcaaaactcacagagagctcttgtacttaacatagtcatggtttattacagcaacagcaacaacaacaacaacaaaaagatgaaaataaaagaagagatgcatggggaagagtccaggaaagttccacacatggaattgtcctctcccagagaatttgcatacaatgctacctttcctgtcaatgttgtgttacaatgaacatgaagagtattgccaaccaagaaagctccccagctcattggtgtctaaagactttactgaaacttgatcatggggacatggttaactgctcacatggattacttcaagtcacagcccctccagagatcaaactgatactgcataaactacagctcccaccataaattacattgtcagaataatgggcattgcccaatgctcccagctaaacaaagacagttttcagcaggatgttccaaaggtttagatgctacttttcatgagtggagatcaaaaactagatttcttcttgggcaagaaaaagttctttggtatacaacaatgatcgagatttctaaaatacatcaatccagaattctatatcaatgaaaatatctttcaaacacaaaagcaggaactttttcagacacaaaaaagaaagaaatttaataattctagtcccaagaataagaaatgttcagtgcaattctacaggcagagagaaaattatgcaagatgaaagtctgtatctacaaaagtagtgaagagcaccagagctggtagctataggagtgataattttttttcttattatttaaatccctatgaaagatcattgattttttaaattaaaataataacaatgtattatggggtttataacatatgtataaaagtgcacaacaaccatagcacaaaggctaagagaagagaaat

SEQ ID NO: 716355 - DNA, 1524 bp, Homo sapiens
taagtagtgacatggaacatgtgaaataaaccaaagtaatctctagaagtgcaaagtatgagatgaaaaatacacaggatgagattaacagtagattagatattacataagaaaagagtagtgaatttaaagaagtaacaataaaaacaacccaaaattaaacacggaaagaaaactactttaaaaaaagaacaaaacataagttatttggacaatgccaagtggcctgatatatttaattagagtccctaaagaaggggggaacaaaaaaccttttttaaaaaaaaaaaaagtctaaaaataacccaaatttgttgaaactataaacacacatatcaaaaagttattaagcacaaacacaaggaacatagaagaaatatacatgaccacattgcttacaaccagtaaaaagagaggaaagcgtaamagcaaacaaaggtaaaaaacatgacatacagagaaaaaaagataaaaatagcaacaaatcttcatgtaacaatgcaaccagaagacagttgtaaaatttgaaaatatttcaaatcactggctgtcctcacttttgacaccaatttcaagtgtgggagtccccaagatgaccctcaattttgataatttacatagtggactcaaaactcacagagagctcttgtacttaacatagtcatggtttattacagcaacagcaacaacaacaacaacaaaaagatgaaaataaaagaagagatgcatggggaagagtccaggaaagttccacacatggaattgtcctctcccagagaatttgcatacaatgctacctttcctgtcaatgttgtgttacaatgaacatgaagagtattgccaaccaagaaagctccccagctcattggtgtctaaagactttactgaaacttgatcatggggacatggttaactgctcacatggattacttcaagtcacagcccctccagagatcaaactgatactgcataaactacagctcccaccataaattacattgtcagaataatgggcattgcccaatgctcccagctaaacaaagacagttttcagcaggatgttccaaaggtttagatgctacttttcatgagtggagatcaaaaactagatttcttcttgggcaagaaaaagttctttggtatacaacaatgatcgagatttctaaaatacatcaatccagaattctatatcaatgaaaatatctttcaaacacaaaagcaggaactttttcagacacaaaaaagaaagaaatttaataattctagtcccaagaataagaaatgttcagtgcaattctacaggcagagagaaaattatgcaagatgaaagtctgtatctacaaaagtagtgaagagcaccagagctggtagctataggagtgataattttttttcttattatttaaatccctatgaaagatcattgattttttaaattaaaataataacaatgtattatggggtttataacatatgtataaaagtgcacaacaaccatagcacaaaggctaagagaagagaaat

SEQ ID NO: 716356 - DNA, 1524 bp, Homo sapiens
taagtagtgacatggaacatgtgaaataaaccaaagtaatctctagaagtgcaaagtatgagatgaaaaatacacaggatgagattaacagtagattagatattacataagaaaagagtagtgaatttaaagaagtaacaataaaaacaacccaaaattaaacacggaaagaaaactactttaaaaaaagaacaaaacataagttatttggacaatgccaagtggcctgatatatttaattagagtccctaaagaaggggggaacaaaaaaccttttttaaaaaaaaaaaaagtctaaaaataacccaaatttgttgaaactataaacacacatatcaaaaagttattaagcacaaacacaaggaacatagaagaaatatacatgaccacattgcttacaaccagtaaaaagagaggaaagcgtaacagcaaacaaaggtaaaaaacatgacatacagagaaaaaaagataaaaatagcaacaaatcttcatgtaacaatgcaaccagaagacagttgtaaaatttgaaaatatttcaaatcactggctgtcctcacttttgacaccaatttcaagtgtgggagtccccaagatgaccctcaattttgataatttacatagtggactcaaaactcacagagagctcttgtacttaacatagtcatggtttattacagcaacagcaacaacaacaacaacaaaaagatgaaaataaaagaagagatgcatggggaagagtccaggaaagttccacacatggaattgtcctctcccagagaatttgcatacaatgctacctttcctgtcaatgttgtgttacaatgaacatgaagagtattgccaaccaagaaagctccccagctcattggtgtctaaagactttactgaaacttgatcatggggacatggttaactgctcacatggattacttcaagtcacagcccctccagagatcaaactgatactgcataaactacagctcccaccataaattacattgtcagaataatgggcattgcccaatgctcccagctaaacaaagacagttttcagcaggatgttccaaaggtttagatgctacttttcatgagtggagatcaaaaactagatttcttcttgggcaagaaaaagttctttggtatacaacaatgatcgagatttctaaaatacatcaatccagaattctatatcaatgaaaatatctttcaaacacaaaagcaggaactttttcagacacaaaaaagaaagaaatttaataattctagtcccaagaataagaaatgttcagtgcaattctacaggcagagagaaaattatgcaagatgaaagtctgtatctacaaaagtagtgaagagcaccagagctggtagctataggagtgataattttttttcttattatttaaatccctatgaaagatcattgattttttaaattaaaataataamaatgtattatggggtttataacatatgtataaaagtgcacaacaaccatagcacaaaggctaagagaagagaaat

SEQ ID NO: 716357 - DNA, 743 bp, Homo sapiens
ttctctcacacttggctgcctgtttttggccttgtaaycttcttctgttcaatcaggactgaggcaaagcaaccactgacatgtgctgaggcaactcacagcgatacttcccagtaagcaggccaccctcctttcctgcaaacctctgcctgaaagcagatttcatccatcctggccctcccaggtccaccctggggccttcctccactgaccagaaagcacagtcagatgcacagggtcgctgaggctggtctggccagtctggcacgtgtactccccgctgtcattgttgttggccttgaacctgtagctgggctgcgtgtgggtgggaatgagattcccattgtggaaccacggaatggagtcgctctcagggctgtgagtcccccggcatgtcagagtcacagagtcctcttggagcacgttgatccactagggctcgagtttcagcacagcctttgggggagctgctgaggggcagagagaggaggtagtgtgaggaagaggaagcccaagagcctgagaggccctgaatctcagacaaaaaagcacctgtaggcctactgggggcaccaaaagctgagccaggcccagaatggttctgcaactgaaggcagttgcttttgctcatacatcccaccacaagggccccagggaacccaggactcagacagggcaacagggaagaaggagggagcaggcaagagaaacaccctcgaaatacatatactttacctgagata

SEQ ID NO: 716358 - DNA, 743 bp, Homo sapiens
ttctctcacacttggctgcctgtttttggccttgtaatcttcttctgttcaatcaggactgaggcaaagcaaccactgacatgtgctgaggcaactcacagcgatacttcccagtaagcaggccaccctcctttcctgcaaacctctgcctgaaagcagatttcatccatcctggccctcccaggtccaccctggggccttcctccactgaccagaaagcacagtcagatgcacagggtcgctgaggctggtctggccagtctggcacgtgtactccccgctgtcattgttgttggccttgaacctgtagctgggctgcgtgtgggtgggaatgagattcccattgtggaaccacggaatggagtcgctctcagggctgtgagtcccccggcatgtcagagtcacagagtcctcttggagcacgttgatccactagggctcgagtttcagcacagcctttgggggagctgctgaggggcagagagaggaggtagygtgaggaagaggaagcccaagagcctgagaggccctgaatctcagacaaaaaagcacctgtaggcctactgggggcaccaaaagctgagccaggcccagaatggttctgcaactgaaggcagttgcttttgctcatacatcccaccacaagggccccagggaacccaggactcagacagggcaacagggaagaaggagggagcaggcaagagaaacaccctcgaaatacatatactttacctgagata

SEQ ID NO: 716359 - DNA, 608 bp, Homo sapiens
cacatagctgctgaactgcttttcagagcactgtgtagtatgaggtctgagcacatattctcagcttttgaggagaatgatgataacgctggttcacttcttttatcagatgggtgatgactgggtgaatcaattagccattttctaccccacttctttaaaaaaagagtaattatatctactaccatgtaaataaaagagatagcagaagttttaaagaaggcagtgaatcacacacagaatatcttctgaaaggtaccttgtgtaaaattaatgatagcattttcatttctaattgatctattcattccacaaacacatactgagggcctaccatgtaccagtcacttctaacaagatttaaattaaaaatatctataaagsatattgaattccttgggggaaaatgacatcctccactatttaaaatagcaggtggtagaaacacaagcaatccagatctccctttttattgacttttccccacacattttagaagaacgattttagcaccaaagtttacaataaaccattaactatatattaagcatcaaatgtcatcatcccaaaatattgcattttatacaatatagttgcatagtaatctg

SEQ ID NO: 716360 - DNA, 608 bp, Homo sapiens
cacatagctgctgaactgcttttcagagcactgtgtagtatgaggtctgagcacatattctcagcttttgaggagaatgatgataacgctggttcacttcttttatcagatgggtgatgactgggtgaatcaattagccattttctaccccacttctttaaaaaaagagtaattatatctactaccatgtaaataaaagagatagcagaagttttaaagaaggcagtgaatcacacacagaatatcttctgaaaggtaccttgtgtaaaattaatgatagcattttcatttctaattgatctattcattccacaaacacatactgagggcctaccatgtaccagtcacttctaacaagatttaaattaaaaatatctataaaggatattgaattccttgggggaaaatgacatcctccactatttaaaatagcaggtggtagaaacacaagcmatccagatctccctttttattgacttttccccacacattttagaagaacgattttagcaccaaagtttacaataaaccattaactatatattaagcatcaaatgtcatcatcccaaaatattgcattttatacaatatagttgcatagtaatctg

SEQ ID NO: 716361 - DNA, 1694 bp, Homo sapiens
atgaaaattgaggcatctgtcatcattataggagttattcccctagtgagttttctcatcaaggtgaatagaaaattgtcgagtcttataataaagatttagctggccattattattttaatgcctctcaaatccatttcttgatccttttttcatttacaacatacctttccttccattacatccttttagtcagagccttagatctggaattacattcctctattacaactaccttaatgggcatcctgatgccaacaccgtttcctcccaggtgaatcctaaccctgtttccagagttggcttgtcaatactctccctaaagtcctttcaggactttctgcartggaacaaaatttggctaaactcctcatactctgcttcacaggcctacagatttgagtcataaagttactaaagagagttcctttctacctcttaaattttgccttcttgattttcttaagaattgttaaggaaaggaaatcttattattcacaagtattgccaaagagtatctcaggtatcttcactcgtttaaaacatttggaattgttgacactaagtaaatgttggcatcatccagcactacttttcctttaaaagaaaaactagcagatggacatgtgtaattttcttttttataaaaacttattaagaatatcttaaaaatgaagattttgcaagtatcataatttttttcatctttcccttttgtaagaaagttatctggactttcatatgtaatttgtgagcacttaaaatcctaatggcaggaagaaaatgtagctctaccagcacatctgtgaccaatatgtcactaataatgtcctcctttgccaagttttagactcttttttgtttccttcaacaataccagcaaaaatggaaaaagatcttttctcttaatgaaaacaagtgtaatttatttatttttcaacaagactcttaagtgagcttattaaaaatgcttggaaaagagaaaggcatttgaattgaattgaattgaaatggatgagttgtattctatttttaaaaactccctttattccttaaactttatttccaccctgatttttctgaagtgctcaagaaggtttggctaaattaaatccctagagacacggaagtaatgattcttcctaaaccgacagattctggggcttataggtgagagaagttaagtaatattggaagataaagtaacaaaataaataatgagatggtatattaaaagtgagaaaagggctaggtgcagtggctcaagcttgtaatcccagcactttggacactgaggtgggaggatggcttgagcccaggcattcaaggctgcagtgagctatgattgtaccactgtcctccagtctgggagacggagcgaggccttttctaaaaaaaaaaaaataactacataaaataaaaagagagagagagaaaagaagagagttctgcctttgtcagcatgaagtcaaaaacgaattatctaactctaaggcaaagtcacctatgatacactttgaaagaccaagacagatacaatactattcttgtgcaagtttggaaaagggagagatggggcagcagcaaacaattcaaaggtggtgcatacactcattgggcactaaatgtacgtcaggcacttgccttatttcatttaatccaggtgttcccaaaaggaactatctgtggataca

SEQ ID NO: 716362 - DNA, 2014 bp, Homo sapiens
tcacccagagcctttgatctccaatgtagctacttcagaactattacacttctacatttacttccaggtgcttgtccagctttgtcacaaaatacactktgtacatgcccttggcgtttcttcatagaactctcggctatcttttgtaacacatccctgtgcgttaatatcatgtgttcctcacttttttctgatttcttgaccatggaggttttgaaaagtaaatacaaaggcaggttagagttttctttcatgggcttccccctgcttagggctcatttgtgggcacgctataaaagggtccacttctggcatccttctggaatctttgaaacacaatcttccctcaccaatcagggtctcttcttgccagttttcagattcttttctgatttctgcccaatcccttgggcatgatgctttggactttcccatactgccccgcctgcctcccactgaaaatcctttttgcactaagtcttgcagccagtgcgtcagccccacctatgttcatgcctttgctcatagaagcccagcctgagccatgccctgggcactacgtctattgcctgggagaggtagttgcagaatgagagtgttttaaattctactgccagtgaaatggtttttcaaagttgaaggaaataaggaccattacaaaaagtttctcatcaagttccttcctttcctggccctttctttccctctgtccctcacaaatcaatagctatttcctgaatccttaatctaccacttggttctgactgtaattttcatgggcttgaaagagggctttattagagtttcttaaataaacattctaattccaagatggaaacccccaaactatttatttgattttttttaacaggcctgtgaacagctttccctacaaaatgtttctaaaatatttagatttcaagaaaagtcactgatagccttaacttggatacctaagtggaaaagttctgctaagtgtactcagcctgcttaatgatggggaagaagcaagctttgtgttttctctgtaaacagagaatcttttccatttggctaagtagttggaatttgtagactctttttaactgactgaagcacatataaagagcaataggcaggctcttgttctcaataatggaagctatcaatgaaagaatcctccaccccacaccctacctccacatttcagtaccatcaacttgctgaaaaggaacttcccagccattactgcaaggaacatggtttctaacgttcatgttatatataagtgttgccatggtgatttctattttttatctatttgcaaatgtcccctatgatggtataggtcatgcactatgcaatggcgccatgtctgagggggtgctattcacatcatgggtttgtatagttatcacgacaagtgtctgtcataaggcaatgaagagcctcctaacaaaatcagcatactgcaacaattttccaatagatggcagaggtgccttttaataagtgacataaaggtgacttgaggtcatacagactagaggccattccgtctagacaccctgacctagagcaatgtcaagagcaggtgggcctcatgacaatgggtgggggtgcaccaggctcttctaaataactagatatgtttcacatgttgtaaacatagtcccaacacaagtcacttaaataaagagaacattcacttgtttgtcagttctcaatatcctttttgtttctccccaacacattttctcagaagctctttatggtgaaggtttagggaaaagcagagatgtaaagttttaggaaaagtatgtaaggtgacccctcctttctgcatttaaacaatttcaaaggtagattttcttagattgattacaactttctaaaaggtttctttggttataaaatataaatacttgaaatatgtttcttgggaaagattcatgaacctgcaatatatttttgtgttagtgttgacctagacaaaatgggctaaaagcaatggacgttttgtccattactgaga

SEQ ID NO: 716363 - DNA, 585 bp, Homo sapiens
caagacattgagggtgatacataaagagctgtttccacttgaagtatattgtgtgctttatcctagaattctttccatctacrcattcttcattcagcaattgtttattatattcctattctatgtcaggctcagctcttaaacctgggaatataaaacaattgctctatatctccaggattcacctcatgccatgcacattctagttggagtcatgcagtgcactgtgtaagtgtaaggttaggttaagatgtaccccagcccagtgggagtggtctctaggaagtgtccaggcaggactacagtgctatcatgtcattcttttaagtctgcacctagaaagaggacagttgagcttgccgtgaagttctgacttggctctccctgtctcatatttatgatctaccactgtgtgtctgttctggagaccgagaagttaatgcttcatctatttcttgagaatgtttctaatttctctagtctcaaaattgctgagctgatatctttatctttggtaaaacttgtttgatatgcccatgtatctcatttctcttttgaacttgactcactatcatcatttgtcaa

SEQ ID NO: 716364 - DNA, 1300 bp, Homo sapiens
tccagccaggatccaattgagtctcttgactatgttcatcttaagaagattttaactcctcaagatgacgaactttccacaaagacttttcagtcttcaaatggacccctttcctgttcgggccattgggtaggaattgtgctccactcttactagctgtggggtactgtaccatcttttgcagttttccttgtgctttaaaatttgtatgttatctctacaaaatcctccttgtcacaatttgtcataatttctatatgctgtttctttggtgacctgaattgatacagtttgaaaatttgtatggcttaatatagaatattaagcttaagcatgcttgtccatagccttcaaatattttcagcatctctctaaaaatccatctctactggatgcctttgacttactaaatgtcagggtccacattgatctaacaactaaattggtgatttggggaaaaacaaaactaaacaacaaatgaaaacaaaacaaaaaaattacaatggcctataattgtggagcttgtcttctacataggaaaaaaaaagtgcatcccttttgtcaaaattctctagtgatcattagtgtttaaaataggcttgccagggtgaggcaggagaatttcttgagtccaggagtccaagaccagcctgagtaacatggcaagaccttgtctccttaaataataaaaaaattttwaaaatctgggcatgatggcacatgcctgtggtcccaagctgcacaggagtctgaggtgaaagaattgcttgagcccagatggctgaggctgcagtgagccgtgatcactcactgtactccaacctgggcaatacagtgagaatttgtctcaataaaataaataagtaaataaataataaaataggcttgaatatttttcaaccatatttagtgtcttaaaattttttggttttgaataaaacaagcagatacagattattccttgcctggaaagcaagaactcccccaaaacagtgaaatattgatcaactgtgcattacaattatcatcatcatcatattgaaggaatatttactgaggcctcagtgagtgtgcataatagtttccatgttataatacataaagatacatattcctaccaaatgaagctgtttgtagtatgccctgctccaatctcagccatattcccactttggcatttctggattctctgtcaattctatttctatttagataattctggcaaattactgttgttatcttcactgttctggcattaatgctgcccacttcattttgaactctttaatattagtgttat

SEQ ID NO: 716365 - DNA, 855 bp, Homo sapiens
ctttgactgtaattttcctttacctacccaaatcctataaaacagccccaccccatctcccttcactgactctcttttcggactcagcccacctgcacccaggtgattaaaagctttattgctcacacaaagcctgkttggtggtctcttcacacggacgtgcatgaaattatacttcttaaaattatgagattaaatgagtttagcagaagtcaagcacttagaacagtgcctagcaccaagtcattattgaacgagtgttggatatttataacaaacaactcctttccctaattacagatttttgaagtgacacatattgctagcagccaatacaggctgatgggatttccagcactgggtgcaatatctacaactaaatacttactatggtaagtattcaatatatatttattaagggataaaatggtacaaagtccaacacttcacctggatgaacaatttgaatatgaactagatggaatcaagcatccattctttggtctcacagacctttcccaaaacctttgaaatttgtcctgagaagaggcataccatacattatgagttttgttttgtcttgttttaataagcctttatataaattctagctgagatcagcatcattatcatttccggaggcaatacaggtggctccccagttgagtcatgatagtcctgtacaaatatgcatttcatcaatcctattcccacgctgccctctgttttctcattccttcctttaacagcagctcagcattcacaatctacccctgctgtttatggtttcatagtgcagcaccatcccttggatattttagagagcaatgcaataaacaaaattttccagagttg

SEQ ID NO: 716366 - DNA, 650 bp, Homo sapiens
cagtatctccgtggacatcctctcctagaatgattggactcagccttttgttttgttttctaggagagcaattagctaagtttagggcacatgctcactgcttgcctgtcatggagctgtaagaaagagaatctgacagaaagaacctcagggaagcccatacttccaaagagacgagacaggtacctgaatttgccaataccaacactgtactcaatgcaaggagaagatccactccctcctacccccaaaatagcaaaaagtttcaagaaatttggaaaaggatattgagtgcctacaaaaaataaatatttactaccaccatcattttcttttaccttctgctatagaggcattattgatttagtctctccaagtctgttagcccttaattttaaaagtggggaaattatgtgtgtctgttgtttagaaccttgctaataaactaatcccatcagttagcctaattttcccaggatattgcactcataaaggtttytaaaataaaatttctgcctattcttctctgtctctatttagcacagcatgtaatccaggtgctcagtttagcaacattttgcaacattgatactatccccatctgatttgctgagaagatgaatataaacaaaatgacactggtggctttt

SEQ ID NO: 716367 - DNA, 1167 bp, Homo sapiens
taatttcctttaaatctggagtggggaggaaatctacaatagtgcctttgaaacacttatatagcatcttttatgtcttagctattcttctgagcacattgtcatgtatttttcaggttttcaagaaacctttgcaactttaacatagcattttgaggagtaaaagtgacacctggaaaaagccatccwtgagaactaactccccacaaactgatcagatgtcacaactgtgatttttcttgagagagagcaaaactatgggttaagatgtgtttggaaggcagaaatctgaccaagagtctgtcatgaggagcagacatacagaagaatgattcacaagaagacctcctttctgtgcattgaacatctatccacagagcacatcttcattactaggggagagcatccctcagctgacatggtggtggcagcatggtcacaactgaggtgcggcttcagaaaggagagcttttcaatagttagattattacagggcccaactaaatgcctcaaattcccaggaatgtaggtaacaacaattatgcctctttctctcttttcctcacagacaaaaaggtaacttatgttgcataattataaaaaattccaaaataaaaatttgaaatatacaggacacttcaaataatacatctacatgttttgaatcatcttcctaaagcccaaatattgttgttgtgtacccaggcacagtagggagctgatcattacaaatgacagcaacaacattttaaaattataaatcttaagaatatttaaataaatgtatagcaactaataaaattgaaagcaaaatgtatactaacttaatttatattttattagcagatatttgtcttttaaaactgtttattagtaaatttaaattatgtaaaattttgcatgtatatcttaggatggcagatatatcttgaggtcatattattccccttatttgcaggtagagtcaaatatccatttttttgttggcttctcatcctactgactttgtattaacttgacttgtattcattatttaaattaaaaatgaaatggaaattccataatgggaattacctcccattgttagatttaagtttcagtcaacagaatctctcattttcatcaagaaattttttaaacgcgtgggcacaatattcctattctttc

SEQ ID NO: 716368 - DNA, 1167 bp, Homo sapiens
taatttcctttaaatctggagtggggaggaaatctacaatagtgcctttgaaacacttatatagcatcttttatgtcttagctattcttctgagcacattgtcatgtatttttcaggttttcaagaaacctttgcaactttaacatagcattttgaggagtaaaagtgacacctggaaaaagccatccatgagaactaactccccacaaactgatcagatgtcacaactgtgatttttcttsagagagagcaaaactatgggttaagatgtgtttggaaggcagaaatctgaccaagagtctgtcatgaggagcagacatacagaagaatgattcacaagaagacctcctttctgtgcattgaacatctatccacagagcacatcttcattactaggggagagcatccctcagctgacatggtggtggcagcatggtcacaactgaggtgcggcttcagaaaggagagcttttcaatagttagattattacagggcccaactaaatgcctcaaattcccaggaatgtaggtaacaacaattatgcctctttctctcttttcctcacagacaaaaaggtaacttatgttgcataattataaaaaattccaaaataaaaatttgaaatatacaggacacttcaaataatacatctacatgttttgaatcatcttcctaaagcccaaatattgttgttgtgtacccaggcacagtagggagctgatcattacaaatgacagcaacaacattttaaaattataaatcttaagaatatttaaataaatgtatagcaactaataaaattgaaagcaaaatgtatactaacttaatttatattttattagcagatatttgtcttttaaaactgtttattagtaaatttaaattatgtaaaattttgcatgtatatcttaggatggcagatatatcttgaggtcatattattccccttatttgcaggtagagtcaaatatccatttttttgttggcttctcatcctactgactttgtattaacttgacttgtattcattatttaaattaaaaatgaaatggaaattccataatgggaattacctcccattgttagatttaagtttcagtcaacagaatctctcattttcatcaagaaattttttaaacgcgtgggcacaatattcctattctttc

SEQ ID NO: 716369 - DNA, 1167 bp, Homo sapiens
taatttcctttaaatctggagtggggaggaaatctacaatagtgcctttgaaacacttatatagcatcttttatgtcttagctattcttctgagcacattgtcatgtatttttcaggttttcaagaaacctttgcaactttaacatagcattttgaggagtaaaagtgacacctggaaaaagccatccatgagaactaactccccacaaactgatcagatgtcacaactgtgatttttcttgagagagagcaaaactatgggttaagatgtgtttggaaggcagaaatctgaccaagagtctgtcatgaggagcagacatacagaagaatgattcacaagaagacctcctttctgtgcattgaacatctatccacagagcacatcttcattactaggggagagcatccmtcagctgacatggtggtggcagcatggtcacaactgaggtgcggcttcagaaaggagagcttttcaatagttagattattacagggcccaactaaatgcctcaaattcccaggaatgtaggtaacaacaattatgcctctttctctcttttcctcacagacaaaaaggtaacttatgttgcataattataaaaaattccaaaataaaaatttgaaatatacaggacacttcaaataatacatctacatgttttgaatcatcttcctaaagcccaaatattgttgttgtgtacccaggcacagtagggagctgatcattacaaatgacagcaacaacattttaaaattataaatcttaagaatatttaaataaatgtatagcaactaataaaattgaaagcaaaatgtatactaacttaatttatattttattagcagatatttgtcttttaaaactgtttattagtaaatttaaattatgtaaaattttgcatgtatatcttaggatggcagatatatcttgaggtcatattattccccttatttgcaggtagagtcaaatatccatttttttgttggcttctcatcctactgactttgtattaacttgacttgtattcattatttaaattaaaaatgaaatggaaattccataatgggaattacctcccattgttagatttaagtttcagtcaacagaatctctcattttcatcaagaaattttttaaacgcgtgggcacaatattcctattctttc

SEQ ID NO: 716370 - DNA, 1167 bp, Homo sapiens
taatttcctttaaatctggagtggggaggaaatctacaatagtgcctttgaaacacttatatagcatcttttatgtcttagctattcttctgagcacattgtcatgtatttttcaggttttcaagaaacctttgcaactttaacatagcattttgaggagtaaaagtgacacctggaaaaagccatccatgagaactaactccccacaaactgatcagatgtcacaactgtgatttttcttgagagagagcaaaactatgggttaagatgtgtttggaaggcagaaatctgaccaagagtctgtcatgaggagcagacatacagaagaatgattcacaagaagacctcctttctgtgcattgaacatctatccacagagcacatcttcattactaggggagagcatccctcagctgacatggtggtggcagcatggtcacaactgaggtgcggcttcagaaaggagagcttttcaatagttagattattacagggcccaactaaatgcctcaaattcccaggaatgtaggtaayaacaattatgcctctttctctcttttcctcacagacaaaaaggtaacttatgttgcataattataaaaaattccaaaataaaaatttgaaatatacaggacacttcaaataatacatctacatgttttgaatcatcttcctaaagcccaaatattgttgttgtgtacccaggcacagtagggagctgatcattacaaatgacagcaacaacattttaaaattataaatcttaagaatatttaaataaatgtatagcaactaataaaattgaaagcaaaatgtatactaacttaatttatattttattagcagatatttgtcttttaaaactgtttattagtaaatttaaattatgtaaaattttgcatgtatatcttaggatggcagatatatcttgaggtcatattattccccttatttgcaggtagagtcaaatatccatttttttgttggcttctcatcctactgactttgtattaacttgacttgtattcattatttaaattaaaaatgaaatggaaattccataatgggaattacctcccattgttagatttaagtttcagtcaacagaatctctcattttcatcaagaaattttttaaacgcgtgggcacaatattcctattctttc

SEQ ID NO: 716371 - DNA, 1421 bp, Homo sapiens
atgtcctttataacatgtcatcctagactttgggattttacaagaatatttaattaatatgaaatccaccaatcttagcaggtcataaacaagaatacttttcattcttaactcactcatttctgtgtattgaggccatggcgctctttagcaagtatcttttgggcagttaggtgccgagtggaatgatttgccccgttctaaatttggcgtgtattaagtgaagagtgccaaaattgttcaggtagtcatatttgtaaactatctattttgaaaataaagatttgaataactcattgaatgaaccattctttaaggttaaatgccaaaaagataatgttctcattattctttcttgatttttagcaataggtgtttccattgatgttttttaagtttattcaaaaattaaaggaaaaaagtataatgacaaaaagaaagaataatgccctgtattaatatttaagatagtataatcctttggctatctttaattccattctgaaaatattaatattttagtaggaaaacaataacttaagatgtagaattattttttgtgtcagatgtagcattatattttctttttacatctcaacttatttttatgctagatgagaactttaaaaaatataacaggtgtactgttatttttgaggacttctaaataaatctcaagaaaagccctggggcagagatgaataataagggataataacgtttagcactgtagagaatatatcataagctactattggatgatattctactgtcatcctttttatatatccacacagaagactttaatggttttcaaactaacctggatttatggtcatttctaagaagaaaaaagaaatgttatatgtttttctcagtgaacaaggtaattgaatgggactattataaacaggaaagagaacccctagttgtcggtgcagaggaaactgctggctggaggaaaaggatgcggtgttagtatttgggagtgtgaagattgtgtttgtgttagagttgagcttctgcaggaaacaatttaaaaactgtatcctatagtgctagaaattatggtgccataaattttctaatattcgtatgtccctaagaggcaatattgttaaattctctctctaaagataaatgccttttcccccccaccgcttaatagaactctatggagaactctttggtattttggaagtaacatatgctaattcaatttatccaagtgctgaactcaactttaaattaatatttatgygctactccatcttattccaaactataaaatttatgaggcaaataatgaaaaagctgtcttcgagaatcatataaataattctctaagacattgcaacagctttagttggctccttggaaaatgcactgagtggagacagtggatcaggttctggccccaa

SEQ ID NO: 716372 - DNA, 708 bp, Homo sapiens
cttgattgcctacaactttatatagcaatcagaggcccgaattcactccagcaagtacccttctaaagctgctgtcaggagccttacctggatttcctcacccacctgccttgtgtgagtcggcggctaggatgcggtccaagcttctgagtgtgccagcacagctgagtctctatttatgcaccagggcatacctcaatcccacccactagtgctgcatttacttgttgctaactcagaaacgaaccttcctttccccaagtgattatcttccctgggttaaagagttccttgtttttaaaaataacattgcaaaagtatgcttttcagtatgcatgtttttaactatttgtgaaacgtattgttaagaggttttgaaacgatgggcagagtgccaaatccaggtagactttgaatgaagacatttgatttgcctgaaggctgatttgtctttacatgattggacrgagtttgtagtttgtagattttttttctgctccgtgggcagattgcctttatttacttgaagacacacaagagatgattcacaattctgatcctcgcagtcatataacctgccatactccattatgataaaaattattttctacaatacttccctgctcctgtcaaaacaatgcaccctaacttctacaggtatgaaaaaaaatacaaatcaagtaacccacgtaatttttcaaaactgag

SEQ ID NO: 716373 - DNA, 3054 bp, Homo sapiens
tataacaatggttgtaattaagtggatattatacctttgtgttttaaatgtttattacattataattttagaggcatttattcaagcatattttattttatatttttaaattcaacttttaaatttagggggtacatgtgcaggtttgttacatgggtatattgcgtgatgctaaggtttggggtacgattgatcccatcacccaggtagtgagcatagcgcccaataggtagtttttcagccctttctcccttcttttcctctacccttttggggtccacagtgtctatgggtcccatctttgtgcccatgtgtacctaatgtttagctactactaagtgagaacatgtggtgtttggttttccatttctgcattaatttgattaggataatgacctccagctgcatccatattcaagcatattttaaagtggattatatcctatttttgagttaaaacaggagacttataactggcaattattgtgtaatctagcatgcatgagtagctaactcttgtgtttcatttactcattcatttattttcttcaccaagtattcatcaactctgtttatgtagcaaatattgtgccaggcattaaatatataaaaatgaaaaaatgatggtcagttattgaggtagccagacacacacatagataattgcaattcggagtgatgggccatgctatggggaaaacatgtagcagtttacaacactgtttctactctaaggttacttacgatctgattgaagaattaagatggaacaacactaaaaattagccattcacatgagaatggcacgcaacaagaaacaagtaagtgggatagacgtcaggtgtgattatttttcagagagagtagagattgctacctactagagtgctcaacttgacggcagaaagcaagatttccaaatagagacggtgatatagaatttgcaaaatatatttgtgggatatttaaggacgagcctagctgaagtgagagacatctgggtagctcatagacaatagggttggaggggtgttttggggctatttgcctgggcctttaatgccattctaagtttagactttaccctcaagaggaagcatgtgagggttaagagggcaagctgtagattcagataggttcgagtttgaatcaagtttcctgactgttacatactctactaatccaggcaacttacttaacttctctgtgctttagttgtctcacttgtaggtcttcctatccctacttttttactatataggatctgtggaagattacataagataatagacataaagtgcttagaatggtacataacacatagtaagcactcaaaaatattagttagtaatacagaatgtattacttctctgtattatgatcatttaggtctcagtctatgacagcagaatctttgttggattaccctttgattatagcctatcacaagtcttaaacttttcacatatattcattggaaatattcatttgtcattataacaatctcaccagacttcattattttcttttaaaaaagtaaaaaggctcaggtgagtggacataattagcgcaaagccacaaaattgatgaacagagagaagatctaaaattttccatagttggtgataattaatccagtatttctttcagtccatcaggctgccttctgatgtcaggaaataatgagataagcctgtagatgcatagaattccacattactgaattattatgagccttatgcagagggaagtgcaaatgacttcttgtactcaaagggtttgcctcagagaagacttgtcaaaaacatatctaactgctgaccaaatagctgaataaattctccctaactctagcttagagaaatggacacataaaaatttgtgttttgacagaggaaaacttggttaccatttgaatttattttaatttctgaattgggcttttgtgcacagaatggtttagagtttctggagttttaattgatatccagtaatgaaattgttaaaaatagtttaaactgtacttatatatctaattctcttaaactttctaaatgcccaacagagcagatttgcaaacataattagcaaaacctttctttgagtaagcttatcagctttactcttctttgtattctttcctgagactagtgatggaggagcagatttactgcttgggtggatgaaggttcctgggtctaaagtttgggaccatgatatgtgtcaaaggctgagaaccagtcattgatatgttaaacttaatgtcatacaattagatgtgtttcttgcgggaaagtatagagcaaaaggaccagcatacaactttggtaatgattgtccatttaggagtgaggaaaagaaatacttgcagagcacagaaagtataaagtgtgaggacaggcaggatagtgtcatagccctggatccaagtccagtaggagctacaaatctcaaggcaacaactggtgccaaatgcggcgagacttgtaactagacactaggagaatacactgattgtataaaaatcagtggctttaaacgaaaattcatgaagggttcttgggttgaaataatgaaaagctaagtgttctggtgcagtagtgtattaccttttggggtcatgaatgaggtgattatacttctcagtttgcccaggagagcctcagtttaagcctgttgctgggtataataattgagaatgtcttctttcattctcaaaagyaccatgatttggacaataagttacatgatctggatgatgaaatctattgaatttatctgcaggtaagatacacatatataggcatatgcaaaattttacagttacttcagagggttcacttatatactgaacccaatcctaggatctctttgagggatttataaaccctcaaacgtttgctcttgtgttcaagtttctatgcttagccattctcaaggagcccacagcttgagatttggcatgtaactctccacacttgttttacagcataatctaatctttcttcctggtgagcagaaattttataccctgtactaagctggaaggaatcc

SEQ ID NO: 716374 - DNA, 649 bp, Homo sapiens
ataaaaataataaaatactaatccagtatcattcactgacaatgttaactcaggtggataggcattaagtcaatactactataagaaccacttcttgtttatgttaatgccatatagaatgaaataaaattcactaaaatccaaaaaattagaaaaactatcaaaactcaataatattaagacaacccaataaaaatgtggtcaaaggatttgaacatacatgtcaccaaaaaatatattcaaatttccaataaatacatgtaacaatgttcgacatcgttagtcatcagagaaatacaaaataaaatggtaatgaratactactagataggcttttacagagactgacaataccaagtattgacaaggatatggagcaactgaaattctcattccttgtggtaagaatgtacaattatataaccacattgaaaaaacaagttttcagtttctttattcacccaaaatatatgtcttttggaaaaaattttttccagtctgtgggttgtcttctcattctcttgatatatgtcttttcaaagaggctgagctttactttagacagtggtcatcaaagtgtgtatatttgtgtttttataatttatatgcatatattcctgtgaaaagatactgtatgcattgttcaaca

SEQ ID NO: 716375 - DNA, 1087 bp, Homo sapiens
tttttttattgtaactgtattaatgtcaatatcttggctgtatgttttgtaaaatattaccattgaagatggaactggaggccattatcctaagtgaaataactgagaaacagaaagtcaaatactgcatgttctcatgttctcacttataagtgggagctaaacaagagtacacatggacatatagagtggaataatagacattggagactagaaaaggtgaaagggtrggaggagggtgagggttgaaaaactacctattgggtacaatgtttactattcaggggctgggtacactgaaagcccagaatccattactacacaatatatgcaggtaagaaatcttcacatgtacctgtaatctataaaaattacaaataattaaaaaataataatactggagagaatttgataaagtggtcatggaacctccatattatttcttacacttatatataaatatacagttatctcaaaattaaagtttaaacatgaaagtaaaatagttttaaaaaattagtgactgaaatggcagaatatggagcagggttaagaagaatgaaaatccatcagagctgtgttctgtgcgtttggaaaaataagtccatggatattttgtccttagaggacagctgtggtaggttcatgcttagccttcacagtaccaaatttgggggaagccttactcagttggaatcacatttcccagctttccccaagctggcaaaataggactgtgtgactcattctagcccataaaatggcagcagagtgaaatatataaatttcaaaccagaatttaagaaggaaatgtgacttcacactttatcatttcagactgaatgtcaaaacccagggcaattttggaagttgtttttctccatatggcacatcctttgcattctggaactccaaaaactatgtggaacagaatgctgctcgcctatcttggaatgtcacctaagaaattgtgttttttaaacactgatttcagccatttattttattacatatatattatagtgtatattgttaccataacaaatataataatgtactatcattttccacaagacctggagggaaa

SEQ ID NO: 716376 - DNA, 815 bp, Homo sapiens
cactctgtggaaagcgtttatcaacaatctcactgagtattcacaacaactatccaaatgagtcctaagaaagtttccattgtagatcaaatgtagaggagggcagtagcagttctgttagagaagaaagactcccacttgagcccttctcctctaaatccactatagaacaaaagccttaatttatgcagagktgggcaacatacaccactgcctttagaatactggagaaaatttattgcatctagaataaaacatgggaaaaatatctactcctgaatcaggtgaagatctatgaactggattctgaactaagccaatggaggtgaaaagaaataagtaggagccattccccaaacctaggatactgtgactgcctaagacttaaagcttgatcaaaccatttaagaatgcttctcaagtactgggagccaagccgcccagctttgaaacacaagtaatgattgagaactgcagagagcagtataagaaaagaataagaacatgcaaaaaataacactctctgaggcacaatgtaaaaggaaggccaatactcagggtcaaaccaatctatacactaaacacatggtattgctacaggaatgtgcatcctattatgcatagataataactataacaacaatatacttcttctcagctcatcacctgaattaattaattagttagcttgaactcctgcactgaaggcattcaagagaaaaggtataaccattttcagcattgaaaaactgtttacttcagtgtgtattgtcctaaacagattgcaggtggctttcaacaaaacctgtaagaca

SEQ ID NO: 716377 - DNA, 559 bp, Homo sapiens
gccaatgaaatcaccatcccattaatgtgtttatttgacaactaaggttttgttttttatagtttattaagaatggcctttctgtaatatttagaaaataattgggaaactaattaggaaggaggagaaaaatacatttgtaaaataatttttataatttatttttcatttatttattttgacaatattttatagtacccattactatacccattttacagatgagaactgtaagtcttatttagaatttaaactgtccttggtgatttatctagctagttatatagccaggattcaaatccagattttctgactacctgtctcaagacttatagataactctacattcatgttataaaaacactcaagtatcccaatcaaaattcctattgaatatgttgaggaacacaataaacttatcctagtatttagttggagtgaataasgcctgcaaagagctaagtgatccaaaagaaaagagtataaagaaggagggacttgttctaccaaatattaaaatgttattattgcatctattgcatcaatggagagatataaa

SEQ ID NO: 716378 - DNA, 559 bp, Homo sapiens
gccaatgaaatcaccatcccattaatgtgtttatttgacaactaaggttttgttttttatagtttattaagaatggcctttctgtaatatttagaaaataattgggaaactaattaggaaggaggagaaaaatacatttgtaaaataatttttataatttatttttcatttatttattttgacaatattttatagtacccattactatacccattttacagatgagaactgtaagtcttatttagaatttaaactgtccttggtgatttatctagctagttatatagccaggattcaaatccagattttctgactacctgtctcaagacttatagataactctacattcatgttataaaaacactcaagtatcccaatcaaaattcctattgaatatgttgaggaacacaataaacttatcctagtatttagttggagtgaataaggcctgcaaagagctaagtgatccaaaagaaaagagtataaagaaggagggacttgttctaccaaatattaaaatgttattattgcatctattgcatcratggagagatataaa

SEQ ID NO: 716379 - DNA, 1693 bp, Homo sapiens
tgagtggcttggtctaggcaaaatattttttccagcagcatttctcattgctttatcttgttaaataaaatttaaaacatataataatgattacacacatcttagcaaaatattggtataaacattctgaattatgtggacacttgtgactcacattcctttcctaagtttttataaaattttaactaggatttgggattcaaaatatatatatatatatatatgagagcacttaagctacttagagtcaactgaagtccaataagatggagaatgacatgttcatcaaataatttatcagtggatttgcatctgtacaatacttctggagatgattcatgagcaagtgtggcacagtataaagaagagtgaaacaagagtcaaaagtaaggtttgaaccatgacttctaacattctaaacttcagttttctcatctatataatagtgatattgctttgtggtctacgggattgttctaaacattaattaacattaatttagtaaaataaatagaaatgcgtaaataatgtcttatatgtggcaagcatatttgaagttctctttgaatgaaacagcataactctggaacttttgcgtgttaaaatttaatataacactccagaagtctttttttttattaattctatgtctctacrtctctatgtctctatctatctacctacctacctatctctctattcatccatctgtcatttctcatttcttttactaggattttcagagcttgttccattgatagttctctttcctaataggcatggcatccatacccagccaaatccttatatataaatggacaggatgtatgtatattcaacgatcacctcctctcccttttaatcagttttgcaaaaaagttcttagttaagttttagtcaaacaaggatgcagtactcattaataggaacccaaaaggaaaaaaatggaattatcacaaatgtgaataagatatattttacatgataaatacagagaattaagatatttgtataagcttcatttaaatattcttaatcatttaaaaaatttgatcatttagtacacacaaaactggaactccaacttagaagacaaataaatcgcttttaattttaggaaacatatttctttgataaaggggctagcctgaacaagttctaccattctatattatatctacttcatgtatgtaacccccaccaccatcagtgaactcccattgacttcaatatggtcaatttaattgaaacttctgaatacccaactcctactaacataattgaagaacaaaataattagtttcagtgggagttatgcgaatgcacagattgaagattggaggcaaagcagagtcattactcattttcacagttttgatggtctcccaaattagaaccctagtcttattttttaaaacaaaataagagaaattttttaaaacaaaaaaattatttaaaattattttaaaaattatttaataaaaaattattttttaaaacaaaattctactctatgcaggttagcagtgagcagaggggcttgctttgtgtcctcatagctttaacccatgtgttttcaatatgtcatgaggaaacagcatacaacatgtgaagattgatcctagttttcttagaggaatacccgggtaagatatattccttaggtgaaaaattttctcgtttttattttctg

SEQ ID NO: 716380 - DNA, 1693 bp, Homo sapiens
tgagtggcttggtctaggcaaaatattttttccagcagcatttctcattgctttatcttgttaaataaaatttaaaacatataataatgattacacacatcttagcaaaatattggtataaacattctgaattatgtggacacttgtgactcacattcctttcctaagtttttataaaattttaactaggatttgggattcaaaatatatatatatatatatatgagagcacttaagctacttagagtcaactgaagtccaataagatggagaatgacatgttcatcaaataatttatcagtggatttgcatctgtacaatacttctggagatgattcatgagcaagtgtggcacagtataaagaagagtgaaacaagagtcaaaagtaaggtttgaaccatgacttctaacattctaaacttcagttttctcatctatataatagtgatattgctttgtggtctacgggattgttctaaacattaattaacattaatttagtaaaataaatagaaatgcgtaaataatgtcttatatgtggcaagcatatttgaagttctctttgaatgaaacagcataactctggaacttttgcgtgttaaaatttaatataacactccagaagtctttttttttattaattctatgtctctacatctctatgtctctatctatctacctacctacctatctctctattcatccatctgtcatttctcatttcttttactaggattttcagagcttgttccattgatagttctctttcctaataggcatggcatccatacccagccaaatccttatatataaatggacaggatgtatgtatattcaacgatcacctcctctcccttttaatcagytttgcaaaaaagttcttagttaagttttagtcaaacaaggatgcagtactcattaataggaacccaaaaggaaaaaaatggaattatcacaaatgtgaataagatatattttacatgataaatacagagaattaagatatttgtataagcttcatttaaatattcttaatcatttaaaaaatttgatcatttagtacacacaaaactggaactccaacttagaagacaaataaatcgcttttaattttaggaaacatatttctttgataaaggggctagcctgaacaagttctaccattctatattatatctacttcatgtatgtaacccccaccaccatcagtgaactcccattgacttcaatatggtcaatttaattgaaacttctgaatacccaactcctactaacataattgaagaacaaaataattagtttcagtgggagttatgcgaatgcacagattgaagattggaggcaaagcagagtcattactcattttcacagttttgatggtctcccaaattagaaccctagtcttattttttaaaacaaaataagagaaattttttaaaacaaaaaaattatttaaaattattttaaaaattatttaataaaaaattattttttaaaacaaaattctactctatgcaggttagcagtgagcagaggggcttgctttgtgtcctcatagctttaacccatgtgttttcaatatgtcatgaggaaacagcatacaacatgtgaagattgatcctagttttcttagaggaatacccgggtaagatatattccttaggtgaaaaattttctcgtttttattttctg

SEQ ID NO: 716381 - DNA, 793 bp, Homo sapiens
atagcttttgcttttggaaatacttgctgaccaactataaattagaaaaaggttttttgtttgtttttttcagacagtcttactctgtcacccaggctggagtgcagttgaagatctcggctcactgcaacytctgtctcctgggttcaagaaagtctctgcctctgccccccagtagctgggattacaggcatgcaccaccatgcctggctaatttctgtatttttagtagagacgggtttcaccatgttggccaggttggtctcgaacccatgacctcaggtgatccacccacctcggcctcccaaaattctgggattacaggcgtgagccaccgtggccagccagaaaaaggttctaatgaatttatttatctctctatatatggtctgtatttattaatctaaccatattttaaaaattatatgtattatcccaattggataatatatgctaatagaaaacattatttttgtcatagttcaaatataatcagaaacttgcaatgaacttgagttattcttgtctaattgagaaagtatgattgtcacagttaaaataaaatattttatgaacaacctaacttgtaggaaactatgtatatgctggcaaagatcattaatattatggtttactatttaaccattcaaaaaacttgaaatatatgtccatttttgtcatataatattgtagatgaaattaaaacttgtaagtatagaggacagttaatgcattcaaagattattaaaactattgtggggactcttgcctagaagatagtttcaatgttaag

SEQ ID NO: 716382 - DNA, 615 bp, Homo sapiens
tatccaaataagtctcagtgctcctaaaatttagcctaccaatctcattagaaaaagtgataagttaatatactttttcagatacagctcagaaatatggctgaaattacttgaaattatgttattattaaacatacttaggctttatattagatttgtttaatttagagtttaataaaagcmatttgtaacatttatagttcaataatttgtgatagttaaattacatatatattgataatttgaactgtgagaaaattgtaaaatgctagaatttgtttttaattgaaagtaaaaattatatcttttagtgcctatgaaacctcaaaaaaaaagtttctagggagattttgtattatacaatcctttttaaaaagtacttcaaatcttcctaagagtactgaccccaaattgtatttaagatacttttagcaataatcttttaagcttgtcatttcaaatatcaaaaatttgggcatgtccaaaacttactttgggtttaccaagtcatgtgcaaagcctattttacaattagtcaccatccagcatcaaattgttttgcaggttagaaagcacagttagtatgtataagaacctagctgtacactaattcat

SEQ ID NO: 716383 - DNA, 615 bp, Homo sapiens
tatccaaataagtctcagtgctcctaaaatttagcctaccaatctcattagaaaaagtgataagttaatatactttttcagatacagctcagaaatatggctgaaattacttgaaattatgttattattaaacatacttaggctttatattagatttgtttaatttagagtttaataaaagccatttgtaacatttatagttcaataatttgtgatagttaaattacatatatattgataatttgaactgtgagaaaattgtaaaatgctagaatttgtttttaattgaaagtaaaaattatatcttttagtgcctatgaaacctcaaaaaaaaagtttctagggagattttgtattatacaatcctttttaaaaagtacttcaaatcttcctaagagtactgaccccaaattgtatttaagatacttttagcaataatcttttaagcttgtcatttcaaatatcaaaaakttgggcatgtccaaaacttactttgggtttaccaagtcatgtgcaaagcctattttacaattagtcaccatccagcatcaaattgttttgcaggttagaaagcacagttagtatgtataagaacctagctgtacactaattcat

SEQ ID NO: 716384 - DNA, 665 bp, Homo sapiens
tttagacttttgcatttgsgcagaccagcagatgtcatctagacccatgactaataccaaagaactggcccaactgatcctgtgaccccccacccagaaactgactcaacacatgaagaccaatttggacactcctataatttcatacccaaccaatcagcaacacccattctccagctccctgtccaccaaattatcctcaaaaacctcacctctgagattttgggtagaaggatttgagaattatctcccattcttccgcttggttggtcctgagattattaaactctttctttctggcagaaacctgctcttctcagtgcattggcatttctaggcagtgggcaagatgaacccgtaaggcaattacattgacaaggatgtggagaaattggaacccttgtgcattcttggtgggaatgtaaagtggtagagccactgtggataacagtatggcagttcctaaacaaattacaaatagaattactgtgtgatccaacacttccactactgggtatatccctgaaagaattgaaagtatggtctcaaagagatatttgtacacccatgttcataacagcattattcacaacagctaaaacatagaagcaacccaaatgtctactgataaataaatggaaaagcaaaataggatacatataatg

SEQ ID NO: 716385 - DNA, 610 bp, Homo sapiens
atgtcctttgcagggacatggatgaagctggaaaccatcattcttaggaaactgtcacaaggacagaaaaccaaacactgcatgttctgactcataggtgggaattgaacaatgagatcacttggacacagagcagggaacatcacacaccagggcctgycaggcggtggaggactgggggagggttagcattaggagaaatacctaatgtaaatgatgagttgatgggtgcagcaaacaaatatggcacatgtatacatatgtatcaaacctgcacgttgtgaacatgtaccctagaacttaaagtataataataaaataaaataaaataaaataaaataaaataaaaaagatttgggagctacatcatccaagcactgtagagaatgagggaaaaaaaaggccagtgccccctgttcaatctccttcataattgtacttctggataaggagactaacaatatttgctaggaagaagaagctttatctttgaaatgcttttggcagaatgttcttggcaaagcattatctatagcaagtggaaccgcagatctatgaatatggctttctggagatatcaggtagacaacataactctctggagtataaa

SEQ ID NO: 716386 - DNA, 610 bp, Homo sapiens
atgtcctttgcagggacatggatgaagctggaaaccatcattcttaggaaactgtcacaaggacagaaaaccaaacactgcatgttctgactcataggtgggaattgaacaatgagatcacttggacacagagcagggaacatcacacaccagggcctgtcrggcggtggaggactgggggagggttagcattaggagaaatacctaatgtaaatgatgagttgatgggtgcagcaaacaaatatggcacatgtatacatatgtatcaaacctgcacgttgtgaacatgtaccctagaacttaaagtataataataaaataaaataaaataaaataaaataaaataaaaaagatttgggagctacatcatccaagcactgtagagaatgagggaaaaaaaaggccagtgccccctgttcaatctccttcataattgtacttctggataaggagactaacaatatttgctaggaagaagaagctttatctttgaaatgcttttggcagaatgttcttggcaaagcattatctatagcaagtggaaccgcagatctatgaatatggctttctggagatatcaggtagacaacataactctctggagtataaa

SEQ ID NO: 716387 - DNA, 599 bp, Homo sapiens
ctttcagtgtgttcatctggctgataatgaaaataccatcccactgtaaaggagttgcttctgccttttgctgcttacagtaggatccacacaagactatctaaattattattttgctaaattgagcaaaatatacaactgctttttctataaaattacagatatttttactcttagmttggtgaagtgaagcttagtagaataacaatccgtaagtagtaaaatgttatctaaaccaataaagataattaaatcaagcaaatgatctgaggtggttaaacatcaaaaaagtacaaaagcaatgcataaagtgatgaattgtccttctctttttcaggagaggaagattaatgttgtcacaggctatagtgttctatttttccactccttctcactatttattaaaaatctaggactgttctgagaccacgttctcttcactcttgattgtctctgtttgacctgggacacagctaataaaaccaacccaacatcactcaagttcatgtttgctcattgactctggctgtcaacattagaaaatcctcttcctcaaatgtgattttcctctctgcagattctttattccttatagagaa

SEQ ID NO: 716388 - DNA, 731 bp, Homo sapiens
ttcatatactaattcaaacacttttaagtttttggatatattctcatttgatccaccaacacacaagagagatattcttttattctgattttaccatttgcaaagaaactgaggcttagagaagtaaagtaacttgttcagattgttagaactggattccaggttctaaataggactttgaggctcacccctttcaccactaatccatgctgcctctagaaggctaaaatctgtgtgctctttgcaccttaaaaaaagatgttgcctttatagcagcatgatttatagtcctttgggtatatacccagtaatgggatggctgggtcaaatggtatttctagttctagatccctgaggaatcgccacactgacttccatactggttgaactagtttacagtcccaccagtagtgtaaaagtgttcctatttctccacatcctctccagcacctgttgtttcctgactttttaatgatcgccattctaactggtgtgagatggtatctcattgtggttttgatttgcatttctctgatggccagcgatggtgagcattttttcattgttttttggctgcataaatgtcttcttctgagaagcacacatatgtttattgcggcattattcacaatagcaaagacttggaaccaacccaaatgtccaacaatgatagactggattaagaaaatgtggcacatatacactatagaatactrtgcagccataaaaaa

SEQ ID NO: 716389 - DNA, 2322 bp, Homo sapiens
ttttagggatattcgttgaaaatgaggatttatcttcactcaattttaacataaaatctaaagattacttagaattataaaacataatttaaataaaataaaaatatatataaaataaacattaaaatcaatataaaaggcaactaggaaagtttaacaatttctaacatttcaaagacttcttttttcccttattgttttttccttattgtttgtcaatttctaatttaaatacattaagaattagggccaggcatgctgactcatgcctgtaatcccagcactttgggaggccgtcacggccagatcacgaggtctagagatcgagaccaccccggacaacatggttaaaccccgtctctactgaaaatataaaaaattagctgggcgtgatggcacacacctgtagtcccagctactcgagaggctgaggcaggaaaatcacttgaacctgggaggtggaggttgcaatgagctgagattgtgtcactgcactccagcctgggccacaagagagagactctgtctcaaaaaaaaaaaaaaaaaaaaaattagaaaatcacacatatctcaaattctacattacagatcaaactgtctttcaataattctttggtttatctttatcttagccaataattcctcttttatctattgttattaaattccatttgattttcttatcttttgtatccaatagaattagtttctactgtatataatatactaacaaaaagtagcacagcttaaacaaaatagaagtctatttccctgcaatgtgaaaaaatccgcatrtagctagtcgttattttcttagagagggtacaaaaaattatcatagttcctgatgacttctgtctcacagctctgtcaattttatatttgtttttcaagatagcttccaggactctgacatatgtgaatattctgttgactgtatagctacaaaatagaaagtttcctaagagttttaaaaatatagtaatctgtacgttcctggtgctgtatgccctaaagtcaaaaagacctttctttttatttacttatttttatttttttatttttgcgggtacataatatgtgtatatatttatggggcacatgatatattttggtacaggcatgaaaaacagctttcttcaaaacaatttataacctatttctatatgcatatcattgctaatattatattgctcttcttagattgctttccgggtaatgcaggataaagcaaagagactgattggtcttttgcttatgatagtttgattttctcatggtattttgattatagcgtctgtaacatacctaagaactgggattctctgtgcgggataaagaaaatatacagttcagatggactaggttacgtatacactgataattgtgaatttgaattagaattaaaagtacaaattcttaatgtgttttgtgtttaaaatatatattataatatataatacatatatattttatatgtatacatatatgaatttttaatacatatatgtatttttaatacatatattttaatacatatattaaatccatatttaatacatatattttaatacatatatttttaatacatatatacttaataactctgaagctgcctagaaaaaaatggcccacctggtagcaataactacctctatcgtgccaggcatggtggctcatgactgtaatctcagcactttgggaggctgaggcaggaggatcacttgagctccggtgttcgagatcagcctgggcaacatagcaagatcccatctctacaaaaaattaaaaaataattaaaaacacctctatcatggtctacagataccatttcctacaggctgattccagacctggggcagaaaacgtacaagatgagcctggatactgtaccataccatagaacaagaacactattatatatgactagggtctcatcaagaggatttaggagctgacttaaaaggactcccactggccaaagattgttatgtaaaagaataaaaacggcaaatgattcaaacatattaaatatgtttgttcatgagttcataatgatgcaaaaatacgtacatacacatgcacagagagagagaaccagagggagggaggacagaaaacatctattgtgtcatcctcaccagattctagggaaataatttattattttgggaaccagtaaataaagaaaagaaacaaggcatttgtttgccttgtctacatcaactataccactggataatctaataaaagatcaggagatgtttttctttatacagatagtctaactaacaaaaaacaaatgaatgatagattagaaat

SEQ ID NO: 716390 - DNA, 1538 bp, Homo sapiens
attgcacataagattaacataagcagtagagatggtgctgacatacgttgtaatacctaaacaggaggcattttaagccaagataaggggtttaatcttagagcatcttgaaaaataaaatgcaattatgagttgtgggaggctgaatcatcgagttcttgttgcccatatagtccaatttacaaaataactgccagctctcaactttgctttgtgccgtataaatctgatggcagaaatcccatttcaggtgatttaagtggtattgtgcatacttttctagttgatctaaaagagctatatgtggtttatatgaatatacttcccatggaaataggcagtgtggcaccaaagacgattgctttctgaaatcattttgaatggtaatataatcagtatgctaatgtttctataacatagcatggttcagcgtggcgtgacatacgtttgtaatgctgctgctgaagacatataaccatataatgagcttgattgtcttcctctgtgatatagggaagggagcacttacttaaaaaggattgcctcgaagtcctgactcatggactcaatatgactgtaactcttttctgtctgttaaagttgtccttaagaagttacttgttcagaaacatatttcattagacggaaccatcaagaaccctagtcttttgttgaatcattgcaaagtttatgttatcaaattcagttgctttaataagaaaatgtgtatgaggtacttaaaaaataaacattatcttaggtgttttttattccttcttgtggaataaatacataacataatttagtgtaggttctcaaccacagtgttgtgacaccctactgtgctgttataacctttgaaaaaggggtgggggtacagcttttgccaggaacttatgcaaaatccaaaacatgttttatccatggctgtaggaatgtgaacatatgggacactgcatttaagaaaagagaataaaaaccactggtttaatggaaagattcttgaattaaaaaaaatgaaggtatatgtaaaaacactgacctttaaatctctgggaagcaggtgattttaaatattatgtgtcrcataaagatcactgctaaagaaagaatgaaagagttaaacatcttttatttaagtgtaggggaaaattgtaaatcttttagtaaatggggtttttaagagaaacataaaggcagaaacttaatgaactacccattctgaaccaaggatactataaataatccattaaaggtgattgctattattttggatctataaacttgaaatggggtctatctttcataagggaggcagaaatatccttttatacatgccactctgactccacaatttttcttagagttttacgtcatgatgaggcttttagaaaacttgctcatttgaggcacagtgatttttcttgttgagctcatcatatagttattgcatttaacatgtctttgtaacccatgaggttacaaatcaattactcctgcacaatttcttcaataatttgaaatgctgcctctgtctt

SEQ ID NO: 716391 - DNA, 1538 bp, Homo sapiens
attgcacataagattaacataagcagtagagatggtgctgacatacgttgtaatacctaaacaggaggcattttaagccaagataaggggtttaatcttagagcatcttgaaaaataaaatgcaattatgagttgtgggaggctgaatcatcgagttcttgttgcccatatagtccaatttacaaaataactgccagctctcaactttgctttgtgccgtataaatctgatggcagaaatcccatttcaggtgatttaagtggtattgtgcatacttttctagttgatctaaaagagctatatgtggtttatatgaatatacttcccatggaaataggcagtgtggcaccaaagacgattgctttctgaaatcattttgaatggtaatataatcagtatgctaatgtttctataacatagcatggttcagcgtggcgtgacatacgtttgtaatgctgctgctgaagacatataaccatataatgagcttgattgtcttcctctgtgatatagggaagggagcacttacttaaaaaggattgcctcgaagtcctgactcatggactcaatatgactgtaactcttttctgtctgttaaagttgtccttaagaagttacttgttcagaaacatatttcattagacggaaccatcaagaaccctagtcttttgttgaatcattgcaaagtttatgttatcaaattcagttgctttaataagaaaatgtgtatgaggtacttaaaaaataaacattatcttaggtgttttttattccttcttgtggaataaatacataacataatttagtgtaggttctcaaccacagtgttgtgacaccctactgtgctgttataacctttgaaaaaggggtgggggtacagcttttgccaggaacttatgcaaaatccaaaacatgttttatccatggctgtaggaatgtgaacatatgggacactgcatttaagaaaagagaataaaaaccactggtttaatggaaagattcttgaattaaaaaaaatgaaggtatatgtaaaaacactgacctttaaatctctgggaagcaggtgattttaaatattatgtgtcacataaagatcactgctaaagaaagaatgaaagagttaaacatcttttatttaagtgtaggggaaaattgtaaatcttttagtaaatggggtttttaagagaaacataaaggcagaaacttaatgaactacccattctgaaccaaggatactataaataatccattaaaggtgattgctattattttggatctataaacttgaaatggggtctatctttcataagggaggcagaaatatccttttatacatgccactctgactmcacaatttttcttagagttttacgtcatgatgaggcttttagaaaacttgctcatttgaggcacagtgatttttcttgttgagctcatcatatagttattgcatttaacatgtctttgtaacccatgaggttacaaatcaattactcctgcacaatttcttcaataatttgaaatgctgcctctgtctt

SEQ ID NO: 716392 - DNA, 634 bp, Homo sapiens
gtgtattactttcttatctggatgaactatgttagccttttagaaagtaaagaagataagacaatactaaagctccagttcattcatccaacacatgtttattaggaatctgctcttctctgttcactgctctaggtcctcatggatcttacattcttggagaatatattcmttaaaaatcacgagtcttatattcttaataaaaatactctttaaaactgcatctcacttcttttctgtaaattatactggaggcagtgttaagaggaagctgtttggacaaatgtggtcccttattaactagcaattgattctaggagcatagactgatatggggaagatgccaggaagtctaaaaactagttcaaaaataattaaatcactcaagtaaatttgggagtttaatatataatagaggtggaatttgaaatcagtgggggaaaaggtagattattcataatgattgggtcgagaacatgtggttggccactagaagaaaaaacaatgaagctaagttccttcctcactctttgtaacaaatacaacttagatttcttaaaaatacatgtatacaaaataaaaccagaaaacaactggatgaaaacatggataattttgctttgaagcaggaaat

SEQ ID NO: 716393 - DNA, 634 bp, Homo sapiens
gtgtattactttcttatctggatgaactatgttagccttttagaaagtaaagaagataagacaatactaaagctccagttcattcatccaacacatgtttattaggaatctgctcttctctgttcactgctctaggtcctcatggatcttacattcttggagaatatattcattaaaaatcacgagtcttatattcttaataaaaatactctttaaaactgcatctcacttcttttctgtaaattatactggaggcagtgttaagaggaagctgtttggacaaatgtggtcccttattaaytagcaattgattctaggagcatagactgatatggggaagatgccaggaagtctaaaaactagttcaaaaataattaaatcactcaagtaaatttgggagtttaatatataatagaggtggaatttgaaatcagtgggggaaaaggtagattattcataatgattgggtcgagaacatgtggttggccactagaagaaaaaacaatgaagctaagttccttcctcactctttgtaacaaatacaacttagatttcttaaaaatacatgtatacaaaataaaaccagaaaacaactggatgaaaacatggataattttgctttgaagcaggaaat

SEQ ID NO: 716394 - DNA, 634 bp, Homo sapiens
gtgtattactttcttatctggatgaactatgttagccttttagaaagtaaagaagataagacaatactaaagctccagttcattcatccaacacatgtttattaggaatctgctcttctctgttcactgctctaggtcctcatggatcttacattcttggagaatatattcattaaaaatcacgagtcttatattcttaataaaaatactctttaaaactgcatctcacttcttttctgtaaattatactggaggcagtgttaagaggaagctgtttggacaaatgtggtcccttattaactagcaattgattctaggagcatagactgatatggggaagatgccaggaagtctaaaaactagttcaaaaataattaaatcactcaagtaaatttgggagtttaatatataatagaggtggaatttgaaatcagtgggggaaaaggtagattattcataatgattgggtcgagaacatgtggttggccactagaagaaaaaacaatgaagctaagttccttcctcactctttgtaacaaatacaacttagatttcttaaaaatacatgtatacaaaataaaaccagaaarcaactggatgaaaacatggataattttgctttgaagcaggaaat

SEQ ID NO: 716395 - DNA, 1473 bp, Homo sapiens
acactttgggaaatgttcttatgatacagtgtaaggctgcagaccaaacacaggcaagcaatcaaggacaggaggacacayactcgtgggtgagttattaagtcaaagatcagtcctatccctttattctgcaatgaataatatttatacaatcatcctattgcaaacactatttccaattttcagaagcaatgtatatatacattattagataatttatcacagtaaaataaaaatgtcaataatctaaagttagtggttttgcattcagcataacaaataaaataaaaattaatggtttatctgaaagaggaagggagggagaaaagggggagtagggaagtggatatccatttattttacatagtactctctaagttcaatgagtaaagacttaggaatttaaagttataaacgtaatctctggaagaaccaaaatttcaaaaaactaagtgataaacaattgggaggagccagaggaaagaaaggggagtataagtaagctaaatcctcatctctcaaagcaggttgcaataaatggttatcagagatgatacataaagaaaatatttaagagttgggaaggactaccaatatatctaaacccagaaatgatcagaaatggctcctctgaggagtgagaatggagacagatctagaggtacctttctctaaagtttgaaattggattttatgtattaagcagtcataaagagaggtgatgacagcgagaatacagttgtgggtgaagtttctgttcttgtaagagtcgtgttgaactccagcatacatgacagtcacctggagggcttgtggaaacactgctggacccacccgagcattcctggttcagtctggctgatgcggggctggagaatctatagttccaacaagtccccaagtgatgctgatgtagttaatccagagaccacattttgagaacccttgctacggcaagtgccagttctgcacatccatggacctgggcctatatttttctagcatgcttactcctttttgaacatgtgaaggggaaaagggagaggcagatctaataacagcctagtactaaaccagctcatagaagcaggccttgcctgcccgccattgccattttcacctaaatcacttgcttccaacatccaaaatccaacaggtaacaaatgaaaagagaacactgaaaatcacctgtgaactaatttcaggccatctaatatcatgtctatatcttaagcatattccacattagttaatgttcctaatttcatattccatattaattcttaattctgtattccacatttcttggatgctaagacaaatgtgatctgaaaaggtacttttatagctgtagaaaactgaagaataaaacaataatatagttactaatccagattatcccgatgccaaagatgctatgggagtgcctagatttcacaggagatgtgagcaatacagacaacagctctgttt

SEQ ID NO: 716396 - DNA, 1473 bp, Homo sapiens
acactttgggaaatgttcttatgatacagtgtaaggctgcagaccaaacacaggcaagcaatcaaggacaggaggacacatactcgtgggtgagttattaagtcaaagatcagtcctatccctttattctgcaatgaataatatttatacaatcatcctattgcaaacactatttccaattttcagaagcaatgtatatatacattattagataatttatcacagtaaaataaaaatgtcaataatctaaagttagtggttttgcattcagcataacaaataaaataaaaattaatggtttatctgaaagaggaagggagggagaaaagggggagtagggaagtggatatccatttattttacatagtactctctaagttcaatgagtaaagacttaggaatttraagttataaacgtaatctctggaagaaccaaaatttcaaaaaactaagtgataaacaattgggaggagccagaggaaagaaaggggagtataagtaagctaaatcctcatctctcaaagcaggttgcaataaatggttatcagagatgatacataaagaaaatatttaagagttgggaaggactaccaatatatctaaacccagaaatgatcagaaatggctcctctgaggagtgagaatggagacagatctagaggtacctttctctaaagtttgaaattggattttatgtattaagcagtcataaagagaggtgatgacagcgagaatacagttgtgggtgaagtttctgttcttgtaagagtcgtgttgaactccagcatacatgacagtcacctggagggcttgtggaaacactgctggacccacccgagcattcctggttcagtctggctgatgcggggctggagaatctatagttccaacaagtccccaagtgatgctgatgtagttaatccagagaccacattttgagaacccttgctacggcaagtgccagttctgcacatccatggacctgggcctatatttttctagcatgcttactcctttttgaacatgtgaaggggaaaagggagaggcagatctaataacagcctagtactaaaccagctcatagaagcaggccttgcctgcccgccattgccattttcacctaaatcacttgcttccaacatccaaaatccaacaggtaacaaatgaaaagagaacactgaaaatcacctgtgaactaatttcaggccatctaatatcatgtctatatcttaagcatattccacattagttaatgttcctaatttcatattccatattaattcttaattctgtattccacatttcttggatgctaagacaaatgtgatctgaaaaggtacttttatagctgtagaaaactgaagaataaaacaataatatagttactaatccagattatcccgatgccaaagatgctatgggagtgcctagatttcacaggagatgtgagcaatacagacaacagctctgttt

SEQ ID NO: 716397 - DNA, 1473 bp, Homo sapiens
acactttgggaaatgttcttatgatacagtgtaaggctgcagaccaaacacaggcaagcaatcaaggacaggaggacacatactcgtgggtgagttattaagtcaaagatcagtcctatccctttattctgcaatgaataatatttatacaatcatcctattgcaaacactatttccaattttcagaagcaatgtatatatacattattagataatttatcacagtaaaataaaaatgtcaataatctaaagttagtggttttgcattcagcataacaaataaaataaaaattaatggtttatctgaaagaggaagggagggagaaaagggggagtagggaagtggatatccatttattttacatagtactctctaagttcaatgagtaaagacttaggaatttaaagttataaacgtaatctctggaagaaccraaatttcaaaaaactaagtgataaacaattgggaggagccagaggaaagaaaggggagtataagtaagctaaatcctcatctctcaaagcaggttgcaataaatggttatcagagatgatacataaagaaaatatttaagagttgggaaggactaccaatatatctaaacccagaaatgatcagaaatggctcctctgaggagtgagaatggagacagatctagaggtacctttctctaaagtttgaaattggattttatgtattaagcagtcataaagagaggtgatgacagcgagaatacagttgtgggtgaagtttctgttcttgtaagagtcgtgttgaactccagcatacatgacagtcacctggagggcttgtggaaacactgctggacccacccgagcattcctggttcagtctggctgatgcggggctggagaatctatagttccaacaagtccccaagtgatgctgatgtagttaatccagagaccacattttgagaacccttgctacggcaagtgccagttctgcacatccatggacctgggcctatatttttctagcatgcttactcctttttgaacatgtgaaggggaaaagggagaggcagatctaataacagcctagtactaaaccagctcatagaagcaggccttgcctgcccgccattgccattttcacctaaatcacttgcttccaacatccaaaatccaacaggtaacaaatgaaaagagaacactgaaaatcacctgtgaactaatttcaggccatctaatatcatgtctatatcttaagcatattccacattagttaatgttcctaatttcatattccatattaattcttaattctgtattccacatttcttggatgctaagacaaatgtgatctgaaaaggtacttttatagctgtagaaaactgaagaataaaacaataatatagttactaatccagattatcccgatgccaaagatgctatgggagtgcctagatttcacaggagatgtgagcaatacagacaacagctctgttt

SEQ ID NO: 716398 - DNA, 1473 bp, Homo sapiens
acactttgggaaatgttcttatgatacagtgtaaggctgcagaccaaacacaggcaagcaatcaaggacaggaggacacatactcgtgggtgagttattaagtcaaagatcagtcctatccctttattctgcaatgaataatatttatacaatcatcctattgcaaacactatttccaattttcagaagcaatgtatatatacattattagataatttatcacagtaaaataaaaatgtcaataatctaaagttagtggttttgcattcagcataacaaataaaataaaaattaatggtttatctgaaagaggaagggagggagaaaagggggagtagggaagtggatatccatttattttacatagtactctctaagttcaatgagtaaagacttaggaatttaaagttataaacgtaatctctggaagaaccaaaatttcaaaaaactaagtgataaacaattgggaggagccagaggaaagaaaggggagtataagtaagctaaatcctcatctctcaaagcaggttgcaataaatggttatcagagatgatacataaagaaaatatttaagagttgggaaggactaccaatatatctaaacccagaaatgatcagaaatggctcctctgaggagtgagaatggagacagatctagaggtacctttctctaaagtttgaaattggattttatgtattaagcagtcataaagagaggtgatgacagcgagaatacagttgtgggtgaagtttctgttcttgtaagagtcgtgttgaactccagcatacatgacagtcacctggagggcttgtggaaacactgctggacccacccgagcattcctggttcagtctggctgatgcggggctggagaatctatagttccaacaagtccccargtgatgctgatgtagttaatccagagaccacattttgagaacccttgctacggcaagtgccagttctgcacatccatggacctgggcctatatttttctagcatgcttactcctttttgaacatgtgaaggggaaaagggagaggcagatctaataacagcctagtactaaaccagctcatagaagcaggccttgcctgcccgccattgccattttcacctaaatcacttgcttccaacatccaaaatccaacaggtaacaaatgaaaagagaacactgaaaatcacctgtgaactaatttcaggccatctaatatcatgtctatatcttaagcatattccacattagttaatgttcctaatttcatattccatattaattcttaattctgtattccacatttcttggatgctaagacaaatgtgatctgaaaaggtacttttatagctgtagaaaactgaagaataaaacaataatatagttactaatccagattatcccgatgccaaagatgctatgggagtgcctagatttcacaggagatgtgagcaatacagacaacagctctgttt

SEQ ID NO: 716399 - DNA, 1473 bp, Homo sapiens
acactttgggaaatgttcttatgatacagtgtaaggctgcagaccaaacacaggcaagcaatcaaggacaggaggacacatactcgtgggtgagttattaagtcaaagatcagtcctatccctttattctgcaatgaataatatttatacaatcatcctattgcaaacactatttccaattttcagaagcaatgtatatatacattattagataatttatcacagtaaaataaaaatgtcaataatctaaagttagtggttttgcattcagcataacaaataaaataaaaattaatggtttatctgaaagaggaagggagggagaaaagggggagtagggaagtggatatccatttattttacatagtactctctaagttcaatgagtaaagacttaggaatttaaagttataaacgtaatctctggaagaaccaaaatttcaaaaaactaagtgataaacaattgggaggagccagaggaaagaaaggggagtataagtaagctaaatcctcatctctcaaagcaggttgcaataaatggttatcagagatgatacataaagaaaatatttaagagttgggaaggactaccaatatatctaaacccagaaatgatcagaaatggctcctctgaggagtgagaatggagacagatctagaggtacctttctctaaagtttgaaattggattttatgtattaagcagtcataaagagaggtgatgacagcgagaatacagttgtgggtgaagtttctgttcttgtaagagtcgtgttgaactccagcatacatgacagtcacctggagggcttgtggaaacactgctggacccacccgagcattcctggttcagtctggctgatgcggggctggagaatctatagttccaacaagtccccaagtgatgctgatgyagttaatccagagaccacattttgagaacccttgctacggcaagtgccagttctgcacatccatggacctgggcctatatttttctagcatgcttactcctttttgaacatgtgaaggggaaaagggagaggcagatctaataacagcctagtactaaaccagctcatagaagcaggccttgcctgcccgccattgccattttcacctaaatcacttgcttccaacatccaaaatccaacaggtaacaaatgaaaagagaacactgaaaatcacctgtgaactaatttcaggccatctaatatcatgtctatatcttaagcatattccacattagttaatgttcctaatttcatattccatattaattcttaattctgtattccacatttcttggatgctaagacaaatgtgatctgaaaaggtacttttatagctgtagaaaactgaagaataaaacaataatatagttactaatccagattatcccgatgccaaagatgctatgggagtgcctagatttcacaggagatgtgagcaatacagacaacagctctgttt

SEQ ID NO: 716400 - DNA, 1473 bp, Homo sapiens
acactttgggaaatgttcttatgatacagtgtaaggctgcagaccaaacacaggcaagcaatcaaggacaggaggacacatactcgtgggtgagttattaagtcaaagatcagtcctatccctttattctgcaatgaataatatttatacaatcatcctattgcaaacactatttccaattttcagaagcaatgtatatatacattattagataatttatcacagtaaaataaaaatgtcaataatctaaagttagtggttttgcattcagcataacaaataaaataaaaattaatggtttatctgaaagaggaagggagggagaaaagggggagtagggaagtggatatccatttattttacatagtactctctaagttcaatgagtaaagacttaggaatttaaagttataaacgtaatctctggaagaaccaaaatttcaaaaaactaagtgataaacaattgggaggagccagaggaaagaaaggggagtataagtaagctaaatcctcatctctcaaagcaggttgcaataaatggttatcagagatgatacataaagaaaatatttaagagttgggaaggactaccaatatatctaaacccagaaatgatcagaaatggctcctctgaggagtgagaatggagacagatctagaggtacctttctctaaagtttgaaattggattttatgtattaagcagtcataaagagaggtgatgacagcgagaatacagttgtgggtgaagtttctgttcttgtaagagtcgtgttgaactccagcatacatgacagtcacctggagggcttgtggaaacactgctggacccacccgagcattcctggttcagtctggctgatgcggggctggagaatctatagttccaacaagtccccaagtgatgctgatgtagttaatccagagaccacattttgagaacccttgctacggcaagtgccagttctgcacatccatggacctgggcctatatttttctagcatgcttactcctttttgaacatgtgaaggggaaaagggagaggcagatctaataacagcctagtactaaaccagctcatagaagcaggccttgcctgcccgccattgccattttcacctaaatcacttgcttccaacatccaaaatccaacaggtaacaaatgaaaagagaacactgaaaatcacctgtgaactaatttcaggccatctaatatcatgtctatatcttaagcatattccacattagttaatrttcctaatttcatattccatattaattcttaattctgtattccacatttcttggatgctaagacaaatgtgatctgaaaaggtacttttatagctgtagaaaactgaagaataaaacaataatatagttactaatccagattatcccgatgccaaagatgctatgggagtgcctagatttcacaggagatgtgagcaatacagacaacagctctgttt

SEQ ID NO: 716401 - DNA, 1209 bp, Homo sapiens
ccatttatgtgccaggcattatgatacagtcattacatataacctttttctcccactatattgcatgctgcttcacttaccttgtaaaacattttagacataaaaggtgctccatttttttgcacaaatgaacaaatacatgaaataaaagtatgttgaaggcacagaaaaagtattcataaaagacaaactcaaaattcccaatgacacagagagtataatcacaccacatatcaaatccaagccacatagcacagagtgtgctattgaaatgaaacgcaatataactattgctctgggaattacagatgggatccagtaaaagacactgtattaattatattgttttccatggaacttttctaaggttgcccaggacagcaacactgtagaacattcatgatgaaactgtcaaagaggactagacttgaggggccttagggagaaaagagatttgaaaataatgtactgcttgcccatggttcagacgtgcctttctctgcaagtatgatcacattattgattctcaaaggaagaaagaaaatatgactttgtcccttaactgacatcaaagttacagtgttatgcagtgatgcccaaaagcatttgcaaatattcagaaacaaagttttgagtgtcctaggagatgactatcataccaattgatccaaaacacaatggtcaagaggcatggaaaacctatggttggggagggagaggaagggtcataaatatatacagtcatgcaccacgtaatgacattttagtcaatttactggatatatgatggtggtcctataagattataatgtatctggaaaattcctattgcttagtgacatcctagctgtcttaatgacatagcacaagacattacttatgtgtttgcagtgatgctggtataaatraacctgtgctgccagtcatataaaagtattgcatattaggtacagcaggggtccccaaccccctggctgcagatcagtgcccatctgtggcctgttagtacagtgggaggtgagcagtgggtgagtgagcattactgcctgagctctacctcctgtcagatcagagtcggtattagattctgatagaagcatgaaccctattgtgaattgcacatgcgagggatctaggttgcatgctccttatgagaatctaactaatgcctgaatatctgaggtaaaacagtttcattccaaaactgtc

SEQ ID NO: 716402 - DNA, 1022 bp, Homo sapiens
ttaatatatactcttgattcattaacattgaacccaccaccaacagtgctgtaatccatacctgaacaaagcttctctaacacacatattttctttgggagacacaccacagctctcttatgcttcaaacccctagacagcacgtcactactgtgcttgggagcatgttaaacaccaaaatcattcaccaggagcacccaaaagtaaaaaacgatgacaccaagtagaccataaaaaagatacttgtttacaaaatgagagttgaaasaaaaaggcagagagtcaccttgtttgacctaagctgggaagatgcatatcaggtgactcaaattctttgctgctctgtgcatatccatgaatgcaagtgaaagtattgagttttggaattacaaagaaattttagtgagttgacaatttgcaaataagaaattcgtgaatgatgaagatcagctttatgctcagtttttgtagatcctgagagagtttcttaaaatggttatacaaatgtagtttttgagaagtgcatgggtaaaaataatatattattttaatttgcattttactaaggactattctaattaagtcagtatgtgagagatctggttgtgccatactgatacttggttattttttgcctttttctttttagccagtgtggtgggtggagttggctgcccaatagaataagtttgtttgtttgttttattctgacatccaaattctctttttgattgtaattctatgtatattgtatttttactgtatctctttcattgtttcatttctttgaagatggtgaaattcatggtagtttgaagactagagatgattcaacaaatggcatcacttagtgctgttaaaattcctccctgaggcacatcctcttcccccaaggtgggatagggccattaggaaatgaatcttcctagtgatgtggagctaacctcctaaatataaaagaagccaaagccttttgagtgtatctacaaggctttcatcaaaagatgttgatgaaaaggggg

SEQ ID NO: 716403 - DNA, 905 bp, Homo sapiens
ctttgaatgtgcatagctaatgtcctgtcattgtaaattaggacacaaattgcttcaggaatattgatgggccatgaattctggaattgccagagagaactggaatcacttcatgaatgggatcgtgacgggaaaggcataggcttacatttccatttccctcacatctttaggcaagtgtgactgaaacattttcttggcatttatgtttaatatatacactgactcccagcatttgactcccagcatttgactccaaaaatttggaagccctcctcccttaaaaataatgtatacacttgtgcatttatgcccaccctgacctatcaagatattgatctttgaattcctactgttcatgtataatttttaaaaagttgagacatgagccttataccaaaataaaataaacacatattaaggattttatttgattctttaattatagaggaaattaagatgacgataaagctgacttgaatagcaccgaaggagcaggaattttactggccaacaaaaaagttaaaaacaaaaccagttaatgtgctataggacaataaaaccattacctttggggttagagatacacaacagaaatctacaagttaagatgtagcttccctgtaagtgagcaaagtcaatcacaaatattcccctagaaaccagcactattcaatagaattttctgtggtgctggaagtgttctttgtctgtgttgtgtaatgtggtagttacttgttcaataactttatgtgtcacttgaaatgtggcctagtgtgacttggaaagtggattttaattatatgaatttaattaattgttaattawttaattaattaattaattaaaacttgattttaaatagccacatgtgtctggtagctatactattggacagaagagca

SEQ ID NO: 716404 - DNA, 905 bp, Homo sapiens
ctttgaatgtgcatagctaatgtcctgtcattgtaaattaggacacaaattgcttcaggaatattgatgggccatgaattctggaattgccagagagaactggaatcacttcatgaatgggatcgtgacgggaaaggcataggcttacatttccatttccctcacatctttaggcaagtgtgactgaaacattttcttggcatttatgtttaatatatacactgactcccagcatttgactcccagcatttgactccaaaaatttggaagccctcctcccttaaaaataatgtatacacttgtgcatttatgcccaccctgacctatcaagatattgatctttgaattcctactgttcatgtataatttttaaaaagttgagacatgagccttataccaaaataaaataaacacatattaaggattttatttgattctttaattatagaggaaattaagatgacgataaagctgacttgaatagcaccgaaggagcaggaattttactggccaacaaaaaagttaaaaacaaaaccagttaatgtgctataggacaataaaaccattacctttggggttagagatacacaacagaaatctacaagttaagatgtagcttccctgtaagtgagcaaagtcaatcacaaatattcccctagaaaccagcactattcaatagaattttctgtggtgctggaagtgttctttgtctgtgttgtgtaatgtggtagttacttgttcaataactttatgtgtcacttgaaatgtggcctagtgtgacttggaaagtggattttaattatatgaatttaattaattgttaattaattawttaattaattaattaaaacttgattttaaatagccacatgtgtctggtagctatactattggacagaagagca

SEQ ID NO: 716405 - DNA, 786 bp, Homo sapiens
tttctcacataataccaatactaagcatgtgatgtgggtaagattgattagacacactgcataaatgagtaaactgaaagtcgctgaagggtaatattaaagaaaacattagcagataaaatacatgtttcaattgtgcttgttctacacctgtataaaatatgcctttctgatttcattaaaagcagtttcattgcatcagccttgctcagggtattttcacaaaaaaaaaatatgaaacaaaatcaaatttcattcatctgaaatgaggtggggtcctatttattaaaagtacatctctgactcccagggtgcacccaaagctatgtagttcaaagttaaatttcacacaacttgataattctgttagcattgtgactttgaaaacagacctgttttgatgatgactaaggtcgacttcctgaaattgacttataatctctttgggaggatgtgcactatagcagaagtactggaaatctataaacatgttatatatttcatttcwactagctatgcaatcctgcacaagctacataaactcttggatttttagatccctcatcagttaaaatttaattctaactccaaagtctttgattgaaagctgcagtttgaaatcagacccagcaaactcataatttgattaactttattctcccctgattactttagcggttcatgctgacctatcaacgtgtgaatgctgatcaaataaatctcttacatatttaaatgaagacatttctcttgtgacatttccatttgagccttttgtctattgat

SEQ ID NO: 716406 - DNA, 578 bp, Homo sapiens
attttatctattgcacgtaattatttatataattatgtacttttacattttatatacttaattatatgtatacccacgatgtgtgtgtatatatgtgtgtgtgtttatgtgtattcatttttgcagttcttatcatagctactagaatcttgcttatttttttcaatccagtgtctgtaattgtactatgctcctatatgtttttctataaatcatgtaatcactccatgtcatttgccattttaagaggcaatgtccccctttaccagccacccaattaagcaaccattcattaaatatcagatttcaggttcaccctgccacttttgaagtactttgaaaattatagtgatgtattttgtgctctcaacagcttacagttagtggtgggttaaaaatcactatcgaggtaaaaataaccataaataagaaagagactcaagcaaagtttgggatagtgataaaatttatcttggagctcttagggttttgtaaaggaagttccattttaagtgtgtcttgaaagatgaatactaaayctggctgcattttaatggatgaattagaggatcaagaaa

SEQ ID NO: 716407 - DNA, 816 bp, Homo sapiens
ttattatgaaatattacagtatttatgaaatgaataactttaaatgtatcttatatataggtaaaagttggtaggcaggctactgataaatatttttttwaaaaagccataatttatagcatttgccaatttccatgctctaaacactgccactgtggccacgttcagattgatatcactaaatacaaagttgaggagagatatgcagtagcagaccatttctaccatatagattcaatacatgtaagtaacccaagataacacacgacagtaaaatgtaataaaatattgagaaagtgatacattttgagtttttaaaatttttgcttttagtataatttaactttaatattatttaattttaataatgaatatgcttaaaattcaactcacaaaattcctgaaaatccaacatttaccttccacaagtgcacctgatattgacattgtttgtcagtgcatactttctatttatacagttttgtttaaaaatgctgtaagaaagggaaaaactatatgtgaaatgtaagaagaaattccatttctctcctctaatgggcttgttcattttatctacatttttgttgcctcccctcttatttttctcctcctcttccccagttgtctaccagtcctatcgccagtcccgaacaacaaatgatttttgttcatcacttaacctccctcagatctcatttttcagttgctaatagccaggccctttaatggcattttccttgagtttacttcctcatatacaaaggtatgtagtgcagcaaatactcaaagaatgcacagttgaaaaatcctaacagt

SEQ ID NO: 716408 - DNA, 640 bp, Homo sapiens
aaactagttcaaccattgtggaagtcagtgtggcgattcctcagggatctagaactagaaataccatttgacccagccatcccattactgggtatataccgaaaggattataaatcatgctgctgtaaagacacatgcacacgtatgttcattgcggcactattcacaaaagcaaagacttggaaccaagccaaatgtccaacaatgatagactggattaataaaatgtggcacatatacaccatggaatactatgcagccataaaaaatgatgagttcatgtcctttgtagggacatggatgaagctggaaaccatcattctcagtaaactatcgcaaggacaaaaaaacaaacaccacatgttctcactcataggtgggaattgaacaatgagaacacatggacacaggaaggggaacatcacacactggggcctgttgtggggtgaggggagaggggagggataacattagaagatataactrattgaatgaggagttaatgggtgccgcacaccaacatggcacatgtatatatatgtaacaaacctgcacgttgtgcacatgtaccctaaaacttaaaatataataaaaaataaaataaaaaaataaataagtgaccatgctaaggagcaaagaa

SEQ ID NO: 716409 - DNA, 2193 bp, Homo sapiens
cctttttataaattgttggatttgttttactaattattttgttaaaccttttttatatctatgtttataaaggatattatctttagttttcttgtaatgtccttgtcagatgttggtattaggttattctgtctgtataatatgagttaggagtattctttcctcctctgttttctgggtgtgtataaaatggttattattttctccttcaacgtttgatagaattcagtatagcagaaccagtacagcaagttggattctctgcaagcaaaggctgaggtagagtttaggggtgaaagatgttttctagggatcaacagctatgaagggagaggaaagaagtttgggaaaggcagaaaataaacttcagtgaaggcccaatgaatgtgggccaacccagcagggtactctggagtaagtagcagagtcaggtacagccttcacaccttgccctgctcagtccttacatgggagccactccagaaagcctgtgacaatggaggagacagcactctgtagtggaggcggccccaccaatcccagcgaacttagtatctgagttctaatctctgtctctcagctcaccaaggtggccaatcaccatgaagagtctccctctctatgccacagtccagaaagatctgcactggctgtgggtctcatctttgcttcacctcactcatggatcgtagttctgtgctttctatactcaagaaaataatcatttaatatatctttttcagttttatagttgttttcaatagaagggctggtccagaacgaattactccatcatgatgggaagaaaaattcttagttcagcttttgtcagctagttatgtagaaatttatttttattaacttcattaggaattcacttttgacacagaattataattttaagatagatttttccttagccgactagaagagttttaaaatcttagaagtacaaaaggaagctataaatccagaccacagcttggattattttgctaatgtaggccccttctcagatgtccattctccctgtccatcatcataaccagattcctttttaaaaaataaaattaatcaaataagcagttcttaatggcagatttccagagtcctcagccacaacagaagagccccactctacctcccttcacaattcatctctactcctgggccatttcagcaggaaccctcccaaacccaagtggcattgccacatttataatagtgggtgctcctgttacccactcctttggactgtgtctcagtccatttgggctgctataacaaaaataccatagacttggtggtttaagttacaaacatatatttttaaagttctggaggctacgggtctagatcaaggtgtcagcagattcagtatttggtgaggagccacttcctagttcaaagatggttgtcttcttgtcgtgtcttcacataggagaaggggcaatggagctctctggcacttctttgtaagggcactaatcccactcatgagggctccacttttatgatctaattacctttcaaaggcttcacctcctaataccatcatcttggaggttaggattcaacctatgaacctatgaattttaagggtgcacaaacattcagtctatagcagactgtcagtattttttgcacccacatgatctgaggggctgttaagtcaaacctgtgaagcttttaaggtttatgtctttcaagaaagaatatttgggataaaaattgctgattagagtgaggggaacgggagggtatagagggagagcactaaagaccaccagagagtaycaaaggaggtggaatagagaaagaaagagcttttgacatatgtcattttcattcattgttaggtatacagtaggcacttaatagacacttgattattggttgatgtggaatttcatattcagtatagctgatactttccctttaataatggccagctcattttccatcctacattgccctgtggaaaaaatcatcactgtattttggcacttttgaaatagcagcagacattgtgaatgcaggagtgatggcaacagaatggaaaagaatgatcactagtgaggtttctagtgtgggtgttgaaactaatgaattgctgtattattctgtgttctgctctagcaaactttcgatattcttcttccttagttaaatttgactctgttacttattatc

SEQ ID NO: 716410 - DNA, 627 bp, Homo sapiens
tgatgagtcatgcaaatatagggtggcacgggtgattcaaatgacaggatgagtaaaactcagttttggtcttcgtggccatgtggcttgcactgagacctttaactttgcttcctacctttcagagaaggaagcaccaggtatgaattctctcagttctttctacctacagtgccacccccgcccccaaatcatagcagccaccatttgtctctttctgtttaatctcacagaaggaggtgttctcaactcccccactctcaacctttggttagcttaaacctttcccttattactcagctctttcatgatagtctatagttacatttaggcctttcccaactgaaagagcaaaacaaacccttcttcactcttgtgtcttctctaattactactttcttgttccctccacagcaaaagctctggagacagaagtaggtaaacactgttcctgcttcctctcctcccctcccctctacttgcaacccattgcagcctgctctgtgccttcacgccactgcctctgccggcaggagccactagtggactgtattggatgaattcgaggaatgctytttaaggccttatcctacttgacatctctgtagcatttgacacttgaccacc

SEQ ID NO: 716411 - DNA, 2138 bp, Homo sapiens
  misc_feature 1415, 1416, 1417, 1418, 1419, 1420, 1421, 1422, 1423, 1424,1425, 1426, 1427, 1428, 1429, 1430, 1431, 1432, 1433, 1434,1435, 1436, 1437, 1438, 1439, 1440, 1441, 1442, 1443, 1444,1445, 1446, 1447, 1448, 1449, 1450, 1451, 1452, 1453: n = A,T,C or G
  misc_feature 1454, 1455, 1456, 1457, 1458, 1459, 1460, 1461, 1462, 1463,1464, 1465, 1466, 1467, 1468, 1469, 1470, 1471, 1472, 1473,1474, 1475, 1476, 1477, 1478, 1479, 1480, 1481, 1482, 1483,1484, 1485, 1486, 1487, 1488, 1489, 1490, 1491, 1492: n = A,T,C or G
  misc_feature 1493, 1494, 1495, 1496, 1497, 1498, 1499, 1500, 1501, 1502,1503, 1504, 1505, 1506, 1507, 1508, 1509, 1510, 1511, 1512,1513, 1514: n = A,T,C or G
tgctctctctgcttttgaaaatgtttgtgagtgttcatatttagttaataaaaacagcgttcacaaagaatttccccaggaagataacattaaagagccagattggaagaagtgaaagattcaggtgcagtaatagcaattacaagctgttgaaatcattgcatgcctggaaggttctagaaacagtaagaaggtaagtgttgctagagtggaatgagagaaattgagaatattaggagatgtgtaggagccagattgtgtaggtcattgtaagaatttctccatgagtaagatgggaagtcattggagaggttcaggagagaaaagtaatccaatttgaattttagaagcatcactatggctgtgctgcttagacaacagtagagataagcatggaattcctgagactagtcagttggctatttcaaaatgtagaagatggtggcttggggcaaagtgatatcaatggagttagtgagatgtggtcagcccctgaatttgttagcaggtggcatcaataggatttgctgaaggaaaaaatgtgggttgtaatttatgagagaaagaaaagactcatggatgattccaaagtttgggcccatgcaaactgaaagaagaatttttccattaagtgagacaaggagaacttcaggaagattaattaggggatgattttatgttggttttaagaaagaccatggtgagaagacaatgttttaagatagaagggatgatatttaagtctctcttgatgtctgtagacaagaattgaagctatagagtagtgataggcttatagtaagcatgtagggctttctcttgaaaaaatattttggaaacagcagagtgtttatatttcccaatagtgtttttttataaaggcttcaaagagttctagttctcgattgtttccatttagtcaccagaaacttataaacttggttagtgctttayagtgcccggcagtgaatttgagcagcaaactgtaatcataatccatgacactacatgcatttcttaatctgcaaaagctatattgcaaataatgatataaaatctatagaaatgattatcacttgggcattaatgtcacatctgtctgattattaccaagacttaaaaaaattacttatctccttagcatggaaataattgatcttaaaaccaatatttccatttacgaagtgcaaagtgcttacatatatatcatatgttttgatgctgatcgcataggacctttgcaaaaacattgttgtccctactttaaaaacgtgaaacttgatattaagaggttcactcacaatgaggactaacctgcacacaactaaaactatgatctagatcaccttactcttaccttacatcacttgttaatattactttatacttgattgtgtatatatgtatataaccannnnnnnnnnnnnnnnnnnnnnnnnnnnnnnnnnnnnnnnnnnnnnnnnnnnnnnnnnnnnnnnnnnnnnnnnnnnnnnnnnnnnnnnnnnnnnnnnnnntttttaacttttcaactaaaaataacttacattaaaaaatgaatatttagcataagtgtaatttctattatgtcgttttctaagattcagaaaacagttcttttaagtatctattttagattgcattaatgcaaaatatggtcaagatttgttcttccttcttataaatgctgtggagtttttccttttctagaatgtcttctagtgatagatttgattctgtgagcatggcttggagacaatctgtggcctctgttgctgctataaatatagtggtttctcagtgaaagaggcacacagcttcttttttatgcttaaagactgatagcactcaatctgttattttgagaaagatccctttactatgattcaaacccgaatatccaactttctagaagacatttacaccaatgtgtccctaaagcatctcacatttagtatgtccaaagttgaatcttctctttttttatcataattcattgtaagccatgagtctaccacttctcctccttcattctcaagtatagtttattttattataattcacacctaaagtctaaggattaatttggatgttagttaatctaaagctttgggtcattctaacttcaatttctctctgat

SEQ ID NO: 716412 - DNA, 1146 bp, Homo sapiens
attgaatatttttaccctttgaccaacatctctccatttccccaccctcgagtccctagaaaccacttactctctacttctatgaattctgcatttttagttttcatttaactcttgcttcataataaactatcccaaaacatagtgatttgagaaacaaccaccatttgattatagcacatagttgttgtgggttaggaataggaagtttgtgggttagcaatagtcttcgatctttatggtccagatgacttctytcacattcttgatatttttttttttgagtgaaggtagaactggaaagctgagctcatccagaccatacctcactccatgtggtcctcgactctttccatgtggtctttctggcagggtcggaatatgtcctcacataagcccagtgctcagagaccatgacagagcctccagttttattaactgctcagaactggaatgtcacttctaccatactctactgaacagagccatgcacagaccagcacacattcaaaaagaaaaataaaatttacttctccatagaatgaatatgaaagaatttgcagccatcttcattctaccgcagacttcatcaagcaaaagtaatttgattccggatggaaagtcaaagttgtgaaaagaaatcatgaacaaaaaacctgataactggataagtctataggtataacaataatatgaaacaatgatagtgttgttatgcatgtagaaaaagaaataaaactaaaatatataacaaaagactatatagctagggaggagaggaaaagacttaaaatattttggagtattctgttttattcaaaagaaagaaaaacttcagattaacaggaggtttttgtaagtgaagtatgtatattaaagatatcagagtaactcctaaaatttaaaaaaacagtttgtatagtttccaataagtagattggaaaagaaaaggaataagaagacttcaaaagaaaagaagaaaaaagaggaaatagtaaagatgggacaaatagaaagcagaaagtaagataaaaaataaattcaaccatatcaataattacaatgaatgtaaattaactagttatgttactttccaaaatctaactacacgttgtttgtaagaaacacaaataaaacataataaaa

SEQ ID NO: 716413 - DNA, 1146 bp, Homo sapiens
attgaatatttttaccctttgaccaacatctctccatttccccaccctcgagtccctagaaaccacttactctctacttctatgaattctgcatttttagttttcatttaactcttgcttcataataaactatcccaaaacatagtgatttgagaaacaaccaccatttgattatagcacatagttgttgtgggttaggaataggaagtttgtgggttagcaatagtcttcgatctttatggtccagatgacttctctcacattcttgatatttttttttttgagtgaaggtagaactggaaagctgagctcatcsagaccatacctcactccatgtggtcctcgactctttccatgtggtctttctggcagggtcggaatatgtcctcacataagcccagtgctcagagaccatgacagagcctccagttttattaactgctcagaactggaatgtcacttctaccatactctactgaacagagccatgcacagaccagcacacattcaaaaagaaaaataaaatttacttctccatagaatgaatatgaaagaatttgcagccatcttcattctaccgcagacttcatcaagcaaaagtaatttgattccggatggaaagtcaaagttgtgaaaagaaatcatgaacaaaaaacctgataactggataagtctataggtataacaataatatgaaacaatgatagtgttgttatgcatgtagaaaaagaaataaaactaaaatatataacaaaagactatatagctagggaggagaggaaaagacttaaaatattttggagtattctgttttattcaaaagaaagaaaaacttcagattaacaggaggtttttgtaagtgaagtatgtatattaaagatatcagagtaactcctaaaatttaaaaaaacagtttgtatagtttccaataagtagattggaaaagaaaaggaataagaagacttcaaaagaaaagaagaaaaaagaggaaatagtaaagatgggacaaatagaaagcagaaagtaagataaaaaataaattcaaccatatcaataattacaatgaatgtaaattaactagttatgttactttccaaaatctaactacacgttgtttgtaagaaacacaaataaaacataataaaa

SEQ ID NO: 716414 - DNA, 1146 bp, Homo sapiens
attgaatatttttaccctttgaccaacatctctccatttccccaccctcgagtccctagaaaccacttactctctacttctatgaattctgcatttttagttttcatttaactcttgcttcataataaactatcccaaaacatagtgatttgagaaacaaccaccatttgattatagcacatagttgttgtgggttaggaataggaagtttgtgggttagcaatagtcttcgatctttatggtccagatgacttctctcacattcttgatatttttttttttgagtgaaggtagaactggaaagctgagctcatccagaccatacctcactccatgtggtcctcgactctttccatgtggtctttctggcagggtcggaatatgtcctcacataagcccagtgctcagagaccatgacagagcctccagttttattaactgctcagaactggaatgtcacttctaccatactctactgaacagagccatgcacagaccagcacacattcaaaaagaaaaataaaatttacttctccatrgaatgaatatgaaagaatttgcagccatcttcattctaccgcagacttcatcaagcaaaagtaatttgattccggatggaaagtcaaagttgtgaaaagaaatcatgaacaaaaaacctgataactggataagtctataggtataacaataatatgaaacaatgatagtgttgttatgcatgtagaaaaagaaataaaactaaaatatataacaaaagactatatagctagggaggagaggaaaagacttaaaatattttggagtattctgttttattcaaaagaaagaaaaacttcagattaacaggaggtttttgtaagtgaagtatgtatattaaagatatcagagtaactcctaaaatttaaaaaaacagtttgtatagtttccaataagtagattggaaaagaaaaggaataagaagacttcaaaagaaaagaagaaaaaagaggaaatagtaaagatgggacaaatagaaagcagaaagtaagataaaaaataaattcaaccatatcaataattacaatgaatgtaaattaactagttatgttactttccaaaatctaactacacgttgtttgtaagaaacacaaataaaacataataaaa

SEQ ID NO: 716415 - DNA, 1146 bp, Homo sapiens
attgaatatttttaccctttgaccaacatctctccatttccccaccctcgagtccctagaaaccacttactctctacttctatgaattctgcatttttagttttcatttaactcttgcttcataataaactatcccaaaacatagtgatttgagaaacaaccaccatttgattatagcacatagttgttgtgggttaggaataggaagtttgtgggttagcaatagtcttcgatctttatggtccagatgacttctctcacattcttgatatttttttttttgagtgaaggtagaactggaaagctgagctcatccagaccatacctcactccatgtggtcctcgactctttccatgtggtctttctggcagggtcggaatatgtcctcacataagcccagtgctcagagaccatgacagagcctccagttttattaactgctcagaactggaatgtcacttctaccatactctactgaacagagccatgcacagaccagcacacattcaaaaagaaaaataaaatttacttctccatagaatgaatatgaaagaatttgcagccatcttcattctaccgcagacttcatcaagcaaaagtaatttgattccggatggaaagtcaaagttgtgaaaagaaatcatgaacaaaaaacctgataactggataagtctataggtataacaataatatgaaacaatgatagtgttgttatgcatgtagaaaaagaaataaaactaaaatatataacaaaagactatatagctagggaggagaggaaaagacttaaaatattttggagtattctgttttattcaaaagaaagaaaaacttcagattaacaggaggtttttgtaagtgaagtatgtatattaaagatatcagagtaactcctaaaatttaaaaaaacagtttgtatagtttccaataagtagattggaaaagaaaaggaatargaagacttcaaaagaaaagaagaaaaaagaggaaatagtaaagatgggacaaatagaaagcagaaagtaagataaaaaataaattcaaccatatcaataattacaatgaatgtaaattaactagttatgttactttccaaaatctaactacacgttgtttgtaagaaacacaaataaaacataataaaa

SEQ ID NO: 716416 - DNA, 1161 bp, Homo sapiens
ctaagcatttacaatgtcaagtatattggtattttcttttcatgtattattatatttaattcttctggcacttctgtgataaagatcagggatttgcaaacttcttttgtaagaaccagttagcaaataatttaggctttgtgggtcctatcatccctgttacaactatagccatgcaccacacaatgacatttaggtcaacgacagaccacaatggtggtctaagatattataatggagctgaaaaattgatatcacctgggaaaatttctattccttagtgacaacttccagtcctgcaagctccactcatggtaagtgctctatacaaatataccatttgttatcctttataccatatttctactgtacctttcytatgttgagatacacaaatacttcccattgtgttacaattgcctaaagtattcaggacagtaacatgttgtacaggtttgtagcctaggagcaataagtgataccatctagcctaggtgtgtagtagactatcccatctaagtttacataagtacactctatgatgttcaaacaataatgaaattgcctaacaatgcatttctcagaaggtatcccccattaagtgatagatgactgtacttaattctgcagttgtaggaggaagcagtcatgtataagacacaaataaatgggtgtggttacattccaacagtgtttattacacaaacaggcagcaagccagatttgccaaccctggatgtagatcatcattcccactcagtgtcttttggtctacagagccaagattccaactcaagtctttctatgccagaacccactctccttacaacttcattatattgcttgcaacgaagtttcagaaaggtaacttcaacagaggactgtaagccgaattacaaaggaaaaactgatttctagagacatgaagtctagatggtaaaaatataaacgggattcactgacatctaaaactagggaggtgtattagtccattttcacgctgctgataaagacatacctgagactgggcaatttacaaaagaaagaggtttaatggacttacagttccacgtggctggggaggtctcaaatcatggcagaaggcaaggaggagcatgtcacatctcaaatggatggcagcaggcaaagagagagtttgtg

SEQ ID NO: 716417 - DNA, 2005 bp, Homo sapiens
actttatctaaaacctttcattgacatcttatgatgctatcatcagcttcaaaacctgcagagtggctgtcaggaggttggaaagataatctcctggagagtgacttaggaatctcacaagaaatgtggcatagccaaagctgctgattgacacagatgatgataatatggggaaggtcatggagaggatgagctgcaaagttacgtagaagagttttacccaaatgagagaaatttagaaatatctttgtggatatattgtacttaactttttttttccatcccacataatcatggaagtaatctgaaacaaatatccatatttttacaaattataaaaagttttctcaatatttataacatattataaatgataagtattatccgagtcatagtttgtcagtgattttattctttgtgatcagtaaaataatgatgtattttacaattgatgtgattgatacatcatacaatttttagaaaatgcttttagtattaacaaatgatcattcagtggtttgtatacacctggtattattctacatgcttgatgtattattaattcattcaatcttcacagcatctcaggagggagacagtaacaccactcccgtgatccaattctgaatctaagcccaagtcctacaagaaataaacagaaaaacctgagcttgactcagcctgtttccagaatgcttgctcacatcaaatatgttagagtatcttttatcttatatagtaaatactttataggtttagtttaagaattgttactcttcaccacagtcatgaagctatctttttaagttctaaataatgtattaaattgtttttatatttaggtctgtgatccatttggaataggttatgtgtgtaatgtgagacggtagattttatttccaatgacgcatattcacatccctacatttattgaaaatttatttccccactaatttatcttatatattatttgcctatatatgcatgtgttcgtttttaagctctctttaatttttttccattgatattctccatctttgtgcaaatactgagttagtcccttcatttaatgcaagaattttcctccagtgccctttctgttgtccactgtactgttctataatgaagtaaaagaagggtgaaaatttgcacaccttacacctacaccaggattcccagctgtatcttgaaggaagcggaggttagaactttcaagattaatgtcgacactaatgtctctaatgtccttgtgaatcttaggcaattctcccgagatactttctgctttattgtgtgtgcgtgtgtttaacgttctcagtgaattccatttgctgtcaggactcctgattttctttccctgcttttaggatactcagtgactttctactcccctagcaacagccagcagtggtaggaacctgcacagacaaccccagtaccttgtgcgcgggcgcagacacgccaagggtggtgggttgcttcctccagaccacgcccaccgatgccggcagcagctggtgcagcggagctcagatcctctctgtggggtctgcaccggcaagggcagctgctccctgcctttcctcaggagtcagtggaggtaataacttgttttcatataaagaacaartttgttcaacagtgattttgcctgttgaccaaagacaggactcgttaccccttagggccttgcttggtaatatgtgcttttgctttttttaggtgggggtgggtgggcagagaggcgctcacgaatgtttttaaaacttttgtataaattttcattttattcgtaacataaacatcatctacaagcaaatccacattctgttttctatattaaggcctttcatacttgtgatttaaaatgcatgcattcattttttttcattaggtttcaaataatcgtttcaattatttccatgttttcaggtatcactcttcactatattaaaagataatatcgcttttattattttaaagacatatattatacattctctga

SEQ ID NO: 716418 - DNA, 2005 bp, Homo sapiens
actttatctaaaacctttcattgacatcttatgatgctatcatcagcttcaaaacctgcagagtggctgtcaggaggttggaaagataatctcctggagagtgacttaggaatctcacaagaaatgtggcatagccaaagctgctgattgacacagatgatgataatatggggaaggtcatggagaggatgagctgcaaagttacgtagaagagttttacccaaatgagagaaatttagaaatatctttgtggatatattgtacttaactttttttttccatcccacataatcatggaagtaatctgaaacaaatatccatatttttacaaattataaaaagttttctcaatatttataacatattataaatgataagtattatccgagtcatagtttgtcagtgattttattctttgtgatcagtaaaataatgatgtattttacaattgatgtgattgatacatcatacaatttttagaaaatgcttttagtattaacaaatgatcattcagtggtttgtatacacctggtattattctacatgcttgatgtattattaattcattcaatcttcacagcatctcaggagggagacagtaacaccactcccgtgatccaattctgaatctaagcccaagtcctacaagaaataaacagaaaaacctgagcttgactcagcctgtttccagaatgcttgctcacatcaaatatgttagagtatcttttatcttatatagtaaatactttataggtttagtttaagaattgttactcttcaccacagtcatgaagctatctttttaagttctaaataatgtattaaattgtttttatatttaggtctgtgatccatttggaataggttatgtgtgtaatgtgagacggtagattttatttccaatgacgcatattcacatccctacatttattgaaaatttatttccccactaatttatcttatatattatttgcctatatatgcatgtgttcgtttttaagctctctttaatttttttccattgatattctccatctttgtgcaaatactgagttagtcccttcatttaatgcaagaattttcctccagtgccctttctgttgtccactgtactgttctataatgaagtaaaagaagggtgaaaatttgcacaccttacacctacaccaggattcccagctgtatcttgaaggaagcggaggttagaactttcaagattaatgtcgacactaatgtctctaatgtccttgtgaatcttaggcaattctcccgagatactttctgctttattgtgtgtgcgtgtgtttaacgttctcagtgaattccatttgctgtcaggactcctgattttctttccctgcttttaggatactcagtgactttctactcccctagcaacagccagcagtggtaggaacctgcacagacaaccccagtaccttgtgcgcgggcgcagacacgccaagggtggtgggttgcttcctccagaccacgcccaccgatgccggcagcagctggtgcagcggagctcagatcctctctgtggggtctgcaccggcaagggcagctgctccctgcctttcctcaggagtcagtggaggtaataacttgttttcatataaagaacaagtttgttcaacagtgattttgcctgttgaccaaagacaggactcgttaccccttagggccttgcttggtaatatgtgcttttgctttttttaggtgggggtgggtgggcagagaggcgctcacgaatgtttttaaaacttttgtataaattttcattttattcgtmacataaacatcatctacaagcaaatccacattctgttttctatattaaggcctttcatacttgtgatttaaaatgcatgcattcattttttttcattaggtttcaaataatcgtttcaattatttccatgttttcaggtatcactcttcactatattaaaagataatatcgcttttattattttaaagacatatattatacattctctga

SEQ ID NO: 716419 - DNA, 661 bp, Homo sapiens
tgacaagaatgatacaaatgatgggatacaataattattattattctgttataaggtgtttacactaccttttaagtgatatactgctatttgaaaggggacttgggatagtcatgaatgtaagytgcaaactttagggcaggctgtttgaccaggagcctcagttccttgctggctgttgaccagaggctgcatttagttccttcccatgttggcttctctcacagggagattatttcatattggtcatcaagggcgagagcttgtatgcaagacagaaatcacaattttaagtaccaaaactgcattactgaattgttagcaagcaagtcacaactcctgtttacactcataaggagaaaagtagaataccagattgtgtatccctggaggtgggaattaccatcttagggcctatctaccacatcaggtcttgcccaatctaaagtagtttctcagtcttcacttattttgctgaccttggtccttgtggggaaaaaaaaagaaccagtcaggtattttgtacaatgtaccatgatatggatttgtccaagtagtttctcataatttgactggagttatggattaatttaggcactacatttctctaagttggaaaaatgaaaaaactgaatagtatattagcaaagccaacttacat

SEQ ID NO: 716420 - DNA, 661 bp, Homo sapiens
tgacaagaatgatacaaatgatgggatacaataattattattattctgttataaggtgtttacactaccttttaagtgatatactgctatttgaaaggggacttgggatagtcatgaatgtaagctgcaaactttagggcaggctgtttgaccaggagcctcagttccttgctggctgttgaccagaggctgcatttagttccttcccatgttggcttctctcacagggagattatttcatattggtcatcaagggcgagagcttgtatgcaagacagaaatcacaattktaagtaccaaaactgcattactgaattgttagcaagcaagtcacaactcctgtttacactcataaggagaaaagtagaataccagattgtgtatccctggaggtgggaattaccatcttagggcctatctaccacatcaggtcttgcccaatctaaagtagtttctcagtcttcacttattttgctgaccttggtccttgtggggaaaaaaaaagaaccagtcaggtattttgtacaatgtaccatgatatggatttgtccaagtagtttctcataatttgactggagttatggattaatttaggcactacatttctctaagttggaaaaatgaaaaaactgaatagtatattagcaaagccaacttacat

SEQ ID NO: 716421 - DNA, 657 bp, Homo sapiens
atatattttcatttaaaacatgttgtaattttagtgattggctcaccacacaataggagctcaccacacaataggagaatgaagggaagggaaactaccttcacttagtagccattatgtgctaaggatgtaattctcatgacagtttataaacactagtattactacctccattttgcgatagctgaaaataaagcccagagagttagatgtgatttttaaagttaaaattgaatttaaaaccaaaccctctttactttaaagaccacgtttcttttgatactacaccccacttcatatttgagtccccttccccacacactaggcttctatcttctcttgtggaaagataaggatctaaagcttcatagtatactgattggtaatggtaacaggcctggagaatgggttacaaacgagacacagctatctcctctctctgttaaaactttacataaatgcacaggtaaggtatgaaatatgctttaatattaaacacacgtgtaagcctttattatacaccaagcttaaatgttcatttgtttttagaatataagtaataattactaagaaaataaacttaagaccaataygataaatattatgggttacgatgcaaataatctaagatgtttacagctgtttgctgcattattc

SEQ ID NO: 716422 - DNA, 638 bp, Homo sapiens
tttatttataaaatatgaaacatctaacatcatatagattatagcaaatttgatttaaacattcatcattaaaaatgaaataattagttctatggcgacaatatgaacataagtatcagtgcagaacaatattttttattaagtcaggaaaactatggacagggagatacttccagaatggtggtgtaaccagtctgtgaacccagtccccagtaaaaaaaataaataaataacttgtgaaaaatattttaaaatcattttaagactttagaaattcatcatggtcatatagcaaatgcataaacatttactcaagaaattctactaaatctctgtaagagaaatgcaagtctgtggcatttgagccatgacccactacttttttccacctatcctctaccagcacagtatgacaaaaactttattccaggmagttgcagctaagaacacaaggctctctctcagatcccagtctggcatctctccagaaggagcaggctgccagaactttttatctccccaagcctatattacagaagttcctatttaaacaaagcagctaaatgtagcactccattttcccacccagcacccactcatagggtagaagttatacgttacatgttgcaagtcaatca

SEQ ID NO: 716423 - DNA, 940 bp, Homo sapiens
tgatttttaggaatacatgtcaccttgtaacaaaacttaccgtgttgagtgtcattaagagtttcaatgggagttttagatgatttataattataataagtaatatttattgaatgagtgctatgttctatgaattttacctgtattagctatctgatttaacttaaccctaaaatgatcctgtgggtgtgattattttccccattttataatggaggcaactatgatttagagggataaaataatttattctcaaccacaaagctaataaacagctggagttcaaaacccagctctctgagaatgcagatcccacttcaaaaaacactgggcaaactcaaccatggccaaactgtgctaagtgcagcaggacttgtattcagagagaccagcagccatgtgctcacctgcctgtcactaattaagaccacaaagcctgggaactggacagccttgcagccaaatccaggttccaccacttactgggtgcatatcattgaacgagttgcttaaactttctgaatttcagtgtcctaatgtgaaaaatggaattcaattgtaatacaatagctaacattcattgagcacttattattaacctcaaaacaatctatgatataaayattgtcccatttctacaaatgacaaaacttgggcttagaaaagtaaaaaaaaaaaaaaaacttgattaaggtagcacagctagtaggagtgaagctggatttcaacctgtctgttaaactccagacaattgtcttcttaaccactgttgaacacaacccctaataaaacctttcacctggatgtctctgaggattgagggagatactatctgtaaatcattttgcactgtgcccagtctatgatgtgaatttaataaatgaagttcattgtcattattaccattggaacttagctaagaacataagtaattataata

SEQ ID NO: 716424 - DNA, 882 bp, Homo sapiens
gcacattatatacaacccatttgtatttcactttcttcatctgtaagatgaggatggtaacagcaaatgtgagagtaaaataaataatgcatgtatagcacttagaaaattgtaggtcaccaaattagtgcctgataaatattatttttattttgattagtgatagcattatatcaatgtgatggaaagagtgtattaatgtagcatgatttgtaaatattcattccttagaagggaggaaggaaaaagaaagagagacagaaaaagaaaacctaaaaytcagacttaaatgtggccacacgcctcttggaatttcacaatattcatgatcacgttaaagactttgagaaactctttaagtgtattttatcatttcattccaaaattgtttgactacagcacatcacctcttcatccctctttttttttttttttttaacattgtccaacctaaatctgttcaactttgtcattttggaaacactatgctaatgtgcctttggagtccatatataacacacttgttcctttgctattaactgcagtgctaacagtttcgtttgtgaatatttccaggtacagaaatcgaaaaagtaaagaaccaaagaaggaatatgagagagttacctcaggggatccagagttgccgcaagtctgaatggcgccatcaaacttatgggcagggataacagtgtgcctggttaatattaatattcccattttattaataatatttatgttgggtcaagtgttaggtcaataacactgtattttaatgtacttgaaaaatgtttttatttttgttttatttttgacagactatttgctaatgtataatgtgcagaaaatatttaatatcaaaagaaaattgatatttttata

SEQ ID NO: 716425 - DNA, 678 bp, Homo sapiens
  misc_feature 157: n = A,T,C or G
taaattgtatgtgacacagaagcctcagaaatgatctgaaaaaaaaacaggaatatctttgtatattttatgctaagtctgatttaaaaaatagatggttgtgaagaaacatgattggagaaaaaggaagataatacaactggtaataaactggggngggggggaaggtcagcaaggcctgatttttcagattcttttctgtgtcttcaaggataaggatggtcctttcatccagttagatggaggactttttggaatgagggtcttttggaattagggtcgcataacctacttcaggggaaggtcagttttgttttatggcccacttcaggaaagaaaaggaaaaaaaaagaattctagtttctatggtctgcttgaggagagagggggacaggagaaggtcaaagagaccttcctgcttctgtagttttcttaatttttcagcttaagacactcactattccaagatgtcatattttgggttatcatgttcygagttctgtctgcagtttactcatatgttatattttatccccgctgaaacttactgaatttgagggaagagaggggattctgtgtatagctaaaataaaaaatacttagcttcctaaccaagaaaaattgtaaatgaaccctacagctcctcaatgaaatgagttgatttaagacaaatgctga

SEQ ID NO: 716426 - DNA, 1130 bp, Homo sapiens
catgagaaagaaattaacttctgtttttcttcagccactagtatttggggatctttttataacagttaaacctatatctaactaatatagaagcagtatctggaagggagacttccgcaacaaaagacatatgtaatattaatacagcaattgaacaggaaacagcaaatattcagataagccagggtggaaagctggtgactcttattatgtcataatgaaactttggctaaactgttacctgccatacattggacagtaagccataaactgtcagagtctgtgactctaaggcaactagttggaaaaattcaggatcttggtgtgtgttggctgcttcttgccacttgaagcaaaatcttacaaaagagataaagtctgaaatagtctcccctaagggaggagaattctattttatgaaaagaggcattttctgtcttgcctgaaatataacttgagtgaaagtgcagtaatttgggtgctcaaaggtttaaaaaaagtatttttggttttttgtttgttttgttttttggagatagggtgtcactctgtcacccaggcagtggtgcaaacacagctcactgcacccccagcctcctgggctcaagcgatccttctacctcagccttgggccaccatatctcgctaattttgggggtagagacagattcttaccatattgctcaggctgatttcaarctcctggcttcaagcaatcctcctgcctcagcctcctaaagtgctggggttacaggtgtgagccaccgtgcccagccaaaaaagccaattcttctttaccgaacacaagcaagaataaaaggtagctctcaagagcagctgtaagtggaaattagaatgtggccccccataaaatggagaaggaaaggaaggaaggaaggaatgaaggaaggaaggaaggaaggaaggaaggaaggaaggaaggagagaaagaagaaaagaaagaaagaaaaagagaaagagagaaggaaagaaagaaagaaagaaagaaagagagagagaaagagaggaggaggaggagaatgtggactgcaaacctttttcgagcacttttgataaagtccctgacagtcagtgagtgccaactccgtccaaatatcagatgatggctg

SEQ ID NO: 716427 - DNA, 1130 bp, Homo sapiens
catgagaaagaaattaacttctgtttttcttcagccactagtatttggggatctttttataacagttaaacctatatctaactaatatagaagcagtatctggaagggagacttccgcaacaaaagacatatgtaatattaatacagcaattgaacaggaaacagcaaatattcagataagccagggtggaaagctggtgactcttattatgtcataatgaaactttggctaaactgttacctgccatacattggacagtaagccataaactgtcagagtctgtgactctaaggcaactagttggaaaaattcaggatcttggtgtgtgttggctgcttcttgccacttgaagcaaaatcttacaaaagagataaagtctgaaatagtctcccctaagggaggagaattctattttatgaaaagaggcattttctgtcttgcctgaaatataacttgagtgaaagtgcagtaatttgggtgctcaaaggtttaaaaaaagtatttttggttttttgtttgttttgttttttggagatagggtgtcactctgtcacccaggcagtggtgcaaacacagctcactgcacccccagcctcctgggctcaagcgatccttctacctcagccttgggccaccatatctcgctaattttgggggtagagacagattcttaccatattgctcaggctgatttcaaactcctggcttcaagcaatcctcctgcctcagcctcctaaagtgctggggttacaggtgtgagccaccgtgcccagccaaaaaagccaattcttctttaccgaacacaagcaagaataaaaggtagctctcaagagcagctgtaagtggaaattagaatgtggccccccataaaatggagaaggaaaggaaggaaggaaggaakgaaggaaggaaggaaggaaggaaggaaggaaggaaggaaggagagaaagaagaaaagaaagaaagaaaaagagaaagagagaaggaaagaaagaaagaaagaaagaaagagagagagaaagagaggaggaggaggagaatgtggactgcaaacctttttcgagcacttttgataaagtccctgacagtcagtgagtgccaactccgtccaaatatcagatgatggctg

SEQ ID NO: 716428 - DNA, 1130 bp, Homo sapiens
catgagaaagaaattaacttctgtttttcttcagccactagtatttggggatctttttataacagttaaacctatatctaactaatatagaagcagtatctggaagggagacttccgcaacaaaagacatatgtaatattaatacagcaattgaacaggaaacagcaaatattcagataagccagggtggaaagctggtgactcttattatgtcataatgaaactttggctaaactgttacctgccatacattggacagtaagccataaactgtcagagtctgtgactctaaggcaactagttggaaaaattcaggatcttggtgtgtgttggctgcttcttgccacttgaagcaaaatcttacaaaagagataaagtctgaaatagtctcccctaagggaggagaattctattttatgaaaagaggcattttctgtcttgcctgaaatataacttgagtgaaagtgcagtaatttgggtgctcaaaggtttaaaaaaagtatttttggttttttgtttgttttgttttttggagatagggtgtcactctgtcacccaggcagtggtgcaaacacagctcactgcacccccagcctcctgggctcaagcgatccttctacctcagccttgggccaccatatctcgctaattttgggggtagagacagattcttaccatattgctcaggctgatttcaaactcctggcttcaagcaatcctcctgcctcagcctcctaaagtgctggggttacaggtgtgagccaccgtgcccagccaaaaaagccaattcttctttaccgaacacaagcaagaataaaaggtagctctcaagagcagctgtaagtggaaattagaatgtggccccccataaaatggagaaggaaaggaaggaaggaaggaatgaaggaaggaaggaaggaaggaaggaaggaaggaagraaggagagaaagaagaaaagaaagaaagaaaaagagaaagagagaaggaaagaaagaaagaaagaaagaaagagagagagaaagagaggaggaggaggagaatgtggactgcaaacctttttcgagcacttttgataaagtccctgacagtcagtgagtgccaactccgtccaaatatcagatgatggctg

SEQ ID NO: 716429 - DNA, 1130 bp, Homo sapiens
catgagaaagaaattaacttctgtttttcttcagccactagtatttggggatctttttataacagttaaacctatatctaactaatatagaagcagtatctggaagggagacttccgcaacaaaagacatatgtaatattaatacagcaattgaacaggaaacagcaaatattcagataagccagggtggaaagctggtgactcttattatgtcataatgaaactttggctaaactgttacctgccatacattggacagtaagccataaactgtcagagtctgtgactctaaggcaactagttggaaaaattcaggatcttggtgtgtgttggctgcttcttgccacttgaagcaaaatcttacaaaagagataaagtctgaaatagtctcccctaagggaggagaattctattttatgaaaagaggcattttctgtcttgcctgaaatataacttgagtgaaagtgcagtaatttgggtgctcaaaggtttaaaaaaagtatttttggttttttgtttgttttgttttttggagatagggtgtcactctgtcacccaggcagtggtgcaaacacagctcactgcacccccagcctcctgggctcaagcgatccttctacctcagccttgggccaccatatctcgctaattttgggggtagagacagattcttaccatattgctcaggctgatttcaaactcctggcttcaagcaatcctcctgcctcagcctcctaaagtgctggggttacaggtgtgagccaccgtgcccagccaaaaaagccaattcttctttaccgaacacaagcaagaataaaaggtagctctcaagagcagctgtaagtggaaattagaatgtggccccccataaaatggagaaggaaaggaaggaaggaaggaatgaaggaaggaaggaaggaaggaaggaaggaaggaaggaagragagaaagaagaaaagaaagaaagaaaaagagaaagagagaaggaaagaaagaaagaaagaaagaaagagagagagaaagagaggaggaggaggagaatgtggactgcaaacctttttcgagcacttttgataaagtccctgacagtcagtgagtgccaactccgtccaaatatcagatgatggctg

SEQ ID NO: 716430 - DNA, 631 bp, Homo sapiens
aggagtgaaccatcgcacccagctgggttatccagtttaaaagaatttttttttcaaggaaaccagagaagccatcatccacttttctgtctgtatcwttccgattttagtatatgtgttgccgaagtgagtatacactatcatccacttttaatgagagaaagttataaacttacattttgtttccaatttttagggttttttttttttttttttttttttttttttgagacagcactctgcctccaggctggagtgtgcagtggcaccatcttggctcactgcagcctctgcctcctggtctctaacaatcctcccacctcagccttctaagtggctgggactacagatgagcgccaccatgcctggctaatttttgtatttttagtggagaaggggtttcgccatgttgccccagctgaatttgggatttttttaaaggggactttcagtccaaatttgaggggaaattactatcaccactagtttgaatatagtacaatgaaaaaaatatatatatagtacaatggtccagacataataagaggtgtaaaaactagcacaggaagaaataaaaacagatttttgaaggtgagatgagaaactcacaaaattaacaaaataaatagcc

SEQ ID NO: 716431 - DNA, 827 bp, Homo sapiens
tctcaaaataaaaataaaaataaaaaaaatttaaaaagtggctgacatagcaagaaccaaagatgctagagacaagatgataattcacagggcatgtgagggacrgtaaccaataatataaagagaatatgaatcgagagatttttgagatggattgagcggatagatagaatattttagtctgagaggataagggatgagggaatttgaactggattcactgtttttggagcagaacttgaaggggactgtcttctttccagtacgggcacagtggaggctgaagagcatgcaggtctgcaatggctgctgcactagcagcggggggaccccagaggtggctgagcaggaggcaggctctgatgtggggtgggttcagtgatcccatccatgaaatgggactccccctcctgcctgcctcagagggggtggtaggaagatctgatgagaacagtgcttttcaagtcaagcttctacccttggcatcttaaaccaagtataaacattaactatgtagaaaaataaaagattttttaaaaaatgaaagcttctgtagatttgaactagaacttccatgggtttctgggagttaagagcctaaaggcatgggcaggcggagtgactggccctaattcagactgagaatgggctcaatcctccgccctgaccctaaccatgaactgcctcccctctcaagctggctgcacagtcatctggttacacggccagcagcttaggactgaaagtcatggaactgcaaaagttgggtttgggtgacttgggggaaagtgagccgtgtgggggtcattaagctgttggaatgaggc

SEQ ID NO: 716432 - DNA, 598 bp, Homo sapiens
ggcgggacctcaactttcctggtaggaaaatgatgtttaaaattctgaacactgaaatcaaattaatatataaatgcattattttatttggtactcacatattttattcttcttacaagttaaaccctgtttcaagtgctaaggattcaaagatgccttttctcttaggaagtcttaattagcaatggaaatttcctgattaagacggaatgaaaaggcttatcgttttccccacctggctgaaatctggaaccttaatttaaattattatgattttattccacagacgctaaaataaacttaagtaattgacatattttgaacatatatggttttgtttcaccttcatattcttgggataaactatatggcacatgcactttttaattcttgtacttctgtacatagtttcttgtgttaacttctgtttaatgaaattttgtaaagattcctgagcctaaytaatagattttagagtcttattactgcttggcactctgtaggtctgtgcacctgccaatgaaacttgaattcttcagtggcatggcctttcttattgttgctagtggtcagcattcactagataactaaattagct

SEQ ID NO: 716433 - DNA, 308 bp, Homo sapiens
tttkttttttttttttttttttttttaaaaagaacatttgaagttccctatgtgttcatttcttccctccctacttaaaggtaatcattacactgacgtggggtttttatttgcttgttcttactcactgcattgccacattttttcttctaaacaatatgttgtttaattttgcatgtttttggcctttatataaagataatcataccgtatacattcttttgtaacttcattgcttctactataagtcattacttttaactctcacctaatagtccattgtatgaatatgccacagtttattcatt

SEQ ID NO: 716434 - DNA, 957 bp, Homo sapiens
gggggcctggcaaggttcctgaggatgtaggatttcctcatcctcaggatgaggggagtttggaaacctcttaacagttctttcatattccaggatctggaattaattgtggacttatccttcctaaattgaggagtgcagagtcctctccccaaccctggatatggcagaatgatttagcaatatggctttcgtggtttttgtctttaattatctattgaatactaacacttgggaaggaaaacttaaaaaatatataacctcaaagctatggaatgaatgacatagatcgtgttcttttccagaaagcaggaggagagaatccyttgcttatttatttcattcttgtcattgtgagccctaaaaatggaatactgactattggactttgagatattgtggactggctaatggactgctagttttgtcagctccttatagaatgtgtgctaatcctgtcaagctgttctgaagagctcaactacatattttgtattaagaagtctagtaaattaggtgttaattgaaatccagaaagtgaagcaaggtggtgtttatcttactcagctcttctcttgccacttacatttagagtttaagctaaaacaaatgctatccattgtattttttaaaagaacttctttgaatgatagtaattttaaaaagttgaaatcatatattaaatgggtcagaagtgctctaaatatattattttttcccaatcaaaatctagttttatgtattggtatgctacttgaagcattcaactcagtgtttaaaaaagacttcaacagtttttaacacaccataccattttacaagtcaggggagttgttacggaggtggagataaaagccatatatttactctcagcattttaaatattctgtgttgttgagttttccattgacgacatttaatttgtgtgatgagggaggcagagatggaggggtaaaa

SEQ ID NO: 716435 - DNA, 650 bp, Homo sapiens
ttataaaacgaaaagttgacatctggatccagcccaaagaataaaagcatcaccctataatatttacttaagaatcacagaagttcattttaaggttaagaaacttgcataatagaaaatttttatcaaagtttactcaagtttggctacagtgtatgtatataaaatgcctaaaatggagtacgtgattgggcaatgtagtgcctttgaagttacatatttagtaatgccttagcattattgcctgttttaaatataaagagctttcatgttagttcctgtgacctaatgaatttcctcaagagtactttattaaatcgtatcttcctaatgctaggaataatagctacaggaataaattaaatttaaaatgatttatttttgcccacaaaagagcatttcccagttacacttaaataatgtcttttttctttaatgtttcactttgaaaacaaaataaaataacattttacttttatgtttttatttcatatctagtttttactttgagacaatagatgaaaggatgtttaaaggagacagtaagtagagttgcataaaataaaatgagaataaaatttrggaaataaaattccatcttctaagcgtgaaataagggtatctaatgagtaaatttaggtaaaaaacca

SEQ ID NO: 716436 - DNA, 612 bp, Homo sapiens
gaatctttttttctgggttcattaaattggatttcaactttctcttgcatcttgtttagcttccttgtcatctagattctgaattctattattgtcatttcagacatttcaatctggttaggattcattgttatagggtgagtgtgatcctttaaagttaatgaaacactctggctttttgaattactgtagttcttgagctgatttcttcttatctgagggaactgctgtttctgtttctgtttgaatttgctgttacttggaaaggtctttttgttttttatcttatatctcttgagggtttgactgtgtggatgttgtttatagtcaattggttttgtttccgggtactttcagatggccatgtctctgyaaaggttcctcggttgtagataggatcctgtggtgggtttcagatgttttgtgtgttggaggaatgcatatttgtttggtggtataattaaggcttcagtccactatatagcatgtaagagtaagggctagcagataggatgttactcagttgtgcaccccttttgtttttcagtgtgtgtacagcagtgctctgaggaggggaggcaggagagtgagagataagtccctcttaagtca

SEQ ID NO: 716437 - DNA, 1258 bp, Homo sapiens
gggaagaaaccatgtccttttcatgtttataattcccacaatgctaaacataattctgtacacctagtatgtgctcagtaaatgagtactgattaaataaaaatgctttaataaaggtgtgtggagggggtactgagaatactgatgtttccatccatctcttgaattgaagttctcttgctccgcagttcattcctggttacttgtttcttcacaaagcactgttttatctggcttcctctgaaagaccagaacaaatgtcaagacttttctgtttctgttcatcactcaaagcacttggcacgatcttcacggaaacttycctcgtgctcaagttttctttcagaatgtgagcatctgtctcttggtctacactgaactcttcagccatcattctcacagttaatcatgtattcgagtcagccaaatctctgaccttttcaacattttccttggtccctacatgataggctgactgtacctcacccaggatagcttcttacctgctctgaaatctccccgtaagccaaaactttctgctcttgacattgtgcctcttatcatgtcacctctctcacttgtgggcctctttaccttcctgaaaattatgttttttgtcttaaataatgagagggattaatacactgacttgaaactccatacactgctattctccccaggcgctagcacaaaactgactttctattaattagagtactgatgcttcaagtcaaagtttccgtaacatactctaaagccacatctttacaagctaaacagtgaaagccatttcattgttgatagtgtcatgttgcaaatatacacaaataaaaagaagtgttctccttggatctctcaacaagaagaaatggcctttcctgatggcctcctgatgaatgttctattttatgttacctttgttttgaaactgtaatgttttaggttttctctctccagaacgagaacccacagtgttttctgcattttagtggcactttaacatttcaggtttatctgaccaaaataggctaaaagttctatttgataaatcattggcccctaaacatctcaaacgtttttcaccactagatagtgaatcctcttcattggttaggtaaaatgattaccgaagtaagtactagactagtaggaagttgacatattcacagattacaactggggagtgtaaaacacaggattttaaaaaaccgtatcactttatggatgggtaacaattgtgaaatggtttaaaaggaaa

SEQ ID NO: 716438 - DNA, 601 bp, Homo sapiens
ttgaggagagtagggaacaactctgggatagtaattaagtattttgcagcctccatataattttactttcgtatctactattttgcatattttttttcttttcaaatgcaatgggactattttgttcactgtcactwtcttgtcttcatttcatttcacaacattcacaaaacttcattgttccctttcctttccttcctttagcttttactacatgacacaaagttatcattacattctcttgcaccaaacacctcattcacttcccctccatctaatttccactacttatatgtgagtctttccctgcctgtggatccttggctctttatcctctcccaattctttctttcagagacttactgttctaattctactaattttttcatgttgctatgttttcagaatcatcttctaattttggatgaagaaatatatatacaaacaattttatttgacaagagaaaatactattgatgtactcttgaaaaagcaacaatcagaatattattgactaaggaggctggcagctaacacaaaaggaaagtttatggccaactcaaagtaaatctaccttaaaatgggataacagaattacaga

SEQ ID NO: 716439 - DNA, 587 bp, Homo sapiens
actccctggcgctggctgccagtttatcatttgtagagagaaaatctgataattgccaaaccatcgcccgacattcctagtggatgagggagagccctctcctgcccccactcatgcctgtctaactacctgtaacagtttcttgttaggcattataggtaagtttttccaagaatgaatcgaagtttttcaggaatgtggcgcatttcttcattcaacatagaatttcarattttatttaatgttgttttaatatgctttctaaagttatagttatgattacttgcaatttcttttttgctcagatatttctactatgggttagttgcatctactttgcttctgttctatatttttatctaattcttttttgtcatttttttacatattaaaactttcttgttgtaacttctcttcatgcataaattgtatgtgtatttgttcttatgttctctctgatttagacttctgtcctttttaaatatatgaacattgtataaaatttgggtttatttatttccgtttctcatttgtatgcaaaagcattttcctgaacttttagatgggagacatgatgagattgtttc

SEQ ID NO: 716440 - DNA, 587 bp, Homo sapiens
actccctggcgctggctgccagtttatcatttgtagagagaaaatctgataattgccaaaccatcgcccgacattcctagtggatgagggagagccctctcctgcccccactcatgcctgtctaactacctgtaacagtttcttgttaggcattataggtaagtttttccaagaatgaatcgaagtttttcaggaatgtggcgcatttcttcattcaacatagaatttcaaattttatttaatgttgttttaatatgctttctaaagttatagttatgattacttgcaatttcttttttgctcagatatttctactatgggttagttgsatctactttgcttctgttctatatttttatctaattcttttttgtcatttttttacatattaaaactttcttgttgtaacttctcttcatgcataaattgtatgtgtatttgttcttatgttctctctgatttagacttctgtcctttttaaatatatgaacattgtataaaatttgggtttatttatttccgtttctcatttgtatgcaaaagcattttcctgaacttttagatgggagacatgatgagattgtttc

SEQ ID NO: 716441 - DNA, 587 bp, Homo sapiens
actccctggcgctggctgccagtttatcatttgtagagagaaaatctgataattgccaaaccatcgcccgacattcctagtggatgagggagagccctctcctgcccccactcatgcctgtctaactacctgtaacagtttcttgttaggcattataggtaagtttttccaagaatgaatcgaagtttttcaggaatgtggcgcatttcttcattcaacatagaatttcaaattttatttaatgttgttttaatatgctttctaaagttatagttatgattacttgcaatttcttttttgctcagatatttctactatgggttagttgcatctactttgcttctgttctatatttttatctaattcttttttgtcatttttttacatattaaaactttcttgttgtawcttctcttcatgcataaattgtatgtgtatttgttcttatgttctctctgatttagacttctgtcctttttaaatatatgaacattgtataaaatttgggtttatttatttccgtttctcatttgtatgcaaaagcattttcctgaacttttagatgggagacatgatgagattgtttc

SEQ ID NO: 716442 - DNA, 587 bp, Homo sapiens
actccctggcgctggctgccagtttatcatttgtagagagaaaatctgataattgccaaaccatcgcccgacattcctagtggatgagggagagccctctcctgcccccactcatgcctgtctaactacctgtaacagtttcttgttaggcattataggtaagtttttccaagaatgaatcgaagtttttcaggaatgtggcgcatttcttcattcaacatagaatttcaaattttatttaatgttgttttaatatgctttctaaagttatagttatgattacttgcaatttcttttttgctcagatatttctactatgggttagttgcatctactttgcttctgttctatatttttatctaattcttttttgtcatttttttacatattaaaactttcttgttgtaacttctcttcatgcataaattgtatgtgtatttgttcttatgttctctctratttagacttctgtcctttttaaatatatgaacattgtataaaatttgggtttatttatttccgtttctcatttgtatgcaaaagcattttcctgaacttttagatgggagacatgatgagattgtttc

SEQ ID NO: 716443 - DNA, 587 bp, Homo sapiens
actccctggcgctggctgccagtttatcatttgtagagagaaaatctgataattgccaaaccatcgcccgacattcctagtggatgagggagagccctctcctgcccccactcatgcctgtctaactacctgtaacagtttcttgttaggcattataggtaagtttttccaagaatgaatcgaagtttttcaggaatgtggcgcatttcttcattcaacatagaatttcaaattttatttaatgttgttttaatatgctttctaaagttatagttatgattacttgcaatttcttttttgctcagatatttctactatgggttagttgcatctactttgcttctgttctatatttttatctaattcttttttgtcatttttttacatattaaaactttcttgttgtaacttctcttcatgcataaattgtatgtgtatttgttcttatgttctctctgatttagacttctgtcctttttaaatatatgaacattgtataaaatttgggtttatttatttccgtttctcatttgtatgcaaaagyattttcctgaacttttagatgggagacatgatgagattgtttc

SEQ ID NO: 716444 - DNA, 989 bp, Homo sapiens
tggtacgctattcttctgataaacatccaggaagggttgaggtcccaaaatccaagtcagagtacagagcaagattgaaagtgttctgtatggtggcatgagaagaggggtaaaagctggggcacatgggatttaaggtaaagagctttcttctggttcacattgtccaggactaaggaatttgatttctctgaccatccctgaggccatgccctgggagtagggttagaagggtcccccaggctgagggtcaggtctgtacwttttgtccagccgcaaacatagatgaaaattaggaatcagagaagaaacctctaggattaatgctagatgctcatggaggtaccacaaagcgtaattcactctgaacctcctacacacagtcattgatgtaacagaccgatcacagagctcattcacttccaaatacactgccaggtgctctcatgggattggaacctagagagggttgaaactgctgatggaaattcatcagcctgggctgttgagtgagttgtaagacacagacttcacttatcgactggagtagtatttatatgcactattaacagggattttatgttccgtggaattgcttctctttctcagtctaagtttattttacatatattttagaaatatttgacaactactccaaaaaacagacagtggtggatctaagtcaacgaagcttccatgttgtattcagttcctggctaatgagagatttatgtgtgttcggtctcagggcagagatgagaatgatgaggatctttcagctaaagaaaacatgttcaagtgacaatataatggtgaaagagtatactcaagctaataaatgtcactcggaaaagtagtgagccagctttatctctgtgttgccactgtcagagtgtgcacatttttgatctgaatatttatagcaataatttaaaaagtgtgatccctagaccaatagcatgagagtcaactggtaacttgaaaatgca

SEQ ID NO: 716445 - DNA, 1457 bp, Homo sapiens
tatatatataaataaaatattgctgagcagttagggtaacaatgctgtaaagtagatatttcttgaaatctattgaatattcctgatttttgatggagaaacatgtagtttatagattaggtttgccagagttttacattgtttatctrtaataaagtctaatgatcaattccagagtgtgggctttggactacctcaggtttcagctacagctcctgaagccgtcaggtttttctagctcagtactgccaccttctgccgctacttatgtactttacagagctaccaaaagaggctactgaaacatacccaagcagtggaaattttcttctgtgtttcttacgattattctaataagtctgtgtgcaggctatgaagtgaacgtttttaaaatctgcaccaaatgttagaaaactatgctaccaagcactagagttaactttagtatatttaattttggcatcattaaagttagcgttttatgggtttaatttcactattttatgagttttttgttggttttaccttaaaattcctcccctttgtgaatttatattttcatcttggatagtgcagatttattttgatatttctataattcatcatgagttggtgggcaaatgaaatttcaggaaatatgttcctttaatgttggtaactttagaaaacattgagaatttataggtcattccatttttattttcatattactcatgtatttggtgacgaagccacattttcaatatactttgaagtcgaataacatcatttaaatatttttcaacagggaatttatttcagtgaagtgaagatttggtaaaaattttcagtaaatctcacaacacctagggttaatgacaggcagctgtttggttcttgtgacaactgatgagacaccacatgcccattgcttggagtgtcgtacattttgacacttacacacaagtaatttttaatatttttaaatgtaccaaagcatcttactattagtggataattcaagtttaatattgtatatattccctcttatttaatcctttgagaagtagttaaaatttcgactatatctgcttttctataacattaacataattctattaattttaaatattgttcattagcatagaagtgatatatatatcctctaaaataactcagttattcctaagaagaaattgccttctccatatttttcttaatgttggaaggaaatgttaaaaattgatgtttgtttactcacgtcattcaaaatattctactttcaatagaggttgtttcataacttttattggtgctggaaagagcggatgttattttatctagtttagtaagttctttttgtaaaacacccttttggaaaacttgatattctaaactaggtaactccaaataagaaattgtcagctttgtcataaattgcttgtacatttccacttatagttacatataagcttaga

SEQ ID NO: 716446 - DNA, 1414 bp, Homo sapiens
gggtttcacatgcatatatcagaagtgaaatgttctatacatcatgttaaccacctagaggtcaaagaactaaatcattgcattcatgaaagtaaaatgttgtgctttccaactgccatcactattggagactctcacctccaattaccaaagtgaccttcaaatctgaattgaccactttatagtaaaatttattacaactgacacaacaatataaaatttwaaaaaataacatgggtaagatagctgaaaatacagtaataacatttttagactcaattttatattcaattttttgcttggttgactttttcctgattctttatattacatttgccaatatattgttaatatactgtttataggattctaccatcctttaaatgtgtaaacttaaaaaatttcttaatatagattcatggatgtgcaaggactcaacttttgtagaaaaacattctaagacacattaatatcccacatgatactaacatagggtgaggggatcacttgtaaactcctgtttagacaatgaaatatcagtgctctataatgctaatttggaactcccttaataccattccaagatgtcaataagaagtaaaaactaataattaccagtaatatactatctgctagaaatatgaacaacactaagcccttcccaagtgctttactgttaacttctcaaagttttattaaagagaattatattccagaaaaaatcaggtaactttgaaaatcacatagctaggaaaggacagaaactgaaagcaggactgggttgtctgctttcaaaacatttccactgtgaggtatttatggatggtagggggcctaaaataatctaactctagtctactgctttcatttgcagatgaggaaaatgaggcacacagatgtaacaaggcttgacaaaggtcaaaaagaatcatttcgttgccctatctcttcatttcatcccatatcacctttactatgagctattcatttacctaatgaaaacaaggggtcatccaaagggcaggtcagttctggagactgtacacccaaccaagttgcatagaaaacacttgatactatgctgagaagcatattgtaaaattgactttttctgaattatgttgctatggaaatttacattgatgctattaaggctgtgagtaaatggaaaatgaagaaaagcaaaaaagcctcacaacttgtatttgtttttgtatacattttataattatttttctagcagaattattgcagttctggtttcaaaaggtcaaataaaaatgtgcacttattgtagttaaaaaaataaaagcagaaatagactgttttgagatacctcattacctttcaactctattacattcccctagttaactactgtttacagttttatatccttacagaatgtttaata

SEQ ID NO: 716447 - DNA, 567 bp, Homo sapiens
atggtcagttccctcctgctaggaagtagaagggatttattattttaaattggagacatttaaatttttaaattaattcatcattttttatttggcagarctaaaaactggctgtacatagagattccagtaaaatttcaatattcttcagctgccaaattccttaagaaaatatacttaaaaccaaatacttgctagagctagttgaagtcaaaaggcagaccctgtggaatgatccagtgcgttactcaatgagtatttcggcatttaagtctggggaaagagacgaaatgagtggttatgtagcaatcacagtaaattaaaaggaaaacaacctggggaattagacaaattgctgtacatttagaaattacatatacaataagattattttttaaataattattgtctgggctttacatcctgcttaatatttaaataatctgagccaaatgtaacagtggcccattgaacaaaaccctcaacgtttttggatttggtttccagggtatacaatacaacctttttgccatctggcatttcattcgggaatatagcctttgcttg

SEQ ID NO: 716448 - DNA, 567 bp, Homo sapiens
atggtcagttccctcctgctaggaagtagaagggatttattattttaaattggagacatttaaatttttaaattaattcatcattttttatttggcagagctaaaaactggctgtacatagagattccagtaaaatttcaatattcttcagctgccaaattccttaagaaaatatacttaaaaccaaatacttgctagagctagttgaagtcaaaaggcagaccctgtggaatgatccagtgcgttactcaatgagtatttcggcatttaagtctggggaaagagacgaaatgagtggttatgtagcaatcacagtaaattaaaaggaaaacaacctggggaattagacaaattgctgtacatttagaaattacatatacaataagattattttttaaatawttattgtctgggctttacatcctgcttaatatttaaataatctgagccaaatgtaacagtggcccattgaacaaaaccctcaacgtttttggatttggtttccagggtatacaatacaacctttttgccatctggcatttcattcgggaatatagcctttgcttg

SEQ ID NO: 716449 - DNA, 652 bp, Homo sapiens
tttttattcttaaataaaaggaattccttcaggtctacttttcttattatacaaatacagtacattgagtaaataaactaacacacataaattgaaaataacaatttcttgatctatggaatcccaatttaattatttctctatagagcctactttggagaccatattatataacaatttacaacccttttagttttaaaaactctggtctttaatatacaataactttttctgckgagtagaaaaagcaatcaggtaagtggcacattaaagaaaaatattttgacattttaaaaaagcttaattttaagcaatttcaggttatttgttctacagataccccagattccatccagctatgtagttttctttacttgcgagcacatggaaaatagatgctgagttgttagagtaagatatatttaacaggtagttttaaaaggaaatataatatttatttttagagggtcgagtttaggtattgaaattgaggtcctactacttcttctttttccaaatttctttgagttgataatcaataataaagcaaataagataatacttttataaatcaccaagcaagtttccagcaccctatattgtaagtatagtttctctgatacttgctgagtggagaaatacagttcacaca

SEQ ID NO: 716450 - DNA, 605 bp, Homo sapiens
tcatactactgtaaataatattgatacggccgggtatggtggctcatgcctgtagtccgagctctttgggaggctaaggtgggcggatcacctgaggtcaggggttttagatgagcctggccaacatggcaaaaccccatctctactaaaaatacaaaattaaccaggcgtggcggtgggtgcctataatcccagctactcaggatgctgaggcaggaaaattgcttgaacctgggaggcagagattgtagtgagctgagattgcgccactgcactccagcctgggcratagagcaagactctgcctcaaaaataaataaataaaaataaataaataaataaaggtacacagatgacaaaattatattgaattgataaatgcagtgaataccagtaagttcagtgcattagttcagagacataattactggcctatcatgggaaaatatgttggtatgttagaattctaagtcagaatgagctaaactctatatgattagccttttagtagagaggtcatttcagatataaccagtcaagaataatgactcccacgggttggtaacagctatgccccatccaagtgtatggaacaaacctagtga

SEQ ID NO: 716451 - DNA, 621 bp, Homo sapiens
tgcatcttagaaagtttactctagctatactgtagagaataagtgaaaagggggcaaaacttaggaggatgcctgcataatttatgtgggcagtgatgtgaacctgaacttcattagtgagagtagaaagaaccggaggaaattaagtataattcaaatggtagattcaaagtagttaactgcatctaagaaaagaaggsaataaattaaagataacaggataactcattaaattccagcttggtcacctgagtaaatgggaatgcgattcattgagctagggcatatgaaaggaggtttaggggtgagataataatatggaatttggggaacttgtgagaaatcaaagtggaaatgcctaataggctgctagataaatggatctggaccttggtaaagtgctctgggccggaaataaatgttacaagtattaatgaaagtaaccgggtttgagaccagcctgactaatatggtgaaaccccatctctgctaaaaatacaaaaattagccaggcgtggtggtgtgcacctgtagtcccagctactcaggaggctgagacaggagaattgtttgaaccctggagggcgaggttgcggtgagccaagatcacgccactgcact

SEQ ID NO: 716452 - DNA, 1603 bp, Homo sapiens
gcagtcaagagattgtgaaagatgtgtatacaaaagaggggccataccacagcagtaacttgaccacagcagtaactcaatgcatgatttgtgttcctgtatcttttaatggcacaagtcctgggacctttgatgaggctctgtctaatcatagaaggactctgccaccagaataacctagtttgcataaactttcctcgtgttttctttcactccgctatccagactgtagggtgtgccttacattatttagctgaattgtcaacaggtgtactgagtaaactgtttgatttataaatatctctgtatctaatcatgtatcaatttctcaaattatggtgtttcacatattggtttctctaaagattatttcatttcacaatttgaggcagttttgtgaaaagaaacatatacatatattttaatttctgcctgaaatatacaacattgaatttcattcaaatatttaatgccttcacaaataaaacgtagctagtgtttcatgttgctgtttagaagtttattgaaatatggcagataaaatgctataragatattattatgtttaataattcagtagttgcttcaaatatgctataaagtgttggaatatggccagttaactttaaaatatagaataataaaataattggatttaaaattgcttcatattatttttgtttaataaaaagacaatccatgtcttaggtgtacccttttaaatcctatctactttctgattcttaggattcttaaaaagaatattgtaatgactgaacagaaatattatatctgattttgtactagaaaattgaagcagcatgggatcatggctaagtaagagctttatagcagtagcaaatagttacatgattactgaagtatagctgtcactggaaatagaaagctgcaaggaacctatcataaaagtagcaatttcagtttcactagtgtttaaaattaaagcctagtaattcattgtggatgtatttcctcaatggtttcaggaaagtatcctgctttcactgagcattttcactttgttccttatgtgtttcctttcataatgaaaaagttgtaatttcagattggtaaaacaattgttaggactttgtgaacaaacactcaaaaagttttgtgtcatgaaataatgattagtcaattgtatttattgttataacacactatgttaaaaattcactgccagatgatccacattatgttaggtaaaccaatttaatcaacagtttcctcttttgacatataattagctgatggatgaatttagaggtgtaaaaaaccttcaaataaaagcgtttatggaaaaaaataatggctgtttatggagttttgcatacatgtgttactgtcttaagaagctgaaatgagatttaagaaattgaacaatatttaaagaaaaagataacttttttttttttttttttttttttttacaatttggtttaccgtgaaaagcatttggacagatgtatctattgacatgtaatattgctgagggacattgacaaacgtagtctctaaaaaatttaggggagtttataaaaataaccacagtttgagataaattaaagtaaacatagaa

SEQ ID NO: 716453 - DNA, 977 bp, Homo sapiens
tttaaatttaacaggagaaatacgtcatgtccacaggtcatatttttaccagcagatggctcccctggtgttttcccctactaaggattcttacaggttgaaatgccaaatcaaacaataccaaatgtaaatatgtattctctacttcatgccaagattaatatacattttcacttccatctaagatacttttacaagcttcttgaaatgcattgaaaagctaacacaattacaagcacatttcaagtattaataaaaacatactttacaattttctgtttttttcaccaatggaagaagacagactgcagtttccatgcctgtatctacagagaacttcagaaaacatttttaaagtactaagtcacaaaaattaaaacctgaacagaaacgcactattgatttattaaaatttattattttaaaagacattctatttaaaatacaaacatgcaaacataaattttcaatagtattctatgtgttattaatgtagttcaattttaatagcctttgatctatgcctttccaggaactaaatggagtaatggtagattgcttggttccaatatagtgttagcaaaaagagtcaagagggaaaaaaaaaggaaagtcctacccctccgaagataaaaagctaatcagctataaaagagaccgtcaataaaatattttatttgatcttggttgagatgcggtgctttttaagaactaagtgtattttcaagttgtccattcctcaaagatatgacaattgcttcagacttagccatgcataatctcataaattccatttcattgtgacatgtagtaaacccattagtttatttwtaccatatatttttacagttttaaaaataaatgtacttacactctctttagtcacataataatcattaatattagaaattgaaaaaatagatttcatataatacagcaaatttgcagggcatttttaattcttacacagtaaaaaa

SEQ ID NO: 716454 - DNA, 977 bp, Homo sapiens
tttaaatttaacaggagaaatacgtcatgtccacaggtcatatttttaccagcagatggctcccctggtgttttcccctactaaggattcttacaggttgaaatgccaaatcaaacaataccaaatgtaaatatgtattctctacttcatgccaagattaatatacattttcacttccatctaagatacttttacaagcttcttgaaatgcattgaaaagctaacacaattacaagcacatttcaagtattaataaaaacatactttacaattttctgtttttttcaccaatggaagaagacagactgcagtttccatgcctgtatctacagagaacttcagaaaacatttttaaagtactaagtcacaaaaattaaaacctgaacagaaacgcactattgatttattaaaatttattattttaaaagacattctatttaaaatacaaacatgcaaacataaattttcaatagtattctatgtgttattaatgtagttcaattttaatagcctttgatctatgcctttccaggaactaaatggagtaatggtagattgcttggttccaatatagtgttagcaaaaagagtcaagagggaaaaaaaaaggaaagtcctacccctccgaagataaaaagctaatcagctataaaagagaccgtcaataaaatattttatttgatcttggttgagatgcggtgctttttaagaactaagtgtattttcaagttgtccattcctcaaagatatgacaattgcttcagacttagccatgcataatctcataaattccatttcattgtgacatgtagtaaacccattagtttatttttaccatatatttttacagttttaaaaataaatgtacttacactctctttagtcacataataatcattaatattagaaattgaaaaaatagatttcatataatayagcaaatttgcagggcatttttaattcttacacagtaaaaaa

SEQ ID NO: 716455 - DNA, 617 bp, Homo sapiens
tcattatgaaagaaattgtatcaccatcattctttaatcctatgtttggcttttaaaataattttcatattttttggaaatacacaaaataggccatatattataaactgcaatttttggtgttatctttttattcctcttgggtttgcattaacatccctgtctctatcaaactactgacattgttatttctccttcccttttctgtatttgtgttaacaasttgtcatttctatgtccgtataatcatgcatgagtacacacacacacacacacacacacacttttttagtacataattataagatatccctttacatcaatacattgaaaaaaaaattgctttccttataactgcctacccctaaagttaggtgtatcatatagcatttttgggggaccttgtgctatccatctaagatgtgcaagccctacaagagttaattttcacttctgaatacatgacataaacaaataccctctgtttcccatttccttattagaagttcaagttataaatgattaattcaccaggctctgaatacttgaacacaaacacactacacacacacacacaggtatctatgtctgtgtgtatgtgtatttatacacataca

SEQ ID NO: 716456 - DNA, 617 bp, Homo sapiens
tcattatgaaagaaattgtatcaccatcattctttaatcctatgtttggcttttaaaataattttcatattttttggaaatacacaaaataggccatatattataaactgcaatttttggtgttatctttttattcctcttgggtttgcattaacatccctgtctctatcaaactactgacattgttatttctccttcccttttctgtatttgtgttaacaacytgtcatttctatgtccgtataatcatgcatgagtacacacacacacacacacacacacacttttttagtacataattataagatatccctttacatcaatacattgaaaaaaaaattgctttccttataactgcctacccctaaagttaggtgtatcatatagcatttttgggggaccttgtgctatccatctaagatgtgcaagccctacaagagttaattttcacttctgaatacatgacataaacaaataccctctgtttcccatttccttattagaagttcaagttataaatgattaattcaccaggctctgaatacttgaacacaaacacactacacacacacacacaggtatctatgtctgtgtgtatgtgtatttatacacataca

SEQ ID NO: 716457 - DNA, 617 bp, Homo sapiens
tcattatgaaagaaattgtatcaccatcattctttaatcctatgtttggcttttaaaataattttcatattttttggaaatacacaaaataggccatatattataaactgcaatttttggtgttatctttttattcctcttgggtttgcattaacatccctgtctctatcaaactactgacattgttatttctccttcccttttctgtatttgtgttaacaacttgtcatttctatgtccgtataatcatgcatgagtacacacacacacacacacacacacacttttttagtacataattataagatatccctttacatcaatacattgaaaaaaaaattgctttccttataactgcctacccctaaagttaggtgtatcatatagcatttttgggggaccttgtgctatccatctaagatgtgcaagccctacaagagttaattttcacttctraatacatgacataaacaaataccctctgtttcccatttccttattagaagttcaagttataaatgattaattcaccaggctctgaatacttgaacacaaacacactacacacacacacacaggtatctatgtctgtgtgtatgtgtatttatacacataca

SEQ ID NO: 716458 - DNA, 1284 bp, Homo sapiens
aagcacatatatatagggaaaaaaaccatagtacatatgaggttccacactatacttgtttcaggtatccactggggcttttaaaatgtatccctcacacataagagaggactgctgttttccaacatatttaaccctgggcacctgaaatttaaagaagaataaagttaaattgcactttgctttgcgtgagggaagaatgaaaatatttagagcaattagagttgtcagcatttcaaacaattatttggaaaatagaagagaccttgggcactagttcatctccatgttaatggatattgtggtttaaaaggggaattagtgtgtgttttgaagctaattagagcacagttgttaaatgtcacatctgttgttaataaagcatatggttttaagatttaatcttgcacaaatctgccattttaaccaatatctgcatatatttggatctgtgatgattttattattttgtggtttattgtaattcagtatttgtggctagatttcaagcatgatcctttaaaatattttaggtagaagttttctaattagattatagtctgtgatttaaataccatttattaatatttgtatcttaagttaaaaattatgctaaacggtattctaaaacttaaaaattatttcaaccwttggataagtagttattcccggaaaaaaatttttgagttcatttttaattaaggcatttaagtactgatccttgataaacattttttaatcccagatacccatttaacatggatttggctttatattgccttggtttcaagtatatgggaattagcactatgaatcacaatatgaaatacctaagagttcacttggaatatatcaatgttaccgaagttttcctgaaatttttaggtgaagattaaatatttagggcaatatatatatgctcaattaacattatctttaattgttagaatataatttgtcttgtgtttgtgtctgcaacctagaaaggtaaaacaaaagagaaattgtgttcctctagttgacctcctttcacaactaatttgagagtattgtttctgtggagataagtctccatggttactgattacagactttttaaaggttttaacgaggttggaaggatccatagaactgttgctttgcatttcagcaaataagggcattagtcctttgagactgcacctttgaaacaataaattcacgttagatgaagtgcactgtaatatctataacatatcagcagcttataaatgtgtatatatggatgatgatttaattaaatac

SEQ ID NO: 716459 - DNA, 940 bp, Homo sapiens
caattcaagactgcctttcctatccacttcagtgcttcttttattgacataataacaaaaccaggtactgtaatcactcatctgatttttgattcctatggaattgttttcttctttgtatagttgtttaatttgacattcttaagagaggaatgtgtactggagggttctatttagccatattgctctgcctcctcgccattacataatgctttcaagtcattattgttgtagcaggtattagtactttactcttttgtatagtcaagtggcacttcattattataatattacattttgtttatccattcatctgctgatgaacaattggcttgttctcacttcttggttactgtaaataatgctgcaacacacatgggcatgaacttatttgtttgcatccctgttttcaattcatttgggtacatgtctagaagtggaattaaatacacacacacacacacatgcacacacacacacacatacacacacacacacagaaagagagaatgggagaaagtgaatttgtttcttccagaagtctataactgttatttttatttttcttctgttgaggagttacaaatttcaaataacttatttcaatcacaggtgttgttttctattcatttttcacaagcttttattaccacagtttgtttccaagcattcattagtacttttgatcatgccatatagttcatagattatgatgtgtttagcttgcaaataaaaacaaaatttacattcaaatagcacagtattaaaaaaacttgttatgttgacgattttttgcctggaacaatttctgaatttaagtgagtttcacttacttcaacacttactttgcatatgtttttaaaataaaaagaatatgatcagtaaaaacaatattgggtaatctcatgaaataataatatttgwccttagctaactttac

SEQ ID NO: 716460 - DNA, 647 bp, Homo sapiens
caataagagtacaggttatacatgaagaaatggagaaaggcagttgtaaggaaaataatggaaattcacttgagggcggctattctcatcctcaagccaccttcttctgacaatcctgaaaagtagttaatattttgttattttttwaaaaatatggctggatgcatttcaagccgtcctctttcttaaatatatctctttgcctcttcatgtttaattcatgctcatatttgcccacatttaaagctaggctggcttcacattggaattgaaaatagccctaggagcatgaggaaccctgagagcctgggtgtcctcagctgtcacaactgggtacctgcccctttgtgtttgctgccctctctgcctggctagaggcggccccaggcttcctgggcatttttaaattactgaaacaagagtattataataaaacacttaacattttaatacatagtttttttttgctattgttgcttttgtgtgttttggggatgtctgaggcctctgcccttgactgcaattggtccttctgctgtggcctgcccctctctgtgtcacaagttgcagctgctgacaggacgcaacttctattgccccatgtgccaccagaatcattgttcaagctcccagtactctcagacaga

SEQ ID NO: 716461 - DNA, 668 bp, Homo sapiens
ccccccgacacacctcactgtcatggccatcactggcaggggaggcaggaggccctgagttcagcttctgcacagtcacttccagggatccaggtgcgggctgggcagcgccgccctctcacttctgctttccaatgacaaaactgaggcttaaaattatttgaagatgaagtttcgctctcatcacccaggctggagygcaatagtgcgattttggctcgctgcaacccctgcctcccaggttgaagtgattctcctgcctcagcctcccgagtagctgggattataggcacgtgccaccacatcccgctaatttttgtatttttagtagagatggggtttcaccatgttggccaggctggtcttgaactcctgacctcaggtgatccacctgtcaaggcttaaaattcttgaggtgggaaggagatgggttggctctaaaaggggaagagcagtagtcctcatgctgctggaacattctgtgtgttgtgtgaatccatgtcagtatcctgctggtggtggttttatggatgttaccgtgaggaccctggttacaaggtgtacagatcactgtgttacttcttacagctgcacgagcctacagttaccttaaaatggttaatttttttaaaatcaggtagtttacaaaaacccttcagttgttcttg

SEQ ID NO: 716462 - DNA, 597 bp, Homo sapiens
ctagccagttttcccagcaccatttattaaatagggaatcctttccccattgcttgtttttgtcaggtttgtcaaagatcagatagttgtagatatacggcattatttctgagggctctgttctgttccattgatctatttctttgttttggtaccagtaccatgctgttttggttactgtagccttgtagtatagtttgaagtcaggtagcgtgatgcctccagctttgttcttttggcttaggattgacttggcaatgcaggctcttttttggttccatatgaactttaaagtagttttttccaattctgtgaagaaagtcattttgatctacaaaatgagagttatcaattgttcagtgtaaatactagaatccacaattattcaaagacattttaactgttccacctaacttctcwtttatttactttcctgattatatattacgaaatgaaggagactctggagtattcatagttcttttgactaaaaagttatctctgcgtatgctttagaaacaaccttcttgaaagaatgccctctgattcattgcaactcactggcacaacctagtaatgactggcttaaagtttcca

SEQ ID NO: 716463 - DNA, 612 bp, Homo sapiens
ggagatcatacattcttcctgattgtatagtattcttcctggtgtctggtgacttgtccatctagcacttctcactctttcacctggaaaagtcttttccttccgaaaaatttctgtctcccatgctaggaatctccctcaaatttgagcttcaatgctgtttaattactctgccccagtggtcgcactgattgagctgagtggagcatctgccccaagctgaaccaatcctaaggcctaaatgatcactgataactaacatattcagaactagtcattattctaagttctgcatagtaattcatttaatcatcatagcgatgcaatgaagtaggtacaattatcatttccttttattcatataagaaaattcaggcactgggatgtaaacttgtcccaagtcacaaatagaccaggttttacattccaggaatctggtttcacattccacacattcttaaccactacccrataatgcccttgatcagtttcttcatccagaaatatgcacctcttccaagatgacccaataagaattcttccttggatttgtgtctttgggtgctggagttagaagcagtgtgcatgattgcttctagaaactatgaatcc

SEQ ID NO: 716464 - DNA, 1596 bp, Homo sapiens
ttagcaaagcaagactttggtagcaccatgtgggactgctctgtccagagacattagctaaccactagtcacctgcagcctcatctttgctgggtctcaaaaccagtgagaacatagtctgactattaagaatttctctctactagttgaaggactggaaataatagtttactctcctgagtctggtgaacctgagcttgaagctggattctgtgatctgtgaacggtggtcaaatctttctgaccatgatcaagaacatctaatatgataggcttgccctgattcctggttatcacaccaatttttcactggtgtgctgaccagaatacattaatgtaagatgtaaaaccctcttcttctggccttatgtcctatttctttgccattcaaaatgtattcttgaatgccgccatacycattgaaccgcatgtagtatgcctctgtgcttttatctcattgttccacttgctctaattctttcatgcctggcaagcatctacgaatcattctttgttctaattatatactattttgtttccctgaatgcatgatttaagttcactcctctgtcccacaatagtaaattctgttagtctttgtcatctgtgttagaactcacttcctacagtatcataatggtttcattgtctatccttttctctcttcagagtcccccaggagcttggactataccacattgcctttacatcttacagtcgagggctatgtgtcaaattctcaataaatgtttcttggattggactgagtctggtcttgatttctagctctaccactaaaaatgtaggaatgcttatttgactgcacatcacgcatcaaattataacactgtctcaagactcttcctgctcttaaggtcagacctaggttatggagacctacctaaatcatacctgagttctccccatgcctttgagctttgaaagaaactgatttataattttcctggagaatgagaaaggaagaaagaaatgaggtctgcctaggcatattaatccatacctttggcacatagcagatcaagcttactctcaatcttgccacagttccaccaagaacagtttagtacactttacaactgaggctatatgctttttttaaatttattttttatattaaattggcaagttataatagtatatatttgtgaagtacaaaacgatgtgatgatatgaatacaatgtattgggttggtgcaagaacaattgtagattttgccattaaaaataatgacagaaaccacaataacttttgcaccaatctgtcaattgagaaaaatgatgagaaaagtctcaatcattttaggaagtttatttgccaaagttaagggtgcacgccggtgtcacagcctcagaaagtcctgacgacatgtgcccaaggtggttggagcacagtttggttttatacattttagggagatatgagacgtccatcaatatatgtaagaggtatgttggttccttccagaaaggtggggacaactcgaagtagggagggggcttccaggtcacaggaaggtgaaagacaaatggttgcctgcttttgagtttctgataagcttaagcctttccaaagga

SEQ ID NO: 716465 - DNA, 606 bp, Homo sapiens
gtttttctaaaaggatgtacctatgggagatttggatggtgtgtatgagtggagactgtcatcctgcctattttggacatttctattaaaaacaagtttggtgtgatccttgaggtatgagttttgacctttgctattatgttaatgtctgctgtgggtacaacttatagtctggcctctccattaacttgctgagagtttggtgtctgccttggctccttttactccacttgagctgctgccactgctgctgctgctgctactgctcctggctagaaaagctatgattagcaacctcagtaaacctccctgcagccctacattagaggcccacttcaagcccactgatgtcccccacccctattagtttgcctcaggtaaggtgtgtctctcctgggtccatgtgaaaatggctaggccccacttggcccacatgtgayctaagggtagctctggggagcagagcagggtcccctgcttttcttaaccatcttgtatcacctggcttgctatgatgtcaattcagcagggtgctgcaggccaggctggcaatgaccttccataggaataccaaatgggaagtgagacaaaagcttctctgctatt

SEQ ID NO: 716466 - DNA, 601 bp, Homo sapiens
  misc_feature 599: n = A,T,C or G
cagggaaagatgttcttcaagtggaaatgtgtgcaaaagcccagagatgggaaagagctcatctcatttgaggaagaaagggaacagggaacacaggcagagggtgggggtggtgattgagatgattgagactaaagagatgtttgagtgcatgtcatgcaggtctggtagtctgtgataagcacaagaggtcccagaaacattttaaggaaggagtggcaaaatcagatattcatgtctttggtgtggggaacagattggaaatcagccaaagcggaagtgagaggagactagaagacagatycagatgagggggtgacttggactacagtggtagaagtaaaacataaagataaagagaaatggaggatcttgaggtacattttggatgttcaaaatatgtataagactcgcccaaggttctgtgacaataagtgaaaaataggaaagaacttaaatatccatcaccatgtatgagattaaatatattaaaagaattgtggtaaatctgtatgtgcttacatgagaagatctccagatgtgtgaactgaagaaaagagatgtctcagaataaatatagtattgtcccacttatatanca

SEQ ID NO: 716467 - DNA, 601 bp, Homo sapiens
  misc_feature 599: n = A,T,C or G
cagggaaagatgttcttcaagtggaaatgtgtgcaaaagcccagagatgggaaagagctcatctcatttgaggaagaaagggaacagggaacacaggcagagggtgggggtggtgattgagatgattgagactaaagagatgtttgagtgcatgtcatgcaggtctggtagtctgtgataagcacaagaggtcccagaaacattttaaggaaggagtggcaaaatcagatattcatgtctttggtgtggggaacagattggaaatcagccaaagcggaagtgagaggagactagaagacagatccagatgagggggtgacttrgactacagtggtagaagtaaaacataaagataaagagaaatggaggatcttgaggtacattttggatgttcaaaatatgtataagactcgcccaaggttctgtgacaataagtgaaaaataggaaagaacttaaatatccatcaccatgtatgagattaaatatattaaaagaattgtggtaaatctgtatgtgcttacatgagaagatctccagatgtgtgaactgaagaaaagagatgtctcagaataaatatagtattgtcccacttatatanca

SEQ ID NO: 716468 - DNA, 655 bp, Homo sapiens
taccaaaaaaattaccaagtagtagaaaaaaattttaaagggaaaaaggaaagagtattcaaaaaaaaagttttatttttttgttaaaacatctgggccgggtgtgctggctcatgcctgtaatcccagcattttgggaggccgaggcaggtggatcacttgacgtcaggagttggagaccagatggccaacatggtgaaaccctgtctctactaaaaatacaaaaactagccagggtgccaggtgcctgtaatatcagctactggggaggctgaggcaggaaaatcrcttgaacctgggaggcagaggttgcagtgagccaaaatcaggtcgctgcactccagcctgggtgacagagtgagacaccatctcagcaacaacaacaacgaaatatcttacattttgttttcattactttcaaatccacacatcacatgtggtgaaacatgttcgaatgatgataatgaataaggaggtcacttacttatgttgttaagctgttaaatattatgtttagacatttatttcgagtgtatataataatgagccctactatggtagaatttctgtgtactgatcctagaagtctgactggatacaaaattcatacttttaaaagcaccctataactctaacactaccttgttgaaaacga

SEQ ID NO: 716469 - DNA, 474 bp, Homo sapiens
gcaatcccagcactttgggaggctgagacaggcagatcacaaggtcaggagatccagactatcctggctaacaccatgaaaccctgtctctactaaaaatacacaataattagccaggcgtagtggcgggcgcctgtagtcccagctactcggaaggctgaggcaggagaatgrcgtgaacccgggaggcggagcttgcaatgagccaagattgcaccactgtactccaggctgggcagcagagcaagactctctcaaaaaaaaaaaatttttttaatgtacattctgacagtaattatataaaaaggcatatacatatgaattaaagatgaaatcttctatatacagtgtgaaagaggtatgccgcagctgtgagactgtgcaatgacaccattagacatcatcatgatatagccaaagaagggtagactactttgcagatgaacatgctttaacaaccagtgttgaatattt

SEQ ID NO: 716470 - DNA, 1098 bp, Homo sapiens
taaatctttaatcctgaattttttataaaattgcagggtgtattttttgtttgtctgtagcaaaaaacaaagctcattacattattgatgttttaggtcttaaggcctttgtggtaatctaagcatctacttgtgaatgcattttatgtgtcagtggtcattatttataagtgactgagaaagtctgctaactataaatctggttcatttatgggactctcatggcarcaggtctaagagagaaataacttttatccaaaatgttttgttttattggttctaaattttcctaccatttatttgattcagtgacctcttgttttcaaatgatgaggcaatcaattatgtttagtatttttgttagttaccaggtaggtccagcaattaaacccaattgtagagtgatttaatttcaatgggaggaatgttttttgctgtttctctcagccagtaatctccactctcaatcctacaccccgggtgctaaaaggtttttagccatctgaaggttaggtgcatttgagcaaaaatatttccatatttatgttcttaggcagcggtccccaacccctgggccagggacctgtaccagtccatggcctgttaggaatggggccgcaaagccggaggtgagcagtggggagcaagcattactgcctgagctctgtctcctcttagatcagtggtggcatcagagtctcacaggagcatgaaccctattgtgaaccatgcatgtgaggtatctaggttgggtgctccttatgagaatataattcctgttgatctgaggtggaacagtttcatccccaaactgtactccgtgccccatctgtggaaaaattgtcttccacaaagctggtccctggtgccaaaaaggctgtggaccactgttcttaggtatctgaatgatgaaaatccaatcgtgaccactggagcagtgaaaaatatcttcattattatcttaataaggtcctgttctaatatataactgcatcactaatgtgaaagataagagaatgagatctgcagtgtatatgccactaaataaattgtagagactcaaaaaatattacttaacctcacttttattaaaagtga

SEQ ID NO: 716471 - DNA, 1098 bp, Homo sapiens
taaatctttaatcctgaattttttataaaattgcagggtgtattttttgtttgtctgtagcaaaaaacaaagctcattacattattgatgttttaggtcttaaggcctttgtggtaatctaagcatctacttgtgaatgcattttatgtgtcagtggtcattatttataagtgactgagaaagtctgctaactataaatctggttcatttatgggactctcatggcaacaggtctaagasagaaataacttttatccaaaatgttttgttttattggttctaaattttcctaccatttatttgattcagtgacctcttgttttcaaatgatgaggcaatcaattatgtttagtatttttgttagttaccaggtaggtccagcaattaaacccaattgtagagtgatttaatttcaatgggaggaatgttttttgctgtttctctcagccagtaatctccactctcaatcctacaccccgggtgctaaaaggtttttagccatctgaaggttaggtgcatttgagcaaaaatatttccatatttatgttcttaggcagcggtccccaacccctgggccagggacctgtaccagtccatggcctgttaggaatggggccgcaaagccggaggtgagcagtggggagcaagcattactgcctgagctctgtctcctcttagatcagtggtggcatcagagtctcacaggagcatgaaccctattgtgaaccatgcatgtgaggtatctaggttgggtgctccttatgagaatataattcctgttgatctgaggtggaacagtttcatccccaaactgtactccgtgccccatctgtggaaaaattgtcttccacaaagctggtccctggtgccaaaaaggctgtggaccactgttcttaggtatctgaatgatgaaaatccaatcgtgaccactggagcagtgaaaaatatcttcattattatcttaataaggtcctgttctaatatataactgcatcactaatgtgaaagataagagaatgagatctgcagtgtatatgccactaaataaattgtagagactcaaaaaatattacttaacctcacttttattaaaagtga

SEQ ID NO: 716472 - DNA, 1098 bp, Homo sapiens
taaatctttaatcctgaattttttataaaattgcagggtgtattttttgtttgtctgtagcaaaaaacaaagctcattacattattgatgttttaggtcttaaggcctttgtggtaatctaagcatctacttgtgaatgcattttatgtgtcagtggtcattatttataagtgactgagaaagtctgctaactataaatctggttcatttatgggactctcatggcaacaggtctaagagagaaataacttttatccaaaatgttttgttttattggttctaaattttcctaccatttatttgattcagtgacctcttgttttcaaatgatgaggcaatcaattatgtttagtatttttgttagttaccaggtaggtccagcaattaaacccaattgtagagtgatttaatttcaatgggaggaatgttttttgctgtttctctcagccagtaatctccactctcaatcctacaccccgggtgctaaaaggtttttagccayctgaaggttaggtgcatttgagcaaaaatatttccatatttatgttcttaggcagcggtccccaacccctgggccagggacctgtaccagtccatggcctgttaggaatggggccgcaaagccggaggtgagcagtggggagcaagcattactgcctgagctctgtctcctcttagatcagtggtggcatcagagtctcacaggagcatgaaccctattgtgaaccatgcatgtgaggtatctaggttgggtgctccttatgagaatataattcctgttgatctgaggtggaacagtttcatccccaaactgtactccgtgccccatctgtggaaaaattgtcttccacaaagctggtccctggtgccaaaaaggctgtggaccactgttcttaggtatctgaatgatgaaaatccaatcgtgaccactggagcagtgaaaaatatcttcattattatcttaataaggtcctgttctaatatataactgcatcactaatgtgaaagataagagaatgagatctgcagtgtatatgccactaaataaattgtagagactcaaaaaatattacttaacctcacttttattaaaagtga

SEQ ID NO: 716473 - DNA, 1098 bp, Homo sapiens
taaatctttaatcctgaattttttataaaattgcagggtgtattttttgtttgtctgtagcaaaaaacaaagctcattacattattgatgttttaggtcttaaggcctttgtggtaatctaagcatctacttgtgaatgcattttatgtgtcagtggtcattatttataagtgactgagaaagtctgctaactataaatctggttcatttatgggactctcatggcaacaggtctaagagagaaataacttttatccaaaatgttttgttttattggttctaaattttcctaccatttatttgattcagtgacctcttgttttcaaatgatgaggcaatcaattatgtttagtatttttgttagttaccaggtaggtccagcaattaaacccaattgtagagtgatttaatttcaatgggaggaatgttttttgctgtttctctcagccagtaatctccactctcaatcctacaccccgggtgctaaaaggtttttagccatctraaggttaggtgcatttgagcaaaaatatttccatatttatgttcttaggcagcggtccccaacccctgggccagggacctgtaccagtccatggcctgttaggaatggggccgcaaagccggaggtgagcagtggggagcaagcattactgcctgagctctgtctcctcttagatcagtggtggcatcagagtctcacaggagcatgaaccctattgtgaaccatgcatgtgaggtatctaggttgggtgctccttatgagaatataattcctgttgatctgaggtggaacagtttcatccccaaactgtactccgtgccccatctgtggaaaaattgtcttccacaaagctggtccctggtgccaaaaaggctgtggaccactgttcttaggtatctgaatgatgaaaatccaatcgtgaccactggagcagtgaaaaatatcttcattattatcttaataaggtcctgttctaatatataactgcatcactaatgtgaaagataagagaatgagatctgcagtgtatatgccactaaataaattgtagagactcaaaaaatattacttaacctcacttttattaaaagtga

SEQ ID NO: 716474 - DNA, 2164 bp, Homo sapiens
tagggtctcattttctcacttgttaaatgaggggttagaatggaaagcctccatgtgctgcagctctaattttacaagtaagcaaagcccagtctctcttaatgtgggctcctgttggccagtcacagctgcccctggaagcttctcatgtatattgtgagtgatgtgtaaaccccttcggcccttgcaaacagagggatgcagactttgttgtgtcatttcaccctggtgtgttggccaaattccaattacttaattaccttctgcaacccccacaatctcccctagggttttagttgggatggagtgcttggggttctcacaccctaactgcctgccttcctcagcctttgggatctattgatgtgtgtcgtgaaacaactgccaggccagccagggagatggcccttgtgtggggccccagcacaaggattccaggaggatgctttaatgggagtggcttggaaatcaaagacttcttatcaatgaaaatgactctggtcactccctccaagcactagaagaaacccagggtctaggcaacaccaataacaatgatgtaggagagaacacaacttggaaggaaaattacctttttttttaattttaagggaaatgaaaaaaatatggttcatgcaaaaaacaaatgcaagcctgtgtttatttccactggactactgcaacagaggtaaccttgctaattagattttttgtgtgtgattttgttattagatctttgttaatgagcttgcaccattacatcttgtctgcaatctccctaggctgctctggaggtttgcaaatgagaaagcagagagaggtgtcttcataaaacatacttacgctttatgcatacaaccagatttgccttttcatcgaaaattcaaacaccctgaaatctccatgaggcagataggctgaacatctttgacttacagaagaaactgatgctccaaatggttaaataacaacatggttaaatatggaaaagattagatagcaaataaactgttgcttgtgacctaatcttgmcttaggctactgctacgcaaatagtggttcaccaatctcttctttcttttaattttatgacagtgacagagtcttgctctgtcttacagtgcagtggtgtgatcatggatcactgcagtgttggtctctaaggttaaacaattctcccacctcagctctcaactagctgggactacaggcaggatcaaccgcacccagataatttatttacttacttacttatttattttttgtagagacctattttaaccatgttgcccaggttggtctggaagtcctggggctcaaacctgcttgatctcttatttcttttcttttttttttgaaacagagtctcactctgtctccaggctagagtgcagtggtgcgatctgggctcactgcaacctcttcctccctggttcaagtgattctcctgcctcagcctcttgagtagctgggactacaggtgtgcaccaccatgcccagctaatttgtgtatttttagtagagatggggtttcaccatgttggccaggatggtctcaatctcttgacttcttgatccgcctgccttagcctctttgggattacaggcgtgagccactgcacctggcccatctcttatttctaatcactttccatcccagtgtttttgtttctttgatcttttaattgttcccatctctttctgccttatgaattatcttgtaaaatcactgtccagaaaaccatgatgtgtggatgaagtttagttctatagcccaagcattcactaccttgccttcattcttcttacctgaagcatgggaggctaagctcctctgagctaatctactattgcatcagtctacagattattatcctaaatgtgcctgtgttgcacatttgtaaatttataagtgagtgtggttcatctttgtacactgaaatcatatgaatttacttaagaatgaaattgctagtactacaatttcttcactgacaaaataataaaacaacaggggtgttttggattgaacaaagtatattggtttatattagttcttcttgccattgctacatccagcaaaagtttctaattatgaattgctcttaaaatcaagatcaacatcacactttattatctccagaaaatcccctttcacctttca

SEQ ID NO: 716475 - DNA, 626 bp, Homo sapiens
ttctttaatgtgagcatccttcaacaggtatcataaacattcaaaagggatttactgtagtcataggaacaaaatgactattctgagaatttcattctggcaaactgaatgatgtactgctagttatatatgtctattgaaccatgactctttccataggaaaactctgagattactatcatcagagtcaccatatccataaccaactgaatgcttctgatgtattttaatctggttttgttgatagtgataaaacactggcttggctctatttggactgagtaatttaaaaatattttacattgatgaaatcatattttaataataaagttaattaaatatattgactttttcccaagtttagargcagcaactatttcacaaagaggaaaaaatgttgtcaatacttacataagattatttaatttcagttgattcttgtacgaagaactatagaaatagttgatctttcttcttttttcgaattaaaatgagcagcctctgattttccctccattcctctcagggccatctcaaccagcttgttgaaaccagaatgcacttgaggaggccaaatatctccatataatagtggttgcataaccaatgaaaatgaaatattttaa

SEQ ID NO: 716476 - DNA, 626 bp, Homo sapiens
ttctttaatgtgagcatccttcaacaggtatcataaacattcaaaagggatttactgtagtcataggaacaaaatgactattctgagaatttcattctggcaaactgaatgatgtactgctagttatatatgtctattgaaccatgactctttccataggaaaactctgagattactatcatcagagtcaccatatccataaccaactgaatgcttctgatgtattttaatctggttttgttgatagtgataaaacactggcttggctctatttggactgagtaatttaaaaatattttacattgatgaaatcatattttaataataaagttaattaaatatattgactttttcccaagtttagaggcagcaactatttcacaaagaggaaaaaatgttgtcaatacttacataagattatttaatttcagttgattcttgtacgaagaactatagaaatagttgatctttyttcttttttcgaattaaaatgagcagcctctgattttccctccattcctctcagggccatctcaaccagcttgttgaaaccagaatgcacttgaggaggccaaatatctccatataatagtggttgcataaccaatgaaaatgaaatattttaa

SEQ ID NO: 716477 - DNA, 626 bp, Homo sapiens
ttctttaatgtgagcatccttcaacaggtatcataaacattcaaaagggatttactgtagtcataggaacaaaatgactattctgagaatttcattctggcaaactgaatgatgtactgctagttatatatgtctattgaaccatgactctttccataggaaaactctgagattactatcatcagagtcaccatatccataaccaactgaatgcttctgatgtattttaatctggttttgttgatagtgataaaacactggcttggctctatttggactgagtaatttaaaaatattttacattgatgaaatcatattttaataataaagttaattaaatatattgactttttcccaagtttagaggcagcaactatttcacaaagaggaaaaaatgttgtcaatacttacataagattatttaatttcagttgattcttgtacgaagaactatagaaatagttgatctttcttcttttttcgaattaaaatgagcagcctytgattttccctccattcctctcagggccatctcaaccagcttgttgaaaccagaatgcacttgaggaggccaaatatctccatataatagtggttgcataaccaatgaaaatgaaatattttaa

SEQ ID NO: 716478 - DNA, 539 bp, Homo sapiens
tgattggttcaggaactaaggcaaaaaatttctgtcttttgaaaagcaattgcaacaaaagcaaaaattgacaaatgggatctaattaaatgaaagagcttctgcacagcaaaagaaactatcaacacagaamacagacaacctacagaatgcgagaaaatgtttgcaaactatgcatgtgacaaagttctcatatccagcatctatatgataccctaacaaatttacaagagaaaaaccaacagccccattaaaaagtgggcaaagcacacgaacagacacttctcaaaagaagacatacatgcagccagcaagcatatgaaaaaaagctcaatatcatggaccattagagaaatgtaaatcaaaaccacagtgacaccatctgacaccaatcagaatgactactattaaaaagtcaaaaaataacagatgctagtgaggttgtggagaaaaaggaatgcctatacactgttggtggcagtgtaaattacttcaaccattgtggaaaacagtgtgctgattcctcaaagacctaaaaa

SEQ ID NO: 716479 - DNA, 513 bp, Homo sapiens
gtcaaaagctgtcccagagccaaaactgagggaagggtacaggaagaaaaatacaggcaatctggggcaatacaggaagggcaggagaagcctacggacttgaatggacaacagataaatccagcagctagtcagaagagaaaaccgcatctctcccgctctgagcaaattgcattgttttgctgggaaggcagccatcattcagcagacactgtctcttcctgtcctctccctgaagaagagtcaaactcacatctgcagagtgctgtgtctgtgacctaagatgctagagtgattgtttctcttcatgcctgctgtagtcacagacactcttgtttcctttgctgactctggctcaaggagcattcctgttcctccrtgttgacttcctgttgggttcccttcccagtttctctgaattccagtttctgagatggccttttggtttgtggtcttccatttcagtagctgaaggagacactctcaggggtgcaaggaaataatattgtgaaa

SEQ ID NO: 716480 - DNA, 1098 bp, Homo sapiens
caaagaaaaaaagttttatttggcttacaacatttttggtcttgggagctaagggattttttcttaattctactctagaattgaatgtcttgccatctttttacagatatttcatctttcctttagaaagccaccaaaatgatagacttggagtcagacgcaggactgcctgggaggcatcaaagtattcagagaatcccactttttgagcagcaatctgaccagtgatggtcagcttcctttctatacagtggcagctgaaattcagtgctggctgttagctgagtctcctacctatatggagctagaaatccataggtccccttaactcctgagaagaaagcagagctttgctgccactgaataaaggatgttcctgtgtcacccacagctgctgtaggcaaaatagtgaaatcagaccttatcagctcactacgatatctgctggtgaccctttctcagatggaaaattacctccacaaataaatgtaccatgctccaccccaggggaggaagctgaccaaagtaggtggattgctggagcttcgaagtttgaaaccagcctgggaaacatggcaaaaccycatatctacaaaaaatgcaaaaattagctggatgtggtgccatgtctgtaattccctcctgcttgtaaaagcagcccctgagggtcagaacctcaagggctctctgagaaggacctctgtctctgagcgtgttaatgacacttcccagcttgtgtggtgaggattggagagccgggggactgtcgttctttctcctgattcctggatgcaactagagtgtccacctgcttcagctcagcagtttcctctccatcttccctctcttctctcctcagcacattcctgcctgagaaacaaactgtcaatcgtccataactaggaagaaaggggaagtgagcacaagctaatggctgtctgattgatggttttctctaaattatacactctttatttcaacttaaaacatgtaaatctacaatttaaattgtacacatacaatacattatgtactaatcatatattcaatatatacatatatgatttatcaatatgtaatatgagggcttttatttca

SEQ ID NO: 716481 - DNA, 1323 bp, Homo sapiens
gtggagtgttctgtagatgtccaatggatccagttggtcaagtgtcaagtttaagtccaaagtttggttaatagttttctgccttgatgatctgtttacagctgtcattgagatgttgaagtgtcccattgttattttgtgattgcgtacgtctttttgtaggccaagaagaacttgctttatgaatctgggtgctccagtgttgggtgcatatatatttgggatagttaattcttcttcttggattgtactctctatcattatttaatgttcttctttgtctttatttttattggtttgagatctgttttagctgatagaagaatattgactcctgctctttttggctttycatttggatggtagatattactctatccctttactttgagcctgttgatgttgttaaatgtaagatgagcctcttgaagacagcagatggctgggtcttgtctttttatccagattaccactctatgccatttaaatgggagcatttaacccatttacatttaaggttagcattgatattgtattcactagtgtaatggcctgtgacttatttatccaccatctccagcaccagaattgatcaatatcagtatgagtttttaccaatcctaaaaaatgcaagccattttaaaatgcattaacttacaaactttaaaatacagcaactcatttatgagtttcaaatatgagggtagtttgaaaaagtcatgaatatgtttacatatttcttgtaaatagcattggttatgcaaatctagtagttaaaaaattgaatttacctactgttatgataattcttgtctctattaaaatgtgtaggtgctcagaacattcatatgttaactttttctatatctcttcttaacttacactcacatactttgttagaaaaaaatctattaaaagatgatctactgaacatagagttaaacaatacctcctacatggggttttgctttattcatcaaattcagagctgaaaaggagaaaaagtgtgacaactgaaatttttaactagagtaagtgtcctgatagacatttaaatacaattttcatacaaatggtgggtatctcaatcaatgtagatatgtaaacatctcagtaaatgaagaatttgagttggcatttgtatagtagtttgagagctttgaatttgcaatttaattcattaacatagataatttttagagatatcaaaatggaaagaaaaaatgtaattttactgatgaagacactaagtgctaaatgttttgtctaatatatcaaaattgataaatacagagtaaagataagaactgaacacttaatacc

SEQ ID NO: 716482 - DNA, 963 bp, Homo sapiens
tgtggaatgcctgagtgattcattacagcagattctgaagtatgacaatgggccgcagaaatgactgatggtatctttttcctgatttcatttccctgatcctcttcatcccttggcctgtgtacctcgattaattagaaaccagggattttcactcatcagctgatgggtttcatgctccactctgtcacaaatctgctgcctgcactatctctcttacagccggtggctgctttaaaaactttcccttctttttctttcttttttttttttttttttttccttttttgaagcagtgctttgtgactacaggtttaggtcttttaaagattcagacatatttttaaaaaagagattaaaattaaagtagagaagattcaaaatctctgattaagttaatccctatccaaatgatacttgtccaaaaatgaactttttgaagagataataatataaatgtttcatagctctcagcaagttcttttctcaagatataataattgaagtattataaaaagactgaaaaatatataatttttatgtgtgagccccaaagcacttgtgtttatttctcatgcgtttgggggtactcatgctatattttaaaactcaatttcattcaaattctagttgaataaaccatttaataacagatatcctgaaataaatcattgaatcactattgtttctggaggaaatattttataattgaaatatgctctcccttagggtagataccaaattaaatcacatgatgatataatccccaaggaagcaaatcataattaaatagtatttcaaatgcaggatacttgataacaaaactctctaaaatctaaaataatgtgtkattcaaaggtaaaaacataaattatttttacccaagaaaagtaatagctacctgatactacaggattatttactggagtatttttctccatattaacttattattttattttt

SEQ ID NO: 716483 - DNA, 1189 bp, Homo sapiens
tcagcataaaatgtgaatctagttacatgaaccttttaaaaaactcaatgataagtaaagtgtattcatacccattgaatatcttatcacagtgtttcaatgaggtaggatgatggtcttgcaagagagattattcaacatggtctatagattttatttttaagttgaaaaagtaacctgcaatatggcaaggataatggtttctatacactcttaaaggcagtcaatagttctataaaaaggccatggaatacatgcccctttcttcccaaagtgactattataattgttttttaaaaacctgaagtgacaatggatttagtttgcatatattaatgttcaaccaaattgtctattttggatattaaaaaatcaggataggatttgtgcatatgaaacaagttctttctgtgttgttgaaattattgaataagttctgctgactatacctacttttctctgcatcagcatacgtctaggagatgtaaagaagcaaagatgatacaaaattcttctcacagagtaaaaatacaatttaatttaaaactttagaagataacctctctcaaattaaaaaattactaaaatttaggatttgtaattgtgtttcatcagcattgatcttatagatatgttgtcaataaatatcttgtaaacaaaatatactcttgtgaggcataattattgatatccaaaatcatgaaagagatcaaaacagacaaataatttttaggatagcaaatattcataaggaaatttaataattttttaaattgttaaatttaataattttttaaactgttaaatttaaaaaatttgttaaattaaaaaaagtaattgttaaattgactgaccaggtttagataacgttagcaattcacaagttcaatatttgatggaatgcacagtatgtagactatttccacaattaaatcaagatattaagcttctcatcaaaggctatgaaagattaattcattacaataacacaaaattaaaagatttaatcatgtcatttcaatagaaaacattattcaaaagaaactaacatatrctaaaagtttcttaattgttttctttgaatcactggattgtctatatttgtataacttattgtgtgctgaatagttaccaggcatgatttctaatctttccaaaaactctggaagataatcattattatcctcac

SEQ ID NO: 716484 - DNA, 669 bp, Homo sapiens
ttcgaattatcatatttctatggaaatttagttttataggtgtgtaggggtgttgtctgtgtctatatctgagaaagaaggagcagggagagagagagaaacagacaaagagacaaagacaaacagactgactcacttcaactctgtaaggccaatgtagctatttgtattccaggaaaaacaatctggagtataaaatggactgaaatatgtacctttactaataatrcttatctaacactgtaactgaagttaattgtctatgacataaatcaagagagtcacattttggaggtttctttctgtgatacttgtggatccattcactggtatttgattcatttatttatccctttagcaaacctccattaagtgtctcttgtgtggcagttttttggttttttgtttgtttgtttgtttgtgtgggtttttttgagacaaagtctcactctgtcacccaggctggagtgcagtggcgtgacctcggctcactccaacctccgcctcctgggttcaagcatttctcctgcctcagcctgccaagtagttgggactacaggcacaggtatgtgcctccacgcccggctgatttttttttttttgtatttttagtagagacaggatttcaccatgttagccaggaagatctcgatctcctgacctcatgat

SEQ ID NO: 716485 - DNA, 669 bp, Homo sapiens
ttcgaattatcatatttctatggaaatttagttttataggtgtgtaggggtgttgtctgtgtctatatctgagaaagaaggagcagggagagagagagaaacagacaaagagacaaagacaaacagactgactcacttcaactctgtaaggccaatgtagctatttgtattccaggaaaaacaatctggagtataaaatggactgaaatatgtacctttactaataatamttatctaacactgtaactgaagttaattgtctatgacataaatcaagagagtcacattttggaggtttctttctgtgatacttgtggatccattcactggtatttgattcatttatttatccctttagcaaacctccattaagtgtctcttgtgtggcagttttttggttttttgtttgtttgtttgtttgtgtgggtttttttgagacaaagtctcactctgtcacccaggctggagtgcagtggcgtgacctcggctcactccaacctccgcctcctgggttcaagcatttctcctgcctcagcctgccaagtagttgggactacaggcacaggtatgtgcctccacgcccggctgatttttttttttttgtatttttagtagagacaggatttcaccatgttagccaggaagatctcgatctcctgacctcatgat

SEQ ID NO: 716486 - DNA, 724 bp, Homo sapiens
gattgacgctttcaaattaaaaatgtctctgcgctggcatgacatgaataattgytttcagttgcttttcatttattcataagtgtattcatcaatcaaacattaattgaacatgttcaatgtgtccagtgttttagatacaaagataaattggcttccattgctcttgtcatcgagaagcttacattctattgtgagatacaaagaaatagcattatggtgataaatgtgttcattgctttcagccttcctttataaactttaaatatattctgtctaatcattatacaaaatctaaatcaatatcatataaccatgatgatccttattcaacctttaattgatcacacatctcttaatcaaaagccacactaaaattaattcactatgtcagcaataaaacttttcgttaatggagcatttttagttatgaaaacctacaagtgttttggcttccaactactttattcccactcctacacgagagtagttttcaaatccctaaggaaattttatgtatatacattaactccttatcagacacacatgcacgcacacattaaaaaccaataattcccagcctttggtcttactaaggttttcattgaattttataggattttacttcctttccctatattcatggtaccatagggaagcccactttttagtttttgtgggaattatagtctaaaaatttggaggctaagagcagaccctaaat

SEQ ID NO: 716487 - DNA, 724 bp, Homo sapiens
gattgacgctttcaaattaaaaatgtctctgcgctggcatgacatgaataattgctttcagttgcttttcatttattcataagtgtattcatcaatcaaacattaattgaacatgttcaatgtgtccagtgttttagatacaaagataaattggcttccattgctcttgtcatcgagaagcttacattctattgtgagatacaaagaaatagcattatggtgataaatgtgttcattgctttcagccttcctttataaactttaaatatattctgtctaatcattatacaaaatctaaatcaatatcatataaccatgatgatccttattcaacctttaattgatcacacatctcttaatcaaaagccacactaaaattaattcactatgtcagcaataaaacttttcgttaatggagcatttttagttatgaaaacctacaagtgttttggcttccaactactttattcccactcctacacgagagtagytttcaaatccctaaggaaattttatgtatatacattaactccttatcagacacacatgcacgcacacattaaaaaccaataattcccagcctttggtcttactaaggttttcattgaattttataggattttacttcctttccctatattcatggtaccatagggaagcccactttttagtttttgtgggaattatagtctaaaaatttggaggctaagagcagaccctaaat

SEQ ID NO: 716488 - DNA, 1692 bp, Homo sapiens
atctgggaagtacatatgtgcgaacatatacacatatacatttatatgtgcatccataagcttttgtttcaagccctcttcagattttatttttcatgcccaacttttcctctggtgtaaaatataccgctggcccctatctactgatttcttacaatctctacttagatgtctttagttatttcaaaccaaataacacaaaacatttcttgatattttgaaaagacatcaaccttcatgccaataatctggatttatctttgytgccaaaataactctcactcctcattcaattcattgttaagtcgtttttattctacttcctaaatatactttagcatctattatcttttctccatcctaatcaaagccaccattacctgtttgcttaactgttctaccaaacctcctaactaacatcgtggtttaggagcattttctcttacctcccccagtccattatccacaacatagttgcaatggtctttcaaaacaaagcaaacaaacacacaccaaatcccgttttactcttcttcagtttaaaactctttaatgggttctccatgtattttggataaagtgcagaactcttaacaaagcctaaacatccctgcatatgatcctccctccctctctacattcatttctgatcatttcctctggctttctgcctcatagaaccattgaataattttcattagctcgaatgtgtcatgctccccaccactgcaagaactttttacttgttcttcccactgacagaaattattgtggacctcctctcaacctgaccctgtcaatggttactcatcttctttgtctctgattacatatcactgtcattaaaaaaaatggccctccaaactcaattttaggttatggctccctgttttatactcttagagaactcagtgcttacttccaaatacttcttgcaatgtaatttaatgttgtttatgttttctactagaatgtcagccacatgagggtagagaagatcttcctgattcactcattgccatctagtacagtgactggttaacaaaaatgtcaaaaagctatttgttagatgtgagtatacacttctatctgagaaaaaaataggtgcagcaaaaagtaaaatctaggcaactgctgctgaatgttttctaaagtaacttcagtacatttttaattatgctctttcattattttttttagccgatccacatagctgaactaaattgtttatttttcaacccatagacattaaatgtaaaaaggagaaaaatctacaatttgagctagtggacaagccagagaccaatggcaccagttgctcttccctcagaacccttgctcctatttccaaagtagaaaatgtccttgttcttgctccagctgaatgtaggaggtgaagactttttaatacccttcttagaacaactcttggctgtagtcagttctctacggttgctttgcttgttctatgaataaatgtttttagaggtagagtcaggtctcaaagtgctaaggaaaaaataaattgtgatctgctgtcacctcacccaatgactgaatcatgtaacatgtaacatgtgacatgtaatatatacaactgtttttctgccaattttccaatcctctgcagtttccaaaagacaagattacattgcagttgagcataagtgttgggaaatattgttgtagcta

SEQ ID NO: 716489 - DNA, 604 bp, Homo sapiens
tctagcaagtggtttctttgcaatctactctgattcttccctgaaaacgggattttcttttctaccatatggccaggctgcacattttctaaacttttacactgtttcctctttaaatataaactccagtgttgagttatttctttgctcctgcctctgagtataggctgtatatagtatatacaagtatacaartatagccacaaggcaatatcatgaatacttcgctgctgcacagaaatttcttctgctgactaggcacggtggctcacacctataatcccagtacttcaataggccaacataggcaaatcactggacccaggacatcaagagcagcccaggaaacatgatgaaaccccatctctaccaaaaattataaaaaattagtcaggtgtgatagaatgtccctgcagttccagctactcaggaggctgaggtgacaggaaaacttgagcctgggaaaatggggctacagtgagccatgattgtgccactccactccagccttggtgacagagcaagaccctgtcttagaaaaagaaagagaaagaaagaaagaaagaaagaaagaaagaaagaaagaaagaaagaaagaaagaaa

SEQ ID NO: 716490 - DNA, 617 bp, Homo sapiens
  misc_feature 578, 584, 609: n = A,T,C or G
ttttctctccagcttgtttgggcagacaaaagagaaatcgagcccagtcattcttagcacagccaagaagggcagatttcaaaaggagccttgcttcaaactgaggaaaaccaaaaaggaaaaaacaacaaacacagctgcccctaccctccagtccacaaaacagtctgtgtctgacaagctgggctctgccagcggcycacccccagactcctgcaccagctggccttcctgacctgtgtgccctgggagccaggccgactcttcacacttccagtcaccgacacagtgcaatgcaacccattcttgctcaaggcctccttagaaattattcctcccattgctcgaacctgggagttggagattgcagtgagccacgatggtgccactccactctagcctgggtgacacagtgagaccctgcctcaaaaaaaagaaaagaaaagggaggggagggaagggaaaattaaaaaaaaagaaaagagaaaagaaaagaaattactcctttccccaggcaggggagccacccagagctgtccacactgcatattagggcttgcacactctagcttcccagnctctcncactccctctttctgtacacgtggncacacaca

SEQ ID NO: 716491 - DNA, 569 bp, Homo sapiens
tccccctgccttttcacccaataaaacccagctttattcaccctttaagccatctccaagcctaaattttcctggccgtgggatggacaagaacccagtctttagctgaacgaaggaaaagtcctgcaacattcttggcatgcaacgtgggggctcttgaagagatgtatcagaattccacaatgcatatggttcttgggcaagtcactgaaaygtgggtcagatgttgaaagctgctgtactatgatgtgaaaataaagcccaccgcagctcaacaaggcctactgcctctagactccatctctgtgggcagggcataactgaacaaaaggcagcagacaacttctgcagacttaaacgtctgaagagagcagtggttctcccagcacggcatttgagctctgagaacggacagactgcctcctcaagtgggtccctgacccccatgtagcctaactgggagacacctcccagtaggggctgacagacacctcatataggcagctacccctctgggacgaagcttctagaggaaggatcaggcagcaatatttgctgttctgcagcct

SEQ ID NO: 716492 - DNA, 653 bp, Homo sapiens
tggatgccacgtaattggggagcaaaaggaagccccagtcacccacaacctttcacagcacacggtgcagggctggacagtgcaaataacttacaggggtttcctcatcaaatccaaggccatttcccagaactgtgacagtagtgaaatggaatgttacattcacagcacaaaattgacagagacagaaaggacgtctgcattccactgtgggtttaaatgaaacggtgagatgctcggaggaagcgccggctgcttgctgcrtcaggaacgtttcgtaatagcaaaggcactatcgggaagcgttacgtaagctgtccattaaggacactgattaggaacgttcagaaatatgaaaaccgcatagcattgtttgctggcctcaaccacatgcagcttgctttcagcaagagggaaggaagtgatcacagaaggtgcaggtcactgctgggatgccccctgggctgagataactgaacgtatgaaactgctcccttgccaacagctcggtaagaacgcaagtgctcgcgttacaaaagaatttggcatgaagagctgttcgtcagagagcccaccagagtcgtgtatacgtttgaatccacttccaacgttttaatttacacaaatttcaggagcacactattagccgagtg

SEQ ID NO: 716493 - DNA, 1344 bp, Homo sapiens
tggactttagtcattaaaaattacctcgaacattagacacagctgcagrctatggttagtaaatgtccgcaactgatactagcttcacttcctcagcataacatgcaatatttgtattttgttcatacaaccagctgcacagctccatagagaaatgttaacagatagaatttggggaaaatttacagctttaacatttatctcaaattcaacattgaataaggcaagaatacaaacagaataatatatatgtataccccacccccatatttcagttttccaaacacactgggctgtcacagtgcacacgatttggcaccggaaagatatccgtcagtgcggcaaatgcacaattgtgtcacaccagcatctaatccaaaggggatggaacaatccacaggcacagggttcccgtggccactgccagcgtggccgcgggaacaaaagggaagaccagtgctgctcaccgtgaggccgccacgtcactaaaaaacccgtgccggcgtggccaggtctgcacgcaccggacacctgcaggaggcgctgcgcatggcggataatttccccagtgcaccctggagtggaacgtggcgtgagagcggcgttggggctgcccaaagcaggtgaagcctcacacaagcgtggggggctccgcggggacctggaaggaacccaccagatgacgtcagcgggacccaacagtccaaccacctacaacacagggctgggctctgccaaggaaagcaggcggcaagagctggtctgctgctgagagtgggcccgggcccagggagagccagcggtgccctccctccgtggcgtctgcacctgagtcccagttcccgcagggccccagcggggatgccacagctctgggtgtgaacattgtcatgctctcctcagcaatctcatggcattagaatgaacctgtgtgtgttacaggtggaagaggggcaggggcccttcccagcagggagctggccgggcgctcaccacacctgaccctcccctccgagagcctgctgccaggccggggctctttaaagtgggaagttcagtgacctattttagggtaagaattgctgcttcgtgtattggtatgaaaggactggaaaaaaattaatgtctctcatttaaaattgggcaatcattaaaaaacactatttgattcagcagctttgtacccaaattctaaactgcaggcaccagagtggctggcagcacacggtcaagtcacgcgaccaggagcctttagccctgtgcaccaaggaccactttaacacccctaggcacggtaggcacagtgggcacggtgttcacacctgtaggtccagcactttggga

SEQ ID NO: 716494 - DNA, 629 bp, Homo sapiens
ccgcgaactctaggaatgatctgaagaaagaggctatggtatattttaaagttgcctttgtgagtgatgattcacctccggccaccaaaagcataaaaggataggctcagggagagatcaaccgcacgggggacctcacccaaccacaggctcagggacagatcaaccacacgggggacctcagggactcagggacagatcaaccgcacggggacctcacccaaccacgggctcagggacagatcaaccgcaaggggacctcggggactcagggacagatcaaccacacggggacctcacccaaccatgggctaagggacagatcaaccgtacgggggacctcagggactcagggacagatcaaccgcacgggggacctcagggactcagggacagatcaaccgcacgggggacctcacccaacctgtgcaggagacctcacctcacctgggcgcctgttcttttcggtacctggaactggtgttgggacgatgtgtctgtgagatccttaaacattctgaagatgacttgtttggttttttattttgaggatttattttaaggagtgaaastgcccggcaggcggctgcatatagaacaggcatctgatgtttgttgacttgagagaa

SEQ ID NO: 716495 - DNA, 671 bp, Homo sapiens
agagtgaaacggcaattacagtactgatctggtccttgcccgaggagccagaatggagaggcagaaccccaaccacctcctgcagctgggagggcagcatggaagccgcgccagagccgaggggttttctaatcatgctcgtgtggtttcaccagggagggtcagttccgtgcttgcgtggttctctaatcgtgcttgcgtggtttcacccgtgagggtcagttctgccgtgcgcaggtcatttagcaaaaaaaaaaaaaccacaaaaacccaggggtgctaactccagtcctggcccccaagtcttcagcagctctgggtcccgacccgctgagcgccacatccagttgcccacagggggagacacggatgcagcacgtatcctggatgacgtggctggccgccagcaacaccctgactggtcttagtggaaaagcactttgggtttcttcttttaattagaaaaaaaaactatcasgttaaaccacctatgttcatacaaagagcacgctgcaaatccgcagatactaacatggccacggcagacagactccttggagctggctcagctcagccccgggctagagggtcttcaggggagggcagtggaaccctcccagaggcccccagtgcaccgccttccccaggcctgaccccagagcttcatgaca

SEQ ID NO: 716496 - DNA, 671 bp, Homo sapiens
agagtgaaacggcaattacagtactgatctggtccttgcccgaggagccagaatggagaggcagaaccccaaccacctcctgcagctgggagggcagcatggaagccgcgccagagccgaggggttttctaatcatgctcgtgtggtttcaccagggagggtcagttccgtgcttgcgtggttctctaatcgtgcttgcgtggtttcacccgtgagggtcagttctgccgtgcgcaggtcatttagcaaaaaaaaaaaaaccacaaaaacccaggggtgctaactccagtcctggcccccaagtcttcagcagctctgggtcccgacccgctgagcgccacatccagttgcccacagggggagacacggatgcagcacgtatcctggatgacgtggctggccgccagcaacaccctgactggtcttagtggaaaagcactttgggtttcttcttttaattagaaaaaaaaactatcaggttaaaccacctatgttcatacaaaragcacgctgcaaatccgcagatactaacatggccacggcagacagactccttggagctggctcagctcagccccgggctagagggtcttcaggggagggcagtggaaccctcccagaggcccccagtgcaccgccttccccaggcctgaccccagagcttcatgaca

SEQ ID NO: 716497 - DNA, 624 bp, Homo sapiens
tgcagccaagattgagagtcactgagtgaaagacttaagtgatgctggtcaggattgagacaagactggaaaccatgaactgatccatttaccattttacccagttttccaccacactgttcagctacctgggtatccctgcagaggattactgtaggattaatttggaattagggctttaccaggtaaatatggaagtaggwtaaataaaaaattcagacactacctgggtatccgtgcagaggattactgtaggattaatttggaattagggctttgccaggtaaatatggaagtaggataaataaaaaattcagacaccaaggcaaaattatagtctctgagagagtgaagagaaggaggtataagagagctgaacagccagagacctttacagtgctgtaaaggttatcacagttgagtcagacaaggaactttaaggccgctcacaagtcggcatttgaagggacgtggaagtctcccagagcaacagcaggagtaacgatggagaaacgtcaaagtctctaaggcatgtgggattgaagcgaagaacaagagacaaagaagactaagaaaggcagaggcaacaaagcccaacagtgagatgttcaaaaaaggagagtt

SEQ ID NO: 716498 - DNA, 1277 bp, Homo sapiens
gaggtcaatatttgggtcaattcctgtttggtactatggttagcaacgctgcagtgaacttgcttatacatgcgcctggatgtacataagctctcagtttccacagtgtatgcatctaggatggaaatgtctgcatcataaagctatacatatatccaactctaatacataatgcaaaatgtttccaaagagcttgtactgattcacactctcagcagtattttttttagagttcccgttactccgcagtttactaacacttagcattcactttttagccagtaatcaaagttttagtcagtctggtggtgctattaatcagtattgtggtattcgtttccactttcatgattaaataaagaagttgaacatcttttcatttctttttagcctctttggtgatatgcctattcaagtatcctgcacacgtttctattgtgttgtccgccattgctaatttccattcccctggctcaccctatctaaggttcatcattactttgctttccttttatttagttttattgcacctatacatattcctaaaagtactttattgtttttctaatttcatataaattataatttcatgtgagttataatttttatactttcatatgaagggcattctgttgcatatacttggagatttccatttgcctaatattactatagttttttagagtttatattgtctaatattaagtgtctagtcatataataacaccagttttcttttgttgatattgcatagtatgcctttttccagacttttacttttgctatttctacattcttttgttttagatgtgtcttttgtaaacagcatttagttgggtttttatagcctgacgacctttgtctttaattgaagcatttattcaatttacttgtaatataattgtttatatatttgggattgaatttaccatctttactttctttccagaccaaaaaaaaaaaaagaaccttcagagtcttcaactgacttaacacactctcaattttaatgcccttgttgtttaactctgtatatttttaaatctcacaagtcaatattcatttagarttgcccccattttcactattttctttgctcttaatttctttttaagcctcacacccctcacctgaggccattttcctccaacctaaagcacatcctttagaaccccctttagtttgggtctgctgttagcaaatgctttcagtttttatatgaaaatgtctttatttcatcttcaatcttgatagacacttcactgggtatagaattc

SEQ ID NO: 716499 - DNA, 665 bp, Homo sapiens
cagtacaaagacttattataaaatgaacaaacccatgcaaccatcacctagggcaaaaattagaaaattaccacaagcaacccagaagcaaccttcttgctacctgccaatcattactctcactacctcagaatgtacccaccaatcttgacttctaccaccacttcctatttttgaaatttatataaatgaaaacatatttttaaaaatttctggcttctttcactcaatgccatacttataaaatgcaatcatgctgttgcatgtgcaataatttagccattttatcacrgtatagtaattcattttataaatataatcaagatatgtctatttctattttaccattagtagacatttactattgaaagtcttgaaaattatgagcaacttaggatctatgaattctatcggtagctgtgaaattatcttggcattaaactattacaaataacactgctttgaatattctttttttttttgaatttcttatatgtctcttttggttgatataagtgtttgactttgtcagacacatacctatggagtagaattgctggctatatggatcaactgtgccaggaactagttgatgcagtttcatgcccaaagctttgatatattttgaaaaagttaaataatgacttttttttacatttaccagt

SEQ ID NO: 716500 - DNA, 1453 bp, Homo sapiens
cattgtttggccataaaactacacagttctccttatacttttaaaaccagctaccagaaccaatttgctggtcctccacatcacaatcctctcaataccttccatcccctttagagagcttactttcaatatttgaatcttttgagtggcattctccccaagtttatttttagtgaacttttactttgaaataattatacattcagatacagttgtaagaaataatagagatctcatatatcctggtttcccccaatgttaacatctcacaaaaatatactacaacatcccaaacaaggtattgactttgatataaatcaatcttagcttatacttccccagttttacttgcactcatttgtgatttagatcaaagcaatcctatcacatatgtaagttcgtgtatctaccaccagtgaaaaatgcagagcagtaccaccacaaggatctcctatttctctttttataaatataaccatctcactctcttatgtaccctccaccaaaaattcaattttcttttccttttgcacattaaatcaccaaaacatatataaaccagatatataaatcaccaacacttatataaaccttataaataattaacatgagtgtaacttcaaaatttatacattttctggccaggccgcagaggctcacgcctgtaatcctagcactctgggaggccaaggcagccaaattatttgaggacaggagtttgagaccagcctggacaatatggtgtaatcccgtctctaccagaaacacacaaaaaaatagttgggcatggtggagtgaccctgtaatcccagtaagtcaggtggctgaggcacaagactctctcgaacccagcaggcaaaggctgcagtgagccaacatggcagcaacagcaccccagcctgggcgacagagcgagactctgtctcaaaaaataaaagtcatattttttcaacktcataaaaaactgaaatattattcaagttaaaattagtcacaagtagaaaaaccaagacaaaattcttttttttgagacagggtctcactttgtcaccctccctggagtgcagtggtgtgatcatggctcactgcagtcttgacctcctgagctcaagtgttcctcctgtctcagcctcctgagtagctgagaccacaggcacattccaccaaaaaattagcattagctaactttatgaattatttgtagagacagggtcaccctatgttgcccagggggccccgaactcctgcgctcaagcaatcttcctgccttggcctcccgaagtgttgtgattacaggaatgagccactgtgcccagcctccaaaattcttaaatcatgttcagaaataaaaaatatactttaaggccgggtgcagtggctcatgcctctaatcccagcactttgggaggacgaggcgggcggatcatgaggtcaggagttcaagaccagcctg

SEQ ID NO: 716501 - DNA, 1168 bp, Homo sapiens
tacacctccccccagcccccacaatgaacaaattctgacttacgtagtaattattccaggtttttctttatgcaaccatctatatacgttaagtgtacctaaaaaatcatgtttcatttgatctgttcttgagttttgtggagtcatattgtgtatgaaccctcacttctttcattcagcattgttttctagatgtattcataaagatgtgtatggcaatcatttttttctctactatatagctacttttcactactataatgatgacatagtcagctactgatagatacttcaaatattttcaatttgtgactataatgaattattctgctacattattacatactgctcctggtgaacacatctaaattcctccagggtagtgccagccaatacaaacacaatgtaatcttaaatttcccataactacaaaaaatatacaagatgtacattttaaataatctatttcgacatgcaataattattaaaatttgagatattttatattcctttttgttactaagtcttcaaaatccagtattttacatttaaaacacatcctatttkgactagccacatttcaagggctcaataactacatgtggttaatgtctactaaacaatgcaactcgagaatatattcctgagtggaaatggtggatcatagcatatggtttaccattttttattcccacagattgaggttcttgctccaaatactcccaaactctacttaccatctgatgtcttaacattgctaatataagttttatgaactatttcattgaaatattttcatctccttgactaataatgttgaacatcttttcatgttctcagtcatttagacttcttcttttgtaaaaagtttgttcatgtcttataagcagtatactgaatcttttgtgtgtgtgtgtgtgtgacagtctcactctgtcgcccaggctggagtgcaatggcacgatcttatactgtttttttgtttttttttttaacagttatacagttacaagcatttagtaaatctactttatggattcttttcttctattttaagagatgggcctcactatattgcccaggctggagtgcagtggccattcacaggtgcacactacatcgcagctgtgatcatcacacactacagcactgaatttttgggctcaag

SEQ ID NO: 716502 - DNA, 578 bp, Homo sapiens
ttgaactcctgacctcaggtaatccacctggcttggcctcacaaaaggttgggattacaggcatgagccaccatgcccagctgtttagcctttttatacctaggtaatgcctgactctcattcacgttctcatgaattctaatttcttatgtacagctcaggtaccaaagatatgttcttctcataagtgttctcccccaccactaccctttccacaaatatttgacttattattagctctattctctggaaatatttgtgcattcctgaaattattcattccaatcataaaaagatatgttaataaaatatctatatttgaagttattatagagtttgaagatttttaaattgtcatagcactatctagactttcttttccactccattttgaagttatatacttttctagaaatctgtctttataaaaaagttcaaatttattgctctaaaattacattttaaaatttctgtatggttagtaactatatcccctcytgcattccatgtaaaatatctattttctttttttgttatgataagcttaattctagcctttttgaaaaattaagtcctga

SEQ ID NO: 716503 - DNA, 597 bp, Homo sapiens
agaaaataagctctttgcccctccctcctttgatttgcaaatattttctcctaacctgttatctttctttaggtatttttagaagttttaggttcacagcaaaaccaarcagaaagtacagagtataccatagaccctctgcacccaaacacatacaacctcccacactatcatcctgcactagagtgatacattagttacaatagatgaaaacactgacagtattatcaaaattgtcctgtacattttctatgggttttgagaagtgtacaatgacatgtatcgtcatcagaacatcatagaaaatactgtcactgccctaaaaaacctgtgctctgtccattcatctcttccccttccaaccattggcaatcactgatctttttactgttactatagttttgccctttccagaatgccacgtagttggaatcatacagtatgtagtcttttcaaataggcttttttcacccaatataaactcagtctttgtatgaatccatgtcttttcacagcttgatagctcatgcatttttgagctctgagtaagtccattgtctgaatgtaccacagcttgtttatccatccacctattca

SEQ ID NO: 716504 - DNA, 597 bp, Homo sapiens
agaaaataagctctttgcccctccctcctttgatttgcaaatattttctcctaacctgttatctttctttaggtatttttagaagttttaggttcacagcaaaaccaagcagaaagtacagagtataccatagaccctctgcacccaaacacatacaacctcccacactatcatcctgcactagagtgatacattagttacaatagatgaaaacactgacagtattatcaaaattgtcctgtacattttctatgggttttgagaagtgtacaatgacatgtatcgtcatcagaacatcatagaaaatactgtcactgccctaaaaaacckgtgctctgtccattcatctcttccccttccaaccattggcaatcactgatctttttactgttactatagttttgccctttccagaatgccacgtagttggaatcatacagtatgtagtcttttcaaataggcttttttcacccaatataaactcagtctttgtatgaatccatgtcttttcacagcttgatagctcatgcatttttgagctctgagtaagtccattgtctgaatgtaccacagcttgtttatccatccacctattca

SEQ ID NO: 716505 - DNA, 625 bp, Homo sapiens
aattggcaaatatatttgtaaaacatatatcacttgcaaaaggttagtattcagaaaatagaaataagttgtttaaataaaagacaacccaacagaaaagaaacagtcaaaagacacacataagaatttcaccgaataaataagatgcagcaataaacaaatgctcaactttcaacataagtaaggaagtgtaaacttaaaccatgagatgccgtttctactcaattaaaaacttggataatatcaagtgtgagtgataccgtagagcagtagcaactctcatactttgttgttgatatgrtgaatttcattgattgatttttgaatgttaagccaagtttgcattcctgagataaactacacttggttgtgatgtattatcccttttatatattgctggatttgatttgcttatattttgttaaggatttttgtatctctgttcatgaagtattcgtcttaaatgcttgtgagaatttaccaaaggaagccatctggacctatttatgttctgtggaatgttgtaaactataagttcaatttctttaatagaaacagagcttttctagtcatctattttttcttgagttaactttgatattttgtatctttcaggaaatttgtc

SEQ ID NO: 716506 - DNA, 615 bp, Homo sapiens
atcatggattctggtatccatggggcatcctggaaccagtcccccatagatactgtggggatgactgtatactatcgcttgctgaagttttcttaaaatattagtttgagaaatcacctttctcctgttgaaatgctaatcagatgtacttaatttttgtaaattattaaatcccatcaaaatttcttgaattattccaggattactcaccttggtctttttatatagctaaattattgtttttagtcttgttttggtcattcaacaaatagttattcattatgtcctatgtatcaggccctatcctaggtgcttgggaaccatctatgagccaactggaaaaagtctgtggtcttgacctttgttgttgcacaaggagatagtgtaataagtcaataatggttagggagagggccacctgagaaggtgacattggagcsaagacttgaaggagatgagggagtagcccagtgggtaccttggggaagagaattccaggcagcaggaacactccttgcaaaggccctgaggcagggcatgcttgacatatttgaggaacagcaaggaggtgagtgtggttggagctgtgccaggagagatgagctcagagctgtg

SEQ ID NO: 716507 - DNA, 615 bp, Homo sapiens
atcatggattctggtatccatggggcatcctggaaccagtcccccatagatactgtggggatgactgtatactatcgcttgctgaagttttcttaaaatattagtttgagaaatcacctttctcctgttgaaatgctaatcagatgtacttaatttttgtaaattattaaatcccatcaaaatttcttgaattattccaggattactcaccttggtctttttatatagctaaattattgtttttagtcttgttttggtcattcaacaaatagttattcattatgtcctatgtatcaggccctatcctaggtgcttgggaaccatctatgagccaactggaaaaagtctgtggtcttgacctttgttgttgcacaaggagatagtgtaataagtcaataatggttagggagagggccacctgagaaggtgacattggagcgaagacttgaaggagatgagggagtagcccagtgggtaccttggggaagagaattccagrcagcaggaacactccttgcaaaggccctgaggcagggcatgcttgacatatttgaggaacagcaaggaggtgagtgtggttggagctgtgccaggagagatgagctcagagctgtg

SEQ ID NO: 716508 - DNA, 615 bp, Homo sapiens
atcatggattctggtatccatggggcatcctggaaccagtcccccatagatactgtggggatgactgtatactatcgcttgctgaagttttcttaaaatattagtttgagaaatcacctttctcctgttgaaatgctaatcagatgtacttaatttttgtaaattattaaatcccatcaaaatttcttgaattattccaggattactcaccttggtctttttatatagctaaattattgtttttagtcttgttttggtcattcaacaaatagttattcattatgtcctatgtatcaggccctatcctaggtgcttgggaaccatctatgagccaactggaaaaagtctgtggtcttgacctttgttgttgcacaaggagatagtgtaataagtcaataatggttagggagagggccacctgagaaggtgacattggagcgaagacttgaaggagatgagggagtagcccagtgggtaccttggggaagagaattccaggcagcaggaacactccttgcaaaggccctgaggcagggcatgcttgacatatttgaggarcagcaaggaggtgagtgtggttggagctgtgccaggagagatgagctcagagctgtg

SEQ ID NO: 716509 - DNA, 615 bp, Homo sapiens
atcatggattctggtatccatggggcatcctggaaccagtcccccatagatactgtggggatgactgtatactatcgcttgctgaagttttcttaaaatattagtttgagaaatcacctttctcctgttgaaatgctaatcagatgtacttaatttttgtaaattattaaatcccatcaaaatttcttgaattattccaggattactcaccttggtctttttatatagctaaattattgtttttagtcttgttttggtcattcaacaaatagttattcattatgtcctatgtatcaggccctatcctaggtgcttgggaaccatctatgagccaactggaaaaagtctgtggtcttgacctttgttgttgcacaaggagatagtgtaataagtcaataatggttagggagagggccacctgagaaggtgacattggagcgaagacttgaaggagatgagggagtagcccagtgggtaccttggggaagagaattccaggcagcaggaacactccttgcaaaggccctgaggcagggcatgcttgacatatttgaggaacagcaaggaggtgagtgtggttggagcygtgccaggagagatgagctcagagctgtg

SEQ ID NO: 716510 - DNA, 631 bp, Homo sapiens
tttctgaaggaatatgtattgttgaatgcttgggtcagagttgtaagagttgaatgggtaaaaacataaagtgacttactggagtgataagaatgttctatattttgatttagagctattaaatgagtgtttacctttgtcaaagttcagaaactgttgacttgaacgaattcttttttaacayatctaaattacatcttcataaaattactctaaaatctgtgtagagggttataagatcaaaaactcaaacagtaaacacatctcaaacaaacataaataaaataaacacaatcttagatataattctgtgaaattttgaattaaaaattgttaacatccttctagagataatccacaggtcaaccatgaggggaatgaggaagagtctggctttagagcagtagtttttcttcaacaccaaacaccagaagacaataaggtcacaatataacagtgtgtgagaccccttaaatacatccttagacaagtggtcattaatatgtcaaaggaatattttcagataagcagctctctaaaagtttatcaccaatgtctgctgcatcattaactctaggcagaattgtaaatagagaatccaccatacagaattatttgaaggcatgcaaca

SEQ ID NO: 716511 - DNA, 631 bp, Homo sapiens
tttctgaaggaatatgtattgttgaatgcttgggtcagagttgtaagagttgaatgggtaaaaacataaagtgacttactggagtgataagaatgttctatattttgatttagagctattaaatgagtgtttacctttgtcaaagttcagaaactgttgacttgaacgaattcttttttaacacatctaaattacatcttcataaaattactctaaaatctgtgtagagggttataagatcaaaaactcaaacagtaaacacatctcaaacaaacataaataaaataaacacaatcttagatataattctgtgaaattttgaattaaaaattgttaacatccttctagagataatccacaggtcaaccatgaggggaatgaggaagagtctggctttagagcagtagtttttcttcaacaccaaacaccagaagacaataaggtcacaatataacagtgtgtgagaccccttaaatacatccttagacaagtggtcattaatatgtcaaagraatattttcagataagcagctctctaaaagtttatcaccaatgtctgctgcatcattaactctaggcagaattgtaaatagagaatccaccatacagaattatttgaaggcatgcaaca

SEQ ID NO: 716512 - DNA, 1323 bp, Homo sapiens
ttgcaaagtctagctacctaattttattttgaaatattaaatgtaaggtctacttttctgttgtcaaaaataaaatcagatccagttagaaaatgtaaaagtttattatcttgtcatcaaggaaggtacactgtgatccaggagacattaaactgaaacagtaattattattattctgttttgcaaagtctagcttcctaattttatttcgaaatattaaatgtaaggtctactttgttgatgtcaaaaataaaatcagatccacttagaaaatgtaaaattgtatcatcttttctttaaggagggtacattgtgatccaggagacgttaaactgaaagtggtgagaggctcagaagcacagttacaggatggtttataaagtaaaaatgaagaaatcatttaacctttacaatgattagttattacaatgacggtttcctgatagcaggagatttgttaaagatgactgctttatgccatttttggaaggcaactcaagttttctttatgattattagagactttacaagaaataaccaaagttaagttttgcttatgttcagaaattaagctggcttgttcacgttgttgctaacacaacgttcttggctttcaatgcaatagaaattaacatgaagtctggcacacttttcctagacaagattttgaacacttatgcctggaaaggttggrgctaagggaaacagtgcaggaggaagggtttcctagttggctccccaaggtgggtcctagtggtatctagaggagggtaccataagtaagtaatgagctcagtaagcatccttacatgtggtgggtagagcgctggtgcacaggcccagtgagaaatcatgctaacacatgcattgcatggcatgattagaaaacagtgggggagatgttagtattacaatgagttaaatgttagggccatcaacctcccggtcttgtgtgcatgatggtaggatcccctgccttgggtaagatttgtagccagtgttgcgtgtcttagcgttctcagatattttgcaaggtctcagggggtttcgggccagtgcgggtgggctgagtcctgtctccagtccatctcaatgtggctttctctgctgtgagaagtcccatgactggtctccatcttattatatttaaagctggttacctcacatttctgaagaaactcatctcatcctgagctattgaacggacattgtttgaataaaccttggcattatgcctatttcagctttcattgaaggtgcaatcttaaatgagttatgattagcacatcatctttttccctcaaatataataaaaggcatata

SEQ ID NO: 716513 - DNA, 609 bp, Homo sapiens
tattagctaaagttgaaatagaagcatcccaactaaatgattaaaagcgcatctactagattcagactgcctggattcaatgctaaatctaccattcactagttatgtgcccttaggtagattgcttaaccatcgcatgcctcaaatccccacctgtgcaatgccagtagtgataagagtacctacctacaggctggtagcaaagactaaataatttcacccatgcggaggacttagagrattggcacatagtgagtacaaccttaagtgttaagtagtggtactcagaaaccctgtgatgcaatactttatgatgtcaatgtaaaggaaactgaaaagagtgttgaaagacaatggtcatggaactgaacagatgagcctctgattcctgttctgccactgataaaccctatggtctttgtcatttactccccttcctgggcctccctagggagtaatgaggctagaagaaatgatacctgggaaggtgagacagatagactaagagcatgttctagagtcagacagattcatgtagacaccacagctcagcaacatattaaccatttgatgttgaacgttgtaaaccaaaaaagtacctgagacaag

SEQ ID NO: 716514 - DNA, 609 bp, Homo sapiens
tattagctaaagttgaaatagaagcatcccaactaaatgattaaaagcgcatctactagattcagactgcctggattcaatgctaaatctaccattcactagttatgtgcccttaggtagattgcttaaccatcgcatgcctcaaatccccacctgtgcaatgccagtagtgataagagtacctacctacaggctggtagcaaagactaaataatttcacccatgcggaggacttagagaattggcacatagtgagtacaaccttaagtgttaagtagtggtactcagaaaccctgtgatgcaatactttatgatgtcaatgtaaaggaaactgaaaagagtgttgaaagacaatggtcatggaactgaacagatgagcctctgattcctgttctgccactgataaaycctatggtctttgtcatttactccccttcctgggcctccctagggagtaatgaggctagaagaaatgatacctgggaaggtgagacagatagactaagagcatgttctagagtcagacagattcatgtagacaccacagctcagcaacatattaaccatttgatgttgaacgttgtaaaccaaaaaagtacctgagacaag

SEQ ID NO: 716515 - DNA, 645 bp, Homo sapiens
aatggagtagcctgcccttggcagtgagaattttgctttccttaattagtaagcttttactcatcttgctatagtaagattaaaaaaaacttatttgtaacatgttataaaagatgggacatcttcaattttaaatccagttttaattttttagtaaaactaaagatcacttactttgaaatcttgtgaactacctctggatgttttctatctaccagctctaaactttgtgctcatactccatacagtcacttagcacatcatatgctttatgttagtcacttccttaagtccttagcatacacaatggtgaaaaagaaaaagaagaaaaataaaaaagagtctctagtcctcaaattttacacgtctgtttgaaggtaacaaaaatatgcccccaaatctagtgctgacaaatatccagttggaaataaagtgggactagatgggagatttcctagttaacaggtggtrgtgagacagacctctctgagaaggtaacactttaggtgacaggataggaatatttagtgaaagaatgttgcaagcaatagcaacaaccaaatccaaggtttcagaggaagaaacaaatgttgctagttagaagaacataaaacaataatactgcaacttgagtataagactgga

SEQ ID NO: 716516 - DNA, 631 bp, Homo sapiens
gtaacacctttatactatgtaattttgcaacacactatcgagccctctggtttacgtatctgaaactttattcctattatctgactgttttcttgataaagtttgaaatcagaaattcatacaactaacataacaatcattatcatcatttttgacaccctacagaattccagtagcagattctaaagttgcttggagtttaggaatcttatgaagagtaaagaaaaattcagctgattactagcacaatkcagtagttgtttgcccagactgattttcattagagagaaaaagatctatttcttagaggcagggtagactctaatttttatgcttaattccagtctttatatgtcatttaattaataaagagccatggggaaacaaccaatttagctcatatttaagcaactgttttaaaattacctgaacagcaaatataagccattttaaatgagaaaattcggcttaatgaaagattttaggtagccatttggggactgcttaatctatagatattttagaggcaatattaagagaaaaaggatatgaatattataccatctacagtaaattatatcaagatgtgttaatcagattgttagaataagacaaacatccatagagcttc

SEQ ID NO: 716517 - DNA, 649 bp, Homo sapiens
ttctaagatgatatttacatgaacaattttatagaatctagaaacagttgttctcagatgacatctacatctacatggataattttatagaatctacaaacataccattgaaagtagtgagaaaatttagcacagttactggatataagatcaatatctaaaatcagaataccaacatttaaaaagtgttattaaatttagaatgtaattcaacaagttataacagtcctatgaaataatatcacaagaactgtgtaagattttataaagaaaataatattttctaatatgttgggaaaatcccaagtaaatggagagaagatgttcacgcacagaaaatgcaatcaatatcattgctccaaattatgtgaatcggaagcaatctgtattacaatccaaatagatgtgctcatggaacttgacaaattaattttaagatttatatgaacaccagatgctagaatagacaagatctttttgacagatgtatattttagttttggtgcagaaacaatggaatrgaatagagtttagaattagatcgaaacacacagattacacgtttatgtcttgatgtgtggttaaatttgtattataatcagtggaatataaaccagtattgtggaacagattatccataaataataaa

SEQ ID NO: 716518 - DNA, 1584 bp, Homo sapiens
acattattattacagcagttgaaatgtgaagttgaagaacattttaatttcaaaatagtattcatgagaatcagatgacacatctatactttaactctggtgaagtgtgaaaattaaatgaacactccgtcagattctgaaagttgaattatgacccccacctccctcactaaagagatattttttcatatttagggtggcatacctcatttgtggaaaaggtctttctggcactcatcccctgtttctcaatttattgtagccatcttattaatcactgtgtttgctggggaagagccaaagtatacctaaatctagaattaaactatatagcactagggtttaaaataatagaatttgtcatcaagttgactgcctcatattcatccagtgtcaaactcaatagttgatatgtttgcttatgcaaaaatatcagagaggaaaagaaaattttaatttgtaatggatctatttctcataaaatgtcattcctgccgctctgctctttagcacatgatgaggggaagctgaggcagcttctattgtaaaggaagacccaaggaggtgccattttaggggaccttcagtctccacccagttcaggggattcacatgagcctccctgcatatatgggcgtgtcccatcactgcttcttctgcttggaagcccacaaagatggtttgctatcctagtacctcaggtcttgatggaagaaggccttggtgtgttcttaattatatcctttgcctcagatgttttgttgtcagtgtttcactcttcccagtcaggttttagggctgctaccagtctctccatgaaatagaaaccccctaatgtgctgttctgctgaacttcctcattgactgaccttgtactatgatgtctttcttcctggggtcagtgggtacgggataaagcctctaagcagggttgcccatatggttgtgtatgtttggattaccccacagctctggacggcaccattcacactgtggtcattgtcgatttaaatatgtattatggccattttatggagatggtagtaaagggtcttgatgaagacatacctttttctggtttgcacacaaaaaattaaacacaaggtagcaatggcctgccctgatgttgaaagcaagactctggcaacaggctaggtgggttctaccccttactagctgtgtgaccttgggctagtcacataatctcagttttatcatctgtaagatgggaataataatagtacatcataggctattaggattaaagaaattatgtatgccaaggactaagtacagagcctgacgcatggtgaatgctcagtatatggcagctgtcacaatgtggcccatttgtgtccttccatatagatagatcattttccaatttccaattactttctacacatcctctcttaacataaaatgactttcaagcccattactacaagacttattacaggggacctatggacttgtgatttgaatcgtaattagtattaatttaatagtctcttcacagagttagactaatatgtcaggtgacacagtgtcttagcccagccacacacattratatgactctga

SEQ ID NO: 716519 - DNA, 1409 bp, Homo sapiens
gttattttgctcattagttgatgcagtttcttcctagcatcaatggtctttacaattttgcatgtttttgcagtggctggtactggttgttcctttccatgtgtagtgcttccttcaggagctcttgtagggcaggcctggtggtgactttatactattaattaagcacaggaaggaatgcttactgtgatttatgcttactgtgatttatcttttcctaaagttgcattacagaagatattcaaatacaatatatcatttaatagaagtagttgtttcaactccaaattataacatatccatgttagttgtttttatatctctattctctaatttagggaatagactgacactgtcagctcatactgccaaatatccctttttttcaagtcaggattttttttttttttttttttagatggagtcttgctctgtcaccaaggctggagtgcagtggcacgatctcagctcactgcaacatccgcctcccaggttcaagcgattctcctgcctcagccccctgagtagctgggattacaggcacacgccaccacgcccagctaacttttatatttttagtagagatggggtttcaccttggtcagccttgtctcaaactcctgacctcatgatccgcctgtctggacctcccaaagtgatgggattataggcgtgagccactgctcctggccaggatttttaagtgtagtagaaactagtataagcactaatgcttcagatttctcagacttgccttcatgttttggtttgggatatttggggatggggggagtcatattgtaacacctccaagcaactgaaatccaccacttacggtgcaaaatcattatgcctgagtttccttggtgctgtatgcaggcaaccacttccatttattggagctggcaaagaatctttgctattaaatgggaaaaggtcacagttgtaaatcaaggagcagtaagtcttttaagtgtgtgtagggcagttggtagggggagtagcaaaggggggtgaatgggagaaatttgtaatggcttctcttaacaccactcacacacatcaaaagcatcataatacacatttctatttggacatattctatttttaaattaataatcatgcgctatccttccttcccctaaaccagctggaaagcttagtagttatttacagggcacctcagtgaaattagcagtagactgaaacatgactgtgccactgatatgtgcaagttcttcataaaacctcattaccagggcctggagataatgcagttgtagtaaaacaaaacartttgtcaaatgtgatctgaaatcctaaaggggattttccagcagctatattttgttaatgctggtgctgactgagttgatcagaatatgcaaactatatctctaaactggtca

SEQ ID NO: 716520 - DNA, 664 bp, Homo sapiens
aaagaataaacgattcaggactcagtttgaccaacaaagttggtcagttaccctacaaagttctcataacccttcagttatagttgagttcctgttttacacaggaaggctgcctgagtgctggttagaatgaaggtgaggacaaatatttggagaaagcaagccagatccgttgaaggtacatatattagaaccccaaatggctattcctttgctcaatcctctttctcattccccttgacctttatactccttgaatgcagcctgaatggtgcaatttgggaagagaagaaagtaaaacaaaccttgagcctgaccatgaggtctctgagtggcacatattcttgtatttttagttctctctgctgcctcacttccttaagcaaaaacaaacagaaccatgctctagtcttccactccaaataaaagatcaacatcacaacttcccaccctgagctactgttgttctatatgttctttcatttcagctgccaccccaacaggttttcygaaactcttgtttcaaaggcagccaatgacttcattatttcccatagcctctactcggtacttctgttctctggatgatcagagagtaaagctttctgcctgctgaccccactctcctctttggtgctgtctccctccatgtttctgtgacatc

SEQ ID NO: 716521 - DNA, 632 bp, Homo sapiens
gaaaacaatgaagctcaaaatgtaataattatgagtatgactatgtacttttacatttgaaaaatgtgtattatggataaccaactaataattagctcatagacaatgaaatgccagtggcataatctaaatatatttatttattcatccatcattcaataaatacttactgagcatttttaaaatacaccacacactacgagtaaagccagccaagatttcttctctcatgggtcttacagaagtcctggggggaagatgttaaactaaaatcattacaatttaataaatgtttaagatttatgtgcaatttctcctgacatctcaatttagttttatcagaagctccacattccaaattaagacaccagactcctgtgcaggattttcagagagtggtttaaaaacttatcttgtgacctttgactcattatcccccgcaactatttatgagtcttgggaatgaatcagaatttggagaattcagacacagacattctctagaaagacttaacgggttttcctgtagtcccacccrttgcaatgaggaggcttggccccgctcactctacttacccagttgagagggtctttactcagagagtttgatacatgtcccctggagtttggga

SEQ ID NO: 716522 - DNA, 622 bp, Homo sapiens
tgaaaacttgtacatgatagggttggaaatacagtgaacaataattgcatacatataatgaagtaaagctagactgagaatttaaaatatggtttatttagtttgtgaagatagggaaaaggacatgatttggsgtggtgcaaaagaggtaaattctcaatacctaaaagaagccaataaataaggcatgtaattaaaaacaaaaacaaacaaacaaccctaggagcattactgaatattacaagaaagcaaacctgaagaaagaacttaaaacattgaaagtgtttttttgttttgttttgtttctgggaagaagaatgaaaagttcgatggacttgatcaaggaattgcttttttgactatgtcttttagcactgtgtgtttgttgtacttgcttgcatgagtggctcttttaaaaaataataataataaagtatagattgcatttttaaaatcgaagactttagtgaatttttaagaacaacattagtatgctgtgtaaagaaaataattttatttctgattattcaatactcaacagtgattcagggtcagtcatcatgaatgtcaactttggtcatataaatagaaactatgtaagagactgtaatggatatgtatt

SEQ ID NO: 716523 - DNA, 622 bp, Homo sapiens
tgaaaacttgtacatgatagggttggaaatacagtgaacaataattgcatacatataatgaagtaaagctagactgagaatttaaaatatggtttatttagtttgtgaagatagggaaaaggacatgatttggggtggtgcaaaagaggtaaattctcaatacctaaaagaagccaataaataaggcatgtaattaaaaacaaaaacaaacaaacaaccctaggagcattactgaatattacaagaaagcaaacctgaagaaagaacttaaaacattgaaagtgtttttttgttttgttttgtttctgggaagaagaatgaaaagttcgatggacttgatcaaggaattgcttttttgactatgtcttttagcactgtgtgtttgttgtacttgcttgcatgagtggctcttttmaaaaataataataataaagtatagattgcatttttaaaatcgaagactttagtgaatttttaagaacaacattagtatgctgtgtaaagaaaataattttatttctgattattcaatactcaacagtgattcagggtcagtcatcatgaatgtcaactttggtcatataaatagaaactatgtaagagactgtaatggatatgtatt

SEQ ID NO: 716524 - DNA, 622 bp, Homo sapiens
tgaaaacttgtacatgatagggttggaaatacagtgaacaataattgcatacatataatgaagtaaagctagactgagaatttaaaatatggtttatttagtttgtgaagatagggaaaaggacatgatttggggtggtgcaaaagaggtaaattctcaatacctaaaagaagccaataaataaggcatgtaattaaaaacaaaaacaaacaaacaaccctaggagcattactgaatattacaagaaagcaaacctgaagaaagaacttaaaacattgaaagtgtttttttgttttgttttgtttctgggaagaagaatgaaaagttcgatggacttgatcaaggaattgcttttttgactatgtcttttagcactgtgtgtttgttgtacttgcttgcatgagtggctcttttaaaaaataataataataaagtatagattgcatttttaaaatsgaagactttagtgaatttttaagaacaacattagtatgctgtgtaaagaaaataattttatttctgattattcaatactcaacagtgattcagggtcagtcatcatgaatgtcaactttggtcatataaatagaaactatgtaagagactgtaatggatatgtatt

SEQ ID NO: 716525 - DNA, 778 bp, Homo sapiens
ttggaagaatgcaatggtatcttagtgtgcttttttttttagcagggacagaatctttcccaggctgtattgcagtggcgaaatcacagttcacttcaacctcaacttcctgggctcaagcaatcctcccacctcacccttccaaatagctgggaccacagacaccaccatgctaacttttttgttatttgtagacaaggtcatgctatgttgccagactgttctcaractcctgagctcaagcattctcctgtcttggccttccaaagtgttgggattataggcatgagccaccacgcccagcactttgtaattctaaagttccatcaaagagtgatggcctaggttttgtgttacgtctatattatcacaaaaatatttataatctctaaacatctgtgcctcctttatgcacatgatgcattagcagtgtaagataagaagacaatatgcatttttctgtactgtgttagaggtaaattccttgtgtgataaatcgcagtcattagaagtaattaaaggaagctaaataggaattgatttggagttatataaccaaagcaagacaatcactacaaccgctcattcaattatgtctacagtgtaaaagcagcagaaattgaagatgtcttaagataaccgtgattcattagttttagcttttgctaagtagtcaaactgaaagtttgaattgctctgttctataattgaagaaaaaaaaattgggggggaaaaggaaaagaaaaagaaagaaatagaaataagatagaagacttgc

SEQ ID NO: 716526 - DNA, 634 bp, Homo sapiens
acgctctgtgagtaagtggtgacgcctgggctgctccaacctgtgtggccacacgaggcgcacacggcagacgggccccccacccctcccagctcccgaagaacattgagaatggcccccaagtctggccaggaggttgaagaaaccgaggaagaggctctcctgtcccccacagagcaagagtcggtcagtggtcacctgggacctccagcaggcgcacctgcagcccccgagactcccacgtgcctgccagacaccacgccccaccccrcaccggtggtctgctctgccgacccgcagtaaggaggagagggaggactggtgagcctcctgggccaggtggccaggggccggcctgagtaagcagcagggtctgctgccgctgcaggttggctcttgagtccctggaccctcgcacactgcggctgctgtggagacagcgagaactggagatccaggccttgcggtgggccatccagaatggcgaggacgcccggctctgccacatcctggaagaggtggcggggcttccgcccaagaggtctgcagcacagtccccagcccaacccaaccccgccctgtcctcgcccggactcctggtttctgtctgaccccaaccccaaccgctgaggca

SEQ ID NO: 716527 - DNA, 547 bp, Homo sapiens
ccttaaattttatcttaatactcatgataagacgtttttgttttatttctaggtatgtattctattctgcataattcaaataagtggatttttttattctaactttttgtttacaacacaattcacatgtgcttattcaactatttcttaatatatttttgccttgttaacattttgaaaataaccccatatgaacttacacaataaaaaatgagagtggtcacaatcaataccagtcttatgaaacctgaaatattgcaccctagtatctgctcatacatatcaataatcaactgatggtatctaactggtaattttcaggacccagaccaatgtactaaacrgcaggggctgtatgcctcaaacagtatcatgagcttaacaagttaaattgttttttcacataatcattctacaccagggtcccccgccctcaccaatccagtaatctccccaaagatggataactccatatacacataactaaatcatattcaatgaaacttaataaagatatcaaccattggggttaaaatccacagagggt

SEQ ID NO: 716528 - DNA, 1630 bp, Homo sapiens
accatgaagcttgctttttctggaagaggaattgcccaggccagtttccagctgtggtggggagcacagagcctgtgtgcataatgcagtattaacagtgcatcagcgtgatatagatttctgtcaccttctatgctaacaaacatcgcttagcgtagggtaatgatgggtgtttattcccagccacttaactcagcataatggacttgcagatgaaatacggaaaatgggctcctttgtctaggaggctggggcccttcctggaaccagtaacagaggcaacagcagcagctgctactcctgcagaaaaagtctttctagttctttctctagaagaagtccgggatggacttgcctgatgcaaagaaggagatctggttacagggctgggctgggagcatggggtgtgcggctgaagagggtaggttggcataccaggggctgctgttagcttcctgcggttgttttaggaggcaggctctgctagatgtgacatgggagagaaataggaccaaggtgggtgggggattctgatgggtcccctcttttattctcctggttggatcttgacagtccactctaggggaaccataagatgaatcttggtgactcttggttaataatggaaacatttagctttaacctttttcaccagttcagtatctccaggccctgcttggtaggcagtgtttcataaaacattttaaatggacataaattagtattgtctccctctgatttttcttcaatcttatcttcagattcagttagaataactaggagacccccaggaattctgtgatgctaggtttggtaagcccaaggtctctggagggagggatgagtctgaagacattactagtattctttctttgtagaaagagctggatgttgccagaatgagatatcttgggagccaagcaaataagtcctgggcccatgggcttgaactttagtatacatacaagcttgtccacagagtctcagcctcaagatattaatctctgctgggtgctgatgtctgagttccctaaatgttggtacaatccaagcatagcactttgacatttttcccccattcctggaagaaaaaaatcatatgaagccatttccctgaaattaattgaaaacactagactttcctagcatgcactttggagctaaaaccaactagttcaaagtgacagattagcattcatctccctgggccgagaccacctgccatccttgtggttatcatgacctcatctgctctgtgcctcactgccataatcacatactcaaagttagtagctgcatgcagtcatgctaattaagtaattaggtctaattatgctcactgtaaatacaaggtaattggctttaaaaaagtacttgagggataagcattcacttcatggtcgaggaggggaagaatgatgagacccccagccagcttggagtaatgtcatttcccggtgggatgggagcccaggggaagctgcacccaaaagctgaaggtgggcagaatatggagtgggtcctttctgtttygctcagtggcctagaaacagaaggactacttgtcttcctggcatgttttggcttcagtcttgtcttcaaggagtaagaggattaacttttctccaga

SEQ ID NO: 716529 - DNA, 639 bp, Homo sapiens
ccatcctatgtcacatcataagccacactccctgaaagaaaaaaactctctaagagctgtaagataacccaccagcatcacccaactgtaagttaccatggtagtatctatttagattctgtatacctcctttgtaaattacctaattttattctttgttcttatcttggtagccttttcaaaatgtgtagaagaacctttaggctgctgggtaggagactctcttgaggtactctgtatttccacagtgatggagaataatgtatactgtgttagttgcaataaccagtttgaagaactaagattatacatgggtaacctttgtatgattttttttttaatagaatggggaaaaaattctgaaaggtttagggtcgtgtagttaattggttcattttcaaacattcaggatagaaaccttttcccaactttsatatcagtgtacattgttgaagagtaaaatatcgccatcctggcaggagatcaatgagaaataataaagtctcatttcaatagcaagtgaatgaaactaatgaatatatttccttgtgttaatgttggtagatacatcaagtaggcaatagttgattaattgaacccaaaagcaattaaaacagtttaatttgtttttatttcact

SEQ ID NO: 716530 - DNA, 639 bp, Homo sapiens
ccatcctatgtcacatcataagccacactccctgaaagaaaaaaactctctaagagctgtaagataacccaccagcatcacccaactgtaagttaccatggtagtatctatttagattctgtatacctcctttgtaaattacctaattttattctttgttcttatcttggtagccttttcaaaatgtgtagaagaacctttaggctgctgggtaggagactctcttgaggtactctgtatttccacagtgatggagaataatgtatactgtgttagttgcaataaccagtttgaagaactaagattatacatgggtaacctttgtatgattttttttttaatagaatggggaaaaaattctgaaaggtttagggtcgtgtagttaattggttcattttcaaacattcaggatagaaaccttttcccaactttgatatcagtgtacattgtygaagagtaaaatatcgccatcctggcaggagatcaatgagaaataataaagtctcatttcaatagcaagtgaatgaaactaatgaatatatttccttgtgttaatgttggtagatacatcaagtaggcaatagttgattaattgaacccaaaagcaattaaaacagtttaatttgtttttatttcact

SEQ ID NO: 716531 - DNA, 947 bp, Homo sapiens
ctcatattcctgatctacagaaaccatgagataaaaaatgcttgttgtttcagccattaagtttttgggtaatttattacacaatgacagataactaatatagacattctaggacttctaagaccaggcctttgctcctccctcttagaaccccagctattgtgctattaaaaagcccaagccacatggagcagacaggtggacaagaaccaagctgctcatakggacagccccagtcagaactgaaacttcagacacaccatcccagccagctggctgccatttaagccaccccagctgaggcccttgacatcacagaacagacaggaaccatcccctctatgccctgctgaatttctgacccacagaatcattaaggaaataagagggttgttgttttaagtcactaaactttggggtggtatgttataataaataaccagaacaaacactaattattaggatttgcagtgaggcaacagatcacgcaggtagagatctggggcatgtggactgctttactgaaccccagcaatttattcatgaatggtggacaagtggacagtggtctgcttagggactagaggatggggtgcataaggaaatgatcccatggccacaaactacaattctatgtctaacaggcactgtcttagaaatgtgagttgttggtcagagacaacagcttaagccaggccaactaaagaataagaaattccttgcatgtgttctgttggaattagaaatctctaaactaaaaggctccacaaaactagtatcttggttgctgctaaggaaggcagcaccaatattttccagcattattcagtaatacctgttcacccaaagaataacctgccaaatctctgcctctaacagatctaaaatagaaaagctttatcaaattgaatgaattaaggcaatgtcaaatatttagagaaaagaac

SEQ ID NO: 716532 - DNA, 947 bp, Homo sapiens
ctcatattcctgatctacagaaaccatgagataaaaaatgcttgttgtttcagccattaagtttttgggtaatttattacacaatgacagataactaatatagacattctaggacttctaagaccaggcctttgctcctccctcttagaaccccagctattgtgctattaaaaagcccaagccacatggagcagacaggtggacaagaaccaagctgctcatatggacagccccagtcagaactgaaacttcagacacaccatcccagccarctggctgccatttaagccaccccagctgaggcccttgacatcacagaacagacaggaaccatcccctctatgccctgctgaatttctgacccacagaatcattaaggaaataagagggttgttgttttaagtcactaaactttggggtggtatgttataataaataaccagaacaaacactaattattaggatttgcagtgaggcaacagatcacgcaggtagagatctggggcatgtggactgctttactgaaccccagcaatttattcatgaatggtggacaagtggacagtggtctgcttagggactagaggatggggtgcataaggaaatgatcccatggccacaaactacaattctatgtctaacaggcactgtcttagaaatgtgagttgttggtcagagacaacagcttaagccaggccaactaaagaataagaaattccttgcatgtgttctgttggaattagaaatctctaaactaaaaggctccacaaaactagtatcttggttgctgctaaggaaggcagcaccaatattttccagcattattcagtaatacctgttcacccaaagaataacctgccaaatctctgcctctaacagatctaaaatagaaaagctttatcaaattgaatgaattaaggcaatgtcaaatatttagagaaaagaac

SEQ ID NO: 716533 - DNA, 947 bp, Homo sapiens
ctcatattcctgatctacagaaaccatgagataaaaaatgcttgttgtttcagccattaagtttttgggtaatttattacacaatgacagataactaatatagacattctaggacttctaagaccaggcctttgctcctccctcttagaaccccagctattgtgctattaaaaagcccaagccacatggagcagacaggtggacaagaaccaagctgctcatatggacagccccagtcagaactgaaacttcagacacaccatcccagccagctggctgccatttaagccaccccagctgaggcccttgacatcacagaacagacaggaaccatcccctctatgccctgctgaatttctgacccacagaatcattaaggaaataagarggttgttgttttaagtcactaaactttggggtggtatgttataataaataaccagaacaaacactaattattaggatttgcagtgaggcaacagatcacgcaggtagagatctggggcatgtggactgctttactgaaccccagcaatttattcatgaatggtggacaagtggacagtggtctgcttagggactagaggatggggtgcataaggaaatgatcccatggccacaaactacaattctatgtctaacaggcactgtcttagaaatgtgagttgttggtcagagacaacagcttaagccaggccaactaaagaataagaaattccttgcatgtgttctgttggaattagaaatctctaaactaaaaggctccacaaaactagtatcttggttgctgctaaggaaggcagcaccaatattttccagcattattcagtaatacctgttcacccaaagaataacctgccaaatctctgcctctaacagatctaaaatagaaaagctttatcaaattgaatgaattaaggcaatgtcaaatatttagagaaaagaac

SEQ ID NO: 716534 - DNA, 913 bp, Homo sapiens
tgccctctcaaagatgtaaggagggaaattatgaggaagggatgattattcagataataaagattatttaatcaccaccccccaccacacacacacacacacacacacacacacatacacgcacacacacaaatagcattggtcctgcccaaccaatatacaaataagaaaacaggttatacaatatacaaataagaaaacagcagaaagctttctttctgctctatttgaattccctagggaatgcttgcttgactgcaccatttgtacttgtggggaataaggaacctctccaggatcagagccatatcacaggtggatgtcttaccctataactacataaaaatgcaaaactgtgcatctgatgcatattaaggttcccctgcttgtccataacagattgaaccaaaaacatccctaaagatttttatgctcctgaaaattctatatgttttttgtttctttcagcaatgtaaaacaggtcattttaaaccaactgtgccataagtttagagggtggggtaggggagccttacattcgttttataccaatkatgtgctgggcaatgcattcagtgccctgtgatggtcatacattaatccttccctcatcttttgatttagatattatcatttccctttcatagtttaaaaaactaagattcagagggtaatgctttacccaggttctcaaagtgatttgtggaacagtgcttaggtacaaaccctgactctgaaatcctcattctttccacagcccacctttgtgctaatcaagactcgcatcactgccttaaaaggtggcatcctcaaaacgtccagggaaaacatcaggggacatgagatgtcagatggcctccacaaaccaagcactctgtcttgaagcactaggctaggctgcagatccacgctg

SEQ ID NO: 716535 - DNA, 913 bp, Homo sapiens
tgccctctcaaagatgtaaggagggaaattatgaggaagggatgattattcagataataaagattatttaatcaccaccccccaccacacacacacacacacacacacacacacatacacgcacacacacaaatagcattggtcctgcccaaccaatatacaaataagaaaacaggttatacaatatacaaataagaaaacagcagaaagctttctttctgctctatttgaattccctagggaatgcttgcttgactgcaccatttgtacttgtggggaataaggaacctctccaggatcagagccatatcacaggtggatgtcttaccctataactacataaaaatgcaaaactgtgcatctgatgcatattaaggttcccctgcttgtccataacagattgaaccaaaaacatccctaaagatttttatgctcctgaaaattctatatgttttttgtttctttcagcaatgtaaaacaggtcattttaaaccaactgtgccataagtttagagggtggggtaggggagccttacattcgttttataccaatgatgtgctgggcaatgcattcagtgccctrtgatggtcatacattaatccttccctcatcttttgatttagatattatcatttccctttcatagtttaaaaaactaagattcagagggtaatgctttacccaggttctcaaagtgatttgtggaacagtgcttaggtacaaaccctgactctgaaatcctcattctttccacagcccacctttgtgctaatcaagactcgcatcactgccttaaaaggtggcatcctcaaaacgtccagggaaaacatcaggggacatgagatgtcagatggcctccacaaaccaagcactctgtcttgaagcactaggctaggctgcagatccacgctg

SEQ ID NO: 716536 - DNA, 1088 bp, Homo sapiens
ttacgggaggagcaagggatggaacagcagaagaggaatgtggaaacataagcaagactatttcttgttaaaagtgtaagttgtggtaatgagttggattttattcagggtatatgagaaatttatgaaagatttcaacaggaaaattccatagatatgaggctgctctgaggaatattggtctatctgattacttaaatgggaaaaacagttggaacctgaggatgtctatttctgctgtagggaacggaagcaaagaaatctgatttgtaaccacagcggaatggacatgcagagagaagcagagatgtaagactgagaaggaggtgtttgtttgttcactgtggtactctattctgttgttccagtttattcctgactgtattctgaccttgaatgtaaagagatgacacctgaatccttataataaaccatttttcttttgtgtttcctcgagttaactagtgttgatttttactacctgcaaagaggagtcctaggattcattttcaatttgtggttacttggtgagcgatttaagttacttctttaagttcgaatttcattcaccttgaaacagatttgatattattttaatatctgttgatagtacaaatatggataatgcaagtagtattctgtttagctctcattcatcatggctactccaatgtggagggtagccatgttggaaacttggatgggagcaaaaggccaggtgagtcgcaggctagctcgttttgggaagaataagttccaaagtccccagtattttctcaactcagtcaaccaaaaatgaccctgaaaaattcctgaaactgcagcctatgacctagaagtccaagccaactacaggacccagacccatggagatatttcagctagagctgacaactgttaccaggtgacactaagctatagttgggaccagaatggctacatctttcatcttgacacaacyccgtcacatgaaatcttatgcaggttcaacctagtcctttaattacatttgcaataacattacttcatttattatgcagttgaaatttttataatcagttattacattgtcattggattttactata

SEQ ID NO: 716537 - DNA, 624 bp, Homo sapiens
cccattgaggaaagaacaagataaaataatttagattataacgttctgagttttaattagaaataaggacatgtttccaggcagtgagagtgactcagtattggcaagtgtttctaagggaagccaagaaactattgtttctgtagattagtgaaatctttgacattctgcacagccaaaatcactrcctgaaggtagtggggaaaaatgaccagatggcctcaggggcttctctgaatcacctccacactgccaggtttgaagaaactataaaatgacactgttagctttcaggttgtatatatttgtcttctgtgttgtctggaagctctcccatcagaactacaaccatctcctaatgctttatcttgtactcaggcaatgcaactcactccgttcctagacagatggaaaataagggaactgccttgtgagaaactgcagaaacacaactggtctaatacacttcaccactaggtggcactctaatcatatcacagctaccattttaaaaatcaataaccttgcctttatatatgaaaaatttcacttgttttctgtcttaaaatggttcccccttaccactcaaatgaaaaggctagctctcagaaagcttgaattttt

SEQ ID NO: 716538 - DNA, 1413 bp, Homo sapiens
ttgcaagagctatgctgttaaaagcgaagaacaggagggaagatcctctgccttctttgctgcttccactttcaccctcatgcctcccagtggcagaatctaaggggaagttggatgttaaatgagtctacaaagttagttttcagaattccagtctcagtttagaagtatgagtttagaactgagagatattaggtaaatcaccagcacagctgtcaaggattcatccaggaacttgaagcatgtaaccaggaactaccttttgacttttttctcttctacgttggtttcattcttaggtatgaagggcacagtggcctaaggttcacattctaggtctaagatcatgaggatggagtgtctttttttttggctcatgcatttaatattctgggattggtttccattaaaccagagtgatgtggatcatgtgacatacctttcaagtaacattgctttgagaaagttatgatttcaatggccatgctgacatctcaggatagagtcaatttcatccaattccacccaaagcrcatggcttgatagtcacactcagttacacatgggaatgtgtaagaacattgtagtgcatgtagagaagaaacaaactcaaaaataaatttatataccacataaaaaatgtttttaactttaaatataggagatatgtgaaatgattgagacattttgaatacatttcagatttgctgtttaaaattggtattacagcagcattgtggaggatagttctaaaaatgattagactagaattgaggcaatgagctaggaggcaattaccctaatataaaattaaaatgatgagaggctgatctaagaggcatgtgtaagaatgggagggaaaagacatgtacagtcatagcaatgccaatgcctattgattcattgagtgggcaggacaagagaagaaaagatctagaacagggattttaaagcctaagtgaatttagtgattttctgggagactgttaaaacacaaattaaaatgcctcatactcaaatatcttgttttaaatgatataggatggaaggtttttttttttaatcttcatatttaattaacaccccagggggattctgaggaacacatgttgagaacacaggtttaggatgattcccagctttttgatttagagaactgactttctagttctgttaactaaaattttatgaagaggaagaggagcaaggctgaaaaggagagagagatcagttactccattttgcctaagactgtaccagcaccagcactgaaagtcctctgtcctggaaaatccctcagccctggacaaaactgggcagttagttttcctaaatatagaagagaaaaaaaatgtatataattgagcaagagctgcttgcagaatgtctaaatatagatgtctaattggcaat

SEQ ID NO: 716539 - DNA, 671 bp, Homo sapiens
tattttgtagctttcagtgaggcagtgagaacatggaatatgattctgatgtaaatcccaaatagcatagggaatcagagtctaatataatttaacttaaakaaataaagaaacatggtatttacttcacacctgagtttatagagtaacatttattctggttattttagctagggttcagaaactaattttttattaactctcttcctctgctgaacaatatgtatggtataagaattactctagtcttttgacatatattaatatctggctaagtaggtgcctcattggacccacgatcttggccaacacctcaagcttagccttctttcacttacacctctattgttactaaaagatcagtaaagaaaaatctaagaaaggcatttgttccatcattattcttagatttgatttttattgtttcacaattcttccatctttgcttttgccatagttcacttatgaacagagtattatacctttctatcccacttgggcttagctattatgacctgctttaacgaatggaatctgagtagaagttatagtgggtagtaatgaggaaacagttgattttgaccaacagactgaagaaaaactcctccagctgactttctgaatgctaagtgggaaacaagtgtctatattgaaaactatatgagtttgca

SEQ ID NO: 716540 - DNA, 671 bp, Homo sapiens
tattttgtagctttcagtgaggcagtgagaacatggaatatgattctgatgtaaatcccaaatagcatagggaatcagagtctaatataatttaacttaaagaaataaagaaacatggtatttacttcacacctgagtttatagagtaacatttattctggttattttagctagggttcagaaactaattttttattaactctcttcctctgctgaacaatatgtatggtataagaattactctagtcttttgacatatattaatatctggctaagtaggtgcctcattggacccacgatcttggccaacacctcaagcttagccttctttcacttacacctctattgttactaaaagatcagtaaagaaaaatctaagaaaggcatttgttccatcattattcttagakttgatttttattgtttcacaattcttccatctttgcttttgccatagttcacttatgaacagagtattatacctttctatcccacttgggcttagctattatgacctgctttaacgaatggaatctgagtagaagttatagtgggtagtaatgaggaaacagttgattttgaccaacagactgaagaaaaactcctccagctgactttctgaatgctaagtgggaaacaagtgtctatattgaaaactatatgagtttgca

SEQ ID NO: 716541 - DNA, 652 bp, Homo sapiens
tcacattctttagttatatgaagaaattctatcaatataatgataaatttcaaaaataacatatcaaatgttatatgtattgtgcctctttgtgatggcaaggtccagatgcaacatttgtytttgaccttggaagggatattttggcattccttaaaccattagacctcttgaaattttaccaaggtttcaggcccctgaattccaatgagatttatttcccactttctactacatatttttcttacccaggtatgtagggtagttgctacttcctgcctaccaggcccaagcaaaatgtcatcattgcagtggaccagagcaatttagttgaatggaaggataatcaaagtccctatggaccagattatgacagaaggctaaagaattgatgcaatcctgatataagacagcaaaagtatatgctgtccatgacagccaagagtaaacttttaccattctttactactgggtataaagaaagcagcgttagccagatcaggagttgcatacaaagtgccaaggaatatgttgatttgttcaatcagtgaaaccacatcaggaatagcagctgcaattggagtcaccacctgattaagtttacaaaaatccacagttattccccaaaatccatctgtcttctttgaaaaca

SEQ ID NO: 716542 - DNA, 652 bp, Homo sapiens
tcacattctttagttatatgaagaaattctatcaatataatgataaatttcaaaaataacatatcaaatgttatatgtattgtgcctctttgtgatggcaaggtccagatgcaacatttgtctttgaccttggaagggatattttggcattccttaaaccattagacctcttgaaattttaccaaggtttcaggcccctgaattccaatgagatttatttcccactttctactacatatttttcttacccaggtatgtagggtagttgctacttcctgcctaccaggcccaagcaaaatgtcatcattgcagtggaccagagcaatttagttgaatggaaggataatcaaagtccctatggaccagattatgacagaaggctaaagaattgatgcaatcctgatrtaagacagcaaaagtatatgctgtccatgacagccaagagtaaacttttaccattctttactactgggtataaagaaagcagcgttagccagatcaggagttgcatacaaagtgccaaggaatatgttgatttgttcaatcagtgaaaccacatcaggaatagcagctgcaattggagtcaccacctgattaagtttacaaaaatccacagttattccccaaaatccatctgtcttctttgaaaaca

SEQ ID NO: 716543 - DNA, 646 bp, Homo sapiens
tgtttgcagtaaatatgactctatatttagaaaacacaagagaaatcaactaaaaaaatcgatgtgaaacaataagaaaaaagacaatcaggagacagattaaaaaaataaaatataaaagcaacagcttttcaatatttaaaccacagcaagttagaaaatttaatggttaaataaatctcattttcaataggaataacagaagataaaacacttaggaaaaagtttaacaagaattgtgtggggtgatataaagaaaactttaaaactctactgaggcatattaaaaagcgttgaaagataaatggaaacataacttgtggaaaccaaaatttcacattgtaaatttgtttattctccaaattcacctattgaatcaatacagcttgaaacaaaataatttaaagtaaaatgttaactttgacctggtaaaataaacatgcagaartgggcgagaaaattaagaaaagaaaaatgaagagccctacagaatattaaaacgtcattgagttacacaaattagaacagcttggtacaagtgaaacaatatcctcatggctctcaaacagcacataagaatcacctaggatgcatattaactcttaatttccctatggatcaaacatctcaaaattctgattttcta

SEQ ID NO: 716544 - DNA, 601 bp, Homo sapiens
tcattaattaaatacaactaacaccacaactgaaaatgatatgcacgtttgaaaatgtcaagatgtaaaakagaagcaaagtttgttgttacaaagtttattaccctggtcatacagtgtgaacacaaaaagtagaggagaacccctacctcacactatttacaaaaacaaatttcattaagactgcagacctcagagttaaaagtgaaatgatgaagtttatggaaaataaagtaatagaacatatttctcatataaggtagtaaaagattttaaataacacacagaatcatccaagaataaagaaaacaattgataataggaattttatcaaattaagaatctttgttaagaaacttgacatgaagagactaaaaaagcaagtcacagagtggagaagattaggaaatgcacataataaattaagaactaataccagaatatacagtttctataaatcaataataaatgacaaaaaactcaattttaaaagattgatcaaagtcttcaacgaagtctttagaataaaaattattctggcgggggacagtggctcacatctgtaattccagcactttgggaagctgaggccaggagtttg

SEQ ID NO: 716545 - DNA, 1137 bp, Homo sapiens
gatcacagatacataagtaactacacctagaatgagaaaaaccacccatttgagctccatccaagttactgacacacaaaagtatgagctaaataaatagttgtttctaactattatttttgggttggtttgtaacacagtgatagctagctgatatattttgcttttattcttatagaacctgataaagaaagaagagtgaaattatactggcttcagctaaacctttgggaatgtgatgacttgccaaaacttttgggacctgactaaattgtattctaatatttacataaaattgcccataggtcagtgtggtattccatcaagggtcttggacaggaataaagaaacttgatttctagctctgtcttggatattatattcactcggtcactttgaaaatataacgtcacctcattgattctgtttttccacatatttaagataaagggttaagatgagattctgaaaattcccgttgaattttattmtggaattcttagtatgacagagactgctcaagaatttgctagattccatgtaatggatgaatagattttgttctactgatagcattagtgatcttatcataaccctgacatgaacatattttttgcttccacatttttggatcagagatcacattgagtgatcacattaaccaatcactcaatttatccatgcctatatcattgactacttccacagaaaaccatctgactacatgacaagttacatagacaatatatggtgtaaaaagaagtctctatactaaaaaatactgaacaagactggtagcatttgttttaaagtttgctaaaagctcaattgacaaaacaaaatccatcatctctgatcatctatcagagacatcctttatgtccacaattttattaccccaaattctctattttattaaagtttatcccttgagaataggagcacacaaatttggaccaaccttagactgtttagtatgttctagtccagagcttccacaggagcttctcctgatttgatgattcggatatgctgagactattcatcccctctgtctttagggcaagcagatgggcctgagcagctggaccccccaggactatcacctccgtccatgcatatcttcatcatttcctc

SEQ ID NO: 716546 - DNA, 2159 bp, Homo sapiens
aaaaaaaaaattaaaaaatttaaaaaaaaatagtcttcctgtaaggcataatttttgcagctaaatcagcggcaagtgatgggtgtttatatgtgtgcacaagcatgttagtgtatgtgtgtatgagcgtatgtatgttggtgcatatgtgtatgttggtgtttgtgtgtgggtgtgtgttagtatgtgtgtctgtatgttggcatctgtgtttatattgctgtgtttgtatgtgagtgtgtgcttgtatgttggaatgtgtatgttgggatttgtgtgtgtgttagggtgtgtgtatgtgtgtgtatgtgtgtgtgtatgcagaaagagcaagaagtcatttttttaataggaagttttagacatagcttcttttctggcctaattttcttgtttgcttgaaggtctttataattgtcacttcaagcatgtgtccagttagtttaaatctcacttaagcccattatggttttctacacatagctgtgagatgatgtgatgtgactttctttctctgaagtctgcaatgtagcccactaacttgctctttctgatatgtctcagctcaggtttgtagcctgcagagtctgagccaccctccacatgaggagtgtaagataggatgtcagtgctgccttctaatgatttcatctgaattgcaaagcaccagcttatggccccatttataactccagttttagaaactactttttatgactaagaaagacttttaaaggatgcaataaaagggacactacattaacatagagctggaaaacattgttaggcaacatgaggatgtgataattagtgtgaacttgaaatttcaattgtagttgcctcctgccactcacttattcaaaactctagatgggctttgggttgtccaatggacagtggcaacatgggatggtgagagtgcaaggtctttggagtgaaacagttgtgaattcaaatattgactatcaataactctggcactctatgccacataatgggggcttaaaaatatttgtcaaattcctgttttctaactcaagctttacaagcctcagtttctgcatctctaggtaggggatgatatcgacttcacgggaatgttatgagcactaaacaaacccacatctggaaatattaaccaatgcctggcatggagtagagagttcgataatgaacacaacttgatctgctattccatttggatacctaattaggcgttattaatttatccgcccatctcttaacctctgcatagattcatcaagcactcattttatgcttattgtcccaagcacaagctatactcattcatatctccatactttagcttataatgtgtttccatcgaaatgtcttttttatattcctttttggccacctaaatgttgttattattttagaacaaacttaaatgtcacttttttcatgatgtcttcccttataactctcatgttctctttcttttatctgtttctgttactatgtgtatcacttttgttaaggatattatcacattatattctatctyatttatcattctaggtctatttcttgtatttaaatctcccttcttaaaaaattatagactctcttgggaagttgaccacatactaatatttttctttggctagaattatttgcaaagataagtaatatttgctcaaatagtactgtattatttaattcatacttaagtaatcttctaactagttatttgcttatctctcttcgaaccaacacctttccccaggacatagttgcaaggctcattcagagcactcctttcaatgttattcttcctactcataaacttctggtggttcacaataacattcagaacaaaaatcaaactttgagaccagacatttaaaatatcctattaatacaacctagactttacctattgttctctaatatttcctaactactactttcctagacaatgatcattttcttacttatacacctttgtccgaatgccaactacctatggacaatatcttctctccatttccaaattatctggttcctgtatttcttttcatgaacacttgccatactgctcctgtccatatgatctttcccctttaatgcctggaagatctttaatgtctttatagctcagttgatgcttagaaaattatcactgctatcattgt

SEQ ID NO: 716547 - DNA, 611 bp, Homo sapiens
gcagagttcatttctatacatctgtcttacagagtacatgattcagrttcatttctcaacaaaatgataaactgctttgtgctagagaccttgcaggtctctaataaataggtggaaaatgataaagttaaaattcacagtgttgtggttccactgacactttgctgcttcctgcttttctaactgttatgtcacattttccattagagttctaggtgatttcctcaactttttcttccttctttgattaatgccacacatacccactgtgttaattttcctatagcagagttccaggcatactgcttttgctgaaaacatttcatcattctctggcgcttagaaaaaattagtcaaactgcctatcttagcctctaggcccctaatgatctgactctattcattctttcaaagcaaattttaaaaaaatcattattgcccttttgtcatcctcaattctttctgtcaaagttaaaacttgttctttgtgtacatcctatgtttcctgtttcctcacctttgtttacgttgtgccttctgcctggagtaccccccaccccactctcatttctataacaaatcatattattattttggtaaattctgggaaa

SEQ ID NO: 716548 - DNA, 524 bp, Homo sapiens
  misc_feature 234, 235, 236, 237, 238, 239, 240, 241, 242, 243, 244, 245,246, 247, 248, 249, 250, 251, 252, 253, 254, 255, 256, 257,258, 259, 260, 261, 262, 263, 264, 265, 266, 267, 268, 269,270, 271, 272, 273, 274, 275, 276, 277, 278, 279, 280: n = A,T,C or G
  misc_feature 281, 282, 283, 284, 285, 286, 287, 288, 289, 290, 291, 292,293, 294, 295, 296, 297, 298, 299, 300, 301, 302, 303, 304,305, 306, 307, 308, 309, 310, 311, 312, 313, 314, 315, 316,317, 318, 319, 320, 321, 322, 323, 324, 325, 326, 327: n = A,T,C or G
  misc_feature 328, 329, 330, 331, 332, 333: n = A,T,C or G
taaattattaacccaaaatttgctagaatgtagggagattatgaaatagagagtgaatgtattaataaaaattcagaataatcctatattcaaaacacagtttgagaaagaatatatctttttttgacatcaaaggtatttttcaagagataaaaaaaattgttttgccataaattcatttcatgtttacttctaaaaataaaacaccaattctttgctctactgggaagtcannnnnnnnnnnnnnnnnnnnnnnnnnnnnnnnnnnnnnnnnnnnnnnnnnnnnnnnnnnnnnnnnnnnnnnnnnnnnnnnnnnnnnnnnnnnnnnnnnnnatatttctgggttttgttcttgcagatgctatcgtttggaaataaatctaagaaaacagagcctaacagtttgagccaaattcctcccatgctccgttcccacctatgttgycaccctttttatgttcttcatggaaatgtctcctttctactctgaaattacagagccacctctctctagatgtttctgt

SEQ ID NO: 716549 - DNA, 1134 bp, Homo sapiens
atatgtattaagtaccacatgtttgctaattttgtctaaaagttgaatatctcaagttacattttatggtgcttcattattcattgtgcagtttttgaaaaggtattattttctttttgaataaaagattctaaggaatattgaaattttaatttcatgcatactctctagaattctagaatttaaaagaagtttacaataaacctgatgtatttttaatatataattaaaaggcactgtacacctctactacgtgcctccagaagcatatactgagctgccttaggatgttaagtatgtatgtaacggtctgaattgttaggtgacagttgatagcagatgtaaaagttaaataagaagggaaaaaagaagacaataaatcatcaataatccattcaaccatttcctgacttaacatggttctctcttttattaagtgtcttcgaactgttagagtttttagaaagtgattttgtggctagaagaaaatagtgtgtgaagctcttggagtattaatagaaatgccttttaagctccttttagtgaagctttacaaaactatacactcaaattatgcctcaaatatttcttttgtattggatagatattaagctctaagtaattgaaaacagatttttccccctcctccttttagagggaaaattgttcctggtttactcttcagtgttaatttattctattttattggtccaagtacctgtgcccttcttctcttctcctccatctgaccccctcccaaaaaacttgatgtggctagacaatttcatcatcacttcttaaaacaacatcttcaatatccaccartgtatttggtaagataaggaagttggcatttatggaaaaatcttatatgcatagaacactagagcatcagagtaccatcccagtttatctgagagatgaagccattcataatcattaataaggatatgaacttcataatgtaagcacaagaatgctcacagctacatagtttaaatagaaaaaaggaaataaatgtatatttataagacactggctgaataaattatattacataaatatatagtgaaccattacacagttactgaagttgatgatattgaacaagcaagacttgtgggaagtacaata

SEQ ID NO: 716550 - DNA, 644 bp, Homo sapiens
atatctacttttgaattatttgtcaaattattgggcagaaattcagaaagaatgcttctttatgcttacctgttaatgaggatatgtctgtaatacacctgatcaagaaaaactaagaacacccatgccagtggttcaaaacattggaaagtcagcaaaaggttaagatgagggggaaagaggagaatttgtgtttttataaccaagttctgcttgttacattttacgagtgacaagcaggttttgttgtggattagcaggactcctggaatttttgccctgctgtatcttctagatgtagtattgataattcagtttctgtaatgagtgactgcaaagggaagtggaagttggcgcctcacttacttccgaaataggaaggtttcattttatgatgatttgcaatgtggttctgcttctagtggtgctcttcttatacctaggaatcactttgaaattttaaaacagatttggagcacgatgtaaaatgtttattttttctagttaaaaagtaactccaaagctgaaaattttctatctacacagccctgmgtaattcttaaatgactgtgaaatgatttttacctacccaattatatccatggtaagcttatatgtgacttttattattttcacagaagatt

SEQ ID NO: 716551 - DNA, 1055 bp, Homo sapiens
tgtaaaaactgaaattataaaactaccggaagaacaaatagggtaaagtttcttgacattggtgttggcaatgatttcttggatatgataccaaaagcagagacaaacaaaaccaaaatatacaaatgggattgctgtaaactaaaaagttgaatgagagaaaatatttacaaaccatatatttaataaggagctaagggccaaaaacaaaaacaaacaaaaaaaaaactcctacaacttagtaacgtcaacaacaacaacaacaacaacaacaagaacccaacgaagtttaaaaatggggaaagggctctaatagaaatttctgtaaataagtaacatttctttttcttactctggctccatttttttggcttcctgctgaagccctgatctcacttgtgtctccctttctaaractgttcttctccatgctctccaaagatccacacgtgggacagaacatgttttcctctatttccctccaaccactagtcaaaaagaaattcagaaagtttaggtaacatgctcaagagagcatggtgatggagcagggacatacttcaaggttttctgcctgaaaaccagagctattcctattcatctttctttctgatgtattggccaatgacatatggtgggcagggaactcatgaaatgaagtgaatttgacttatcctgagatagtaaaacattcgaagtggtgaaaatttaaatatttttcaaagagaaaacttttaatatttagagcaatgattattttactaatattcattaattggggataatgttcttattatcattatgtaagagttatctataaataaaattatctaacgtttcaatatgtggcaaagtatttagtttcttttttttttttttttttttttgagacagagtcttgctctgttgcccaggctggactgcagtgatgcgatctcggctcattgccacctctgcctcccaggttgaagctattttcctgcctcagcctcctgagtagctggggttacagtcaagagccatggcacctggtcttcatcaataatttttagtgt

SEQ ID NO: 716552 - DNA, 726 bp, Homo sapiens
tttctgaaaaacgtgtcttgcacatattctacatacccctcactgtaaactattaaagcaaactcaaatctatacgacaagattaaacactgaatatttttgaaaaacatgagctattagctgttggttgacaaaactcatttctttatatttttatcttttccttttttcttctaaaaactttttaaaattagttatttcaaagcctatgcactttgaaaacatggaagaacaagtgctccactttgcagtattgtggattgaataattttccagctaactactactatttctaataagaaaaagaaattaaaaggtggaagttttgacttcttactggcaaggcaaaaaaagaaaatttaacacctgtggtgaaaataactctgaaacgtatcttcttccttacttccttaatttcttatgaataggttttgtttcaatgctctgtacaaaaratgtttgttttaaaacttggagtgtgttttcctacagaaaccacgtcataatcagaggctgggtgctcatgctatgctataatcatgaggctttctgctcagtgttacacagtccacattacctgagcaggaactagaagaaatgaacaaaaacagactcccatggaccctgatttctacctactaattggtcaaagacttcagtcccctaaaacccaagccccaagctgctttctgagatgtccttaggtctgggatccaccatggatac

SEQ ID NO: 716553 - DNA, 591 bp, Homo sapiens
agtgaagccatagacactacataaaggagagggtgacgctgtgttccaataaaactttacttacaacaacaggcagcaggcctgatttggcctgcatctatagtttacagacccctgagaatgatgattgttctttttaaatacattgatttcataataactcattcttaaagcagtagaaaatgtttgatccattttrcctcactgttaagcaggacaggtatagttatacccattttaccagtgaggaaatagaacacagagaggttttgtgagtttgaaggtccccagagtaggtgttggcacaggcactagattatatgtctccttcttccattctggtgtgttcttcacttatcgtgcaatgcaaacacctcttgcagatggaggtcagccttttgagactgtcaagcagggaattagataagaacagctttgaaaagaaaggagatggctgccaggaagcctgctataagatctcctaaaggagagggtctctggctgtctttcagagtttggctctaaatttacacatagttctaacggctctggtcatctgatttctcagatgaccagattagccgcagcaaa

SEQ ID NO: 716554 - DNA, 631 bp, Homo sapiens
ttatcaacaaagacccttaattattcccttttttatttttggttatgagacttcctttttattacacctatttggccataccttattttccttgccatttttttttaactgtcccagagcttttatttgacgttttctatcatttcagtatttcagttcctagagaggatattttgttgtacatttatttctcagaattatttataaaaccatgaaagtttaaagctggcacttggtttcaatccctttccagaagctggagacacacttgtggttgtggttctttttgttggggagaatacattggtccctagcttttgtctcttgtttgttaaccagtsctcaatacaaggtgacctgaaacagtctactggcctttggtaattttgtttaccttatttcttttctttttctatccctcactccctcctttaccttggtcttacaacgtttttcaaaaatgatgagcagtttgtttacctctaaatccattatttgtattatttctcacttacctgcaactgaatctgcaccacagaaatttaattgattgctgagagattatttgggaaatatgataagagaatatgagttacgggggttttataagcacgagatataaaaataaaaa

SEQ ID NO: 716555 - DNA, 631 bp, Homo sapiens
ttatcaacaaagacccttaattattcccttttttatttttggttatgagacttcctttttattacacctatttggccataccttattttccttgccatttttttttaactgtcccagagcttttatttgacgttttctatcatttcagtatttcagttcctagagaggatattttgttgtacatttatttctcagaattatttataaaaccatgaaagtttaaagctggcacttggtttcaatccctttccagaagctggagacacacttgtggttgtggttctttttgttggggagaatacattggtccctagcttttgtctcttgtttgttaaccagtgctcaatacaaggtgacctgaaacagtctactggcctttggtaattttgtttaccttatttcttttctttttctatccctcactccctcctttaccttggtcttacaacgtttttcaaaaatgatgagcagtttgtttacctctaaatccattatttgtattatttctcacttacctgcaactgaatctgcaccacagaaatttarttgattgctgagagattatttgggaaatatgataagagaatatgagttacgggggttttataagcacgagatataaaaataaaaa

SEQ ID NO: 716556 - DNA, 669 bp, Homo sapiens
ccatttctattttagtttttacttcattgaaactttttttaacaagacagaatgaaaaagattctcctgtctaacagtttcttagtttgtaggagatacatattatattactttctgccacaagcataatcatgataaattaagtaaacaaacggctgagacaaccataatctcttaaagttaattcatcatgacagacacaaaggacataaacacagtaagaaacttatcctaaggtgtttgcattttacttacaaaggttgggaaagaaaaattcaacatgaaaagacttcaaggacttcaagttatgggagacataactttatatactatatatatttatattctatatatatagaatataaagaatacatattttatatataatatacctattatatataattttttatgctacatatttatrtcctatatatgtgatatatatatgattatataaagttatcatcaatacagctatgtacctaaaatacaattactttgaaccaacacttagagtaactatcaggaatttttttctcaatatgtgatagagaatagtattttgttagcagctatttaaggtgagaggggaaaaaaagctacttgaaatattaatggaatttaaatacaatatagaaggtaaaaatacaataaataatgagttac

SEQ ID NO: 716557 - DNA, 619 bp, Homo sapiens
acctcatttaattctcaccgtaaatctaagcggtagcaactattatgatcgtcattttgtaaatggggaaactaaggcacgactccgtctcccaaaaaagacagtctcccaatggagtctcccagaaaagatggagtctcgctctgtcccccaggctggagtgcagtggcaggaacttggctcactgcgacctccgcctcccaggttcaagtgattcccctgcctcagcctcgcgagtagctgagactacaggtgcatgccaccacgcccggctaatttttctattttagtagacggggtttcaccatattggccaggctggtctcaaactcctgtcctcaggtaatccgcctgcctcggcctcccaaagtgctgggattacaggcatgagctaccacgcctggcctgttttttttgttktttttttttatgtggagtctataactgtcatccaggctggagtgcagtgctgtgatcttggctcactgcaacctccgcctcctgggttcaagcaattctcctgcctcagcctcccaagtagctgagattagaggcccgcaccaccaccacgccccgctaatttttgttatttttagtagggacggggtttcaccatgtt

SEQ ID NO: 716558 - DNA, 1895 bp, Homo sapiens
gtattatttctataaggacatgtattcagaacacattttcraggtgaggacagcctattcactgcagtacatatagattaccagggactaaatttagctcaaacacactagctcacaagagaatcttccaggttggggttcttgccaatgatgggttgttgctgaaaatgcaagcttttgagctcaattctcactcggcaagatttagaggaagccatggacccattcattcctaggttctcatctctgttcccaatatctcttatgacttggacaagttattaattcacctgagccctcatttcttcatctacacaatcagaattattctttctttttgtagacttagtgtgatgttaagtgaaataatgtattaaaactacagcttagtccctagcaaagaagacatcaactaaatgttagtttccttttcctttccccttcttttagttaattgaatttatgttttactgagaaaagtagaggaaagtactccgacgacagtgtgtgtcaccagaaatctaagcgcatgggaggtcaggggagaggaaggaaaatttgcaattgctgccttcccagccatctttccaactggggacatcccccttcctgctttctatcaggaatgttacaatctgtatatccattttctcaatccagcactttcagcttacatctgacaaattcacagaagtgctctttgtcctttaagctattccagaagctaaaatgacttagaaatgagctatttgtataggacagcaggtagtcaaggcaccagacagaggggatcattatccaggtcatggccatttgctggtcacgtcaaatcttttggtttccaagagaatcgccctgaatcacattaaaacttggaggatttgtaaagataataggcccaagcacccttcctcttctcctgacagctctgttgtaactgagttccgaatgccaggcattgtccatgccatgaaatctagacatcaggcagtcagggatcaagggatggcaaacagtataaaaatatctgttgcaacccaccacaaaatgactgcttcaggagtttgctgacagctaactgtgctgagctgaagtaattaactcatgtgtttgttgtcacagacaatctgggcattgctgcttgactgcttctaagaaggggtttatttggattaagtttagcaactgcagagcaaatttccttcacttgctgttccacagtgtttgaggcattgttttttgtcgtgtttttcagtaactttctcacacttacacatctgaggaattttctggagaatagctctgcagtggcccccacagcagggtaccacctttcagagttgaaacaggtcctcactgaacagtcaatgtcacttccagtcggggcacactgtgtcccaagtttacaattaaaaactctgctgtcttgagaagaactgtggttaattcctggtacaaaccttgcatcaggagagtcctatgccatcttccactaaagcaatcaagtgtgaacaccagtgcagaggggctggtctggccttaacaatcctcagatggtgccagagtcggtagatgccagctcatgtgcatcttatacaaagactagcagcaaatctcatcagggattggttgagagcatgcctgtattttccaatttgttccccttgtgtttggagacttaacaagactatcattgttgatttactttttttttttttttttagtattgtgttactatgaccttttagtcttgtaacagccatggagaggtaaatcaaagtaaattctggggattatttttactataaaagacttttgaagagccagaaagtagattagtggttgcctagggctggaggcggagggggcaaagggagtaactgctaatggggaca

SEQ ID NO: 716559 - DNA, 599 bp, Homo sapiens
gtagtggtgcaatcttgactcactatagcctcggctccagcagttcttctgcctcagcctcccgagtagctgggaccacaggtttgcaccaccacatctggttattttatcattattattattattatttgtagagacaaggtctcattatgttgcccatgctggtcttgaactcctgagcccaagtaatcctcctgccttggccttctaaaatgctgggattagaggtgtgagccactgaggctggtagagcttcttgacaacaggaatcaattatttgtatttaaatacttctggaggaaggagcaagggagaataagagagagaagtaagagaggaaggaactaaaaccaatttctcacaatttttattcttgtatcttttttatgacataataaataagactatgtattagtctgttttcacattgctataaagaatggcctgacactggttgatctataaaggacagaggtccawttggctcacagttcagcatggctggggaggccccaggaaacttacaatcatgacagaaggcaaaggagaagcaacacactttcttcaaaggtgacaggaatgagaatgaacacaggaag

SEQ ID NO: 716560 - DNA, 603 bp, Homo sapiens
aaaaaggacatggaaactatatattgacatgaaattatttccatgagttttcttattaaaagaaagttgataaattgtgcatgaacatatcattagtgttgaaaaatacaagagaggtaaacgcacatatgtaattgcttgtatttacttaaaatattcctgagaggttacccaagaaagaaaaattttggttgctcctgggtcagaggatcatgtgaatgtactaccattacaaaaaattaaacaaatgaaaatttttacaagtgaagtgtgaagggtgaaatgaaaaatcaaactagataaaatgtataaatgagactgtaaataagtgggagtgatgtattccaaaacaaaaacaaattaatttttcatggagcaattacaaaattattattattattwtttttttttttgggagatggaggattcttgctcttttgcccaggctggagtgcaatggtgcgatgtctgctcactgcaaactccatctcccgggttcaagtgattctctcgcctcagcctccaaagtagctggaattacagttgcctgccacattgcccagctaatttctgtattttagtaaagatggggtttcaccattt

SEQ ID NO: 716561 - DNA, 584 bp, Homo sapiens
gattctcagtgattgcccatctttgtctattcagaaactgttttataatcatctaggattttcttccggctgaatgataaacacagagttaatcttttgccatgttcattttcttttgttatgtttgtgttttttcctcactctgaaagatggagtactttgtctcctgtcttaacctctttggtcttcctgacttgttaaagagttatagcattcagcaraattcccatgcaggctcacagtagacaactggtcaagtcagatttgcagtgtgtcgggggcaggtcttttatggccgcttcacgtgtcatgggcatcagttctttcatcctaacgcgccactttttgctgtcgttctcctagactgagaagagaggcagggattgagtgatggacactggactggaagttctcttttataaaataggcgtcatacctacctctccaggtagaaatatgtaaaaggtctttgtaaactgtgagggggtattcaagtgtagaatttttaaaaagcaaaatagaagtgaagggtttctttcccccccttttttttcctatcatgtattaactacaccatttacctt

SEQ ID NO: 716562 - DNA, 1159 bp, Homo sapiens
tttctaatttaccagtggcaaaggaaatattactaaaattctgaaaaaacatatttttttctgaaaaggacagtagtaacaaaacatatgataaatgtctttccacataaagaccaagagcctttactagtttccctaatgttaaatatgattttgcagtaatatttaattgttaaatattaaacccaccacattttattctaagagacaaactaattaatacagaaataaccactcaagtagagcttacttacaaaaacataaagacacaatgtaaaatctaaattatttggcagaaattgaactaaaaagtagacaaaagcagatattcaatattttacattgtggttttgctggctacttttaaaatagaactttaggcttttcagatattactgaaagtgtgtaccaatattattttcttaaaaatgttgggagtgagtattccagggcaagaagtgccatgttccagtgccaccagagatgaacatataaataattttgcaatgatacggaagccatgtcatggcacacgttaagctagcaaaatgtttttcattacaacttaagtaatgaacagacattgctaatataactwattatatgtataccttgaacatgatagtaatatgaaggacattttttttctttagtttcattgcctagatacacaactagctctgttttgtataaaactattaagaattacgttgtcaacaggccaggcgagcctgtaatcccagcactatgggaggccgaggcaggtggatcacgaggtcaggagatcgagaccatcttgtctaacacggtgaaaccctgtctctactaaaaatacaaaaaattagccagttgtggtggtgggctcctgtagtcccagctacttgggaggctgaggcaggagaatggcgtgaacctgggaggcagagcttgcaatgagctgagatcacgccactgtactccagcctgggagacagagtgaaactctgtctcaaaaaaaaaaaaaaaaagatgttgtcatcaagtaagtctgttatagatgtatgttctgatggtgcagctgcaatgacatgacaatattttgagtatacccagattaaggattttcttccagaatgtaaatcaacttactgatttcttcaccgatcaagttttgcaatgg

SEQ ID NO: 716563 - DNA, 660 bp, Homo sapiens
ccatctctactaaaaatacaaaaaattagctggatgtggtgacaggtgcctgtaatcccagctactcaggaggctgaggcaggagaatcgcttgaacctgggaggtggaggttgcagtgagctgagatcacaccagtgaactccaacctgggcgacagagcaagactctgtctcaaacatacatacatacataaaaaaatgctctctgttttcaccttcagtatttactgtagagattgaattaagcttaagaggaggaatataatgtaatgattaaggattaataattaaaatcatggtctttagatgcagacggaattgggttatgatcctggcttcatcagtcactagatgtcacctcaggaaagttgttaagggccctcagaatactcacaaaatggaccattcaaatgcacyttccagaatgtagcaagaatctaattggcactatggctgccatgggtaaaagggggctggagttgtcatttcttcttattgtttagtctctttcgtgtctttcttccgtaactagttgctccaaaggtggggattagcaaactttttctgtggagatctagagagcaaagattttaggcctcatgggctgtatagtctctgttgaaaccactcaactctgccattgtagtgcaaagacatcca

SEQ ID NO: 716564 - DNA, 607 bp, Homo sapiens
tgaaaacactcccaaatctgtccgtaagctccctgtagaaataatgaccttcctggtaaaatcaagagatgattaraagtaattaatggatacttctcaaaaaagacataacaatcagaggatctggaagccagctgttgtaacatttcttgagaacaaggtgcattttattggcttcatgaaatgcatgccttcggccccacagcagaaggccaggaaacgcagatctgacccagggataatgccagttttctgttcttatatcctttcagcacagagctcaagtcttagaaaacaaggggcaattttctgaactgacttgatgttttcttgtgtgtgacctgacaaatgtgagtgccttacttgatgatctgagggaacaggccccttatcttcacagacagagcaatcactcaattctagaaggaagccagggaaagaaggaagacaacaatccattgagccttggtttcctcatctgtaaagtagaatactactatctatactgcacaggtagatatgaagattaaataaaatactgaacatacagaatattagcaagggcagggagtggggagaggggttgatcacaaagcagcagcttgag

SEQ ID NO: 716565 - DNA, 642 bp, Homo sapiens
aaaccaccagtagaatcttacagctcttttagaagtatatctatatccactatcattcaataggttcttaactcaatttatgtgaatgttttatgaaaatgagtctttaaaaatactgattattccctctatgctgactatttgatgaattaatgttgatgtattagtctgttttcatgttgctaataaagacattctcaagactgggcaatttacaaaagaaagaggtttattggacttacagttccacgtggctgggaaggcctcacagtcatggcagaaggtgaaagacacatctcacatggcggcagacaagagaagagagcttgtgcagggaaactgccatttttaaaactatcagatctcctgagacttattcactatcatgatagcagcacaagaaagacctgctcccatgagtcaattacctcccactaggtttctcccatgacatatgggaatygtgggaattacaattcaagatgagttttgggtagggacacagccaaaccatattagttgaatactgataataaattgttaacttctaggttataacccatcccaaatgttgttaaatacttacgagtggtgctgaggcccatgtaattgcttaatcagatctcagaggaccattgagac

SEQ ID NO: 716566 - DNA, 789 bp, Homo sapiens
attcatttatatacccaaaaaccacaggcaaccttaaagctattgaaataaaaataaacaaataaaaatgaatgaacaaacaaaatatatggaaacaatctaaatgtccattgatagatgaatggataaagaaaatgtgttataaacatacaacagagtattattcagacaaaaaaggagattctgccatatgcaacaatgtggatgaacctgtaggatattatggtaagtgaaatgaggcagtcatgaacaaatactacatgatyctatgtataggagttatcttaaatagtcaaaattatagatgtggagagtagaatggtggtttccagagactggtgaagagggaaagatgaagttgttgttcaacagtataatgtttgttatgcaagatgaataaattctataaacctgctgtacagcatagtgcctatagttaacaattctgtattgttcagcgtatctggaaatgattctaactagcaactccctaaatctgactttttgcctttgtaacgcggtgatgagaaaactctcacaaaaaaaaaaaaagaaaagaaaagaaaagaaaagaaaagaaaaggaagagagcaccccacacacagtaatttgtatacatgatattttcttcatatcaaactaaacatgatcataccatttgttcaaccactcacagtgtactagaaaaaaaagatagaattattgaaggaaaattttataagaatgacattttccagaatttgagaagaaaataatatgactaagtcaaataatactgagtcttaagag

SEQ ID NO: 716567 - DNA, 897 bp, Homo sapiens
tatagcatctagaccattctttggaaggtagtgaaaatgtgtttatgcttcacaaacatccgtatccagtccctgaaaactatcctgggaggattttttaaacgctttgcccagaactatcaattataactaatcctacacttcatcaatataaaaaaattataaaataatgagatccccaggcaatgcaagtcaaaaaagttttaaatttgacttattaaaatgaattctcacacctatcctttctccagcccattttctaaattcacccagctctctgagtttccaagttctccatacaagaaagaacaaggtagaattgagctgaggaagcaaaggaggtctttggaagaacacccacaccctccaacaagcccagcagtgaygttagccggctcagggccaagcctcaggagatggctgtaggcaccatctctgaacaggtgcaggctttccttctgccatgcagaaagttctcactccacagcaaatacaaatgcacacttgggaaaaacaaaccccaggcaatctggagtaaaacgtggctttctctacctgatgttcacaatcaaagtttctgtgagtttcctactgaagtcagtttaacaagggaaatttgaaatagttccacactcaatctatttggtggtatctgaagaaggtcacagtagaatggcctgaacagggtttgtggaggactgttattgtctgttacacaaaaaaatataatatgctcttttgtggtttgtctacttacatcaaattagctaagcagtccacattagtgagcactgccccatctagggtgtgtgtttgcatggatgggtgtgtggtgcaagtgtgtggcccccttcctaggagagaaaactcatctcctcccttctacatcatatagtg

SEQ ID NO: 716568 - DNA, 897 bp, Homo sapiens
tatagcatctagaccattctttggaaggtagtgaaaatgtgtttatgcttcacaaacatccgtatccagtccctgaaaactatcctgggaggattttttaaacgctttgcccagaactatcaattataactaatcctacacttcatcaatataaaaaaattataaaataatgagatccccaggcaatgcaagtcaaaaaagttttaaatttgacttattaaaatgaattctcacacctatcctttctccagcccattttctaaattcacccagctctctgagtttccaagttctccatacaagaaagaacaaggtagaattgagctgaggaagcaaaggaggtctttggaagaacacccacaccctccaacaagcccagcagtgatgttagccggctcagggccaagcctcaggagatggctgtaggcaccatctctgaacaggtgcaggctttccttctgccatgcagaaagttctcactccacagcaaatacaaatgcacacttgggaaaaacaaaccccaggcaatctggagtaaaacgtggctttctctacctgatgttcacaatcaaagtttctgtgagtttcctactgaagtcagtttaacaagggaaatttgaaatagttccacactcaatctatttggtggtatctgaagaaggtcacagtagaatggcctgaacagggtttgtggaggactgttattgtctgttacacaaaaaaatataatatgctcttttgtggtttgtctacttacatcaaattagctaagcagtccacattagtgagcactgycccatctagggtgtgtgtttgcatggatgggtgtgtggtgcaagtgtgtggcccccttcctaggagagaaaactcatctcctcccttctacatcatatagtg

SEQ ID NO: 716569 - DNA, 1559 bp, Homo sapiens
caccaccatccaagtttttaaacttctaatcaggttcccaagattttcctgggaaaacgtaaaaatgctctaaactctgcccccaaagggatcctcaaaatgtgctccatgrtacatttctttttctttctttcaagacagggtgatatggcttggctgtgtccccacctaaatctcatcttgaattgtagctcccataattcccacatgtcctgggagggacctggtgggaggtaattgaatcataagggcgggtttttcctgtgctgttcttatgatagtgaataagtctcacaaattctgatggtttcataaagaggaattcccctgcacgtgccctcttgcctgctgccatgtaagacatatcttgctttctttcccttcaccttctgccatgattgtgaggcctccccagccatgtggaactgtgagtcaattaaacctctttcttttataaactacccagtctccagtgtttttttttttttttttctgagacagaggcttgctctgtcacccaggctggagttcagtggcgcgatctcagctcactgcaagctctgcctcctgggttcacgccattctcctgcctcagcctcctgagcagctgggactaaaggcgcctgccaccatgcctggctaattttttgtattttttagtagaaatggggtttcaccttgttagccaggatagtctcgatctcctgacctcgtgatccgcccaccttggcctcccaaagtgctgggattacaggcgtgagccactgcgcccggcctcgagtgtgtttttattagcaatgtgagaaaagactaatacacagggtctcgctctgtctccgactggaatgcagtgatgcgatcaaggctcactgcagccttggtctcctgggttcaagaggtcctcccacctcagcctcctgagtagctgggactacaggtgcaccaacacgcctggttaatttttttatttaaaagatatatttttttttactttctttttgagactgaaggaaataatgtatacagtggtccatctccaagacaaagtgccttgaatcggcttaggtcagcaaactacagaagaaacaggatatacaaggcccctgcttggatagtcgatgcctacttgttggctttccccttcttcccctctctgctccccattagttgcccttacccaaaccaaaaaaagtttagtttaaaagtttactagcctgcaaaatagctaattttgtctgttcctatcagcctgcccagctacttaggtcataagtcaaatacttgaaaagcccctaagctaactagaattgcaatgcattgtgggctgcaacaaaatgcagcaagacaaccctaaaaacaaacaaacaaacaaacaaacacgcctaaagccactatgcaacaatcaataggtgacatctgggaagatcgtgaccccatagtactcagcctatgaggaaccaggggagggacctgtgcagtaggggataaattgcttgttgaaattgtgctgggtgtgcctgctcatcagacacctgatcttgcaagaccatcattaaaag

SEQ ID NO: 716570 - DNA, 1367 bp, Homo sapiens
tgcccaggctggagtgcaatcactcaatcttggttcactacaacctctgcctcctggattcaagtgattctcctgcctcagcctcccaagcagctgagattataggcactcaccaccawgcccagctaatttttgtattttttgcagagacaggctttcaccatgttggccaggctggtctcaaactcctgaccccaagtaatctgccttggccttccaaagtgctgggattacaggtgtgagccactgtgcctgtctcaagtttttgttttactttttacactgtgcttctttatatgttcataaaaggaaaccctgtctttagcagtagccttttcttcatgtcttcttttctgagctctgcaaacaatttctccccattctatcttcatgactctcattattcacccgtcacctttccttaggtacctgcaccccattggccctgttctgcaccacacctggtgtctcaggcccttcctgctgctgcaacaaaatacccatgactgggtaattttataaataatagacatttatttctcacagttctggaggctgggaagtccaagattaagacactaacatccagtgtctgatgagggtgtttttgctgtgtccttacatggtggaaggcagaaagtaaaaaagggatgaatggtgtgtgaacctcttttataagacattaatcccattcactagggcagagtcctctggcttaatcatctcctaaatgtcccatctatcatattggtgactgtgtttcaacatataaattttcgaggacacattcaggccatagcacctgcccaggactacagctctccttgagggagggaaggtggaggaactaagcagacaaaaccagaattctcttttgtcggctaggtttactcaaacaatgtccattctatcacgcttgctgggagcacggcagctctgtgctgcctcggcatgcgtttaagagcccttttgttcttttaattacctagacattgcagattattaaccatatgagtagctagctcagtgctaggccttggagtaacaaaggggcagagggtgactaagatgctgcagatttctttatttagagacaaggtctttctctatcacccagacttcagtccagtggtgcaatcttagcatactgcagcctcagacacctgggctctagtgattctcctgcctcagcctcctgagtagctgggactacagacacatgccaccatgtctggttaatttttaaatttttattttgtagagacaggagtttcactttgttgcccaggctatcctcaaactcctgctctcaagcgatcctcccacctcagccttccaaagtgctgagattacaggcatgagccact

SEQ ID NO: 716571 - DNA, 1367 bp, Homo sapiens
tgcccaggctggagtgcaatcactcaatcttggttcactacaacctctgcctcctggattcaagtgattctcctgcctcagcctcccaagcagctgagattataggcactcaccaccaagcccagctaatttttgtattttttgcagagacaggctttcaccatgttggccaggctggtctcaaactcctgaccccaagtaatctgccttggccttccaaagtgctgggaytacaggtgtgagccactgtgcctgtctcaagtttttgttttactttttacactgtgcttctttatatgttcataaaaggaaaccctgtctttagcagtagccttttcttcatgtcttcttttctgagctctgcaaacaatttctccccattctatcttcatgactctcattattcacccgtcacctttccttaggtacctgcaccccattggccctgttctgcaccacacctggtgtctcaggcccttcctgctgctgcaacaaaatacccatgactgggtaattttataaataatagacatttatttctcacagttctggaggctgggaagtccaagattaagacactaacatccagtgtctgatgagggtgtttttgctgtgtccttacatggtggaaggcagaaagtaaaaaagggatgaatggtgtgtgaacctcttttataagacattaatcccattcactagggcagagtcctctggcttaatcatctcctaaatgtcccatctatcatattggtgactgtgtttcaacatataaattttcgaggacacattcaggccatagcacctgcccaggactacagctctccttgagggagggaaggtggaggaactaagcagacaaaaccagaattctcttttgtcggctaggtttactcaaacaatgtccattctatcacgcttgctgggagcacggcagctctgtgctgcctcggcatgcgtttaagagcccttttgttcttttaattacctagacattgcagattattaaccatatgagtagctagctcagtgctaggccttggagtaacaaaggggcagagggtgactaagatgctgcagatttctttatttagagacaaggtctttctctatcacccagacttcagtccagtggtgcaatcttagcatactgcagcctcagacacctgggctctagtgattctcctgcctcagcctcctgagtagctgggactacagacacatgccaccatgtctggttaatttttaaatttttattttgtagagacaggagtttcactttgttgcccaggctatcctcaaactcctgctctcaagcgatcctcccacctcagccttccaaagtgctgagattacaggcatgagccact

SEQ ID NO: 716572 - DNA, 1367 bp, Homo sapiens
tgcccaggctggagtgcaatcactcaatcttggttcactacaacctctgcctcctggattcaagtgattctcctgcctcagcctcccaagcagctgagattataggcactcaccaccaagcccagctaatttttgtattttttgcagagacaggctttcaccatgttggccaggctggtctcaaactcctgaccccaagtaatctgccttggccttccaaagtgctgggattacaggtgtgagccactgtgcctgtctcaagtttttgttttactttttacactgtgcttctttatatgttcataaaaggaaaccctgtctttagcagtagccttttcttcatgtcttyttttctgagctctgcaaacaatttctccccattctatcttcatgactctcattattcacccgtcacctttccttaggtacctgcaccccattggccctgttctgcaccacacctggtgtctcaggcccttcctgctgctgcaacaaaatacccatgactgggtaattttataaataatagacatttatttctcacagttctggaggctgggaagtccaagattaagacactaacatccagtgtctgatgagggtgtttttgctgtgtccttacatggtggaaggcagaaagtaaaaaagggatgaatggtgtgtgaacctcttttataagacattaatcccattcactagggcagagtcctctggcttaatcatctcctaaatgtcccatctatcatattggtgactgtgtttcaacatataaattttcgaggacacattcaggccatagcacctgcccaggactacagctctccttgagggagggaaggtggaggaactaagcagacaaaaccagaattctcttttgtcggctaggtttactcaaacaatgtccattctatcacgcttgctgggagcacggcagctctgtgctgcctcggcatgcgtttaagagcccttttgttcttttaattacctagacattgcagattattaaccatatgagtagctagctcagtgctaggccttggagtaacaaaggggcagagggtgactaagatgctgcagatttctttatttagagacaaggtctttctctatcacccagacttcagtccagtggtgcaatcttagcatactgcagcctcagacacctgggctctagtgattctcctgcctcagcctcctgagtagctgggactacagacacatgccaccatgtctggttaatttttaaatttttattttgtagagacaggagtttcactttgttgcccaggctatcctcaaactcctgctctcaagcgatcctcccacctcagccttccaaagtgctgagattacaggcatgagccact

SEQ ID NO: 716573 - DNA, 1367 bp, Homo sapiens
tgcccaggctggagtgcaatcactcaatcttggttcactacaacctctgcctcctggattcaagtgattctcctgcctcagcctcccaagcagctgagattataggcactcaccaccaagcccagctaatttttgtattttttgcagagacaggctttcaccatgttggccaggctggtctcaaactcctgaccccaagtaatctgccttggccttccaaagtgctgggattacaggtgtgagccactgtgcctgtctcaagtttttgttttactttttacactgtgcttctttatatgttcataaaaggaaaccctgtctttagcagtagccttttcttcatgtcttcttttctgagctctgcaaacaatttctccccattctatcttcatgactctcattattcacccgtcacctttccttaggtacctgcaccccaytggccctgttctgcaccacacctggtgtctcaggcccttcctgctgctgcaacaaaatacccatgactgggtaattttataaataatagacatttatttctcacagttctggaggctgggaagtccaagattaagacactaacatccagtgtctgatgagggtgtttttgctgtgtccttacatggtggaaggcagaaagtaaaaaagggatgaatggtgtgtgaacctcttttataagacattaatcccattcactagggcagagtcctctggcttaatcatctcctaaatgtcccatctatcatattggtgactgtgtttcaacatataaattttcgaggacacattcaggccatagcacctgcccaggactacagctctccttgagggagggaaggtggaggaactaagcagacaaaaccagaattctcttttgtcggctaggtttactcaaacaatgtccattctatcacgcttgctgggagcacggcagctctgtgctgcctcggcatgcgtttaagagcccttttgttcttttaattacctagacattgcagattattaaccatatgagtagctagctcagtgctaggccttggagtaacaaaggggcagagggtgactaagatgctgcagatttctttatttagagacaaggtctttctctatcacccagacttcagtccagtggtgcaatcttagcatactgcagcctcagacacctgggctctagtgattctcctgcctcagcctcctgagtagctgggactacagacacatgccaccatgtctggttaatttttaaatttttattttgtagagacaggagtttcactttgttgcccaggctatcctcaaactcctgctctcaagcgatcctcccacctcagccttccaaagtgctgagattacaggcatgagccact

SEQ ID NO: 716574 - DNA, 1367 bp, Homo sapiens
tgcccaggctggagtgcaatcactcaatcttggttcactacaacctctgcctcctggattcaagtgattctcctgcctcagcctcccaagcagctgagattataggcactcaccaccaagcccagctaatttttgtattttttgcagagacaggctttcaccatgttggccaggctggtctcaaactcctgaccccaagtaatctgccttggccttccaaagtgctgggattacaggtgtgagccactgtgcctgtctcaagtttttgttttactttttacactgtgcttctttatatgttcataaaaggaaaccctgtctttagcagtagccttttcttcatgtcttcttttctgagctctgcaaacaatttctccccattctatcttcatgactctcattattcacccgtcacctttccttaggtacctgcaccccattggccctgttctgcaccacacctggtgtctcaggcccttcctgctgctgcaacaaaatacccatgactgggtaattttataaataatagacatttatttctcacagttctggaggctgggaagtccaagatyaagacactaacatccagtgtctgatgagggtgtttttgctgtgtccttacatggtggaaggcagaaagtaaaaaagggatgaatggtgtgtgaacctcttttataagacattaatcccattcactagggcagagtcctctggcttaatcatctcctaaatgtcccatctatcatattggtgactgtgtttcaacatataaattttcgaggacacattcaggccatagcacctgcccaggactacagctctccttgagggagggaaggtggaggaactaagcagacaaaaccagaattctcttttgtcggctaggtttactcaaacaatgtccattctatcacgcttgctgggagcacggcagctctgtgctgcctcggcatgcgtttaagagcccttttgttcttttaattacctagacattgcagattattaaccatatgagtagctagctcagtgctaggccttggagtaacaaaggggcagagggtgactaagatgctgcagatttctttatttagagacaaggtctttctctatcacccagacttcagtccagtggtgcaatcttagcatactgcagcctcagacacctgggctctagtgattctcctgcctcagcctcctgagtagctgggactacagacacatgccaccatgtctggttaatttttaaatttttattttgtagagacaggagtttcactttgttgcccaggctatcctcaaactcctgctctcaagcgatcctcccacctcagccttccaaagtgctgagattacaggcatgagccact

SEQ ID NO: 716575 - DNA, 2172 bp, Homo sapiens
tattgcttatttctaggcccagccagtccagcctaatcagtttgttccatcctctccatcaccagtaattggtttcaatttaagcacatgatcaagttggactaaactggagttcatctaggactctggctatgtggatttcagctggggttgccaaactgaagggctcattcatttatgcatttaactaatcttttgtaaatatctatcctgtcaggcacccttctaggtggcagatggaagcmacataaaggaaaacaaaagagttggagggaaagaaatagacgattggagcatctggattcaactatacctcaagttagattaacccctggactttttaactgcatgaatcaacaaatcttcttttagtttaagacattttgagttagtttctgccacttgcaacccagagtcctaactaagatcccaccatcatccccagggtctaactgtggcaactggactaaagcctcacctccttgtactgtccgccttgcctgcttccagttatggtcctatccctaagccagttctagcaggcttgtggtccattcctcatcctttctagcatttccaaacttaatttggagtgactctccaaatctaacttagactggtcccaaaatcttggaagaaacctattctccaacttcaacatagactggccttttttcctttgaggagaaagaaaactgaacagcgtgaatatcctcacataaatacatgcaaatacatcactagaatcagatgtggagctggaggtaccccaccagggcagctcctcctacgtcatatccaatgcagaaatgctgtctcattgtctatgaccatccatcctctggttaaatgcctccagagacagaaagctcactacctcagaagccatcctgttctattgatggacaacttctatatatgagatgtgtcattattataccaaaataaaaattactccctctgaaatttccattgctttatgctatttctgttaaatagagcaacaaagagtcagctttcttcattgtctacttgtcagcccttcaaatacttgaggacaattagtatgtctgcttttagtgtgtatttttctacagttcattcagctattccttgaaatatgtaacttccagatcctttaacatcccagttctcttagtctaaatatactctgatttgtcaacatctcttttaaaatatgttattcctcccatccaccccatccctgaactcacctttggggtgatctgaaaagcccagaggactgtgtgcaggtcactttcaatgggctaaacattgaatttgtgatgacaaatcctaagatgttattggctctttttcttttagcaaacacaccacatggttgattgatagttttagtacaattcttgacacatagtaggcttccagaatgtggcactgaagctccaggtgatccaaaacctccagagtctgtttacaagaacctactgcattgacggtccctcttttcctttcctaccttggaaaatggatagtttgtttttttaacacaagcttcaagctaggatcccagctggtttgttcatcatggtacgaccactacccagaacagtgtctggcacatggtagggattcaatgagggctgattaactcaatgactgtaaatacaagaacctcctgtttacttaatttttgaatttcaaccttgatatttagttagttgaggtaatttgccgtctaaactcagtattagttatatttcttaattcatgttccctctaaatttaataagtctgccttgtgcggccttccctaagacattgatgaaaacattggagaggctggagccaaagttggaaccctttaggactcaacaagagaccttggtcaaggtgacattgagtcattagtcatactgtgggactgagcagcaaacccaccttagctttcatcatctcactctggcaaggctttctaaagctttgttgaagtcaaaacacagatttagtaggtcaagtcttatgaaattattttttctaggtcaaggttcaatagcagcaatttcatgtggttcaacctcattaaaagcacccactaatagttagccaatgttttgtttgttaatttttctggactttccttaaagaatctatactggttctgttctgccatgtctagcatctgccatc

SEQ ID NO: 716576 - DNA, 2172 bp, Homo sapiens
tattgcttatttctaggcccagccagtccagcctaatcagtttgttccatcctctccatcaccagtaattggtttcaatttaagcacatgatcaagttggactaaactggagttcatctaggactctggctatgtggatttcagctggggttgccaaactgaagggctcattcatttatgcatttaactaatcttttgtaaatatctatcctgtcaggcacccttctaggtggcagatggaagcaacataaaggaaaacaaaagagttggagggaaagaaatagacgattggagcatctggattcaactatacctcaagttagattaacccctggactttttaactgcatgaatcaacaaatctycttttagtttaagacattttgagttagtttctgccacttgcaacccagagtcctaactaagatcccaccatcatccccagggtctaactgtggcaactggactaaagcctcacctccttgtactgtccgccttgcctgcttccagttatggtcctatccctaagccagttctagcaggcttgtggtccattcctcatcctttctagcatttccaaacttaatttggagtgactctccaaatctaacttagactggtcccaaaatcttggaagaaacctattctccaacttcaacatagactggccttttttcctttgaggagaaagaaaactgaacagcgtgaatatcctcacataaatacatgcaaatacatcactagaatcagatgtggagctggaggtaccccaccagggcagctcctcctacgtcatatccaatgcagaaatgctgtctcattgtctatgaccatccatcctctggttaaatgcctccagagacagaaagctcactacctcagaagccatcctgttctattgatggacaacttctatatatgagatgtgtcattattataccaaaataaaaattactccctctgaaatttccattgctttatgctatttctgttaaatagagcaacaaagagtcagctttcttcattgtctacttgtcagcccttcaaatacttgaggacaattagtatgtctgcttttagtgtgtatttttctacagttcattcagctattccttgaaatatgtaacttccagatcctttaacatcccagttctcttagtctaaatatactctgatttgtcaacatctcttttaaaatatgttattcctcccatccaccccatccctgaactcacctttggggtgatctgaaaagcccagaggactgtgtgcaggtcactttcaatgggctaaacattgaatttgtgatgacaaatcctaagatgttattggctctttttcttttagcaaacacaccacatggttgattgatagttttagtacaattcttgacacatagtaggcttccagaatgtggcactgaagctccaggtgatccaaaacctccagagtctgtttacaagaacctactgcattgacggtccctcttttcctttcctaccttggaaaatggatagtttgtttttttaacacaagcttcaagctaggatcccagctggtttgttcatcatggtacgaccactacccagaacagtgtctggcacatggtagggattcaatgagggctgattaactcaatgactgtaaatacaagaacctcctgtttacttaatttttgaatttcaaccttgatatttagttagttgaggtaatttgccgtctaaactcagtattagttatatttcttaattcatgttccctctaaatttaataagtctgccttgtgcggccttccctaagacattgatgaaaacattggagaggctggagccaaagttggaaccctttaggactcaacaagagaccttggtcaaggtgacattgagtcattagtcatactgtgggactgagcagcaaacccaccttagctttcatcatctcactctggcaaggctttctaaagctttgttgaagtcaaaacacagatttagtaggtcaagtcttatgaaattattttttctaggtcaaggttcaatagcagcaatttcatgtggttcaacctcattaaaagcacccactaatagttagccaatgttttgtttgttaatttttctggactttccttaaagaatctatactggttctgttctgccatgtctagcatctgccatc

SEQ ID NO: 716577 - DNA, 2650 bp, Homo sapiens
cttctgttagaggctgagcagggaataacactataaggtttgccrctgttcatccttattattgtgtgtatgttgttagtggaactgaagaggaatatagactgggaatattttcagaaggcaaagaccaagatgatgaaaggtcttcaaaccatgtctggtggataaagattaaagaaactttaagagtttacacctggggactaacctttaaaatttttgaagagttaaaatatgaaggaagaattaaatttattttttttgatctcaagagagagaattagcttgaaacttctggggaacagattccttttaatatgaggagtttgcttggtcagattggcaggagatgacaagaattgtcttggaaccatagtaagttttccagtgctagagaacattgctagagaacattcagtagaacatggcatggtcatttcacaaggatcttgagagagatttaagtttaagaagtatggtttaccctgatggcctttaaggactcttctaatactggcattttattattctagggcaacattaatctgatgtccagattgtaggatgttagatttgtataacatggttggtgtttgtccttttaaaaattggttttagttatcaagaattataaccacttaaaattacttactgtaaaattccttggaatcaatcctaaactcttaatagaaattttatgaagaatttacatttttaagtagttttgaccctgggaacttcttgaagattagttgattagttttatttaagagatgataatgatttaaactaatatatgccattgctaaagcctccggaatccccttagaagtctagacttctgtagattcatatttagcctgagagttgctggcttcagagggagatgagccctttatttttctttctttggagggaatacagagggaggcaaagaaaaccaaagtgaattattactaaaggactttgtgattactaatactaatgtaaacagaaattaagattttttttttctttttctttttctcattctcattctttctttcccaaacagatggggcacaatcatttttagctgctttgtttgcattggacaggtaaggaaggccaaaacattcattgattattgacagtgacttctaaattcttatctaattaattccattggcaaagctgtgtttaattaatgcctagcttaattaagcagaacccataaatgcccatgtgatataatccatagtctattttaagccttgaaataaatgaacattaatattttaacttcacagatttattaaggagaaatattaaaactattgtagaagttgagatttatcatgttccttttgcttctctttaatactttgaatttactttttcattaatttgacatgaacttctacattataggttgtttttgccctgggtggaatatttaatgctttttggctgatggaatttggaagatttgtatttgggtaagttatgcataatttaatttatcctaatgtattattgttttagtgttcatctatgaaagatctttaaaaaaccttgtctcttctggggaattacttcaaatctttgaaacctagcttcatatgcataagagtatttcttagttgtcttagttttcctttaaaataagcaacaattttgaatggtcctaatcaactctgtgtggggtttgagtattaaatagttctctggaaatgatatttttcccaggcattttgcctgttctgttgtattaaagactatgatttgaaccacatttagaaaagtatagaccatcgatttctaggttggtgactgatggacatttcactctttcttagcaagtgatgcgagggtcctttcaaccctgtccaagagctttgcttgaatgagcacaatatgtgtaagctgactattctgtgtgaattcttatagaccagttgttctacctgaattgcattgtctgttcagtaagcctattctgagaccagccttgggcttgctgccctgagggacccagatgacagaactgactcagttttaaaagcataacttattcaagctttgcacaggtgtcaggagcatgtagacataggtgacataccccaaaaagtaaccgtcagtgagagagaaggaagaagaatgtatgtaaagttatgacagggattcagaaacagaaatgtggtcagaaatggccttacagatgaagtaggccttgacagaagtacaggatttggattattagaagagagggaaaatatttttgggctaggacagagtcacaagaaataagactatttcttatttgtcttaagactgtttcttagtccttaatactgaggtggcctcggtgtaaggatatggaggaaggaagctcctaactgaaggcccttggaggagaatcgtaaatattgaaacttactgaaggaaaattaaaacccaggaagtaggagagtgttgaatatggaaagtgaatgtggggattgattgatggagagctttgcatattgttctgaaaaatgtgagtttttatgttttcacaaagcatggaccacttttcccacatctgcattttatataatatcgatggtaatgtagtaaccaagacgactccttttgttgcctatcatggttattattgcagtatatcatg

SEQ ID NO: 716578 - DNA, 696 bp, Homo sapiens
gtactttattatttgtgaggatgtctactcatctatgccatgtcttgatcctcaccaaagtgagttgtagattaagttcggtggcctcacagtcatcatgttgcttaatttgcatttctttaattgttaatgaggttaggacattaattaggatgacataaataatcctgacataagtaatatgggttcagtaaaactagtaagttaactgaatttctagttcttagcacagcacttgatacatagctagtgcttgttaaatatttgataaatgaatggaagattggcaaaagtgctaatctgaatctatgatgctgacaacttaaaaatatttcttatcaagggtcttttttgktgcagtgaaagagtattgggctactcaatttatcaggtattatctggttcagggttttagttaagagaattattaccctggggttataatacctataatacctaaaaatataaatatatatttatatatataaaatatataaaaatataatgcctctgccattagtttggcattttataaagcaatctgcatactgatgtgttccagggactggcatgctggtatttttaaaactaaacttagacacacttacacagtgtactatcattttctcttcttctcttcatgttcaagaagctttaaagtcatttacatgcctaaatattgttttccttttttta

SEQ ID NO: 716579 - DNA, 1441 bp, Homo sapiens
ttgaagttttaaattttcatgtagccagatcaatcagaccttatatttcttattttttcctattactttcatacttagaatgcccatgtcttccaagagctgatgtatacttttataactagtattacaatgtgtaatccagtcttaggatttgcaatatctacctatattttcactttagagttttctcatgggatgatttttaaaactatataacgtacttggaattcattctcacctgtagtgttaggtgaagatctaaaatttatttgcaaataaccaagtagtatttttagtgattttatatcctagttattaaatactaagggttcctacattataggcctgattaggagctttcttctttgttctattgagctccaagcctgtttctctgacaataccatgatggtttattgtttaggtgatttattatgtctagttatcgggytgagttaggttcctctcatttctcttccccaaactctgactcccagtttttctttgctgttctcacttattctccagaaggtttttagaacattttctaagcccttcccctcacttataattttttttttgagacagagtcttgctctgttacccaggctggaatgcagtggtgtgatcttggctcactgcaacctcctcctcctgggttcaagcaattcttctgactcagcctcccaaatagctgggaccacaggtgcacgccaccatgccaggctaatttttgtatttttagtagagacagggtttcaccatattggtcaggctggtctcaaactcctgacctcaggtgatccacccaccttggcctccctaagtgttgggattacaggcgtgagccactgcatctggcctaacttgtaattttgattataattattttaaactcataaattaatctgggaaagtagttatctttataatatgcagtttcctcaactagaaatattccccattcttttaattcattttttgttttattctgttgtatgcatattatgtttcagttttgaaacatttgttaattatgcgttcttagtagtatataattcttgcatacggcaatttggactgattttaaataatattggaaggtcacatacaataataagcaaattaataatagcataaaggaatccacctctcattttgagaaagattgcttgtattgtagaaaatagctgttagcatataatgtaaaataagattctagtattctgttaagcactttaagtttttcagttgcatatactacccctattttattaaactatatttaatttttttatttgggaatgcttttcttttctatacctaaaagctctgcaatttgttggtctgtaggttatcatgcaagaagttctcaagcctttttgatttttgtgcaataaagtacagctttgcataagagtgaaattgggctagcttaaat

SEQ ID NO: 716580 - DNA, 3032 bp, Homo sapiens
tgtaattttttcattgcctcaatttgcatggcacatcatttagattttttttttagtgtggaaaatatgtgcagatattgatgtgtgcattaagtacctttattataatacttgttacagaatataccaagttactcatttagagtaggggtttttaaaagaaacctttttattgaaatatactcataatgcatgtttcaggattttagagctctttgagttttaacaaacagattgtgactgtataactgaatccagattgagaaaccagcatccaaattgagaaataaaaattactagcatcccataagctcccttcatggtctctttctgtcactgcttcttccaagagtaaccagtatcattacttgtgactctgtatattagtttttcatgcttttgttctttaacaatttacatacagtatgtacttttttggggcctgtcttctttcagaataggttatttattttttcatatctcacagataagtgagaaactataatcacatttaaatacagcatttaatttggacacagatcctttttaaatcttactaaaaatgtcagaatttggtactggaatgatagaatcaaccatatattaccaataacattttaattcaacataggatataaaaagctgtgacttttcctcctcttttcagaaataaaccatgatcctagtttcttgaagaaaaaaagggacattggtgtctgtaatttttaaagtcagatttcaaataaaaagtactctgcatgaaaatgagttcacctattttattttcatgccattggtactgtatcaccattgaagattgtcattgaagtttcttttaaaaactagaaaagatgacttagcagcatcttggataatgtattttggcatcagggtttccttgaggttttcaagtcgattgtaccaagacttattaaaaaaaaaaagatctttctgtgtgagatagggtcaatgaaattgtatttctttggcacttaacacgagactgagttatttcactgtactttgtcaggtatctctgtgttctcctttgcacttgagagcagacaatttcttttttctgcatggttttctcttctcttttctccctaagacccaaagtagtctcatatcaactcttttctttttttttttttttttttctgagacgtagtttcactcttgttgcccaggctggagtgcagtggtgcgatctcggctaactgcaacctctgcctcctgggttcaagtgattttcctgccttagccttccaagtagccaggattacaggtgcctgccaccatgcctgcccaattttttgtatttttagtagagacagggtttcactatgttggccaggcttggtctcaaactcctgacctcaggtgatccgcccgcctcagcctcccaaagtgctgggattataggcatgagccaccatgcccggcctcatatcaactcttaatggcttctggtacttttttcttttgaaatcttcttttcattttgacctactagtgtattttcctagacattgtgatttttggtttgattctattcaggtactgtttttgtttttgtttttgtttgctaatttctttgtggcatctttttatttccattaatactaggcattacccaaagttctattttaggttactgtcccttttcctctcagtcattcttcataagtatcagatgtgtgtatatctgcatgaattcttattttaaaatatctaaacttgacttttttctcatttctgacgtgtatttttacatatttacttagatgtgcctccatcttttaaacatttcataaagcacttctgcttccctgttcttcccagtctcttccacctatttctttgtcaccagtggcagcatcacttatcttcgtgaatttaagtgtctttatctgtaaataattattaactcaatattttattttttgctattagtaacattatatcaccagaggattactgctatttttgatgagttctgctttattcatatataatatggtcatatctttatgatttccctacattaaaaaacatattgatagctactatttctgagatataatcactagaattgagagtgagaaagaaatagtttttttctcttttatattctagtaaatactaccatattttcccaagagctgtcatgttgttgtgaataaccccttaggtgcctcaaggaaarttaaaacaaacatctcccttctttctgtaacatgttattttaaaatatttctcttttgatacaaatatctttgcctctatgttttctgtatctattttatatttgaatgatacaacattagaagtgtatttaaccatattttagtttaaatctttcattattaaagtctttgcattattttatctgtctaaatattttacttgagtaaggttattttttccacagttttattactgtatactttattgatattgaagctaaaaattgtttgaacttgatttttctctcacactttcattgaagagagattttcctcctaaggaattaaagagatgtaacttttttccctcagattctcctgagaatgatattcctatggagatcaccacggcagaaccacaggtttccgaggcagtatatgactgtgttatttgtggacagagtggcccctcctctgaagatcgacctactggattagttgtactgttacaagcatcctcaggtaaaatcaaagtaattttttcatgggaacattttagagctgaagtatatacaacagattaataaatatctgtattaaatgaaaattatatctttgtctacttataactaggcaagggtcagtttagatccaaataacaaagattctttatcggttatatcttattttcctggacatgagtgttagaagaaactcctaacagagatcttgctgtatggtttcacaatttttttctttaaagtgtgatggtatattaccaatgctaggtggccaataactgcgttcagctttcttggtaattataattgttctggccgggtg

SEQ ID NO: 716581 - DNA, 3032 bp, Homo sapiens
tgtaattttttcattgcctcaatttgcatggcacatcatttagattttttttttagtgtggaaaatatgtgcagatattgatgtgtgcattaagtacctttattataatacttgttacagaatataccaagttactcatttagagtaggggtttttaaaagaaacctttttattgaaatatactcataatgcatgtttcaggattttagagctctttgagttttaacaaacagattgtgactgtataactgaatccagattgagaaaccagcatccaaattgagaaataaaaattactagcatcccataagctcccttcatggtctctttctgtcactgcttcttccaagagtaaccagtatcattacttgtgactctgtatattagtttttcatgcttttgttctttaacaatttacatacagtatgtacttttttggggcctgtcttctttcagaataggttatttattttttcatatctcacagataagtgagaaactataatcacatttaaatacagcatttaatttggacacagatcctttttaaatcttactaaaaatgtcagaatttggtactggaatgatagaatcaaccatatattaccaataacattttaattcaacataggatataaaaagctgtgacttttcctcctcttttcagaaataaaccatgatcctagtttcttgaagaaaaaaagggacattggtgtctgtaatttttaaagtcagatttcaaataaaaagtactctgcatgaaaatgagttcacctattttattttcatgccattggtactgtatcaccattgaagattgtcattgaagtttcttttaaaaactagaaaagatgacttagcagcatcttggataatgtattttggcatcagggtttccttgaggttttcaagtcgattgtaccaagacttattaaaaaaaaaaagatctttctgtgtgagatagggtcaatgaaattgtatttctttggcacttaacacgagactgagttatttcactgtactttgtcaggtatctctgtgttctcctttgcacttgagagcagacaatttcttttttctgcatggttttctcttctcttttctccctaagacccaaagtagtctcatatcaactcttttctttttttttttttttttttctgagacgtagtttcactcttgttgcccaggctggagtgcagtggtgcgatctcggctaactgcaacctctgcctcctgggttcaagtgattttcctgccttagccttccaagtagccaggattacaggtgcctgccaccatgcctgcccaattttttgtatttttagtagagacagggtttcactatgttggccaggcttggtctcaaactcctgacctcaggtgatccgcccgcctcagcctcccaaagtgctgggattataggcatgagccaccatgcccggcctcatatcaactcttaatggcttctggtacttttttcttttgaaatcttcttttcattttgacctactagtgtattttcctagacattgtgatttttggtttgattctattcaggtactgtttttgtttttgtttttgtttgctaatttctttgtggcatctttttatttccattaatactaggcattacccaaagttctattttaggttactgtcccttttcctctcagtcattcttcataagtatcagatgtgtgtatatctgcatgaattcttattttaaaatatctaaacttgacttttttctcatttctgacgtgtatttttacatatttacttagatgtgcctccatcttttaaacatttcataaagcacttctgcttccctgttcttcccagtctcttccacctatttctttgtcaccagtggcagcatcacttatcttcgtgaatttaagtgtctttatctgtaaataattattaactcaatattttattttttgctattagtaacattatatcaccagaggattactgctatttttgatgagttctgctttattcatatataatatggtcatatctttatgatttccctacattaaaaaacatattgatagctactatttctgagatataatcactagaattgagagtgagaaagaaatagtttttttctcttttatattctagtaaatactaccatattttcccaagagctgtcatgttgttgtgaataaccccttaggtgcctcaaggaaaattaaaacaaacatctcccttctttctgtaacatgttattttaaaatatttctcttttgatacaaatatctttgcctctatgttttctgtatctattttatatttgaatgatacaacattagaagtgtatttaaccatattttagtttaaatctttcattattaaagtctttgcattattttatctgtctaaatattttacttgagtaaggttattttttccacagttttattactgtatactttattgatattgaagctaaaaattgtttgaacttgatttttctctcacactttcattgaagagagattttcctcctaaggaattaaagagatgtaacttttttccctcagattctcctgagaatgatattcctatggagatcaccacggcagaaccacaggtttccgaggcagtatatgactgtgttatttgtggacagagtggcccctcctctgaagatcgacctactggattagttgtactgttacaagcatcctcaggtaaaatcaaagtaattttttcatgggaacattttagagctgaagtatatacaacagattaataaatatctgtattaaatgaaaattatatctttgtctacttataactaggcaagggtcagtttagatccaaataacaaagattctttatcggttatatcttaytttcctggacatgagtgttagaagaaactcctaacagagatcttgctgtatggtttcacaatttttttctttaaagtgtgatggtatattaccaatgctaggtggccaataactgcgttcagctttcttggtaattataattgttctggccgggtg

SEQ ID NO: 716582 - DNA, 1351 bp, Homo sapiens
tgacaaaaaaatcatacatgaagtaaaaagacatttgacaatctggtgaaatgtattgcaacttataacaaaaaggactaatacccataatacataaacatatcttaaaaatgaagagaaagctgggtgcagtggtgcgcaccggtaatcctagcaacacgggagaggctgaggtgggaggattgcttgagcccaggagtttgagtccagcctgggcaaaacagggagatctggtctttaaaacaacaaataataaaaataaagaggaaggctaggcacggtggctcacacttgtaacctcagtactttggggaggcccagatgggaggatcatttgaagcyaggagtttgagaccagcctgggcagcaaagtgagatcccatctccccgaaaaataataataaggaaaagaccaatgatccaattttttgaaataggcaacagattagagacttcataaaaagaaatgcaaatggatgggaatgaaagattgatgtctatgaatttattttgttatatagtttttacttcagaaaaatataaattttatacaataaaatataagtcaagggggaaaaaagcagtctttaaatattgaggaaaaaaactgaaatgagctgaactataaatcaagttgatggcataatcacatgggaaaagttactttatgtgatttaaaaacacagtttttgactatacatccctagaagtacatattctaatgacaaagataatttatggttagtagtaatattggtattttaaaaacataatcgaggctatactttagttatacaaataattatgttaatattattaggaatcaagactttaagagaaaaaagatacaagtaacaaaaaagaaataaaatgaaaactgtgcaatcttatgttgatcagaaataccagtaagaacacaggatctttttttcctttaaaaaaatatttcctaactctgtccactgaaatggcctataaacaatgataacctattagctatgtatgccctctagcacccagactgtggtctctaaataccatttgccattaaaaggaactaaatggagaaatggctgattccaagtataaaatagaaaatgtacaaaacgaacccgggccaacttgtaccagaaagtgaggatatgatgaaagactacttggctcatgtcaaaagtacaaaagtcagtttggaaagattctcactaaagtaaaagggaacaatttgtatcaaaaagaggaaagattgaaatggagtgaaacacatcaaatatatataaaatccatgagatcataaaatacaccaaagaccaaacttattggtcactgttggaagttaatagggcatccattc

SEQ ID NO: 716583 - DNA, 1351 bp, Homo sapiens
tgacaaaaaaatcatacatgaagtaaaaagacatttgacaatctggtgaaatgtattgcaacttataacaaaaaggactaatacccataatacataaacatatcttaaaaatgaagagaaagctgggtgcagtggtgcgcaccggtaatcctagcaacacgggagaggctgaggtgggaggattgcttgagcccaggagtttgagtccagcctgggcaaaacagggagatctggtctttaaaacaacaaataataaaaataaagaggaaggctaggcacggtggctcacacttgtaacctcagtactttggggaggcccagatgggaggatcatttgaagccaggagtttgagaccagcctgggcagcaaagtgagatcccatctccccgaaaaataataataaggaaaagaccaatgatccaattttttgaaataggcaacagattagagacttcataaaaagaaatgcaaatggatgggaatgaaagattgatgtctatgaatttattttgttatatagtttttacttcagaaaaatataaattttatacaataaaatataagtcaagggggaaaaaagcagtctttaaatattgaggaaaaaaactgaaatgagctgaactataaatcaagttgatggcataatcacatgggaaaagttactttatgtgatttaaaaacacagtttttgactatacatccctagaagtacatattctaatgacaaagataatttatggttagtagtaatattggtattttaaaaacataatcgaggctatactttagttatacaaataattatgttaatattattaggaatcaagactttaagagaaaaaagatacaagtaacaaaaaagaaataaaatgaaaactgtgcaatcttatgttgatcagaaataccagtaagaacacaggatctttttttcctttaaaaaaatatttcctaactctgtccactgaaatggcctataaacaatgataacctattagctatgtatgccctctagcacccagactgtggtctctaaataccatttgccattaaaaggaactaaatggagaaatggctgattccaagtataaaatagaaaatgtacaaaacgaacccgggccaacttgtaccagaaagtgaggatatgatgaaagactacttggctcatgtcaaaagtacaaaagtcagtttsgaaagattctcactaaagtaaaagggaacaatttgtatcaaaaagaggaaagattgaaatggagtgaaacacatcaaatatatataaaatccatgagatcataaaatacaccaaagaccaaacttattggtcactgttggaagttaatagggcatccattc

SEQ ID NO: 716584 - DNA, 1666 bp, Homo sapiens
  misc_feature 638, 639, 640, 641, 642, 643, 644, 645, 646, 647, 648, 649,650, 651, 652, 653, 654, 655, 656, 657, 658, 659, 660, 661,662, 663, 664, 665, 666, 667, 668, 669, 670, 671, 672, 673,674, 675, 676, 677, 678, 679, 680, 681, 682, 683, 684: n = A,T,C or G
  misc_feature 685, 686, 687, 688, 689, 690, 691, 692, 693, 694, 695, 696,697, 698, 699, 700, 701, 702, 703, 704, 705, 706, 707, 708,709, 710, 711, 712, 713, 714, 715, 716, 717, 718, 719, 720,721, 722, 723, 724, 725, 726, 727, 728, 729, 730, 731: n = A,T,C or G
  misc_feature 732, 733, 734, 735, 736, 737: n = A,T,C or G
ttatgtgacagtagaagctattgattattctctagatttattccttaattatttcatttcttaagtggaattcataaaactaaaattttttcctatttttcctatttgtttacacattggtaaagttgatataggaaaggcaggttaaatgcttgattttgtaccagttttcagaaaaatgacttttttttttagcattctccaaagatgattgcttttttcccagtattatgaattcttggattttaatatatttagtgtccttcagtcccatagtaaaataataactgtttaaatacttcaggttggcttgtatcctattgatgtaaccccaacagtctttgatagcctcttcagaccaaagctttattttttttattttttggggagacagtcttgttctgttgcccaggctggagtacagtggtacagtcataactcactgcagccttgacctcctgggctcaagcagtcctcctgcctcagactccccatgtagttgggaccacaggtgcacaccaccacatttggctaattttattttttgtagagacggtggcggtgtcggggggggggtctcactttgttgcccaggctggtctcgaactctgggctcaaggaatccacctgccttggcnnnnnnnnnnnnnnnnnnnnnnnnnnnnnnnnnnnnnnnnnnnnnnnnnnnnnnnnnnnnnnnnnnnnnnnnnnnnnnnnnnnnnnnnnnnnnnnnnnnncaaaagtagacrgcaaacatattttgaaaaacacttataaacaactatgacaaaataagatttaatattttaaaccatggagaatcattcatataattttaaacaataagatgccaacagaaaatggacagaggtccagaatatatcattcacaaagaatgtatacaaatagctaataaatataaaaatacttaactttgctagaaatcaaatagatttccattactttaggatcccatttttaatcactcatattagccaaaaaatgtttaagtgataatactttttttggtaagttttttccccaataataatcagaaaaaatcctggcagttattggctgataagataaaaatagccattctaaggacagagagagaaatggatctttcctagcacatcactggcccataactggaatgaatgaatggattgatgcacccctctgtagaaaagagaaccaaagatttcaactacagggtttaatatgatcattgtgataactatcttttaaaatgcttaatattttaaaatacataattgttctcactaagatcaggaactaggcaaagatgtccccactccccacttcttttcaacatcatactggaagtactagctaatgcctcaagataagaaaaggaaataaaagttatacagattgggagagaagaaataaaactgtctttctttgtttacagattacatggtcgtctatgtagaaaatctgaacaaactgaccaaaaaactcctggaactgataaatgattgtaacaaggctacaggacacaagattaatatacagaagtcaatcactttcatatatactggcaaggaacaattggaatttgaaaataaacacacagcatcatttaaattagcaaccccccccccaataaaatacttaggtataaatctagcaaaaaaat

SEQ ID NO: 716585 - DNA, 1297 bp, Homo sapiens
acagagggtcttattcagtaggaggtcattttcaagctttaatcagaaacagctaaaatttaaacagaggagttacatgaatattttgcaattgtgaacgatcttcctccctgatttgtaaaggaaaattgatgagttgcaagccaggagcatgctgcacgggtcatctagatgaaagatgacctagatgaaagactctctctggtaacccaccgcacctcatacctacttctattatgtatttactgtattttctggtaattactatttatacttgtgttcctccccaaatgaagcacactaaagagaaaagatccatcttataggcctagaacctaccacaggactagaaatatttagtacatatttgttgaaggttaaaatcattggggagtcacccatgccaatctttgaatttaaaatctagtgttacatcttgaatatacaaataggactacttgcatccaagttttgattgaatacttgaatttttataatttttactcatattcatcgtagacattttaaaatgaaaatatacataatgaagaaattttgaaatcaccatactaagcttcacttcccattccagcaggcataaccactaatatttgcaatatttcactccagacttcataaaaatattttgtaaacctgggatcatcctagatgcatgcttaatctcctaccttttacctatgcttgaaaatgacttttgtgtttcmataatattaactgccaaccacatctaactttatctctgctgtaaattaccctatgagattatgaatagctccaattacttcaagataaggggctggaatttgaattattgactcattcgtttttaagattagctttaagtttccttgaaattgaaaaacatgtgcatataatgcaacttttttagatccaactttcttccctttggaatgctgtggacattcccacattatctttcaccattgagtgttgctatgtagaaattgaaaccagttcaattcttgctcccatttttggggatttttttaatcctaaaaaattattgcttattcttgaagttcaatagttgaaacaaaagtctttaaagtttttctaaatgaaggtgtaactgacatgtagatccaattcttccttcatttcagggaatttacatgtctaggaatgtgttcttttttccaattgtaaagttttctactttagaaataagtcgtttatttttacaatggatatttgtgtgtcctccattgccaccatcttctgtaattaacataatggttttggcatttttctctgc

SEQ ID NO: 716586 - DNA, 653 bp, Homo sapiens
acgataaatgaaattcagatcttaaattgcttctttatctttcctagaactgccattacaaaaaaatctttcagcacataaagcaaactatccatctgttaatcagatgttcaatattatttactctcaacccagtaaacagatgtttattatatttagctaccaaattgtgccaatccagagagaaaaatattccaaataatgaacataaactgtgactaaaaatttgctagtaattcatgtgaaattctagcagtctgagaatgatgtacaaaatgaaggacattacaaatcattataattatctgatgagtttaatctctaactaacacatcttggccatttcttttaagcagttcaggtaggttgttgttgctttggagtttctcatgtgtttgtttgtttttaatataaggaatatccttcaaaagcagaaacagtagaaatgaaaataattttaaatagcttctaaaatattagtcatgaaattacaagttctccaatatgttgattctaaaaatcatactttgttgtgactaaactttaaagagtgtatgagattgccgtttgtttttttaatatatatatatatttttattatactttaagttctaggktacatgtgcacaacgtgcaggtttgttacatatgta

SEQ ID NO: 716587 - DNA, 1522 bp, Homo sapiens
atgccatgaagttggtaagctctatattaaaaaatgactattatcaaaatcttcatctaagtggttgaagtgaaagcaagcattctctcaccttggtctgacagaatgaacgtctatatgtggacttctctttcccaaacccatatcacaaatggcatgagctgaatatttccaagtgtgggtctgacttttaagttatttcccacattttcacttcacaagagatcccttaaaatattgtagtggtgacaatgacttcactcaaatagacacagaaccagcctttcacgtttctaatgcatttttctggagttcagactaaaatatactgcttatttgatctatcaggtgagattggtaatccctcactaatttaaaaattaccatgttgaatttgatccaatttaaaatatatatattgcttaaaatgccatttttgtgatttcttttttgttattctagccatgaaatacggaagctcagtctccttaatataaatgagttaattatttcaaagatcaaaaaatgacatttgctctttatttttaaagtagataataatgcttttatggaaaaaatctcctagaatctctatttcaatctaatcagagggaaatttgtataatttataagaaataaatacactgtggaaaacagaactattgaaaaataatgcatggtatttcctaagctgagccataamacatagcacttgtttattttaccatataattccagggttatcacttcgatgtttaaagcaaagacctctatcagttatctaagtgtatatatattggatataaaaagtctcaaacaaattacagagttttttagtgatgtaaggaaggaaatttaaactctcagtcatccttcctgaagcttacagcattttagtgaaactcacatagatcaatgtaagtatatatttcatatgacacagctctcaaactagacaccaaagagttctggtatccatgcattagtcagaaaaatcttagtctaccgccataccaccttgaacgtgtctggttccatctgatcttgaaagctaagctggggcgggcctggttagtatctgaataagggatcacgtgggaataacgggtgctgtgggcttaaaagaaatttatttggtgttttatcttttcggaccatttgggttttcaaaggcaacagctcaaatcaaaccttaagcagaagttttaatttttagaggtttttttctgtcattctacagtctttgctactttcatgttaagaatttcctccattactttaaatatttatttacctatggctttactgagaagacttatacatatacatacatatgtataactggatttatacgtatatagctatatgtaactatttatacatatatagctatatgtaactattcacatatatcaacaagtaacaccctgaatcctaattgtgattgatgtaaagctgtttgtttttatagactgaagtttatgcccctctgcagacataactgtggtaggggctgtgctac

SEQ ID NO: 716588 - DNA, 602 bp, Homo sapiens
ttttagtgtatagaggctcccttgttcattttgccttgtmtctctcctgaaatcctggctggttccaagtcctgactacccccatgaggagaatcacagcccacctttagtggcactgatccaagcgggccttccttgcccacctccagacaactaaggcattggcaacacagcatctggcacagattctctgcaggcaagattattataccaattgaaaatggggttacaatggccaattggagtttgaggcatttaaaaggtaataataaatctattggcaattgaatagtcattaataacactaccatggaaacagattgacatagatttctcagattctcatgaattcaactttgaactccctaacttggtgtaaacaaaatgatgttgtggtttgtggtggtacaagggcgcgctgaggtctcaatgttggatcagagttttccagaatctacatatatgctccttggaaggtaatttaaaatcatgtaaaatctcaaccaacagtgcagtgcaaggtgctgagggctccctgtgcaccccgtgaaaatggccaaggcattgaacgaaagggattaggtatttccatgccaaccagt

SEQ ID NO: 716589 - DNA, 602 bp, Homo sapiens
ttttagtgtatagaggctcccttgttcattttgccttgtctctctcctgaaatcctggctggttccaagtcctgactacccccatgaggagaatcacagcccacctttagtggcactgatccaagcgggccttccttgcccacctccagacaactaaggcattggcaacacagcatctggcacagattctctgcaggcaagattattataccaattgaaaatggggttacaatggccaattggagtttgaggcatttaaaaggyaataataaatctattggcaattgaatagtcattaataacactaccatggaaacagattgacatagatttctcagattctcatgaattcaactttgaactccctaacttggtgtaaacaaaatgatgttgtggtttgtggtggtacaagggcgcgctgaggtctcaatgttggatcagagttttccagaatctacatatatgctccttggaaggtaatttaaaatcatgtaaaatctcaaccaacagtgcagtgcaaggtgctgagggctccctgtgcaccccgtgaaaatggccaaggcattgaacgaaagggattaggtatttccatgccaaccagt

SEQ ID NO: 716590 - DNA, 1342 bp, Homo sapiens
ctgaaatgcattcttcccatatggcttttcagggccctaagtgtgaatatgaactttgcatgtgaaagatgcttcattttgcattttgtttgcttgtttttgtttttttgagatggagtttcactcttgttgcccagactggagtgcattggcgcccaggctggagtgcagtggcgcgatctcggctcactgcaacctccacctcctgggttcaagcgattctcctcccttagcttcccaagtagctgggattacaggtgcccaccaccacgcccagttatttttctgtatttttagtagagactgggtttcgccatgttaagcaggctggtcttgaactcctgacctcaggtgatccacccrccttggcctcccaaagtgctaggattacaggcatgagccgctgtgcctggccaagacgtaattattaaaattaacaatgttcatctcagtatactgcctaaaattacgtgatatgccaaagtgggtgtatgtatcccactttgaggaatactgatgagaaaggatgttaggcctacagagatcttcatcttcagaagagcacagataagttctggtataatggaaatgacagcgtcttggcattttttactgctgccttcaaacagcagacatcacagcccacgatgatgagcctgctgatgccgacttcctgcattctgtggtacacctgggctcagcttagaaaggctctaccccaactcatacttcttcatggcaagatgaggtgaattcatttctacccatagtcattctaatctgcattttcataacccacctttccattctccaagtgtgactttcatttttaggacagagttattcagtcggtgaatatgcagtccctttaaagggatatttatcacccttgaagaatcttattgccaaatcttaatagtctttcttataacaaaggctcaaattcactatcaagattaagaggtggagcttgaatgagctttgctggagcatctcatgataaaatagattaaagtcttaaaatgggcaacccatcgaggtggaagtcaaacaaatatgcaaaagcgtccctgtattttcctcaggcagtttgggcactgtgggtgagcccagagggtgaatggtgggaagtgggagttaggccacgtggattttccctcaggctcagcggggtgacctcccatgagaagctgaaactatcttaattactttgtctgtaaaatagtggtggtgagcatggggagagcttgcctacctcagaggcttgtggtgaggattacggggaaaagtccatgtaaagtgctcccccctggtttctggcacagaacaaatgaatgaaatt

SEQ ID NO: 716591 - DNA, 1676 bp, Homo sapiens
tccaacattgcagtctgcaatctgcttcgtaactcttttctgcccaggactagaggtcataaggcccctactaactctctggcttcatccccagtactacctgttaaccaacctgacattcctcccatcaccccgcagatcctggccccaaagccttaccttggtgctagcagctgcctctgttttgaaagctcttcccctgagttctccatgaccaagtcctcacccytttcattgcagatgcttgcgtgttcccatcactgagttctaatttctctaatggaagtatcattctaaagttatcctttgtccttcttttattcttgttcatgggtatctccactagaaggaggatatatttttctggcagaagaacatgcccgtcctatttattgtgttatcactagtgtccactatagggatggacaggtggtaggtgttcaatatttgcctcatggatattgggaattactatatttattgttctgtgtcccaaagaacaaatgaagcccccacacccttcctgtttattgacttaaagtattgtctttgaatgttgaaaaaagtttttagaaaatgctgaacttacagggaaattcaccaaagtaatagtaatatcatgaagatgctcattgcttctgggctttccaaatctcatctttcctcaattgtgccttctctgcatgagcctaatttgaaaaaaacctggttcacagagggctgcttaagaagttgatggttttgtttatactcaaagtcattgtggggacctctattttcaccttttttggcctaggttgtcccagtacttctctcattctgtgattgatgtcatacgtgacaagtgtgatgggtcacttcactggcctctccaggcggtttattctttagctgacttcaccttgctctggccttatgtaaaggtccctgccctctggcttttagtgggttcaacccacaagtctgcaaactttctcaaagagccagataataaattttcagacattgcaggccatccagtctctgggcagctacactactctactctgccattgtagcatgaaagcagacatacacaataggtaaaccaatgagcatggttgtgttccaataaaactttatttacaaaaactgacaataggctaagatgtggcccgtgggctttggtttgccaatcaatggtttagccagtggaggattgggacaagaactcagagggagagaggagaataaatctttgcaggctgctctgtccttccattgggggttacagttcttctcagggagccccctccatgtggccgcgtcttttgggtctggaaattgtttcctcccctggccctctaggcttagatgtgggaaaggtgccccattattactggcatgttgctttatgctgtgggccccttttccttgactctgactgtacttttgctggttcctgcgtccatctcttgtcacatagctcaatttgcgtgtgccatcaatttcctgctgggattaagatacctggcagtgcagggtttcctgggatatgggacctctaaaaccgaaacctagacagtcccagtaaatcaggaggattaatctccctaactggaacccagccctgtctcctcccttggccctgctccaattaccttcattctggccctcagtacccccaacttggataa

SEQ ID NO: 716592 - DNA, 1676 bp, Homo sapiens
tccaacattgcagtctgcaatctgcttcgtaactcttttctgcccaggactagaggtcataaggcccctactaactctctggcttcatccccagtactacctgttaaccaacctgacattcctcccatcaccccgcagatcctggccccaaagccttaccttggtgctagcagctgcctctgttttgaaagctcttcccctgagttctccatgaccaagtcctcacccttttcattgcagatgcttgcgtgttcccatcactgagttctaatttctctaatggaagtatcattctaaagttatcctttgtccttcttttattcttgttcatgggtatctccactagaaggaggatatatttttctggcagaagaacatgcccgtcctatttattgtgttatcactagtgtccactatagggatggacaggtggtaggtgttcaatatttgcctcatggatattgggaattactatatttattgttctgtgtcccaaagaacaaatgaagcccccacacccttcctgtttattgacttaaagtattgtctttgaatgttgaaaaaagtttttagaaaatgctgaacttacagggaaattcaccaaagtaatagtaatatcatgaagatgctcattgcttctgggctttccaaatctcatctttcctcaattgtgccttctctgcatgagcctaatttgaaaaaaacctggttcacagagggctgcttaagaagttgatggttttgtttatactcaaagtcattgtggggacctctattttcaccttttttggcctaggttgtcccagtacttctctcattctgtgattgatgtcatacgtgacaagtgtgatgggtcacttcactggcctctccaggcggtttattctttagctgacttcaccttgctctggccttatgtaaaggtccctgccctctggcttttagtgggttcaacccacaagtctgcaaactttctcaaagagccagataataaattttcagacattgcaggccatccagtctctgggcagctacactactctactctgccattgtagcatgaaagcagacatacacaataggtaaaccaatgagcatggttgtgttccaataaaactttatttacaaaaactgacaataggctaagatgtggcccgtgggctttggtttgccaatcaatggtttagccagtggaggattgggacaagaactcagagggagagaggagaataaatctttgcaggctgctstgtccttccattgggggttacagttcttctcagggagccccctccatgtggccgcgtcttttgggtctggaaattgtttcctcccctggccctctaggcttagatgtgggaaaggtgccccattattactggcatgttgctttatgctgtgggccccttttccttgactctgactgtacttttgctggttcctgcgtccatctcttgtcacatagctcaatttgcgtgtgccatcaatttcctgctgggattaagatacctggcagtgcagggtttcctgggatatgggacctctaaaaccgaaacctagacagtcccagtaaatcaggaggattaatctccctaactggaacccagccctgtctcctcccttggccctgctccaattaccttcattctggccctcagtacccccaacttggataa

SEQ ID NO: 716593 - DNA, 614 bp, Homo sapiens
tcttctcaattaatgatcttaatacgcattacagcctccctgagatcagttgggtaaagctctgagcacagggccaggcacagtgtacacccttgcaaaaatattaatttgcctgggtgcaaggtgagggacatawccttttcctattctgaaactctactctgcttaggatgcatactgatggctctttttttgtgaatggatggaagtatgaaaggagcagtaagaaagggcactatcaggctgcatgcagtggctcacatctggaatcccagcactttggaaagctgaggccagcagatcacttgaggccaggagttcaagaccagtctggccaatgtggcaaaacactctctctcctaaaaatacaaaaattagctgaggacagtggtgcatgcctataatcccagctacttgggtgggtgaggcatgagaatcgcttgaacccaggaggcagaggttgcagtgagccgtgattgtgccactgcattccagcttgggtaacagagcaagactgttgaagaaaggaaggaagggatgaaggaaggaaggaagggattaagggagggagggagggaggagagggaagaaaaagaaggaaggaaggaaagaag

SEQ ID NO: 716594 - DNA, 614 bp, Homo sapiens
tcttctcaattaatgatcttaatacgcattacagcctccctgagatcagttgggtaaagctctgagcacagggccaggcacagtgtacacccttgcaaaaatattaatttgcctgggtgcaaggtgagggacatatccttttcctattctgaaactctactctgcttaggatgcatactgatggctctttttttgtgaatggatggaagtatgaaaggagcagtaagaaagggcactatcaggctgcatgcagtggctcacatctggaatcccagcactttggaaagctgaggccagcagatcacttgaggccaggagttcaagaccagtctggccaatgtggcaaaacactctctctcctaaaaatacaaaaattagctgagsacagtggtgcatgcctataatcccagctacttgggtgggtgaggcatgagaatcgcttgaacccaggaggcagaggttgcagtgagccgtgattgtgccactgcattccagcttgggtaacagagcaagactgttgaagaaaggaaggaagggatgaaggaaggaaggaagggattaagggagggagggagggaggagagggaagaaaaagaaggaaggaaggaaagaag

SEQ ID NO: 716595 - DNA, 1420 bp, Homo sapiens
ggagtccttccttcctatttccatggataggagaagagaagatatcatgcaggacattcaggggccatgtctagaagacgtgagaatccttccacccttattctgttggccagtgcttagtcacatgtctaaaattgtaatggagcagcagcaccatgtcctattgtgagaagtagccagagactaatctcaatgacagttcttatagcttgaaaaggtatttgcaaaatctaaagcaaaagttgccaactcgaatgcctagatgtccaagcaagtgtttaactgaattgagtgagcagaaacaagaaccagggagtggtgctgagaaggaaagcttggagaggggcactctacataacatgacaatttaacttgatgacagacttctctggctaaactaaccacatctgctggccacatccatcccttatgctgccagttggcaacctacagtatgggagagaaaaagaaaaaatcctttctctggaagcaaactccaaagttgggtatattcttgaatcagtacctgtcaggataaaaaaaaaccctttctttttaagaaagaamgaaagttctgtactacagcaaataaatggaagctaaaaagaaaacctggtataaagagtgtgatttaagaatttgctttctgtgcatacatttagggtagtggctcttgcatggaagagagatctctgagctgctactttaaaggatgcttggtgtcctacagaggtaacacaactcaatcatatcaggcactgatgttctgatggtgcagctgatcctgagatgcaaacaccccatgatcttctgctgtctgattccctgctatgtccctgtatgtagtctaaacagtctattcactgaacagttttttagtaacaacaaaagtaataatatgttggtaatagtttgtcaatgtctaccctggagaatatcagtgaatcatgaatatggatttaaatataatacatagaaataataatagcaagcatttattgagcaagtactatgtaccaggaactacttaaggctctttacaataattaactcacttaatcctcataacgggtgagataccattactcctgcttttcagcttagaaaactgagacacagaaggttacttgcccaaggatagcccgctggtaaacgagattcacactgaaccaacgtggcttaaacctgtgcttatagtccgtctgaaacgtgaatctttgtagcaggctgatggtaatttttagataatagaaatcttttgttaatcatagaatttgattattgctgtgctttcaaaggtgtcttggttacctctcatttcttaggtactcactgatgcataaatggacaaacatgtcatagagtaagactatgattgccgtggcattaaagataaatttggaatgatgctcagagcata

SEQ ID NO: 716596 - DNA, 2425 bp, Homo sapiens
taaactgaacaatattattctcatgtgattaatgaagacatgaatctctgagaggttacagaactaataattagaagagttaagatttgaatccaggctgggcacagtgcctcatgcstgtaatcccagtactttgggaggccgaggcgggtggatcacctgaggtcaggagtttgagaccagcctgaccaagatggcaaaacctcatctctattaaaagtacaaacattagccaggtgatggtgggtgcctgtagtcccagctactcaggagcctgaggcaggagaatcgcttgaacccggaaggtggaggttgaagtgagtagagattgcaccactgtactgcactcaagcctgggtgacagagaaatcatcagtttcaaaaaagaaaaaagaaaagctgaatccagtccagcattgtgcgacgcatacgtctctgcacttctctgttcctgagcgtcgctaactcaaagacctggcggcccagggagcacatgtgaagggaatttctgaggtggaccctccagttggcaggaagggggctttcacagggctttacctatctaacagtagtaccaaaaaaattttttttaatattaagtttacccaaaaagggcagtagggaaccaatttttcctgaaaatcaccagcttgtaactgcatcatgatatactacttcgttagtttaattgctctaatataaacatgctcttaaaataattttcacatgggtttaaaatttgtccttcaaataaaagtttgtctttatctcctctgataataaaaaatgaatgcttttatccttagtagaaaagaagctttacaagcaggcatatacatgagtggtgttcagattctgcccccactaatatttttgctaatatgtcctaaagaaacagtagatctgttggggtttggcaggatgccacaaggaagtaagattccaagtgcctgaagtttaaaacttctgcatggaacctttactacaaccgccatgaagaactagaagccagctaagacccatcagtttgaaacctatgtgtgctgacatcaccactgggctgggacactgtagatttcaaacagagcataaataattttcactacattggaaatatgcaagtgttagttcaaaactggggaaaaagatttggatggggagataaatgtatgataagaacagtacacagattttttgtgcactgaattagctttgaaagagcagtttttgttttttgtacaaaacatggcctgccccttaaggtaagattaacactttctttacacatttggcaagatcattgaatttccataaaatatgtaatttgatgaatgctggactggtcagaatgtgcatgtgaatcaaatatgcccttttgttcttatcttctcatctgatttgttactacatctagagtcaaatacattttcagttgattgaagcaacataatatagagatatgacaaaaaaggaatattccactcaatttactatcttaattacaccaagaaagggaaggcaataagatttgtctgctgacaacaaagtcccataatgaaaagggaaaacagattgaggagaatatgcttatgtacttaaacatcattattgttatcattaaaaccatatttcccccttggttgttctttagggtgggcagatttgttttaaataataaaggatcttcacaagcacctcaaacttaacatttcaggtcaagctttcatttattttttcatagtgcactgcagctgcctcctaagtcatcctgccacccctcttctcacctccaaagtatcctctatactgcttctagagtgttcttcctaaaatgaaaagcccagcatggcactgccctactcaattggggaagttaccaaagcccctttaactcattaatatgacacacaagtgccttcttagccgctctgcctcacatccccaattcttactgtatgtacctcttctttcctggcccctcccatctctctggtcatctcatattattgcaaaatgtaaacatactatgctctacacactttcctctactacattgccccttctgtcaagacatcccatcctcgtgtttctacaccatctcgacctggagaaccattgtcaccctggggaagtcctactcatccctcaagacacaattcaaatatccccatctctctaaagccttccctggcctctagcattccttcctcttgggttcccgtagaacttttactaaaataatgatcctgttagatgtcttcctgtttctccctactaagatatgaagactaccatagaacatatttatgatttatctagtggtctgctaaagctggctaatacaagcttgtgagagatgatcattaaatatttgaggattttgtgagctggtggttacattgtggttatttgaaatcaactgcag

SEQ ID NO: 716597 - DNA, 2425 bp, Homo sapiens
taaactgaacaatattattctcatgtgattaatgaagacatgaatctctgagaggttacagaactaataattagaagagttaagatttgaatccaggctgggcacagtgcctcatgcctgtaatcccagtactttgggaggccgaggcgggtggatcacctgaggtcaggagtttgagaccagcctgaccaagatggcaaaacctcatctctattaaaagtacaaacattagccaggtgatggtgggtgcctgtagtcccagctactcaggagcctgaggcaggagaatcgcttgaacccggaaggtggaggttgaagtgagtagagattgcaccactgtactgcactcaagcctgggtgacagagaaatcatcagtttcaaaaaagaaaaaagaaaagctgaatmcagtccagcattgtgcgacgcatacgtctctgcacttctctgttcctgagcgtcgctaactcaaagacctggcggcccagggagcacatgtgaagggaatttctgaggtggaccctccagttggcaggaagggggctttcacagggctttacctatctaacagtagtaccaaaaaaattttttttaatattaagtttacccaaaaagggcagtagggaaccaatttttcctgaaaatcaccagcttgtaactgcatcatgatatactacttcgttagtttaattgctctaatataaacatgctcttaaaataattttcacatgggtttaaaatttgtccttcaaataaaagtttgtctttatctcctctgataataaaaaatgaatgcttttatccttagtagaaaagaagctttacaagcaggcatatacatgagtggtgttcagattctgcccccactaatatttttgctaatatgtcctaaagaaacagtagatctgttggggtttggcaggatgccacaaggaagtaagattccaagtgcctgaagtttaaaacttctgcatggaacctttactacaaccgccatgaagaactagaagccagctaagacccatcagtttgaaacctatgtgtgctgacatcaccactgggctgggacactgtagatttcaaacagagcataaataattttcactacattggaaatatgcaagtgttagttcaaaactggggaaaaagatttggatggggagataaatgtatgataagaacagtacacagattttttgtgcactgaattagctttgaaagagcagtttttgttttttgtacaaaacatggcctgccccttaaggtaagattaacactttctttacacatttggcaagatcattgaatttccataaaatatgtaatttgatgaatgctggactggtcagaatgtgcatgtgaatcaaatatgcccttttgttcttatcttctcatctgatttgttactacatctagagtcaaatacattttcagttgattgaagcaacataatatagagatatgacaaaaaaggaatattccactcaatttactatcttaattacaccaagaaagggaaggcaataagatttgtctgctgacaacaaagtcccataatgaaaagggaaaacagattgaggagaatatgcttatgtacttaaacatcattattgttatcattaaaaccatatttcccccttggttgttctttagggtgggcagatttgttttaaataataaaggatcttcacaagcacctcaaacttaacatttcaggtcaagctttcatttattttttcatagtgcactgcagctgcctcctaagtcatcctgccacccctcttctcacctccaaagtatcctctatactgcttctagagtgttcttcctaaaatgaaaagcccagcatggcactgccctactcaattggggaagttaccaaagcccctttaactcattaatatgacacacaagtgccttcttagccgctctgcctcacatccccaattcttactgtatgtacctcttctttcctggcccctcccatctctctggtcatctcatattattgcaaaatgtaaacatactatgctctacacactttcctctactacattgccccttctgtcaagacatcccatcctcgtgtttctacaccatctcgacctggagaaccattgtcaccctggggaagtcctactcatccctcaagacacaattcaaatatccccatctctctaaagccttccctggcctctagcattccttcctcttgggttcccgtagaacttttactaaaataatgatcctgttagatgtcttcctgtttctccctactaagatatgaagactaccatagaacatatttatgatttatctagtggtctgctaaagctggctaatacaagcttgtgagagatgatcattaaatatttgaggattttgtgagctggtggttacattgtggttatttgaaatcaactgcag

SEQ ID NO: 716598 - DNA, 1465 bp, Homo sapiens
tgggctgtcatccaatagaaggggcttttacctggaacagttgaagttaatgaacaattactaattaaatactactgctgggcaccgtggctcatgcctgtaatcccaggactttgagaggcctaggcgggcagattacttgaggtcaggagtttgagaccagcctggccaacacggcaaaaccccatctctacaaaaatacaaaaattagctgggtgtgatggcggcatctgtaatcccagctactggggaggctgaggcagaagaatcgcttgaacccgggaggtggagtttgcagtgagccaagatcgcgccactggactccagcctgggtgacagagggagacttcatctcaataaataaataaataaataccagaagaatggcagatactgtgaatggttgtattagtcggagttctccagagaaacagaaccagtaggatacagagagagatgtgtaagaggggatttattatgggaattagttcatgcaattatggaggccaagaaatcccacagcatactgtcttcaagctggagatcaggaaagtgaaatttagtttgagtctaaaggctaaactcagasagccaggagcagccatgtctaagggcgggagagacagttgacccagatccagatgagagagtgaatttgctcttcctcctttttttcactctatccaggccctcaataaatgggctgatgcccagccatgttgatgaaagtggatctcctttactcagtctctcaaactgattgcttatgtcttccagaaacatcctcaaagacacacccagaaatactatttttccagttatctgggtatcctataaccgtatcatgttgacatttaaaattaaccatcacaatgtaccaggaaaggtagacctctgttctactctctagttggatgatgctggagggaatattaggacctgttgtagagtataaagaaagaacattttatttgcaaatatgcataattgtagttgacaccctgctacccataggttaaatacacaatttattctgggaaagaagagtaaaactatattaaaagttttaaatgtgctgctttctaatcatggaatacattatttttgccacttccattcaattatctgtcatggtattcatgttctctccatactagtcattataggatctcggccaagcacggtggctcacacctgtaatcctagcactttgggaggctgaggcgggcggatcacgaggtcaggagatgaagaccatcctggccaacatggtgaaaccccgtctctactgaaaatacaaaaattagctgggcgtggtggtggcgggcgcctgtaatcccagctacttgggaggctgaggcaggagaatcacttgaactcgggaggtggaggttgcagtgagctgagatctcgccacggcactccagcctggcgacacagcgagactccgtctcaaaaaaaaaaa

SEQ ID NO: 716599 - DNA, 1465 bp, Homo sapiens
tgggctgtcatccaatagaaggggcttttacctggaacagttgaagttaatgaacaattactaattaaatactactgctgggcaccgtggctcatgcctgtaatcccaggactttgagaggcctaggcgggcagattacttgaggtcaggagtttgagaccagcctggccaacacggcaaaaccccatctctacaaaaatacaaaaattagctgggtgtgatggcggcatctgtaatcccagctactggggaggctgaggcagaagaatcgcttgaacccgggaggtggagtttgcagtgagccaagatcgcgccactggactccagcctgggtgacagagggagacttcatctcaataaataaataaataaataccagaagaatggcagatactgtgaatggttgtattagtcggagttctccagagaaacagaaccagtaggatacagagagagatgtgtaagaggggatttattatgggaattagttcatgcaattatggaggccaagaaatcccacagcatactgtcttcaagctggagatcaggaaagtgaaatttagtttgagtctaaaggctaaactcagacagccaggagcagccatgtctaagggcgggagagacagttgacccagatccagatgagagagtgaatttgctcttcctcctttttttcactctatccaggccctcaataaatgggctgatgcccagccatgttgatgaargtggatctcctttactcagtctctcaaactgattgcttatgtcttccagaaacatcctcaaagacacacccagaaatactatttttccagttatctgggtatcctataaccgtatcatgttgacatttaaaattaaccatcacaatgtaccaggaaaggtagacctctgttctactctctagttggatgatgctggagggaatattaggacctgttgtagagtataaagaaagaacattttatttgcaaatatgcataattgtagttgacaccctgctacccataggttaaatacacaatttattctgggaaagaagagtaaaactatattaaaagttttaaatgtgctgctttctaatcatggaatacattatttttgccacttccattcaattatctgtcatggtattcatgttctctccatactagtcattataggatctcggccaagcacggtggctcacacctgtaatcctagcactttgggaggctgaggcgggcggatcacgaggtcaggagatgaagaccatcctggccaacatggtgaaaccccgtctctactgaaaatacaaaaattagctgggcgtggtggtggcgggcgcctgtaatcccagctacttgggaggctgaggcaggagaatcacttgaactcgggaggtggaggttgcagtgagctgagatctcgccacggcactccagcctggcgacacagcgagactccgtctcaaaaaaaaaaa

SEQ ID NO: 716600 - DNA, 1465 bp, Homo sapiens
tgggctgtcatccaatagaaggggcttttacctggaacagttgaagttaatgaacaattactaattaaatactactgctgggcaccgtggctcatgcctgtaatcccaggactttgagaggcctaggcgggcagattacttgaggtcaggagtttgagaccagcctggccaacacggcaaaaccccatctctacaaaaatacaaaaattagctgggtgtgatggcggcatctgtaatcccagctactggggaggctgaggcagaagaatcgcttgaacccgggaggtggagtttgcagtgagccaagatcgcgccactggactccagcctgggtgacagagggagacttcatctcaataaataaataaataaataccagaagaatggcagatactgtgaatggttgtattagtcggagttctccagagaaacagaaccagtaggatacagagagagatgtgtaagaggggatttattatgggaattagttcatgcaattatggaggccaagaaatcccacagcatactgtcttcaagctggagatcaggaaagtgaaatttagtttgagtctaaaggctaaactcagacagccaggagcagccatgtctaagggcgggagagacagttgacccagatccagatgagagagtgaatttgctcttcctcctttttttcactctatccaggccctcaataaatgggctgatgcccagccatgttgatgaaagtggatctcctttactcagtctctcaaactgattgcttatgtcttccagaaacatcctcaaagacacacccagaaatactatttttccagttatctgggtatcctataaccgtatcaygttgacatttaaaattaaccatcacaatgtaccaggaaaggtagacctctgttctactctctagttggatgatgctggagggaatattaggacctgttgtagagtataaagaaagaacattttatttgcaaatatgcataattgtagttgacaccctgctacccataggttaaatacacaatttattctgggaaagaagagtaaaactatattaaaagttttaaatgtgctgctttctaatcatggaatacattatttttgccacttccattcaattatctgtcatggtattcatgttctctccatactagtcattataggatctcggccaagcacggtggctcacacctgtaatcctagcactttgggaggctgaggcgggcggatcacgaggtcaggagatgaagaccatcctggccaacatggtgaaaccccgtctctactgaaaatacaaaaattagctgggcgtggtggtggcgggcgcctgtaatcccagctacttgggaggctgaggcaggagaatcacttgaactcgggaggtggaggttgcagtgagctgagatctcgccacggcactccagcctggcgacacagcgagactccgtctcaaaaaaaaaaa

SEQ ID NO: 716601 - DNA, 2387 bp, Homo sapiens
tggaagcagttcttcaataaacctggaagcagttcttcaataaacctggaagcagttcttcaataaacctggaagcagttcttcaataaactgttgccctgtacactacacccacggtgactctgtgctctgaatacaccgacgtgaccctgagttttctgaaatacttttttatattattggccccaaaaactatgatattatcttggaaattccaatattttgatactcaagcctcatctgccaagatttatttttatacttagaagtggcatacacattctttactgaatgatatgtcctcattttggtttagtgctacagattacactatacctttgctatcaatagcttctttctctccctactgccatcacaataaaaacccaaccttcagaaaaatcaatgcaatcaaagcataacagaataggattgacggagttgtggttatccaaggagatttcagatatgtcaaaaataacatgataaggtttcaataattttgtgcccaaagtgaaatgctttgctgtgttgtggatgctccctcggggaggtgttttctttcattttttgttattgtgaaagttcattattcctatgcccagggtgtctgtgtctctgtttcttttttactttttctttctttactttttttttttttttttaagatggagtctcactctgtcacccaggctggagttcagtggcacgatctctgctcactgcaacctctgcctcctgagttcaagtgattctcctgcctcagcctcccatgtagctggaattacaggcacccacgaccacgcctggctaattttttgtatttttagtagagacagggtttcactgtgttagccaggaccgtctccatctcctgacctagtaatccacccgcctcagccccccaaagtgctgggattacaggcgcgagccaccgcagcccgccctctgttccgttttatataatcagtgacaaatagtctgagggttgagatttggggcatttagaataatttttgtctcctccatctccttaggaaagatgtctgcccttttctcctattggagagggacaccgtggggatctttgagcagagtcaggcaaatccatgccgaagaggtgggcccgtgccacctttgcacagcaaagtagaagaaaccattggcagttggtgggyggctgttgcggggaattgagaagtccgcctataacagttttggagctgccatattcttgggcatggtttcagactaagaataataagaataatagccctcaaaatgagggctgtggctcttcatcatactagctctgctgtctggtgtcagggatctgatactgccaccaagcagcccagtgctttatgaataggatgaaactcttcacagtgtgaaagcctcaggcagcactactctccacactgtcctacagaacaatgtcaagattatttatagtcttcaaaggtacagtaagcctttttattccattcttaagataaacaaataaatcacaagcactttggggtttgtgtaaacagatacaaaagcaacataaattacagaccgaaaacttaatttataaataggagctataaatttaataatcgataatcataagtaatttcaaaatgaaataaaaagaaaagccccactagagaatattatgcaaatttttattaaattatctattctattctacctcatttcaggtcttaagaatgtgtttttcttatccataatcataaatagggagataaagggagataaactcatttcctcattttttattaaattcacctttcctccttgggtggaattttatgagcatctagagtgtcagtttttctcccaacacactgaaatgtttatagtatggctatttacttcatcaagctagaacatttttctattaaacacacctcagtttcaaagttatacaaaatatacctctactttgactttttgatgtatttcaaactatggccttatctgaaaacttaaaatagtagtcagctattatttttaagaagtacttaaggtagctgtcaatatttaacaatatataaaccatttaaagagtcacgtacctactcattgcaattttgagcacctaatatgtgctattataaagtatagaatgatgtcagagtaactactatcagaataacctgccgtaaggaaaaaaaaactattttaatactatttttaaaatatttgaagccactggcaaatggccaatgttgggtagacaacggagggaaaacaacccttgaaagaggtggactatactgggtgatatttgcatttgtgtggtttttttttttttgcctcagggcaccaccttgtccacatcatatgggacaaccaggattgaagaagatagccac

SEQ ID NO: 716602 - DNA, 583 bp, Homo sapiens
tcagtttcttaatagctaaaacaagataaagtttggtctccctcattgctaaatgtttttagatctaccaaagagacacagacatgtgccatagaaatcccttttcacttgtattttctccctacatttggaaggcggtaaaaagcgaaaaacatctgtttcttcctgtaatgctgacaaccctcattctatggtttaaaaataaaagatgcttatggaagcttatagatataatgatcacctgcttcaaaggcagctggcaattaattgatccaaatacatgcaaaattaaggccaaaaagaaatttccctaaggacaatgccagtgttccccaagcctctggtaatttccaagacacccgtaaaaaaatagcagaggagagtaaagaagcaaacrtagtggcagatgacatgaagagttgacagctgagacacaagggcctgtgtcaatctggattcatttgaccaccataagaacagtttccatgagagctgcttagagaaaatctggttcactctggccaacaatcacccttcatccagctcaaggaaggccagatgttcaaccattaaaggaggacac

SEQ ID NO: 716603 - DNA, 639 bp, Homo sapiens
ttgtacacaaaaaaaaaaaaaaaaagaaagaaaaaaaactagcgtattaagtacatttgccaaacctccttttcttgacagatggtcactcaagagttctctagcctgctttaatcaaygatgattttaaaaattgatttctaaattatttttaattgtggtaaaatacagacaacataaaatttacctctgtaaccatttttaaatgtaccgtttagtggcatcaaatacattgacgtggttgtgcatccaccaccaccatccatctttagaactcttttttatcatccaaaataaaccctgtacccattaaacaataactccccatcctcctctttccccaagcccctggcaacaaccattctctttctgtctctatgaatctgactatgctaggtagctcatataagtggaattatacagtatttgtcctgtttgtggctgacttatttcacttagcatgatgtccttgagattcatccatgttggagcatgtgtcagaatgtccttcccttttaaggctgaatcatattccattgtatgtatatgttgcattttgtttatacgttcatccatcaatggacatgtgggttgtttccaccttttgctgtaatgctgctatgaatatgggttcataat

SEQ ID NO: 716604 - DNA, 591 bp, Homo sapiens
tcctggcttcatgtgatccacccttctcgacctcctaaaagtgctggcattacaggcatgagccaccgtgcccagctgggtcattttctttttatgtattttttttttttcagttgaaaatctgagattgaaaaccaaattaatgaatggagaaatctcacatgcttcatgccaagagtcactcattacagagcaggggaaagccttcctttaattgaaataaactatcacaagtgaaaaagrgtattggaggagagtttatttatgtatctcaggtgaaaccatcacccaccctgtgcaccgaggctgtcaagcttcctcaggggacagcactccatctgcctcaagtgaagttaatctcctttctatctttttaaaactaaggtgagcagatgtttcttttcaaatcaacatgtccttagtctttgacttacatagcgagccacatactgccgagcataaaccacttaacaccaaaaggaaactacatattctattagttcaatgaaacaaagtggaaaataagctaaatgcagagctttttattaccattaaatagttgatcaaaataagcagagttaaataaaaggg

SEQ ID NO: 716605 - DNA, 868 bp, Homo sapiens
tctcacccctaccttccttcagttacctacatttttttctttatccaactgataccagcccaatcctttttttttttttaatatttcaccttgtttacaaaactcagaacaacaggatgagaataaaatagttttttactcactgtttcttaatttctaaaattagtctcgatggaattgtcacttgttctatgaacttggcactgsaagtgtcgttgatgaacatggctgagaaggtggaatgggacttcctacaatgctcttcttccaggggtacaaagacaaaataagtgtttccactggagattgtgaaggactccatgtcctcatagtatatctcctctagaccctcttccttgtcttcttcctaagcaggcaataacactaaagttgacttgatatcatcaaatggacttgggaatgccaaccacaggttccttgatatcagaggttgtaaaccaaattttgggccaagattatgggccgaatcttgcctaggttttttcgccccccacacagtgcttttaaaattgggaagttctacacaaaaatctgggtttctaatttctcttaaaacatcagaaaatatgtcaattctgagcctgcattcccacatggcatctttagttggagctgagtaatgcctgcaccagtcttcatcatttgtcattattttacacttggtctccagccctcttttctattacatacctgtgggcatttgagtttgggattcctgctcaaaaagaagtctacaatttttccacagcaatatacaaaatgattcttctgcaattctatgattatgaaattcaacttattgttctgtgattttgaatatgttttgaggacaagatttattttatga

SEQ ID NO: 716606 - DNA, 868 bp, Homo sapiens
tctcacccctaccttccttcagttacctacatttttttctttatccaactgataccagcccaatcctttttttttttttaatatttcaccttgtttacaaaactcagaacaacaggatgagaataaaatagttttttactcactgtttcttaatttctaaaattagtctcgatggaattgtcacttgttctatgaacttggcactggaagtgtcgttgatgaacatggctgagaaggtggaatgggacttcctrcaatgctcttcttccaggggtacaaagacaaaataagtgtttccactggagattgtgaaggactccatgtcctcatagtatatctcctctagaccctcttccttgtcttcttcctaagcaggcaataacactaaagttgacttgatatcatcaaatggacttgggaatgccaaccacaggttccttgatatcagaggttgtaaaccaaattttgggccaagattatgggccgaatcttgcctaggttttttcgccccccacacagtgcttttaaaattgggaagttctacacaaaaatctgggtttctaatttctcttaaaacatcagaaaatatgtcaattctgagcctgcattcccacatggcatctttagttggagctgagtaatgcctgcaccagtcttcatcatttgtcattattttacacttggtctccagccctcttttctattacatacctgtgggcatttgagtttgggattcctgctcaaaaagaagtctacaatttttccacagcaatatacaaaatgattcttctgcaattctatgattatgaaattcaacttattgttctgtgattttgaatatgttttgaggacaagatttattttatga

SEQ ID NO: 716607 - DNA, 868 bp, Homo sapiens
tctcacccctaccttccttcagttacctacatttttttctttatccaactgataccagcccaatcctttttttttttttaatatttcaccttgtttacaaaactcagaacaacaggatgagaataaaatagttttttactcactgtttcttaatttctaaaattagtctcgatggaattgtcacttgttctatgaacttggcactggaagtgtcgttgatgaacatggctgagaaggtggaatgggacttcctacaatgctcttcttccaggggtacaaagacaaaataagtgtttccactggagattgtgaaggactccatgtcctcatagtatatctcctctagaccctcttccttgtcttcttcctaagcaggcaataacactaaagttgacttgatatcatcaaatggacttgggaatgccaaccacaggttccttgatatcagaggttgtaaaccaaattttgggccaagattatgggccgaatcttgcctaggttttttcgccccccacacagtgcttttaaaattgggaagttctacacaaaaatctgggtttctaatttctcttaaaacatcagaaaatatgtcaattctgagcctgcattcccacatggcatctttagttggagctgagtaatgcctgmaccagtcttcatcatttgtcattattttacacttggtctccagccctcttttctattacatacctgtgggcatttgagtttgggattcctgctcaaaaagaagtctacaatttttccacagcaatatacaaaatgattcttctgcaattctatgattatgaaattcaacttattgttctgtgattttgaatatgttttgaggacaagatttattttatga

SEQ ID NO: 716608 - DNA, 1385 bp, Homo sapiens
ttgtcaattcagcaagaaattagaccaaatggtggcttaatgctgcattgatttggctatcaatttcttttcacttttctgcaaaatatttaatacattattaaattgaattatgctgacgccacagttgttcttatctcaattgtcttaaaattcatttaatttttttttcctttggtttcattattcaaattttaacttcagttctcaagattttatctgatggaagagatggagtccattactaaggactccattgtgctccatcatgccagagttgtaaaatagatcttttaaaggaaatttattatgatttttttctatttaagagcttcctctccagttgagcatgtaagaaaattacaccaggagaatacagtaaactctatgaggcaagctataaacatgtagcattgtgattagggctggttctccttctagagacatggtaggattgcaatttcataccatccttgaagttagagagagccacgtgactcatttagccaatgaatggtgagcagaatgacatgtcacttccagcagaagctttaagaatctgagagacattcatacgttttccatgtgctgtagccttatacccaaagcctgggtcccaagtgaccatgacaggcagagctcccagttgagccacagagatttagagaatggctgttaacacagcataatccagcccatcctgactaatctgatattaacatgtataataaagaattctatcaatgctgagggaagatgattagttaaggtcctaggttgcaagtctcaaaacctcttccaaggattgtagacaggaaattaaatgacttctagtccctagagttcccaatctcctaccatcccatcctaatatgacagaagtaattcctgagttgcttctgaaaccagagcttccctcagaacccttagcctgccagatggcttcttggagagccctcactcacttttctccttctgctattgctgctcattcattccagcttttaaaaattcatctttatccaggaacctcgcttctagaaaagtcatacaggtgcttccaggaggctacatgggcacccatatttttctagccacattcattagaccaatgcagcagagaagaaaagcctcaataattattatgacatggcatgttaggataccaagtaaattgcatttgtaaaatgtgattttctgttggtgttcacttctgctctactgacatttggtaagtattattgactgactgactaactaatgtggtcattagtcttcataaagaaaggctctctacaaaaacggagggatgccctttttctggcatttaatacrtaagaaattgcctccgatggaaaccagagttgcctgattactatcagcac

SEQ ID NO: 716609 - DNA, 651 bp, Homo sapiens
atgtcagacacaaagaacactggaattttaaatatcaaagtcatatatttgaggatgctatagatgaaatcctttaatcataatcttaagaagtagatgaatacctgctttacttcccaagcatcacactttataaggtggaagcttgtaaagcatttcyggagaacttgattttcagctataaatcacgttggtgtcttggtttcttatatttaaaatgacctctagtgtgatctttaaggacactgccagttctgacatttctgaatgctaacccatattcaaggcattgccctggttcattaaaccctttctccaaaggtccattttattttaaacatagaaaaagcatacctaggaactgtaaagtctaaggcattgaatgaagactttttgttgttcttgttactgattaaatgcatttgggaagaatagtctatcaagaaaaattattagctttttgtacaaacttgaaatgcagagtattaaaaatctgtcaaatgcagaactttactgtgccttaatctataccttagtcaatattcattaaatgggtctctcactgtcagcaggtgtgttccaccttggcacgcacaacttttaattcatttaacccaacaattcctttagctgcaagtgattgccttggct

SEQ ID NO: 716610 - DNA, 600 bp, Homo sapiens
aaccatttaaccacttaaccataagtcttcattcagtactccaaacttagaaaaatttgaatagctctggcaaatcaaatggtgttttccacagcttgactagaactttcttgttagtttaatcattatttgcaattgttcctcaagaagcaacaattgtgttcagtttaagcttttcaacattcttcattgtcatgccatttttaaaaaagttttcatgctgaggaaggttttgttattttcaagggaaatatgtagaaaagtaaaaaacaacaaaaataaaagatgtggaggcatttacagtgcaggtaattggtcctaattttgtctgctctcaggttatgtttttgtagattgagcatattgctttatgttccatctgaacaataggctagaacaatgctgagagtgtcacatttttctgagtgactgactataacactagtctttcatttctaatgacaatggagaatgtttactggatgcattcccacacattatttcattttacccttattacaatcctgtgggggtaaatgctactattgcaccmattttcagatgagaaaacaaaagtatattgtcacatacaacaaaaca

SEQ ID NO: 716611 - DNA, 1719 bp, Homo sapiens
cctgaaaagaaatcaaatatttctccagtttctttctacaaaagaaatccattatttcaagaagctaatctaattttagagagaagcttttcacatgtaaagaaaaaagacagaaaagataaattttaccataaaatagaaaatgaattaaaatgcaatcagaaatcaaaatgcatgaaaaagacaagaggcactgtgtactatattacccacctgtagacataagtgttctgagtcctgcagtaaagagaactacagacctttctcagtttagagtttccttaagtattttatggatttaattagtatggagagtttaaaacatcacttttcaaacccatccagggtactagtaccccaaacaagaaatagaaaagaatctacaattaattaagcattgattctcttcaaaaatcacttctgaagttcagtagttgaacacacagcttttcatttctatttcttcccttggaacatgatttgttccaatttgattgtgcctttctaatgatgccacatcacaatgtcttaattaacaaacatacaggataattctgtgcctgtctcctgatgagaatctagaaaacaagataagaagatccaagacagtaaaagayataaattgccaacttctaaactgatgttgtcagtgtatggctgaggttgacgaagagtcattattctcctattactggcctcctggggatcaattaattcaacatttcgcaggtatcctagacaagagataggagggaacctgcaattaattaaacatctattcttttcaaagatcacttcttaagctcaatatctgagctacataaactaaaagggaattgtaataaaagaaaataaaatgtagttataataggacttatgattattaatggattggaaattgaattcacactggcaaactgaggtagagggcaaaacctactcagtaaaatcagccccagttcctccatctctggattaggtgaccaaggcaagggttttaagcttggtgctaacattattaattcacttcggaaatttcaagggtatcactcagtgtcattttagttatacatagtgaattctgagagtttcattccaaactctgtgggctgttctgaggtttaaataagatcacaaaataagatcatggacatcctttaaaagctctgatgggttatactaatgcaagtgataaaacaacatcctgaaaatttccctgtatagactgaaaatgtgctttttaactgacaattattttttaaactcttcttatatcatttggttagtgattgtctagtgtctacaattaatttggctatgtctgaacatggaaaattaaatggagcttcacagacacttactactcagagatagcaagcacattactgattgattagcactgtctgtcaggccagtttattgagaatttgaggccacatctgggcgtggcattaattagtattgtctgacaggggcacagaattgagttagtaaagcctacctgctggctatatgcctcctctggccctacttctattaatttctataattcagatgattgcatatttcaggtttcagtctacttaggagaaagcatttaatgttttctataaattaaatctctcttcacttgatagcttaaaatttcaatactctccttcatgtctttttcttcaaactactcagatatgctgtcctttacttgcaccatgtactttc

SEQ ID NO: 716612 - DNA, 1719 bp, Homo sapiens
cctgaaaagaaatcaaatatttctccagtttctttctacaaaagaaatccattatttcaagaagctaatctaattttagagagaagcttttcacatgtaaagaaaaaagacagaaaagataaattttaccataaaatagaaaatgaattaaaatgcaatcagaaatcaaaatgcatgaaaaagacaagaggcactgtgtactatattacccacctgtagacataagtgttctgagtcctgcagtaaagagaactacagacctttctcagtttagagtttccttaagtattttatggatttaattagtatggagagtttaaaacatcacttttcaaacccatccagggtactagtaccccaaacaagaaatagaaaagaatctacaattaattaagcattgattctcttcaaaaatcacttctgaagttcagtagttgaacacacagcttttcatttctatttcttcccttggaacatgatttgttccaatttgattgtgcctttctaatgatgccacatcacaatgtcttaattaacaaacatacaggataattctgtgcctgtctcctgatgagaatctagaaaacaagataagaagatccaagacagtaaaagacataaattgccaacttctaaactgatgttgtcagtgtatggctgaggttgacgaagagtcattattctcctattactggcctcctggggatcaattaattcaacatttcgcaggtatcctagacaagagataggagggaacctgcaattaattaaacatctattcttttcaaagatcacttcttaagctcaatatctgagctacataaactaaaagggaatygtaataaaagaaaataaaatgtagttataataggacttatgattattaatggattggaaattgaattcacactggcaaactgaggtagagggcaaaacctactcagtaaaatcagccccagttcctccatctctggattaggtgaccaaggcaagggttttaagcttggtgctaacattattaattcacttcggaaatttcaagggtatcactcagtgtcattttagttatacatagtgaattctgagagtttcattccaaactctgtgggctgttctgaggtttaaataagatcacaaaataagatcatggacatcctttaaaagctctgatgggttatactaatgcaagtgataaaacaacatcctgaaaatttccctgtatagactgaaaatgtgctttttaactgacaattattttttaaactcttcttatatcatttggttagtgattgtctagtgtctacaattaatttggctatgtctgaacatggaaaattaaatggagcttcacagacacttactactcagagatagcaagcacattactgattgattagcactgtctgtcaggccagtttattgagaatttgaggccacatctgggcgtggcattaattagtattgtctgacaggggcacagaattgagttagtaaagcctacctgctggctatatgcctcctctggccctacttctattaatttctataattcagatgattgcatatttcaggtttcagtctacttaggagaaagcatttaatgttttctataaattaaatctctcttcacttgatagcttaaaatttcaatactctccttcatgtctttttcttcaaactactcagatatgctgtcctttacttgcaccatgtactttc

SEQ ID NO: 716613 - DNA, 1719 bp, Homo sapiens
cctgaaaagaaatcaaatatttctccagtttctttctacaaaagaaatccattatttcaagaagctaatctaattttagagagaagcttttcacatgtaaagaaaaaagacagaaaagataaattttaccataaaatagaaaatgaattaaaatgcaatcagaaatcaaaatgcatgaaaaagacaagaggcactgtgtactatattacccacctgtagacataagtgttctgagtcctgcagtaaagagaactacagacctttctcagtttagagtttccttaagtattttatggatttaattagtatggagagtttaaaacatcacttttcaaacccatccagggtactagtaccccaaacaagaaatagaaaagaatctacaattaattaagcattgattctcttcaaaaatcacttctgaagttcagtagttgaacacacagcttttcatttctatttcttcccttggaacatgatttgttccaatttgattgtgcctttctaatgatgccacatcacaatgtcttaattaacaaacatacaggataattctgtgcctgtctcctgatgagaatctagaaaacaagataagaagatccaagacagtaaaagacataaattgccaacttctaaactgatgttgtcagtgtatggctgaggttgacgaagagtcattattctcctattactggcctcctggggatcaattaattcaacatttcgcaggtatcctagacaagagataggagggaacctgcaattaattaaacatctattcttttcaaagatcacttcttaagctcaatatctgagctacataaactaaaagggaattgtaatraaagaaaataaaatgtagttataataggacttatgattattaatggattggaaattgaattcacactggcaaactgaggtagagggcaaaacctactcagtaaaatcagccccagttcctccatctctggattaggtgaccaaggcaagggttttaagcttggtgctaacattattaattcacttcggaaatttcaagggtatcactcagtgtcattttagttatacatagtgaattctgagagtttcattccaaactctgtgggctgttctgaggtttaaataagatcacaaaataagatcatggacatcctttaaaagctctgatgggttatactaatgcaagtgataaaacaacatcctgaaaatttccctgtatagactgaaaatgtgctttttaactgacaattattttttaaactcttcttatatcatttggttagtgattgtctagtgtctacaattaatttggctatgtctgaacatggaaaattaaatggagcttcacagacacttactactcagagatagcaagcacattactgattgattagcactgtctgtcaggccagtttattgagaatttgaggccacatctgggcgtggcattaattagtattgtctgacaggggcacagaattgagttagtaaagcctacctgctggctatatgcctcctctggccctacttctattaatttctataattcagatgattgcatatttcaggtttcagtctacttaggagaaagcatttaatgttttctataaattaaatctctcttcacttgatagcttaaaatttcaatactctccttcatgtctttttcttcaaactactcagatatgctgtcctttacttgcaccatgtactttc

SEQ ID NO: 716614 - DNA, 1537 bp, Homo sapiens
  misc_feature 658, 659, 660, 661, 662, 663, 664, 665, 666, 667, 668, 669,670, 671, 672, 673, 674, 675, 676, 677, 678, 679, 680, 681,682, 683, 684, 685, 686, 687, 688, 689, 690, 691, 692, 693,694, 695, 696, 697, 698, 699, 700, 701, 702, 703, 704: n = A,T,C or G
  misc_feature 705, 706, 707, 708, 709, 710, 711, 712, 713, 714, 715, 716,717, 718, 719, 720, 721, 722, 723, 724, 725, 726, 727, 728,729, 730, 731, 732, 733, 734, 735, 736, 737, 738, 739, 740,741, 742, 743, 744, 745, 746, 747, 748, 749, 750, 751: n = A,T,C or G
  misc_feature 752, 753, 754, 755, 756, 757: n = A,T,C or G
ggtctatggtattttgttatggtagcccaaacagactcagacaggcatacagtttgatctttttgcactttgtttttttcatatttaacatgttggtaatatccctaactcacagtgtgtgagcattcatgagaaattcaacattgggaacacatacagtatttaacacagggataatagtatataaatacatatctatatctatgtatacacaaagacatagtccatttacacatttacatataatttaattacttcaattactgatgtagttaggttaacatacacgatattattattcattttgtatagatacatattttacatttctttgattttgatttcttgccttcctttaaacatttttgcgattcttactttcttctatttgttatagattgttttattatctctttaataacaactctaatgattaccatatgcattgctgatttagtactgtctgatacaaaattttcttcggcacatccctgtcattatttaaaattttccattttgtattgcatggctgctgacaataaaacccctcagtctttgtctatccaaaaacatatttatttatcccctttttgaaggatacaggctcagtttttcaatgctgggttgggcagttccattcttttcagaaatttaaagnnnnnnnnnnnnnnnnnnnnnnnnnnnnnnnnnnnnnnnnnnnnnnnnnnnnnnnnnnnnnnnnnnnnnnnnnnnnnnnnnnnnnnnnnnnnnnnnnnnntgggaggccaaggcaggcagatcacgaggtcaggagttcaagaccagcctggccaatatggtgaaaccctttctctactaaaaatacaaaaattaaccgggcatggtggcgtctgcctgtaatcacagctactgagggggctgaggcagaggaaccgtttgaacccgggaggcggaggttgcagtgagccaagatcgtgccactgtactccagcctgggcagcagagtgagactctgtctcaaaaaaaaaaaaaaaaaaaagtagcctcaaaaagaacaagatcaattacttgcttttataaagttctttataattcataatatcatgggaggaaaaaaagttagttaaatgcgacccagtttgcaaaaataaggtatcgcatgtgcttttactactggcctatttttgtacacaccctcattggggatactgcttgacagatgaatctgtcactgagaaaaaagataatcatgttattaaaaagtatcctaagagaaatcagaaaacttcttgcaataatgyagatttatctgaaataagatctacaagagacacattaatattttttgagataaagtgctttatttccttatcctaaactgtacaccaatagaagtttaaagaacatgttatttattcggaaatggtattttctcaatataaatgaagtattttgaacaggaacaaaatggtgttaatggcttaaaaaaagtcaaatggtaagccagctttattattcatactctatattatgtgaactacagactataatgatttca

SEQ ID NO: 716615 - DNA, 595 bp, Homo sapiens
acaaaaaggaacggaaccactgcatgtgggataaaataatgttgaactcattctaatcatcattttattgtgtactccaccccaattcctctgtataagtgttgaatttggtttagtagaatgagcaaaatctttggagcaacacagagctgaatttgaacatagtttggtcaggtacygggcaaagtaattttcccctgaagacctaaattttctcatctacaaaataaatgtaataatagctatcttatccatttgctgttagcattgcacaagataaacataaaaatttctggaaaaagataagtgaaataaaacagaatagggtccagaaatagacccacatagtcaactgatctgtgacaaaggagcaaatgtaatatgctagagaagagacagtcctcaacaaatggtactaaaacaattggacatctaagatacagaacttacaccctttataaagctatctcaatatggataatagatcaatgtgtaaagcacaaaaccataaaactactagaaggcaacaagggaaaatatagatgactttaagtatgatgatgaattttttggtacaacactatgactcgtgaaa

SEQ ID NO: 716616 - DNA, 595 bp, Homo sapiens
acaaaaaggaacggaaccactgcatgtgggataaaataatgttgaactcattctaatcatcattttattgtgtactccaccccaattcctctgtataagtgttgaatttggtttagtagaatgagcaaaatctttggagcaacacagagctgaatttgaacatagtttggtcaggtaccgggcaaagtaattttcccctgaagacctaaattttctcatctacaaaataaatgtaataatagctatcttatccatttgctgttagcattgcacaagataarcataaaaatttctggaaaaagataagtgaaataaaacagaatagggtccagaaatagacccacatagtcaactgatctgtgacaaaggagcaaatgtaatatgctagagaagagacagtcctcaacaaatggtactaaaacaattggacatctaagatacagaacttacaccctttataaagctatctcaatatggataatagatcaatgtgtaaagcacaaaaccataaaactactagaaggcaacaagggaaaatatagatgactttaagtatgatgatgaattttttggtacaacactatgactcgtgaaa

SEQ ID NO: 716617 - DNA, 1004 bp, Homo sapiens
tttaaaagattgggtgatggaggaaatggagaggaaaaggagaaaatataagagtaataatatttatgttcatggtaaggaaaatatagaatgtctaaagaaagaggaaactgaagaaagcagaacattttaatataataagtgtaaaattacacaactttggtaaagcagaaagtattgaagaaaatataggtctgtttgttacttgaagacgtcttcactttaagaggtgaagagtaagcaacaatcatagtgagcagagaaggcagagtgccctaaaaagcttgaagattctctggggatgcaggctagggaacagtagtacttggcacctgcaaagtcatttctgaggacaagagagacttcctctagggccctcagatattttggggaaagagaactatagtcatgtagtaatgcagatgaaggcttctaagccattcaaaattggatatttttccaaatgtgttgttatttgtgtcaatgagtttaataatgatagcttaagagacctaggagaatttgagataagtaaaatcctgtgacattaataccytcatatacatgtatgtgatgaaaaccaccacacttccacaagatcctcagggtgtcacttttccagctggaaacctctgtggccagtgaagcctttgctcgagttttgctcaggcccactgggcttgttccatccactcagcctagtaagctgtgcttggcttgcactactggcttggatcccatgcctgccaagggcaagacaggtgtggagcagtgaggagtgtgtgagcaaatgagcacggggtctggccactgtggacaaccaggcacactggctgctgtggaggggcaggcagctccaggcactggcacaggtgccagctccatgcaagcctgcagctggatcagacgcaccacaagtggcttctgctatgggcacctgcatcagggtgaagggaacgtggtggtacccagaagctttgagatggcagaaactgcagaccccc

SEQ ID NO: 716618 - DNA, 1099 bp, Homo sapiens
aagaagcttcaaaggggaaaatatttttctgaaactgttaaaaggattcccgtgggcacatacaaggggagagagacagaacgattaggtttcctgagggagaaacaaggaactagaagctgatactggggaagtagcccaagtaagaagaggccagggtacacttggcaaaggaatcccaagaggttgtggttttagcatccaggtgtgtcacgggagacaaatcatcacacaaatactacctagaccttactcatctgtactagagattgcactagttcttctttccattgaccggtcttcaccctagggagccaaagtgactggtcaagacttgtacaggagccaccaggagggatctctgtatttctttgttctctgtacttgaacaaatgtaaattgccaccacagggcacragcctgctggagaacagagccaacacagagaaaatggatccaggagatgaagatggagaaactgggtgctgaagacctttgagctgtttttggagctagactgatcactggactttcaaatcatatgagtaaatttgttctcttttaggtgaagttagcttggattgaattttctgtcatttgaaatagaatcctaattgatacacttgtctccaatacctgttcaaagccttagtgaggcatagtaagtacagaacttagctgttgaccaatatcagtgcatacacatatgataccaatttattaacttactgctactgggccaaggaaagggagttgtaatattatcacacgtgtggcatgtcagaatcaaattggagtacctgcttttgtttaaacttccagggaggatggaactcttcttaccacagacatattaaaccctcttaccaccactacagaaaattcagcagtcaaagcaggaggcattcaacataatagcctttgttccctgtatatcttccacctttttattgctgcacccccacctccagcttttactcctagttaactaatagttgtccgtgctgcttcatgcattagtacctctgcacgagctcttttcttaggctggaatgtacttcctagtactgtctacccttctaggcccagctcaagtgcc

SEQ ID NO: 716619 - DNA, 1196 bp, Homo sapiens
ggacctccccacccctgccccttagggatgaagacttgcagggggaacatgccagcatcacagaattcagtgcagtttacacatttccattcctttcatctcagcaaaatgggcaccacaggacctagttctgatcatgccaccatcctggaccacgtgaccggaaggtagataaccaagtttaccagcaataaaatcctgggcccagacagcctccaacaccacagcttccaggcagtgagggagtccctggtgcagggcaagccacagcaactgttttagaggccatccacagccaaggccgttgagactctggacaatttcctgggatgaccgccagcttgagtctgcatggtgctgctgagacagggtggaagagggagcygggtggcccttactttcctttgcttaaaggtggccctgactttccttttcacagagtggtttcctgaatgtgtaaatgtgaaagtaaaatacaatttaaaatatgtgcctatatatatatatatatatatatatatatatatatatatatatatacacacacacatacatacacacacagacacataaatcccttcagccaagagtggaaagcatattggctcaaagcaattaagaaaatatctgtccagtcattccaatcattagcagatctctaagctaactgagcagtatcttttaaccggtacacacaacagggaataaaacctggaaagaattactccagaaatgctattagtcaaataaagagcaacagtagtagcaacaataacaataacaacaaatgggaagacagagatctgatttcttgagctgccatatgatatttaacccatttttctactcaaatgtacgggaactcaaagaaacaggtattatccatagatagaagaaaaaaagaatgtatagaaactgtcccaaaggaagttcacatgttgcccttattagacaaaggcttaaaattaactattataaatatcttcaaagacgaataaaaataatgtctatagaattaaaggaaggtatgagaatcaccaaagaatactgataaaaagttcaaaattataaaaataacctccaacttccaataggcctctttaccgtgaagatcagaggctcacaacactctggagcccctcaggcagggaacgtgcatttcaaatcttgactttactcatactgaaaggctgcac

SEQ ID NO: 716620 - DNA, 1196 bp, Homo sapiens
ggacctccccacccctgccccttagggatgaagacttgcagggggaacatgccagcatcacagaattcagtgcagtttacacatttccattcctttcatctcagcaaaatgggcaccacaggacctagttctgatcatgccaccatcctggaccacgtgaccggaaggtagataaccaagtttaccagcaataaaatcctgggcccagacagcctccaacaccacagcttccaggcagtgagggagtccctggtgcagggcaagccacagcaactgttttagaggccatccacagccaaggccgttgagactctggacaatttcctgggatgaccgccagcttgagtctgcatggtgctgctgagacagggtggaagagggagctgggtggcccttactttcctttgcttaaaggtggccctgactttccttttcacagagtggtttcctgaatgtgtaaatgtgaaagtaaaatacaatttaaaatatgtgcctatatatatatatatatatatatatatatatatatatatatatatacacacayacatacatacacacacagacacataaatcccttcagccaagagtggaaagcatattggctcaaagcaattaagaaaatatctgtccagtcattccaatcattagcagatctctaagctaactgagcagtatcttttaaccggtacacacaacagggaataaaacctggaaagaattactccagaaatgctattagtcaaataaagagcaacagtagtagcaacaataacaataacaacaaatgggaagacagagatctgatttcttgagctgccatatgatatttaacccatttttctactcaaatgtacgggaactcaaagaaacaggtattatccatagatagaagaaaaaaagaatgtatagaaactgtcccaaaggaagttcacatgttgcccttattagacaaaggcttaaaattaactattataaatatcttcaaagacgaataaaaataatgtctatagaattaaaggaaggtatgagaatcaccaaagaatactgataaaaagttcaaaattataaaaataacctccaacttccaataggcctctttaccgtgaagatcagaggctcacaacactctggagcccctcaggcagggaacgtgcatttcaaatcttgactttactcatactgaaaggctgcac

SEQ ID NO: 716621 - DNA, 1196 bp, Homo sapiens
ggacctccccacccctgccccttagggatgaagacttgcagggggaacatgccagcatcacagaattcagtgcagtttacacatttccattcctttcatctcagcaaaatgggcaccacaggacctagttctgatcatgccaccatcctggaccacgtgaccggaaggtagataaccaagtttaccagcaataaaatcctgggcccagacagcctccaacaccacagcttccaggcagtgagggagtccctggtgcagggcaagccacagcaactgttttagaggccatccacagccaaggccgttgagactctggacaatttcctgggatgaccgccagcttgagtctgcatggtgctgctgagacagggtggaagagggagctgggtggcccttactttcctttgcttaaaggtggccctgactttccttttcacagagtggtttcctgaatgtgtaaatgtgaaagtaaaatacaatttaaaatatgtgcctatatatatatatatatatatatatatatatatatatatatatatacacacacayatacatacacacacagacacataaatcccttcagccaagagtggaaagcatattggctcaaagcaattaagaaaatatctgtccagtcattccaatcattagcagatctctaagctaactgagcagtatcttttaaccggtacacacaacagggaataaaacctggaaagaattactccagaaatgctattagtcaaataaagagcaacagtagtagcaacaataacaataacaacaaatgggaagacagagatctgatttcttgagctgccatatgatatttaacccatttttctactcaaatgtacgggaactcaaagaaacaggtattatccatagatagaagaaaaaaagaatgtatagaaactgtcccaaaggaagttcacatgttgcccttattagacaaaggcttaaaattaactattataaatatcttcaaagacgaataaaaataatgtctatagaattaaaggaaggtatgagaatcaccaaagaatactgataaaaagttcaaaattataaaaataacctccaacttccaataggcctctttaccgtgaagatcagaggctcacaacactctggagcccctcaggcagggaacgtgcatttcaaatcttgactttactcatactgaaaggctgcac

SEQ ID NO: 716622 - DNA, 1196 bp, Homo sapiens
ggacctccccacccctgccccttagggatgaagacttgcagggggaacatgccagcatcacagaattcagtgcagtttacacatttccattcctttcatctcagcaaaatgggcaccacaggacctagttctgatcatgccaccatcctggaccacgtgaccggaaggtagataaccaagtttaccagcaataaaatcctgggcccagacagcctccaacaccacagcttccaggcagtgagggagtccctggtgcagggcaagccacagcaactgttttagaggccatccacagccaaggccgttgagactctggacaatttcctgggatgaccgccagcttgagtctgcatggtgctgctgagacagggtggaagagggagctgggtggcccttactttcctttgcttaaaggtggccctgactttccttttcacagagtggtttcctgaatgtgtaaatgtgaaagtaaaatacaatttaaaatatgtgcctatatatatatatatatatatatatatatatatatatatatatatacacacacacayacatacacacacagacacataaatcccttcagccaagagtggaaagcatattggctcaaagcaattaagaaaatatctgtccagtcattccaatcattagcagatctctaagctaactgagcagtatcttttaaccggtacacacaacagggaataaaacctggaaagaattactccagaaatgctattagtcaaataaagagcaacagtagtagcaacaataacaataacaacaaatgggaagacagagatctgatttcttgagctgccatatgatatttaacccatttttctactcaaatgtacgggaactcaaagaaacaggtattatccatagatagaagaaaaaaagaatgtatagaaactgtcccaaaggaagttcacatgttgcccttattagacaaaggcttaaaattaactattataaatatcttcaaagacgaataaaaataatgtctatagaattaaaggaaggtatgagaatcaccaaagaatactgataaaaagttcaaaattataaaaataacctccaacttccaataggcctctttaccgtgaagatcagaggctcacaacactctggagcccctcaggcagggaacgtgcatttcaaatcttgactttactcatactgaaaggctgcac

SEQ ID NO: 716623 - DNA, 1913 bp, Homo sapiens
catagaaattctgggttttttctatacaacagatctggagagttgaaaattaaactttattatctattgtagaaacatttaactaaacccagcatgtcaattacacaatgaaagttaacaaagaacagaggctgaaaaagtatctgctatacattgaaagtacccctgtaagtgtagaaatcagggaacaaccataggaacaaaaacaatatgatgcatttttttcctctgtatatttcacctgagactcttaatagtgctacgtgactaggagaaaaagcaagtattgtgggctgtccactcagaataagggcttattacattgtgacactctgtaagtgagccaagttttttgacatttctttttttctttaccatcattatgacaatgattattacaattctaaatctagtcaaatgcaattggatatgatttcatgagtcttgaaaaaacacactcaaaatgtctacttgtttgatttttctctggatattaccaaaaatatgtcttttgtttatctctttcagtgttccattgttttaataaaatataagcataatagaaaaagccttatgttaatagtttcaacagaaaatcttttttgcattttagttgattaaaccagaaaattagccgcattctctgtttactgtatcgtatcatgcttatcttctctaaagtaagctcccatagaacagaaaatgttttatttattattgtatcatcatctattttagtagaaactagatagatttttaattaaagtgagctataaaaaccaataatgcccattttctgatagtagcaattctgaaatccagcagggatatgtttggccgattcaactccatttagttagagcaaatagcacatggtctaatatgtttctagtttacacttagaaaatcctcttaaatgtctgggaaaatagcaatgatatgttttcaaatattctgtattgactgagtggatacactattggtaatgttatcaattgctacctcagttacattccactcaaaagccatttttgaacctgtcaccaagattttcgtatttcacttgaacatcacgctgtcatatatctgataaagaaagatatactccagtatttccactgatttgtagtggtgggccactatttgaatgtgagatattttaaaaggttaaaatcatttcagtaatcattctgtatgaatgggtaggtttccatcaggtagcaaggagtttggtatatcatccttgtggttatatgcccaaatgctcaaattctaagtgctgtcatttgcattattaagtttaataatgttcatttgacctaacctgtgcactctgtgggactgatgaacctcgaaggagattgcctatctcccatataaaaaaagccaataaaatgttaaatttttatactcatatatatcaaagtgaaacacatgatctttttcaaatggcttttggaatgtttctttcattgcccttgagaagaattagctgtaagaaataactactttaatgtcaattcatgagacccatagtaagtcacttaatctttcaatatttcccttcctcttattgcctcataattaccatatttawcaatgctgaccagcttctgaaaattacataaggaatagttagccagtgcaatttgcccagactttctactataactgggctcccagcctccagtttctcctgccagagaaatctccctcaaactcagttcatatcatgttaattttatgaattattttttattctacaaatatttactgttgtattgaaacttttctctgtgccatgttagaacatcaaaaataaacactacatcaaccaacttattgatttactgaagacaaaaacataagtaaacaagtacgaaaatgtgttaacagtttaatgatagatggat

SEQ ID NO: 716624 - DNA, 2202 bp, Homo sapiens
gacttgaaaagaaactatactgactttacaacagctggaaagtgttattccctcattgttgtcctataagcagaggcgaagatcctagtcctctcttacactaaccctgtctgtcaaggcctcaactcatggttcctaatattcccagtcacatttacctaagagcctagccacatagtttgtctctgaggcagatagctagttaaagttagattcatgtaaataaaacaactggactttccaatacttttgcaggggtgaaagtagtgtgacactaggctcaggagtaggaatgggtttcagcttgcataatcacaaatgtaagtctgactaaaaaatagatattaacattaatttactctgagaaaaagtcaaatgtttttaaactcatataaataatacctcttgacaaaagtatataaaattctttctgctgctattaaaataaataaatggtcaaagggtataaagtttaagttaggataaataaatcttggagatctattgtacagactggtggctgtagttaataatcatgtactatgtacttgaaaaatggcaaatgagtattcttaaatgttctcaccacgtacaaaaaaagtatgtaaggtggtaaatatgctaattagttgtaaatcattccacaaagtatgcgtgtaaacattgtaggcaatgtaaacaatgcgtgtaaacaatgtaggcatcacgttgtacactgtaaatatatataattttcatgtctcaattataccttaataaagctggaggaaagtttttcaaaagtactgaatattttaaaattaattaattttccactgttgaaaatgagtactgtgggtacttcccatatttaactcagtaactaatgattcttgctattaatctatcagctgaataaatggatataaatcagctaataattctcataaatcttactacctacaataaagtattatatattagtgaccttattgaagagattagtttttttaatattggtgtttctagaactgttaagaagggtattctagaaagtcaactataatttgcacacaccatcttacactggtataattatttacagaaggcatttaggcgtttgactcatgtctatgacttaatatgattcagttgccgtatttttaatrcaaatttaggaatgatttttcctaagtaattattgcttctaataaatgcataaaaaacccactgatgaatttgctaggattaatggttataaacaggtttatatctcaacacattattatttaaaaatatgacattaaaaaatgaacagaatggccaggtgtggtggctcacgcctgtaatcccagcactttgggaggccaaggtgggcagatcacctgaggtcaggagttcgagatcagcctggccaacatggtgaaaccccgtctctacaaaaatacaaaacttagctgggcatgatggtgggtgtctgtaatcccagccactggggaggctaggggggagagaatcacttgaacccgggtgatggaggttgcagtgactcaagatcacaccattgtactccagcctgggtgacagagtgagactccatttcaaaaaaaaaaaaaaaaaaaaagaatggaaccattacaaaaattattacataaattccatgcaaagtattcagttattagaagaccacagactgctggaacattgatgtgatttgcacatagtaaatgaatttcatagaaacatatacaaataagtgcaattcatatacacatacgttcccttagatgctaggaaagagaacaggatcaacacttgttctaaaattggatgtcacattaattcaagtatcacttatcactttcaggatacagtcagataattttaagcaatgtgtaatagtaatggtttgagttggtatataattttcttgaagggatctttttcaagtactatatttgcacatttttcctaatatcgttttaaagtatttcaggtcaaaatctgtttcagaaagtaatgttatactaaaaatttataggttaaaaatgctttaaaccttaataatggtccactttcccagaagtgtaacaacaatccagaggggaaaatatctttaaattttgttgcagtagaatttaatttgcactatttgttatcgagaacaaagaatgcatgttcactcacccaggcccttttcagttctaaagaaatgtaaaaaga

SEQ ID NO: 716625 - DNA, 609 bp, Homo sapiens
ggatgaaaacgcataagaatgatacattggacttttgggactcaggggaaaggattggggggtggcgagggataaaagactgcacattgggtatagcgtacactgctcgggtgatggaggcacaaaaatctcacaaatcaccactaaagaattcattcatataaccaaacaccacttgttccccaaaagtattattgaaataaaaaaaaagtttttaaaaagtttcatgactaacatataccacaaatcacataaaatattaaactggaagctatatttgagtaaactatttgatatatggaaaattaagtagaattcagattgartaaaagatacattttctaaaaaatttatttttccttattggtaactaggaccagatattctctaccagtaatggggctctaacaagaaaaaaatgacattcttattgtaacaagaagatttaatctttttagaccacaaagaaagatatataagttttctgcctggaataacattatgacagagccaagtatagaaaaaatgctaaacttttcaaaataattgctgaattcatgctttcatgattttattatttcttgaattatgtttttaaaatattttaat

SEQ ID NO: 716626 - DNA, 1184 bp, Homo sapiens
tcatagtttagtattttaaacctctgtgtttaaattattttcacttcagtgtcaaaatatgggaaaagtttattctgattagggtcttctatttaactttgtagtatgaagaaggccttgaatgagttacttacttcttcccacgctctacaaaaataaaaccccacaaggaattacttgatcaattttgaattctataaacaacattcctatgtacacattttaaatacaagagcataaaaatgataatgtgttcattaagaatgtatttatttttggcttaagtcctacttcttattaccttaaaagctgatcatggttttcaaatcaggtttagggaaacacagtaaaagaacaaaaataaatgtataaattttactcacatcgtatgtcaatccccttaagccgggttagagtttcttgagacaatgtagcagaagcattttttttttttgctcccacactaagaatgcatttaatgaaagaacagtctcactagcttttcctgacaggtcctgtcctgcccaacttgttcagtgctttcatatcaggtaatatttatccttcagggcacttatcacaattgcagctgctcygcataattatgtgctgtcttttccaaaagacattaaacattaagagaatggaaaactaatcttatttgaccaccacttatcctcaggaccagtcaagtgtcagcatatggtatgtgctcaataaatagtaatacaattattttttaaagcaagtgcttgattcaatcaattcaatgcactggctctcctatattagaaaatttgtatttgtctgaaagagagttattagctagagttcaggtaaattattgtatatcctgtatgtttttacttcctatagacatttctaatgaataaaagccagtatttaaacttatctttaaatcacaaagtcttggccttcttgtttatttatttttaaaaccagtgcatatctgagatcttttaccatgttgttggtgataattataaagtagaactggagtaaagacaagggtcataatgatttgggataaaaagcataccacatcatgtattgaataaacagagcaattaaactgatagataaatagacagttcagtaacatttatatgcattgtaacgaacccaaacttgtcctctctgctgattgtctcatttgtcatttt

SEQ ID NO: 716627 - DNA, 634 bp, Homo sapiens
caaaatctctaagctgcatttggtattagctaggatagctggtgtaacagcagagcacggcaatagcttatgacaatagcagttmgtttttctttatttaacaggacaatgcagacgttattagctggcagatggcttttccacatataatttcttctgtctgataacttcatcattcccttgggtttgtgacctctgaattcagacaggaagggaaaaagagaaggtaggaaaggcatacctgccttttcattcatctaggcccaaaagtgacatatttttttgattcatatagcccaacctagaagcaaaaggatgtgggatggggagacttgaaattttagccagcagaaattctataataaaaggcgttgagtaagttttcacggatatttaaaccttccaaaacaatagagaataattattttatacactaataaaaaaatacctaactacatattacaaagacactttacctggcataatacttagcatttttgccacacactccatcctatcagttacaatatctgttaatatttatatccaaaacgatcacctaacatgtaacatcagctcgacttttttcctggagcatttcttactggagccctctgtccttctgctctaatct

SEQ ID NO: 716628 - DNA, 634 bp, Homo sapiens
caaaatctctaagctgcatttggtattagctaggatagctggtgtaacagcagagcacggcaatagcttatgacaatagcagttagtttttctttatttaacaggacaatgcagacgttattagctggcagatggcttttccacatataatttcttctgtctgataacttcatcattcccttgggtttgtgacctctgaattcagacaggaagggaaaaagagaaggtaggaaaggcatacctgccttttcattcatctaggcccaaaagtgacatatttttttgattcatatagcccaacctwgaagcaaaaggatgtgggatggggagacttgaaattttagccagcagaaattctataataaaaggcgttgagtaagttttcacggatatttaaaccttccaaaacaatagagaataattattttatacactaataaaaaaatacctaactacatattacaaagacactttacctggcataatacttagcatttttgccacacactccatcctatcagttacaatatctgttaatatttatatccaaaacgatcacctaacatgtaacatcagctcgacttttttcctggagcatttcttactggagccctctgtccttctgctctaatct

SEQ ID NO: 716629 - DNA, 634 bp, Homo sapiens
caaaatctctaagctgcatttggtattagctaggatagctggtgtaacagcagagcacggcaatagcttatgacaatagcagttagtttttctttatttaacaggacaatgcagacgttattagctggcagatggcttttccacatataatttcttctgtctgataacttcatcattcccttgggtttgtgacctctgaattcagacaggaagggaaaaagagaaggtaggaaaggcatacctgccttttcattcatctaggcccaaaagtgacatatttttttgattcatatagcccaacctagaagcaaaaggatgtgggatggggagacttgaaattttagccagcagaaattctataataaaaggcgttgagtaagttttcacggatatttaaaccttccaaaacaatagagaataattattttatacactaataaaaaaatacctaactacatattacaaagacactttacctggcataatacttagcatttttgccacacactccatcctatcagttacaatatctgttaatatttatatccaaaaygatcacctaacatgtaacatcagctcgacttttttcctggagcatttcttactggagccctctgtccttctgctctaatct

SEQ ID NO: 716630 - DNA, 2212 bp, Homo sapiens
aatttgagccagagaagatccaagtccctggttactaatgtttaggacaggattatttccacccacaaccaagcctgaaacagacacagctttcttgtaattgagctggggagagtattccagttcacattttgactaaggaaacagtaatgtcaggcagtggttgaaattttggggtctagcagggagcaattgtcattctggagttctctacattcacagtattaagatttctctgccctcaacagcagaagtaggatacagaagcaaggtccagaactcagatgcattacctaattttagccttggggtagataccaccaaaaaaaaccctgaaaactttaatttgttgcacctttcaactgtttgtttcaactcaacattcactctactgactcatctgcttctgattatcttgacttctggtagcttgaataatttcttgcacctggttttgcttcaggcctcaatcctgatacttgtttctgctgctgttactcacagttctggattattttcttgattgcaatttacatttgccaatttagctaaacacaacacccagttcaacatagtcccaaagaccctacacacaggtacaggcccttaggtttatcattcctatctaattcacatgcagaatcagggaagggaattagtccatgcctggcagggtgggtgtcttagtctgttcctgctgctataacaaaataccttagactgggtaacttgtaaataatagaaatttatttctcacagttctagatgctgggaagtccaagatcaaggcataagcagcttyggtgtctgataagttctgactctctgcttccaagatgattccttattgatgcatcctccagagggaacaaatactgtgtgtcctcgtatggcagaagggatggaagagcaaaaggcactagggtgctccctcttctaaggtcccatctcttaataccttagggtttaaattctaacacatgaattttggagggacacattcattcaaaccgtaaaagtggggctccagtcttacaggaaaacttaaggaaggttttcagaaacttaaatgactaaaactttagctctgttttttcttttctagccaaaattaaaacattttattgacatatattaaagaaaacaaactataatcttgatatagaagactaatcataaagatgtaattatctcaaaattggtttatattttaatataatctctacaaaagttcttataggaatttttatagaacttgacagtctaattatatatttgtcagagaatagcaaatgaacaatagccaatataatagtaaagaagaacatggtacaggaaagtgccctaaccaatatcaagatttattataaagtttatacataaaaaacatgatattaatgcaaagttagaaaaacagattcttggaacagaatagagacctcctaaaataataaggatgctcaaaaatttgatttgtgagagtctgcatattgaagatcagtggctaagggataagatactctataattaacctcaagaaactcaattatcagtatagaacacaatcaattccatataaaaacctaaatgagaaagataacttcataaaaataattttcatatagttaagaatttttttaaataaggctttaaaaatcataaaagcttgatgaaactgtagtaaattttaattttcaatgaaacgaaaagacaacataagttttaaagagcaaactacaactttgttgaagatgtttgccatacttaagatgtaaaatttattccaaaaacatttaacatttagttcttgaaagaagcctggacctgtggatggaatcaatgctgaagagccatagaaaaagggaaaaggagttgaagttggagggtgcaagggtgcccctggattgttcctgggaatagcaggttctgccataaaagagacagagaaaagcaggggcacactagtcatatctggctttctacatactaggcttgtgaaacgaacaattccaagtttcatcaaaagcaagttagaccatatgattcagcagttccatttctgggtatatatccaaaagaaataaagacgagggttgatcatctctttgtacatccatgttcatagcagcattcttcacaattgacaacaggcagaagcaacccaagtgtccattaatagaagaaaggataaaaaatatgtggtatatgcata

SEQ ID NO: 716631 - DNA, 611 bp, Homo sapiens
tagggatctacagtctctgttagtcacttgaaccctctgccctatccgtccctactcagatataaccatggattactacactcctcataaggccactactgaccactccatctgtccttgtcaatcctctacttaatacacagggaaggaatggtggtggatgacagtaattctgcatttcctagasagaggattctgaccccataggtgatttgtttatggtagtgttcctgtagattactacactcctcataaggccactactgaccactccatctgtccttgtcaatcctctacttaatacacagggaaggaatggtggtggatgacagtaattctgcatttcctagagagaggattctgaccccataggtgatttgtttatggtagtgttcctgtagatggtgtacttcatgactttgtccttgcttttaacagttctagggtaactgaatagaaaacagtccagctcactatctgtttatacttagattattattagatacctttaatctttttagttataattaaagttatgtttttaattatgttttctaagtggtgatacataatatttttctaaatattggtgcttagctgaacttgcctaa

SEQ ID NO: 716632 - DNA, 649 bp, Homo sapiens
tggaaaaatgttgaaacatgggctggagtggcatagaatgctcctccaaaagcacccatgtattcttttgctttgtttgtttgtttttttttaaatggagtctcgctctgtcgccttggatggagtgcagtggtgcgatctcagctctgcaacctctgcctcccggcatcaagtgattctcctgcctcagtctcctgagtagctgaaattacaggcacctaccagcacacctggctaatttttatatttttagtagagacagggtttcaccatgtttgtcaggctggtctcaaactcctgacctcgtgatccgccagacctggcctcccaaggtgctgggattacaggcatgagccaccgtgccccgcctctttttttttttttgagatggagttttgctcttgttgttcaggctggagtgcaatggtgcgatctggtgtcactgcaacgtctgcctcccgggttcaaggcattctcctgcctcagcataccgagtagttgggattacaggtgccctccaccactcccggctaattttttgcattgttagtagagacagggttttaccatgtgggccaagctggtctcgaactcctgacttcaggcgatctgccraccttgccctcccaaagtgctaggattacaggcg

SEQ ID NO: 716633 - DNA, 676 bp, Homo sapiens
tagtcattattaacacatattcacaaggactggcagcttccacaaaatgggttagacataacctgatcctacaatttcaaatacttttaagaacctctagaagtgattgctaatctctgagcttgatgaaaagtgacaaatataaagattaaccacaggattttgtggttaaatgtctttataattttttcttaatatttgctatccaaacttctctttctagtatcatgaaaagatgtagtagatattatttctcttattttatttttttaaagatttgtgtaatcaatgagagaaaattcatggatctgaaaatacaatgaaagcttcataaaatgatrttttaaagaaaaataaggttgaaatattttttaaaaaacttaagcacttaaaaaaaatataagacttctctctccccttggtggtcgggaaattattaactacctgaccacaccaataaactctttatttaaaagcaatgaagaaaaggtgacctttcaacatagaactcctacttcacttaaaattccacttctggtgttccaggaatcccgttgtaaagccttgcttatgaccacaaatgtgacaggagctggaattatttctgagatataatacaggcatttatgatgattattactcacttacaaaattattcgtcaatgaaaacctgcta

SEQ ID NO: 716634 - DNA, 676 bp, Homo sapiens
tagtcattattaacacatattcacaaggactggcagcttccacaaaatgggttagacataacctgatcctacaatttcaaatacttttaagaacctctagaagtgattgctaatctctgagcttgatgaaaagtgacaaatataaagattaaccacaggattttgtggttaaatgtctttataattttttcttaatatttgctatccaaacttctctttctagtatcatgaaaagatgtagtagatattatttctcttattttatttttttaaagatttgtgtaatcaatgagagaaaattcatggatctgaaaatacaatgaaagcttcataaaatgatattttaaagaaaaataaggttgaaatattttttaaaaaacttaagcacttaaaaaaaatataagacttctctctccccttggtggtygggaaattattaactacctgaccacaccaataaactctttatttaaaagcaatgaagaaaaggtgacctttcaacatagaactcctacttcacttaaaattccacttctggtgttccaggaatcccgttgtaaagccttgcttatgaccacaaatgtgacaggagctggaattatttctgagatataatacaggcatttatgatgattattactcacttacaaaattattcgtcaatgaaaacctgcta

SEQ ID NO: 716635 - DNA, 598 bp, Homo sapiens
aaatttgctattatttatttcttcagttgcttatatgccatgttgctgcaatcattcactcagaattaatgtacttattctcttgtttatttatttatttttgagacaggatcatactctgttgtcaaggctgtagtgcagtggtgcaatcacagctcactgtagccttgacttcccaggctcaagcgatcctctcacctcagcctcccaagtaagtgggactacaggcacgcaccaccacacccaactaatttttttttgttgttgttttttaaagacrgggtcccactatgttgcccaggctggccttgaactcccaggctcaagtgatctctctccctgggccttccaaagtgctggggttataggtgtcagcctctgcacaaggcctcattctcctacttttaagtatttaattgtttttgttttcacgattatcaataatgctgggataaacatttccattacacaagcttttctacatattgcattatttttttaggaacttcccagaggtgaaattactagtttaaaagtatgaatgctgtgagtcttgaaagatatctaagctccaaaagaaattcatcgatttacaatt

SEQ ID NO: 716636 - DNA, 598 bp, Homo sapiens
tcactaacaatataaaaaaacaaagttctgagaatctgactcaaagataaaaagtttattctaggtccactgggtatgctgttggtttctcttgtcaactgacatctcgaggacagatggaaatatttcagagactgctcttttatctcagaaaaactgtgagtgctcactcgccccacccttgggccttctccttccctctcgatttcatatgcatgcagccaccyccccatacacatctcttaaggcttttctgataaggaggggtgttctatccatgcatcctttttaaaataataataataataataataataataattttcttgattgtctacccaaggttccttctgcatttcaggccacatgtgcaatactaagcaacagacataaaatcatgacatgttctgagtgaactgaagctgctgaccatctaccactttctcctccgccagctgtagtttcacgacaaagaaagatgaaaatttaccaagcaaaagatctcttttaggccacagagatttaagggcaattgtaaatatttttgttccatttctttggttgaaacccattttatacctgaaacattaataaaaac

SEQ ID NO: 716637 - DNA, 1433 bp, Homo sapiens
tttaaagtaacttgaaataaatccaatgatcctaaagtcaagtgctactgcctaggcttatcttttttcattgggccaaaaatggccaccactgctgtttacaaacaaaaacagcttatattgtgaaagcttataagcctctatcatcttaaaatcaataacatttaaataatattgttgggtgaaattgagagaaaagccctgcagttaactcaccatctctgctttaatttgtgaaggaagtttcatgcttgtaggaattcaattgcaacaatcatgagattattactctccattaatatattyttcagagcttctcataggctttagttaaaaggagctacacagatgtaggaaatgacaagatactgcttggtctccatcacaacagaatactccaaagacctctcaaacgacacatgtcccattacattatccctcgcacccttccacgtttatttgtggtgttgagacactatatagcttcttgttgactttgccctttttgctcagggcaaacctcaccttttttaagatctctgcagcaactgctgcaataaactgctgcctgctgggccatcaaatcgagatgccttgtgaaaaagaaatgtttttttctttttcagctcttcattcacattccattatgtgccatacacaagacaatttttatttttaggctcgcccattatattaaaagtaaagggctaatggtggagagaaagaactgaaacaataggaactttgtaatagtggctttttctaattgttggttataagaaaatgaaatataaaaatcgtaactctttttaagaaaagtgcagaaggaaacggggcttaatagcaacaaaatgatgttttaaacacttgacttattttctgccattttaatgtactgaattatgtcaaagaccttgtagaaaactttaaaaaatcattttctgatgttactaaatgaaaactaatttctgcctatgcatttggaactgtgcctcgcacagagtaagcagtcagtaaatattagctattattatttatattattatgacaaacttagttgtatttttttgtttttgtgcctctaatctcagaagcagcagcagtccaatcaattttgtattccgtgtcatctcaccaactcaggcccttgcattctccccctcttttctctgctggctatctcctctctgctgtaatcctaattagttctaatttcaagccctactctttatctccattctatctaccacccaacttctcatcttcttttcaagaccaagctggctctaatttctcaccacctatacactccatagaccaccaaaataaacagttggtcatagaaagaggagctagcagtgcctgagatgcaattgtgaagttggatcactttccagccagatggcaactaggacaccctctctagtgtgaaa

SEQ ID NO: 716638 - DNA, 616 bp, Homo sapiens
atcttggtttgaaatttgaagatggagaatgtcacattttgtacaagaagaggaaatgtttcactatgattgctacggtaaaagtgtgaaaatygtaaaaagttaaccttgtcaggtatatagaatgacaatatagaagcttatttctatattttataaatatgttagcaaatggtaaaaaaaaaataactttgaagaaagcagtgttacctttgatctataaaaacaggagaaaaaataataaattacaaatgtattgctctagttcagaaccatcattctataaactttttaatccacagatgtctatatttctattgcaattttaattacaaaagtctaaacctttttaattgtattaaagttataattaaaagttgattatttaattataataaaatggataaacctctagttagactaatcaagaaaaaagaaaagacacaaattttcaatatcagaaatgaaaaagggaatattactggagattctacaaacgttaaaataataaagtaatattataaacaacttacactaatgaattcaacaacttagcttcaataacaacaaaatcactgaaagatacaaactaccagagccactagagaagagatgt

SEQ ID NO: 716639 - DNA, 624 bp, Homo sapiens
ctaaaaatacgaaaattagccgggtgtggtggtgcatgcctataatctcagctacttggaaggctgagggaggagaatcgcctgaacccaggaggcagaggttgcagtgagccgagattgcaccactgcgttccagcatgggcaacagagtgagactccataaaaaaaaaaaagataataaataaaaataaatcaataaactttgaaattttacaaaagatggttgtactaaaattaatttatgatctttaacttactttttccttcatttgtgctcttatctaatatttatgtatatccattagtttttattatctgagtaacgcatgggcatgcttgtaaaagttcaaaatttaaaaagtctagaaggttaaagttgcataaatgaatatatcacatgatttttacatagtcataattgcatatagttttatatttctatattctcacttattttgtaaatacttttccatctctctaatagtcactaatttaaatgactgcaaaaattccaatcatgttaygtcatacttaatttagctattcccctacaattgtacatatttcaatttttaaacattttttaaagcacgtagtgttgcttacacagaatatatatatata

SEQ ID NO: 716640 - DNA, 864 bp, Homo sapiens
  misc_feature 298: n = A,T,C or G
gcaactaaaagaaacgaactattgatacattcaacaacttgcatgaatctccaagaaatgttgctgagcaaaaaaagtcaatcccaaaaggttatataccatgtgatctattttcgtaacattcttgtaatgacaaaatcatagaaatggagaacagattaatggtcatcaggaatgggagatggaagtgggcatgtttatgaaagaggaaatttatggtgttgggaatgttccatatccatattgcttgtaccaatgtccatacactggttctgatagagtactgtagttctgcaanagtgggaaaaccttgtaaagggtacaaggaatctatctgcattatgtcttacaaatatgcataaatgtacatttctctcaacgattttataaaactaatttaagttaaacatttacatgttctggtaacagtgacacaaacactcggcaatttaatattgtttttattttaatgcagttttaatattgctattacccataacctggagtggtgtcttagaatgagctaactgtagaaatactgcattgtgattcatttggcttaaatgatagggaaaactaatcgtatcacttcagaagtttctagaaaggagaattccagggttgtttaatccaatggcccataaatgtcatcaaggacccagggctttttcatctttcttttctcccatcttcactttgttagcttgcttctcctcttggtcacaagatgtttgtaatatactagacatcacaagcatagacaacttctsagtaaaataaatttgcttctttcattgtttctctttaattggtgaggacacagcccaagagtctcttctaaaaacgtttctgccacatctcagg

SEQ ID NO: 716641 - DNA, 864 bp, Homo sapiens
  misc_feature 298: n = A,T,C or G
gcaactaaaagaaacgaactattgatacattcaacaacttgcatgaatctccaagaaatgttgctgagcaaaaaaagtcaatcccaaaaggttatataccatgtgatctattttcgtaacattcttgtaatgacaaaatcatagaaatggagaacagattaatggtcatcaggaatgggagatggaagtgggcatgtttatgaaagaggaaatttatggtgttgggaatgttccatatccatattgcttgtaccaatgtccatacactggttctgatagagtactgtagttctgcaanagtgggaaaaccttgtaaagggtacaaggaatctatctgcattatgtcttacaaatatgcataaatgtacatttctctcaacgattttataaaactaatttaagttaaacatttacatgttctggtaacagtgacacaaacactcggcaatttaatattgtttttattttaatgcagttttaatattgctattacccataacctggagtggtgtcttagaatgagctaactgtagaaatactgcattgtgattcatttggcttaaatgatagggaaaactaatcgtatcacttcagaagtttctagaaaggagaattccagggttgtttaatccaatggcccataaatgtcatcaaggacccagggctttttcatctttcttttctcccatcttcactttgttagcttgcttctcctcttggtcacaagatgtttgtaatatactagacatcacaagcatagacaacttctcagtaaaataaatttgcttctttcattgtttctctttaattggtgaggacacagcccaagagtctcttctaaaaamgtttctgccacatctcagg

SEQ ID NO: 716642 - DNA, 1254 bp, Homo sapiens
caaatgccttagggctttgtatttcacttatgaaatggagaagaggtggagaagaggagctggaaaaaaggaactcaatcccttaattgctggaggatgttttcctcatctattactcattggccccaattctcttttttttttttttttttttttaattctcatcctactgtctccagcatgactgtacctgtgtttccacactagtgccaactataagaagtcaaaatgcactggccatgccagacaatacaaaccactagtgagcaaagcagagatgcaatttgaggggctaatagtatcagtgatacctttcagcttagatgaaagtaaaaagaaggaaagaaaaaggtaacagtgtgattttcttctcctggcgtcctaaaataaacaattaacttcagcaatatcagtataactaaattaaaaggtctttcatttctcgtctgtttttctcctctaaattcatgttggtttctgcttatcaagtaaactttatcacacaagttaggccttgtatttatcgtgtcaatgagttttcattaacagaaactagacccgtattcattccactaattggtgaggatcccatttgggagaaataagtgctcagaggtcctctcgaaatgaagtgatttattgtgctacatgagtaaaaatcaattaaattatgtttcattttgtatttttccgcaggttcttaaaattattttactgaaaaactcctggtaaaaggttacggtcatgatattaactatctctgcaaaataacactagtctaaaaagtttatcaggaaataggactccagtactatgttgattcaaaaaaaaaaaaatttggccttgtatggtggctcatgcctgtaatcccagcactttgagaggctgagacaggcgcatcacctgagctcaggagttcgagtccagcctgggcaacatcacgaaaccccgttctaccaaaaatacaaaaattagctgagtgtactggcacacacatgtgctcccagctactcaggaggctgaggtgagaggatggcttgagcctgggaggcagtggttgcagtaagccgagatcgtgccactgcacttcagcctgggtgacagagtgagaccctgtctcaaaaagaaaaaaaaaaaggctgggcgcggtggctcacgcctgtaatcccagcactttgggaggccgagacaggtggatcayaaggtcaggagatcgagaccatcctggctaacacagtgaaatcccatctctac

SEQ ID NO: 716643 - DNA, 1066 bp, Homo sapiens
tgcatttgtcttttaactttattttctttcttagctaaagaaatttgaagcatgacctatatttattaaaactcctgcctctctttcaaaattgcaactttctttctacaaatagctctacatttaaaaaatgagtttagtgccattctgtaatattaaatgcatacaatcttccgataatatttgctaaattcatggtcagttcaagttcaaatacatacttccttgaatgtatcagcagtgcgtttgtttttccctgaagtttcaagtttagtgcagtcagatatcttgtcacatcagtgagaaagtacaatattatgaaccatggggatccaaaaattttagcccattagagctcttttaattccaaagtccatgctcagtgaatttctttagcaagttttatgacctagccatctgacagcattcaacaaaattaaatatcttatcttgtttatcttcttccaaatatttcatgaactgactgtggttagcagcacaaacacaaagaaaattcactgtctcgatcactcctttcacatgactttaccttatgaagcacaaacctacctgataaatgatggagtggaaactacatacagaacctttctttttycacttgaatgaactgttgaaatgttctcatttattgcaagtgcctcatatatagaaagtgaatccagcttttatatgtttggaggaaagttttcaaattatttattggcaagtagttaaatactaggtatatcatacgtactggaaactttgcaatttaacactgatgttggggaagatctgtgatgaaaggatgaagtattcaataaatagatctggagttatccacatggaaaaaataaaataaatctctacctcaaactatatacaaaaaataaactccatgtgaattaagtggtttgatgccaaaagcaaacattagtactatttgtgtgaactttaaataactatcaccttaaggaagatgaaagattttttaatgaaaacatataaaatactaaccataaagtaaaataatgattattttaaatatattaacaatgaactttca

SEQ ID NO: 716644 - DNA, 662 bp, Homo sapiens
aatcattctataatccactattctgagttaaccattactaacatattgatatatatctatcttgaaatgcgtgtgggacgtgtgtgtgtgtgtgtgtgtgtgtgtgtttgtgtgtgtgtgaaagagaggaagccagaaagaaattaatttactaacaaaaatagaactatactacactgttcaataacttgattttatagttaatatcttgtcacagrtatctatcatgttcaataactataggacgatatattcattttttatggcttcacagtattctatcattggcaggtaatgacttatttaatgagcaattttcatggacatttaggttgttttcagtttttctgcaatagaagtattagtgccataaacatatttttgcaattatctttgaattattgtgctagtaccatatcaagataaagttctcaaagtaataactagcaataagggtgaagaatctgagattttgccttatttgcaaaggaaacatgttagcctcccacagtttcatggatgttggtagaagacataaaattccctggtgaaagatagagaacagtttactattcacaacattcacagtagcccagagtatcagcattgtgtgtgtgtgtgtgtgtgtgtacgtgcgtgtaccaattccttaagtactaatt

SEQ ID NO: 716645 - DNA, 1786 bp, Homo sapiens
taaatgatataacataattttttattaactatatgaataaaatatattttaatatataaaattattgtacaaattttgggaaaacaatgaataaagctgtttgtttcttatgccctgaatgcactttaaataatttagagatttcccacatctgagaaacactatttagggaacactcgaaaatcctttttcaatttattgaggagttttgatatatatcaaagacaaaatgatacaaaatgtgtttattgtattctaggagaggtgcggaggaacagagcagaaaggtagcaaagtcattcttcctgggagctttttctctgggaactcttcttacagcttcactatagtacagcttgactatattagtctagaattgtttagaatttagaattttcttaatggctcttcttatggaccagattattattaagaggtgtttgtctacctttagtgatatttctcttttatytttcatataactggactgaaaagaaaggtatggagctgccactgtgtggcggtaattacccagcttttgaaagtaagcaaagttggtcatggaaagaaggcacctcatggataattgttcaaacacttgtgcttccaagtaatgacaactgcttacaataaaaaaaaaaagatgttttgattaatagataaaataatataaaacaaattatatttaaaactatttctatgttattttgaaaacttatactataaaatatgaatatgacgtattttcagtcctttgaaacgtattgaggatttcttgatctagagtatggtcaattttgataaaagttaacgtttttgaaaataatgcatttttgtgttttgccaaataagttgcatttgtaatttgtgtagttaaaataatgtacatatatctagtgatttttccactgttcctgctaaaagctattgagaaaagtgtattacagtcttactctataacatttttatttacatatttttaaattgccaaataaaattatatgtatttaccatgtacaacatattgttgtgaagtatgtatatattgtggaataactaaatctagctaattaacattatgttttaccccagagtgatcacttttgtgataagaacactttacatcctttttcctagcatttttcaagaatacaacatgctgttaactatagtcatcacatgtacaatagattacttgaacttattcttcctatctaactgaaattttgtattctttgatgaacatctcgccaattcacccactaccaaccaccctgccccagctaaccaccattctactttctgtttgtactatcatcttatagttgtctattttcttttagttttgtcaagttttactttctatattttgaagcgatgttactgactctactagtttagaattgtttagaatttagaatcttctcgatggataggccaggttattattaagagatatttgtctatctttaatgatgcttcttgtcttaaagtatactttttatactattagtattaaaaaacacatattttgttagtatatccatggtatacattacattcattattttacttttcaccttactccattcatacctttaaagtctatctcctattgaaaagcggcacacagtttttattttttgttctagtttgtcaacattagtctttgtattggagtctttaaaatagtttcatttaatgtaattagtcaaggttttggaattatatatactgtgtaattgtttttgatttagcaatgtaatatgttctttcttccctgctt

SEQ ID NO: 716646 - DNA, 886 bp, Homo sapiens
tattttgctttgggtcccagtattggagcagtagaacactatattgaaactccttcttaaaatgaagattgtgaatagtatagtctaatattttactcgacttacaggttagtaagacaacccataactacttcatggctgctagcagaagacactagactatgggatagagacaaatgaatttattattaatgaaaaaagcaatggtcatgtcttcatattatttgcatcagtttcctttattccaattcagttcccagtgaggttactcaaaggggcctatgaaagaaggctctataggcagtagggtttattacaggaaaggaacaatgtacctggggaacacactgcttttaccatgagcagaaccaagcctgctttctgtccaggcaagacataaatttattccttaagattgcttattgcaaatgcagctctgaaaaatatccaagataatgaacagccagggccttgcatttttggaagagttcacaacttgcatggaatctcggcccattgtggattgcttctggacccttagcagctgttgttagcctttcaggtatagcaccaactcacrctaggaaaaatcaaagatagcctgaaagaagtgtggatgataaagactcagtttgaataaacatcattaccactgagaggaacaaaagtgattgtacactcaagctaattcactatataaaaggaggtcacaggtataacatcatattcaaagagatgtcatttgaatatgtcacaagttaaaaatcaaatttactctattttataatctattctttatgtttctgtatgtagaaatccatatttctaaaacatcataaatcttcctcatatgctctatattactttgttacaaaagtactttggg

SEQ ID NO: 716647 - DNA, 1140 bp, Homo sapiens
tgagtgttcaggaagtaggaacagggaatttagttagcagaactttaatttacaatcttgaaagctggaatttgaatatctcatctgaataagactagcagaaacaagaattaattaataccaatactcctctgacattaatctaatggtgatgtttgtctcttgtcatgttgattgtcctcctgaaactgtgcatttacagagaacatgttcagtaatgccagctttaaaaataatgaatgcataggcaagaagctggatctgtctctcaattctgaaccactattcaaaagaaactacactgctttatctgcaagtatttggaagttttaactttgtttttaatttcaatagtgttatatgaagcaattttattaattttttgccaccaggcattaacatttttaataaatctgctttccaaatagtaatgattccaataggacattagagataatgagttttacattagagataaatgagttttacaaagaacagatgtaacttgattaggaacagaaagagactgagtcacccaatcaaagattgcttattgtgtgtggacaactataacaatcagaaaactgagtaaagcaaagcctacaaacaaatagtaactataaaaaaagtcatttataaagttataacaatttttggaaagtttctgaagcctaaggataatactttcaatttgatacagtagaatcattcgaggatacttactaaaatgccactgctagaaatattaaaaagtgatagaaataagcataaaacaaggcaaggagtagaataaaactaagttaaaaagagagatatagataattggattacaagattaggaagttttaaaatgtggttagttgtaaagaaagaaacacagagagtgaacaaaatgctaaggcattttgaagagggtttaaatatatatacatacacacacacacacacacacacacacacacacayatatatatatactacagtgtgtgaaataccaagtatcttttcctaccacaatggtatgaaactagaaatcaatgatagacaggattttggaaaatttacaaatgtgtggaaattacacaatatgcacttaagcaactaatgagccaaaggtaagtataaaagaaaattttaaaa

SEQ ID NO: 716648 - DNA, 1342 bp, Homo sapiens
gcgtggcttcacgccctcttgcgtctttgctaaccctgtggggatggcccaggcggtccgagccggtgccctcggcctcagctcggtgtctcagccgccgtctcagggcgtctccagcatcttcctcaccggctgcttccaattccaggaaacctgctcctcctcccggatttcctgggccgacgcccgtgtccctgtgggttcctgtccttcctcagaacatgagcatcgagccaggagcaaagccccgcgctgtggctcaggtgcagctgtggggatcagtttccaccagtgaggggcatgaaaaggccacgtgaaaattctccctccttggagcaaacggcgtccagggccccggattttcaccccctccccagggtggaaaggaggcatctgcaacagcttcaaccacgaagacgaggacaggacctgggaccaaaaccacaaggtggagagcgggcccggcccacctgcagtctcgcctgttgcttgcggatggcgtgaaccgctagcctctgggagcttctccgcttgggggcctctttgttctagaagcttagtctttatcctaataccccggctcggtgagttgaacttccatccactcggatgctgaattagggtccggatggacccctgatccctcgctccacctcatcacccacccaacccttttcacctaagtgacccttttgggccctgagctctgacggagggtgaggccaaaatgctggcttgcagatgtttggtttggctctcatgctttgtccagatatgttttacaggtcctgtccccaggtaggcacgatgtttggacaacagacacctgtggcactggactaaggctgcccaggggcagggggcggagcgctgcacacctgagcgtggcagctgtgactgccacggcaccgactcttaccagctgtgcggctctgggctagtgcctcgaccrgccagctgtcagaggtggttcacagatagtcgttcctatcttatagcaccacggtgaaggttgcaagagttcatccgtgtgaggattctgaagggcggccacagggaggacagtaagtgatggtttcatctgcgtcctgccctgggtcgttgactactcatgcttccctctcacccttgcccctgcccacattaggccgccatcctgcaggggcaggtgcttaaccttcaccgtggcatccaaggctcgtgcccaaggcctctctgacccctttcttgctgcctttgcgctccactctgccccagcccagaagccctgacatgccctgcgacatctaagttttttccactgtgtttaaatacttgcaaagatataattcccattatattg

SEQ ID NO: 716649 - DNA, 1342 bp, Homo sapiens
gcgtggcttcacgccctcttgcgtctttgctaaccctgtggggatggcccaggcggtccgagccggtgccctcggcctcagctcggtgtctcagccgccgtctcagggcgtctccagcatcttcctcaccggctgcttccaattccaggaaacctgctcctcctcccggatttcctgggccgacgcccgtgtccctgtgggttcctgtccttcctcagaacatgagcatcgagccaggagcaaagccccgcgctgtggctcaggtgcagctgtggggatcagtttccaccagtgaggggcatgaaaaggccacgtgaaaattctccctccttggagcaaacggcgtccagggccccggattttcaccccctccccagggtggaaaggaggcatctgcaacagcttcaaccacgaagacgaggacaggacctgggaccaaaaccacaaggtggagagcgggcccggcccacctgcagtctcgcctgttgcttgcggatggcgtgaaccgctagcctctgggagcttctccgcttgggggcctctttgttctagaagcttagtctttatcctaataccccggctcggtgagttgaacttccatccactcggatgctgaattagggtccggatggacccctgatccctcgctccacctcatcacccacccaacccttttcacctaagtgacccttttgggccctgagctctgacggagggtgaggccaaaatgctggcttgcagatgtttggtttggctctcatgctttgtccagatatgttttacaggtcctgtccccaggtaggcacgatgtttggacaacagacacctgtggcactggactaaggctgcccaggggcagggggcggagcgctgcacacctgagcgtggcagctgtgactgccacggcaccgactcttaccagctgtgcggctctgggctagtgcctcgaccagccagctgtcagaggtggttcacagatagtcgttcctaycttatagcaccacggtgaaggttgcaagagttcatccgtgtgaggattctgaagggcggccacagggaggacagtaagtgatggtttcatctgcgtcctgccctgggtcgttgactactcatgcttccctctcacccttgcccctgcccacattaggccgccatcctgcaggggcaggtgcttaaccttcaccgtggcatccaaggctcgtgcccaaggcctctctgacccctttcttgctgcctttgcgctccactctgccccagcccagaagccctgacatgccctgcgacatctaagttttttccactgtgtttaaatacttgcaaagatataattcccattatattg

SEQ ID NO: 716650 - DNA, 1342 bp, Homo sapiens
gcgtggcttcacgccctcttgcgtctttgctaaccctgtggggatggcccaggcggtccgagccggtgccctcggcctcagctcggtgtctcagccgccgtctcagggcgtctccagcatcttcctcaccggctgcttccaattccaggaaacctgctcctcctcccggatttcctgggccgacgcccgtgtccctgtgggttcctgtccttcctcagaacatgagcatcgagccaggagcaaagccccgcgctgtggctcaggtgcagctgtggggatcagtttccaccagtgaggggcatgaaaaggccacgtgaaaattctccctccttggagcaaacggcgtccagggccccggattttcaccccctccccagggtggaaaggaggcatctgcaacagcttcaaccacgaagacgaggacaggacctgggaccaaaaccacaaggtggagagcgggcccggcccacctgcagtctcgcctgttgcttgcggatggcgtgaaccgctagcctctgggagcttctccgcttgggggcctctttgttctagaagcttagtctttatcctaataccccggctcggtgagttgaacttccatccactcggatgctgaattagggtccggatggacccctgatccctcgctccacctcatcacccacccaacccttttcacctaagtgacccttttgggccctgagctctgacggagggtgaggccaaaatgctggcttgcagatgtttggtttggctctcatgctttgtccagatatgttttacaggtcctgtccccaggtaggcacgatgtttggacaacagacacctgtggcactggactaaggctgcccaggggcagggggcggagcgctgcacacctgagcgtggcagctgtgactgccacggcaccgactcttaccagctgtgcggctctgggctagtgcctcgaccagccagctgtcagaggtggttcacagatagtcgttcctatcttatagcaccacggtgaaggttgcaagagttcatccgtgtgaggattctgaagggcggccacagggaggacagtaagtgatggtttcatctgcgtcctgccctgggtcgttgactactcatgcttccctctcacccttgcccctgcccacattaggccgccatcctgcaggggcaggtgcttaaccttcacygtggcatccaaggctcgtgcccaaggcctctctgacccctttcttgctgcctttgcgctccactctgccccagcccagaagccctgacatgccctgcgacatctaagttttttccactgtgtttaaatacttgcaaagatataattcccattatattg

SEQ ID NO: 716651 - DNA, 622 bp, Homo sapiens
tgtagcaatgcgcacatgcccggataaagatgtcacagtgagcatccaaactgatttagggccgggcgctgcggctcacgcctgtagtcccagcactttgggaagctgaggagggcgatcacttgagctcgggagttcaggaacctgggccatttggagaaatcccatctctacaaaaaatacaaaaattacctggccctggtggcatggrcctgtaatcccagctactcaggaggttgaggtgggaggattgcttgactcaggaggttaaggctgcagtgagccgagattgtgtcactgcactctagcctgggtgacggagtaagactctgactcaagaaaaagttttacttggctcattgtatacaggcttatattatgacatgttccaatgacacattcgaggttgtaggtcagagcacaagacattgaaagaataaatggaaatatcagtacaatgggaagcagaggcgggaaagatgagatggaaaagacttactcactgagggacccatgcaggcccacaggcgctctgaagacctgtggcaggcgtgaccatgcacttcctggcagtcaacgaaaatgacgtacagcttctttcaagatttacagctgtcttgtg

SEQ ID NO: 716652 - DNA, 1090 bp, Homo sapiens
ataaatatagaattggatgttttctgttaatattccaataagaagcaaatcttgaatataatcattagtttattttttttttcatttccagaatggtaagtygtccttgtctttacttgacaagatcatgcatggcaagaggaaaaaaatcttaaagtcttttgaaaacttcattttaaagtagtacacagaatgcttgtatggccacagtgctaaatggatgaccttggacaagttctttatctttttaatgcctcattttcctggaaaataagatgatttcaatggttgcttttagtacaatgaagctacacttcatgcagaaggagaagaaacctaatggaccctgtgcattagtatttacttcaagatctaaagcaacagagcatgaaaatgatgttcctgcgttaacattttattatctgcagacaccaggtagcttcaggtgcctgtcaattacagaaatttggaagctaatgaatcaatagtcaacacagggctggtaactctccgagtttaatagttacattcaaacattcatgtgagaaataattaacctgttctacctaatagatcgtttttttcaacacaggtggctatttttattttctatgttcatctttagcaagggagtttatacagtgggaacatactgtcaattgcacccagcagttgaacgccggcataataagaaatgttacaatgacgtagatgtcagggctctatatttgcataatgtgccaaagtgtcaaatcatccgtgggtttgtttgtttgtgttaggtttgtgttgttgttgttggttggttggctggttttgaaacagggtcttgctctgtcacccaggctggagtacggtggcaccattgtggctcactgtagccttaaactcctgggctcaagccatcctcccacctcagcctcccaagtagctgggaccagaggcacacgccaccatgcctgaccaatatttttttattttttacagaaatggggtttcactgtgttgctcaggctgatccatgggatttttaaaataaaaatcctcttaaataaaaattaaccttatatcataattttaaatataaaaa

SEQ ID NO: 716653 - DNA, 208 bp, Homo sapiens
tcctatttcaaatttttacaaatagtggttaattttttatattccaaacttcttcgccatccataaattccaggtactaaactcaccatccataaacaccaggtactaaatamcaggtagtaggtacactactatcttcctgcacaaattaattcaccttagtgagcacatggggattggtgagtatgcctgtgtgcccatgtgtttt

SEQ ID NO: 716654 - DNA, 599 bp, Homo sapiens
ctgaggagatgatttggaggtggaggttacagcctaagcttcccaagctagaaactctatttccctgcctttttcatgttcatctattttacatatagctccgtgtcatggattaaaaatcccttcagttctatggttacccctcttagctactataaaccaaaaagtatctgagacatgtctcaatcaatttagaagtttattttgccaaggttaaagatgcgcccgtgacgcagcctcagaagatcctgagaacatgggcccaaggtggtgagggcatagcttggttttatacattttaaggacatatgagacattgatcaatacaagtaagaggtacatttgttctgtccacaaggggaagataacttgaagggtggacagtttccaggtgataggtggattcaaagattttctgattggcaattggttgaaagagtttccctaaatacctggaatcaatagaagggagtgtcttggttaaaataaggggctgtagagaccatggtttcatcgtgcagatgaagcctcctggtagcaggcttcagagagaatggattgtaaatgtttyttatcagagttatcagagtgttatcaga

SEQ ID NO: 716655 - DNA, 1067 bp, Homo sapiens
tgagagaattacctagaatttctaacatgctgtagaattagacatcttgaaggagatttatgttgactttctgcttgtttgtttatttacctttattttccagctccaccactagattacaatcttcttgaggaaaaaggcttcttttatcttcgttctttgtcttctttctgccctctgcaccatgcctaatggataataagtatccattgtttaaaagaatcagttagtaaaattaattagtcgggacgatatattctccagtagttattctctttttttcttgttcttgtatgatttcaaatctgttactgagactacttgccatcatgttcagtactgacctctacaaaagaagtaattagtacaatatttgttcacatataagacatcatttttgtctccttgcttcatgtaacctgtcagacagagcaggggaagttttacattcaattgctctgtattccccaatacacactaggagaaggaaaaaagccatatttaatagcagacgtctactcttaacataaacctgtataaaatcatattaattgaaaactgtagaacatactgaaatctccagacgccatatagaaatagaaaataattataattaaggtatttaattaatatcagtttaatattgaatatgatcttgatattaaatgtaattaaatattaaatgaaacttccttagttacacctacacttataacctatgcttgtgaaaacctgctgatctattgtacckctatgtactactgggccggagaagcatggtatgagtgtattctgattaatggtaattgaaacttccttaaactatccctttactactcacccttcccatttcaagttccagcagaaggtttccaagcttgagcatgactactcgcgtatttggtttaattcattatgttttaattcagaagattgttttacgatcatccggaattctttctaataaatgataatccatgaatatggttgaactccactatactccgatgattttataagaaattattcaagtttctgttgctatgtaacaacccaccccaaaatta

SEQ ID NO: 716656 - DNA, 2319 bp, Homo sapiens
tcctacaaagcctgacaattccaagaggagagggaaaaaaggaggaaggagagaggaacctgctcttcatgaaataacactagatgcaattttttatcaactgccctcagtgtttctcttattggatggcactgtgtacatttcaagttattatcagacttggatgttcactgtctgcaagggctgtgcccagggtctgttcctgctgttttaatcattattacataaggaaagaagcaagaatcccagtacatcatcccttaccagtctgtgtcctaaagccctctctgaggcaatttatggaaatcacttctcttcaattatgtcctgttcctttggtacaagcccagcggtgagtcaacaaagtttttcttgttcactgattcagcagcagaggacatttaatcagtggtgctcacttctttggggaaaggagagtaacaccgtgtcataagcaaaaaccccttactatgaaagtttctggataactcagctacttccatgtcccagcaaatggcccaagtaatcagtcttctcaaccaagtccctacagtgaaaaagcgtcaaggcagtaatcagttcctaacagggaattacctggttatgcactgtttacatgacaataagaagaaaggacttcttttaaaaagttttatgatcacatagtactttagaattgaaaaaggacctttaggaatattaaacctcaaaacagctcagagaagtacacaggaaaaaagatactgttgtatcaattttatggatatggaaaccaaaatatagaggaatatactttacttactcaagctatataacaactaagtaacagagccaggcttccattgtatatctccacaagaaactcatgcattcattcacttcataaactttgactgacctgttaagtttttgccactgcttaggtgctggaaatacaagttttatccaaaattatattacttgtaccagttcacattctgatatcttttcgggagtacaataagaaagggtaaagtcaacatgttgataattgcttaacacggtttgttggaatggtaattgcttaacacagtttgttggaatacatcatgtgtgtaacagaataaaagaatactgagagtaatcgacacataaacaggtaatttacaggagaaatcttaaaggacaaatggccaattctacctggtagaaactaaagaattaaaaataaaaatggcattccagcatagatggcatatttgagccaggcttcgaaatatcagtatcagtgagtaataggttctaatggtgagagggaagaatgtgatgagaggcatggagatccagaaactcacaggcaagtgttttcaaggacaccatttacctcctttgcttaatactgtgatgttttccctaaacttcagggatttttcctatggtccttaaacatcattttcttccatacctctttcattaattttgatttctatttctttatccctaacttaaaaagtattaaaactacaaccaagaaaacttatctaacttcagaactactcattaaaatctaatatagcagtatcccaataattccagaaatctggaaaacaaaagtaaatatccctgaagagggtatgtctgtgtatatatttgcataaatatattattttcctttggtaataagctaccaagaaattaaagtgaatataatccctcgtrtgattgtaaatattagacagattatgattcacgttttgtcgctaaagactgaggactgaatccactcctatttgtactatgtaaatagaaggatctgatacctctttggtaaaggcatgaaaacttcccattattgtgctttgtgtactcgctcagattaatccaattccataacgtttcaaaccatataatttatagtattcatgaagttttattattcattcaggaattatgtcttcagaacatgttatgcacaaggcatgaatttgggcactgtcatggcacaatttcacacaccaaaaatactttcaacatcttcagctcaccctttgggtaataagatcaagcacaaataaacatattcatttagtacctatcacgtattatttgtttcaccaagaatccgctttgggtaaggacatgccctgtattaatcaaacacccctgactaactctcagtgatagacatttaaatattcactacccttaatggttaaaaaattccttcatcatgataaatattatacatggtctcctgtcagtatagtgagttttatatctacagttttcaaactctgtaccttcaggactcctttgcagtcctaaaaattattgagggat

SEQ ID NO: 716657 - DNA, 2804 bp, Homo sapiens
tgcgttccaatttagaggacatttgtttccttcctttccttctctttyttctttcttgcctctcgtttcactcattttcttccttctttccctttcctttattagagctgcaggcatttcttcatgtgctgcagtttttggtttctgccagtgtcctctaagaaaagatgctgacttggtaaatatgaccaaggcattgccaaagtgtaggtcagtctttgcattctcagctctagaacttaaatagtatgtaaatttcaaatatcaacactggagtctgtgctgtgtttctagtcttagatttctagatgctagaaggaagtttaggggaaaggattttaacttaaaacttatacctcctgtaatagaagaaatgacttcaaaatacattctactattatactgtgtttttcatagatttctttctcattttttcctctagtctaaaagtcattcccgagttggcctgaaatcaagcaccaagcaaaaggtatgttttttcttccgtattgttcctttaaaaaataattattttgggtgggtgcttttatttatttatttatttatttatttatttatttatttatttatttatttttcttcctgaagagaatgacttgtctttggatggccagggcatacccagaaacaaagtagttcttattcccatatgctttgccttcataatagcaaaactgaaatgggagagggatccttgaaatgaaatataatttgagggagattcttgaaacccagtgacagaacctgagaattttcccatgacttacaagcaattctgaaagcaaggtcagaagatactgtgctatattcagctcttttattttctaagcacttcacagtgaaggaattgttcctatctcagttcatatttttactaaactttattctctcaacatgtgttgtggagaataaccctcacttatgacctgtgatgaattggttaaaacatgagctctgtgagtcagaaagaattggtttcaattcttggttctgccactttgctatgtgatcttgaacatatttgtatagagaagatgatcatacccactggggtagcatatgttaaggatgaaatgagataatatatgtgaaaacacttatatcccagtacctggtgcaaagtagccttttaataattttgaggttctatatttcattgatagtttagaaattcaaagagtagaaaatttgaaatttcaaaatattaattctcagacaaacacacatgagtacacacatacacacttaaattatgttaattcctggtgatacatggggcaagttcggagaagttcatgtttaattttagagaggttcatatttacatattattcttccactgtagaagtttgcactgatgggagtacttgcctagcttttcagaataatgcacatagtaactcagaatacctttcttgatgccaactgtcagagaaaaaacactgcaaaaattcaaagcatctaagaggtgctgaagaggattaaaagaggcaacgtatgtggaagcattaagcccatgcctgtgtcaacagtagctatttttgttagagaaacattatgttgattgagaagatggacagacccagattcccacccagctccaatacttaccacataaaaagagctaacattgatatcgcaagccctgtgctccaggtacaatacgagcattttacgatgaactcatttaatagtctcagtgacctaatgaggtaggtgttcttgtttctcagggcttgtcaggagaataccacaccaataattggaaaagagaatctaactggttaaccggttgtaatgttttaatgaggtaatgaaaagggtaaaaagaagggtagaaagagagctgtaaggtatcaggtaggtagcaagcaattccagggagcagctgccgtctccagggctgagggagcaaaggaaagagctgggattaccaacacttcctggacacttagaggaagggccccacagagctgaaattcagacctctgaggagggggcgggtgccagtatccctgaggggcacataatgaggctgattctggaaaaaggagggggcgggtgccagtgtccctgaggggcacataatgaggctgattctggaaaatctacaaactggctcggtggctctgtaggaagaagaaaaggatggtactgctgaggcgaagttcataagaagcacacgggaaggagcaagtcccctgttcgtcctcgggctctgcccctctcgctagcgcccctactggcagatattacaagaagcagctgactcagccgaaatgtggttctcagagttccagccccaagcatcacaaagcagataacagaaacgtgggcttggagatgagcgatgataatttagcaactggcacaattattagctccatttttcagatgaagaaaccaaggcacaaatatattaagctacgtttgtccagggtcatacagctaggaaaaggcagcggcagaatttaaacctagtcagtctggatccaaaagtttatgcccttaaccccttaaacaagtgactatggacagaaacacttttctgacttttttaaaatggagacaatacttcttaatgtgtagggctgtcgtaagggttaaacaaaacaatataaaatatgtgccaatcatacttcttggtacatagtaggttctcagtaaatactaattcttgttaaatatatttttcttgctttaagtatgagaggttcattttgccttggtgactttatgtgtagttttgagagtatctatattgactttgccttggagtggtt

SEQ ID NO: 716658 - DNA, 2804 bp, Homo sapiens
tgcgttccaatttagaggacatttgtttccttcctttccttctcttttttctttcttgcctctcgtttcactcattttcttccttctttccctttcctttattagagctgcaggcatttcttcatgtgctgcagtttttggtttctgccagtgtcctctaagaaaagatgctgacttggtaaatatgaccaaggcattgccaaagtgtaggtcagtctttgcattctcagctctagaacttaaatagtrtgtaaatttcaaatatcaacactggagtctgtgctgtgtttctagtcttagatttctagatgctagaaggaagtttaggggaaaggattttaacttaaaacttatacctcctgtaatagaagaaatgacttcaaaatacattctactattatactgtgtttttcatagatttctttctcattttttcctctagtctaaaagtcattcccgagttggcctgaaatcaagcaccaagcaaaaggtatgttttttcttccgtattgttcctttaaaaaataattattttgggtgggtgcttttatttatttatttatttatttatttatttatttatttatttatttatttttcttcctgaagagaatgacttgtctttggatggccagggcatacccagaaacaaagtagttcttattcccatatgctttgccttcataatagcaaaactgaaatgggagagggatccttgaaatgaaatataatttgagggagattcttgaaacccagtgacagaacctgagaattttcccatgacttacaagcaattctgaaagcaaggtcagaagatactgtgctatattcagctcttttattttctaagcacttcacagtgaaggaattgttcctatctcagttcatatttttactaaactttattctctcaacatgtgttgtggagaataaccctcacttatgacctgtgatgaattggttaaaacatgagctctgtgagtcagaaagaattggtttcaattcttggttctgccactttgctatgtgatcttgaacatatttgtatagagaagatgatcatacccactggggtagcatatgttaaggatgaaatgagataatatatgtgaaaacacttatatcccagtacctggtgcaaagtagccttttaataattttgaggttctatatttcattgatagtttagaaattcaaagagtagaaaatttgaaatttcaaaatattaattctcagacaaacacacatgagtacacacatacacacttaaattatgttaattcctggtgatacatggggcaagttcggagaagttcatgtttaattttagagaggttcatatttacatattattcttccactgtagaagtttgcactgatgggagtacttgcctagcttttcagaataatgcacatagtaactcagaatacctttcttgatgccaactgtcagagaaaaaacactgcaaaaattcaaagcatctaagaggtgctgaagaggattaaaagaggcaacgtatgtggaagcattaagcccatgcctgtgtcaacagtagctatttttgttagagaaacattatgttgattgagaagatggacagacccagattcccacccagctccaatacttaccacataaaaagagctaacattgatatcgcaagccctgtgctccaggtacaatacgagcattttacgatgaactcatttaatagtctcagtgacctaatgaggtaggtgttcttgtttctcagggcttgtcaggagaataccacaccaataattggaaaagagaatctaactggttaaccggttgtaatgttttaatgaggtaatgaaaagggtaaaaagaagggtagaaagagagctgtaaggtatcaggtaggtagcaagcaattccagggagcagctgccgtctccagggctgagggagcaaaggaaagagctgggattaccaacacttcctggacacttagaggaagggccccacagagctgaaattcagacctctgaggagggggcgggtgccagtatccctgaggggcacataatgaggctgattctggaaaaaggagggggcgggtgccagtgtccctgaggggcacataatgaggctgattctggaaaatctacaaactggctcggtggctctgtaggaagaagaaaaggatggtactgctgaggcgaagttcataagaagcacacgggaaggagcaagtcccctgttcgtcctcgggctctgcccctctcgctagcgcccctactggcagatattacaagaagcagctgactcagccgaaatgtggttctcagagttccagccccaagcatcacaaagcagataacagaaacgtgggcttggagatgagcgatgataatttagcaactggcacaattattagctccatttttcagatgaagaaaccaaggcacaaatatattaagctacgtttgtccagggtcatacagctaggaaaaggcagcggcagaatttaaacctagtcagtctggatccaaaagtttatgcccttaaccccttaaacaagtgactatggacagaaacacttttctgacttttttaaaatggagacaatacttcttaatgtgtagggctgtcgtaagggttaaacaaaacaatataaaatatgtgccaatcatacttcttggtacatagtaggttctcagtaaatactaattcttgttaaatatatttttcttgctttaagtatgagaggttcattttgccttggtgactttatgtgtagttttgagagtatctatattgactttgccttggagtggtt

SEQ ID NO: 716659 - DNA, 1152 bp, Homo sapiens
tttcaatacagagcatacaaaaacaagagtaattaatcctgccaagagaaatcagaaaagtcttcatataggaggtggtatttgggttgaccattaaaagatgaatacgagttttcaaaatggacataggtagacagaaggcgtgctgagtagaaaaaacagcatcagcaaagctatagagacatgaagtcacctggaatgatgagctaatgccaggtgctttagtgactaatgcgaagggtgtgttgtgggttggggtggagataattagataagtagaatgtgcggagaaaggttgaaccaggccagatggcartgccctgtattatattctaaggaatcagagcagagagacatcgctaacatagatgtatgtgtatagaccatacacatacagtcaacatagtggaaatattaaaccgaggtgtgactggttgacaaggcagtgttggagtgaaggtcttgctggagttagaaggagccttacctgccattttcaaatgtgtttcagatgcagtcttacagtgaaagttaacgcggtctaaaagtcagagtcgttctgatggaatcattgagggtaaagggtgagaaggggcctgtaggatgggggcccagagacttatctgagtgtccctttgctctttttggttaccaggtgaaaaaacaaaaagtcacatgaaattgtgtatgatttaccttaggctagaacacgaatctgtgaaagtgttggaaaaccttccaccttacgtttatgttctttatatatctaaatattatggacaaaatctcaaatgacgtgtgaagttttgtttcacagaatgttgagttgtaatagagtccagtcaatgttggctgttattattactgttttacccattaaccaaagcactcaagtatatttaggaagcaggtatgggaagggtgagggagagagagagtgtgtgagaatgtgctgaatcccttcttggatctgggctggggaagggaaatgggagtcctgtgtctgggctgatgatgggacagctgtcagaagttgtctcctgcaggctacagtccctctctttgtaatcattccacagtctcaatatcagtcttggcacgaggtggtggaggcaagttgtaaaatgttctatgtccaagttgctctgagct

SEQ ID NO: 716660 - DNA, 1046 bp, Homo sapiens
tgatttgcttgtttcactttaatattgcagactttccccacatgcctggaatccttggctgtctattcatattcaagagaaaatctttggaaagctgaggggaagttttgtgtttattcattggacttttcaacttgcgggcttcaccgcagggccattaggatgacatggctttttcagcagggaccttcaaatgtcagaatctgtagtattttggctgaaggtggtttagttttgctagagaagtttcctccaatcatctgggggttcattctgtgcagtctgcgactttcatttcatctccctgttttctctcgtatgtctaacctccacttgaccttctacctcttgtctctgagtctggatccttacctcctccagctgggctaaggaagcagtagccagacccagcctcttcccaccttcagaggcacttgtgctcctagcctgtctggattctgtgagcatttccaattcacttctcatcagtgcctccctttggaagcacttagctgtgtcccggcttctctctggtgacccatctacttctctattgctttctgccatcttatgatttagttcacagttaaaactgtctccaaaacggatgaaggttgactttctatttctgattcttttttccttaagtgtttgggtgatgtttaagatgagagaggttgggctgggtgcastggctcatacctgaagtcccagcactttggggaacccaggcaggaggattgctggagcccagaagtttgaggccaacttgggaaccatagagagatcctgtctccacaaaaaatttaaaattagctgggtgtgatggtgtgcacctgtcgtcccagttactcaggaggctgaggtgggaagatcgcttgcgcctagaagatcgaggctatggagagccatgatcatgccactacactccaacctgggcaacagagcaagactctgtcttgaaatgaaatgaaatgagagatgctggaaatatatactgtcttgaaactgaaaatctggtaatcatcattttaattatgatgggc

SEQ ID NO: 716661 - DNA, 564 bp, Homo sapiens
gtattataaatttggaagggaaagactctcagtttctcaaatcktaagttgctaaagccaatgatcttatctactcttcctgcagagagggaaagaaacatgtagaaagtagtgatactgcgcaatatttgctcttccatatactctggagttggcagaccatttgatggtttcattgccttctctctcctctgctaatattgctgttacaattccactaaatttttatactcttcactcccagttttcactttctagacaactgaatgcagatgctattaagtgcatcaataggagttctaagaggaatacaggagaagtttcactgctgatctagacctcagacttggttacaggtaaggttaaaggaccctatactctgccttttgtagcacgaaaactgtcagaccataccaaatagaaaaatgggaaataatttttttcttctgtcatgattacaacatcaatagataatctaagacattttgaattcatggtcttagtatccaacaacctttctgctgcttggtcctgtaagagcacttaccatgccatatttaattt

SEQ ID NO: 716662 - DNA, 564 bp, Homo sapiens
gtattataaatttggaagggaaagactctcagtttctcaaatcgtaagttgctaaagccaatgatcttatctactcttcctgcagagagggaaagaaacatrtagaaagtagtgatactgcgcaatatttgctcttccatatactctggagttggcagaccatttgatggtttcattgccttctctctcctctgctaatattgctgttacaattccactaaatttttatactcttcactcccagttttcactttctagacaactgaatgcagatgctattaagtgcatcaataggagttctaagaggaatacaggagaagtttcactgctgatctagacctcagacttggttacaggtaaggttaaaggaccctatactctgccttttgtagcacgaaaactgtcagaccataccaaatagaaaaatgggaaataatttttttcttctgtcatgattacaacatcaatagataatctaagacattttgaattcatggtcttagtatccaacaacctttctgctgcttggtcctgtaagagcacttaccatgccatatttaattt

SEQ ID NO: 716663 - DNA, 564 bp, Homo sapiens
gtattataaatttggaagggaaagactctcagtttctcaaatcgtaagttgctaaagccaatgatcttatctactcttcctgcagagagggaaagaaacatgtagaaagyagtgatactgcgcaatatttgctcttccatatactctggagttggcagaccatttgatggtttcattgccttctctctcctctgctaatattgctgttacaattccactaaatttttatactcttcactcccagttttcactttctagacaactgaatgcagatgctattaagtgcatcaataggagttctaagaggaatacaggagaagtttcactgctgatctagacctcagacttggttacaggtaaggttaaaggaccctatactctgccttttgtagcacgaaaactgtcagaccataccaaatagaaaaatgggaaataatttttttcttctgtcatgattacaacatcaatagataatctaagacattttgaattcatggtcttagtatccaacaacctttctgctgcttggtcctgtaagagcacttaccatgccatatttaattt

SEQ ID NO: 716664 - DNA, 1543 bp, Homo sapiens
tcctttggctagcaaacccagaaaggtgagtcatcctgctacaactcattggaaagagaaaaattttcaaaaggagcagctgaaaaactaggctttcaaatgcaaagaaaggctttgccattcaagttgatacctggtatagatgttatgtgtcaaatgacataaaactgctttctagtccacaggctatccaaaaagtttacacacttcagcagggtggtggggggatagcatattcatcatcctcttttcagatcaacaattggcctcactgctttcaatttagggttacttcatctaaaaagatgtcaggaaggtacagaaaaacatattttaaaatataattaacacacagttttaaaattagtttatcttgtttcccaaatattcagacactctatacatatttaggcccttttaaaataaagaaggacaaagaatgaaccataaagaaaaatacttccaacactagtatgagaaagaatatataagctctcaagattaaaagataaatacactatgctagctatcaacatataccttttgagctagtaagtatacttcaatagatttaatggcccaattggcttatatacacagagaactgtgtccagtaataagtcctggaccactattggaagcagtgaaagcttggggggaaaataaccttaatgttcatcaacaataaatcaagatttttccagacaaaaggaacactatacattcatgaaaaattaactcacagaaaaatgttacttgaagtggtaagcacatactggctataaatgtcctcttgatgatcttgaaccattagggaaaatattaaaacatttcttgagttcttttacacaaattacttacaatcctatagccttctgccttcattcaaaactaggtcttcagagtacttattaaggatttactaaaatctgtgctcataacttaaaattggattgcctgaggaagcaattccagaatgacagagtgaatacctcccaaaatgcattcccctataaaagcaacaggaacactggcaaaattgtcaaaattaactttttcagaacttgggaaattaaaggcttgcaacaagcagaggatcatttatttgagaaaaacagctgaatctcagcaagaatagcaagctttgtggcattttaacttgcactattttcatcctcctctcctcagctctgcaacagccctgaaaaccagcagtctggcaagaatggtagctgtaaaaacaaggaatggaaaagaaaaggaaaaaaaacagtagtctagcaacccctggaaggggacagaatgggcttagagcacccagagagtcccatccccagataattgtcactattagactagtttggcagttccctggaactgccccatgagcagggcttacttcagttgacctgaatcagagcagctcaggaggaamagctctattcccaggtgtttgttgaaaacaattagcggcagttgtttatcattgcaggtacctgaggcaacaataccatttgggggaaaacaccaggctggccaaatt

SEQ ID NO: 716665 - DNA, 1012 bp, Homo sapiens
gccggaaatgaccacaccaagcaactagaaagagaccattttatgcctgtttttctttcccacctggggtgaactcagggccattggaacagaatctgagcaaagaacctgagtgacactgggaartgtggggacttctttctttttgtttttcattttgttgtgcactggggagttaaaaagggatgtattgttaggtgtatgtttatgaaatctgggctatttcgtctctactagtttattattttcccttctgaaaacataacacacacacacaaaatgaatacaaaacaaagcaaaacaaacaaacaaaaaaccccagaaaacagaacacaacaatttggatgaatattacaataaattaaaagtttccagatatgagaaaatacatatcatgtatactcatatatatttacataaaatttttaaataggcagaattaatctatggtattagaagtctgcaaggggtaggggggcagtgactaccggaagcaggtactgttggggcttccggggccctggtgtgttctagttctggatctggatgtgtgtgttcaccttgtgaaaattcactgaaatttatgctcaagatttgggcacttttccttgcatgttaaaataaagatcaagaatgaaaaagaggctgggtacagtagctcatgcctgtaatcccagcactttgggaggccaatgcagcagatcacttgaggtcaggagttgaaaaccagcctggccaacatggtgaaaccccatctctactaaaaatacaaaaattagccaagcatgatggtgcatgcctataatcccagttacttgggaggctgaggcacaagaatctcttgaaccccggaggcagaggttgcagtgagccaagatggctctattgcgctccagcctgggtaacagagcaagactctgtctccaaaaaaaaaaaaaaaaaaaaaaaaaaatgaaaaagagagaaactctcccccaaatagtgtggtagaatgggcacactcttttttttg

SEQ ID NO: 716666 - DNA, 898 bp, Homo sapiens
taaaaatatttaagaagggaaaatagaactcctaaatgtttttggcatgtcattcccttcatttagtaattgggtttgcatgcttttcttgacaaaggaatttctgtaccgcagagagctttttcactgtgactatgctgtgtttagcaaagaagagtttgcctaattgatttcaaactgatttccatacacagaacatataacgttttagtagatatatctgatagttcagtaattaattcacctagttgtattagctcatactcatacaccacacaygctggccaaaacccattgcagcaaatgtgggcaacaaaaaaaatcagctttcaactggggagagccaccttgcaaaagtgattgttcctggtaagtcctctcaagaattgaaagatatcatgccttgcctctgaacaatgcaaggaaagaggcttgctgctgaacatagacagtaaagtctaaacattttatagccttagataatggtttctttgggaaagaccttaaaataggagttactggggaatgtttattaataatcacgtagtgctgagaaggaggatgtcttaaaaaccagacttgtgtcctgattctcccatctgtcagctcagcaagcttaacacaagttatatagctttactgaatcttaagtttccccatctacacataggctttggtaatacttacttcacgggttgttgtgaggaataagtgaagtaatacacgtaaatacacatgtcataaagcatatcctcaataaatattggttgattccaaatttcatattgtggcattgtttagatcacctaccctaaaataaaacttgatctgcttatctagcggatgttagtgaaatgacttcagctgataaaaggaaaatgcatttcctgtgtgttta

SEQ ID NO: 716667 - DNA, 603 bp, Homo sapiens
agtgacagaaacaaacgatggcagtgaacgaagccgaaagtagttctctaatttgcacagtaatctcagccaccttgaaaggtcgtttttagtgtcacttcattgtgaatttgtcagacgtggagcacatccatccaaacggaaagacgaagcaagggccgaaagtacttgctcaccagggcagcttagtgaccagcatcgctggcctttttgtgtctcgtcagagcacactgatttgatgagtccccggctttccttagtcttgcctgttggagagctccatcctgtgccgcctctgatccgtgagatgggcttgctcaccctggctgagtctcactttgttgcccaggctggagtacacgggcacaatcayggctcactgcagccttgacctcccaggctcaagtgattctcctgcctcagcctcccgagtagctgagactacaggcacaaaccacctcgcccagctaatttttgtattttttgtagagatgggtttttgccattgcccaggcagggcttgaactcctgggctcaagtgatcctctcctgcctcggcctcccaaagtgttgggattacaggcgtgagccactgcacctggc

SEQ ID NO: 716668 - DNA, 854 bp, Homo sapiens
tgacaataccaagagcttgcaatgatgaagaacaactagaactatcatacactgctggcaaagtcaaatacgcagtcacagccactttgaaaaacagtttggtagtttcttaaaaatttaaacactaactatcatataactaaatcccactcctatagcatttactcaaaagaaatgaaaacctacatccacaagacatatacatgaatcttcatagcaagtttatttacactagcccaaaactagtagagaaacaaggtttccattctggaaaaggcaaaactattgggacagaaagcacattagctttctgtcagttgccaggggctgaggatggtgacagaactaaattggaaggtatacaagagaactctatgaaatgatgaaaatcaacaaaatttaaatgtggcagtatgaaaaaacaccacaaacatttgttaaaactcaatgaattgtatacttaaaattagtgaatgtattatacataccttatagctcactaaaactgattttaaaaagaaaaaagatgctctgaatacaaataatcactttgaatacaaatgatcacttttccccccatgactttctaatgtaggcaggacttgacagggatggctcatctccataatccacacagcatcagctgcgagggcagggaaactgaaggatccacttctcagatcacccatttggcaggtacackgatgctggctgtcagctagaagcttagcaaaggctacaggctaaggtattggtgggctttttcccacagcatggtagctgtggccccgaaatgagcatgccaagatgtacaggcagaagccaagacactttttatgactcagtctaggaag

SEQ ID NO: 716669 - DNA, 1219 bp, Homo sapiens
ttttagaacctctgataaccaaagctcagccttttagtttctcttttaaaaaggcatttcaactattaattggtagaacgattttgaaaaacaaaacaaaatctctttctttttaccttctgtggtaagaagagagaaaggaaggggttgataggaatggagataatccctccatatagttcagtattatgaatactatttggcatataccacaaacaattatgttatgaaacwactgtataagagctaccattcaacccagcaatcccattactgggttcatacccagaggaaaatagatcattataccaaaaagacacatgcactcacatgttcaatgccatgctattcatgaaagcaaagacatgaaatcaacctaggtccccatcaatggtgtactggataaagaaaatatggcacatatacaccatgaaatacaatacaaccataaaaaagagtgaaatcatgtcctttacagcaacatgggtggagctggtggccataagcctaaatgaattaacacaggaacagaaaaccaaatgccacatgttctcacttataagtgggagctaaacactgagcacacatggacataaatgggaataagagacactgcagactactagaaaggggaaggagtgaaaagggtgtggattgaaaaaccacctcttgggtactatgctcactacaaggtccaatacatccatgtagcaatcatatacatgtatcccctgtatctaaaataaaagctgaaattaaaaaaagaaaaactactgcataaagttttttcatttagtccaattccactaaacgagcttgtttataagtgaatcagctgtcaccacattgtaagctgcatttaaaattcattcctcttgagaatttcatttaataggcttatgtaaattaagtacctttatttactatcccatccaaataaaaagagcaagttgtcaataacagaaacattttccaacaatataacctaagcatctacattaataaagtgcttgagtagaatactgagaaagtattatttcaatgtgttgttataaaatagcatcctttgggacacaaagacaagtatatttatagaggatgtggtacactaggaaaatcacaatccaattagcactggataaggatctccagtataaaattcttagaactctggattattcaaatgacagctaaactggaaacaaaccaagcaaagatg

SEQ ID NO: 716670 - DNA, 941 bp, Homo sapiens
cctttacagaaaaagtttgccaacctcatctttaggcaagtcgctgtcttacttgagcctcatcttccccatttgtaaaatttgggagttggactaggttgttcccagggctcatgtcctctttacatggttactctagaactcttcttacagagcagtctcatctcacatcagtcattttatactgggacgtaaacctattcatatttatattcattcagtttactaagctcctaatactggcaarccagagtggaacactaagtctaagagcatccctgcctttgagaaacttataatctggttagaagatatacatacaaggtttcaaacttaaattaaaatagaatgtaataaaggataacataccaaattaagtgataatgattaaaagatttcagaggagaaatatcattatggactgacatcattagggaaatatctgtaggggaaagtgagattttatttttttaacagtcatcttcatagccctgtaaaatactggattcagtgtccctctaaagacgtagttttcaaattttaggatgcataaaaatcaactgaattagtaggaaaaaaatgcaaattccttatatccagctttcgagattctaagtaggtctggggtacagcttataaatgagtattttcacaaacaccctggataattctgatacacattctggtaagttgttaaatataattactacctaggaatttatgatgtttggtagagtttttgtgaactgtggttatgtgtgactagaaggaactccattgtccatggagcaagtacttcaatgactttctctctctttttaggaaatgtgaaatctcttaggccaagaagaacaacctgaggactctctttctggaggtaattgaactcctttagtaaatccagaggagaaatctgagatcagtacatcttttgtatctat

SEQ ID NO: 716671 - DNA, 941 bp, Homo sapiens
cctttacagaaaaagtttgccaacctcatctttaggcaagtcgctgtcttacttgagcctcatcttccccatttgtaaaatttgggagttggactaggttgttcccagggctcatgtcctctttacatggttactctagaactcttcttacagagcagtctcatctcacatcagtcattttatactgggacgtaaacctattcatatttatattcattcagtttactaagctcctaatactggcaagccagagtggaacactaagtctaagagcatccctgcctttgagaaacttataatctggttagaagatatacatacaaggtttcaaacttaaattaaaatagaatgtaataaaggataacataccaaattaagtgataatgattaaaagatttcagaggagaaatatcattatggactgacatcattagggaaatatctgtaggggaaagtgagattttatttttttaacagtcatcttcatagccctgtaaaatactggattcagtgtccctctaaagacgtagttttcaaattttaggatgcataaaaatcaactgaattagtaggraaaaaatgcaaattccttatatccagctttcgagattctaagtaggtctggggtacagcttataaatgagtattttcacaaacaccctggataattctgatacacattctggtaagttgttaaatataattactacctaggaatttatgatgtttggtagagtttttgtgaactgtggttatgtgtgactagaaggaactccattgtccatggagcaagtacttcaatgactttctctctctttttaggaaatgtgaaatctcttaggccaagaagaacaacctgaggactctctttctggaggtaattgaactcctttagtaaatccagaggagaaatctgagatcagtacatcttttgtatctat

SEQ ID NO: 716672 - DNA, 587 bp, Homo sapiens
taatgtaacctaatcaaaataatgataaatcttattcatgttcacattcccataggcaggaggaaaagagtacccagggaatgcacaccagaggatgggaatcttgggaactgtgatgaactgcctgtttgtgactccccagaattcatatatggaaacccaaacccaaatccaataggataatattaggagacggagcctttagaaggtaaaatcatggttatattaggaaatgggggtggaaccatgagggaattagtgtccttctagtatattagatggaagggcccgggctctctccatgtgaggatacaaggaaaagatggcttctacaagccagctggagtgcttcaccagacccagatctgcttgcgcctcagtcttgggcttyccagcttccaaactgtgagaaataaatgtttgttgtttaagctactcagtctgtggtattctgttttagcagccggaacagataaagacaggagccattttagaattctggctaccatacctcccatcctacaccagacttgtctctgggtaatggtctcttgcataatggatattctttttaacttttttgggta

SEQ ID NO: 716673 - DNA, 615 bp, Homo sapiens
ttggtcagagcaatctactgttaaaactcactaatctgttctgattttatcctaaagcacaaaagatactaccatcactaccaccactaatatgattggcaaagacttgacagtcccctcaaaattcttgcaactggaattgctcaaacagaagctgaatggccactggtaggagtgctcaagaaagaacctaggccttggatgagaggttggaagaaactgtagtctaggcygggctaaactgtaagggagaaaactggagcgacaggccacattgggttagtggatggaccttggagggaaggcacaaccattgatcttaaagtggatttgaatatcaaaaaataggacatatgctctcaaattcccatggatccaaactccaatactacaaggacagatagctcaaccatgaatcgctggccccaaataagtatatgggattgctactcttggactctctaaggcaggagtcctcaaccctagggccacagactggtatcgccttggcctgttaggaaccacgctcgtaaagcagaagatgagcagtgggcaagtgagcattactgcctgatctctgcctcctgtcagattaccggcagcattagatcttca

SEQ ID NO: 716674 - DNA, 1877 bp, Homo sapiens
atgaattggtgaattaaaagcactaagtatagcagttaacatcaagtgggyctgatgtgtttgttgttattaataatacattgaaatgggaacattttttaaaccccagtatatgactaaatgttcatgtcagagtcacaacttgtggtctttggaaataaagtgatttagactttccactgacagatgtagtatagtagaaaaatataattttcaagtaatgactaagaattccctctccttcaattccccttttaacctgcacatgcctttaatatggcacttccttcttttctttattcttgccttttcaaagtatccctatcctcaaaagtaacacatatactaaatatattaacttttaatggataatcttgtgttttatagttactattgcaatggaatttctattcaacagtactatttcaagtgccattgaagtatcctgtcttttaaagatgcaaaaataacaagttttttttttttttactcttattgaatgtttttgaaactgtgaaaaccaatacaattcatttttgtttttgttttttttagagacagcatctcactctgttgcccaggctggagtgaattggtgccgtcatagctcattgcagcctggaactcccggactcaagcaatcctctcacctcagtcttctaagtagctaggactacaggcatgcacaaccacgcccagttagttttgaattttttgtagagacaggggtctcacttttaaatggaaagaatcaaggcaggaaaggaagtggggaatctaagtaatctcttttatttttaataccacagagatactgtgggttgtggcttgctaattcaataaaggatacaagctctcagagattggcatgcattcagcactggagttcagaacagacaggactctgatatgcaagaaataatctgaagatagatttcacggttctcctctaaattcagaaagctagttaatgggtcgtatcatcatttccaatgataatttaaaactttctaatttggaatgaattatttaatttttccttctttcctttccctaactttctactcacacatttctaataatgtttcatttaatgttgatccttatggtttataatttaacagtacttcatggcttaaaaagtactgtcatacacatttcattttcactatttttactggtacaatattttttactaattgtcttaatttatagataaagaaattatttgtattatttccttctttagatgtgtaatttgaagctctgggaataattatcagattgctaaatacacatagcttttaatgagcagaaacataacttgaatgtgggtcttcagttttaaaaacttgttccctgtccatttcattacagttgaatattggtaattactaataaaattctctgagtattttccagggagttcagtcaagacagtggcctaagaacagttagaaccacagtgccaggaagccagagtggaagaatgtagtgaggagagacaaaaattggccacagataagccacgtaaggaaaaaagaagactttatgaagttccaaatatatggcctttaacatattatacaagtcacaaacttaggtatatattttcactgctgcatttcatcaatctaagataccactgattgtgagacgcatgaccaagaaagaaagattgaaaaaaaaactgtcaattaaatcacaatacagcttgatcacaaggtgattttagattttaaaaagttaaaatttgaaaaaaatgtacatcttagaatcaaagaaatatagtactagtaactgcagagggtatgaaaagtctcaaaatcagttataatacaatctcactagacaatcgataagcacttattaagtgc

SEQ ID NO: 716675 - DNA, 1877 bp, Homo sapiens
atgaattggtgaattaaaagcactaagtatagcagttaacatcaagtgggtctgatgtgtttgttgttattaataatacattgaaatgggaacattttttaaaccccagtatatgactaaatgttcatgtcagagtcacaacttgtggtctttggaaataaagtgatttagactttccactgacagatgtagtatagtagaaaaatataattttcaagtaatgactaagaattccctctccttcaattccccttttaacctgcacatgcctttaatatggcacttccttcttttctttattcttgccttttcaaagtatccctatcctcaaaagtaacacatatactaaatatattaacttttaatggataatcttgtgttttatagttactattgcaatggaatttctattcaacagtactatttcaagtgccattgaagtatcctgtcttttaaagatgcaawaataacaagttttttttttttttactcttattgaatgtttttgaaactgtgaaaaccaatacaattcatttttgtttttgttttttttagagacagcatctcactctgttgcccaggctggagtgaattggtgccgtcatagctcattgcagcctggaactcccggactcaagcaatcctctcacctcagtcttctaagtagctaggactacaggcatgcacaaccacgcccagttagttttgaattttttgtagagacaggggtctcacttttaaatggaaagaatcaaggcaggaaaggaagtggggaatctaagtaatctcttttatttttaataccacagagatactgtgggttgtggcttgctaattcaataaaggatacaagctctcagagattggcatgcattcagcactggagttcagaacagacaggactctgatatgcaagaaataatctgaagatagatttcacggttctcctctaaattcagaaagctagttaatgggtcgtatcatcatttccaatgataatttaaaactttctaatttggaatgaattatttaatttttccttctttcctttccctaactttctactcacacatttctaataatgtttcatttaatgttgatccttatggtttataatttaacagtacttcatggcttaaaaagtactgtcatacacatttcattttcactatttttactggtacaatattttttactaattgtcttaatttatagataaagaaattatttgtattatttccttctttagatgtgtaatttgaagctctgggaataattatcagattgctaaatacacatagcttttaatgagcagaaacataacttgaatgtgggtcttcagttttaaaaacttgttccctgtccatttcattacagttgaatattggtaattactaataaaattctctgagtattttccagggagttcagtcaagacagtggcctaagaacagttagaaccacagtgccaggaagccagagtggaagaatgtagtgaggagagacaaaaattggccacagataagccacgtaaggaaaaaagaagactttatgaagttccaaatatatggcctttaacatattatacaagtcacaaacttaggtatatattttcactgctgcatttcatcaatctaagataccactgattgtgagacgcatgaccaagaaagaaagattgaaaaaaaaactgtcaattaaatcacaatacagcttgatcacaaggtgattttagattttaaaaagttaaaatttgaaaaaaatgtacatcttagaatcaaagaaatatagtactagtaactgcagagggtatgaaaagtctcaaaatcagttataatacaatctcactagacaatcgataagcacttattaagtgc

SEQ ID NO: 716676 - DNA, 1426 bp, Homo sapiens
aaaccctagtactggtagattgtgaagattcaagtgaaaatgttttaatattctcttcagatcaattttcattcatttattgtgttcaaaggactgaaaatctgtacctcacacagagtgtctgccaaaaataatttaaaaaaattttaaaggcattaccaagagttgggtagtaacatggtcagtgcctagataaacactctcctcaataaagccctagaaattcagtttggttgttatctatcataaacagttactatgtttataaatcttgtaggttctctaagatttcatgtgagcacaattttccggggaatctacaggaagatagtctatcatataaatcatgaactcccacagctggcaccaaactagacaattcacttaacacttcacatagactataaactccttgattgcacagactgttcatatgtctccttgtaacctacacaacatccaatgtagtcctttgcacacagtatatacaacctgagttggccrgccttagttcacacttgatcttgtaatgcaaaaactcagtggaggttttttaacagaaaggtgaggtgaagtagcttattcagataaatcttgatagattatcccaagctaagaaaggaaaattctaatttgaagagaaaggaaccctaatatttgaatatttctttacagattaaagaagctatttatgtgagcactctcacttaagtatgaaaaaacttaaaatgattattaaatatttcatcctacatcttaccaagaagaaacaaatttagagaggtaaaatgacttctccaatttcttaaagggctctctattcagtaacttgggaggattaggaaaataagaaaccctagtactgatggaaaagaggcacaggcaagtacaagtaccttcaggtattataatcgccaaccacattaaggaatcagagagactggctgggggttaacaacaaagtccttttccaataatttacagaaaaatagaaattaaaccctagagttcaggaatagctattacttcaccaccattccctatctagatagattttttatctcagggtgatctttataaaatgtaacctatcttaatattaaaataaactcaggacagagtttaacattacatactgaaaagatgtcaaaataatgaagtactagcaaagaacacactgcaaaagaacttaagaggaaaaaaaatccaaatataataacatcaaaaagaacattcaggaataaatttaacaaatgaatgtaagacttatacattgaaaactctaaaatctcatagaaagatataaataaagacaatctataatcatggattggaagacttaataatgttaagatggcaatattcccaaaattgatctacagatccactacaatcctgttgaaattacagctaccttttttttttt

SEQ ID NO: 716677 - DNA, 1118 bp, Homo sapiens
gaattctttcctatgtgggatccaagaactttctcttggggtctggatgaagaccagtttttctggtaacactaccacctagtattggatatttacaatgaacattagtagattacagatctgagagggtctaatgtcagaatacacgcaaataaatacacaataacaaactaccgcaacaaaacctgcttcactcaagctaagtatgtccaaacttactgggttactgaacttcttttttctgttacacctaaaagatccactaaaatagcattttatagaacatatttggaaagtgactttcctagtttgaatttaattgtagttttagcaattattgtcttagattaattaggaagtaattaaattaatctattatattttattttcttctgcctttattggtttaagtagtcagctatctatttttcctttaattcactagacaaatgtcaatttcctttatatttaattgtacatgagttgaagcacrtatttatgtactggtattagaagaatatacagacacttgtattttaaaaaaatatgagagcatcatggataattagtctttgccttaaaatattaatagatacaatatgagagaggatatcatagtaacaagaattcagaaaaaaaaatgttaacaggtccatcaaccatgcacttttttctatgcaaccacatacacactcacacacacagacacacacaatatagtagacacacacaatacatgagatataatgcatgtgcatacactgatttttgtaatatattatatgaaaaatgtagaccatatatcagaatgttaatgaaggtattttacgtagaaattggtttcatttggcctgattaagtattctaacttttcaaatgttacaataattaaatggaaagctattagaatgaggaagctctaacactctgtgttccttcgctgtctgctgaaataaactcctaaaaactttaatttgccaaagtttatctttaacactacaattatcatcttaaaaccacaaggattattttaaaaaatcaatttgaccacatgttccactgagaagggagttcagtcctggcttagaaaggctgcttcatattttcataggtaatta

SEQ ID NO: 716678 - DNA, 1908 bp, Homo sapiens
aattggccccctaaaaagatttacatgatatgaataattctaatactggaagattttatttttttatgattcatcttaaagttttaacttctatatatgcatacatatatataaagacatatgtgtgtacatacctacatatacatatatagttagatagcaaaatgcacacatctttcctcccacgattcttcagtctaataagtcattcatgtcccacaaaccttaagttacttcagatgccatcattttgctcatcattgatatccaacctgattcatatctacatagctctaatatcaatctcttctttgttatcattgttctttcagattactgaaatagtctcctaagagtttttcccattcccaatttttcatgacacttgagtcagatcaggccactaaaggctggctaatattcaaggctggtaaaaattaagttatgttgaccaatgaaagatatgatacacacaaatggatatcacttccggtgtctaattccctattagagtaggaacaaatttcagtggtcaatgcatgaagagaaataacaagattgaacgttaaggctagtagttggaacgaataatgaacgcataaaataacgggcatagttgagtgtaattatagtatgctatgcaactcaaaacttttactcaattacatgaggaattataacaaggaaggtgaccaaaagttttatacctttacaaagtattgtgtctaagaaaatgaatgaaaagagcaagaagtcggatcaaaaatacacgccaataacgactttacaagataaaacaagtaattttcaaaattgttggactgaaatgataataatatatacataaacaactctagatatggtctctcttccttttgtccctaaatgctacttttaaattttctttatagtaaaaggtataaattgttatttttaaaacwtatactatcccattcaatttaaataacaattctataagaaatgtattatttacatttcagaggttacaaaactgaggcccaagatcacacaaactgtaagaaatagagggacctgggttttttaagaactagagagacctgggttatgaatcatagttccgtatgtaaactttaccaagccatgtaacaagtactatatagattagtagttctcaagtggagtcattttgccctccagagaacatttggcagtgtctggagataattttggttgtcacagatggggtaaggaggttttgctgctgacatctagtgggtagcggccagagatgttgctaaatatgctacaatgcacaagacagttccccacaacaaagaattacatgacacataatgtcattagtgctgaagttgagaaactgaaatagatattatgtcctgataatacaataataaatatagaatgtcagaggaaactatagattataacttgagagattcatagaaaaagtagggaaagaaaaaatattgaattagtaataataagacaaagtaaagacaaagctcaataaaagcttacctatgactttatgagaaaagtttttcaatataataaagtagatcaagaaaattctatgaaaaatttctgccttctcaagatggaaaatgtgatttcaatcattttagaaagagcatttacaaataaaatgtaattggacaggtatttttctttgtaaagtatacatttcctctatttatagacattgtaaattgtgaaacacatcacccatttcttagaagctctatgaaaaaacaaaatatacatatttaaaaagacaactagaaaagtataattccgtataacatcagttcactttaatatcacaggagatctcttccttactcctaatcagtctaaatgatcatctgaatcacttctaggagtttgcacagtgtaagctgacaa

SEQ ID NO: 716679 - DNA, 1277 bp, Homo sapiens
tgtaggctaaagtttcttaaaagaataatttgagatcaggtatcctgctaggctgaacaatataaaatcactgctactaaaccattagttttcacttagctccaactaaaacttaaatgtgcatgaaatcaggatgctaatcatttacaatagaatgtatcattagttcctgtgtagaaaataacttaaaacaagaaaataaatatttttgttgtttaggattgcaaacatcattctcttgttttccctttcttgttttcttatatctaatggtaaagagttccaaggacaaacaatagtttgaactgtgtcatactgaagacgcataattaagctctatttgtagttatacacagagatatatcctgctgagtgataggggaaagaaatacagtggttttctttcacaaatctaatgaaatgaagggctgggccaggttacagtaaacacttaattacatagagattttatgcaattcaccaatcgcagcaaaggggatagtaattgctttctttctaaggtgaaattatcttgaaataattactctctattttcaatcccaacctgatgaaaactgaacatgctttacttgtttccgattttcttttccttgtcaagatattgatcacccactccttttcaaggaagtgtagartcagaaattctagcataatgatgctggttttgtggcttctaaattcaattagctttagctatagccaactcttttcccataacaaaagcccctcttgagttccttgtttttacaaatgatctattattgtgtcgtaacacaaatctgctaaattaaatttgctgaagtataatagcaatccctaaagccttgattatctttggcattttttttattttttaaaaaattggtatacaaggtcttagataaataaagaaaaaggaaaagttagtatatcactgtgggaaaaaattccagttcatcaaaggaaaacaatagtgagtcacaaagaaaaaaaaaattggccataaaattaggtgacagattgtgtgggcaaagagtaatctcagggatgtgaccaaaacaaaaatgaacagaataaactatcaaaaaggctctacaacagatagcaaatggaaagttccacagataagcaatttattttagaaacaataaaatactatgtgggaagacaattgagcataatagacaaaccaaagcatatttaacctttgcatataatagattctgggatttttaaaacaacttatattaagaaaaaatgaaaaagttttttttttt

SEQ ID NO: 716680 - DNA, 1205 bp, Homo sapiens
cctaagaatactgactgaaaaatgagcagtttatatatcctgagagtaaagtttccaaagttaaacaggataaatgcaaatctaattactttaagaagtgaaataataccattaatcaaaaaagtctgttgattaattgtttaaaatatcccagtgagtcattattgtttatggataccaaaagactgaacatacaaaggaaaacagccaaactatatataaaattagaattctaaccaaaaatctgcagcaacaagcccarcaaaccaacttattctctacaataaccagcccagggagtcactctgctatctacaattcagacttttaggaagttagaccactatctctagtaaccatctaggaagagaaacaatagttcctgtaaaatcagtcctaaaatggcctggacatgattaataactgacagcttccttaatctttgtccccacttccaacttaagaccaacagggaaagccaaatatacacccataaccactcataaaggatgccttgcttctaattagccgagctacagcttccccattccaagagcctccaatcagagaatacttgaaggcatccctttcctttatttatttatttatttatttatttatttatttatttatttatttatttattttctctataaagcttttccactctcctgtttgtctttgagtctctgccaaaacacaaatgatggtggctgcctcctttgctagagcaagctctgaataaacaggctttgcttgtcctcatataaatctttcgggtaaaagagccaaatgaagtatcaactcaaaactagtgtctgtttctaggattgactttcaatagctgactctatacaaccttaagtactcaacatatgtaactcttaaataacttatttacaatggaatacagggaaatagaatgctaaacttatataattctaaacttattcatttgtctgtggagataatgtagatagcataagatatattccacgatgagcaataattgagatgtgtgaacatgttcactttggcacagattgaagacatctataattcttttctaaagacaaaaaaattgctgcagtattttattctacaacaaacaaggtatggaagtaactggtgaatgattacaagtatgtcacgtacgcattcaacttactgatactaagttcacctgcaaagtcaaataggcaaac

SEQ ID NO: 716681 - DNA, 937 bp, Homo sapiens
caagccagcatgagctgggtccccgcggctggcatcctgcaagctcctctccagatcctgctgtacagaccccagcagccgtcgctgcctctctaactcttgccttaatgcctgtgcctcagcctccagctgttccttctgcttcaggaagctgagttctggctcctgctccctggggccttgctccctgatggccttgtcaccctgtgggcctctayccccactgaggcacaccccatctgggccccggacacagtcggcctccagcccctggagccgggcccgcagctgctgcagctctgactccagagcccgctggaaggcttcgccctgctgcagagccccccggagctgggcattctcctcctctagccctttgggctggtgcatcaggctctgaagctcttccttttgggcctagaatatggtttgggacaaaggaagtcacaaagagttcttgtcaggatagccccaatgccttctaccccaattccattctattatagtgggcaggtggcctgagcccgttttacagcctggaacacccagaggatttggttttcatcctccaccccatctccatcatgaatgagacacagggatccccaaattccatcctgagcctcggcatctacatctttatataagcacacacttcctagattcacctaaggatagccaatgtgtggctctcacagtcttatttcctggaacagtgttaactgatcatggcacctggcatgttctttaaatccttttccacacagtgctccaggcagaccacaccaatcaatcacaggtgataccatgtatgtttcatgtaccatgtggaacaggtatgccagccctggcccaaaccttagcacaagggatgtgaaccaagaactgggaagacgccctgactatagtgggagaggggagggtcaggatgtgtggg

SEQ ID NO: 716682 - DNA, 639 bp, Homo sapiens
aaatagcacattgcattgggaattctttacctaagttcacattttcccctattgacatacaaaagaaaaagaaagagaaagtaaaattccaaatgggtattaactkttatgtaatattttctttttcctttttatatccctattactatctctaaaacattggggaggtaagtatcgcttttctctgggtcaaaaaaaatcaagataaacttaatcaaaatcaaatagggggtataaagtaaaatcaagatttttgccttacttttaaaattattatttctagcatctacctcagtacgagggctccgcgtattacctatagccagagactgatggtttcctaacctgggagacctgctgggcatgcagctggttctctgtaaagatcattaacatggttctctgtaaagattcattaacatggaggggtggagacgggtgaaggaaagatgaaatggtgttttctggtaaaagtaaataaacacaatacacatcttttgagagccaaataacatttttccaacctaatgatttttgaatacaagcgtttataacagaatctacttaagtccatacccattaaataataaaactcctaatttgtgagagagaggggacatgctatacagccttgctgga

SEQ ID NO: 716683 - DNA, 1105 bp, Homo sapiens
ctttttagaaagcaatctatgcatatttctttgcatttatttgctgaaagaaaaacttagagcagttctttcaatatttcaattaatatttaagtgactagtctatgtcagagaactagcaggtactataatacaatgagagctcccagaaccggcttaaggacaactggtaatcttttgttcataaaaatatagtttaagaaaaataaaataagctgagcgcagtggttcacacctgtaatcccagcatggtgggaggccaaggcaggcggatcacctgaggtcaggagttcaagatcagcctggccaatatggtgaaacctgtctctactaaaaatacaaaaattagctgggcatggtggcgcacgcctgtagtcccagctacttgagaggttgaggccaaagaatcgcttgaacccaggaggcagtggttgcagtgagctgagatggcactactacactccagcctggtgacagagtgagactgtctcaaaaaaaaaaaaaaagtagctgggtgcagtggcacatgcctgtaatcccagctactcgggaagctgaggcaggagaattgcttgaaccagaggttgttgtgagccaagatcgagcaccactgaactccagcctgggcaacaaagcgagactccgtctcagaaaaaaaaaaaaaaaaaagaagaaaaccggagtcattgaagttggataaacttaataaacttaagttggtaaataataamatttaaacagaaagctggaagctgtaaagacgttaaacatttatcaaaagttgactatgcttgctgtgaacattctatagtcttttcctcccccacgcccgagacagagtcttgctgtcgcccaggctgcagtgcagtagtgcgacaaacattctatagtctttccataaaagaatgactgcgtgtactgctatcttataaaaaggtaatgagtctctgtgcaaaatagttaaggcagagcccaaactttaaaactgtaaagcactgtttgaatgactgaaactttcaaagagagtgatttgtcaatcaacaaatctgtataaattacagtaaggaatgcaacgatgagcctattttaaataaaaaatttcctg

SEQ ID NO: 716684 - DNA, 606 bp, Homo sapiens
gaacgttcacatacattaatttagctaaccctgtgagaaaagcagtatttttccatgtttataaacagagaaagtaaggctcagagagcttaaataactttccctaaatcacatagcaagtaagagataaaactgggatctgtttgactcaaaacacttttttttcactgaaccacccttcacgtatacacacaaagaaagggaataaatacatttatgccaggaggaacagtgtggttaaagacacacaggaacatttgggacttattatgagaatggggtgaagaccagcctgacctgggcagttcttgctaagaagtaatggaaaagacattaaaagataaggtgggctcagacactaaatgtcatgttgagttcagacctggtgtgggastcattaccaattccaaagccagaaagtgacaaaactggggctaagagaggagtaagggcaggaataccagcagcaaaatgccaggtggcttttgatcattcacccctacaacatttgtaagttatactatactacatttccatgttctcctggtacacaattatttttgtttccatactagactgataaagacaattagacagttttgttca

SEQ ID NO: 716685 - DNA, 965 bp, Homo sapiens
ttggcaatgtgaacaagaggaaatacctaggtaggatgggatgaccacagctgtcttcaatgataaaaagaggcacatgtgtatgtttatgtgcccatgaaaatacatgaaggaagataataaggtgtgtgatcgtggtcactctgaatgaagaatgggatcacagaggtagaaaagggaagatttgtgcttccatgttcctctctctactacttcgatttccttatggaaaatatgacacactagtcaatttttagaacactcatcataaagaaggggcaaattaggtcagaaatgggctctaaaagaggaattaggaacacacccacaaaagaacacattttttggtcacttacttgtactttagttctcctttcctcatcagggctaaaactgctattgttgctcaagtctgaatcgctgtgaatatagtgaagagtggagtccatattctgttaggaaaaaataactacttaaagagctgtcctgtctgtacatcttcatttaagctatcttactaagttacttacctttcaagactgccaaaagtaataaacatataaattcctcatgtttttaaaagcttataaacatacytaagaacctaccctactttaaatctaacttgctgaataggttgtcaagtgtacgaaaaccaattccagaaaaattagagtaattaaaaacaatatttgaaagtaattttgaaatggtccaaacagctcaaattagcttatttatgaaatagtactgagaggattcttttggtccattgttttagagaccatggagtgtcatatgcagtttttcttctatttctattcttggctgttaatatctaatttcacaaattatatatatgttaacagccaaaaacagtaacaacaacaacaacataaacaccttctaaaatgcagatatattaatactattcaaatctccaataaatagtcagggcttcaatc

SEQ ID NO: 716686 - DNA, 627 bp, Homo sapiens
  misc_feature 7: n = A,T,C or G
tatatanacaaattttgtatctatattatatattatatatattatatatggcaaatagaagccaattcaatctttaaactaagttattgtaattttgtcttctgagagctctaaagtgaaaacaatacaatatattatatattttatatatttttaaatatatatttaatatattttttgaatatatattttaagatagagtttygctctatctcccaggctggagtgcagtgacatgatcatgcctcactgaagtcttgatctcctgggctcaagtgatcctcccacctcagcctcccaggttgctattaatagataacaggtatgagccactgccacaagctttttcggtaaaacgtgtagctggtcacgcctcagactttttgtgaaacctatgaccactggaaaggtccaataaacatctctatgagggattatctatgcctgagacagattctcacttgtagcccaggctagagtcagtggtgtgatcgtagctcacggctcactgtaagctcgaattcctggcttaagcaatcctctcaccccagccttccgagtagctaggactactcttaggttcttacccaagaggaataaaaacagatgttcacaaaaagatttgta

SEQ ID NO: 716687 - DNA, 1150 bp, Homo sapiens
aaaaaaaaaaaaaagaccccctcaaggcaatgggtacctttttgctttatattttttatgcttacataattaagaggtttccttcaaattgatgaatggagaaatactatccattcttttgcttattcactctttcagtaaatatttatggactgtctattgcatgccaggcactgaaagtgcctgaaaatacagtaataaacaagacaaaagctttcctctctcatgcaacatacattctgaagcttttattgagctgaacttagaatatatgtatattaatctgcagaaggatggatattcacttacaaagggatgaggataatcgaggtacttcattggacaagtagtactgtaaaactcagaaaatgtgaagaatatgggcttgccttctcctgacttttctgtatgattgactcaattctccactttgccttgctggtggaattgttgtctaagaatgttcacagcactcacattgttgggatttagagatctagagatgaaaaaactgatatatgtaattgcaatgtagtgttactaaagattaaatgcttttcaaatttatgtttataatgatatggctacatagaatgtttttccctgtggtttctcccatgcgttatctcttcacctttctaatattgctggaatgtagggggacaattattacccttcaattttgcaggtagggaaacaaatttagtgagtgacttatctaaatcataatgttttactagacttataagaaaatctgattacaggttaataagggaatggaattacaccacaacccagagttgtggttcaaacttttacatgaaccaaggatataaccttagacacattcattttacctctcttggtttcagtttcttcatctggaatatgaggcaatgggctagattcatattcatccaatctttattaggcatctgttatgtgaaagtcatgttttcaaagttacattcaattagatcaggtacagtggctcacagtggcatgtaatcccagcactttgggaggctgaggcaggaggatcacatgagaccaggcrtttgagaccagcctgggcaacagagcgagaccccatctctacagaaaataagaaattaggcatggcggcgcacacctgtagtcctagctactc

SEQ ID NO: 716688 - DNA, 1150 bp, Homo sapiens
aaaaaaaaaaaaaagaccccctcaaggcaatgggtacctttttgctttatattttttatgcttacataattaagaggtttccttcaaattgatgaatggagaaatactatccattcttttgcttattcactctttcagtaaatatttatggactgtctattgcatgccaggcactgaaagtgcctgaaaatacagtaataaacaagacaaaagctttcctctctcatgcaacatacattctgaagcttttattgagctgaacttagaatatatgtatattaatctgcagaaggatggatattcacttacaaagggatgaggataatcgaggtacttcattggacaagtagtactgtaaaactcagaaaatgtgaagaatatgggcttgccttctcctgacttttctgtatgattgactcaattctccactttgccttgctggtggaattgttgtctaagaatgttcacagcactcacattgttgggatttagagatctagagatgaaaaaactgatatatgtaattgcaatgtagtgttactaaagattaaatgcttttcaaatttatgtttataatgatatggctacatagaatgtttttccctgtggtttctcccatgcgttatctcttcacctttctaatattgctggaatgtagggggacaattattacccttcaattttgcaggtagggaaacaaatttagtgagtgacttatctaaatcataatgttttactagacttataagaaaatctgattacaggttaataagggaatggaattacaccacaacccagagttgtggttcaaacttttacatgaaccaaggatataaccttagacacattcattttacctctcttggtttcagtttcttcatctggaatatgaggcaatgggctagattcatattcatccaatctttattaggcatctgttatgtgaaagtcatgttttcaaagttacattcaattagatcaggtacagtggctcacagtggcatgtaatcccagcactttgggaggctgaggcaggaggatcacatgagaccaggcatttgagaccagcctgggcaacagagcgagaccccatctctacaraaaataagaaattaggcatggcggcgcacacctgtagtcctagctactc

SEQ ID NO: 716689 - DNA, 586 bp, Homo sapiens
aggcgggtggatagcttgagatcaggagttcgagatcagcctggccaacgtaatgtaaccccgtctctactaaaaatacaaaaattagccacacatagtggtgcttgcctataatcccagctacttaggaggctgaggcatgatactgcttgaacacgggtggcggaggctgcagtgagccaagataacaccactgcactccagcccgggtgacagagcaaaactccatcccccmaaaaataaataaataaatattgaaaaaaaaagaaaccacagcaacaaaaaacaaagacagtagccatgctgagactccatttattattccaaaaagaaaatactaaacttaattgagcaaagggagcaataaaacatggtaacatctaaaaaaggtctcagagatcaacaggaaaatagcaatcttgaattgtgtaaaatcacaggaggaagtgtagaatattctacactatgtcagcccagtaaaataattaggaaatgaaaatcatggaccagatcaaactatgattgctaaggaaatatcacattatttactgtattcaccacctttttaggacgaaaaagtaagcag

SEQ ID NO: 716690 - DNA, 586 bp, Homo sapiens
aggcgggtggatagcttgagatcaggagttcgagatcagcctggccaacgtaatgtaaccccgtctctactaaaaatacaaaaattagccacacatagtggtgcttgcctataatcccagctacttaggaggctgaggcatgatactgcttgaacacgggtggcggaggctgcagtgagccaagataacaccactgcactccagcccgggtgacagagcaaaactccatccccccaaaaataaataaataaatattgaaaaaaaaagaaaccacagcaacaaaaaacaaagacagtagccatgctgagactccatttattattccaaaaagaaaatactaaacttaattgagcaaagggagcaataaaacatggtaacatctaaaaaaggtctcagagatcaacaggaaaatagcaatcttgaattgtgtaaaatcacaggaggaagtgtagaatattctacactatgtcagcccagtaaaataattaggaaatgaaaatcatggaccagatcaaactatgattgctaaggaaatatcacawtatttactgtattcaccacctttttaggacgaaaaagtaagcag

SEQ ID NO: 716691 - DNA, 668 bp, Homo sapiens
tactttataaagtatttttacttttaattattttggtattcacaccaattatgaggttgatagttcagatgttatattcttttatactagtaggtggagaagataagtaccttaaaatattgtatcagtcaatattttgactagagtcaatatcaggtgattactaaaagagaaaatgtaagcttagcagcaggaaatagttggaaattaggtttagcactaaaagtttacatttttcctccaaaaactttaaaaaagtcttcaatttctaaagtttctttgaaattaagtcttttctttaaaaactggatgaaaagatggctatttaattttagaagatgaataagaaccaggaaaaggaaatgccagatgtttgcatttttaaatacaagaagatgaaatattaattcaaattccactaaacattacacctccaaaaggataaataaaatacacaggcacaattcttcattcaaaaaaaaaaaaaaagtttaccttgcaatcaaggagcagttgtgaatcatgttcttttcaacaaaaataccttgcrattcatcggtttcaactattctcccatcctgataccacaacacttgcatgtcctgatcaatatatgaagccatgcactggaaaggaaggctgtctccttcaaacacaacttggcgatg

SEQ ID NO: 716692 - DNA, 623 bp, Homo sapiens
tattgtgcatagtgctgcaatgaatattcatatccatgctcatattcacgtgcacacaggcaaggttactctgagtacaggagtggggctgctgggttccagggtacatgaacatgtaactatagaaggcaatgcctcccaggggacgtccgcttacattcccaccaactatgtaaaaggatcctgtgggtccacatgttcatcaagacttggcattgtcaggcttaacttctgctgatggaaaaggcataaaatggtaactaattgtcttcattggcatctccatgacccccatgctgttgaacatttctgcacacatgtgctgaaccygtgtgttcgctcttctacgacatgctcatccattctcctgctactttttcttctgacttgttgtgatgttctcactgattatagttactgatatattttttactcaaatgctctgttagttgtgtggattgtaaacagattcctccaatttgtaacttaccttttcagcttctttaagggctcttgataaatacaagttcttatttttagtcaaaattattttttttctagtggatgcctttcactgtcttattggccttccttatcttaaggtctccaacttttttttaaag

SEQ ID NO: 716693 - DNA, 2048 bp, Homo sapiens
gatcaagggcattctgaaaaaggaaaaagaaattgtccttgacttagtagacattaaacacattataaagttgtaatgagcaagtatcaaactgggtactagatgtctacacagaatgtaatatctatatatcagagcactgagactgaactattaatttctcttcatctcagctgctgcctcaagactaccttttcagtagtctcagcattttagtataatgtaataatatgaggcattttatgacaacaaatttgtcaacttagatgaagtgaacaatttcctaaaataaatgagcttattacaattaacataagaaatagaaatctgaatagtcccatatctgttaaagtacttgagttcataaataaaaaacctttccaaaaggaaactttaggtatgtagaatttaagaaataaattttacatatatttttaaaaatttcataacttttagaaaatacagaaataacacttttccaatgcataatctttataaaacaaaaaccaaaacctgatgaggccactgaaagaaaaattacaggtgaatcactctcatgactgtaatgtaagatatgcaaaatactaaatacacatattagctaatatagtccactgacagatataaaatatatcattattaaattgggttttctatagaaatagtaaggttagcctaatatttaaaaattaagtaatgtaaattatcatattaagaaaataagggaaaaacaatttcctcactagaaatagaatagcagtggtttgattccaggatatggcttagtcacatgtatcatatattagtcaggatatgaaacatcttgacaaatattccaaggatgtctaatttgaaaaaacaaaatcctccaaaaatgggccatgtackgttaagctatgtatccagtatttgtaacgttgagcaagttactttacttctttgtctcttagttccccacacataaaagtggcatccacaaaatttgcattgccttgtttaactcacagcaaaatattgttgtaaagatccaaattttattaaaaatatgttaagactttttaaagtatatacctgcatataactttagtgctataatctattttttaataaagtcttgattatgatgcatagaaactaataacaccatatacaaaatatggtgtgagatagtccaatattatacgaagaagaggtttaggtggaaatacagttgttcagttctcaacttgctataagcgcttaaaagattagaccggaattctaatctaagtaagtaaggcccatcattattagtgtcttaagtttcttcctttgttagcttgaagaaagctagaggaagctggctaaaaatgagtcagtgaaaatactatggattttacaatgtctcatttagttgtcttttgtggttgatacaataaatcctaggggtattgtggtgttctaaaataccatgtaacccaaacagttagactccccacaggttaagttagtctactgaggtgaaaagatttgaagtttttctctttgttttaaaacacgtttaaaataaaactcataattaacaaatctgcaatcattatttgcaaatcttttaagttttttgctctttggttgagataaagaggcataaacataagcacaacaccattcatcaggcagtgttatttaccttcttgatgtttcacagtattctagccatatgccaataacactacacatccactgtactttattcatctgttcatatgctatcttcccttttaacctgttagtactttgtggatatagtggattattttcttgctctcactgttcttgactcccaacatggcatagaataagtatcaatacattattttaagtgaataaatgaaacgtgaatttctctataaaaaaatactaaggtattctttttttttctcaatgcaatggagccaatattgtatttgattagaatccggatttccaatatgtttaattaaaaaaaaaacactgtatcttcttctcccagtaagaagtacaactgaaccaaaaacaagaacagtaga

SEQ ID NO: 716694 - DNA, 2048 bp, Homo sapiens
gatcaagggcattctgaaaaaggaaaaagaaattgtccttgacttagtagacattaaacacattataaagttgtaatgagcaagtatcaaactgggtactagatgtctacacagaatgtaatatctatatatcagagcactgagactgaactattaatttctcttcatctcagctgctgcctcaagactaccttttcagtagtctcagcattttagtataatgtaataatatgaggcattttatgacaacaaatttgtcaacttagatgaagtgaacaatttcctaaaataaatgagcttattacaattaacataagaaatagaaatctgaatagtcccatatctgttaaagtacttgagttcataaataaaaaacctttccaaaaggaaactttaggtatgtagaatttaagaaataaattttacatatatttttaaaaatttcataacttttagaaaatacagaaataacacttttccaatgcataatctttataaaacaaaaaccaaaacctgatgaggccactgaaagaaaaattacaggtgaatcactctcatgactgtaatgtaagatatgcaaaatactaaatacacatattagctaatatagtccactgacagatataaaatatatcattattaaattgggttttctatagaaatagtaaggttagcctaatatttaaaaattaagtaatgtaaattatcatattaagaaaataagggaaaaacaatttcctcactagaaatagaatagcagtggtttgattccaggatatggcttagtcacatgtatcatatattagtcaggatatgaaacatcttgacaaatattccaaggatgtctaatttgaaaaaacaaaatcctccaaaaatgggccatgtactgttaagctatgtatccagtatttgtaacgttgagcaagttactttacttctttgtctcttagttccccacacataaaagtggcatccacaaaatttgcattgccttgtttaactcacagcaaaatattgttgtaaagatccaaattttattaaaaatatgttaagactttttaaagtatatacctgcatataactttagtgctataatctattttttaataaagtcttgattatgatgcatagaaactaataacaccatatacaaaatatggtgtgagatagtccaatattatacgaagaagaggtttaggtggaaatacagttgttcagttctcaacttgctataagcgcttaaaagattagaccggmattctaatctaagtaagtaaggcccatcattattagtgtcttaagtttcttcctttgttagcttgaagaaagctagaggaagctggctaaaaatgagtcagtgaaaatactatggattttacaatgtctcatttagttgtcttttgtggttgatacaataaatcctaggggtattgtggtgttctaaaataccatgtaacccaaacagttagactccccacaggttaagttagtctactgaggtgaaaagatttgaagtttttctctttgttttaaaacacgtttaaaataaaactcataattaacaaatctgcaatcattatttgcaaatcttttaagttttttgctctttggttgagataaagaggcataaacataagcacaacaccattcatcaggcagtgttatttaccttcttgatgtttcacagtattctagccatatgccaataacactacacatccactgtactttattcatctgttcatatgctatcttcccttttaacctgttagtactttgtggatatagtggattattttcttgctctcactgttcttgactcccaacatggcatagaataagtatcaatacattattttaagtgaataaatgaaacgtgaatttctctataaaaaaatactaaggtattctttttttttctcaatgcaatggagccaatattgtatttgattagaatccggatttccaatatgtttaattaaaaaaaaaacactgtatcttcttctcccagtaagaagtacaactgaaccaaaaacaagaacagtaga

SEQ ID NO: 716695 - DNA, 415 bp, Homo sapiens
acttccagtgactctatatattgtccaaataaaaaatgaaaacaaaaagtcacaatatgtgtatatcaaaaaggaatatatgacattgattatctaatggattttgctcattaaaattatgttatctggcttctcagaaatattttttccatataataaaattgaatttttttaggactgattgaaaaaccaggagatattcaacataaattggtaattacagtaattcaataagttaaagccatatttttctcttcttaacaataatgaaaaaygctctatttagtggtctgctttgaataaacttgtgaaagaagtaaatgctttttgcaatccctaaaaccatggggaacatatatataaagtaaaacttgtgaatatcataaagcattgacagaaaggagttatccaaaaa

SEQ ID NO: 716696 - DNA, 644 bp, Homo sapiens
attatgcagaatgcaaaagtatctcaagtagattttctacacgaaagaaaattaacatctattttacatatgatatgtgccacagattgtaccagatattatacataaatttaattaaaattaacaatattttctactctggaggctgaggcaggaggatcacttgagctcaggagttcgaggttgtagtaagctttsatcatgccactgcactctggcctgggcaacaaagttagacctagtctctaaaaaaaaataaaaattcacaatattttatagaataagtattattattattcattttatatatgtgaaaaccaatgcttggagaggttaagtagcttctcaagttcccacagatacagagatgcagataaaatatcaatgtaggtcttcaggcctcaaaagccatggctttccactgaaccatgctgtctatgaagtacatattggaggaaccttctcattttccatgtattaggctccaaataaataaatcaccctagtacaatttttacgttttcaaattcaatttcataaaatggtgtttgtcacctattcaggacttcactgtttgttttactttctcgtatccctaagtagtattgacatccctgtccactatcctcctagtggacaccaag

SEQ ID NO: 716697 - DNA, 1248 bp, Homo sapiens
tgaaattcttacctgttgcaaaggaacagaaaagttagtgagtaggtgaaaatttacaatataaacagtatttttatatacatataattcattttcagtaagactaagaaaataaagagtgcttaaaatcgttttaaaatgacacaaattagattatacaaaatgagacaaagagaaaaatttgagatagatcctgtacattctatgtagtgaagattgagtcatttcctttttgttgtctttatcagctctaaaggaaaaggggaaagacaaccgggtataggcatwctaagggttataggggacattggtggaacactcagaaaccctttgcaaaggaaatcctcaaaatgtcagtcagcttcatcaagcaaggcaggtaccatcttcactccatagccaaggaacatgtttgaaagtatttagccagtagctaaggagatatactgtgtgaaaggcactgattggaagcaacctgaattactccctgctggttagaatatttagaatcttatagatctgcatttattgttctgctttgtgaagaacagcaaaaggtatataagtcttcacaatagggaactcgagttatctgtgtaagaaacaacattttctgtttttccacatttctctggaggctaggggagctttactgtgcttcattacatgccaagtagtgttggaagatggaagttgttttttctcctgcccttactacccactctttactcagaaacttaacttttctcccaaaaccattagtcacacataaagctacttgttttgccttcaggagtttctgtgcctctattgtccacaccatttactaggaagaatgagatttattacatgaataccaataaagacaaaatgtccacttataaaatgtttggagaatatagttatgctcgtgaacaaactttctttacattaatgatttgcatttagctttgaagacagaactcagtgtactggtaataatgttaggtaaaaattaaagaatttgtttaaagaaactaaatatttaaaaaatatgtaagtgcagaaaatacttgtatataaaagtttaattctttataaaattagatattttgggtgtaatatgcagctgtgaggtctctgatgtggtaattgggcagaagaacactttagtggcactaaaatttgagattcagctgtgctgtgtcatggaaatccatagaattttagtgagcaagcaggtgcagaaagaatacatctgggtaaaaa

SEQ ID NO: 716698 - DNA, 1248 bp, Homo sapiens
tgaaattcttacctgttgcaaaggaacagaaaagttagtgagtaggtgaaaatttacaatataaacagtatttttatatacatataattcattttcagtaagactaagaaaataaagagtgcttaaaatcgttttaaaatgacacaaattagattatacaaaatgagacaaagagaaaaatttgagatagatcctgtacattctatgtagtgaagattgagtcatttcctttttgttgtctttatcagctctaaaggaaaaggggaaagacaaccgggtataggcattctaagggttataggggacattggtggaacactcagaaaccctttgcaaaggaaatcctcaaaatgtcagtcagcttcatcaagcaaggcaggtaccatcttcactccatagccaaggaacatgtttgaaagtatttagccagtagctaaggagatatactgtgtgaaaggcactgattggaagcaacctgaattactccctgctggttagaatatttagaatcttatagatctgcatttattgttctgctttgtgaagaacagcaaaaggtatataagtcttcacaatagggaactcgagttatctgtgtaagaaacaacattttctgtttttccacatttctctggaggctaggggagctttactgtgcttcattacatgccaagtagtgttggaagatggaagttgttttttctcctgcccttactacccactctttactcagaaacttaacttttctcccaaaaccattagtcacacataaagctacttgttttgccttcaggagtttctgtgcctctattgtccacaccatttactaggaagaatgagatttattacatgaataccaataaagacaaaatgtccacttataaaatgtttggagaatatagttatgctcgtgaacaaactttctttacattaatgatttgcatttagctttgaagacagaactcagtgtactggtaataatgttaggtaaaaattaaagaatttgtttaaagaaactaaatatttaaaaaatatgtaagtgcagaaaakacttgtatataaaagtttaattctttataaaattagatattttgggtgtaatatgcagctgtgaggtctctgatgtggtaattgggcagaagaacactttagtggcactaaaatttgagattcagctgtgctgtgtcatggaaatccatagaattttagtgagcaagcaggtgcagaaagaatacatctgggtaaaaa

SEQ ID NO: 716699 - DNA, 632 bp, Homo sapiens
tttcacatgaaactaccaaaactactgggcaaatcttaggaacttacaaaattttaaactcttattaaactatgacactatgattcctaaataaaaatccattttaagtacaaatttttaaaaatagtattcttttggttatgtagcaaactattttcctgatttattaaaatgtcatgtttttgcttcctaaaattttgctgcctttcaaatgcaatttgaatttaaaatcttttaagaaagaaacattycaaaaatcattactttaaaataaaaatgaaaaattgagtctttataaaatttcacagaaaacgttggcttttttttttttttttttttttttttttgagacagagtcttgctctgttgcccaggctggagtgcggtggcacgatcttggctcactgcaacctccgcctcctgggttcaagcaattctcctgcttcagcctcctgagtagctgggattacaggcacccaccaccatgcccagctaatttttgtgcttttagtagaggcagggtttcaccatgttggccaggctggtctcgaactcctgacctcaggtaatctgcccacctctgcctcccaaagtgctgggattacaggtgtgagccatcgcgcctggctggc

SEQ ID NO: 716700 - DNA, 632 bp, Homo sapiens
tttcacatgaaactaccaaaactactgggcaaatcttaggaacttacaaaattttaaactcttattaaactatgacactatgattcctaaataaaaatccattttaagtacaaatttttaaaaatagtattcttttggttatgtagcaaactattttcctgatttattaaaatgtcatgtttttgcttcctaaaattttgctgcctttcaaatgcaatttgaatttaaaatcttttaagaaagaaacattccaaaaatcattactttaaaataaaaatgaaaaattgrgtctttataaaatttcacagaaaacgttggcttttttttttttttttttttttttttttgagacagagtcttgctctgttgcccaggctggagtgcggtggcacgatcttggctcactgcaacctccgcctcctgggttcaagcaattctcctgcttcagcctcctgagtagctgggattacaggcacccaccaccatgcccagctaatttttgtgcttttagtagaggcagggtttcaccatgttggccaggctggtctcgaactcctgacctcaggtaatctgcccacctctgcctcccaaagtgctgggattacaggtgtgagccatcgcgcctggctggc

SEQ ID NO: 716701 - DNA, 650 bp, Homo sapiens
tttttagaaaatatttacttaaaaattgtgagagactttcaagaatttaatccaaaatctacaatgaaacctcaatttgccctagtcatatcacttttttacttttagttaaacagataatactttaagagytggtgttattattatttttttattcttatttatttcactagtgtattagtccattttcatactgctatgaagaaacacaaaagacttggtaatttatttaaaaaaaaacaagtttaaaggactcacagttccatatggctgtggaggcctcacaatcatggtggaaaacaaagtgggagcaaaggcacatcttacatgatggcagacaaaaaaatgcgtgcaggggaactgtcttttataaaaccatcagatctcatgaggcttatttactattatgagaatagcaggggaaaaaccctcccgcatgattcaatacctctcaccaggttcctctcacaacatgtgaggattatgggaactacaatttaagatgagatttgggtggggacatagccaaacaataccattctgtcctttccccttcccaaatctcatgttctcacatttcaaaaccaatcatgtcttcccaaatgtcctccaaaatcttagcttgtttcagcactaactcaaaagtctat

SEQ ID NO: 716702 - DNA, 650 bp, Homo sapiens
tttttagaaaatatttacttaaaaattgtgagagactttcaagaatttaatccaaaatctacaatgaaacctcaatttgccctagtcatatcacttttttacttttagttaaacagataatactttaagagctggtgttattattatttttttattcttatttatttcactagtgtattagtccattttcatactgctatgaagaaacacaaaagactyggtaatttatttaaaaaaaaacaagtttaaaggactcacagttccatatggctgtggaggcctcacaatcatggtggaaaacaaagtgggagcaaaggcacatcttacatgatggcagacaaaaaaatgcgtgcaggggaactgtcttttataaaaccatcagatctcatgaggcttatttactattatgagaatagcaggggaaaaaccctcccgcatgattcaatacctctcaccaggttcctctcacaacatgtgaggattatgggaactacaatttaagatgagatttgggtggggacatagccaaacaataccattctgtcctttccccttcccaaatctcatgttctcacatttcaaaaccaatcatgtcttcccaaatgtcctccaaaatcttagcttgtttcagcactaactcaaaagtctat

SEQ ID NO: 716703 - DNA, 650 bp, Homo sapiens
tttttagaaaatatttacttaaaaattgtgagagactttcaagaatttaatccaaaatctacaatgaaacctcaatttgccctagtcatatcacttttttacttttagttaaacagataatactttaagagctggtgttattattatttttttattcttatttatttcactagtgtattagtccattttcatactgctatgaagaaacacaaaagacttggtaatttatttaaaaaaaaacaagtttaaaggactcacagttccatatggctgtggaggcctcacaatcatggtggaaaacaaagtgggagcaaaggcacatcttacatgatggcagacaaaaaaatgcgtgcaggggaactgtcttttataaaaccatcagatctcatgaggcttatttactattatgagaatagcaggggaaaaaccctcccgcatgattcaatacctctcaccaggttcctctcacaacatgtgaggattatgggaactacaatttaagatgagatttgggtggggacatagccaaacaataccattctgtcctttccccttcccaaatctcatgttctcacatttcaaaaccratcatgtcttcccaaatgtcctccaaaatcttagcttgtttcagcactaactcaaaagtctat

SEQ ID NO: 716704 - DNA, 1643 bp, Homo sapiens
ggcttactttcatataacatgtcaatcataatgcatccagttaaggtaatatttattttctttcattttgaaaccatttcttacagggaaaatatacattcaatagcaattttcctgcaaatttgaaaaatttctcttgactacatgtgtgtacatttgaagcctaatttttattttattttattttattttatttttttaagacggagtctggctccgttgcccaggctctggagtgcagtggcgcgatatcggctcactgcaagctccacctcccggattcacgctattctcstgcctcagcctcccgagtagctgggactatcacctaccacctgccaccacacccggctaattttttgtgtttttagtagagacgccaccacgcccagctaatttattgtatttggtagagacagggtttcaccgtgttagccaggatggtctcaatctcctgacctcgtgatccgcccgccttggcctcccaaagtgctgggattacaggtgtgagccaccactcccggcgtgacgcctaaatttttaacatgttcaacatgtttgcatacataataaaaacacaaatgcattatagttatttaatgcatacagtcaatatattattgtttgttaatatgaattaagagacatggagatatttactactcagaatgtagtgccaagtgctgcattaattcactccaaaaataatggtagaaaaccaaggttctataagaaagtgtataagaaatactttgaaggatctcatgcttctaattctcaggaaaatacaattttttggtaagatggtatatcagtccattttcgtgctgctataaagaactgcccgagactagataatttataaaggaaagaggtttaattgactcacagtacagcacggctggggaagcctcgggaaacttacaatcatggtggaaggcaaaggggaagcaaggcaccttcttcacaagtaagcaggaagaagtgcctagcaaagggggaagagccccttataaaccatcagatcccataagaactcactcattgtcaggagaacagcatgggggaaactgacctcatgattccattgtcttcacttaatctctcccttgacaggtggggataatgaggattatggaggttataaagcaagatgagatttgggtggggacacaaagcctaagcatatcagatggttattgacctgggtcaaaaaaaagaggctggaattttagtagtataggaaaagaccaaagactttccatgtcagaagataagtgtgaccaaatattcagaagtgaaaattggacatattgtgttagagagacagtgagagatgtaatattttaggataaaataatgttcaaagtagaatgctaagatataaagtaaaaaaaaaattctaagaatgtgagttgaatattttctaggatgactgaggataaatatattctcaaaaagatgcattaacccacactatttcagagttcagcataggtgaactctgaaataaggagtgaaggcagatgaaaaagtaccatggtgtctccagtgaaatgtgttgaaaaattaccaaaagtgaaaacgtcctttgttgttgaaaattacaaataaacttataaacaatatgacaaagagcagag

SEQ ID NO: 716705 - DNA, 1643 bp, Homo sapiens
ggcttactttcatataacatgtcaatcataatgcatccagttaaggtaatatttattttctttcattttgaaaccatttcttacagggaaaatatacattcaatagcaattttcctgcaaatttgaaaaatttctcttgactacatgtgtgtacatttgaagcctaatttttattttattttattttattttatttttttaagacggagtctggctccgttgcccaggctctggagtgcagtggcgcgatatcggctcactgcaagctccacctcccggattcacgctattctcctgcctcagcctcccgagtagctgggactatcacctaccacctgccaccacacccggctaattttttgtgtttttagtagagacgccaccacgcccagctaatttattgtatttggtagagacagggtttcaccgtgttagccaggatggtctcaatctcctgacctcgtgatccgcccgccttggcctcccaaagtgctgggattacaggtgtgagccaccactcccggcgtgacgcctaaatttttaacatgttcaacatgtttgcatacataataaaaacacaaatgcattatagttatttaatgcatacagtcaatatattattgtttgttaatatgaattaagagacatggagatatttactactcagaatgtagtgccaagtgctgcattaattcactccaaaaataatggtagaaaaccaaggttctataagaaagtgtataagaaatactttgaaggatctcatgcttctaattctcaggaaaatacaattttttggtaagatggtatatcagtccattttcgtgctgctataaagaactgcccgagactagataatttataaaggaaagaggtttaattgactcacagtacagcacggctggggaagcctcgggaaacttacaatcatggtggaaggcaaaggggaagcaaggcaccttcttcacaagtaagcaggaagaagtgcctagcaaagggggaagagccccttataaaccatcagatcscataagaactcactcattgtcaggagaacagcatgggggaaactgacctcatgattccattgtcttcacttaatctctcccttgacaggtggggataatgaggattatggaggttataaagcaagatgagatttgggtggggacacaaagcctaagcatatcagatggttattgacctgggtcaaaaaaaagaggctggaattttagtagtataggaaaagaccaaagactttccatgtcagaagataagtgtgaccaaatattcagaagtgaaaattggacatattgtgttagagagacagtgagagatgtaatattttaggataaaataatgttcaaagtagaatgctaagatataaagtaaaaaaaaaattctaagaatgtgagttgaatattttctaggatgactgaggataaatatattctcaaaaagatgcattaacccacactatttcagagttcagcataggtgaactctgaaataaggagtgaaggcagatgaaaaagtaccatggtgtctccagtgaaatgtgttgaaaaattaccaaaagtgaaaacgtcctttgttgttgaaaattacaaataaacttataaacaatatgacaaagagcagag

SEQ ID NO: 716706 - DNA, 640 bp, Homo sapiens
taaaaacaatcatatcaactaacatcctatttcctgaagtatatttcttgtatctatttttgtatttatatatatatrtatatttcaataaaaggcttaatggaattaatttttccatttttctcaacctagtaattgaaatgttcataataaagtagctttctatgtatgaactgatgaggtgctagagatggaaatttttaataagagtaacaaggtcacttacagtctccccacgttgcccagggtgtcctggcagcccatccttcccaggtggtccctgaaattacaaatattaaataccacatgtcataaatatttaattattttatagtctaaatgtgacatgttagaaaattttcttttctttttatatttccattagctattttactttgctcttctgttgattttatatatgataatatgcacatatatctcttcaatataattctgtagctatagctgaaaccaaaataaaatagttgaactcttttctgaatattttacatttaaatatatttcatttgcatcaatcatttgtaaaataatatttgcaaaggtttgtattttcgtttttgtgaaaaatattacttctttagcacttcacaaatgagtatttccccctttttggtgattt

SEQ ID NO: 716707 - DNA, 625 bp, Homo sapiens
tcaaacagatgaagccaattctgtcccaaactgcataaaactgcatactagagaaatggggtatttttatttcatgctctaatgtttcacttgttagagaaacatagtataaaaatcactttgtttatcagtgaaagaaatactccttcttgtctctcctactagaatgcatgcttctcaagtgtaggcatttattatgcttctgatacctcttacagacaaaatgcatgcacgatcaatggctcaaaacatgttgaaagacacataacacaatgggctgaaaaagtctgataaaaaaatgagtcaaatgggtttctttgacaatgaaacaatattacatgagccaagcagttctcaacaatacatacaaacataaatsgtacaatactgaggttatatacgtcactaaactttatgttcctaaacaataatctaatatacagcttaaaataattataagaatgtttataaaaatatacatacagtgacttttgaaactgttttcatttctctgtgaaactttgcagagtcttcatgttacatttggagcaaaactgacatagtaggtaagcattatatgcaggtagtaccaaggttactttatatttaacactagccatatgta

SEQ ID NO: 716708 - DNA, 2542 bp, Homo sapiens
gggggaagcctgtaattatgtgagccactctaacaacacattgccctttgtgttatgtgatcaatgtacaccaccttgcatcaaaaaacttttcatgcatacaacatgcttgctttttattagatcatagaaaaatgtgtatttctctttcagttacttagggttcaaaatccagtaatcaccattagcctatgtattcttgaacaatttactactcaccttctcagcttacttcccatagtttccttatggactatgttgcccaggctagcctcaaacttctgggctcaagtgatcctgccaactcagtctcctgaggagctgggactacagatgctcaccactgtgcctgactagacatacaatttttggcaacaggagagctataaataattttaggagtaaaaggagaaaagagaaaaagagcaaagtaattatatcacttgcattttcgaagaaatcagtctatctcttcttttttcttccacacaggttatttgttttttgtattctcttcagggttttatgcaaatgtccrttcattcttggctttaaccagttctcacaggcccataccattttacaaaccagctgtgtgactttggcctccatgtctttgtttcctcatctgtacagcagggaaacaatgtctaggttgtataggaattttctaaggactagaaattacacactcaaagcaaatccagtagatagaaggtgctttaaaactggttgtcacccatgttgtagctcccttactatttacagccaagttcacagtgccctttgcaatcaggcactttagaagatgcaaattattcccaataatttggccagaatgtaattctgcagccacctctgttcttcttgaactgcatgcatcatattttaacgtcaaaatctcaagccatgaaatcacatattttttctctaatttttgatctgcctaatttgtagtctgccacaggtaagtgacaagcatgctgggtactaatcctctcacctcatgcaatggactcattttatatctgcgttagcttgaaaaagactgggaagcactaatgagtgattagtgactctcaaatctaaacgtgtgtttaaatcacctggacatcttattatataaaacatggattttgattcagcagattgggggcggaatctgagattctgcatttctaaccaactcccatgggatgccaatctgtggccaatgcttggtgcagagaacaactacagtacaggtttcatgatacttaatgatcctttccctataaaatcaaaaaagatatgattaatttgtctcaaatatcacttcccatttctctaattagaataactttagtattttctctttcctctatcctcacgaagtaataagtttttatgtgctaaagaattgtctttcacatacgtggaatttgaataacttcctaatatacatgaaaaggcaatcaactaaaagatgaaataaaatttcaaaagaaacagaagaaattaaaagttaactaatgtaatccataactaaaagttcactataatgtgactgaaaataagaactacattttcccaactgttccaaagacatacaactaagagaactgaggagatgtcactcaaatgtgaaacacctgaacctgagtctacctaacaacaaagctctcaaatgtgaaacacctgaacctgagtctacctaacaacaaagctcttcctgcctgttacaggatgagtttgtccttcccaaaattcgtatgttgaagtctttactcccaatagctcagaatgtgaccttattaaagaacaggtaaggccaggcacagtggctcatgcccgtaatctcaacactttgagatgctgaggcaagactcctggcttgagtccaggagttcaagaccagcctagacaacaaaacaagatcccttctctaaaaaaaaattagaaactagctgggcacagtgccgtgcacctgtagttccagctacttgagaggctgaggcaggaggaccacttgagctcgggagttcaaggcttcagtaagccgtgttcatgtcactgcactgttgtctggacaacagagtgagacccttccccgccactcaaaaaaaaacaaacaaacaaaaaaaaaacagggtcatcattgccaatgtaactaaaataaggacacatgaaaatataattacactgtaggtgtgattagttaacattaagtaaggtgagccctaatccaatatgactggcatccttacaaaaaggaaaaatgtagatagacacagagatatgtacacaaagagaatgctatgaaagatcaccactacgctgccacaaagcagcaaactactgtaagcaaggacagaggcttgaaacagatccttccctggtgccttcagaggtaacatgaggctgggtggagtggctcatgcctgaaatcccagcactttgggaggccaaggtgggcggatagtgtgagccaaggagttcaagatcagcctgggcaacatggcaaaaccttgtctctacaaaaaatacaattagccaggcatgg

SEQ ID NO: 716709 - DNA, 1027 bp, Homo sapiens
caattgaagcagactctgtgcttgcaccgggacacctgtgtgttttcttttttaatgccccactccctatctaccccaggtggtttgaatatgcagccaggattgagaaccactaggctagattatgggagatcattctccactttaaaattagagatctgtgaccacctaatttgctgtcacagtgggatggctggaaatgacttaacattgtgctcttcccaggagcagcttcatattcaccaagggttgggaggggagttttgcttggaaggaatgacaatggcggaactccagggggagaacaaaggactggccgcatcttgccgaaatggccatgctatgtgatcttgtctcagcaatttcatgccttgggcctccgtgtcttggccctgaccagcacaactcctgttttgttctgtctgttcagcccagaattcccagagggcttggagctttctactgatctggaaggttctcttcccctctcttctattctgagtgaaaaaggcagctgggaggccccctgcccttctcccctccagtgatccgaagccatggctgagaatagtgggaatgaggtgctaatgccccsgtcttgagtagattttccccccacggcacacacatctggtttccattttcttctgcagcaggccccattgagcagagccttcctctttgaatctcctgaaaaatcatgtccagaggccaggttcagcccccaccctgaccccagtcctcaatgcagcaaaattcctttctcagggacccttggcccagtcttccctatggtccttgggaggcaggtggggccctcaccagaggggagagcaaaaggctggggtggtgtgggggacattagaggagtgctggctccctggagaactggggaagtaggaaggtttgggaacacctaaaaagaacaggaggagtgcatgagccaccaggaaaaatgagtgcctactgcctccagctgggaggactgcaagctcttcttgctctcacccagacccctgggcacaga

SEQ ID NO: 716710 - DNA, 1027 bp, Homo sapiens
caattgaagcagactctgtgcttgcaccgggacacctgtgtgttttcttttttaatgccccactccctatctaccccaggtggtttgaatatgcagccaggattgagaaccactaggctagattatgggagatcattctccactttaaaattagagatctgtgaccacctaatttgctgtcacagtgggatggctggaaatgacttaacattgtgctcttcccaggagcagcttcatattcaccaagggttgggaggggagttttgcttggaaggaatgacaatggcggaactccagggggagaacaaaggactggccgcatcttgccgaaatggccatgctatgtgatcttgtctcagcaatttcatgccttgggcctccgtgtcttggccctgaccagcacaactcctgttttgttctgtctgttcagcccagaattcccagagggcttggagctttctactgatctggaaggttctcttcccctctcttctattctgagtgaaaaaggcagctgggaggccccctgcccttctcccctccagtgatccgaagccatggctgagaatagtgggaatgaggtgctaatgcccccgtcttgagtagattttccccccacggcacacacatctggtttccrttttcttctgcagcaggccccattgagcagagccttcctctttgaatctcctgaaaaatcatgtccagaggccaggttcagcccccaccctgaccccagtcctcaatgcagcaaaattcctttctcagggacccttggcccagtcttccctatggtccttgggaggcaggtggggccctcaccagaggggagagcaaaaggctggggtggtgtgggggacattagaggagtgctggctccctggagaactggggaagtaggaaggtttgggaacacctaaaaagaacaggaggagtgcatgagccaccaggaaaaatgagtgcctactgcctccagctgggaggactgcaagctcttcttgctctcacccagacccctgggcacaga

SEQ ID NO: 716711 - DNA, 1027 bp, Homo sapiens
caattgaagcagactctgtgcttgcaccgggacacctgtgtgttttcttttttaatgccccactccctatctaccccaggtggtttgaatatgcagccaggattgagaaccactaggctagattatgggagatcattctccactttaaaattagagatctgtgaccacctaatttgctgtcacagtgggatggctggaaatgacttaacattgtgctcttcccaggagcagcttcatattcaccaagggttgggaggggagttttgcttggaaggaatgacaatggcggaactccagggggagaacaaaggactggccgcatcttgccgaaatggccatgctatgtgatcttgtctcagcaatttcatgccttgggcctccgtgtcttggccctgaccagcacaactcctgttttgttctgtctgttcagcccagaattcccagagggcttggagctttctactgatctggaaggttctcttcccctctcttctattctgagtgaaaaaggcagctgggaggccccctgcccttctcccctccagtgatccgaagccatggctgagaatagtgggaatgaggtgctaatgcccccgtcttgagtagattttccccccacggcacacacatctggtttccattttcttctgcagcaggccccattgagcagagccttcctctttgaatctcytgaaaaatcatgtccagaggccaggttcagcccccaccctgaccccagtcctcaatgcagcaaaattcctttctcagggacccttggcccagtcttccctatggtccttgggaggcaggtggggccctcaccagaggggagagcaaaaggctggggtggtgtgggggacattagaggagtgctggctccctggagaactggggaagtaggaaggtttgggaacacctaaaaagaacaggaggagtgcatgagccaccaggaaaaatgagtgcctactgcctccagctgggaggactgcaagctcttcttgctctcacccagacccctgggcacaga

SEQ ID NO: 716712 - DNA, 657 bp, Homo sapiens
caatctaaatcccttcatccacaaacgtgattgtttcatgtaataataataataacccctatatgtgcagagtccttacttccaaagtgttttcccagagaccacttcattcytttttggattatgaaatagaaagagtaggtgttattattcctcttttaccaaggtgaaattgaggctcagagacaaggtagatgatgagctcaaggtcagtgacagagccagcgttcaaatgaaggcaggtccccgggctctgcattccaggcttttgcatccaccaaacagactcccctgagttcatctcagctctgcagcctctttacaattgtgcccccaccttccccagtgccatcagcacaagattgggcattgggtcatgccttaaccccaacatgtggtcaataaaaatgtgcttttggttttctgttcatagcagagttcataatttttaagtcaggtgtcctggcctgttctctgactctgcaggtgggaacaactgtttctgcctcaaaagagaatggcatgatgataatggtgatgtcattttaaatatattaatctatctatctctttctcctgctatttccccctgtctctttcccctactctggcagacactatgcctgtgtttattactcagagaatggtgtgggagaa

SEQ ID NO: 716713 - DNA, 634 bp, Homo sapiens
gttagtcttccttgtgttttgcagttaaaaagggaattagtaatgaaatacttgaaattcagagagcatgaggcaccatagaattggtacctgttatgataagtactaaccacgtgaacacaaaatatgggttttacaggagacacttgaagcttcaagttcttgagaaatcagagaagtggcagatccaagaagccaagttaggtctcagattccagattctatgcatatagatctccttatcggatgcttcacattgcctgacttcaaaatattctacaaaactgtagacaaaaaacagcatggcattgctataaacacagacacatagataaatggaacagaacagaatatccagaaataaatctacatatttatagccaactggttttcagcaaaagagcatatattaaagaaaggacaccatcttcaataaatggtgctctgaaaactggatattcatatgcacaaaaatacagctagacccctatcatttgccatttagaaaaaatcaaatcaaaggggattaatgacttaaatgtgagaccccaaactataaaactactagaataaaacataggsgaaacacttcaggacattggtctaggaaaaattttataggtaagacttcaaa

SEQ ID NO: 716714 - DNA, 615 bp, Homo sapiens
tttaatgtagttttccggtggtacgtaatttgctctgagtatgtggattgaaaatctggctcagtgaacagaaaagtagactgagtagccacatgcccagtggaatcataattaaaattaggccaaccagacacagagatgattggaatatactcaggaggaaatagggacatttgaagaggtcacaggacttctgtcatgttaaatacactcctgacaatgacagaggataaaaattggcttcctgaggaaagggagaaacataattgagaaacaaaaaagaataatgaacatttctcagaattctgagaaacaggttttggtggcttagagttggctgctatttcttcttcttcttcttcttcttcttcttcttcttcttcttcttcttcttcttcttcttcttcttctyctcctcctcctcctcttcctcctcctcctcctccttcttcttcttttcttctttcttcttcttcttcctctttctttttttttttttaaacagtcttgctctgtctcccaggctggagtgcagtggcacaatctcagctcactgcaacctccacctcccaggttcaagctattctcctgtcccatcttcctgaagagctggga

SEQ ID NO: 716715 - DNA, 615 bp, Homo sapiens
tttaatgtagttttccggtggtacgtaatttgctctgagtatgtggattgaaaatctggctcagtgaacagaaaagtagactgagtagccacatgcccagtggaatcataattaaaattaggccaaccagacacagagatgattggaatatactcaggaggaaatagggacatttgaagaggtcacaggacttctgtcatgttaaatacactcctgacaatgacagaggataaaaattggcttcctgaggaaagggagaaacataattgagaaacaaaaaagaataatgaacatttctcagaattctgagaaacaggttttggtggcttagagttggctgctatttcttcttcttcttcttcttcttcttcttcttcttcttcttcttcttcttcttcttcttcttcttctcctcctcctcctcctcytcctcctcctcctcctccttcttcttcttttcttctttcttcttcttcttcctctttctttttttttttttaaacagtcttgctctgtctcccaggctggagtgcagtggcacaatctcagctcactgcaacctccacctcccaggttcaagctattctcctgtcccatcttcctgaagagctggga

SEQ ID NO: 716716 - DNA, 615 bp, Homo sapiens
tttaatgtagttttccggtggtacgtaatttgctctgagtatgtggattgaaaatctggctcagtgaacagaaaagtagactgagtagccacatgcccagtggaatcataattaaaattaggccaaccagacacagagatgattggaatatactcaggaggaaatagggacatttgaagaggtcacaggacttctgtcatgttaaatacactcctgacaatgacagaggataaaaattggcttcctgaggaaagggagaaacataattgagaaacaaaaaagaataatgaacatttctcagaattctgagaaacaggttttggtggcttagagttggctgctatttcttcttcttcttcttcttcttcttcttcttcttcttcttcttcttcttcttcttcttcttcttctcctcctcctcctcctcttcytcctcctcctcctccttcttcttcttttcttctttcttcttcttcttcctctttctttttttttttttaaacagtcttgctctgtctcccaggctggagtgcagtggcacaatctcagctcactgcaacctccacctcccaggttcaagctattctcctgtcccatcttcctgaagagctggga

SEQ ID NO: 716717 - DNA, 1120 bp, Homo sapiens
caaccccaaactgcaatagtgttttaaacaggtcatgttagtggatcctaatttaaataaaattctgcttatccaaaataggatattatgggcagttagtaaagtgacaatggctatttgctgagtccagaatgcaatagactagtttcctatttgtttcttgtgctgtctgctttattacgaaaagattgcaaaattccttacctcttcttcctcctcctcttctgaactgtcatctccattttcttcggatgagtcactactgccctaaaaatatatacacatgtatgtatactcttatctgtgtacaaatatattcaacagcaatttaaatttcctgctaattgaatcacaataaaatacacacaaatatttactcaatctaattagtattaccatcttgactgacttgtttactaagaacagattgcatactgatgtgagaaagataggagattagacatgcaaaatgaagttagagaaaaataggcattttactatgatcaagatatgaattggatgtcccatttgtcaacttccaaagcattgacaatatattgaaacattttgtatgtaaaaactagggcaatgaatcacagaattgtttaactttgagagaacaagtgaattaactggtccaatttttaaattttatggagaatgaatcagcggcctaaaaaagttgtgacttctccagcaggttcaaggcagaccttgggctaagatatagttcacattttaaaattttatttagaaaacatgaaagaaatcattcagcttactataaaagttgttatagatgattctcttacatagtgagctctcctgttgaatttaaattagcacttaatttaatagcatttaatttgcatataatttttagtatctttaaatttgattaaagccagttcctaaaatgaggttaatttatacatgtgaagtaaaartcttatgacttattcatttaattatttgggaggttgtgtagagtaatatccctctaacaagttcagtgttgaatgagaataaattaagattttgtatataaaaatataattataagctaaagagttttgctactttttgaaaggaaatgtaaattccaatctaagattctgtc

SEQ ID NO: 716718 - DNA, 639 bp, Homo sapiens
caggcctttaataaatgaatagatgtgattttttttttcccaccaaagcaaagaaatagggtagtagatggcttactgaaataatttggagtagtattatatggtagacatgaagagttcatgtatatttgtaaggatgggaatattgattggagtgaattttaaggagattttactttattttttagacataaaggaatctgattattttaagcatctraggtttctatcttcagttagcaggtatatggtgaagcaatcaacacagagtggggaaagagtttatgaggtagtctttcttagtttgaattggacatccctgtgagataaccaaaatattagcctttaaacaacagcataagcattaagctggcagtgaagggtagtgtcagctacagataaatatcgggaaggaaggattatattcctaagacatattttatgaataattttaagtagtgatttctttcagtaaggtacatctttatgtcagtttactggtgtgattcacaaaaacacctttctttgagtggaagtcatacaaaagtacaggagttttagggaaaacataacacatatcttcaaaagtatttaacaataatttattttatattatagtaatataacttatttattaaa

SEQ ID NO: 716719 - DNA, 639 bp, Homo sapiens
caggcctttaataaatgaatagatgtgattttttttttcccaccaaagcaaagaaatagggtagtagatggcttactgaaataatttggagtagtattatatggtagacatgaagagttcatgtatatttgtaaggatgggaatattgattggagtgaattttaaggagattttactttattttttagacataaaggaatctgattattttaagcatctgaggtttctatcttcagttagcaggtatatggtgaagcaatcaacacagagtggggaaagagtttatgaggtagtctttcttagtttgaattggacatccctgtgagataaccaaaatattagcctttaaacaacagcataagcattaagctggcagtgaagggtagtgtcagctacagataaatatcgggaaggaaggattatattcctaagacatattttatgaataattttaagtastgatttctttcagtaaggtacatctttatgtcagtttactggtgtgattcacaaaaacacctttctttgagtggaagtcatacaaaagtacaggagttttagggaaaacataacacatatcttcaaaagtatttaacaataatttattttatattatagtaatataacttatttattaaa

SEQ ID NO: 716720 - DNA, 1422 bp, Homo sapiens
ctcgatctcctgacctcgtgatccgccggcctcggcttcccaaagtgctgggattacaggcgcgagccaccgcgccaggcctaaatgtagccattcttatcggtgtgtatgtcactgcatgtccctattgattaatgtcattaagcatcctattatattaaatcagcctttctttcccaagataaatctcattagctaccatggattatttgtttttatattttgttgaacttgattttttaaaattgtattagaatttttgcatctatgttcatggtaaatattagtctgtagttttcttttcctgtaatgtctttatcaggttttggtatcagggtaatgctgccgtaatggaatgatctgagaamtatctctcttgaggtaagagtttaagaagggctaaagcaacaaatcccatcagaatgttaaaaccatacaatcacaaatacatctattcaagaagaaaaacatttccaattatcttcagtagaaggttaaaatccaaggaaatattctgtcagttatatcactacattacaatattataacatttatcaagtaatttaactttttaatgcaataattatgctttatttttgttaaccaattacatacaaaccggtaagtgtagcatcacactgttatacaattagagaggtttatataacattcctaggcatttaaagtgcagggccccattactggtgaatccaaggtgagctctattttgagtgttgcaaaaaacccagatatgagccaaagaaaaactctgaagttaattattttttcttctgttaatttttcattcaatgcattaaacttcaacttccaataggagagaaaaaacatctcctcatgtgaatctctaaaaatatcctgcaaaatgtcttgaaagaaggttgtgctaaatacacgtgggttcgaacggtactgatgtcctgctagaaacacttgttaaaaggtttgttgaggaatgtacatattttattctgttgccctctccctaatccatgtgcccaagaacatgcctcctattctaattagtcttcccatagaatgttttatactctgtacttcctctctttataccttctacatacaaatattttctccactagatactgtttttaaaaggaacttaaatttcactgtaagttaataatacttgttaacaggtaatatggtttggttgtgtccccactcaaatctcatcttcagttgtagttcccataatccccgtgtgtcatgggagggactcaatgggatttaattgaatcatgggggcagttaccctcatgctgttctcataacaatgagtgagctctcacgagatctgatggttttataagtggcttttcccctttctttgctcagcactcttctctcctgccaccatgtgaagaaggatgtgtttgcttaccc

SEQ ID NO: 716721 - DNA, 1422 bp, Homo sapiens
ctcgatctcctgacctcgtgatccgccggcctcggcttcccaaagtgctgggattacaggcgcgagccaccgcgccaggcctaaatgtagccattcttatcggtgtgtatgtcactgcatgtccctattgattaatgtcattaagcatcctattatattaaatcagcctttctttcccaagataaatctcattagctaccatggattatttgtttttatattttgttgaacttgattttttaaaattgtattagaatttttgcatctatgttcatggtaaatattagtctgtagttttcttttcctgtaatgtctttatcaggttttggtatcagggtaatgctgccgtaatggaatgatctgagaactatctctcttgaggtaagagtttaagaagggctaaagcaacaaatcccatcagaatgttaaaaccatacaatcacaaatacatctattcaagaagaaaaacatttccaattatcttcagtagaaggttaaaatccaaggaaatattctgtcagttatatcactacattacaatattataacatttatcaagtaatttaactttttaatgcaataattatgctttatttttgttaaccaattacatacaaaccggtaagtgtagcatcacactgttatacaattagagaggtttatataacattcctaggcatttaaagtgcagggccccattactggtgaatccaaggtgagctctattttgagtgttgcaaaaaacccagatatgagccaaagaaaaactctgaagttaattattttttcttctgttaatttttcattcaatgcattaaacttcaacttccaataggagagaaaaaacatctcctcatgtgaatctctaaaaatatcctgcaaaatgtcttgaaagaaggttgtgctaaatacacgtgggttcgaacggtactgatgtcctgctagaaacacttgttaaaaggtttgttgaggaatgtacayattttattctgttgccctctccctaatccatgtgcccaagaacatgcctcctattctaattagtcttcccatagaatgttttatactctgtacttcctctctttataccttctacatacaaatattttctccactagatactgtttttaaaaggaacttaaatttcactgtaagttaataatacttgttaacaggtaatatggtttggttgtgtccccactcaaatctcatcttcagttgtagttcccataatccccgtgtgtcatgggagggactcaatgggatttaattgaatcatgggggcagttaccctcatgctgttctcataacaatgagtgagctctcacgagatctgatggttttataagtggcttttcccctttctttgctcagcactcttctctcctgccaccatgtgaagaaggatgtgtttgcttaccc

SEQ ID NO: 716722 - DNA, 1135 bp, Homo sapiens
agtacatttccgaaaatctgatatttcatgtttctgaggatattctatcagctggaacatagacatgtggcctcacgtaaatgtagtggagattggtaaattaatatttgctgtcactgaccacatctaagctaagcctcatcattgtgccaagaaaaccccatgaacattatagaaaaaaatcctattctctgctatattacataaaccaccattgctatccatcagttttcttcmgattatcaaccatcctccttttttagccagtatattctgaattgtaagatttaattattcatttaattacaaacaaaattgcgcatcattaggcatatataaagaagtaaaagaaatacttgcatttataagccaacagtctaccctgataagtgtcaatctctctaccctctgaaaacaaaaacaaacacaaaacaaaagccttttgttttccttctcagtaaaataacacaatttctttatttggtctgtatttgggcaagaagactactggaagcaacttaagccatttcagcatctatgtgattgatcaattcccattttatatttttcctgactctgcctttaaaccctgatgcattttattatcttatacatcacatagtactctccaggatctcccgttctgactgatattgctccacaggataggtttcctgctgttatctttttataggaacacctattactgtgcaagaaagggcagaatgaacaaatcttactttctttaccttcacttctgaacaagttagaaaatctcgttgaacaatctctaatataaagaatgcttgacattttcttcaattttaaattggccgtcatttataatatttctatcataagtttaggtctgtcatgagaagtttatcagaaataaaggattgtttagtgcttccaaaagttatgtagtataatagtgtaaaattaagctaagtgacttttcaccataaaagtcaagtaaactcactaacaccaagcataaacagaaaaactcacagacctgtattataaggcattccatctgagaaacattttaaaaaccatgaaaattgtgtccagattcagataagtgtttgggatatatttaaccaaaccttaattcaaataactggaattc

SEQ ID NO: 716723 - DNA, 1117 bp, Homo sapiens
aatgttaggggtttctcataaacctgaacctgaagaaaatcaccctgccagcatattgatcttctagctcttcttaacctttttttctgtgattcaggaattcataatgatagaaaatattatactaaagaagaaaaaaagagggagaataagtaagtgatagatggatgcatcagggtgtaaagttagcaagtaaggctgttgaagtgtcagagtgaatataaatgaattgtgggaatggtccatgccaggagaagagggtatggttgacaaaaagggaaatgctaagattcaaaacagggaagggcttttcaaaatgccaagagcaccaacttatatctttcagtttaattcctctcttccttacccactggctggaaagcaaaggagctagtggtaagtaagagtgttatagccagagaaaaagtcttcaaaaaacacaaagtactttccatggacaaccttttttattttaaagtgccaatatgttgctttgaaaaagaataaattccttacatccaggtatctgractagacttcagtgcatttagtgattatagcaaatccaaacagtagcttttgatatcagagaatgggtaaagtgtttttgacaatttctaagaacttagagttcttcggtgatacgttccatgcaactgaagctctgctctccaaatttaggtgggtacatacccaagtccatcacctggggcttctatttcctttgctcagatgctcacctcctaggtgggcacctgacataagatagactaataaaaataagtcctgtaacttttgatactcctattaaaaaagagttgcaaaccaataggaggtacacttgagaatcagcacaaatgaaagtagaacctggaaatccaggaagcagatacccaatcatgtcatttaaacatttagatccagctgtgcctgaagctgaactttagcattacataagccaataaatcactcttccccaacttacgccagttgaaattgaatacatactcagtgactttgagagaattccagggaattggtcagtccctgtttcacttgtaaatacatagcaatcaagcctaccaaatctatgattgattggggtgtctgaaagaga

SEQ ID NO: 716724 - DNA, 666 bp, Homo sapiens
ttcagtgactttttgttttgtttgtaggcaaaagctcttcctaggagatctagccaactaccaattatgaaataaagaaatgtagtgataaattcatgataataaattcattttctacaggattactgaytgaaatatcaagatttttaaaatcagatatccataaatgttttacttgagaataaattacatattttactattgcattaacttctttatttgccaaaagttttcggaatgatattgataaatcccacaggcagtttctatttaaagattgatctgattttttctgagagtaagattgtgtaatatctattttaaacagccagaactgttacagactatttaaagtagaaaaaaggtttaatttggtgcagttatgggcttgtaattgtttaacaatagtctctccagaaaaaaagtgatttgtaacatttgacaatttatctgatgtaaattctcctactaaggacaattttaagctaccaatgtaatgccaatgaattaagagataggaaggaataaacggaatcactttcaagtgcctttaagagttcataatattaaccagcacactatgaaacgtgatgaagttttttaacttagattttacaatggggcaaatatactactatattatccaagctatacatttttaaaatg

SEQ ID NO: 716725 - DNA, 658 bp, Homo sapiens
ttcatttttaaaacacaaataagtttcacagacaaaaattttctaacataagatctttaatattcagagttctcactttttttttttgcaaatgtcctaaagctaacaaatgtttggctgtttaatatacaaaaaatgtataccaattaagaccttttcctgtcataactctttctttccagattatttcagtagaggccaggacaccccaaatcctgttctactttgctcactggctggggaacttgcctgtcaacaatggggttgtgaggtggcttcacaatgaggcagtgaggtgggttccttccctrtaagtaattagctcacctgttctcatcatgaccaaatgagaatgcttgaccaaatgagaatacaccagtcaaaaacaaaagttctttcaaacatgtaaagtacactggatatataggatagagtactctgtcacctgcgtcagaactgcagggaaatcttgttaaatcatagattgctgagccccaactccaaggtttctgattaagtaggtctgaatggggctcaagagcacattcccaggtgatgctgttgcagctgctctgggttttacacttggagaaccatatggggagttatgggcattcatgacacaagaaagcttgttgcataatatttcaagagatac

SEQ ID NO: 716726 - DNA, 721 bp, Homo sapiens
tgctaagatgttacaagcgcaaatttgctccagttcccagtaagtttctcatttccatctgagacttcgtcagcctggtatttactgctcatatttctatcagcattttggtcacaaccatttatccagtctctaagaggttctaaaattcctcttattttcctgtattcttttgagaccccccaaactcttccaacctctgcccgttacccagttccaatgcttccacattttcaagtatcgttatggcaataataacataccatataccgcacttcttgataccagttttctgtattagtttgtttgcatggctataaaggagyacctaagactgggtaatttacaaataaaagaggtttatttggctcatggttctgcaggctgtagacaaagcatagtgccagaatctgcttcttgtgtgggaatcagaaagcttacactcatggcagaaggtaaaggggagatggtgtgtcacatggtgagagagggagcaagacagagaaggaggaggtatcaggctgttctaaaccactagatctcatgtgaattcatcgtgtgagaacttactcattactgtgatatagcaccaaaccatttatgaaggagccaccccagtgccccaaacacctcccactaggtccttctacaacattggaggtcacatttcaacatgagattagaaggcgacaaaatattcaaaccttatccatctatctat

SEQ ID NO: 716727 - DNA, 721 bp, Homo sapiens
tgctaagatgttacaagcgcaaatttgctccagttcccagtaagtttctcatttccatctgagacttcgtcagcctggtatttactgctcatatttctatcagcattttggtcacaaccatttatccagtctctaagaggttctaaaattcctcttattttcctgtattcttttgagaccccccaaactcttccaacctctgcccgttacccagttccaatgcttccacattttcaagtatcgttatggcaataataacataccatataccgcacttcttgataccagttttctgtattagtttgtttgcatggctataaaggagtacctaagactgggtaatttacaaataaaagaggtttatttggctcatggttctgcaggctgtagacaaagcatagtgccagaatctgcttcttgtgtgggaatcagaaagcttacactcatggcagaaggtaaaggggagatggtgtgtcacatggtgagagagggagcaagacagagaaggaggaggtatcaggctgttctaaaccactagatctcatgtgaattcatmgtgtgagaacttactcattactgtgatatagcaccaaaccatttatgaaggagccaccccagtgccccaaacacctcccactaggtccttctacaacattggaggtcacatttcaacatgagattagaaggcgacaaaatattcaaaccttatccatctatctat

SEQ ID NO: 716728 - DNA, 634 bp, Homo sapiens
ttttccttgaattttccagtatgtataaagactatctgcatttatttattttttggcctgctggtcccttttctccttcttcaaagccagcaacatagcatytcactgaccctgattgcattgccatagctctttctctgactctccttttatacctccattttccacttttaaagacccctgtgattacattgggcccacctggataatccaagataatctccccattttaagtgtgttgataagcaaacttaattccatctgcagacttaattccgctttgtcatatagggtaacatatttgcaggttctatggattaggatatggataccttcttagggtcattattatgcctattacacaagtctattgaacatttagatatctgtctgcatcctattacgttttttgaaaatagagttaaaccaattcccaatcttcttccatgtctgcagtaggctgcctctataatggcctccaaaactccccacatttggccaggtgtggtgtctcacacctgtaatcccagcactttgggaggccaaggcaggcagatcacaaggtcaagaatttgagaccagcctggctaacatggtgaaaacccgtctctactaaaaacacagaaattagcta

SEQ ID NO: 716729 - DNA, 634 bp, Homo sapiens
ttttccttgaattttccagtatgtataaagactatctgcatttatttattttttggcctgctggtcccttttctccttcttcaaagccagcaacatagcatctcactgaccmtgattgcattgccatagctctttctctgactctccttttatacctccattttccacttttaaagacccctgtgattacattgggcccacctggataatccaagataatctccccattttaagtgtgttgataagcaaacttaattccatctgcagacttaattccgctttgtcatatagggtaacatatttgcaggttctatggattaggatatggataccttcttagggtcattattatgcctattacacaagtctattgaacatttagatatctgtctgcatcctattacgttttttgaaaatagagttaaaccaattcccaatcttcttccatgtctgcagtaggctgcctctataatggcctccaaaactccccacatttggccaggtgtggtgtctcacacctgtaatcccagcactttgggaggccaaggcaggcagatcacaaggtcaagaatttgagaccagcctggctaacatggtgaaaacccgtctctactaaaaacacagaaattagcta

SEQ ID NO: 716730 - DNA, 644 bp, Homo sapiens
gagaagaccattcaaaggtaccccactgcttcctatttagagggggaaaaaggacgtcatatatccctgctcatgatggcataatttggtgttaaagtcagttgtgatggcaaagtaaagttttggtttgtttggtgagaaaactgagttcaccctcttgccacyctcttatctgtttgagccagaaacgatcccatctaccaagtgctgtctgagagccagggtccatgcccaacaattttcatgcatcgatacctttcatctcatgaagcgggcactactctgatatgcctttgctaggtaaggaagctgaaattcaaggagattttgttccttgttagtgacaacatcaaggcaaagtggctctagagcctgcctgcttagtcacaactgtgccttgtcactctactgctttgaaccaggcagctattgtgccggtggcatatatacaaggaggctgagggacagagcaaatattcaggacaagagtgagtcatgctgagggattgtggcaagaagaaggctggctgtgggtaggggagggccttgggcctggggagaacagaaattctattgaatttctaactaagtgctgggcagagtagctcttcttccttacctccttatgaaatcatcagtcaaat

SEQ ID NO: 716731 - DNA, 1507 bp, Homo sapiens
tctaagagttcttccatttctctgtggccccaggaactgtctcatcctcatacttgagctctggtttgttgctggtgaagatctcagtcctatatatttgtttgtttgtttttttgtgggggaaatggtgggtgggtgggtggggggagaagccagcttgcttctgtgtggccattttggaactggaaactccaatctcctgtatttgctaaactggcaactctaacatgtaaaggattgatacagatagatgaatgtttgttgaatgaatgactaatgtagttgatcagatgtatagagtaagaaggagagatgagtgaatgatgtcttccaggttcctggtttggaaaatgggcaaatatcggtacccttcagaaaaataaggacaatagaggaaaagcaggttagggaagaaaggcaaagtgatgaattgcactttggacaggttgaggttaagttctccctggaacatattaacagatatgaccagtaggctgtcggctgcattgctctggagctaaggagaagatcaggatggaatcataggtttgagagttatcatcaattaatggtagtaaagctataggagtggatgaaaccacagaaaataaagcaagtagaaagcagccctaggatgaagcctaaaggaactctgacatttgaatggccagcgggttaaaggaaaaccaggagtgagatatcacagaagctgagggaggaagattcaagaaagggaagaagtggtctgcagtgactaacattccagagaaataaatgttaaagaacaccaagaggtcagtggtgaccttgaagagaagcatttcagtggaggaggtgagacaagaagtgaattggagaagtgaaagcaggaagcccgggagtgtaggcaagtcttataaaaacccaactgtgaagaggagggtggtcactggagaaagacatggggcctaaggatgattgtgtttgtgatcagagtaaacagagcaggtttaaatgcacaagggaaggatttagaaaagagggagatgttgaagatacaaaagagggagacagactgaggtgttgaggggaaatcagatacagagcccaggtgaaggggtctttggacaaaaggagctctcttccatattgacaggaagtaggctggagctgcgcatgcaggtgaactggtagtttaggaaaaggaaactgatttatggcaggagagctctgtgcatagattctttcccctraagaacccccttccctttgtgaactgttcatgccagttgtacttataatatttaacaatgtgagctgaaggaatcaatttaaaataaaatcgagtgaaataaaatcaaactaaatgaaatctacgctttgggaaaatcctttaaaaggtgagttgctacttttttgggtcaaagtaggtgtgggcaaaatcaaccataaaagtttggattaaaaaaaaaacccaaaattgctttcacctgtattgctttacctaaaaagtccaaactggacatcg

SEQ ID NO: 716732 - DNA, 1507 bp, Homo sapiens
tctaagagttcttccatttctctgtggccccaggaactgtctcatcctcatacttgagctctggtttgttgctggtgaagatctcagtcctatatatttgtttgtttgtttttttgtgggggaaatggtgggtgggtgggtggggggagaagccagcttgcttctgtgtggccattttggaactggaaactccaatctcctgtatttgctaaactggcaactctaacatgtaaaggattgatacagatagatgaatgtttgttgaatgaatgactaatgtagttgatcagatgtatagagtaagaaggagagatgagtgaatgatgtcttccaggttcctggtttggaaaatgggcaaatatcggtacccttcagaaaaataaggacaatagaggaaaagcaggttagggaagaaaggcaaagtgatgaattgcactttggacaggttgaggttaagttctccctggaacatattaacagatatgaccagtaggctgtcggctgcattgctctggagctaaggagaagatcaggatggaatcataggtttgagagttatcatcaattaatggtagtaaagctataggagtggatgaaaccacagaaaataaagcaagtagaaagcagccctaggatgaagcctaaaggaactctgacatttgaatggccagcgggttaaaggaaaaccaggagtgagatatcacagaagctgagggaggaagattcaagaaagggaagaagtggtctgcagtgactaacattccagagaaataaatgttaaagaacaccaagaggtcagtggtgaccttgaagagaagcatttcagtggaggaggtgagacaagaagtgaattggagaagtgaaagcaggaagcccgggagtgtaggcaagtcttataaaaacccaactgtgaagaggagggtggtcactggagaaagacatggggcctaaggatgattgtgtttgtgatcagagtaaacagagcaggtttaaatgcacaagggaaggatttagaaaagagggagatgttgaagatacaaaagagggagacagactgaggtgttgaggggaaatcagatacagagcccaggtgaaggggtctttggacaaaaggagctctcttccatattgacaggaagtaggctggagctgcgcatgcaggtgaactggtagtttaggaaaaggaaactgatttatggcaggagagctctgtgcatagattctttcccctgaagaacccccttccctttgtgaactgttcatgccagttgtacttataatatttaacaatgtgagctgaaggaatcaatttaaaataaaatcgagtgaaataaaatcaaactaaatgaaatctacgctttgggaaaatcctttaaaaggtgagttgctacttttttgggtcaaagtaggtgtgggcaaaatcaaccataaaagtttggattaaaaaaaaaacccaaaattgctttcacctgtattgctttacctaaaaagtccaaaytggacatcg

SEQ ID NO: 716733 - DNA, 639 bp, Homo sapiens
tttgtatctgatactttatgagcgttttcagttcactttttaaaaatatgagacttcggtttttaatttaagtgtagtgaatactaacaaaaaagatttttctacttgcctcaccttagactgaaactcagaggaaggatgcaaggaaacatttgtccatgtgtccttgacatgtccctccccagggtgagtcagtgaagacactcttggttgtctgaactggtttacttgttcaaaaagagaccagtggagctgagatttgtgggaaactagggtcattttgcacaaaggaaatttgtacttttatacattatactctttttttttttttcttttaagagacagggtctcggtttgttgcccaggctggagtacagtgatgtgatccttgctcactgggctcaagtgatcctcccacgtcagtctcctgagtaactgggactacaggcgtgtgccatcatgcccggctagtttttaaattttttgtggagacagagtcttgttttattgccaaggctggtcttgaacttctggcttcaagtgatcttcycaccttggcctcccacagtgctgagattataagcgtgagccactgctcccagctgtaccttcagtcttaggtgttctggcaggtggcac

SEQ ID NO: 716734 - DNA, 639 bp, Homo sapiens
tttgtatctgatactttatgagcgttttcagttcactttttaaaaatatgagacttcggtttttaatttaagtgtagtgaatactaacaaaaaagatttttctacttgcctcaccttagactgaaactcagaggaaggatgcaaggaaacatttgtccatgtgtccttgacatgtccctccccagggtgagtcagtgaagacactcttggttgtctgaactggtttacttgttcaaaaagagaccagtggagctgagatttgtgggaaactagggtcattttgcacaaaggaaatttgtacttttatacattatactctttttttttttttcttttaagagacagggtctcggtttgttgcccaggctggagtacagtgatgtgatccttgctcactgggctcaagtgatcctcccacgtcagtctcctgagtaactgggactacaggcgtgtgccatcatgcccggctagtttttaaattttttgtggagacagagtcttgttttattgccaaggctggtcttgaacttctggcttcaagtgatcttctcaccttggcctcccacagtgctgagattataagcgtgagycactgctcccagctgtaccttcagtcttaggtgttctggcaggtggcac

SEQ ID NO: 716735 - DNA, 2262 bp, Homo sapiens
catgcttgtccctcgttccttggcctgtagacggccgtcttctccctgtgtcctcacatactcgtccctctgtatctgtgtgtctgggtcccagtctcctcttcttagaaggtcaccagtcatactgaactagggcccaccataaagacctcattttaatgtaatgacctctttaaagaccctatctccaaatacagttacattctcaagtaccaggggttaggacttcaacatggaatttgtgggtttaagggcaaaattcagcccataacaccatcattgtggggttgtctgtggtttgcctctatctacatagctatttaccatattatatcaacagaaggatcttagatgctgttggtctaggtgctgtttggtctatccaaatggatatccacacacagtgcagtttgctgccatccacacagctatttgccacattagatcagcagtaggatcctagattgaggtgccatttggactaggactgggctacaagggctggcagccaggctggtagacacaggtgtgtacaaagggcacaaacacaagactttaggagaagaggcctggagggaggggggaggaaggtaaacttgccaaccagtaataaaccatatttgatgagcagctctgcagcagacagtggacaacagcgccacacaggagacccccttccaggaccagcacacactcactctacctgcatcatgcaacttgcgcatatgcccgtgacacagtccatcaatgttgtccatgcctggtaatttggcacaaatgataagcagctgctatgataactattaaccctttgccagcacaaaggaatctgccaatactttgatggaagctgtgtgatcgatcaaggagcagcaccrtgagggaggacagcatggattcttagccaaagctgggtctgccccttgcctgctctgtgaccttcagcaatctgtgccctctctgtgcctgcttccttatctctaaacaggaatgagaatcgccgaactcaccttactaggttattgcaaggaataaccaattaacatttgtgaaacgtagaagagtacctggcacagagttagttccatttaaacgttcaggtttgtttttgtttttgttttttagtcccaacatttcatccaaaatcacaggtccatgggtcaatccctaccttattctcagcctctgatttctctttgtaaatatctacttagcaaattcacgaagtacatactatatatatgacactgaggccagcgctgtgagctgaaggctggtaatgccatccctgtcttctttaaagggttgttattggccgggtgcggtggttcacgcctgtaatcccagcactttgggaggccgaggcgggcagatcacttgaggtcaggagtttgagaccagtctggccaacactgtgaaaccccatctctactaaaaatacaaaaattagctgggggtgttggcatgcacctatagccccagctacttgggtagctgaggcaggagaatcgcttgaacctgtgaggtggaggttgcagtgagccaatattgggccactgcactttagcctaggtgacagagtgagactccatctcaaaaaaaaaaaaaaaaaaagtggggtggggttgttataaggattaaatacaattgtgtttgggaaaatgctttgtaaagtataaaccgttgtgtgtattttaagagttgctagtattatcctgaatgtgtgtgatgacatattttttcagcagttctgagtgggctattctggtgggcagggtgaaacaggacccagagcagctttaaaccggaagctgagagggagagaccagaagtaaggagggaaggggcggccgttggtaagttcctgccatgggtcaggcattgtgctaggcccctgatatgccttttcagatgcagaatgctaggtctcacacagaaccagtcctctgctccttcgtggtcccctggagaagctgtgcctcgcagccccttactgttaggtggcaccagagactaattccgtctgatgggctgtgcatgggaatgacatgccacttccaggtggtggccttgaagaatagatatgggctacgctcccttctctcccgtccatgggggcttctctttcccttccaggttgtgcgtcccagagggtggctctaaaagttaaaggaggatggcctccccatgtcagatataacaggggccactagtgcacctgtgcactcttgattagccactaaaatgttggggtgaatttgt

SEQ ID NO: 716736 - DNA, 2262 bp, Homo sapiens
catgcttgtccctcgttccttggcctgtagacggccgtcttctccctgtgtcctcacatactcgtccctctgtatctgtgtgtctgggtcccagtctcctcttcttagaaggtcaccagtcatactgaactagggcccaccataaagacctcattttaatgtaatgacctctttaaagaccctatctccaaatacagttacattctcaagtaccaggggttaggacttcaacatggaatttgtgggtttaagggcaaaattcagcccataacaccatcattgtggggttgtctgtggtttgcctctatctacatagctatttaccatattatatcaacagaaggatcttagatgctgttggtctaggtgctgtttggtctatccaaatggatatccacacacagtgcagtttgctgccatccacacagctatttgccacattagatcagcagtaggatcctagattgaggtgccatttggactaggactgggctacaagggctggcagccaggctggtagacacaggtgtgtacaaagggcacaaacacaagactttaggagaagaggcctggagggaggggggaggaaggtaaacttgccaaccagtaataaaccatatttgatgagcagctctgcagcagacagtggacaacagcgccacacaggagacccccttccaggaccagcacacactcactctacctgcatcatgcaacttgcgcatatgcccgtgacacagtccatcaatgttgtccatgcctggtaatttggcacaaatgataagcagctgctatgataactattaaccctttgccagcacaaaggaatctgccaatactttgatggaagctgtgtgatcgatcaaggagcagcaccgtgagggaggacagcatggattcttagccaaagctgggtctgccccttgcctgctctgtgaccttcagcaatctgtgccctctctgtgcctgcttccttatctctaaacaggaatgagaatcgccgaactcaccttactaggttattgcaaggaataaccaattaacatttgtgaaacgtagaagagtacctggcacagagttagttccatttaaacgttcaggtttgtttttgtttttgttttttagtcccaacatttcatccaaaatcacaggtccatgggtcaatccctaccttattctcagmctctgatttctctttgtaaatatctacttagcaaattcacgaagtacatactatatatatgacactgaggccagcgctgtgagctgaaggctggtaatgccatccctgtcttctttaaagggttgttattggccgggtgcggtggttcacgcctgtaatcccagcactttgggaggccgaggcgggcagatcacttgaggtcaggagtttgagaccagtctggccaacactgtgaaaccccatctctactaaaaatacaaaaattagctgggggtgttggcatgcacctatagccccagctacttgggtagctgaggcaggagaatcgcttgaacctgtgaggtggaggttgcagtgagccaatattgggccactgcactttagcctaggtgacagagtgagactccatctcaaaaaaaaaaaaaaaaaaagtggggtggggttgttataaggattaaatacaattgtgtttgggaaaatgctttgtaaagtataaaccgttgtgtgtattttaagagttgctagtattatcctgaatgtgtgtgatgacatattttttcagcagttctgagtgggctattctggtgggcagggtgaaacaggacccagagcagctttaaaccggaagctgagagggagagaccagaagtaaggagggaaggggcggccgttggtaagttcctgccatgggtcaggcattgtgctaggcccctgatatgccttttcagatgcagaatgctaggtctcacacagaaccagtcctctgctccttcgtggtcccctggagaagctgtgcctcgcagccccttactgttaggtggcaccagagactaattccgtctgatgggctgtgcatgggaatgacatgccacttccaggtggtggccttgaagaatagatatgggctacgctcccttctctcccgtccatgggggcttctctttcccttccaggttgtgcgtcccagagggtggctctaaaagttaaaggaggatggcctccccatgtcagatataacaggggccactagtgcacctgtgcactcttgattagccactaaaatgttggggtgaatttgt

SEQ ID NO: 716737 - DNA, 655 bp, Homo sapiens
ccaaagatttcatgctataactatagagcttcaaacatcaaaaaagaatttaagctcctagaaattcaaaagacaggtcacatacaaagaagctgacttctcactatcagctatagatgccagagaagaaaggaacaatatgtttaaggtgcaaagagaaaagaatgctatacccagctaagccttccattcaagagcgagggcaagttaaatatactttcagacatacaaaggttgaaaagagttactaaaaacatacttcatcaagaataaacataagccccaagagaagaaatgagatccaagaaatgttaaataaaagggagtaaactggttttttaaagttcataaatctaaaaagaaaatttaaygtatataaataataattgtcatgtttaaaaaccaagtgaaaccaaattataccccagaaataacatacaggatgtagaggggataggagaattctaagataattgccttatttaaagggagaagagagactgacttggctttagattgtgtgagaaccatgtaaagttaagtaaatgcggtaaagtttttagtttaaccaccaaaagaatgtaattaaaaatggtcttccaaacagtggagaggccaaagggcatagcaaacactatcaagattataaaatgca

SEQ ID NO: 716738 - DNA, 655 bp, Homo sapiens
ccaaagatttcatgctataactatagagcttcaaacatcaaaaaagaatttaagctcctagaaattcaaaagacaggtcacatacaaagaagctgacttctcactatcagctatagatgccagagaagaaaggaacaatatgtttaaggtgcaaagagaaaagaatgctatacccagctaagccttccattcaagagcgagggcaagttaaatatactttcagacatacaaaggttgaaaagagttactaaaaacatacttcatcaagaataaacataagccccaagagaagaaatgagatccaagaaatgttaaataaaagggagtaaactggttttttaaagttcataaatctaaaaagaaaatttaatgtatataaataataattgtcatgtttaaaaaccaagtgaaaccaaattataccccagaaataacatacaggatgtagaggggatrggagaattctaagataattgccttatttaaagggagaagagagactgacttggctttagattgtgtgagaaccatgtaaagttaagtaaatgcggtaaagtttttagtttaaccaccaaaagaatgtaattaaaaatggtcttccaaacagtggagaggccaaagggcatagcaaacactatcaagattataaaatgca

SEQ ID NO: 716739 - DNA, 648 bp, Homo sapiens
tggtatgtttgggattatttcagtgtgttgagattacagggtatttataattttygaaaagttccttttatataactgttttgcattgtcagaatttttatggaatgtattttattagtgatcagaaaaagctaagaaactcttggaaagatgattttttaatagacagttttgtaagaacaattttagatttacagaaaactagaaaatgtagtagagttcccacagacccttatacctagttccccctacgattagtatcttacattagtatcgtacatttgttacagtttatgaaccattttggatacacatcactaactaaagtccatactttgttcagatttccttaggtttcacctaatatcctttttttttttgagatggagtttcactcttgttgcccacgctggagtgccatagcgccatcttggctcactgcaacctgtgcctcccaggttcaagccattctcctgcctcagcctcccaagtagctgggattacaggcataagccaccacggccggctaattttttgtatttttagtagagatggggtttcaccgtgttagccaggatggtcttgatctcctgacctcatgatccgcccgtctcggcctcccaaagtgctgggattacaggcgtgagc

SEQ ID NO: 716740 - DNA, 603 bp, Homo sapiens
atcttaattgatctgtttactctttgctctaaatgcttggaggggagcccaaagggccatcagtatttgtatgacaataatagcgtacatggctaaaacacwatctcttaaaatcatttctcattaagagagagggagagaaatctatagtgacatctgacaaagctgaatggtcaatctgaaaataaagaactgccaaaattaagaaagctgagaaacagctagagacaacagaacaggtcagtcgtaacagagttacggaagagatgattgtctccaattgccacagttgaaatggaatgctttgtggtctttaacaaagagataagagttcattaggcatgtcacatgtccctctgtcttaaaatgtcagagcctaatctattgccatgtggtactcgcttcccggagcttacagacctgaagtaccctcttggactggacttgcatatatcaaacaggggcaccttcatttaagttaaaatgtaagctcctctgccataaactgtaaagggaggtaaagacaagaaaacctttagggaaaaaaaaatgattctttctggctgggcgcagtggctcacaaggtcaggagattgagaccat

SEQ ID NO: 716741 - DNA, 603 bp, Homo sapiens
atcttaattgatctgtttactctttgctctaaatgcttggaggggagcccaaagggccatcagtatttgtatgacaataatagcgtacatggctaaaacactatctcttaaaatcatttctcattaagagagagggagagaaatctatagtgacatctgacaaagctgaatggtcaatctgaaaataaagaactgccaaaattaagaaagctgagaaacagctagagacaacagaacaggtcartcgtaacagagttacggaagagatgattgtctccaattgccacagttgaaatggaatgctttgtggtctttaacaaagagataagagttcattaggcatgtcacatgtccctctgtcttaaaatgtcagagcctaatctattgccatgtggtactcgcttcccggagcttacagacctgaagtaccctcttggactggacttgcatatatcaaacaggggcaccttcatttaagttaaaatgtaagctcctctgccataaactgtaaagggaggtaaagacaagaaaacctttagggaaaaaaaaatgattctttctggctgggcgcagtggctcacaaggtcaggagattgagaccat

SEQ ID NO: 716742 - DNA, 918 bp, Homo sapiens
tgtaaatgtcagcttcagattacagccatataagcacttatattcttgaaaaaattcttaactagagcaaaaatatttaggaagatattaattagaatcttagaacttttttctttaagtgagccttttcaagtgacaaagtacaataggaaaacaaggccagaatgtttctaactggagctaagtttttacatgtaatgttccctacaattaaarttgtagccatttccattaactgatcaaaaacatttattaaacaccgattatttaaaagatatacaaatttctagtagcaactaattaatgtgatttcatttctcccttccttcttctatcaagcagatacttattctataaagatcatgtgagagcctgaagctcagaagaaaggccaggcctgaaagcagatttagtatgcttctccctaaaggtgacaattacagtaacaggactggaagacagcttccactaaaagtccctagaagctgggcatggtggtgcacactcgtagcactagctactcaagaagctgaggtgaaaggttcactggagcccgggagattgaggccaaccttggaaaatagtgagactctgtctcttaaaaaaaaattcccggaaaagacaaggaaaataattaatttaaaaaaataagaggaataggaaaatactaccataatgtttcataacaaattatcccaaaactcagtcataagtcgtaagtcaaaatcataaggatttattctcatgctcagcttcactggggctgatgtgtacatattgctagagcccaggatgaagggaggctatgcaggagaacctcttcttaaggcaatgacagaagaataagcatttaaagcatttgtttaggttaagtatattcacattgaccaaagattggggttactaagaataaagcta

SEQ ID NO: 716743 - DNA, 918 bp, Homo sapiens
tgtaaatgtcagcttcagattacagccatataagcacttatattcttgaaaaaattcttaactagagcaaaaatatttaggaagatattaattagaatcttagaacttttttctttaagtgagccttttcaagtgacaaagtacaataggaaaacaaggccagaatgtttctaactggagctaagtttttacatgtaatgttccctacaattaaaattgtagccatttccattaactratcaaaaacatttattaaacaccgattatttaaaagatatacaaatttctagtagcaactaattaatgtgatttcatttctcccttccttcttctatcaagcagatacttattctataaagatcatgtgagagcctgaagctcagaagaaaggccaggcctgaaagcagatttagtatgcttctccctaaaggtgacaattacagtaacaggactggaagacagcttccactaaaagtccctagaagctgggcatggtggtgcacactcgtagcactagctactcaagaagctgaggtgaaaggttcactggagcccgggagattgaggccaaccttggaaaatagtgagactctgtctcttaaaaaaaaattcccggaaaagacaaggaaaataattaatttaaaaaaataagaggaataggaaaatactaccataatgtttcataacaaattatcccaaaactcagtcataagtcgtaagtcaaaatcataaggatttattctcatgctcagcttcactggggctgatgtgtacatattgctagagcccaggatgaagggaggctatgcaggagaacctcttcttaaggcaatgacagaagaataagcatttaaagcatttgtttaggttaagtatattcacattgaccaaagattggggttactaagaataaagcta

SEQ ID NO: 716744 - DNA, 918 bp, Homo sapiens
tgtaaatgtcagcttcagattacagccatataagcacttatattcttgaaaaaattcttaactagagcaaaaatatttaggaagatattaattagaatcttagaacttttttctttaagtgagccttttcaagtgacaaagtacaataggaaaacaaggccagaatgtttctaactggagctaagtttttacatgtaatgttccctacaattaaaattgtagccatttccattaactgatcaaaaacatttattaaacaccgattatttaaaagatatacaaatttctagtagcaactaattaatgtgatttcatttctcccttccttcttctatcaagcagatacttattctataaagatcatgtgagagcctgaagctcagaagaaaggccaggcctgaaagcagatttagtatgcttctccctaaaggtgacaattacagtaacaggactggaagacagcttccactaaaagtccctagaagctgggcatggtggtgcacactcgtagcactagctactcaagaagctgaggtgaaaggttcactggagcccgggagattgaggccaaccttggaaaayagtgagactctgtctcttaaaaaaaaattcccggaaaagacaaggaaaataattaatttaaaaaaataagaggaataggaaaatactaccataatgtttcataacaaattatcccaaaactcagtcataagtcgtaagtcaaaatcataaggatttattctcatgctcagcttcactggggctgatgtgtacatattgctagagcccaggatgaagggaggctatgcaggagaacctcttcttaaggcaatgacagaagaataagcatttaaagcatttgtttaggttaagtatattcacattgaccaaagattggggttactaagaataaagcta

SEQ ID NO: 716745 - DNA, 591 bp, Homo sapiens
tattttattttttgaaaaatatttttaaatataccatttcacccttaattttaacacataaaactttttttcttttttgtagatctgtctctatgaaagaaaagattgtaggtaggcattatgcaatctatcagtgaaagggatgtgtgaatgtgcccttgagtaccagccattagaatgacagatcactgcattttctcttcagttagaaattctactacccctggaaatactgataactttttggaagactgtatctataccgtttcatctagtctttattgatatatgattttaaaatattttmttggttggtacagacagcactaatgatgcatgtagcttgccaaaatagacatttttgtttataaatgttaggagaattttgtataatcttagataccacataccttacctggggaaactgaaaatgaaatatcacattttattttcgtatttgactttccaaagtcggataccataaatatgagctttgaaatttattgagctccaatgatgttctttgccagatcaaatattctactgcaatttcaatttactaaatttatgtgtgaaaattaaaatttaatc

SEQ ID NO: 716746 - DNA, 1893 bp, Homo sapiens
gctttctgataggcccagggcccccaagttattttgggatgtctaggtgagaaattcacaggtatttgcaagcatagataaatccttggctgggcttcgaggcttctaaaaaagtacaattttagattccttatggaacaaaatttcagcaaagtcaatattaaaatcagtctatatggaaaataattatttctacttctctttatgcaaataatcaggcagagcatgttaagattaaaacaaattttacaagtaaatttgacctaccttaatttattttcaataaaaatggaaactagagagaaaaattatgcttaaaaaaatccataatacacctgttgttagttgttcttgagtttttctatttttctgaagtttggagtaaatcctaaattttttgtgggctacaaatctcctaactaatgtttcaaatctttacttttaaaacttggaatttcactccttatccaagaactcattatttaccttatagtatgctgtttccttaaatgctgtactaaaactatagataagaatactactgcctttgtcatgcaagccttggaaccccagcctggcctgcatgagtatgttaaaactgttgcaaagaggttctactcctttcaccttggggtcaattacacctaccctcactatacccctagtcagcaggaagaggttagagcagtcttcagcctttttccatcttctttagccaacaccttgagattaagatgttataaaacccaaagggaggaactgaaaccaccactgcaaaattataagtgagacaatgaaagaaacctgatctaaccaaccccatcttgcttctaacctccacgttattctcattcattcctggccgtaggccgaattaactttgggaggaacttagtttatagtttataatttgaaacaaagatgataataaccctttcccaatacaaacccctttctttcctgggaactagactgcstttgtaggactaataaattagtcaaaagattagaaattatggtttaggagtcatgcagctgaaatctgctagattctgacccttcccaaattgctcctaggataacattgccactgtaaaatctaagatcagggcttaagatattttgcaggccttgcatctgatggatcatctggtatcacccacattgataaactagctcatctgttcttgccgcccccacctgggaactgactcagcataagaagacagcttcaattccctatgacttcatctctgacccaattgatttgagtaataataaaactctgctgtcccgcaaaataaataaataaataaataaattcacaaaggaaattagaaaatatttaacagaatgacattattatttatcgttaattgtattgatacctatgatactatatatcaataatccttatttaggtacagaaatcacactagatagcattgcaaaaatagacacaatgtaacagaatacataatccacaaaaagcccaggtatatattgatacctgaattatgacaaaagggtcattgcaaaatgataaggaaaggaccatgttctcaataactggtagtagatagattggaaattcatatgaaaactttcccctaccttatgcatgaaaatacacgtacagaataatatttatagaagcagtctctgcactggtcttaaagccaaactgctgcaaatgcatatcaacaatagaatggataaacatacaatagatatacaatgaatataagatatgcaatggatttacagtatacaatagaacataacttgccaataaaataaactacagctatatggaaaaacttggatttatatctcaaatataatattaaacaaaagaagccagatattcattggattattatactcataaaa

SEQ ID NO: 716747 - DNA, 1893 bp, Homo sapiens
gctttctgataggcccagggcccccaagttattttgggatgtctaggtgagaaattcacaggtatttgcaagcatagataaatccttggctgggcttcgaggcttctaaaaaagtacaattttagattccttatggaacaaaatttcagcaaagtcaatattaaaatcagtctatatggaaaataattatttctacttctctttatgcaaataatcaggcagagcatgttaagattaaaacaaattttacaagtaaatttgacctaccttaatttattttcaataaaaatggaaactagagagaaaaattatgcttaaaaaaatccataatacacctgttgttagttgttcttgagtttttctatttttctgaagtttggagtaaatcctaaattttttgtgggctacaaatctcctaactaatgtttcaaatctttacttttaaaacttggaatttcactccttatccaagaactcattatttaccttatagtatgctgtttccttaaatgctgtactaaaactatagataagaatactactgcctttgtcatgcaagccttggaaccccagcctggcctgcatgagtatgttaaaactgttgcaaagaggttctactcctttcaccttggggtcaattacacctaccctcactatacccctagtcagcaggaagaggttagagcagtcttcagcctttttccatcttctttagccaacaccttgagattaagatgttataaaacccaaagggaggaactgaaaccaccactgcaaaattataagtgagacaatgaaagaaacctgatctaaccaaccccatcttgcttctaacctccacgttattctcattcattcctggccgtaggccgaattaactttgggaggaacttagtttatagtttataatttgaaacaaagatgataataaccctttcccaatacaaacccctttctttcctgggaactagactgcgtttgtaggactaataaattagtcaaaagattagaaattatggtttaggagtcatgcagctgaaatctgctagattctgacccttcccaaattgctcctaggataacattgccactgtaaaatctaagatcagggcttaagatattttgcaggccttgcatctgatggatcatctggtatcacccacattgataaactagctcatctgttcttgcygcccccacctgggaactgactcagcataagaagacagcttcaattccctatgacttcatctctgacccaattgatttgagtaataataaaactctgctgtcccgcaaaataaataaataaataaataaattcacaaaggaaattagaaaatatttaacagaatgacattattatttatcgttaattgtattgatacctatgatactatatatcaataatccttatttaggtacagaaatcacactagatagcattgcaaaaatagacacaatgtaacagaatacataatccacaaaaagcccaggtatatattgatacctgaattatgacaaaagggtcattgcaaaatgataaggaaaggaccatgttctcaataactggtagtagatagattggaaattcatatgaaaactttcccctaccttatgcatgaaaatacacgtacagaataatatttatagaagcagtctctgcactggtcttaaagccaaactgctgcaaatgcatatcaacaatagaatggataaacatacaatagatatacaatgaatataagatatgcaatggatttacagtatacaatagaacataacttgccaataaaataaactacagctatatggaaaaacttggatttatatctcaaatataatattaaacaaaagaagccagatattcattggattattatactcataaaa

SEQ ID NO: 716748 - DNA, 510 bp, Homo sapiens
atagamgtttaggaatttttgttaaatgaacctaaaacttgtgtaattactggaacatgatccagatagaaagaataaagtgttggtcagcaaaacacagaattttaggcatacaatgagaaaggaagagttttgacatcctttcaaacacaagaaagctcgagaaaatagaatgaagttcagcggtattgttcatattctgagtaaaatgtattaagtggaagaacccaagagcctcccaagtaccgtacctgttattttttcctgctttcacagtggtgaaaaatggtactaaaccacactatgctacctgtaggaatctacgcatggaataaaacaactgaacaacacaatctcaggaggagacgaacttcattttactggtgacatcaccagggtcaatttaagttggggaagttgctgccttagtttctcccctactgcacccttgtgcttataaagacgatttagggaccatgagtgtagaaacacccagttgttcacaacctt

SEQ ID NO: 716749 - DNA, 510 bp, Homo sapiens
atagaagtttaggaatttttgttaaatgaacctaaaacttgtgtaattactggaacatgatccagatagaaagaataaagtgttggtcagcaaaacacagaattttaggcatacaatgagaaaggaagagttttgacatcctttcaaacacaagaaagctcgagaaaatagaatgaagttcagcggtattgttcatattctgagtaaaatgtattaagtggaagaacccaagagcctcccaagtaccgtacctgttaktttttcctgctttcacagtggtgaaaaatggtactaaaccacactatgctacctgtaggaatctacgcatggaataaaacaactgaacaacacaatctcaggaggagacgaacttcattttactggtgacatcaccagggtcaatttaagttggggaagttgctgccttagtttctcccctactgcacccttgtgcttataaagacgatttagggaccatgagtgtagaaacacccagttgttcacaacctt

SEQ ID NO: 716750 - DNA, 510 bp, Homo sapiens
atagaagtttaggaatttttgttaaatgaacctaaaacttgtgtaattactggaacatgatccagatagaaagaataaagtgttggtcagcaaaacacagaattttaggcatacaatgagaaaggaagagttttgacatcctttcaaacacaagaaagctcgagaaaatagaatgaagttcagcggtattgttcatattctgagtaaaatgtattaagtggaagaacccaagagcctcccaagtaccgtacctgttattttttcctgctttcacagtggtgaaaaatggtactaaaccacactatgctacctgtaggaatctaygcatggaataaaacaactgaacaacacaatctcaggaggagacgaacttcattttactggtgacatcaccagggtcaatttaagttggggaagttgctgccttagtttctcccctactgcacccttgtgcttataaagacgatttagggaccatgagtgtagaaacacccagttgttcacaacctt

SEQ ID NO: 716751 - DNA, 2955 bp, Homo sapiens
tcagaaaggaatcaaggtgtgcttaagagcaatggaattcttttagaagtctctatttttaaaaaggtaggtcagcacaaatgacttttttataacttgagtaatgatttttcttattctctgttctgtaccatctgaaggaaattaggaccatgccttgtctacttgttgttaaattagacatatgaagaaaacaaaatttggggctcttttagaatataattttcttttctttctctaaacttttgaaaactagagtcttgataataaaaatattttataattgaacacaattaataaatatctcaaatacattcaaaaacagtctgatatttatgacatagtatctctcctgaactattcctagactgagggggtcattctggattaatatgaactccttaaatcctcaagacaaaactgggttggaatgatggattctccatttattagattggtatagtcttgccacagtattttgctgcctaggaaaaatgcatactgatctctatactactggttagaaaggtctgctaggtagctagatgtgccgctagtaaaatcctgtaatgagcgaatgtatggaaaagaacatattgtcagatacatttttgacttaatgatttagataggcccttttatccctcttcatgttgtattagcatactaaagaagtaatattgtatgattctttacataattttctaccttagtctaccttgaaggactaatgtccagctaatcaatgaacaaagaaacaccaggcttccaggttgatatggtttggctctatgtccccacccaaatctcatgttgaattgtaatcctcagtgttgaaggagggacctggctgaaggtgattggatcatgctggtggatttccccattactgttctcattagagcgaatgagctctcacgagatctggttgtttaaatgtgtgtaacacctcccccttcactctctctcctgctctggccatgtgaatactgtgcttgcctccccttcaccttctgccatgattgtaagtttcctgaggccatccaagccatgtgtcctgaacagcctgtggaactttgagccaatgaaacctcttttcttcatgtactactcagtctcaggtagttctttatagtaatgcgagactggaccaatacacaggttaaattgctgacagggcatatggaaatgttctcctctatcacttaaagataaatgaaaacaagagaaggaagcaactcccaaatagtaaggagaatgtgaggaaagtgaacagcaaaattgagatgttgcgttaccagtaacaacaataaagaatagccacaggctcagaagagacttgaatcagaaattagaggtgatctttctgcagagatctgaagggactacaaattaggaatcagtgagaagagatggtaggttaaaagtatgggacagaaatgtgtagcaattcctctctagggaatgtctatagattagctttgccgcctgacatcactgttcacccatgcatggtatttacttccaggcaaaatcatttgcactgtttgacctttacaattgcaaaatatgcctggagacatcagggatgtctcatgggtattgataccccacaaagttcctctccatattgttgcacagaggttagggaggggcaattattagccattgatttattcattctttctacaaatatttgtgcaggtagtcttctagattttgagaatatagaagttaatcaaacaatcaaaaccctctggcatcatgagtgtgtattctgcaggaggaagggaaagaaagccaataaatgcataaatagatatattgtatatattgtatgtatggatatgtggtatggaggatatgaaacaggcaagaggagtaggaagtgtctgtgtacatgtatatggtgggaggggggtcacagtcaagtggaaataccttgggtaaaagtgcaacatgacataattatctgtccattcagggggatttcaccatgttgttaaaaactgtctatgtaaagacagaaacatttaaaaaataataatctttgtggccttctcactaattggtcgttctatgtcaagctactgtaatttttgtacattaacctccacaggtgggaactaaaataacatgttactatgaccagactgatataacatttaaataatttaaaattaaatctatttttaaattccaaaagacaaggcaattttatgctttaaaaagttttctttttactctttgtaatttaaataaacttttcttttgaatataatgaaaatctagtttcaagataaaatcaagttcaatatgcatataatgaagaaaatacattggtttgttatggcaaaattaatttcccattgtataaaatattaataaaccatcaaactgggagtcaaaaactctagcattttgatctagagttttgatmtaatcattttgatttactcattttctacagttctttgaatttctccaatatatgtatattccccaaattattctcttagatgtcatttattttttaaaaacagtacttaaaatgtaactaaagaaacagaaaactgcttactgaaattgcattcattttttgaagttcaatgggaatataacatttcagcaaatgatagaattaaatatttttgtgtctaaatttaaaatgctagtagaagccttggcatttaaacacaaataagataataaaatactcaaagcataatcttaattgtttatgatttagataaataaaatttggtgggaataaatcaaaaaagaatgcacaatattgaaacttttgagtcggataaacgaataatgactaatcctcaagcttctacatcctacaatatccaagaattattttgttaatttagtttgccttgttaaagtataaatttctttctccaaaacctacttcccaacctctcaatctcctgaaaactggag

SEQ ID NO: 716752 - DNA, 2955 bp, Homo sapiens
tcagaaaggaatcaaggtgtgcttaagagcaatggaattcttttagaagtctctatttttaaaaaggtaggtcagcacaaatgacttttttataacttgagtaatgatttttcttattctctgttctgtaccatctgaaggaaattaggaccatgccttgtctacttgttgttaaattagacatatgaagaaaacaaaatttggggctcttttagaatataattttcttttctttctctaaacttttgaaaactagagtcttgataataaaaatattttataattgaacacaattaataaatatctcaaatacattcaaaaacagtctgatatttatgacatagtatctctcctgaactattcctagactgagggggtcattctggattaatatgaactccttaaatcctcaagacaaaactgggttggaatgatggattctccatttattagattggtatagtcttgccacagtattttgctgcctaggaaaaatgcatactgatctctatactactggttagaaaggtctgctaggtagctagatgtgccgctagtaaaatcctgtaatgagcgaatgtatggaaaagaacatattgtcagatacatttttgacttaatgatttagataggcccttttatccctcttcatgttgtattagcatactaaagaagtaatattgtatgattctttacataattttctaccttagtctaccttgaaggactaatgtccagctaatcaatgaacaaagaaacaccaggcttccaggttgatatggtttggctctatgtccccacccaaatctcatgttgaattgtaatcctcagtgttgaaggagggacctggctgaaggtgattggatcatgctggtggatttccccattactgttctcattagagcgaatgagctctcacgagatctggttgtttaaatgtgtgtaacacctcccccttcactctctctcctgctctggccatgtgaatactgtgcttgcctccccttcaccttctgccatgattgtaagtttcctgaggccatccaagccatgtgtcctgaacagcctgtggaactttgagccaatgaaacctcttttcttcatgtactactcagtctcaggtagttctttatagtaatgcgagactggaccaatacacaggttaaattgctgacagggcatatggaaatgttctcctctatcacttaaagataaatgaaaacaagagaaggaagcaactcccaaatagtaaggagaatgtgaggaaagtgaacagcaaaattgagatgttgcgttaccagtaacaacaataaagaatagccacaggctcagaagagacttgaatcagaaattagaggtgatctttctgcagagatctgaagggactacaaattaggaatcagtgagaagagatggtaggttaaaagtatgggacagaaatgtgtagcaattcctctctagggaatgtctatagattagctttgccgcctgacatcactgttcacccatgcatggtatttacttccaggcaaaatcatttgcactgtttgacctttacaattgcaaaatatgcctggagacatcagggatgtctcatgggtattgataccccacaaagttcctctccatattgttgcacagaggttagggaggggcaattattagccattgatttattcattctttctacaaatatttgtgcaggtagtcttctagattttgagaatatagaagttaatcaaacaatcaaaaccctctggcatcatgagtgtgtattctgcaggaggaagggaaagaaagccaataaatgcataaatagatatattgtatatattgtatgtatggatatgtggtatggaggatatgaaacaggcaagaggagtaggaagtgtctgtgtacatgtatatggtgggaggggggtcacagtcaagtggaaataccttgggtaaaagtgcaacatgacataattatctgtccattcagggggatttcaccatgttgttaaaaactgtctatgtaaagacagaaacatttaaaaaataataatctttgtggccttctcactaattggtcgttctatgtcaagctactgtaatttttgtacattaacctccacaggtgggaactaaaataacatgttactatgaccagactgatataacatttaaataatttaaaattaaatctatttttaaattccaaaagacaaggcaattttatgctttaaaaagttttctttttactctttgtaatttaaataaacttttcttttgaatataatgaaaatctagtttcaagataaaatcaagttcaatatgcatataatgaagaaaatacattggtttgttatggcaaaattaatttcccattgtataaaatattaataaaccatcaaactgggagtcaaaaactctagcattttgatctagagttttgatctaatcattttgatttactcattttctacagttctttgaatttctccaatatatgtatattccccaaattattctcttagatgtcatttattttttaaaaacagtacttaaaatgtaactaaagaaacagaaaactgcttactgaaattgcrttcattttttgaagttcaatgggaatataacatttcagcaaatgatagaattaaatatttttgtgtctaaatttaaaatgctagtagaagccttggcatttaaacacaaataagataataaaatactcaaagcataatcttaattgtttatgatttagataaataaaatttggtgggaataaatcaaaaaagaatgcacaatattgaaacttttgagtcggataaacgaataatgactaatcctcaagcttctacatcctacaatatccaagaattattttgttaatttagtttgccttgttaaagtataaatttctttctccaaaacctacttcccaacctctcaatctcctgaaaactggag

SEQ ID NO: 716753 - DNA, 2955 bp, Homo sapiens
tcagaaaggaatcaaggtgtgcttaagagcaatggaattcttttagaagtctctatttttaaaaaggtaggtcagcacaaatgacttttttataacttgagtaatgatttttcttattctctgttctgtaccatctgaaggaaattaggaccatgccttgtctacttgttgttaaattagacatatgaagaaaacaaaatttggggctcttttagaatataattttcttttctttctctaaacttttgaaaactagagtcttgataataaaaatattttataattgaacacaattaataaatatctcaaatacattcaaaaacagtctgatatttatgacatagtatctctcctgaactattcctagactgagggggtcattctggattaatatgaactccttaaatcctcaagacaaaactgggttggaatgatggattctccatttattagattggtatagtcttgccacagtattttgctgcctaggaaaaatgcatactgatctctatactactggttagaaaggtctgctaggtagctagatgtgccgctagtaaaatcctgtaatgagcgaatgtatggaaaagaacatattgtcagatacatttttgacttaatgatttagataggcccttttatccctcttcatgttgtattagcatactaaagaagtaatattgtatgattctttacataattttctaccttagtctaccttgaaggactaatgtccagctaatcaatgaacaaagaaacaccaggcttccaggttgatatggtttggctctatgtccccacccaaatctcatgttgaattgtaatcctcagtgttgaaggagggacctggctgaaggtgattggatcatgctggtggatttccccattactgttctcattagagcgaatgagctctcacgagatctggttgtttaaatgtgtgtaacacctcccccttcactctctctcctgctctggccatgtgaatactgtgcttgcctccccttcaccttctgccatgattgtaagtttcctgaggccatccaagccatgtgtcctgaacagcctgtggaactttgagccaatgaaacctcttttcttcatgtactactcagtctcaggtagttctttatagtaatgcgagactggaccaatacacaggttaaattgctgacagggcatatggaaatgttctcctctatcacttaaagataaatgaaaacaagagaaggaagcaactcccaaatagtaaggagaatgtgaggaaagtgaacagcaaaattgagatgttgcgttaccagtaacaacaataaagaatagccacaggctcagaagagacttgaatcagaaattagaggtgatctttctgcagagatctgaagggactacaaattaggaatcagtgagaagagatggtaggttaaaagtatgggacagaaatgtgtagcaattcctctctagggaatgtctatagattagctttgccgcctgacatcactgttcacccatgcatggtatttacttccaggcaaaatcatttgcactgtttgacctttacaattgcaaaatatgcctggagacatcagggatgtctcatgggtattgataccccacaaagttcctctccatattgttgcacagaggttagggaggggcaattattagccattgatttattcattctttctacaaatatttgtgcaggtagtcttctagattttgagaatatagaagttaatcaaacaatcaaaaccctctggcatcatgagtgtgtattctgcaggaggaagggaaagaaagccaataaatgcataaatagatatattgtatatattgtatgtatggatatgtggtatggaggatatgaaacaggcaagaggagtaggaagtgtctgtgtacatgtatatggtgggaggggggtcacagtcaagtggaaataccttgggtaaaagtgcaacatgacataattatctgtccattcagggggatttcaccatgttgttaaaaactgtctatgtaaagacagaaacatttaaaaaataataatctttgtggccttctcactaattggtcgttctatgtcaagctactgtaatttttgtacattaacctccacaggtgggaactaaaataacatgttactatgaccagactgatataacatttaaataatttaaaattaaatctatttttaaattccaaaagacaaggcaattttatgctttaaaaagttttctttttactctttgtaatttaaataaacttttcttttgaatataatgaaaatctagtttcaagataaaatcaagttcaatatgcatataatgaagaaaatacattggtttgttatggcaaaattaatttcccattgtataaaatattaataaaccatcaaactgggagtcaaaaactctagcattttgatctagagttttgatctaatcattttgatttactcattttctacagttctttgaatttctccaatatatgtatattccccaaattattctcttagatgtcatttattttttaaaaacagtacttaaaatgtaactaaagaaacagaaaactgcttactgaaattgcattcattttttgaagttcaatgggaatataacatttcagcaaatgatagaattaaatatttttgtgtctaaatttaaaatgctagtagaagccttggcatttaaacacaaataagataataaaatactcaaagcataatcttaattgyttatgatttagataaataaaatttggtgggaataaatcaaaaaagaatgcacaatattgaaacttttgagtcggataaacgaataatgactaatcctcaagcttctacatcctacaatatccaagaattattttgttaatttagtttgccttgttaaagtataaatttctttctccaaaacctacttcccaacctctcaatctcctgaaaactggag

SEQ ID NO: 716754 - DNA, 2955 bp, Homo sapiens
tcagaaaggaatcaaggtgtgcttaagagcaatggaattcttttagaagtctctatttttaaaaaggtaggtcagcacaaatgacttttttataacttgagtaatgatttttcttattctctgttctgtaccatctgaaggaaattaggaccatgccttgtctacttgttgttaaattagacatatgaagaaaacaaaatttggggctcttttagaatataattttcttttctttctctaaacttttgaaaactagagtcttgataataaaaatattttataattgaacacaattaataaatatctcaaatacattcaaaaacagtctgatatttatgacatagtatctctcctgaactattcctagactgagggggtcattctggattaatatgaactccttaaatcctcaagacaaaactgggttggaatgatggattctccatttattagattggtatagtcttgccacagtattttgctgcctaggaaaaatgcatactgatctctatactactggttagaaaggtctgctaggtagctagatgtgccgctagtaaaatcctgtaatgagcgaatgtatggaaaagaacatattgtcagatacatttttgacttaatgatttagataggcccttttatccctcttcatgttgtattagcatactaaagaagtaatattgtatgattctttacataattttctaccttagtctaccttgaaggactaatgtccagctaatcaatgaacaaagaaacaccaggcttccaggttgatatggtttggctctatgtccccacccaaatctcatgttgaattgtaatcctcagtgttgaaggagggacctggctgaaggtgattggatcatgctggtggatttccccattactgttctcattagagcgaatgagctctcacgagatctggttgtttaaatgtgtgtaacacctcccccttcactctctctcctgctctggccatgtgaatactgtgcttgcctccccttcaccttctgccatgattgtaagtttcctgaggccatccaagccatgtgtcctgaacagcctgtggaactttgagccaatgaaacctcttttcttcatgtactactcagtctcaggtagttctttatagtaatgcgagactggaccaatacacaggttaaattgctgacagggcatatggaaatgttctcctctatcacttaaagataaatgaaaacaagagaaggaagcaactcccaaatagtaaggagaatgtgaggaaagtgaacagcaaaattgagatgttgcgttaccagtaacaacaataaagaatagccacaggctcagaagagacttgaatcagaaattagaggtgatctttctgcagagatctgaagggactacaaattaggaatcagtgagaagagatggtaggttaaaagtatgggacagaaatgtgtagcaattcctctctagggaatgtctatagattagctttgccgcctgacatcactgttcacccatgcatggtatttacttccaggcaaaatcatttgcactgtttgacctttacaattgcaaaatatgcctggagacatcagggatgtctcatgggtattgataccccacaaagttcctctccatattgttgcacagaggttagggaggggcaattattagccattgatttattcattctttctacaaatatttgtgcaggtagtcttctagattttgagaatatagaagttaatcaaacaatcaaaaccctctggcatcatgagtgtgtattctgcaggaggaagggaaagaaagccaataaatgcataaatagatatattgtatatattgtatgtatggatatgtggtatggaggatatgaaacaggcaagaggagtaggaagtgtctgtgtacatgtatatggtgggaggggggtcacagtcaagtggaaataccttgggtaaaagtgcaacatgacataattatctgtccattcagggggatttcaccatgttgttaaaaactgtctatgtaaagacagaaacatttaaaaaataataatctttgtggccttctcactaattggtcgttctatgtcaagctactgtaatttttgtacattaacctccacaggtgggaactaaaataacatgttactatgaccagactgatataacatttaaataatttaaaattaaatctatttttaaattccaaaagacaaggcaattttatgctttaaaaagttttctttttactctttgtaatttaaataaacttttcttttgaatataatgaaaatctagtttcaagataaaatcaagttcaatatgcatataatgaagaaaatacattggtttgttatggcaaaattaatttcccattgtataaaatattaataaaccatcaaactgggagtcaaaaactctagcattttgatctagagttttgatctaatcattttgatttactcattttctacagttctttgaatttctccaatatatgtatattccccaaattattctcttagatgtcatttattttttaaaaacagtacttaaaatgtaactaaagaaacagaaaactgcttactgaaattgcattcattttttgaagttcaatgggaatataacatttcagcaaatgatagaattaaatatttttgtgtctaaatttaaaatgctagtagaagccttggcatttaaacacaaataagataataaaatactcaaagcataatcttaattgtttatgatttagataaataaaatttggtgggaataaatcaaaaaagaatgcacaatattgaaacttttgagtyggataaacgaataatgactaatcctcaagcttctacatcctacaatatccaagaattattttgttaatttagtttgccttgttaaagtataaatttctttctccaaaacctacttcccaacctctcaatctcctgaaaactggag

SEQ ID NO: 716755 - DNA, 2955 bp, Homo sapiens
tcagaaaggaatcaaggtgtgcttaagagcaatggaattcttttagaagtctctatttttaaaaaggtaggtcagcacaaatgacttttttataacttgagtaatgatttttcttattctctgttctgtaccatctgaaggaaattaggaccatgccttgtctacttgttgttaaattagacatatgaagaaaacaaaatttggggctcttttagaatataattttcttttctttctctaaacttttgaaaactagagtcttgataataaaaatattttataattgaacacaattaataaatatctcaaatacattcaaaaacagtctgatatttatgacatagtatctctcctgaactattcctagactgagggggtcattctggattaatatgaactccttaaatcctcaagacaaaactgggttggaatgatggattctccatttattagattggtatagtcttgccacagtattttgctgcctaggaaaaatgcatactgatctctatactactggttagaaaggtctgctaggtagctagatgtgccgctagtaaaatcctgtaatgagcgaatgtatggaaaagaacatattgtcagatacatttttgacttaatgatttagataggcccttttatccctcttcatgttgtattagcatactaaagaagtaatattgtatgattctttacataattttctaccttagtctaccttgaaggactaatgtccagctaatcaatgaacaaagaaacaccaggcttccaggttgatatggtttggctctatgtccccacccaaatctcatgttgaattgtaatcctcagtgttgaaggagggacctggctgaaggtgattggatcatgctggtggatttccccattactgttctcattagagcgaatgagctctcacgagatctggttgtttaaatgtgtgtaacacctcccccttcactctctctcctgctctggccatgtgaatactgtgcttgcctccccttcaccttctgccatgattgtaagtttcctgaggccatccaagccatgtgtcctgaacagcctgtggaactttgagccaatgaaacctcttttcttcatgtactactcagtctcaggtagttctttatagtaatgcgagactggaccaatacacaggttaaattgctgacagggcatatggaaatgttctcctctatcacttaaagataaatgaaaacaagagaaggaagcaactcccaaatagtaaggagaatgtgaggaaagtgaacagcaaaattgagatgttgcgttaccagtaacaacaataaagaatagccacaggctcagaagagacttgaatcagaaattagaggtgatctttctgcagagatctgaagggactacaaattaggaatcagtgagaagagatggtaggttaaaagtatgggacagaaatgtgtagcaattcctctctagggaatgtctatagattagctttgccgcctgacatcactgttcacccatgcatggtatttacttccaggcaaaatcatttgcactgtttgacctttacaattgcaaaatatgcctggagacatcagggatgtctcatgggtattgataccccacaaagttcctctccatattgttgcacagaggttagggaggggcaattattagccattgatttattcattctttctacaaatatttgtgcaggtagtcttctagattttgagaatatagaagttaatcaaacaatcaaaaccctctggcatcatgagtgtgtattctgcaggaggaagggaaagaaagccaataaatgcataaatagatatattgtatatattgtatgtatggatatgtggtatggaggatatgaaacaggcaagaggagtaggaagtgtctgtgtacatgtatatggtgggaggggggtcacagtcaagtggaaataccttgggtaaaagtgcaacatgacataattatctgtccattcagggggatttcaccatgttgttaaaaactgtctatgtaaagacagaaacatttaaaaaataataatctttgtggccttctcactaattggtcgttctatgtcaagctactgtaatttttgtacattaacctccacaggtgggaactaaaataacatgttactatgaccagactgatataacatttaaataatttaaaattaaatctatttttaaattccaaaagacaaggcaattttatgctttaaaaagttttctttttactctttgtaatttaaataaacttttcttttgaatataatgaaaatctagtttcaagataaaatcaagttcaatatgcatataatgaagaaaatacattggtttgttatggcaaaattaatttcccattgtataaaatattaataaaccatcaaactgggagtcaaaaactctagcattttgatctagagttttgatctaatcattttgatttactcattttctacagttctttgaatttctccaatatatgtatattccccaaattattctcttagatgtcatttattttttaaaaacagtacttaaaatgtaactaaagaaacagaaaactgcttactgaaattgcattcattttttgaagttcaatgggaatataacatttcagcaaatgatagaattaaatatttttgtgtctaaatttaaaatgctagtagaagccttggcatttaaacacaaataagataataaaatactcaaagcataatcttaattgtttatgatttagataaataaaatttggtgggaataaatcaaaaaagaatgcacaatattgaaacttttgagtcggataaacgaataatgactaatcctcaagcttctacatcctacaatatccaagaattattttgttaatttagtttgccttgttaaagtataaatttctttctccaaaacctacttcccaacctctcaatctyctgaaaactggag

SEQ ID NO: 716756 - DNA, 2214 bp, Homo sapiens
gacatgcctttttcatgcaaattgtttgctttatgatttccaagtagtgcgtcttgtaaagtcctagtctgttactctgtgaagtcatcttagaccatgtgtgtcacctaccaacttgcactacagtttttttttaaattatttcctatagataaaattcttgcttaactaactgggttctaagatagaaattattgtttcagagagcaagagtaagttgtaatgcctgaactctcacttgcaccaactttggtttcataatgcagaaagtaattaaacaacatataattaaatctcaagataggacagtccccacccatgcatacacatgtattcagaattcatagaacacaaacacaattacttctcttataatggctttttcagacatcagagagcatttctcatacagtcttayggatttcagcacaggtattatgagtttatcatacagatgaaaaatgctattatatgagcatgttctttgtgttactagtctctccagtgcagtttctcttgtgggacaaaaataacttggatggttttaaaaattaaaaatctgaaccaaataacaaggaaataaggcaatacaagccagggacaatattttcttaaaactatcttcctgggttttaattgtattttcctatcaggtaatacgcatccagcgagaatccataataggtatttcaaagagaggaaatttaatacagagaactgattacatagctgttggaagttgaaagaatcaacagagtaagtggaagaatttggggattaataacagcaagaaacagcttaaatcaccacagctgaagaaatcagagatgtgaatgttgtatttggggatttcttgtggtccttgttaattagctttcaaatgggtgactttttccctttgattcaatttgtgtcaaagatgagccttagacataatgtgatattcaagtggtttattatggcaacattctcaaaagagggacagtgggaggaggccagtggtatgggccaaaaacagtcaggtagatctctgtctgaagactattctcagagattacgggattcttcttccttttttatatctgtgttaatgcagggtcagttaccaggtatttcttttagaaaggtaatttaagctattcttgtaagggcaagctttgtttcaaggtttatgagaattctatctgtgctgaggtggtcttgtctcctggaaatcccctggccaggttgcatcatactgctaagtgacacatgtagacactttatcttacagacattttatgtctctcatggtattctccagtgaggttcccacacattcgtgtagctgcacatgtggctggtgtttggatttcaggaggagccacacttaggctagtgctcagacctgtggaggggtagacgctgcatggctgcttctcaaacgacgaagatagctcactgggatggtactaggggtacagaaggaagctggagttccctggaacagtaaacccaactctgtttccctcctctcatctatcagttatttcccaatggctccatggtcagattctacgaggaagtcagctaaaagaaagctggagatactattcacagactcccaggcctcgtagcacatagcagagtatagaagggtaagggaatggctgagaggcaatatgtgaaaaatcaacatataatcaatacttttatctataatatgtaaataactgacatacacatttttcacacaatctgtctctccaaatactgaggcaagaagttcaaatcccatagcttgatgtacagaaatttaaatcatatagttcttaactatttcttcattaggtacttcaactcttacgataaccttatcaaggtcaaattttctttatacaaattttacctgctgagagaatattagatatcattagaaaagaagccattaaaatagataaatttacaagtaactcatttagataatttaaaaataaaattttgaattcaccacagaatgtcatttttttcattttttaattcaggaagtaaaatataaattgttttagctattcttcagtaaaagtaaatcaaatagcttttgagtctaatttcgtgtacaaatatgttagatatttccaaataaatttgtctttaaaataatttatgttgtagtaattttttgaagtactacgctaaggaaataaaaaacaacttcaaaatgctacacagcca

SEQ ID NO: 716757 - DNA, 2214 bp, Homo sapiens
gacatgcctttttcatgcaaattgtttgctttatgatttccaagtagtgcgtcttgtaaagtcctagtctgttactctgtgaagtcatcttagaccatgtgtgtcacctaccaacttgcactacagtttttttttaaattatttcctatagataaaattcttgcttaactaactgggttctaagatagaaattattgtttcagagagcaagagtaagttgtaatgcctgaactctcacttgcaccaactttggtttcataatgcagaaagtaattaaacaacatataattaaatctcaagataggacagtccccacccatgcatacacatgtattcagaattcatagaacacaaacacaattacttctcttataatggctttttcagacatcagagagcatttctcatacagtcttatggatttcagcacaggtattatgagtttatcatacagatgaaaaatgctattatatgagcatgttctttgtgttactagtctctccagtgcagtttctcttgtgggacaaaaataacttggatggttttaaaaattaaaaatctgaaccaaataacaaggaaataaggcaatacaagccagggacaatattttcttaaaactatcttcctgggttttaattgtattttcctatcaggtaatacrcatccagcgagaatccataataggtatttcaaagagaggaaatttaatacagagaactgattacatagctgttggaagttgaaagaatcaacagagtaagtggaagaatttggggattaataacagcaagaaacagcttaaatcaccacagctgaagaaatcagagatgtgaatgttgtatttggggatttcttgtggtccttgttaattagctttcaaatgggtgactttttccctttgattcaatttgtgtcaaagatgagccttagacataatgtgatattcaagtggtttattatggcaacattctcaaaagagggacagtgggaggaggccagtggtatgggccaaaaacagtcaggtagatctctgtctgaagactattctcagagattacgggattcttcttccttttttatatctgtgttaatgcagggtcagttaccaggtatttcttttagaaaggtaatttaagctattcttgtaagggcaagctttgtttcaaggtttatgagaattctatctgtgctgaggtggtcttgtctcctggaaatcccctggccaggttgcatcatactgctaagtgacacatgtagacactttatcttacagacattttatgtctctcatggtattctccagtgaggttcccacacattcgtgtagctgcacatgtggctggtgtttggatttcaggaggagccacacttaggctagtgctcagacctgtggaggggtagacgctgcatggctgcttctcaaacgacgaagatagctcactgggatggtactaggggtacagaaggaagctggagttccctggaacagtaaacccaactctgtttccctcctctcatctatcagttatttcccaatggctccatggtcagattctacgaggaagtcagctaaaagaaagctggagatactattcacagactcccaggcctcgtagcacatagcagagtatagaagggtaagggaatggctgagaggcaatatgtgaaaaatcaacatataatcaatacttttatctataatatgtaaataactgacatacacatttttcacacaatctgtctctccaaatactgaggcaagaagttcaaatcccatagcttgatgtacagaaatttaaatcatatagttcttaactatttcttcattaggtacttcaactcttacgataaccttatcaaggtcaaattttctttatacaaattttacctgctgagagaatattagatatcattagaaaagaagccattaaaatagataaatttacaagtaactcatttagataatttaaaaataaaattttgaattcaccacagaatgtcatttttttcattttttaattcaggaagtaaaatataaattgttttagctattcttcagtaaaagtaaatcaaatagcttttgagtctaatttcgtgtacaaatatgttagatatttccaaataaatttgtctttaaaataatttatgttgtagtaattttttgaagtactacgctaaggaaataaaaaacaacttcaaaatgctacacagcca

SEQ ID NO: 716758 - DNA, 2214 bp, Homo sapiens
gacatgcctttttcatgcaaattgtttgctttatgatttccaagtagtgcgtcttgtaaagtcctagtctgttactctgtgaagtcatcttagaccatgtgtgtcacctaccaacttgcactacagtttttttttaaattatttcctatagataaaattcttgcttaactaactgggttctaagatagaaattattgtttcagagagcaagagtaagttgtaatgcctgaactctcacttgcaccaactttggtttcataatgcagaaagtaattaaacaacatataattaaatctcaagataggacagtccccacccatgcatacacatgtattcagaattcatagaacacaaacacaattacttctcttataatggctttttcagacatcagagagcatttctcatacagtcttatggatttcagcacaggtattatgagtttatcatacagatgaaaaatgctattatatgagcatgttctttgtgttactagtctctccagtgcagtttctcttgtgggacaaaaataacttggatggttttaaaaattaaaaatctgaaccaaataacaaggaaataaggcaatacaagccagggacaatattttcttaaaactatcttcctgggttttaattgtattttcctatcaggtaatacgcatccagcgagaatccataataggtatttcmaagagaggaaatttaatacagagaactgattacatagctgttggaagttgaaagaatcaacagagtaagtggaagaatttggggattaataacagcaagaaacagcttaaatcaccacagctgaagaaatcagagatgtgaatgttgtatttggggatttcttgtggtccttgttaattagctttcaaatgggtgactttttccctttgattcaatttgtgtcaaagatgagccttagacataatgtgatattcaagtggtttattatggcaacattctcaaaagagggacagtgggaggaggccagtggtatgggccaaaaacagtcaggtagatctctgtctgaagactattctcagagattacgggattcttcttccttttttatatctgtgttaatgcagggtcagttaccaggtatttcttttagaaaggtaatttaagctattcttgtaagggcaagctttgtttcaaggtttatgagaattctatctgtgctgaggtggtcttgtctcctggaaatcccctggccaggttgcatcatactgctaagtgacacatgtagacactttatcttacagacattttatgtctctcatggtattctccagtgaggttcccacacattcgtgtagctgcacatgtggctggtgtttggatttcaggaggagccacacttaggctagtgctcagacctgtggaggggtagacgctgcatggctgcttctcaaacgacgaagatagctcactgggatggtactaggggtacagaaggaagctggagttccctggaacagtaaacccaactctgtttccctcctctcatctatcagttatttcccaatggctccatggtcagattctacgaggaagtcagctaaaagaaagctggagatactattcacagactcccaggcctcgtagcacatagcagagtatagaagggtaagggaatggctgagaggcaatatgtgaaaaatcaacatataatcaatacttttatctataatatgtaaataactgacatacacatttttcacacaatctgtctctccaaatactgaggcaagaagttcaaatcccatagcttgatgtacagaaatttaaatcatatagttcttaactatttcttcattaggtacttcaactcttacgataaccttatcaaggtcaaattttctttatacaaattttacctgctgagagaatattagatatcattagaaaagaagccattaaaatagataaatttacaagtaactcatttagataatttaaaaataaaattttgaattcaccacagaatgtcatttttttcattttttaattcaggaagtaaaatataaattgttttagctattcttcagtaaaagtaaatcaaatagcttttgagtctaatttcgtgtacaaatatgttagatatttccaaataaatttgtctttaaaataatttatgttgtagtaattttttgaagtactacgctaaggaaataaaaaacaacttcaaaatgctacacagcca

SEQ ID NO: 716759 - DNA, 2214 bp, Homo sapiens
gacatgcctttttcatgcaaattgtttgctttatgatttccaagtagtgcgtcttgtaaagtcctagtctgttactctgtgaagtcatcttagaccatgtgtgtcacctaccaacttgcactacagtttttttttaaattatttcctatagataaaattcttgcttaactaactgggttctaagatagaaattattgtttcagagagcaagagtaagttgtaatgcctgaactctcacttgcaccaactttggtttcataatgcagaaagtaattaaacaacatataattaaatctcaagataggacagtccccacccatgcatacacatgtattcagaattcatagaacacaaacacaattacttctcttataatggctttttcagacatcagagagcatttctcatacagtcttatggatttcagcacaggtattatgagtttatcatacagatgaaaaatgctattatatgagcatgttctttgtgttactagtctctccagtgcagtttctcttgtgggacaaaaataacttggatggttttaaaaattaaaaatctgaaccaaataacaaggaaataaggcaatacaagccagggacaatattttcttaaaactatcttcctgggttttaattgtattttcctatcaggtaatacgcatccagcgagaatccataataggtatttcaaagagaggaartttaatacagagaactgattacatagctgttggaagttgaaagaatcaacagagtaagtggaagaatttggggattaataacagcaagaaacagcttaaatcaccacagctgaagaaatcagagatgtgaatgttgtatttggggatttcttgtggtccttgttaattagctttcaaatgggtgactttttccctttgattcaatttgtgtcaaagatgagccttagacataatgtgatattcaagtggtttattatggcaacattctcaaaagagggacagtgggaggaggccagtggtatgggccaaaaacagtcaggtagatctctgtctgaagactattctcagagattacgggattcttcttccttttttatatctgtgttaatgcagggtcagttaccaggtatttcttttagaaaggtaatttaagctattcttgtaagggcaagctttgtttcaaggtttatgagaattctatctgtgctgaggtggtcttgtctcctggaaatcccctggccaggttgcatcatactgctaagtgacacatgtagacactttatcttacagacattttatgtctctcatggtattctccagtgaggttcccacacattcgtgtagctgcacatgtggctggtgtttggatttcaggaggagccacacttaggctagtgctcagacctgtggaggggtagacgctgcatggctgcttctcaaacgacgaagatagctcactgggatggtactaggggtacagaaggaagctggagttccctggaacagtaaacccaactctgtttccctcctctcatctatcagttatttcccaatggctccatggtcagattctacgaggaagtcagctaaaagaaagctggagatactattcacagactcccaggcctcgtagcacatagcagagtatagaagggtaagggaatggctgagaggcaatatgtgaaaaatcaacatataatcaatacttttatctataatatgtaaataactgacatacacatttttcacacaatctgtctctccaaatactgaggcaagaagttcaaatcccatagcttgatgtacagaaatttaaatcatatagttcttaactatttcttcattaggtacttcaactcttacgataaccttatcaaggtcaaattttctttatacaaattttacctgctgagagaatattagatatcattagaaaagaagccattaaaatagataaatttacaagtaactcatttagataatttaaaaataaaattttgaattcaccacagaatgtcatttttttcattttttaattcaggaagtaaaatataaattgttttagctattcttcagtaaaagtaaatcaaatagcttttgagtctaatttcgtgtacaaatatgttagatatttccaaataaatttgtctttaaaataatttatgttgtagtaattttttgaagtactacgctaaggaaataaaaaacaacttcaaaatgctacacagcca

SEQ ID NO: 716760 - DNA, 2197 bp, Homo sapiens
ttgtcagtccttcaaagacagggaccatgtttagtttgttctttttttttttttttttttttttccatgatacccaggaaaatgttctgcttaaagtggaggtctttccagtgattaactgatttggcaagtacagcctcctaagagaataaattatcagttgggattattataatttaatgacaatcacaaacactccctttcacaggccaggcactgtggttggagctgtatgtcaattatctccttgatatgaaaccaactaagtggycatcgaccaacgagtggataaagaaaatgtggtagaaatacaccatggaatactactcagccataaaaaaatgaaataatgtcttttgcagcaacttggatggagctggaggccattattccaagttaagtaactcaggaatggaaaaccaaatatcgtatgttctcacttatacgtgggagctgagctatgaggacacaaagacatacagaatgatataatggactttagaggctaggggtgggggaggttgggaaggaggtgagggataaaagactacatattgggtgcagtgtacactgctcgggtgacgagtgcactaaaatctcagagttcgccaccatagagtccatccatgtaacccaaaaccactcgtaccccaaaagattgaaatttaaaaaaaattttttttaaaagcatctccttaattcacaaattcctctgagggtagtaccacaagtcccattttacaggtgaggcccctgaggcttcagcaagtctcagggactcaccacagtcactcagctagtaagaaaaggaacaaagactggaattttacctgactccaaggtccatgttcttaatcacctgtgacaatcccctctcatatatccagcagctgatgaagtctttctctcaggaaaccaactggacatagacatgtcatgtccattttatatgcaatatggtgaatcaggaggagccgtgaaaggacgactcactaagttactctcccaatgtttatgtttgtttagacagtgaccatcatgaccactagggaagatcactttctgattctgctgccctcacctcctggacaaaagcagagcagagaagcagcataaaccctggttgggggcctaagaatgatccccaactctccactgcaaaccaccggggtcaggaagcctccgggtaatgccctctccctcttgtttcgctttttaagtaggtaagctgcacagagagaagcactgttgcatatttctggacagcttatttctcttgcagaggaagactgatatacacaactaaaaggcactaacatgggagaagatttgagagattagaaggatggtgaaggtgcggttgtccaaaatccccctctggggggagatgattgatatctggctgtcattccaagaagcttctggttgacaaatactgtctggtatttccttgctgatttcttaccctcacaccgcaagccctgatctctgtggtccactgtgcaaatgcaaattacctgaatcaggctgctggtgactcaccagctcccctttaaagcaacatcaggttcaacgcagtgactgctcagtagaagccatggctcgcagacactgcttctcctactggttactggtatgctggttggtggtaactgtggcagaaggtaagggttttgcttttattctactgtgggtccactaattaataagttgtaggaaaagacaaaactggctccatgattatacgttcccataaattggaaatatttacctcagcttccatcagcctgtgtggttaaagagaaggaagttggattttgtcacctgaagaccttggtcctcgtctcagcaatagctctgtgactttagacacacttaaaatctctgagtatcagattcctcatatgtgaagtgacaacattaacaatatccatcgttatggggtttgcaaggaccaaatgagctatcatctgtgaaaaactcttcaagctaaaaacactgtacaaatactagttattatggttacaaagctaacaattccactttgaattacagcactgtccactttctatctccagcagcatattaatttgcacatggtgggtatttagtctttgttcattgctttaattaatcacatctattgagctgcattttggtgccacagaggtgggcacaggtttctttctttaggatt

SEQ ID NO: 716761 - DNA, 2197 bp, Homo sapiens
ttgtcagtccttcaaagacagggaccatgtttagtttgttctttttttttttttttttttttttccatgatacccaggaaaatgttctgcttaaagtggaggtctttccagtgattaactgatttggcaagtacagcctcctaagagaataaattatcagttgggattattataatttaatgacaatcacaaacactccctttcacaggccaggcactgtggttggagctgtatgtcaattatctccttgatatgaaaccaactaagtggccatcgaccaacgagtggataaagaaaatgtggtagaaatacaccatggaatactactcagccataaaaaaatgaaataatgtcttttgcagcaacttggatggagctggaggccattattccaagttaagtaactcaggaatggaaaaccaaatatcgtatgttctcacttatacgtgggagctgagctatgaggacacaaagacatacagaatgatataatggactttagaggctaggggtgggggaggttgggaaggaggtgagggataaaagactacatattgggtgcagtgtacactgctcgggtgacgagtgcactaaaatctcagagttcgccaccatagagtccatccatgtaacccaaaaccactcgtaccccaaaagattgaaatttaaaaaaaattttttttaaaagcatctccttaattcacaaattcctctgagggtagtaccacaagtcccattttacaggtgaggcccctgaggcttcagcaagtctcagggactcaccacagtcactcagctagtaagaaaaggaacaaagactggaattttacctgactccaaggtccatgttcttaatcacctgtgacaatcccctctcatatatccagcagctgatgaagtctttctctcaggaaaccaactggacatagacatgtcatgtccattttatatgcaatatggtgaatcaggaggagccgtgaaaggacgactcactaagttactctcccaatgtttatgtttgtttagacagtgaccatcatgaccactagggaagatcactttctgattctgctgccctcacctcctggacaaaagcagagcagagaagcagcataaaccctggttgggggcctaagaatgatccccaactctccactgcaaaccaccggggtcaggaagcctccrggtaatgccctctccctcttgtttcgctttttaagtaggtaagctgcacagagagaagcactgttgcatatttctggacagcttatttctcttgcagaggaagactgatatacacaactaaaaggcactaacatgggagaagatttgagagattagaaggatggtgaaggtgcggttgtccaaaatccccctctggggggagatgattgatatctggctgtcattccaagaagcttctggttgacaaatactgtctggtatttccttgctgatttcttaccctcacaccgcaagccctgatctctgtggtccactgtgcaaatgcaaattacctgaatcaggctgctggtgactcaccagctcccctttaaagcaacatcaggttcaacgcagtgactgctcagtagaagccatggctcgcagacactgcttctcctactggttactggtatgctggttggtggtaactgtggcagaaggtaagggttttgcttttattctactgtgggtccactaattaataagttgtaggaaaagacaaaactggctccatgattatacgttcccataaattggaaatatttacctcagcttccatcagcctgtgtggttaaagagaaggaagttggattttgtcacctgaagaccttggtcctcgtctcagcaatagctctgtgactttagacacacttaaaatctctgagtatcagattcctcatatgtgaagtgacaacattaacaatatccatcgttatggggtttgcaaggaccaaatgagctatcatctgtgaaaaactcttcaagctaaaaacactgtacaaatactagttattatggttacaaagctaacaattccactttgaattacagcactgtccactttctatctccagcagcatattaatttgcacatggtgggtatttagtctttgttcattgctttaattaatcacatctattgagctgcattttggtgccacagaggtgggcacaggtttctttctttaggatt

SEQ ID NO: 716762 - DNA, 1055 bp, Homo sapiens
aggtgtacagagcttccttgtcctccccagacgcaccaccttccagcaacctccacatgttcagctgtcctgaagctctcaaactctgtcttcttgggcttctatggagacttcgttggacaggcgtgattgaacgatggacaaccacgtcacaatgcgattggacaaaaagggcatgatctaaagcctgcaagggcttgctgttcagactcttcttggtctctctgtgcagcattccttcctccagggtacagggcacggcccctctggaatgagggtttatgacccacaatcaggttagagtcctgccttgggcaggtgaaaggtggacaggaggagatgagacacagagagagaaagagagagagagagagattctgtttactgtaacaggggctatgagagttatgagccagaaaccatggttgaacatcccagtgaacaaaaagagtattcattaaaaactgcataaggggctaggcattaaaactggggctaaagtaaaggtagctcctgttacttttaacctgaaggggctttaaatcaagcctcaaaacgatcaaactgataatgagttaacctcactgtctcccagaacaaagttccagtactctgcaagaaaacaacaraatctaaacattcagaaatggaaaatttaaaataactggataaagaggtgggaaaaatgtcaccaataaccagaaaaaaggcaattaaaacacacttaagcatgacatagatgatcaaagttataaataacaagggatattaaaacagtttacttaaatatgatatatatgctcaaggatataagaaaaaatttaaataataagagaaatagaagatacgaaagagaacatactagaactccaagaaatataaaaataaaatttctgaaataaaaacatcacagaataaaattaaaagcagattagacactgcataagtaaagatcagtaaactggaaggcatagtaatagcactttccaaaatgaaatgtagaaaaggaaaaaaaaaaaggttggaaaaaatgaccagagcctcaatgacatgtg

SEQ ID NO: 716763 - DNA, 1055 bp, Homo sapiens
aggtgtacagagcttccttgtcctccccagacgcaccaccttccagcaacctccacatgttcagctgtcctgaagctctcaaactctgtcttcttgggcttctatggagacttcgttggacaggcgtgattgaacgatggacaaccacgtcacaatgcgattggacaaaaagggcatgatctaaagcctgcaagggcttgctgttcagactcttcttggtctctctgtgcagcattccttcctccagggtacagggcacggcccctctggaatgagggtttatgacccacaatcaggttagagtcctgccttgggcaggtgaaaggtggacaggaggagatgagacacagagagagaaagagagagagagagagattctgtttactgtaacaggggctatgagagttatgagccagaaaccatggttgaacatcccagtgaacaaaaagagtattcattaaaaactgcataaggggctaggcattaaaactggggctaaagtaaaggtagctcctgttacttttaacctgaaggggctttaaatcaagcctcaaaacgatcaaactgataatgagttaacctcactgtctcccagaacaaagttccagtactctgcaagaaaacaacagaatctraacattcagaaatggaaaatttaaaataactggataaagaggtgggaaaaatgtcaccaataaccagaaaaaaggcaattaaaacacacttaagcatgacatagatgatcaaagttataaataacaagggatattaaaacagtttacttaaatatgatatatatgctcaaggatataagaaaaaatttaaataataagagaaatagaagatacgaaagagaacatactagaactccaagaaatataaaaataaaatttctgaaataaaaacatcacagaataaaattaaaagcagattagacactgcataagtaaagatcagtaaactggaaggcatagtaatagcactttccaaaatgaaatgtagaaaaggaaaaaaaaaaaggttggaaaaaatgaccagagcctcaatgacatgtg

SEQ ID NO: 716764 - DNA, 852 bp, Homo sapiens
ttgttaagtggtcttgaattagccatttgcccccattggcttccgtttcttcatttgtaaaattaagtcaataatacctggccattcatttgtaagtctctcagtttataagtgaatatgtgttggatttcaaaaactattaatatcgattaaacatcttctgggaacctttttcatatatgccctctgttataacttgagccagattgacacaattggtattagaatgaggagactgtgttgcagagaatttatttgactttccaacagtcacttagctagtgggttacaaggctacagtttgaacacagctcgcaaacccattgctttttaaaaaccagtaataccactacttattcactttatcatggtatttaaatttcaagcatgaccaaataaacacatgcttatgcttacaaacataaatgctactgaaacaaaagtttcagaaaacattattcatactgcatttcaatatattatacttttgaaatcctagtcacaatcccctaaactgattttgtaaccaactaactcacaagtcgcagttagaaaatagtcttagattacatgacacacatgcttttttcattaaaaaccccatttaaatsaaatgacccttaaagtccattccggttctaaaactggacatttaatacagtaagtaaacatgaagatgctttagaaaatttaaagtgctatataaatgtgaggtggccgtaacacacccatttatcacatgtgagcatctatatggacccaaagcactgcaaactccactcatcactatctccatgccagagggtaagggcaggcattttgagtctttaacagctcaagaaagactgtcat

SEQ ID NO: 716765 - DNA, 852 bp, Homo sapiens
ttgttaagtggtcttgaattagccatttgcccccattggcttccgtttcttcatttgtaaaattaagtcaataatacctggccattcatttgtaagtctctcagtttataagtgaatatgtgttggatttcaaaaactattaatatcgattaaacatcttctgggaacctttttcatatatgccctctgttataacttgagccagattgacacaattggtattagaatgaggagactgtgttgcagagaatttatttgactttccaacagtcacttagctagtgggttacaaggctacagtttgaacacagctcgcaaacccattgctttttaaaaaccagtaataccactacttattcactttatcatggtatttaaatttcaagcatgaccaaataaacacatgcttatgcttacaaacataaatgctactgaaacaaaagtttcagaaaacattattcatactgcatttcaatatattatacttttgaaatcctagtcacaatcccctaaactgattttgtaaccaactaactcacaagtcgcagttagaaaatagtcttagattacatgacacacatgcttttttcattaaaaaccccatttaaatgaaatgacccttaaagtccattccggttctaaaactggacatttaatacagtaagtaaacatgaagatgctttagaaaatttaaagtgctatataaatgtgaggtggccrtaacacacccatttatcacatgtgagcatctatatggacccaaagcactgcaaactccactcatcactatctccatgccagagggtaagggcaggcattttgagtctttaacagctcaagaaagactgtcat

SEQ ID NO: 716766 - DNA, 870 bp, Homo sapiens
cttctgccttgttgtctgaaggaaaacaagttgacaaatttcttactcaattctaaaaccatgaacactgtttcttcagtttatcaggtagacaaatgctattcaccaagcctctggcctctcaggagaagcaagtcagagtcaagtaattctgtagctacatttgaaatggagtcaagcctacagagtctgcacagtgcagtttttatagaatctctgagttgaggaactagaagcgatcttcatgaacatctaaccagtccaacagacaaccaaggcttacaaagaaaatgatggccaaagttcacccagacaattggtgactgagctaggatttgattaattacagtattttctatgagacaggaaaaagcactggactcttgttggaatgtgtcattaattctctagctttatctcactggtaatttttacttaagatttctcattaataaagcaactatttagactttttcagttgtgtgccacttaacaatgacatgattcaaaatacaacccttcttcctccagttattctgagaccatatcatcagtgccccctttcagaaacgtgcttcagggaatgtgcctaagccattagttcttcccacctataaaggaaatagccacccactctgtccaatcactgctctttttcttttatattttacatgcttcgagaagctacttctagagtaaataatttcaacttataaaacayatgaagcaaaatattttcatgcaaaacactttttccccatcaaaaagacatattgcacccagattctcaagaaccagaaggctcagaaacaaagtatgttttatcctgaacgcaggatttgggccaacaaaaattggctgttgggagca

SEQ ID NO: 716767 - DNA, 870 bp, Homo sapiens
cttctgccttgttgtctgaaggaaaacaagttgacaaatttcttactcaattctaaaaccatgaacactgtttcttcagtttatcaggtagacaaatgctattcaccaagcctctggcctctcaggagaagcaagtcagagtcaagtaattctgtagctacatttgaaatggagtcaagcctacagagtctgcacagtgcagtttttatagaatctctgagttgaggaactagaagcgatcttcatgaacatctaaccagtccaacagacaaccaaggcttacaaagaaaatgatggccaaagttcacccagacaattggtgactgagctaggatttgattaattacagtattttctatgagacaggaaaaagcactggactcttgttggaatgtgtcattaattctctagctttatctcactggtaatttttacttaagatttctcattaataaagcaactatttagactttttcagttgtgtgccacttaacaatgacatgattcaaaatacaacccttcttcctccagttattctgagaccatatcatcagtgccccctttcagaaacgtgcttcagggaatgtgcctaagccattagttcttcccacctataaaggaaatagccacccactctgtccaatcactgctctttttcttttatattttacatgcttcgagaagctacttctagagtaaataatttcaacttataaaacacatgaagcaaaatattttcatgcaaaacactttttccccatcaaaaagacatattgcacccagattctcaagaaccagaaggctcagaaacaaagtatgttttatcctgaacrcaggatttgggccaacaaaaattggctgttgggagca

SEQ ID NO: 716768 - DNA, 615 bp, Homo sapiens
gtctgcctatattctgtctcatcagatagcaaacaaggaaatttgtcttttttccccccattgatatatcctagtgcttagactagcacctcaaacaaagtaggcattcttcttgaatgaaaataaagttaactcctgggcttccagaatcctaagatcatatatgttgatgtgtactgaatattttagtgccatttcctatagagctattataaactcagataaatactaattttcccagtgactgtttaggcaagtacagctgcttttcacctgattctaacgcattctgtaggaaagaaactgttagactcctaccctgacccatatttgctttcttccttaggataaaccyacttgttactatttcttcctgattccaagagactactttcccagtccccctttgtagttatatgaagccgtatgaagacaaggtaaacaggccaatgagatgcaagcagaagtgatacaagaaagagttttgaaaagactccatcaaggaagctcctgaagcttctagataaacctttccttctcccttctgttgcttcctgccttgaaggcagccatgatggctgggacctcagatgctactgtggcctaaggtcatct

SEQ ID NO: 716769 - DNA, 608 bp, Homo sapiens
ccaaacaagtttccccaggaaattttgatttgggaaagaaagtagaataaaagtaaaagtgaataatgtgtttaagtgtttgcagtcaaagggcagagggagtctgtagtgtgtgtctttgctgaactcctggttcttctttgcacagtggatatgacgttcgatgtggacacagccaacaactatctcatcatttctgaagacctgaggagtttccgaagtggggatttgagccagaataggaaggagcaagctgagaggttcgacactgccctgtgcgtcctgggcacccctcgcttcacttccggccgccattactgggaggtggacgtgggcaccagccaagtgtgggatgtgggcgtgtgcaaggaatctgtgaaccgacaggggaagattgwgctttcttcagaacacggcttcttgactgtgggttgcagagaaggaaaggtctttgctgccagcactgtgcctatgactcctctctgggtgagtccccagttgcacagagtggggattttcctggatgtaggtatgaggtccattgccttttacaatgttagtgatgggtgccatatctacacattcatcgagattcctgtttgcgagcc

SEQ ID NO: 716770 - DNA, 1035 bp, Homo sapiens
gtgcgggcgcctgtagtcccagctactcgggaggctgaggcaggagaatggcgtgaacccgggaggcggagcttgcagtgagccgagatcccgccactgcagtccagcctgggcgacagagcgagactctgtctcaaaaaaaaaaaaaaaaaaaaaaaaraaagataccaaagtagaaatatatctcttataaaacctaagaaatagcatatcagaaaatcgtttttaggccgggcacagtggctcacacctgtaatcccagcactttgggaggccgaggcaggcggatcacgaggtcaggagatcgagaccatcctggctaacacggtgaaaccccgtctctactaaaaatacaaaaactcagctgggcgtggtggcgggcacctgtagtcccagctacttgggaggctgaggcaggagaatggcgtgaacccgggaggcggagcttgcagcgagctgagaccgcaccactgcactccagcctgggcaacagagtgagaccctgtctcaaaaaaaaaaaaaaaaaaaagtgacaccctacatgaaagcaaagttttaactactttgtccccctagggctatcctagaatcctgattcaattttatttttaagaaatcgaattctcaaagcttcatctcctatggagtcaagtgagattggggtgataagggtgacccacataaagtcttactatcctcttttgtctagcagtttagtctttttttctttcttcagaattcctacgatgattttgttctcatgttcgcaaaactactgttagtagccttctttattttactactgtaattcccaagaaagaacggagggtaagttgaaatccctgggtgatggtagtcgggggggcctctgagacagtttggaaagacttttctgtagagattcaaacagttctccctatctacccattttcccttctttagagtctctcttctagaggggaaaatgatcagataatcagagatgactccaaatatgcttattgcacatggtagttagtgtaattagctaacaga

SEQ ID NO: 716771 - DNA, 914 bp, Homo sapiens
tcaaaagaaagtaaccgaaatctagaaagactcaaccagttttggggtcaacttctttggatgcctttcccaatcctctctggaattaccagcatatggcactgacaaggctgcagttgtcaatcaccttctacatcagaggttgcaagcgctgctacacaggtgcattgcctttggcctgcactggaatttaaaccggaggggatttcacatattgaagattctttgctgctgatgaacaatggaagatccacgacattggacacgcctcacatttttgcctggcaacggtgggtcggtgcccagcagcagctgctctgtttacacgggrtataattctcaagctcacaagaatgtatttttctatgatctgacactgctctgtttcgctgattcacactctctgcctgactcctgagggtattcaagtttgtgaccctagtcaagtccagaaagtgacccacacagacctcagagtccacatcacacccaccttagcctttcaaattacattcgtttccattcggggtggtgggcagagaaggcactggcattcttttttaaaattaaagtgtgctcctggtagagaacagcagttttcataacataactctttgaatggatgagtttatcatcaccttattctttattcagcgtgcttgccgcttataccatagagatcatgagaaaccgggaagaatgacagtcacattttaaaacaaagtgttccttaattggatgggtcaaactagggtgccacagatgacaagagaactatgacatgaccataccagggaaaatacgaggacgggaatctcgtacggggagatacagagacccacaggcaacctcgtctacacagcacgttctcaccttccactgtttaagcacaagtcacctgcttggaacgccag

SEQ ID NO: 716772 - DNA, 1246 bp, Homo sapiens
taagcaatgtcctaaagtcctctttgtgggattatgaaaattatccttcaggcatttcagaagtgaagtctgtgacgatgtgttttcttttatgagttcatatgttcaggaggctggaaaatacctagctgaatgtgtgatacacatgataagcatgctaaggcatatgggcasaagaagagattgctttctatagaacagggaactagaaaacatttgtttgttcttttaaaattaacatttaaaaatggatccaaagttaagccctgtaaaccttgtttgattaactctggaacacaatgttatactttttcctgctgaggtgctcaaaggaatgtggcatacttgaatgtagaaaaaaaaaaaaaaaacatgaaatctgaggagttgggctgaaacttgaaatcctccactttcaggttactgagttttagttttctcatcctcaagatgaaatactcgccagatgcgctggctcatgcatgtaatcccagcactttgggaggctgaggtgggcagactgcttcaactctggtgttccagaccagcctggacaagatggtgaaaccctgtatctacaaaaaaatgaaaaacttagctgggcatgctggtgtgtgcctttggtcccagctactcaggaggctgaggtgggaggattgctggagcctgggaggcagaggttgtagtgagccgagactgcgtgactgcactccagcctgggtgacagggtgagaccctgtctcagaaaaacaaaagagatgaaagctgatgatctaaagcctcattcctagctggggtattttgttatgttaattaattgattaatatatgaattcaataactcactaattagctattaaacaacactatgctttctttattgtactaaacactttatgtacaaaagtgagcagaataaacagccactgccatcacagagtatgatcttattagcaaaatggcatatttttgacatcccattcttaataggccagtgacttccaaagattttacgctgcagattgtacaggaaacattgccaattttagagcaatttaaacaagaaaacagaaaaaagtcaaagaagaaagaagcagggatgaagtactgaaacaggaacaaacaaacaaatccagattatggtgagaatatacgataaaaccaagcatcaaatgccctgagctttctgatagctctggtaaaaatttaagagagatgggatgcaggatattttcaaaaagaagga

SEQ ID NO: 716773 - DNA, 1246 bp, Homo sapiens
taagcaatgtcctaaagtcctctttgtgggattatgaaaattatccttcaggcatttcagaagtgaagtctgtgacgatgtgttttcttttatgagttcatatgttcaggaggctggaaaatacctagctgaatgtgtgatacacatgataagcatgctaaggcatatgggcagaagaagagattgctttctatagaacagggaactagaaaacatttgtttgttcttttaaaattaacatttaaaaatggatccaaagttaagccctgtaaaccttgtttgattaactctggaacacaatgttatactttttcctgctgaggtgctcaaaggaatgtggcatacttgaatgtagaaaaaaaaaaaaaaaacatgaaatctgaggagttgggctgaaacttgaaatcctccactttcaggttactgagttttagttttctcatcctcaagatgaaatactcgccagatgcgctggctcatgcatgtaatcccagcactttgggaggctgaggtgggcagactgcttcaactctggtgttccagaccagcctggacaagatggtgaaaccctgtatctacaaaaaaatgaaaaacttagctgggcatgctggtgtgtgcctttggtcccagctactcaggaggctgaggtgggaggattgctggagcctgggaggcagaggttgtagtgagccgagactgcgtgactgcactccagcctgggtgacagggtgagaccctgtctcagaaaaacaaaagagatgaaagctgatgatctaaagcctcattcctagctggggtattttgttatgttaattaattgattaatatatgaattcaataactcactaattagctattaaacaacactatgctttctttattgtactaaacacttyatgtacaaaagtgagcagaataaacagccactgccatcacagagtatgatcttattagcaaaatggcatatttttgacatcccattcttaataggccagtgacttccaaagattttacgctgcagattgtacaggaaacattgccaattttagagcaatttaaacaagaaaacagaaaaaagtcaaagaagaaagaagcagggatgaagtactgaaacaggaacaaacaaacaaatccagattatggtgagaatatacgataaaaccaagcatcaaatgccctgagctttctgatagctctggtaaaaatttaagagagatgggatgcaggatattttcaaaaagaagga

SEQ ID NO: 716774 - DNA, 581 bp, Homo sapiens
taagtccctctgtaatctgagcctgataagcactgaataataacaggaacaccatcactgctgcyaccaacaactttgaaaacaggaactgacattccttgagcatgaacaatgtgctggatattgtccttatctattcgtgtgtgttaacctgtttgaaaataactccgtgaggtgtgcatacttctatcattcccattttgtaaatgaggaacatgggacaggtttagagttaagtaacttacccaaatcaaacaataaactagtagtaaagttggggtgtgaatccatatactcaggagaatccacatttttgtctacaatactatacttcttcagtaaatattcatgagttgaagaaaaccaattctgattaagtgaagctgaaagggaatttattatattaggaagacataaagaagctcactgaataagtaggaagccttgcttggaaaaaaagcaggaccatgagggaataaggagcagagaacacagtcagattgtgccacaggaagagcttgggcccagggccactgctggtgctgctcctactggccagcacaggtaccacactgttggct

SEQ ID NO: 716775 - DNA, 581 bp, Homo sapiens
taagtccctctgtaatctgagcctgataagcactgaataataacaggaacaccatcactgctgccaccaacaactttgaaaacaggaactgacattccttgagcatgaacaatgtgctggatattgtccttatctattcgtgtgtgttaacctgtttgaaaataactccgtgaggtgtgcatacttctatcattcccattttgtaaatgaggaacatgggacaggtttagagttaagtaacttacccaaatcaaacaataaactagtagtaaagttggggtgtgaatccatatactcaggagaatccacatttttgtctacaatactatacttcttcagtaaatattcatgagttgaagaaaaccaattctgattaagtgaagctgaaagggaatttattatattaggaagacataaagaagctcactgaataagtaggaagccttgcttggaaaaaaagcaggaccatgagrgaataaggagcagagaacacagtcagattgtgccacaggaagagcttgggcccagggccactgctggtgctgctcctactggccagcacaggtaccacactgttggct

SEQ ID NO: 716776 - DNA, 633 bp, Homo sapiens
ataaaagccaggaacagagaagagattacaccagcggtaacactgccaactgagactaaaggaaacaaacaaaaacaggacaaaatgaccaaagactgtcagatttcttagactccacaggaccaaaccatagaacaatttcactgcaaacatgcatgattctccaagacaaaagaagagagatcctaaaggcrattcagatatccccaaggctgcctctcccaccacaagcccagagtggatgggctgggggaggggtgctgttttaatttctaaaggtaggaccaacacccaggggatcagtgaaggaagagaaggccagcagatcactgagagtgcaaccccaccctccacaggaaattgcctcatgggcagggccacagcagagagacacagcatgggcagtgccttccctgcctgtgggggtcatgctgccacttttaatgggtcctccacccaacggggtcagggaggtggtgctgccccagtgggccatgattatcttaaaggcattattctccagccttaagtaagatcttaggacgtttcctttgctatgatttgtacttgcttgagtcccatgactgtttctcttcctctctttcttccttttggaatagtaatatccatcct

SEQ ID NO: 716777 - DNA, 633 bp, Homo sapiens
ataaaagccaggaacagagaagagattacaccagcggtaacactgccaactgagactaaaggaaacaaacaaaaacaggacaaaatgaccaaagactgtcagatttcttagactccacaggaccaaaccatagaacaatttcactgcaaacatgcatgattctccaagacaaaagaagagagatcctaaaggcaattsagatatccccaaggctgcctctcccaccacaagcccagagtggatgggctgggggaggggtgctgttttaatttctaaaggtaggaccaacacccaggggatcagtgaaggaagagaaggccagcagatcactgagagtgcaaccccaccctccacaggaaattgcctcatgggcagggccacagcagagagacacagcatgggcagtgccttccctgcctgtgggggtcatgctgccacttttaatgggtcctccacccaacggggtcagggaggtggtgctgccccagtgggccatgattatcttaaaggcattattctccagccttaagtaagatcttaggacgtttcctttgctatgatttgtacttgcttgagtcccatgactgtttctcttcctctctttcttccttttggaatagtaatatccatcct

SEQ ID NO: 716778 - DNA, 656 bp, Homo sapiens
tgtcacctgggctggagtgcagtggggccatgtcrgctcactgcaacttctgcctcctggattcaagcaattctcctgcctcagcctcctgagcagctgggattacaggtgtgcaccaccactcctggctaatttttttgtatttttagtacagacggggtttcaccatgttggtcaggctggtcttgaactcctgacctcaggtgatctgcctacctcaccctcccaaagtgctgggattacaggcgtgagccactgcgccccaaacataaccttttattcttttaagtcactaaatattaacgtgtcacatagcaataatcaatacatattttggtaccaagaatgaagttactattataaagaaaaaaaaaaaccactaaaattttggagtgcttgaaaacaggcagtggatggaggccaaaaggacaggaaagactgaaaccttctagtatgggcttatagtagggaagtgaaaacatattagaaactggagaaagtaaaaatctttctatttagtaccagaaagtttagcaacacttttgtctgtagcattgtggaaagtagaaaatgtacttaatgatttaagagaatgctctaaacttatttccaactagagtgttgaatatcttgtctgatttcttcctactacttat

SEQ ID NO: 716779 - DNA, 656 bp, Homo sapiens
tgtcacctgggctggagtgcagtggggccatgtcggctcactgcaacttctgcctcctggattcaagcaattctcctgcctcagcctcctgagcagctgggattacaggtgtgcaccaccactcctggctaatttttttgtatttttagtacagacggggtttcaccatgttggtcaggctggtyttgaactcctgacctcaggtgatctgcctacctcaccctcccaaagtgctgggattacaggcgtgagccactgcgccccaaacataaccttttattcttttaagtcactaaatattaacgtgtcacatagcaataatcaatacatattttggtaccaagaatgaagttactattataaagaaaaaaaaaaaccactaaaattttggagtgcttgaaaacaggcagtggatggaggccaaaaggacaggaaagactgaaaccttctagtatgggcttatagtagggaagtgaaaacatattagaaactggagaaagtaaaaatctttctatttagtaccagaaagtttagcaacacttttgtctgtagcattgtggaaagtagaaaatgtacttaatgatttaagagaatgctctaaacttatttccaactagagtgttgaatatcttgtctgatttcttcctactacttat

SEQ ID NO: 716780 - DNA, 610 bp, Homo sapiens
gacctcatgaatagagaacatttatttatttattgagatggagtctcactctgtcacccaggctggagtgcagtggcacagtcttggctcactgcaacctctgcctcgctggttcaagcgattctcatgcctcagcctccccagtagctgggattacaggcacccaccaccatgcctggctaatttttgtattttcagtagacatgaggttttgccatgttggccaggctggtctccaactcctggcctcaagtgatccacctgcctcggcctcctgaagtgctgagattacaggcatgagccattgtgtctggccaaatagaggacattttacagcccaatagtaagctaggattatatttccttctttgaggttctattgttataacccttatacaataaaaaacaactcttctgccagattaaarttttttgttttttggtttttttagttctcaattatgttgtataacccatgagtgtcactttattctcattggaaatatcctcccaagagctcttacccacctgctgttgtttggactggcaccttactagacctgctccacaaactgccgtcatgaaatttttcttcactaattttctcatt

SEQ ID NO: 716781 - DNA, 1023 bp, Homo sapiens
tcaggatggggccagagtgaggcagttgttgatttattttgagacataaatcaatgtttttcaaaggttgactctacaagtttaagctatgaagtgatggtgacatcactggccacacccccatccattccagtgagttgagtttgtgtgagtgaagtgacccattcagtggctgcttcggcacagaagcatggccataaaccagccggggttgaccactgtgcccagggaggcttgagttccctctctggatgagatcagcaccgtgcctagggcaggaggagtctttctccagcccccgaccagagtacaagctgaagacctggtgacgagactgcrgagggaggatgtggcaccccctcagcgtcaacactcgggggagcgagtaacagcatttgctcaggagtcagaagactgatctgagctgcagccctgccactcaccagctgtgagacctcagacgtaggacttagtttctcgggcccttatacttctttcaaatggtgataatggtgcctacttcataggctgaagtgacagcagtattaaaactgccaaagcactgtatgaatgcaagctggaggtggtggagctgcagaaggggtagaggcagcagtagtaaaatgtaggtggagatggaggtgttgttgatagttatgtataactaggattccagaagagaataagtgagtctgtcccaaatcaccagaattaatatccaagctagacaagaaccttggacctcaaagagcccagaagatggcaaagacccctagcaaaatgatcattggccttctatgcccatgggactctattgctcacctccctggaattcaagaaggctttaatcacaacaagtgcacagtacaggctgcaggaaaacctctttactatagaagtgtcccagggcaccagcagagggaggagaggaaaagctggctttttctttttgtctggtgctgggtcactggactacagagctcaagaggctacagacaaggccgggatctaaacttgagttcc

SEQ ID NO: 716782 - DNA, 651 bp, Homo sapiens
gcaggaatttaaactrccattgaagtttatgtgctgttgcagtcacccacagaaatgagatgaaccctcacccaaactttggctcctatttcaagacttagcataccacatatgcaccaacagggtataaaaaggtttattactcacataatgagcctttctaggaagagtacagcagacctcctaagcaggttttaaaatgacttgagagagtaggagaaaaagctattgggatttttttcatggctaggacatggcgcttgggtgaaaaagcccacacagggcagggactgtatggctcaaattttccaccagcaccaaaataggaaatacctattttgcaccatatttggatctaggcaagctttctcatcaagttgcctagattcagatatcatacaaaagggaacaggtgaggagccggacttaaaacttgttaagaatcaaacataaaaaattatgtcagacacaattacatattcttagatctagtttaactgcaactaacaatatagttgttacatatatatatgctttgaaagtgattatcatggacactgtagttgcaatcccaacatttattccactcttcccacattgtgcatagtacacctaagaaattgaggtgaaattaacctcacctttatctcc

SEQ ID NO: 716783 - DNA, 1133 bp, Homo sapiens
aaccaaataaaaaacaaagaattggcacatcaaatgaatggaagggactgaggatagaaatgctttcctcagagatggtatggtgacatacaaactgaacagtatgcctactttaacttcgatttggctatgagacctcctggtacatttttctataatttatttagccaaggtgtttaacactccgtaagttactcttttattcccatgctataaaaaggagagagaagcctataggtcctaaaatgaagtcatctgaaaaaagttttctttgaaagtactgattcctacaaaaggaactagctttgaagactcaagtcatcactcctagattatcactattaatagtaaaygcagtgagacaacaatgataatgccagatagcatttatattggtcattaatgtaaaaacaacccaaagtgatatacgttaagtctcacgtagtctctctgatatgttactgttcccatttatagatggaaaaactgaactctcaaagatgtatgtctcactaaagggtccagaataagtcattcagtggagacaaagaaacacaaagttatctcattattcagtactatgccttttaatcagcaccatagttccaaggatgaggtcagtaagtgtggctatacacaatgtaattagtccttggggagcagggtgcatgatattagttcatctattcaattcatccaacagtattcattgaacatgcactatatgccaagtactactgggaaggaaaactccttaatctcaaggaatttacactgtagtggagaaaagacagaaaataaacaaatcaaaataaaataacaggtaggaataagcggtatggaaaagaaaaaaataaaaagggctaggggatgctgagcaagtacaaagggccttattttatacagcacgattaagaaaagcctccacaagagtagcatttgagcaaatatcagaaggaagctagagttcagcgagagctgttaaaagtataattttcaaaaagttaatctgactcatgtaaataccaattgaagatataccaaagatttattctgttcatttactaatgaattaatcatttatcttaagactgaatgaatattaagactggttcaagaagcatttgaagaac

SEQ ID NO: 716784 - DNA, 1552 bp, Homo sapiens
tatctgggttatgtctattaatgtataatttcactaaatatctttwaaaatctgtaagatagcagcagaagtagttgtttccatgaaaaagttgactatttgtaacagtttgataaggaccacttgctttttaaaaaaattctgtcaagtacaagactataaaaatttaggacaatctccactgagactattttgcaactgtctcactacacttagaaattaaagaggatatttaaaggtgtgatttaagaaaaatttacaataaattccaataaggagacctgtgttcatagaaaagatttgggtctaataccaaaaggctacactacaaatatgttataaagcatgtacatatcattttcatgactatccattttagccaaaaatatttttataaacttaattatgggaccaatttaaatggataaaggagctaatattataatccctttttgaaaaatgctttttaaattaagaaataatgatgaagtttccattttgcaagatgagttctgtggatgcatgatagtgatggcagcacaacaatgtaatttacttaatgccactgaactgtacactttaaaatggtaaagatgatcaattttaccggtattttacaattttgaaaaaataaagatgataccaagagttaagcaatacatatttgacttatatcccagaatgaactgttagctgtttcaaaagcactgttaaagtaacagaggctcatgtctatataaccttatctaacaatacgaaaaaaaaaatgtgagtttaaaaactaagtaagaatagagtttcttcctcccaaacctgaaagatgatcttctcagagaagtcagggttcaataattaggacaaaattgacttatgctaacaaaataaataaatgaagattttaatttccagattaaactggaccttgtattcacaaagctattccaatattcaatattcaaagtatcaaaagaactacttcctatttgggtcaaaaaaggatattgtaggtattgtcactttacatagattcttctttaatctctgaattaaatattaacattcacagaaattttctcaccaataacaaggagatgttctctaacatttttcactacactattcaaaaaggcttcacaaatataataaatatcaaaaacatgttggataaattaagccagtaatagagaatacatgttataaaatttcatctatatgaagttcaagaataggcaaaactaatatatgtaacagaaatcagaagagtagacaccaggggttgggggagaatggtatggagaaagatagactacaaggggaatgagggaattctctgaggagatcgaaatgtttgtatcttgactggagtattgttacacaggtatatatttatcagaactcagcacacgatacaccctctatctgtacattttgtgatatatgtaaattacacattaatttttttaatggagggttggggaaaaaaaagacttaggaaatcagttaattcatgagatgtatcccctgaaacaaaaaccagtaatgatattttttt

SEQ ID NO: 716785 - DNA, 359 bp, Homo sapiens
aactctgagggaagccaccwgaagagaagtcaacagtgcataaaggttgcgcctaaacagctgcagtgaaatgaagctggagccacgttcaaattacaccctgaacacatgcccccaaaaactccttttaaattttgtgaaccagccaaattcctttatctcctctttgacctataaaccacagcattctaactgatagagaactccaaaggctgattcaacctcttttcccaagtcatctcccaccacttcataaaatgttgaagtgggctaatctatattcctctttgtttttgagacaagggtctggtatgttgctcagactggtcttgaactcctgggctcaagcaatcctccca

SEQ ID NO: 716786 - DNA, 1965 bp, Homo sapiens
taaagcatrtgtgtgctactgtcactttgtggtcatattttttcctcttgatcagctctccaattccttgaacctgcaatactgtcctgacccaggcctgtgtgtagagagggttctgtgggacagcagtctgctgctgcaggtatggaattacacagcctggcctccagcttccctatcctgctgctgcctggctgtgagcctggaccatgcactcaatttccgcgagttcttgtctataaacaagaataataaatgtgcctaccacgaagggctaccgtgaggattaaatggactgtgtacataaagagcctggcccagaatcagcactcaagaagtaatggatgtgggttttttgtgtgaatcaaaggttatgcagtttccccaaggttcagctgggcagggttttaacatcatctcggatgcttctcagatagttctctagataaatcacttgaaaagccttacacacacacacacaccacacactctgttttgtaatctgctttttttcaacataacaaaatactgggatgaaatttcatgaaaatcacacaactagatcattattattactgtgattattattgtcctgtcacccaggctggagtgcagtggcaccatcttgactcactgcagcctcaacatccccggctcaagggatcctcccactgcagcctcctgagtagctgggaccacaggcctgtgccactatgccggccaatttgtatttttagtagagatggggtttcaccgtgttgcccaggctggtcttgaactttgaggctcaagcaatccgctcacctgggtccctgaaagtgctgggattacaggcgtgagccactatgcctgccatagtttttaaaatagttatattgtatggtgatatacaaagaaatatttaatgaattgcctgttttgggacagttaagtggttttccatttttcattatgtaaaaatattaggtggtaaatgtgtttatttatttattttgagacagaatttcagtctgtcacccaggctggagtgcaatggcgcgatctcagctcactgcaacctctgcctccagggttcaagtgattctcctgcttcagcctcctgagtagctgggattacaggcatgtgccaccacacccggctaattttgtatttttaatagagatggggtttcaccatgttggtcaggctggtctcgaactcctgacctcagatgatccgcccgccttggcctcccaaagtgctggaattacaggcgtgagccactgcgcctggcaaaatgtgtgtgtatttacaatattattgccatgtctgattttttagaatacatttctagaaatggaattgctggatcaaaagatatgcatattttaaggttttgattcctactaatgttggaacattactaaaggtaatttaccaaggaaccaagttagtagattttggaatgtattctcatctaaaaaagaattgtggtaaaatgcacataacataaaacttaccatcttaaccatttaaaaatgtacagttcagtggcattaagcacactcacattgtcatgctcccatcaccatcatccatccacagaactattttcatcttgtaaaactgagaatgtgtacctattaaaaataactctcaaataagctgaaaatttatgtcaacaaatagatctgcatggatgctgatagcagctttattgataattaccaaaacttagaagcaaccgagatgcacctcagtaggtgaatggataaataaactggcctgcaaagcctcttgacagtctgcaaagcctcttacagaaccaagagaatccgtaagtggccctgtgacccactgggatttcctccactgcaaactttgaggaagtccatataagggaatattatttggtgttaaaaacaaatgagctaccaagtcatgaaaagacagaggaaccttaaatgcatgttactaagtaaatg

SEQ ID NO: 716787 - DNA, 1965 bp, Homo sapiens
taaagcatatgtgtgctactgtcactttgtggtcatattttttcctcttgatcagctctccaattccttgaacctgcaatactgtcctgacccaggcctgtgtgtagagagggttctgtgggacagcagtctgctgctgcaggtatggaattacacagcctggcctccagcttccctatcctgctgctgcctggctgtgagcctggaccatgcactcaatttccgcgagttcttgtctataaacaagaataataaatgtgcctaccacgaagggctrccgtgaggattaaatggactgtgtacataaagagcctggcccagaatcagcactcaagaagtaatggatgtgggttttttgtgtgaatcaaaggttatgcagtttccccaaggttcagctgggcagggttttaacatcatctcggatgcttctcagatagttctctagataaatcacttgaaaagccttacacacacacacacaccacacactctgttttgtaatctgctttttttcaacataacaaaatactgggatgaaatttcatgaaaatcacacaactagatcattattattactgtgattattattgtcctgtcacccaggctggagtgcagtggcaccatcttgactcactgcagcctcaacatccccggctcaagggatcctcccactgcagcctcctgagtagctgggaccacaggcctgtgccactatgccggccaatttgtatttttagtagagatggggtttcaccgtgttgcccaggctggtcttgaactttgaggctcaagcaatccgctcacctgggtccctgaaagtgctgggattacaggcgtgagccactatgcctgccatagtttttaaaatagttatattgtatggtgatatacaaagaaatatttaatgaattgcctgttttgggacagttaagtggttttccatttttcattatgtaaaaatattaggtggtaaatgtgtttatttatttattttgagacagaatttcagtctgtcacccaggctggagtgcaatggcgcgatctcagctcactgcaacctctgcctccagggttcaagtgattctcctgcttcagcctcctgagtagctgggattacaggcatgtgccaccacacccggctaattttgtatttttaatagagatggggtttcaccatgttggtcaggctggtctcgaactcctgacctcagatgatccgcccgccttggcctcccaaagtgctggaattacaggcgtgagccactgcgcctggcaaaatgtgtgtgtatttacaatattattgccatgtctgattttttagaatacatttctagaaatggaattgctggatcaaaagatatgcatattttaaggttttgattcctactaatgttggaacattactaaaggtaatttaccaaggaaccaagttagtagattttggaatgtattctcatctaaaaaagaattgtggtaaaatgcacataacataaaacttaccatcttaaccatttaaaaatgtacagttcagtggcattaagcacactcacattgtcatgctcccatcaccatcatccatccacagaactattttcatcttgtaaaactgagaatgtgtacctattaaaaataactctcaaataagctgaaaatttatgtcaacaaatagatctgcatggatgctgatagcagctttattgataattaccaaaacttagaagcaaccgagatgcacctcagtaggtgaatggataaataaactggcctgcaaagcctcttgacagtctgcaaagcctcttacagaaccaagagaatccgtaagtggccctgtgacccactgggatttcctccactgcaaactttgaggaagtccatataagggaatattatttggtgttaaaaacaaatgagctaccaagtcatgaaaagacagaggaaccttaaatgcatgttactaagtaaatg

SEQ ID NO: 716788 - DNA, 1965 bp, Homo sapiens
taaagcatatgtgtgctactgtcactttgtggtcatattttttcctcttgatcagctctccaattccttgaacctgcaatactgtcctgacccaggcctgtgtgtagagagggttctgtgggacagcagtctgctgctgcaggtatggaattacacagcctggcctccagcttccctatcctgctgctgcctggctgtgagcctggaccatgcactcaatttccgcgagttcttgtctataaacaagaataataaatgtgcctaccacgaagggctaccgtgaggattaaatggactgtgtacataaagagcctggcccagaatcagcactcaagaagtaatggatgtggkttttttgtgtgaatcaaaggttatgcagtttccccaaggttcagctgggcagggttttaacatcatctcggatgcttctcagatagttctctagataaatcacttgaaaagccttacacacacacacacaccacacactctgttttgtaatctgctttttttcaacataacaaaatactgggatgaaatttcatgaaaatcacacaactagatcattattattactgtgattattattgtcctgtcacccaggctggagtgcagtggcaccatcttgactcactgcagcctcaacatccccggctcaagggatcctcccactgcagcctcctgagtagctgggaccacaggcctgtgccactatgccggccaatttgtatttttagtagagatggggtttcaccgtgttgcccaggctggtcttgaactttgaggctcaagcaatccgctcacctgggtccctgaaagtgctgggattacaggcgtgagccactatgcctgccatagtttttaaaatagttatattgtatggtgatatacaaagaaatatttaatgaattgcctgttttgggacagttaagtggttttccatttttcattatgtaaaaatattaggtggtaaatgtgtttatttatttattttgagacagaatttcagtctgtcacccaggctggagtgcaatggcgcgatctcagctcactgcaacctctgcctccagggttcaagtgattctcctgcttcagcctcctgagtagctgggattacaggcatgtgccaccacacccggctaattttgtatttttaatagagatggggtttcaccatgttggtcaggctggtctcgaactcctgacctcagatgatccgcccgccttggcctcccaaagtgctggaattacaggcgtgagccactgcgcctggcaaaatgtgtgtgtatttacaatattattgccatgtctgattttttagaatacatttctagaaatggaattgctggatcaaaagatatgcatattttaaggttttgattcctactaatgttggaacattactaaaggtaatttaccaaggaaccaagttagtagattttggaatgtattctcatctaaaaaagaattgtggtaaaatgcacataacataaaacttaccatcttaaccatttaaaaatgtacagttcagtggcattaagcacactcacattgtcatgctcccatcaccatcatccatccacagaactattttcatcttgtaaaactgagaatgtgtacctattaaaaataactctcaaataagctgaaaatttatgtcaacaaatagatctgcatggatgctgatagcagctttattgataattaccaaaacttagaagcaaccgagatgcacctcagtaggtgaatggataaataaactggcctgcaaagcctcttgacagtctgcaaagcctcttacagaaccaagagaatccgtaagtggccctgtgacccactgggatttcctccactgcaaactttgaggaagtccatataagggaatattatttggtgttaaaaacaaatgagctaccaagtcatgaaaagacagaggaaccttaaatgcatgttactaagtaaatg

SEQ ID NO: 716789 - DNA, 1006 bp, Homo sapiens
tactactgcatgctaagcacacagcaacaaaaagaagcactgcagaaatggttgtgaagctttatgagagtaaaaacaaatgaagaggggaaaacacaacaaccattgagaaataaggacaaagaaggcattgagggaaagaagcacagaaaaaaagattatccctgaaagaaaatctgttgactaaaaaaatctgttctaaatacttaatttaaaaatgtctattctaggccaggtgcggtggctcacgcctgtaatcccagcactttgggaggccaaagcgggcagatcatgaggtcaggagatcgagaccatcctggctaacatggtgaaaccccgcctctactaaaaatacaaaaaaattagctgggcgtggtggcgggcccctgtagtcccagctacttgggaggctgaggcaggagaatggcatgaacccaggaggcggagcttgcagtgagctgagatcgcaccactgcactccagtctgggtgacagagtgagactccatctcaaaaaaaaaaaagaaaaatttctattctaacacactgtcatttgggaggcctacaaaaacatttccttaaaaaattaccatgacttcaactatattttaaaaaagccttgacacttggaaaagactatgataatacctagaataacttgtctcactattaacttagaaatattctatttaaaagtcgaccaacaataggaactttgcaattgcacaacagagaaagtaaatgaataacactcagtggcccatggcgtgtttccccatctactagaacattctgtgacttacaccatctaccctgaaccattcaccacgtctccattcacgcagtgattcaaatagagttcctgtgttcattccacaataaacctcagtaattygcacatcacagtacttgtaaccatttgttaacagaaagagaacgagtcttcatatatgagtttcttgtagacacagatagctgggtcttgattcgatccaacagcctctttc

SEQ ID NO: 716790 - DNA, 497 bp, Homo sapiens
gggcaacatggtgagatcctgtctctaaaaaataaaatgtaataggtcatccttaggcaagtcattttaaaaggaaacatttattataaatccatttttcctgaagccaaattttttttttttttttgagatggagtctcactctgtcactaggctggagtgcagtggcacgatcttggctcactgcaacctctgcctcctggcttcaagcaattctcgtgcctcagcctcctgagtagctgggattacaggcatgcaccaccacacctagctaatgtttatatttttagtagagatggggtttcrccatgttggccaggctggtcttgatctcctgatctcatgatccgcccaccttggcctcccaaagtgctgggattacaggagtgagccaccgcgcccggccatttcctgaagcaaattttatgctacttttatctaaaatgtttacttccaagaaggacatgccccatatggcaccctgttttagatttgca

SEQ ID NO: 716791 - DNA, 497 bp, Homo sapiens
gggcaacatggtgagatcctgtctctaaaaaataaaatgtaataggtcatccttaggcaagtcattttaaaaggaaacatttattataaatccatttttcctgaagccaaattttttttttttttttgagatggagtctcactctgtcactaggctggagtgcagtggcacgatcttggctcactgcaacctctgcctcctggcttcaagcaattctcgtgcctcagcctcctgagtagctgggattacaggcatgcaccaccacacctagctaatgtttatatttttagtagagatggggtttcgccatgttggccaggctggtcttgatctcctgatctcatgatccgcccaccttggcctcccaaagtgctgggattacaggagtgagccacygcgcccggccatttcctgaagcaaattttatgctacttttatctaaaatgtttacttccaagaaggacatgccccatatggcaccctgttttagatttgca

SEQ ID NO: 716792 - DNA, 606 bp, Homo sapiens
tccttcatggtgatttctgttatttggttctgcgggggctcatgtcctaaggaaaaaattacattttggctaactagggtttaccacacctcacaaaaggattgcaaactcaaaggcttacaggagcctagaacataaaataaatatatacgaaacaggrctgggggaactgaggcaaactgggatggagcgccaagcgtctgcaccagcagacgagtgccctgcaggaacccgagcccaggccagcctcatctcctgacttttcagctgaagctgcaaaaattgagggttttatttccaggcttccaattttaaaatgttgacaacttggacaaaatgtatacaataccacactgtgtggcccatagtagctgctagtttcttctttgcggacagggacccactgaggcagaaggcaccaaatccaggtggctcctagcttgattggggtgcctgtcctgaacattaggaccactttccctgcaggatccatgggggaattcgattctcccaagtgaaaacatcagaattcagttgaattccgatgcagctgcacgtctgcaacaaacacttccaacaaataatagagttgtgacattcatcatt

SEQ ID NO: 716793 - DNA, 606 bp, Homo sapiens
tccttcatggtgatttctgttatttggttctgcgggggctcatgtcctaaggaaaaaattacattttggctaactagggtttaccacacctcacaaaaggattgcaaactcaaaggcttacaggagcctagaacataaaataaatatatacgaaacaggactgggggaactgaggcaaactgggatggagcgccaagcgtctgcaccagcagacgagtgccctgcaggaacccgagcccaggccagcctcatctcctgacttttcagctgaagctgcaaaaattgagggttttatttccaggcttccaattttaaaatgttgacaacttggacaaaatgtatacaataccacactgtgtggcccatagtagctgctagtttcttctttgcrgacagggacccactgaggcagaaggcaccaaatccaggtggctcctagcttgattggggtgcctgtcctgaacattaggaccactttccctgcaggatccatgggggaattcgattctcccaagtgaaaacatcagaattcagttgaattccgatgcagctgcacgtctgcaacaaacacttccaacaaataatagagttgtgacattcatcatt

SEQ ID NO: 716794 - DNA, 1367 bp, Homo sapiens
tgcctttgcttaacagtcaaagtaaaattgcttccaagtcttcaactgaagcgcatccttacccaggaagtcagaaggacatattgatgttttgagtgtgcactggggctagagaagagttaacagctaattctgacatacaagtatgaattactcttgtctggaagtcacttttctagtagttttattttttcattactgatatttttcaaaatcttaaatcttgcccagaattctattagcatttagaaaaaaactaaacctaggtgattgtgggtttttcttcccctttctgtcactgcaacaaacacaggaacaaatatccatagattgatgaacattcagctacatgtgaccagtgaattacaggttgtgctgaagactttgtttttaatatgtatgtgaccttgtgtgtattctctagacgtgtacatgtgttatcagcatttttagatayagaagttatcagcaagaaaattgaagtcatccataggaagttatctacatgaagcaggcatataggaaaattgacttcttggattttcctgaagatcacttgtttcctgactgtgaactagaagattttggaggaagcaaatctttgggtatagttgatttccaagagatgagtcactttattttactaaagcaacactgcccagcattgccactgactttccgaattcagaaaatacattttgtgttctcataacagcaagatcatggatcattttttaaccctgggtcttttaggcttcagtcagcaatgtgtttatacaaaattgctggtatataagaaaaaagtttattatactggaggctttcgggtccagtctgatcagataacaaaagggaatagatcacattgtagtgttgtggaactattttgaaattcaggtaatttgacaggggaaaaatatgtttgctctcagtcatttttatttctttccacagtacatcatggcatgaaatttctgccacaaataacacaaatggattctaacagaaacattctaacaagcctaagtgagttggatctagagtagactatataatttggttagctatgttagtagaaaacaagcactactttcataagttggattgtgaattttccaggctgagtgaaagtttgctgtgtgttcacatatgttgtaccgtggggaaatagatcaagaattcattttagtgacattagccaaaaggtcagatgccatactgccttccagagtgaatatacatacaaccttttcatgtatctttacatatttagaaatggataaaaaatgggagtctttagaatatttgacattcttgggaaccaaagataaaaagaattgaaataacgtgaaattttgtagaacaaa

SEQ ID NO: 716795 - DNA, 1352 bp, Homo sapiens
tatgttatgtgcttggcttcatgtaaccgtaaaaccagctctaggacataggtattgttatccccactttgcagacagaagacactgaggtttagagaggttgataatgattaaaaactatccaaaacctgggaattgagagaaagggacaatcacacatcctttcagtactggagctctaatgggctcacccaaggtttatctgattcttaaggggaatggacttcatctggcttctaattaattaggcccggattatttcatgcaagatgttaatttgtaaatgataaataagtcacaaatgagttctgcctggtagagagcaaatgatttctgtctagtagaaaagataaccccagaagctatggtttcaattggcctgtaggacattaactacctttgtatataacttagccatcttatttccatgtgtgtgttttgtttttttttcttcagtgactccatacacacctctgggatccttctttgagcttgatcgtccttccggttacttmattaatgagataatctctgatgtgtgttcactctatatttgtatgaaagtcatggctttttaaatttttgtttttatttttgaaaattacacttggatagtaatttgtacaaggatcatcaagctcagaaggagtacaacataatttgtctggctttcctcaaggagcaccaagaaagacagccaactgtgccttgatttaacatagtatgcactgcagtcttgaggtattggtaaagttaagttatacaagctctaaggaggaatacttctgtttcttattttcagggggtaagaacagtggaagatgtcacaagagaggagacatttaaggcagcattaagtaatgagcagatttctctgattctcatcatatgtggaagaataatctccaaaagttattaagtattaagaaaaaaataggaagggtaataacaatagcagtggtaatgatgcttaattgttttataactctcacctcactgatgctttacaaagcctctatgaggtaggctatttccattttcagatgaaacggaggcacaaaagagcttaagtggcttctccaaggacaccagacaggccagtacagagctggatgttgagtcagtgcccctgtcctgggcccatgttcctctgtgcctctcctgcctctgtcttaatatgttcactaagatttctagcccttggtcttgggggacatacaatctcaggcttagtcctttggcttcaggcaggatagaaatttttattcctgcttgacatatgaggagcccttggaagcttgaaatgtgtaaatgacttgtcagctaggaagaggttgaaagaggagactttg

SEQ ID NO: 716796 - DNA, 584 bp, Homo sapiens
ctgctgatgtaccaggcattgtggtcatgactttatgtggattatctcccttaatcctcacaacaacgcatgttatagtttcatacccattttacaggtgggaaaaatgagacctggggagattaagttgctgccatttgcacacacatagtcagtgatggagcccagatgagatggtttataacagtctgactccagatcccatactctgagcctctacggaaaatgttctgtttcagatgaaggacccaccagggaacaggaaagaaaggctcaaggccagtggcaagagtccccagaacatttccctggagaactttcactgtgccctgtccactgctgtgtccccacaattgcattctgcaatcccactagcaatggcttggtcagaggtcgagccaccctgacctctcgggcycttgcatacgcagttccatctgtctcaaatgcccttccctctgcgctgaacttggccaactcctgcccagattaatagctctttcctcagagaagcctgacctggccagattcagtctcaccacgccatgtaactctgtcttacaggctctagcacagttgttatg

SEQ ID NO: 716797 - DNA, 2117 bp, Homo sapiens
ccccctcagcagagttataaaatctctcttcaccctggcctgtggaggaaatgttatgctacagtgagaggtggtgggcacagccttgcagatgggaaggctggagatcggcggcagcacaactcagccacattggcagtgcatgttggaaggaatcctagccttctgtggaggagctgagatgatgttttgactaagtacacagcaagatgacgagtaagaracagaaaatagggagaacaaactttggaggacatataggagagatacaagatgaaccagactaacccagaactatcaatttcatcacattaggtaaaagttaatctgcaggttcattagtggggagagaaaggaatctgacagcagcacttctgtgtttttttttagagcatggggtccacccttgagacttgtgaaccctggggtttcttggatgacctcaggaggaccaggaatcttttgaaactgttttaaaatttcttgatgttattgtgtaaatgtacattttttatagggaaaggatgctcaaatgtgtccagaaccccaaaagaagactgactattgcaatagtcaatacatgcataatacttatgcacgtatagctaagtacattgctcttatgcagaacgggttagtcaactcaataagtcaatctcagcacatattttatcatctgaattttcataaagtcttgaattcaaagattcttctatgttttgccatgttgatatatgaaattaagcagatgataccttgtgatgggcaccaacagttctattctgtgtgtagacaaagccaggaaagcaacccctttcctgaactgaccttatgaggtttggtcccatctggatatgcaatagattgcagccaaaggttgcaaactcaaatgcctataggggcaaggcagattacagaagtgagtgaacaggtcaattcataacatgataaagtacaaatcaacactcatcttctctttgggggagactctgaggaacagtggagcaccttgcagggagccgctatcactcaggttcagctgacatttaccacaatggaatacatattcagcatttccagatcttctaggggatctagagaatctagagatctgattttttacacaaaaatgtctcttatgttcagaatatccagaaaaagttctacaagatgtatggatctttatctatttaatgcatgactgagccataaatctttgtttgaaatgacctggattaaatgcttttaaaagtcttctaaaacttaaggtttataaaactctaaaattattttaacttaaataatattatgtaagaatatgtaggcagttagaaactcactgttctttgaagttggagttggtcgtattatccacataacatagaatgctactaggaaggcacccaaggagagcattccttcaggtgtttggagggatgtgaacttgatccatattgtctacatggacagatagaacctgtgatgttactaaacctagagaatagctggtatttttagaaaggaaattttactgtatgggaaatgacactatatggagcccaagttgaaggtctgttccttccctgagatggcaagagtggggcatgaactgtcagaacagtggcagacagacagaaggctggtgatctggtgagtaggaaggcgtcggatgctcattttggcagtagaggcatctctaccaaacatgacagtcaagtttctagcttgcctggtgacacacaccaagtctggagacccagatacttcgaaccttactcagccacacccaggagacacttactctcccaagcccagtagctaatgggcaatggtggaagagagccccaaggggtcatggggggtttgcactgggttcttatagaaagtccctgcttacagaaggggctgtttcacagtgacccaacttttaatccctttgccttacttttaaccagaagtgtgttccgaaagcttatttttatggcaggaattatggcattattttatattcattagtcctctgctcttagggctgaggataccacatggtatctgtcgtgagggccacgtctaacaaaagaatattcttcttttttttttgaaacggagtcttgctc

SEQ ID NO: 716798 - DNA, 1441 bp, Homo sapiens
cccatcacatgaagagaacaaactcttccttgggacagaatcaatgccaatgcaggactaaacttgcgctaattggtggtttcatcttgcagaaatgcctccaagtctaggaccctaacacctaaagattaggccatttagggaaatttayggaccagaatataatctcttattttttttttaacctttctctcttagagtattttccaaaagaagagcaaggggtatgtatctaacatgacatgtctcattagacacatgaagttggctttccatgcatccctttggatttttttttttcctggggattccctcaaggtagtgtgggcccacaatctgtgatattaggaacaacataatccatttgaaggaaaaaaaagaatattctccaaatagcacttactgccttattctttcctttgctagcggagctggcagggtttcccttggcatctgtcttcctcccaagtgaggtcaagggcaatgtagaggttttcagctggttggctgcctggtagttattattattgttttggttgccacttagtgtctccatgatagatcgaaaggctccaaaaggccttttcagttgatcccccgattcgttacttgtggaggtccgctggagagtcctgcccttatctttgtctttttctccattcagttcaaggctaggctgctccatctgcaccacaggctcctcaaaggtaactctcagttttaagttctgagatgtcctacgcttggaagatggagacttgagggcactcttgggacttgtggcaactttctgggcagcagtactgtcagggctgggctgctgagggtcaccagagggctggtttggaggaatactccctgagcctggatactgggattctaagtctggttcgctgctctctgaggtgggagatgggctgtggccatccagggatttggaggccttgatgctgaaaggaaacctgcgtccccctgatgccaaggtgtgtttcttaatcatcaggtgcaggctttctgcgctgtccatactctctacgctttctacaatgggctgcggccttggtcggtcagccttcctcactggggtagtcttggggtcctcagagttgttggagtctgtgtcagactcactcagtgacctctgcatcagctgtctcagcctggctaacttcagttccctcttctccagtgggatctttttagaatttctagaggaagcctgagcatcctggaattccaaggacagtttttcctgggtgcagacattttctgagatttcctttcccaataactggcgtaagattttatcagaatcttcatcttttgctttgggtctagcccggctggaggctgacaggcttccaagaacctgaatcccctcttggactcctggcttgcttttggctacagaatcatcatctgcatctggagatttccactg

SEQ ID NO: 716799 - DNA, 642 bp, Homo sapiens
tttttttgtaattaagaaattaaagagtaaagataagagactctttacttctgtatgagtgaggacataactcatgccaaactcctgagttcttatcactttcccactatattcatttatcatgggaatctatctgcttatcagacctgtgtgaagtaaaacatcaaaaagcacaagcaatcttgagcccttaaagaaacatgaattggcatgacccttcaaaatgcatcttcatcaactgaagctatgtcaactcaactgtctcacgtgacaagaggttataatgccaaagactgmagacttaatgttgcaggggaaatagggtccacattaaaaaaagagagtacatttcatttgtttttactgggctcttttcattgttgttgtctgcaacccattttatacagaattgtttggcagcagttttgtgaaggagaaaaagcttaagggaaaagtatgttgctgaaaatttaaaggattatttatttgtgttatattatctgagatctcatagcctatctgcctagctacactgctaaacttcaaaaatactagaatgagaaggcgctggggaattggttagcaggaaaggtgtggacataggattcaatacagcatgactggacccatcatagtatttca

SEQ ID NO: 716800 - DNA, 642 bp, Homo sapiens
tttttttgtaattaagaaattaaagagtaaagataagagactctttacttctgtatgagtgaggacataactcatgccaaactcctgagttcttatcactttcccactatattcatttatcatgggaatctatctgcttatcagacctgtgtgaagtaaaacatcaaaaagcacaagcaatcttgagcccttaaagaaacatgaattggcatgacccttcaaaatgcatcttcatcaactgaagctatgtcaactcaactgtctcacgtgacaagaggttataatgccaaagactgaagacttaatgttrcaggggaaatagggtccacattaaaaaaagagagtacatttcatttgtttttactgggctcttttcattgttgttgtctgcaacccattttatacagaattgtttggcagcagttttgtgaaggagaaaaagcttaagggaaaagtatgttgctgaaaatttaaaggattatttatttgtgttatattatctgagatctcatagcctatctgcctagctacactgctaaacttcaaaaatactagaatgagaaggcgctggggaattggttagcaggaaaggtgtggacataggattcaatacagcatgactggacccatcatagtatttca

SEQ ID NO: 716801 - DNA, 624 bp, Homo sapiens
ctagagagaaaaaaagatataccacatagagttgttaatgatgactaaattagctaaaatacatgaagcatcatctaattcctaaaatataacaggcatacaataaagagtagctaccattttttcctcagatctgggctatatttagcttgtgtgttttttcctcattttcctcaaaccccagaatgtccccaggaattcaaggagtctggaggttaatgcccagtcttaagtatttagtcatgaaaattaaatttgaaaatattctttcaggaaccatctcactgactaaaaccatgactgatttaaaatgctacttaggaatatacaaggcagaaattttaaagatgatgcagagtgttatgactagaaagttctgatggaatcttttacccactcacgcattcattaattcataaaataaacgtcttttaagaacctgtgctgggccagactctctgcaggtgctttacccttattatctcctagccctcaccaccatactagctcagcagcagcatstggtattggaagtcggtctgcctaaatatgagctattttgtttaaaaccacaggtgtaagcctatctgtaaaatacatcagttttcctcagtagacaacgtg

SEQ ID NO: 716802 - DNA, 598 bp, Homo sapiens
cagttctttgctaaaattttcagacttgtctcttatctccctgtttatgcaaacagttggtttaaagtctgataattgtttgaagtctgatagcacaaacattggcagccaccatagctgtttctattttccataatttccactggtctcattcatgttgtgttatttccttgtgtgcctagttatttttactgtgggctaaatactgtacgtaaaattattataggagtagcctgatgcctggggtaattttgtatatttcaaacatatatatttatatttgaaaagcttccagcatccccactaatgatccaagattattttaatccaaactgggctgcagtttctgccagagctatcctacttccacttccctcttagtccccaaatcaaaggatagcatgtctaccttggttgatctgaattccaatgttttttcctcagctcagtaatgtgttgctctacctcctagtctctctactaactcttgctgaattaggaaatgtgtcaagaggactagtagccctagaatactgsgcccacctcttggatttccacctcctcccagatcttagatcagtgattttttattttctta

SEQ ID NO: 716803 - DNA, 676 bp, Homo sapiens
ctcttgggttcaaacgattcttgtgcctcgtgagtcccatgagtacgtgggactaaaaatttgggactaaaaaagattaaaaattacattttgtaatcttttcttatcttctcagtgctatgattgtttgacaatacagaatttccattgattttggttatccttrcataatcttgttgtggattattttccaacacagtacatcatgtggtcctttagcatctatttgtatacagtaaatatgctgtaaatgtgaagaatatatacttttcattgatgtgacagtgatatgttttttacaaactgttagacactttagggtcacgatggaaaaatattccttactttaggctacacgtttttgtgccctgtcagtgttttgtcacgatattggaaatagacttccgtaaaaataatttgaagcacatgtaatcgccctttatttgttaaagaatcttatgcttttctgttcctaaactttgagggtcatgtttgcaaagtttaaaataagtattgttttttgtgtcatatttacacatttcagcattatttaccatctgtacttaatttgaaaccttttggtgtgtatactttttagatatctcttccaaatgcatgatgaaggagttctcgtcaacagcacaaggcaatagagaagtgttccatgcagggacat

SEQ ID NO: 716804 - DNA, 676 bp, Homo sapiens
ctcttgggttcaaacgattcttgtgcctcgtgagtcccatgagtacgtgggactaaaaatttgggactaaaaaagattaaaaattacattttgtaatcttttcttatcttctcagtgctatgattgtttgacaatacagaatttccattgattttggttatccttacataatcttgttgtggattattttccaacacagtacatcatgtggtcctttagcatctatttgtatacagtaaatatgctgtaaatrtgaagaatatatacttttcattgatgtgacagtgatatgttttttacaaactgttagacactttagggtcacgatggaaaaatattccttactttaggctacacgtttttgtgccctgtcagtgttttgtcacgatattggaaatagacttccgtaaaaataatttgaagcacatgtaatcgccctttatttgttaaagaatcttatgcttttctgttcctaaactttgagggtcatgtttgcaaagtttaaaataagtattgttttttgtgtcatatttacacatttcagcattatttaccatctgtacttaatttgaaaccttttggtgtgtatactttttagatatctcttccaaatgcatgatgaaggagttctcgtcaacagcacaaggcaatagagaagtgttccatgcagggacat

SEQ ID NO: 716805 - DNA, 676 bp, Homo sapiens
ctcttgggttcaaacgattcttgtgcctcgtgagtcccatgagtacgtgggactaaaaatttgggactaaaaaagattaaaaattacattttgtaatcttttcttatcttctcagtgctatgattgtttgacaatacagaatttccattgattttggttatccttacataatcttgttgtggattattttccaacacagtacatcatgtggtcctttagcatctatttgtatacagtaaatatgctgtaaatgtgaagaatatatacttttcattgatgtgacagtgatatgttttttacaaactgttagacactttagggtcacratggaaaaatattccttactttaggctacacgtttttgtgccctgtcagtgttttgtcacgatattggaaatagacttccgtaaaaataatttgaagcacatgtaatcgccctttatttgttaaagaatcttatgcttttctgttcctaaactttgagggtcatgtttgcaaagtttaaaataagtattgttttttgtgtcatatttacacatttcagcattatttaccatctgtacttaatttgaaaccttttggtgtgtatactttttagatatctcttccaaatgcatgatgaaggagttctcgtcaacagcacaaggcaatagagaagtgttccatgcagggacat

SEQ ID NO: 716806 - DNA, 676 bp, Homo sapiens
ctcttgggttcaaacgattcttgtgcctcgtgagtcccatgagtacgtgggactaaaaatttgggactaaaaaagattaaaaattacattttgtaatcttttcttatcttctcagtgctatgattgtttgacaatacagaatttccattgattttggttatccttacataatcttgttgtggattattttccaacacagtacatcatgtggtcctttagcatctatttgtatacagtaaatatgctgtaaatgtgaagaatatatacttttcattgatgtgacagtgatatgttttttacaaactgttagacactttagggtcacgatggaaaaatattccttactttaggctacacgtttttgtgccctgtcagtgttttgtcacgatmttggaaatagacttccgtaaaaataatttgaagcacatgtaatcgccctttatttgttaaagaatcttatgcttttctgttcctaaactttgagggtcatgtttgcaaagtttaaaataagtattgttttttgtgtcatatttacacatttcagcattatttaccatctgtacttaatttgaaaccttttggtgtgtatactttttagatatctcttccaaatgcatgatgaaggagttctcgtcaacagcacaaggcaatagagaagtgttccatgcagggacat

SEQ ID NO: 716807 - DNA, 676 bp, Homo sapiens
ctcttgggttcaaacgattcttgtgcctcgtgagtcccatgagtacgtgggactaaaaatttgggactaaaaaagattaaaaattacattttgtaatcttttcttatcttctcagtgctatgattgtttgacaatacagaatttccattgattttggttatccttacataatcttgttgtggattattttccaacacagtacatcatgtggtcctttagcatctatttgtatacagtaaatatgctgtaaatgtgaagaatatatacttttcattgatgtgacagtgatatgttttttacaaactgttagacactttagggtcacgatggaaaaatattccttactttaggctacacgtttttgtgccctgtcagtgttttgtcacgatattggaaatagacttccgtaaaaataayttgaagcacatgtaatcgccctttatttgttaaagaatcttatgcttttctgttcctaaactttgagggtcatgtttgcaaagtttaaaataagtattgttttttgtgtcatatttacacatttcagcattatttaccatctgtacttaatttgaaaccttttggtgtgtatactttttagatatctcttccaaatgcatgatgaaggagttctcgtcaacagcacaaggcaatagagaagtgttccatgcagggacat

SEQ ID NO: 716808 - DNA, 676 bp, Homo sapiens
ctcttgggttcaaacgattcttgtgcctcgtgagtcccatgagtacgtgggactaaaaatttgggactaaaaaagattaaaaattacattttgtaatcttttcttatcttctcagtgctatgattgtttgacaatacagaatttccattgattttggttatccttacataatcttgttgtggattattttccaacacagtacatcatgtggtcctttagcatctatttgtatacagtaaatatgctgtaaatgtgaagaatatatacttttcattgatgtgacagtgatatgttttttacaaactgttagacactttagggtcacgatggaaaaatattccttactttaggctacacgtttttgtgccctgtcagtgttttgtcacgatattggaaatagacttccgtaaaaataatttgaagcacatgtaatcgccctttatttgttaaagaatcttatgcttttctgttcctaaactttgagggtcatgtttgcaaagtttaaaataagtattgttttttgtgtcatatttacacatttcagcattatttaccatctrtacttaatttgaaaccttttggtgtgtatactttttagatatctcttccaaatgcatgatgaaggagttctcgtcaacagcacaaggcaatagagaagtgttccatgcagggacat

SEQ ID NO: 716809 - DNA, 656 bp, Homo sapiens
catccagcctggtgtgcagtggcgggatctcggctcrctgcagcctcaatctcctgggctcaagggatcctcctacctcagcccccaccaagtaccagctgccttttaaatgtcgctcatgcatcacgttccctgcaggatcctgtgtctctgaagataagtagcagcctgtgggaactgacagaatggctgctgggatgtggccatgggaacgatcttcttatcgcagactgtacttggaatcctggggatttctctcttatttaccattatctgtccttttacatcactgggtgcaggttaaggtccacagatttgatgatcagacacctaattgtagccaacaccgtattcctcctccctagaggagtcccacagacaatggcagcttttgggtttaggcatttccggagtgattctggatgtaaatttcttttttgtgtccacagagttgtcaggggagtgtccattggcagcacctgcctcctgagtgtctcccaggccatcaccatcagccccaggagctcaggtgggcagagcttaaagggaacgcccccaagcacgctggctcctgtgtgttcctcagctggctcctccctggtcaatatcattgttctcatgcacgtgaccggcaagtggagcaacaaaaataccac

SEQ ID NO: 716810 - DNA, 1385 bp, Homo sapiens
tgcatactaataagcaatttaaataaatgtcttaaggttctctagggtaattattagaagataaatatgtattcttagcaggtaatagaaacgcatataataataacaactcttctgttcataaatatcccttcaggtgatgacataagaagtcactacaatataaagaaaggggcccaaataaaggcaaatttttttgcacacatctgttcaatgaatcaaccatatgatgcttaattcaaccctttattcagttgctagtctagtctaaaagttcctggatggttcctggatgactgcttcatctatttttctaatcgccatataaaataaaagcaatttgtttatttgtttgagtctccagacatcctggttgtttttcacccaagtatctgaaaactggagaaacattcatctgggtacccaccaaagtcatttcttgtgtaaggggaggagcaaacacaagaagactcaattttttacactgagatagaagcagaattaaccacttttgttaacctggcacaattctgctctggacatcctcaaatgtctcaaagacacccagcttattgtgagagttcccagtgaccctgggctgatggcccaatgataaaacagacaggagagactcaggctaattctaaacaaaaaattaaactgccctggagaagctccagaacctggatcacctgtcctgattatccagctcttaggtaagaggaagaacaggaatattctactccagtcccacattttagggacaggtgtagttgtggttatggctctggatacattatcacctttctataactctgaagatgcttgttcacacttacgtattctgccatcagattctatttatacctggtgsccctcacataactgtagcaggtcactggacaagatctgagaagctgaaagaatcacattctcaaagaggaactttaagatgtctatgttgacatctgacaatgcataaaatgtctagttagttttctctacattctcaattcaaagtctggccttatcttgtaaattccaggaagagaacagaccttatttgcagattctaggtgggatcaacctggctcttcattcttgggtgttacagcaagcagagtacaatcaaaggaaagatcaccttatagaggctgctttagcacattctgaaagatatgtctacctaaaagaaaaaaagctaaggcaacatgaatgtaagtagaccgtttatttgggcaaagcttgaggattgtaacctgggagcaaaccttcaagttgcctgtcatctacactttgattaggagcagttacaagttgatctgaaaaggcaaaaagagagggagagagagatggctgatacaaagttgtttaccagaaatttt

SEQ ID NO: 716811 - DNA, 886 bp, Homo sapiens
ccagcctgggccctggcaactctaatattggtgaggcctggggcttgggaggaacattccaagacttgaaggatggtcctggatctggggagagagctccaaacaggggacggtgtccaggcctcagagagagggttagggctttggagggggaactcctggcctggctagtagggatgacagtgctagtagtggatggggatggaggtaactggagaatctggtcctcagagttaggttttgggctggacacagcgactcatgcctataatcccagtactttgggaggccgaggtggaaggatcacttgaggccaggagttcgagaccagcctgggtgacatagcaagaccctgtctctacagcaaattgaaaattagctaggtgtggtgatgcccaccagtagtcctgccactcaggaggaagaggcaggaggattgctggagcccaggarttggaagctgcagtgagctgtgattgtgtcactgccctccaacctgggtgacagagtgagaccctgtctctaaaaataaataaataaataaataaataaataaataagtcagagttcgggctttggtgggagtttgggcctggtgtgggggtctgtcatgtaggatttaggcctggggtgggttcttgccccataatgaggatttgggcccagagtgggagtctgggcatctctgggaccaggttagagggatctaggctccagattgaagggatctaaggctccattttggagggatctaggccccaggttggagggatctaggctccaggttggagggatctaggctccaggttggagggatctaaggccccaggttggagggatctaaggccccaggttggagggatctagggcccaggttggagggatc

SEQ ID NO: 716812 - DNA, 886 bp, Homo sapiens
ccagcctgggccctggcaactctaatattggtgaggcctggggcttgggaggaacattccaagacttgaaggatggtcctggatctggggagagagctccaaacaggggacggtgtccaggcctcagagagagggttagggctttggagggggaactcctggcctggctagtagggatgacagtgctagtagtggatggggatggaggtaactggagaatctggtcctcagagttaggttttgggctggacacagcgactcatgcctataatcccagtactttgggaggccgaggtggaaggatcacttgaggccaggagttcgagaccagcctgggtgacatagcaagaccctgtctctacagcaaattgaaaattagctaggtgtggtgatgcccaccagtagtcctgccactcaggaggaagaggcaggaggattgctggagcccaggagttggaagctgcagtgagctgtgattgtgtcactgccctccaacctgggtgacagagtgagaccctgtctctaaaaataaataaataaataaataaataaataaataagtcagagttcgggctttggtgggagtttgggcctggtgtgggggtctgtcatgtaggatttaggcctggggtgggttcttgccccataatgaggatttgggcccagagtgggagtctgrgcatctctgggaccaggttagagggatctaggctccagattgaagggatctaaggctccattttggagggatctaggccccaggttggagggatctaggctccaggttggagggatctaggctccaggttggagggatctaaggccccaggttggagggatctaaggccccaggttggagggatctagggcccaggttggagggatc

SEQ ID NO: 716813 - DNA, 2442 bp, Homo sapiens
gaggccctgggaggttgaggctgcagtgagctgtgatcacaccactgcactccagcctgagtgaaaaacaaacaggccaggctcagtggctcacacctataatcctagcactttgggaggccaaggcgggtggactgctttaggtcaggagtttgagaccagcctggccaacatggcgaaacaccatctctactaaaaatacaaaattagccgggcatggtggcacacacctgtaatcccagctactcgggaggctgaggcargagaatcgcttgatcctgggaggcagaagttgcagtgagccgagattgcatcactgcactccatcctgggtgacagagcaagactctgtctctaaaaaagtaaataaataaataagtaataaaaataaaataaaataaaacaaacaaacaaatctaccatcaaaataaagaaaatggagaactcccgtctgtgagaaaactgcctgcccttgtcatgtttagtttggggttcctccatttcctcggctccttttgggggcttctgttctgcctgtcatatctacagattcgatgaccccatacggcaccccatcatgcctgcatcatgcctcccctcttggcctgtgcctccttatgtctgcagatgggcttcctctagcccacacctccatcaaaggacagggacccccctgcctcgtgccccatgatgcggcccacatggcgcctccggcctctgccccctctccccacagatatcgacgagtgtcgcatctctcctgacctctgcggccagggcacctgtgtcaacacgccgggcagctttgagtgcgagtgttttcccggctacgagagtggcttcatgctgatgaagaactgcatgggtcggtgactgccgggcaggggtgtggtgggcgcccctgggcagggagggcattgaggagagggagggtggggacggctgttgctgtgtggacgtggatggagggggcaggaggagggaggagctgtaaattagctgaggtacagtgagtctgggctccatgaggcctcgtccttaggagagagacctggggcctgagacctgggggtggccggcacactggggtgtggtctcccagggagggtgtgtagcttgggtagaggacagggaccctcagagaagcctgggaaatactgccggttatgaggcctctcgtccccatcattgacttcgttattcatttgatgagcatttcacatgcatcctctgagctagaggcactgcagggagctctagctccagggagccctctttccttggagctcacagcctaacaggaagacagacatgaataacatgaatcgctgaggaaatgcaaaactgggctgggtgcagtggccctcgcctgtaatcccagcattttgagaggctgaggcagtaggattgcttgagtccaggagttcgaggccagcctgggcaacataacaagaccctgtcactataaagttttttaaaaattagctaggcatggtggcgcgtgctactcgggaggctgaggagggaggatcccttgagcccaggaggttgaggctgcagtgaaccataatcgcacttttgcactccagcctgggtgacagagtgagaccctgtctaaagaaaaaaggaaggaaggaaggaaggaagaggaaaaagccaggcatggtggctcatgcctgtaatcccagcactttgggaggctgaggtgggcagattgcctgagttcaggagtttgaaaccagcctgggcaacatggtgaaaccccgtctctattaaaatacaaaaaattagctgggtgtggtggcgtgcacctgtaggtccagctactcaggaggctgaggcaggagaattgcttgaacccaggaggtggaggttgcagtgagccgagatcgcgccactgcactccagcctgggcgacagagcgagattctgtctccaaattaaaaaaaaaaaaaaaagaaagaaagaaagaaaaagaaaagaaaagaaaaaaatgcaaaattgccactgtcagaagcccttaaaagggccacatgatctgatgagagatggctgagacaggattgcttgagaccaggagtttaagaccagcttggtcaacatagagaggccccgtctctacacaaaatttaaaaattagccgggcatggtggtgcctgcctgtagtcccagctactcaggaggctgaagtgggaggatagtttgaacacaggaggtggaggctgcagggagctgtgatcgtgtcactgcactccaggctgggtaacagtgtgaaaatctgtctcaaaaaaaaaaaaaaaaaaaaaaaaaggctgggctcggtggctcatacctgtaatcctggcaatttgggaggctgaggcaggtgaatcacttgaggtcaggattttgagaccagcctggccaacatggtgaaacgctgtctctactaaaaatacaaaa

SEQ ID NO: 716814 - DNA, 2027 bp, Homo sapiens
agatgcatgccacaatgcccagctaatttttctattttttgtagagatgggattttgccatgtttcccaggctggtcttgaactcctaggctcaaatgatctgcctacctcggcctcccaaagtgctgggattacaggcactgagccactatgctcaactaatcttctgttcccttccttccttccttttccttccttccttcctctctctctcttccttccttcctctctctcttccttccttcccttccttcccttcccctcttcctttctctctctctcttttctttcttttttctgacagagtcttgctctgtcactcaggctggagtgcagtggcacaatcttggctcactgcaacctccacctcctgggttcaagtgattctcttacctcagcctcctgagtagttggtattacaggcacacaccaccacagccagctacttttttttttttgtatttttagtagagacggggtcttgctatgatgcccaggctggtctcaaactcctagactcaagtgatctgcctgcctcagccttctaaggtgctgggattacaggcatgagccactgcacccagcctaatcttctattctcaaaagaagaaagtatccacccgcaggtaacagaattctaaaatattactgtctggacccttttacttcattttcctagcttatacctgccaaattattggtaaattcagctctgtgaggtgaagagggccatataaatgatcatactctcaccttgaatcctatctttaggatcttctacatcacgagactaaagcaaagtctgactcctttccactcttctgctatcaacatcagctcaaaaatacataaaattaataaggttgcttcctgatggcatcagtgaaataactttatggtcattcatataaaaacagacaaccctggcccagcgcagtggtccatacctgtaatcccaacactttgggaggctgaggcaggtggatcacttgaggccaagagtttcagaccagcctggtaaacatggcaagactgaccctatctctatttaaaaaaagagaaatacagagaatcctttcaagatcaccaagtcagtatcaatgagcacctctgcagaaaaaacaggagctcagaatggacaaggccagagaaacctcagtaaggtgaatgtgtccgtatagtttctttcgaattcgtgaaaagaaaacttgagtccctataaactgttgctacttcaagaatagagagggaatttctcctttctgggctcagcctgacatgtcccttttaagaataatggtgtgagatgcatcgaaggcttactatttgcctggctctatgtcttagcttgggctgccataacaaaatatcatagtacaggttgggtagctatttatatatttatttattaagagggccttgctctgtcacccaggctagagtgcagtagaccaatcatagctcactgtagcctcaatctcccagactcaagtgagccttccatctcagcctcccaaacagctaggactacaagaacacaccaccaagcccagctaatttttttaaacttttttttgtagaaacaaggtctcaccgttgcccaggcgggtcttgaactctgggcttcagcctcctcccaccttggccttccaaaccgccaggattatattgtgagccccaagacccggcctaggtggcttaaacaacagacatttatttctcacagttatgaaggctgggaagtctgagatcagggtsccagcatggttggattctagtgaagactgtctacctggcttgtagacaggaaactagcttcttgtatgggagagagaaaaggagggaagaggataagggagagggagggagaaggagggagagggagaaggaaggggaatggggggagaaagagagagaaagagagctctctcatgtctcttcttttttttttttttgagacagagtctcgctctgtccctcaggctggagtgcagtggtgcgatctcagctcactgcaacctccacct

SEQ ID NO: 716815 - DNA, 1249 bp, Homo sapiens
tagtgacctaaaacaacaataaacgtctcacatgctgtctatgggtcaggaattttgaaagtgccattggattcacactccccttagctgtgcttcttccctctcactctgcccttccgaagtctttgtccaagctatctctctttccagaccagcacacaggagggccagtgccatttgcgcttatgggaaggaaggagtcccctctgccatggcctttctgtgttcctccacccagcagtggaatcgaagctgttcagcaccttctccaaaatattggcgcccaatataccctaccattcaccaatgagagcaggttgcagaccactactgtctttctccgtctttcttttcctttttttttttttttttgagacggagtctcactctgtcgcccaggctggagtgcagtggcatgagcttggctcactgcaacctctacctcccgggtttcagcgattctcctgcctcggcctcccaacatgctgggattacaggcgtgagccaccacgcctggctaatttttgtatttttagtagagacggggtttcaccatgttggtcaggctggtcttgaactcctgacctcaagcaattcacccacctcggcctcccaaagtgctggaattagaggcgtgagcccccacgcccggcctactgtttttcttatgactagcactatattgatggagaggagatgcgggcagtggtttcctgcagaagtgacagcctcagagtggggttccaacagaaaggatggtagcaggtcattgtcaactgtgtatccctacctagaacaaccaaaaccttggggtcagaaaaagataggctgggggtattgtaggacacatctttgaaaatggtcgtccccaggggagaaacagctaaatgggtgcagctacctggtttcaccgcatagacgcaattaattactcagcatctcacactataatggggcgccctgggcatttagctacacagcggaaagccacacctgagtgtgtgtggcagccttggggcgaggtggagagggttgtwgcagtggccctgccgccacagaaggagagatgtcctttgaggaaaccatggcaatgtgtggtcttgcggagagatggggcttaggaattggatgcaattgactgaaaatgggaagtgggtggcaggaatggggtttaggaattgggggaggagaatcagttctgggatgtagtgataagaggtccaaggaatgattgcatgcagatacttgg

SEQ ID NO: 716816 - DNA, 1957 bp, Homo sapiens
tggccctttggaggaccacagatcattgtaatacctatgagtttttgtcctcttccttctcaaaaaccaagtttcacccacttggaaggtgatatcctccaccctcattgagaatgcatgctttaggtgaaaaaaaggaaaggattaaatggacagcatttaaacacatcaatatgacatcactgaaagtgggacatcagactgtaagggcctcatgatgtgatgtaataggaagtacacagcaccaactatgaattaaaggtgatttagggaaaatctgatccaaattccatcaaacctctagatctaactgcctgtttacagaaatatgaaggaacggaaaacaaattataagacagtacaaagaagcaattagctaaaagcagtatacagaatattctacgggacagatgatctagtttttctacaaatcaacagcaccaattaaaccaaaacaaaacacaggagggaaactatcatgcattaagtaagtttaacaggtttggccaccaaatgcaatgtgtggactctatctggatccagatttgaacacacctattgtaaaaatatgtctttgaaataattgggaaaatctgaatatgggggtatacaagattatgaaataaccaccacgctgttacaccaacataagaaacaaatttattgttttaaacttattgttagtttttttttttatgttggtataacagcatcatggttattttaaaatataatgtcctttttggtaatatatgcttataagaggataaaatacaattttgaaatactataggaaaaaacggggaaggattgatacaaaggtatttacaaatgtttttaattacagctaggtgttgaacatgttggggttcgtattattctttagcctgcttgaaaacatccacaataaagttaaaattttaaaactcttcaaatttcccccagaaagtacagttatttttcatcaaaaccttagaccaggccaggcgcggtggctcacgcctgtaatcccagcactctgggaggcccaggcgggtggatcacgaggtcaggagatcgagaccatcctggctaacacggtgaaacctcgtctctactaaaaacacaaaaaattagccgggcatggtggcgggcgcctgtagtcccagctactcgggaggcttaggcaggagaatggcgtgaacccggaaggcggagcttgcagtgagccgagaccgcaccaccgcactccagccagggcgacacagcgagaatccgtctcaaaaagcaaacaaacaaacaaaaaaatcttagaccagaaaggactgctgtatcatwgggtggaaaggagaggtgtagtgtggctggggagtagagctaaactgatgatcccatccccgcagcatcatttatggggtgcctaaggaccagtcactagcatggctggttcttccttaggaagatgttgctggaggtagaaaacgtttcggaaaggaagaaatttgaggttagaaagaaaacaggaacttcacacaagactttcagaagtgcgatattcttttcctctgggtgcctctcttggaaaacgcagaaccgagaaaagaaataagcatcatagaacatcagagctctcggagcagacgaaacaatttaggataacaccaacctctagaaagggattagtcttccccacagggctgtcaagctagaataggacatctttaacagtggtcttcttcctaagacacttccaggggtaaagcctcaccatcagggaaacttcaaaaagagcctcttactctgcaaagaaactgcagcagctgtaaccgcacgattctcagctggcttaatgatgtccgtgtcacacgaggagtactgcggcccgggaggggccaagcgctaggagcattaacaggcggcaggtgagcccaccccgcggccgcacaagcgcacacgcacacgtccagggcggaggaac

SEQ ID NO: 716817 - DNA, 1184 bp, Homo sapiens
tagacatggtgctcttttgtgtgtctggctggaggacagaaacttctacagctttttaattcagcagttgtatccataatttgctgtcaaactctaaagtcagggagcccagatgagaacgtagaaactgattgaaagtagatttctcccttaaaatctagaaggatgcttagtgagcctgagagtactgtcagaccaccttctgctgatttctctttggcaaaataaagattagccaccaatctaccaaatgccacctcattttaatgcctggtatatccacattctccatcaatgatcccagacataagtgtgtgggagacacaactatgtgagtaattaggagattaaaatgtttgggggaggcaacataaatccaggaagaggtgaattagcaatatgggagcatggaattctatgtcaaggtgggtgacatgggtgggtgctgtcacttcattcaattggtacataaggcagttgggagaggcagattagaaaatataatagttgagctgaatcctaagagaagagcaactgtcccttccatgttcaggactttacagtcagcacatcttccccatgctttctcattgctcattcatccccagtggaaaagcaggggaggcaaagtctgtatgctgaagcagaaagactgtttgttggacttagaaagttayagaaataggtaggcctaggataatattattggcaataatgctgcttttagtgctttacctacagagctttttagctcactgtggatagaaatagggttgatggagagtggttatgaacatagacttgggagccgggctgattgggaattcaagtcccagctccaccttttctgagcagtgtgatcctggatgcctcagctcctactatttcagctttctcatcagggaaaaaacagataataatagtacttacatcatagaattcagaaggtttaacagattaactcaggttaagttaggtaggtgaaacaagggagaagcaactgttcagacatggaattaaagggaattgagaagaggaggatttaaaatttgaggctgtataacaatcatttaggttgcctcttaaaaatttagattcccaggcctcagccccaggcattgagactcagtagttctggggcccaagaggccattttataaaagtaaatttacaaaaagtcgcca

SEQ ID NO: 716818 - DNA, 1184 bp, Homo sapiens
tagacatggtgctcttttgtgtgtctggctggaggacagaaacttctacagctttttaattcagcagttgtatccataatttgctgtcaaactctaaagtcagggagcccagatgagaacgtagaaactgattgaaagtagatttctcccttaaaatctagaaggatgcttagtgagcctgagagtactgtcagaccaccttctgctgatttctctttggcaaaataaagattagccaccaatctaccaaatgccacctcattttaatgcctggtatatccacattctccatcaatgatcccagacataagtgtgtgggagacacaactatgtgagtaattaggagattaaaatgtttgggggaggcaacataaatccaggaagaggtgaattagcaatatgggagcatggaattctatgtcaaggtgggtgacatgggtgggtgctgtcacttcattcaattggtacataaggcagttgggagaggcagattagaaaatataatagttgagctgaatcctaagagaagagcaactgtcccttccatgttcaggactttacagtcagcacatcttccccatgctttctcattgctcattcatccccagtggaaaagcaggggaggcaaagtctgtatgctgaagcagaaagactgtttgttggacttagaaagttacagaaataggtaggcctaggataatattattggcaataatgctgcttttagtgctttacctacagagctttttagctcactgtggatagaaatagggttgatggagagtggttatgaacatagacttgggagccgggctgattgggaattcaagtcccagctccaccttttctgagcagtgtgatcctggaygcctcagctcctactatttcagctttctcatcagggaaaaaacagataataatagtacttacatcatagaattcagaaggtttaacagattaactcaggttaagttaggtaggtgaaacaagggagaagcaactgttcagacatggaattaaagggaattgagaagaggaggatttaaaatttgaggctgtataacaatcatttaggttgcctcttaaaaatttagattcccaggcctcagccccaggcattgagactcagtagttctggggcccaagaggccattttataaaagtaaatttacaaaaagtcgcca

SEQ ID NO: 716819 - DNA, 574 bp, Homo sapiens
aacgagaagcgggagggggtgctgggaagcactgcgaccataaattctctctaggccactgtataacaaagcagtcataaaacctcaaccgcattttcaagtcgcgactgaaacaagatgcccagagcaactcctaatttggttcctagaactcaacaagttgtgaactcatttccttggttgggagggaactatgtagaaggcaggggtggagactgacctcagaactttgggcagaaactcaacccaagagttgacagtaaccaggcctgcacaagtctagagatgctagcagagcyttaatagaggcagccccagagctgggctgggaggggaccctggaggacggcatagctggaggtaggaggcccagggagttctgggggtgtctatgctcaaatgcagaaggcatgtagtctggtgtatgcttgatagagcaacagcactcctccaaccgtagactgttctttcagtgatgtgcctgacacgtttatttcatcatctctctgaatcttactttcctatctataaaaaggggttatcaataatctgcctccaatgagagttaagctga

SEQ ID NO: 716820 - DNA, 2079 bp, Homo sapiens
ttaaaggcatatgccaaaccagaatttgagataacaattccaaaaacttgctgctatcagcaaatcaaaagttcactgtagcaaattcacatgaaatcataatacaggttcaaggacaagataaaaatgtagcctacttattgaagttccttatgcttttaataaacaagacgaacaaatatgttgattgaaggagagaacagtatttcatgagtaacttgcagcaatctattcctctattagcaactaattctgttacatctacaaacaaatggccaaatgtaactaatttgaattgaaatgaaacacatagaaattggatatattaacaaatattaaaggatcccctagacttcaacaatcaggtattattttacttatctactaaaaggtagtgtctctattaaaagataaagatgacttatatttagattattcatctcacaagaataaaaagggccggtcgtggtggctcacacctgtaatcctagcactttgggaggccgaggcctgtggattacctgaggtcaggagttcacgaacagcctggccaacaaggtgaaactctgtctctactaaaaatacgaaaatcaaaacaaaacaaaaagcatttagccaagtgtggtggtgggtgcccataatcccagctacttgggaggctgaggcaggagaattgcttgaacccaggaggcagaggttgcagtgagccgaaatcacaccactgcactccagcctaggcaacaagagcaaaactccatctcaaaaaaaaaaaaaaaattaaaagaactgaaatcactgtggccacttactagctatgtgcctttcactgcatcagtttcctcatctgtcaaatggcaatgacaacatctacctcatagggttgctattattaaataagcttgtatttgcaaagcacttggaataattaactggcccacataagcaccatattaagtgcctgaaaatgacaaatttagaatattatatgaccaacttaaaaaatgattatttccaagtaaccaaatttaaatttggtctcttccttaagtgtgaaaagcttaaaagaagggggtggcggggtgggtagaggtctgcactatctcttgcggcactgaggtggtacttgtctacaaacaaccaaaagatacatcatagaaatacatagagaagaaaagaagaaaccttacccaaaggcaactaaaactaacttcctacatgaacatgctacttaattataattctgaaagaatattttccgaagtaagaataaattaagagcttcacagaatgatattaataaaaggttatcaatcatcccacgtggtacacttgcagcatctgcagaaacacatatataatctcattttggaatataaaacatttgacaccttggaacaaagaggctgttaccaccaatccctagaacatttcaagaaaaatactaataaagaaagcagaattgatgatactgctttccaaacagatactgcacatacaaaattataattaataatagatgcatcaaagagttgtgaaatatgatcaatatrttggatcagaaatttgaaagctgattgttgtacactcatatgcataggtgacttcagttttttcctctttattccctcaaataatttaatattccctgattgatataattcaaatggtttatcctgtcattcaaagttaacattttaaatggctctcagaaatgtaattatttgataaatttaattgttctttaatttaagaaaaaggacaaaatttggaagataagattcagggctatttctatttctttttaaattttaaactcacggcatattgaaaaatgaagaaatatctagcagggtcttgaaaactaagatctcttttaaatgtttacatttaacatttactcattgacaacattcactaacataaaatcctatgcttttataatcagaatttcagaggctctaaaaatattcacagtgcaatataggtgataatgggacaaattttacagtggtaaaagaatgtattcttttatcctgtcaggtgtccatagactacaggtaaaatcttatttggaaataa

SEQ ID NO: 716821 - DNA, 617 bp, Homo sapiens
tcaaagcccaacacaaagtcctgggctgcatctggcctgtgggcggtgggttggacaagattgttttaaagaaatgcgatgtttgtaatattagtacaatatcaaactgaacaaactgaaactcagtttcagagacatattgtaagatgccataaaacattaacattccttgcatgccttcccccatatggctctttttaatgtattccatttgaatttgccatatctatgtctaaattgtggagaggagatgtcaaagagaaatgtratttaaaattatctgaccaaaactgtgtgcttagttttgtccaattttagcatgctactcactgttagatatccagtaatgaatatcatgagatactgattgcttccttttcaaaataataattgtagattagaaatgctatttactcagtatctctttctcaacaggtgaattatctacacattgtatgccttttggtcatttcactgctcattaacacctctatcaatggggaggtggtaaaatgcaagctatgagacaaaattcttgttctccttgttaataacattgcaagagatttagaaaagactgtaattagcctctgaccaccatcttgtccacacaaatg

SEQ ID NO: 716822 - DNA, 617 bp, Homo sapiens
tcaaagcccaacacaaagtcctgggctgcatctggcctgtgggcggtgggttggacaagattgttttaaagaaatgcgatgtttgtaatattagtacaatatcaaactgaacaaactgaaactcagtttcagagacatattgtaagatgccataaaacattaacattccttgcatgccttcccccatatggctctttttaatgtattccatttgaatttgccatatctatgtctaaattgtggagaggagatgtcaaagagaaatgtgatttaaaattatctgaccaaaactgtgtgcttagttttgtccaattttagcatgctactcactgttagatatccagtaatgaatatcatgagatactgattgcttccttttcaaaataataattgtagattagaaatgctatttactcagtatctctttctcaacaggtgaattatctacacattgtatgccttttggtcatttcactgctcattaamacctctatcaatggggaggtggtaaaatgcaagctatgagacaaaattcttgttctccttgttaataacattgcaagagatttagaaaagactgtaattagcctctgaccaccatcttgtccacacaaatg

SEQ ID NO: 716823 - DNA, 583 bp, Homo sapiens
ctatatgttccataatgagaccacctaagaagccatgggctgcccactgctgtgaaaacatccttgtcccacttccaaagcttgtgatttgatggagatgaagctcagatggaactccagggctgagcctgagccttgtcaattggaactgaaattttggttgaagtgtgaggcagtctgttaccgacattcaggagcagtttaaacacattgagtcccttggagacagaagctctcaatrtgcctccccatgttttattctagccttctctgtactgatccatttcataaatattcattaagcatctacaactctcttctggacaccagggctggaacaatgaaggtagctctactctatgcataaaagaaacatgcaacgtggggcacaggccattccagtcatgaggatctggtgttggggcccagggagacagtggctaaattgacccagaagaattgaggagggattcagaaagacattgatgtttagtggaattgttaagtcttgccaaacatggagggaagtatgccctatcaaagagagggagcagcttacatacacacaaacttgaatgtgtta

SEQ ID NO: 716824 - DNA, 583 bp, Homo sapiens
ctatatgttccataatgagaccacctaagaagccatgggctgcccactgctgtgaaaacatccttgtcccacttccaaagcttgtgatttgatggagatgaagctcagatggaactccagggctgagcctgagccttgtcaattggaactgaaattttggttgaagtgtgaggcagtctgttaccgacattcaggagcagtttaaacacattgagtcccttggagacagaagctctcaatatgcctccccatgttttattctagccttctctgtactgatccatttcataaatattcattaagcawctacaactctcttctggacaccagggctggaacaatgaaggtagctctactctatgcataaaagaaacatgcaacgtggggcacaggccattccagtcatgaggatctggtgttggggcccagggagacagtggctaaattgacccagaagaattgaggagggattcagaaagacattgatgtttagtggaattgttaagtcttgccaaacatggagggaagtatgccctatcaaagagagggagcagcttacatacacacaaacttgaatgtgtta

SEQ ID NO: 716825 - DNA, 606 bp, Homo sapiens
tccccattctgaacatmccttatgaatggactcgtgctctgagtggccttctatgtctggcttcttccactcagcagcatgttttccaggctcatccacatggtggcatgtgccagtgccttgttcctttctttggctaaagtgtattctgctgtatagatagaccacatttggctcatccatttgttcactgatggacatttgggttgtcatagtttcttcatgtttgtttttacattttttaaaggaaaatttcaagcctgtacaaaagcagagaggatgataaagtgaacacctgtgtagccactacccagcttcagcagtggcccacttgcaaacactcttgccctttctacagcccacccctggctatgtcaaactggacaccaggcaccaggcatcatacctttccaccacttcaggagtgtggaatgtggggccagtcagccccgatgttgtggagtctcagccaaaagggatagaaagagccccctctacacatgctctcacctgttgacacacccagagaaggggtatcatgtgctgcagccccagtctcatttccaagagagcatctcaccagctcagcttgggtcacacgctctc

SEQ ID NO: 716826 - DNA, 606 bp, Homo sapiens
tccccattctgaacatcccttatgaatggactcgtgctctgagtggccttctatgtctggcttcttccactcagcagcatgttttccaggctcatccacatggtggcatgtgccagtgccttgttcctttctttggctaaagtgtattctgctgtatagatagaccacatttggctcatccatttgttcactgatggacatttgggttgtcatagtttcttcatgtttgtttttacattttttaaaggaaaatttcaagcctgtacaaaagcagagaggatgataaagtgaacacctgtgtagccactacccagcttcarcagtggcccacttgcaaacactcttgccctttctacagcccacccctggctatgtcaaactggacaccaggcaccaggcatcatacctttccaccacttcaggagtgtggaatgtggggccagtcagccccgatgttgtggagtctcagccaaaagggatagaaagagccccctctacacatgctctcacctgttgacacacccagagaaggggtatcatgtgctgcagccccagtctcatttccaagagagcatctcaccagctcagcttgggtcacacgctctc

SEQ ID NO: 716827 - DNA, 1429 bp, Homo sapiens
taagtcaaataacatagtgacctccagacacagaaaggcaaactttgcaggttctcgctgattagtggaagctaaaaattaaaataactgaactcatggagatagtaggatggttaccagggcctggaaagggtagttgggagaaagtggagagggctatgggtacaaaaaatatagtcagaaagaataaataagacctagtatttgctggcatgacagggcgactgttgtcaaaaataatttaattgtacattttaaaataactcaaagagtgtaagtggatgacttgtaacacaaaggataaatgcttgaggtaatggagaccccgtttgccctgatgtgattattatagygtatgcctgtatcaaagtatctctggaacccataaatatgcacctactatgtacccacaaaaattaaaaataaaaaagaaacagtagctaaaacaattatattgtgcccaactccattcaagctctttctgtaaacaaattcgttaaatacagctaatttatgagtcagtcataatggaaggaaactttgttgttctggtcgcaacaaaagtgtccttgtttttaaaaagccaataacaagaaaactgtacttgctggtagaggaaacggggagaacagaattgatttctagattcttttgaatagtgaaagaaaatctagctcattttctagctagggataatatgcaggcagagaagaaatacttcctccccctctccaaatactaatacacaggacttgaattgaaacagacttgagttattctcaagaaaagacactagcttccaacttcctgaaattgtagtatgtgcccttttcctgggggctttttatttgctttcccaaaatgtagtggttctgagtatgcacgtgcacgcacgtgtgcacacacacacacttgtgtgcaatgcaaatgtttgtcttgcactggccaggaattaattcaaactcacttgagaaacttgggagaatttggttttagtacctggcaactccacggattataaaagacgacggtgggaataccggatgaccaagagtttgggctttcatgtgaaacagctggactccacgctgggctgtgctacctctaacactggactgtgctactttctgtgtctcaacttcatcttccatccctttatgtttttgccaagaaatgtgaggctgaagagaagcagcgtacacagagtgtctcaaaggacgccgtcttccggtaagggcctggtgaagacgagctctactgacaagtactgatattctacctgtggaatctgaaccattcaacatcaacaatattttccaaccttgatgataaaattgataataacacagaatttcaaagcactgttcagggctttgtgttgctttcttttaaacataaaaccttatcacaattagctccagatgcaaat

SEQ ID NO: 716828 - DNA, 1429 bp, Homo sapiens
taagtcaaataacatagtgacctccagacacagaaaggcaaactttgcaggttctcgctgattagtggaagctaaaaattaaaataactgaactcatggagatagtaggatggttaccagggcctggaaagggtagttgggagaaagtggagagggctatgggtacaaaaaatatagtcagaaagaataaataagacctagtatttgctggcatgacagggcgactgttgtcaaaaataatttaattgtacattttaaaataactcaaagagtgtaagtggatgacttgtaacacaaaggataaatgcttgaggtaatggagaccccgtttgccctgatgtgattattatagcgtatgcctgtatcaaagtatctctggaacccataaatatgcacctactatgtacccacaaaaattaaaaataaaaaagaaacagtagctaaaacaattatattgtgcccaactccattcaagctctttctgtaaacaaattcgttaaatacagctaatttatgagtcagtcataatggaaggaaactttgttgttctggtcgcaacaaaagtgtccttgtttttaaaaagccaataacaagaaaactgtacttgctggtagaggaaacrgggagaacagaattgatttctagattcttttgaatagtgaaagaaaatctagctcattttctagctagggataatatgcaggcagagaagaaatacttcctccccctctccaaatactaatacacaggacttgaattgaaacagacttgagttattctcaagaaaagacactagcttccaacttcctgaaattgtagtatgtgcccttttcctgggggctttttatttgctttcccaaaatgtagtggttctgagtatgcacgtgcacgcacgtgtgcacacacacacacttgtgtgcaatgcaaatgtttgtcttgcactggccaggaattaattcaaactcacttgagaaacttgggagaatttggttttagtacctggcaactccacggattataaaagacgacggtgggaataccggatgaccaagagtttgggctttcatgtgaaacagctggactccacgctgggctgtgctacctctaacactggactgtgctactttctgtgtctcaacttcatcttccatccctttatgtttttgccaagaaatgtgaggctgaagagaagcagcgtacacagagtgtctcaaaggacgccgtcttccggtaagggcctggtgaagacgagctctactgacaagtactgatattctacctgtggaatctgaaccattcaacatcaacaatattttccaaccttgatgataaaattgataataacacagaatttcaaagcactgttcagggctttgtgttgctttcttttaaacataaaaccttatcacaattagctccagatgcaaat

SEQ ID NO: 716829 - DNA, 1429 bp, Homo sapiens
taagtcaaataacatagtgacctccagacacagaaaggcaaactttgcaggttctcgctgattagtggaagctaaaaattaaaataactgaactcatggagatagtaggatggttaccagggcctggaaagggtagttgggagaaagtggagagggctatgggtacaaaaaatatagtcagaaagaataaataagacctagtatttgctggcatgacagggcgactgttgtcaaaaataatttaattgtacattttaaaataactcaaagagtgtaagtggatgacttgtaacacaaaggataaatgcttgaggtaatggagaccccgtttgccctgatgtgattattatagcgtatgcctgtatcaaagtatctctggaacccataaatatgcacctactatgtacccacaaaaattaaaaataaaaaagaaacagtagctaaaacaattatattgtgcccaactccattcaagctctttctgtaaacaaattcgttaaatacagctaatttatgagtcagtcataatggaaggaaactttgttgttctggtcgcaacaaaagtgtccttgtttttaaaaagccaataacaagaaaactgtacttgctggtagaggaaacggggagaacagaattgatttctagattcttttgaatagtgaaagaaaatctagctcattttctagstagggataatatgcaggcagagaagaaatacttcctccccctctccaaatactaatacacaggacttgaattgaaacagacttgagttattctcaagaaaagacactagcttccaacttcctgaaattgtagtatgtgcccttttcctgggggctttttatttgctttcccaaaatgtagtggttctgagtatgcacgtgcacgcacgtgtgcacacacacacacttgtgtgcaatgcaaatgtttgtcttgcactggccaggaattaattcaaactcacttgagaaacttgggagaatttggttttagtacctggcaactccacggattataaaagacgacggtgggaataccggatgaccaagagtttgggctttcatgtgaaacagctggactccacgctgggctgtgctacctctaacactggactgtgctactttctgtgtctcaacttcatcttccatccctttatgtttttgccaagaaatgtgaggctgaagagaagcagcgtacacagagtgtctcaaaggacgccgtcttccggtaagggcctggtgaagacgagctctactgacaagtactgatattctacctgtggaatctgaaccattcaacatcaacaatattttccaaccttgatgataaaattgataataacacagaatttcaaagcactgttcagggctttgtgttgctttcttttaaacataaaaccttatcacaattagctccagatgcaaat

SEQ ID NO: 716830 - DNA, 1429 bp, Homo sapiens
taagtcaaataacatagtgacctccagacacagaaaggcaaactttgcaggttctcgctgattagtggaagctaaaaattaaaataactgaactcatggagatagtaggatggttaccagggcctggaaagggtagttgggagaaagtggagagggctatgggtacaaaaaatatagtcagaaagaataaataagacctagtatttgctggcatgacagggcgactgttgtcaaaaataatttaattgtacattttaaaataactcaaagagtgtaagtggatgacttgtaacacaaaggataaatgcttgaggtaatggagaccccgtttgccctgatgtgattattatagcgtatgcctgtatcaaagtatctctggaacccataaatatgcacctactatgtacccacaaaaattaaaaataaaaaagaaacagtagctaaaacaattatattgtgcccaactccattcaagctctttctgtaaacaaattcgttaaatacagctaatttatgagtcagtcataatggaaggaaactttgttgttctggtcgcaacaaaagtgtccttgtttttaaaaagccaataacaagaaaactgtacttgctggtagaggaaacggggagaacagaattgatttctagattcttttgaatagtgaaagaaaatctagctcattttctagctagggataatatgcaggcagagaagaaatacttcctccccctctccaaatactaatacacaggacttgaattgaaacagacttgagttattctcaagaaaagacactagcttccaacttcctgaaattgtagtatgtgcccttttcctgggggctttttatttgctttcccaaaatgtagtggttctgagtatgcacgtgcacgcacgtgtgcacacacacacacttgtgtgcaatgcaaatgtttgtcttgcactggccaggaattaattcaaactcacttgagaaacttgggagaatttggttttagtacctggcaactccacggattataaaagacgacggtgggaataccggatgaccaagagtttgggctttsatgtgaaacagctggactccacgctgggctgtgctacctctaacactggactgtgctactttctgtgtctcaacttcatcttccatccctttatgtttttgccaagaaatgtgaggctgaagagaagcagcgtacacagagtgtctcaaaggacgccgtcttccggtaagggcctggtgaagacgagctctactgacaagtactgatattctacctgtggaatctgaaccattcaacatcaacaatattttccaaccttgatgataaaattgataataacacagaatttcaaagcactgttcagggctttgtgttgctttcttttaaacataaaaccttatcacaattagctccagatgcaaat

SEQ ID NO: 716831 - DNA, 646 bp, Homo sapiens
gggtataagccattcttgtcttggtgctaggagatgtagcagtagatcagatagggaaggcgtctcttttttgggtgttacaatgtaaaggaagcttctctcttcccagatccatccacaaagagttgcctctgtttgggttgccattttattattaaaagcaatgtaataaatgtcacaggaatttgggggactggaaaaatagtacttatgatcacatagcacattatcatcatgtctgtggatatgacaatggctattatacaayagagtttatcaaagaagattcgtgtaaatcaagacacaaatgacaacaaatgatagttgaaggtggccttgtgatcctactgaaaaatatgatgcttataaaaaagaactaagtctggatttaaccaaaagaccagactctgactgctttaggtcaatttccattccatggattggatcccaaatattcagtctgatccagttacaatcactgaaccattacaaccactggcatgagataaccatatcagctcaactattcaagttactaatctaatttttgccacttgacaattggactaactaatgtgattaaaataaggtcgagttagtggcagcatagagatatcatttatgattgattgatcaaagaggggaa

SEQ ID NO: 716832 - DNA, 1487 bp, Homo sapiens
tgatatacaattaacataaatatccatcaactgatgaatgaagaaaatgtggtatatatgtacaatggaatagtgtccagccttaaaaaaaaaaagaaaatcctgtaatttgcaacaacatgaatgaacctggaggatattatgcttagtgaaatacaccaggcacaaaagacaaatgctgcgtgatctcacttataggtggtatcttaagaagtcaaattcacagaagcagagaacaatagaatgatggttgcctgggactgggggcaaaaggggggaggatgaggagatgttggttaaagtctacaagatatcagctcaacagtaggaataagcactgaacatctattgtacaacatgactactatagttaataataacatactgtatacttaaaatcactaagaaagtcaatcttaaatattctcactaccaaaaataataaggatgtgagctgatggacatgtgaagtagcttgatttaatcagtttgcaatccatacatatatccaaacattactataaatatacactattttatttgtcaattagaccttaataaagctgggggaaataatgctggaaattgaaattttaaaatttaatttcaaaataggaaatacataggaacaaatctgacaaagatataaaagatgtgtaccctaacatgtgtaaaacattgctgcacaamttaaagacctaaatgaatgggaagatatactatactgtgttcatgggtcagaagcttcaatatgattaagctgtcagttctcccatatcaaaatcctagtgtggtttctttaatagaaattgaacaatctcattttaaaagctataaggaaatgcaaaggacctaaattagctaatacaacttttaaaaagaataaggctggagagctaacactcccagatttcaagacttataataaaattccaataatcaagatacaagcaattgattttttacaaggtgcaaaggcaattagctgggcaaaggatgtctctattttaaatggtactggaacaactggatatctacatccaaaaatattaactttaatgtataccttgaacagtatagccctggatttattaattttttatatttcattgattttatttatcttatcacattggctgtgacttccaggaagtcttgggctcagagatggtgaaacatatagttctaaattaaaacctagaactctaaaacttctagaagaaaacataagagaaaacctttttgacattggggtatgcaaagatttcctactcctctaaaagtatgcagcaataaacaaattgataaacaggacttcataaaaattttaaatgtctactcatcaaaagacactgttaggaaaatgaaacgataagccacaatctgagaaaatatttacaaaccatatgccagataaagaacttgtatccaaaatatataaggagctcttgaaagtcaataataagaaaacccaataaataaaaaga

SEQ ID NO: 716833 - DNA, 1487 bp, Homo sapiens
tgatatacaattaacataaatatccatcaactgatgaatgaagaaaatgtggtatatatgtacaatggaatagtgtccagccttaaaaaaaaaaagaaaatcctgtaatttgcaacaacatgaatgaacctggaggatattatgcttagtgaaatacaccaggcacaaaagacaaatgctgcgtgatctcacttataggtggtatcttaagaagtcaaattcacagaagcagagaacaatagaatgatggttgcctgggactgggggcaaaaggggggaggatgaggagatgttggttaaagtctacaagatatcagctcaacagtaggaataagcactgaacatctattgtacaacatgactactatagttaataataacatactgtatacttaaaatcactaagaaagtcaatcttaaatattctcactaccaaaaataataaggatgtgagctgatggacatgtgaagtagcttgatttaatcagtttgcaatccatacatatatccaaacattactataaatatacactattttatttgtcaattagaccttaataaagctgggggaaataatgctggaaattgaaattttaaaatttaatttcaaaataggaaatacataggaacaaatctgacaaagatataaaagatgtgtaccctaacatgtgtaaaacattgctgcacaacttaaagacctaaatgaatggraagatatactatactgtgttcatgggtcagaagcttcaatatgattaagctgtcagttctcccatatcaaaatcctagtgtggtttctttaatagaaattgaacaatctcattttaaaagctataaggaaatgcaaaggacctaaattagctaatacaacttttaaaaagaataaggctggagagctaacactcccagatttcaagacttataataaaattccaataatcaagatacaagcaattgattttttacaaggtgcaaaggcaattagctgggcaaaggatgtctctattttaaatggtactggaacaactggatatctacatccaaaaatattaactttaatgtataccttgaacagtatagccctggatttattaattttttatatttcattgattttatttatcttatcacattggctgtgacttccaggaagtcttgggctcagagatggtgaaacatatagttctaaattaaaacctagaactctaaaacttctagaagaaaacataagagaaaacctttttgacattggggtatgcaaagatttcctactcctctaaaagtatgcagcaataaacaaattgataaacaggacttcataaaaattttaaatgtctactcatcaaaagacactgttaggaaaatgaaacgataagccacaatctgagaaaatatttacaaaccatatgccagataaagaacttgtatccaaaatatataaggagctcttgaaagtcaataataagaaaacccaataaataaaaaga

SEQ ID NO: 716834 - DNA, 1487 bp, Homo sapiens
tgatatacaattaacataaatatccatcaactgatgaatgaagaaaatgtggtatatatgtacaatggaatagtgtccagccttaaaaaaaaaaagaaaatcctgtaatttgcaacaacatgaatgaacctggaggatattatgcttagtgaaatacaccaggcacaaaagacaaatgctgcgtgatctcacttataggtggtatcttaagaagtcaaattcacagaagcagagaacaatagaatgatggttgcctgggactgggggcaaaaggggggaggatgaggagatgttggttaaagtctacaagatatcagctcaacagtaggaataagcactgaacatctattgtacaacatgactactatagttaataataacatactgtatacttaaaatcactaagaaagtcaatcttaaatattctcactaccaaaaataataaggatgtgagctgatggacatgtgaagtagcttgatttaatcagtttgcaatccatacatatatccaaacattactataaatatacactattttatttgtcaattagaccttaataaagctgggggaaataatgctggaaattgaaattttaaaatttaatttcaaaataggaaatacataggaacaaatctgacaaagatataaaagatgtgtaccctaacatgtgtaaaacattgctgcacaacttaaagacctaaatgaatgggaagatatactatactgtgttcatgggtcagaagcttcaatatgattaagctgtcagttctcccatatcaaaatcctagtgtggtttctttaatagaaattgaacaatctcattttaaaagctataaggaaatgcaaaggacctaaattagctaatacaacttttaaaaagaataaggctggagagctaacactcccagatttcaagacttataataaaattccaataatcaagatacaagcaattgattttttacaaggtgcaaaggcaattagctgggcaaaggatgtctctattttaaatggtrctggaacaactggatatctacatccaaaaatattaactttaatgtataccttgaacagtatagccctggatttattaattttttatatttcattgattttatttatcttatcacattggctgtgacttccaggaagtcttgggctcagagatggtgaaacatatagttctaaattaaaacctagaactctaaaacttctagaagaaaacataagagaaaacctttttgacattggggtatgcaaagatttcctactcctctaaaagtatgcagcaataaacaaattgataaacaggacttcataaaaattttaaatgtctactcatcaaaagacactgttaggaaaatgaaacgataagccacaatctgagaaaatatttacaaaccatatgccagataaagaacttgtatccaaaatatataaggagctcttgaaagtcaataataagaaaacccaataaataaaaaga

SEQ ID NO: 716835 - DNA, 639 bp, Homo sapiens
gtgaggctcataatttatggagctttctcaacttcttgggtctttaacttaatattgttttacaaatttgggagacctggcagctttattcttttaaatatattttctgccacacttgctttttcctcttttcctaagagttcagttacatatacattatgttactcaatactatgtcacagatcacttagcctcattcattttttttwaatatttttcctttctgttttttaaaatgaatgatttctatcttttatcctcaatctgatcctaaatccatccagtgaacatcctacttcagaattacacattctaactctagaattttagttatgtagttttaatttttcctgatattattccctatatattcacttattatgaatgctttcttctttatgtccttgaatgtatttgtaattaccccattaaaatctttatttcttaattttaacaattttaaccttgagataagagcttggtcatctcaagggtagttttgattacctacattttctcttccaactgcagtacattatactgtttcttctcacttttattagtttggttgtatactggacaactttaagtgctggctgaaggtgggggcactctagaattggtggtcatagaggaaga

SEQ ID NO: 716836 - DNA, 627 bp, Homo sapiens
cgtgatactttgcagagcattaggtttttatagatattagttttgattccaaagttgcaacagttgatattaaaactgttacaaagtaaagaagaaaaatacatggaacaagaattcatctcaattattctaaatggcagtcctcaagtgacatttaggtagtgtatctcagtctttaagaactccggctttggagtcagagaaacatgagcttgagtctcagctgctctcggcttctttgtggatatttgctgataatgggyaacataattatgttttctaaatcttattttcctcattgataaatgggtaaaacaagaacactcattacattggcttgtgtaaattattgttatgcatttttttcatgttcaaacaagcaactaaattattgaaaatgtatctgtctctaagatgcttgaagaacctacagcacttgcctagtgtatgacttatagagagtaggaaggaaatagcacctgccactgttagttgcttaccagtttattagtcatttctactttctgttttgcaataagaattctaattttattcagatttgaaggaagcagtgtgtctacacaaagcatgactagtgattaatcttgtcagttacattaatcctgt

SEQ ID NO: 716837 - DNA, 1036 bp, Homo sapiens
gcaaaaacagaatgcttagaggtgtgcttttgttattattctcagtggctctggtgagcccagtgcaatcagcgatactcatccaggccaattcaccattagggagccgcacatgaaaccatttacatttcccattttgtttcaagcragtcaggtctttaactggattgtggtaattgaaccttcctgttacaacactgcttttgctgcccaacggattcaaaagctgctctcgttacatttatttgaacttttatttcattcatactttatacctctggttctcaatcttcagtcctgtagcgaactctataaaaggaaaaagaaattcttacagactctcacagattcatttaaattctttttttgttttattttattattattattatttttttttttttttttgagacggagtctggctctatcacccaggctggagtgcagaggcgcgatctcggctcactgcaagctccgcctctcgggttcacgccattctcctgcctcagcctcccgagtagctgggactacaggcgcccaccaccacgcccggctaattttttgtatttttagtagagacggggtttcaccgtgttagccaggatggtctcgatctgctgacctcatgatccacccgcctcggcctcccaaagtgctgggattacaggcgtgagccaccgcccccagcccatttaaattcttttaatgataattttaattaagtatgttttacaaaaataagcctaaaagtcacaatactaattatacaataatgaaaaccaaataatattcaaatacaatgtgagtatataacccaaacactcaaaatcctaatattaatgttgtatgacagtgttgtttttccttgaattgtatcaccaccttcacctgtttgctccagagcaggttctttttagataggtgctgtgagaacactcagttgtctggtcatatttctatgctgcaattacagtggagcctctgctcacacagcctgtcatgatgccatttggcctctcttagcacaaaggcagca

SEQ ID NO: 716838 - DNA, 1036 bp, Homo sapiens
gcaaaaacagaatgcttagaggtgtgcttttgttattattctcagtggctctggtgagcccagtgcaatcagcgatactcatccaggccaattcaccattagggagccgcacatgaaaccatttacatttcccattttgtttcaagcaagtcaggtctttaactggattgtggtaattgaaccttcctgttacaacactgcttttgctgcccaacggattcaaaagctgctctcgttacatttatttgaacttttatttcattcatactttatacctctggttctcaatcttcagtcctgtagcgaactctataaaaggaaaaagaaattcttacagactctcacagattcatttaaattctttttttgttttattttattattattattwtttttttttttttttttgagacggagtctggctctatcacccaggctggagtgcagaggcgcgatctcggctcactgcaagctccgcctctcgggttcacgccattctcctgcctcagcctcccgagtagctgggactacaggcgcccaccaccacgcccggctaattttttgtatttttagtagagacggggtttcaccgtgttagccaggatggtctcgatctgctgacctcatgatccacccgcctcggcctcccaaagtgctgggattacaggcgtgagccaccgcccccagcccatttaaattcttttaatgataattttaattaagtatgttttacaaaaataagcctaaaagtcacaatactaattatacaataatgaaaaccaaataatattcaaatacaatgtgagtatataacccaaacactcaaaatcctaatattaatgttgtatgacagtgttgtttttccttgaattgtatcaccaccttcacctgtttgctccagagcaggttctttttagataggtgctgtgagaacactcagttgtctggtcatatttctatgctgcaattacagtggagcctctgctcacacagcctgtcatgatgccatttggcctctcttagcacaaaggcagca

SEQ ID NO: 716839 - DNA, 891 bp, Homo sapiens
agtttcagtttgggaagatgaaaagagctctggagatggatggtggcgatggttgcgcaacagtttaaacaatgtcaccaaacagtacgcctaaaaatcacacatagataaaatatacattttatgttatatatatcttactacagttaaaaaattgcttacacgacaaacatattttaatttcagttatgacataattttagagatattaaaatgtgaaaatcacataaatctttagaataaaaagaatatggtttttaacactcaaaaaaaaaaaagaaagactgcttgagcccccacatacagaggaggttagaaatataatccatggctcattgtcaagggcatggagagaccaatccttaaggggaaatcccagtcagagtattgcttataattgcctggaaagagcccccattactcacagttctgggggacagggtagacactgcaggagatgaaccccgcatcttctgtaacatcagcacacacacacaccctcagagccagccatccccaccacccacttccaaacagcagaggggctgcaggatgctcagggtcccagggactgtccccctggcccctgcaggaggccatgcctgctggcagagatgacaagagcccagggtgagacacatctggctgttsgtactggaggaggagaagacactaactgggcctccagttgggggtggtgaggagaagctcaccactgggtgtttccagaatgtgtcctgagccccacagccttcagcttacctcttagaaaagccaaatcccagagcaaccctgtgacccatgaccagagctggccacccagggcttcctgagcaggcgggaaaccaggcatctctgagtcctctgtccagcaccaccatatacccagca

SEQ ID NO: 716840 - DNA, 2148 bp, Homo sapiens
tgcacgaagatatctctgagaagcttaataaagcagctcccagccacaatttctggggtgcacgaagccactgcaaggataactggcaatgactcagtttgttagtcacagaatttgatggtttagctctatatctaccactgccttatggtagaatcctgaactggtccgtcttgtgcccacgtttccatatctgggagagattgttacctgtcatttctggcattctgaccaaacattatgactgttttggctttaagatggaaagacatgcagccttatttattcatctatccattcgttcattcacttaacagatatgtatgacatacctgccatgtaccaggagaatacagcagtgagcaaaacagatgaagtttctgacctcatacacaaactagcacaagtaaatatagatacacactattaggtggtgaaaaattctcaaaagaaagataaagacaaggtaaggggtcaggaggtaatgcagtgctgtttcagacaaagcaatctatcatttgagcctcatttgagggggtggcatttgagcacggatctgaatgaggtaagagtgtccctggggaagctcccaggtacctgaagagagagaggagtcgattcagacaaacgcataataagttctgtgagcctcagtttccatggtttaaaataaggctaataatgccgacctggcaaggtgcttatgtggattaaatgcgctagcacatataaagtgctctgcacgtggtagaaagcctcgggtgggtgtttcaatgttagcggatgctcctttatataacttgggtgagtagactgggagctcattctgttcttccccaggaccacttcaatctgcagtctctccaggcttctttctcagcctgtaaagggaggaaacaactcttgtcccttcctcaaaggaatgcaggcagccaggtgaggaagcatccataagaatgcattgagccagctcttgggagaaaggtccccagaaagccagagccatgtgagaggccagccctgactgaaggctcagttcagactccaggaccaggcctggtctttaaaaatgtaaggtttagactgtggcacagacagatttgctagcacaagagagagctggraagagagccagtccccaggatggaggctctgcagaagggcaggctcagagtgaccgccaggaagcaacaaagcagcgacacaaacaggaagctggcgacagggtggggcctgcgcgggcctggaggagccggcagcagggctgcgggggagctgggatgcacccgtaacgcaccctggggcaggaagggaggcctctgcctgggccccgcggtgagggttacctgccattcaagtaccaaataaagcttcccctttcatttttcttaaaaagacatcagaaagctgcctattttgtaaccccctccccaactcccatctcccatatatgtcgggagaggtgttttttgtttgtttgttttttgtttaaaacaaaacaagacggagcaaaacaaaaccctccttcttaccgatatacacatccacctggtaattaatgaaatgccatttcatcccaatgtctgtcattgcactctgctgagtccagaagctgggaatccatgccagccttattatttagaaaactgcccgataggggcatcttgcagatgactgactcccagtgacaacaggatctgcatctaaaataacatgagtagattgcggattgattcatgggatccagcatggagcagcccaaactccatccttccaagtttcatctccgaactcctgtcagtctcaaaattgatagaacagcctgaagccattaaacagagttatgtcagcaatcacctttctcattctctcatatgggtgcgaatacgtcaaggggacccaggcaagggaacaacagggtggctttttttttttagcattcaagggaacaacagggtggcttttttttttagcattatgacaagcaaatgcttgaataccaaggagcacatgagctttacagcagcagggaaaaaagaaaagaaaagaaaaaaaagcccccacatggacgcctgcctccaactccagtggccctgcacggtgcaaaaaggagattgctaacaaaaaggttattcaacgcttctccga

SEQ ID NO: 716841 - DNA, 600 bp, Homo sapiens
aggggagctgttctgggccagamagactggcagacctcgcatggcccatcaggaagcctgtccacctcccagggaaatgaagcagatactgcagcattggttttcaagtgaggctttcagatatgttatctgttaagtaaactctgccattcaaaggtattactgaaacaaaagccagagagtgaaatgtgaaaacgttctcctctgtcctatggtgagccagcgaaaggtggcgatgtgcactaccagagggtccttcaccttgggtgtacagtgggctagttggagaatgttttcttgaggagctgatgttctcccaggctactctgctctaggcacaaaacctcactttggaatacttcacctgcaacagagcctgttttgtagctagtaaatactaggtgttacttaggaataaataattggcacccaaatcagtaggtaaatacatgactaagtgaggggagggtggtttggagttgttcccacctctgtgcttttattttatgacaaaacagcctcatcagtgatgttacaggacgtgcagccctgagagccccagagctcttttctgaccaggctatgtgatgggcatgtgca

SEQ ID NO: 716842 - DNA, 600 bp, Homo sapiens
aggggagctgttctgggccagaaagactggcagacctcgcatggcccatcaggaagcctgtccacctcccagggaaatgaagcagatactgcagcattggttttcaagtgaggctttcagatatgttatctgttaagtaaactctgccattcaaaggtattactgaaacaaaagccagagagtgaaatgtgaaaacgttctcctctgtcctatggtgagccagcgaaaggtggcgatgtgcactaccagagggtccttcaccttgggtgtacagtgggctagttggagaatgttttcttgaggagctgatgttctcccaggctactctgctctaggcacaaaacctcactttggaatacttcacctgcaacagagcctgttttgtagctagtaaatactaggtgttacttaggaataaataaytggcacccaaatcagtaggtaaatacatgactaagtgaggggagggtggtttggagttgttcccacctctgtgcttttattttatgacaaaacagcctcatcagtgatgttacaggacgtgcagccctgagagccccagagctcttttctgaccaggctatgtgatgggcatgtgca

SEQ ID NO: 716843 - DNA, 2796 bp, Homo sapiens
gggccttgctgggatttcctctaatcgctgcattggattgattgataggattcaggttttgttatgaacttgggagagaagtgggaagacatccaataacacccaacatttcatttaatatttgaaagaaaaccatttctttttcttttttcttttttttttttttatacttttaagttctaggatacatgtgcagccttgttacataggtatacatgtgccatgttggtttgctgcacccatcaacccatcatttacgttaggtatttctcctaatgctatccctccccctgtcccccaccccatgacaggcccccgtgtgtgatgttccccaccctgtttccgtgtgttctcattgttcaattcccacctgtgagtgagaacatgcggtrtttggttgaaagaaaaccatccctacattgatgacataccagttttctcctgaacctggacattaattgttggcatgttggggaagtctgctcctgtgatgtatctcgtaggagcagtcagcagccagacctaacagtttgatgcaatcaagttcagggccagttggaacatcttgaaaaatctaagtaaaggtatctaaggtgggtagtaaatctctaaggaatttcctttgtattagtgatttgctgttttttaaaataaatctctttgacaccagcttcagataattttttttttttttttttttttttttttgagacggagtttcgctcttgttgcccaggctggagtgcagtggcgcgatctcgactcaccgcaacctccggctcctgggttcaagtgattctcctgcctcagcctcctgagtagctgggattacaggcatgcaccaccatgcccggctaattttgtattttttttagtagagacgaggtttctccatgttggtcaggctggtcttgaactcccaacctcgggtgatctgcccgcctcagcctcccaaagtgctgggattacaggcatgagccactgcgcccagcccagataattttttttttttaaagaaattgctgtgtggccttacttgcttgtcagtaaaagcaggcaccggcccccaatcattcactcagttatgacagacttccctcctaccacatgctttcagatgctttacccagaaaataggtctgagggtggtgactgtagacccccgggagaggtttccgtgatggtggtcacactgagttttcttgaatagaagggattatgcaaatatttgtgttttaaatctccctagatttttgctgtctagtgatttacatggctttaagaatttttgtcctgtttaaaggttcctttgtgaggatgtgcatatgatcttgtgtgatctcattttccctaagcctaggcttgaggacaggtggaatcttccactgatcttgcctgctttcttaagattttaccactgatttctcaggatattttaaaacatttcatatttgaaagcatgaaaataaaatgttttatttctttaagttataattcatgaagatggaatttatctgataggtcttacttgctttaaatctttgcctttggaaaaaaaattccaacttttaaacaaattcctaatagtagttgccctttaaatgacaagaatcatagttgggggttggggtgagagaaaatctttcatctcttttaaaggtatttaatcttttttaaaagtttccttactttttaattatcttcaaatatctgccataaagtatgtgtttacttgctctttataaacaagagcagcacttcattcctttcggtaaatgtcagaatgttgggttttgttttatttctcctcctcctccccgccctcctcttcttcctcctcctcttctcctttcttgttcttctttcttcttcttcttttttttttgtggggaataaaactatagtttgtttcagaggtggccaagcatagctcagctgagagatggagggacagctgctgcctgggcaccttggcttaaagtcaccctgaagggactgtgggtttttagagatcttttcatcttgtcagtcttccagcctggccacaagcttgccttagcagtctgcagcccgtgtgccatcttttgacaatgtcattgtcatgggatggatgctccctgtgatgtggcagataatgcattccagtgtgctacttgcagaaagtggtaacatctctgtgtactttttattcagaacctaagttgctagttagttgaacaccacagatgtatgagctgtcttcggcctaagagtgggcatgaaaattgtagcaaacccatagaggcttttaatttttttctaaaaagacctcacagcagtattattgatttggttttaaatagctattttatgaagtttcaggataattttttttttacctcaccttttagcctttattttgattttttaaaggggggtggttttcctttatcaatccctaaccattttatcttaagaactctttctgaagtcattctttatttcagccagaaaactgattagtgttcattgatagaagatgataggctgtacagttaaccatgaaaaatatttttctccttgacaccttaaagttgttgtcaaaagtattaccgcattcagttaaagagagtgggtagaattttattgtctgagcttatagtatacaagcaccaaagctcgatgaattcaggtcttttccaggaagtttaacttgcatttttttctcataagatattcacatttcttttccactcctaattttgtggcataaaataaaacataacttttgttctgggcacagtttcttattgctga

SEQ ID NO: 716844 - DNA, 2796 bp, Homo sapiens
gggccttgctgggatttcctctaatcgctgcattggattgattgataggattcaggttttgttatgaacttgggagagaagtgggaagacatccaataacacccaacatttcatttaatatttgaaagaaaaccatttctttttcttttttcttttttttttttttatacttttaagttctaggatacatgtgcagccttgttacataggtatacatgtgccatgttggtttgctgcacccatcaacccatcatttacgttaggtatttctcctaatgctatccctccccctgtcccccaccccatgacaggcccccgtgtgtgatgttccccaccctgtttccgtgtgttctcattgttcaattcccacctgtgagtgagaacatgcggtgtttggttgaaagaaaaccatccctacattgatgacataccagttttctcctgaacctggacattaattgttggcatgttggggaagtctgctcctgtgatgtatctcgtaggagcagtcagcagccagacctaacagtttgatgcaatcaagttcagggccagttggaacatcttgaaaaatctaagtaaaggtatctaaggtgggtagtaaatctctaaggaatttcctttgtattagtgatttgctgttttttaaaataaatctctttgacaccagcttcagataattttttttttttttttttttttttttttgagacggagtttcgctcttgttgcccaggctggagtgcagtggcgcgatctcgactcaccgcaacctccggctcctgggttcaagtgattctcctgcctcagcctcctgagtagctgggattacaggcatgcaccaccatgcccggctaattttgtattttttttagtagagacgaggtttctccatgttggtcaggctggtcttgaactcccaacctcgggtgatctgcccgcctcagcctcccaaagtgctgggattacaggcatgagccactgcgcccagcccagataattttttttttttaaagaaattgctgtgtggccttacttgcttgtcagtaaaagcaggcaccggcccccaatcattcactcagttatgacagacttccctcctaccacatgctttcagatgctttacccagaaaataggtctgagggtggtgactgtagacccccgggagaggtttccgtgatggtggtcacactgagttttcttgaatagaagggattatgcaaatatttgtgttttaaatctccctagatttttgctgtctagtgatttasatggctttaagaatttttgtcctgtttaaaggttcctttgtgaggatgtgcatatgatcttgtgtgatctcattttccctaagcctaggcttgaggacaggtggaatcttccactgatcttgcctgctttcttaagattttaccactgatttctcaggatattttaaaacatttcatatttgaaagcatgaaaataaaatgttttatttctttaagttataattcatgaagatggaatttatctgataggtcttacttgctttaaatctttgcctttggaaaaaaaattccaacttttaaacaaattcctaatagtagttgccctttaaatgacaagaatcatagttgggggttggggtgagagaaaatctttcatctcttttaaaggtatttaatcttttttaaaagtttccttactttttaattatcttcaaatatctgccataaagtatgtgtttacttgctctttataaacaagagcagcacttcattcctttcggtaaatgtcagaatgttgggttttgttttatttctcctcctcctccccgccctcctcttcttcctcctcctcttctcctttcttgttcttctttcttcttcttcttttttttttgtggggaataaaactatagtttgtttcagaggtggccaagcatagctcagctgagagatggagggacagctgctgcctgggcaccttggcttaaagtcaccctgaagggactgtgggtttttagagatcttttcatcttgtcagtcttccagcctggccacaagcttgccttagcagtctgcagcccgtgtgccatcttttgacaatgtcattgtcatgggatggatgctccctgtgatgtggcagataatgcattccagtgtgctacttgcagaaagtggtaacatctctgtgtactttttattcagaacctaagttgctagttagttgaacaccacagatgtatgagctgtcttcggcctaagagtgggcatgaaaattgtagcaaacccatagaggcttttaatttttttctaaaaagacctcacagcagtattattgatttggttttaaatagctattttatgaagtttcaggataattttttttttacctcaccttttagcctttattttgattttttaaaggggggtggttttcctttatcaatccctaaccattttatcttaagaactctttctgaagtcattctttatttcagccagaaaactgattagtgttcattgatagaagatgataggctgtacagttaaccatgaaaaatatttttctccttgacaccttaaagttgttgtcaaaagtattaccgcattcagttaaagagagtgggtagaattttattgtctgagcttatagtatacaagcaccaaagctcgatgaattcaggtcttttccaggaagtttaacttgcatttttttctcataagatattcacatttcttttccactcctaattttgtggcataaaataaaacataacttttgttctgggcacagtttcttattgctga

SEQ ID NO: 716845 - DNA, 855 bp, Homo sapiens
ttttcagggggtgggagatctggagtgtattggagcaggggctaaccagatattgttgctgactgatgttaatgatgcctatagtgttgtctcatatttttaggggtagtaacccctaatatccttcagaataataaccccagaagtcccaaacctcagaaatccctttagtgacctgatattgtcagaatttgcctgagcgctgggaggatgccccmccatgtgctgcttgaagtatcatgtctacatgattgtcaccaattccttccttcctagtacgtgcatgacactttaccaccgaagattgtgtctattcttccattgccttgaatttgaccagtagtcacaaggagaggcactggagcaccagatatatgaatgaagaaactaccttggcatccagcctagttgagcctttggataagtccagcctcagccctatcatactgcaactgcatgaacgaccccaaagaagagccatccaggtgagcccagccaacacacagaatatacagataataataaattgttgaactaggatattaaatgtgtgggctacgcaataatagataataggaacactgcaagtgacaatgtactgacatgcggagagtactggggaccactaatcaacaggttttttgaggcatttgacaaagcaaggaaagagaaacagaaaactcaaaacagtactcccattctcctctttagcatcaaccaaaactttccaagaacagaggacagaaccaaatgtttctcccaaagtggctgccttgggagctgcttgctttaccttcaataaaaatgcaattgtaagagaggaaatttcagtgaaaccccatctctactaaaaaa

SEQ ID NO: 716846 - DNA, 1499 bp, Homo sapiens
ctcatggcttggtgctgtccttgcaatagtgagttctcatgagatctggttgtttaaaagtgtgtggcacccccgccccttgctcccacttttgccatgtaagatggctgctcccactttgccttccatcatgagtgaaaatttcctgggcccctcaccagaagcagatgccagcaccatgcttcctgtaaagcctgcataaccatgagccaattaaacctcttttcttataaattacttagcctcagctatttctttataccaatgcaaaaaaaaaaataaaaaaaataagaataaaaattaaaaaaacagcctaacacactaccatagaagaattcctcagtggggcaacaagatgtgatgttagggttaactatagttcctgtaatccctctagatcttggtttaagaattcagccttgaagctgaaaaggaaagacaattgaggatggccaatgacaggaagtagtgcccagtaccaaggacagcgctgctccctggacagcaacgttgatttaggaagcaacctgtttccagaataatagaaaaggcctgtgctctgcgtcaggaaggaggtctttgtatctccttccatgagttggaagagaaaaaatgtcatggatattctggaagctccttgaatccctggatacttgactcctcaggcagacctctggtgagattggtgagaatgaaactttttcctaaaagatctaaaaataagccacatgacatgccaatatatctaggtggcatgactaaaggatgcctggaaggggtctgggaagtcactttagctccttgtgtttcctttttctcacctgtcaaggggagatgataatcatttccctgccttactcacagggtcattatgattattgaaccagactttgggcagaaaagtgctgtgaacagcagaaagtacagatgggaagaactctgagtgcaaatgtccagtttagcccctgatctgccacaactctcatctctttctttcttactattagaaagattgccttttctttctaaatgatgcagagaaagagtccagactggtgtcaatctcaccctgttggccttggttacctatccagtatccatgccccctaccaatcgtttctcccattccacggatcctggattgggctcagggacaactgcctcctccggaaggtgaagggcttccccgggatggtcacaacagtcctatgtcccttgctaattgttttagaaagggatctttgaataatcctggcyaatgagatgtgagagaaagtctgctgggaggcatgaataatgatctcacattgatttttaaacattgcaggaagagagctggtctccctcagaatagagtgcagctgatggaggagcagcagagccaaagcagcccaccttgtgccctggatcccgccccacctctgggtttcttgtcctgtgagatgataaagctccttcttgtttgggctggatgacctacagccagaggcatgcgctct

SEQ ID NO: 716847 - DNA, 1184 bp, Homo sapiens
aacttcttattcttctttttattctgaaggagaaagatctgttttcatcccttctggtcttttgatgtcccatattcttctttctccttccttttccttcccctttctccctcctagtgaccataatgaagaattcaagtcctcactttcatatagttcttgattaaaaattttaatagttctctctcaagaattcttcagcttttgtatatgcttcagtctgatttaaaacttccaaatgttataataaataaaattgtcctgaaatctgctatgtccagtaaatctttctctaggccttcctgaaagatcacggtaagatagactcatgaaaagcatgcttttcacacacctgtggaaggagcacacactgcaagaggattgtatccaggaatgcatggccacctgtgaagccaataactgaatttaagaaagacactataaaagaaaaatctctagaaaatttggtgcaaataaaatatactgccattgagctgtaacatgactctttcctcaggctgatatattgtttcagcatagagaacaaaaacgtaaggaagaaaaagcatttttaaattaaaaaaaaattgtcttaatatagaacatttttcgaaagtaaacagaaatttcatcctgagtgctcgttttgtttcagctattgatccatctgttaattgctccttctgttgttattattgatttcaaaatcaggagggcttaccatttcttcgtttgttcatccctcaaatgcctgtggggaaacagaaaaccaaatatcacatgttttcatttataagtgggagctaaatcttgggttcacatggacataaagatgggaacaacagacactggagactccaaaaggagwgaggaagggggacaagggctgacaaactacatattgggtaccatgttcactatgtgggtgaacatgatacccagtagaagcccaaatctgaacaccatacaatatacccttgtagcaaatctgaacatgtaccccctgaatctaaaaaaaagaagaaattaaaataaataaataaaatgggaattcattttttaaaatgcctgtgggggataggggctgatgggggagaaggaaaggaggtatctgcttgtctctgcagattctaaactgaaagacagtcaaatgcctcaaaagaaaagacttaaatgttgatgta

SEQ ID NO: 716848 - DNA, 1184 bp, Homo sapiens
aacttcttattcttctttttattctgaaggagaaagatctgttttcatcccttctggtcttttgatgtcccatattcttctttctccttccttttccttcccctttctccctcctagtgaccataatgaagaattcaagtcctcactttcatatagttcttgattaaaaattttaatagttctctctcaagaattcttcagcttttgtatatgcttcagtctgatttaaaacttccaaatgttataataaataaaattgtcctgaaatctgctatgtccagtaaatctttctctaggccttcctgaaagatcacggtaagatagactcatgaaaagcatgcttttcacacacctgtggaaggagcacacactgcaagaggattgtatccaggaatgcatggccacctgtgaagccaataactgaatttaagaaagacactataaaagaaaaatctctagaaaatttggtgcaaataaaatatactgccattgagctgtaacatgactctttcctcaggctgatatattgtttcagcatagagaacaaaaacgtaaggaagaaaaagcatttttaaattaaaaaaaaattgtcttaatatagaacatttttcgaaagtaaacagaaatttcatcctgagtgctcgttttgtttcagctattgatccatctgttaattgctccttctgttgttattattgatttcaaaatcaggagggcttaccatttcttcgtttgttcatccctcaaatgcctgtggggaaacagaaaaccaaatatcacatgttttcatttataagtgggagctaaatcttgggttcacatggacataaagatgggaacaacagacactggagactccaaaaggagtgaggaagggggacaagggctkacaaactacatattgggtaccatgttcactatgtgggtgaacatgatacccagtagaagcccaaatctgaacaccatacaatatacccttgtagcaaatctgaacatgtaccccctgaatctaaaaaaaagaagaaattaaaataaataaataaaatgggaattcattttttaaaatgcctgtgggggataggggctgatgggggagaaggaaaggaggtatctgcttgtctctgcagattctaaactgaaagacagtcaaatgcctcaaaagaaaagacttaaatgttgatgta

SEQ ID NO: 716849 - DNA, 606 bp, Homo sapiens
gatctgctgatattcacaacaaccttgaaatcttggaataaatacaacttggcaatctcatcttttaaaatawattgctaatgtgctaatattgctaatgctaatattttgtttaggacttgtcctatactgtttgggcttctataacaaaacaccataaactgcataacttacaaacaaaataaatttatttctcctatttctgaatacttggaagtccaagatcaagatggcagcagattcagtgtccagtgagagccagcttttggttcatagatgatgccttacaatgtgtcctcacatggtggaaggaaaaggcagttctatagggtctcttttataaggacactaatcccactgatctagttacctcccagaagctccaccttccaatactatcacactaaggattaggtttcaacgtatgaattgggtagggagtgtacaaacattcagaccatagcaggacatttttacttaaaaaatatttactttatcaactattcttggattatttaagcactaaattaatcactgtctaagcagaaaaatataggatcattttagacttgcaagaaggtgaaatttaaaacaggaaattaaatt

SEQ ID NO: 716850 - DNA, 595 bp, Homo sapiens
ccactagttaggaaaacagaagggtagagaaaagaaaggaggagctgcctgagggcaaagctgggcttgtccctaccctaggtccactcaaggtaaagctcagcacataaacaggctgaaaatggggaagagatgcagaaagagttcagcaaatctgatttattttaaattttcatttttttctcattaaaaaataattaaatagagacagggtctggctatgttgcacaggctagtctcaaattactgggctcaagtgattctcctgcctcggactcccaaagtgttgggattataggcgtgagccactgcgcgcagtctttttctcattcttataaaaaaaaatgacaataatgaactatgcgtctgttcaagggaatcccaatcccttaagaamccctgttaatagtttgcttccttctctctttaattttggtttttctttattggcctttttgtttcagtatattttcctttttttttttctttgagatggagtcttgttctctcacccaggctggaatgcagtggctcaatctcagcttactgcaacctctgcctcccagcctcaagcaatcctcccgcctcagcctcc

SEQ ID NO: 716851 - DNA, 1386 bp, Homo sapiens
atcaaatggaccagggagatgagatatattggttcagaaagtatctggctgcaagtagcagaaaaagtaacgaagaatggcttaagctaaaagggtgttattttctcttagaataacaactgaataggtataacctcgagtctatgctaggtaggaaggaagtgaagtttggttaggggtgatgggtattcagctaatgcacttggcggataagaaaaacatgatgacttcagaggcatctggcaagcaagggagagagggccaaagaagaccagtgtggtctgtgcagggattcagtggttaccatatcagaggaaaagttttgggagacaaaatcacctgcaggtggccttgagacagggttgctaaagtgcaatgaggaaaaagaggaaaccaatctcatctggactttgttcctttcttagcatcccttagagatcacaaactcttatttttattttattttattttatttttgggagagatgagktcccgctatgctgaccaggctggtctccaattcctggcctcaagcaatcctcctgcctcggcctcccaaagtgctgggattatgggtgttccaagccaaccacaaactcaatcatccccactccaccctcttctgcctttcccgacagatacatctagaacattaatagaagaggtagcagaggtgagaacacatcagcacagataccaataccagcctgccctgagtggacagtaaccggcctgcaaatggcaaagctaggaaggaaaggaggctggtggcattgcaagtctgtacctcaaaagaggaggcattggggtggcaacattgccaatgggctagaagtaagagtgagagccagaagaatctaccccactgtctgccaggtataccacagaagccaagcaaactgcttctttcctggggagggtctctgtgctccaagaaccatgctcatcctagcaacaggaagctctttagtgccagcctgttgcaatggacttcagtggctatttctcctgttaatgccttttctgttttgctctctcaagatcttaactgcaactgcccctattactccaactgagattacaatttttgagaaacctgcaaacaggacagctttagagtgtaccccaaatacaaggacacagaatcaaattccatgaacccctataaatcatgaatccactggaatggaagccccatgggggctagactttgctgtttgctcactgatgattcttgagtgataagaaccaggcctggcacatagtaggtaccttctatgtgtgttgaataagagcagctgtgtcagagagctgctccagcactgcacccagtaacatccctccctgccagtaatcaatcatcttgccaaagaccaggtcctttga

SEQ ID NO: 716852 - DNA, 588 bp, Homo sapiens
ttttacagaacgtgtcagtgccctgagtaagccccaccagctctgtgtctttagtttccaaaccgggctgaaacagtgggtgtttaatcattgtttttatgagctcctgtatgtcagcactttgacagatgttttaaatagatcaactcatttaatgcactagtacaaacatgtgaaatatccccattctactggtgtgaaaactgaggccaggagaggtcaaattggaaattctacatccctgatcagagccactaaccaagatgcaaaaagcaacgaagaacctscacagctagtaactgacaacacgtaggtctttgttagtggccaacttatttgaccggagcatccttatggttattgaaggaaggttgtacattattgtggttccctaagcaggttgtacaacatttctctccctctctgaaaaggctgatgtcacttctctaggtgatgttttgtggtatgtgatagggctggatcacatatcttttagacatctattatttcattacgtaagtcttaggctcaaaggaatttttaggagtcatttaataaaataacatgcgttgaatcctcccatctttt

SEQ ID NO: 716853 - DNA, 588 bp, Homo sapiens
ttttacagaacgtgtcagtgccctgagtaagccccaccagctctgtgtctttagtttccaaaccgggctgaaacagtgggtgtttaatcattgtttttatgagctcctgtatgtcagcactttgacagatgttttaaatagatcaactcatttaatgcactagtacaaacatgtgaaatatccccattctactggtgtgaaaactgaggccaggagaggtcaaattggaaattctacatccctgatcagagccactaaccaagatgcaaaaagcaacgaagaacctccacagctagtaactgacaacacgtaggtctttgttagtggccaacttatttgaccggagcatccttatggttattgaaggaaggttgtacattattgtggttccctaagcaggttgtacaacatttctctccctctctraaaaggctgatgtcacttctctaggtgatgttttgtggtatgtgatagggctggatcacatatcttttagacatctattatttcattacgtaagtcttaggctcaaaggaatttttaggagtcatttaataaaataacatgcgttgaatcctcccatctttt

SEQ ID NO: 716854 - DNA, 565 bp, Homo sapiens
cctctgcctcctgctttcagccttgtgctgcctctgttgctacaacttggcatgatgtgtgttcccagtaagtaagagagagttttcttttttttttctccaatrtgaaggaaacaacaggaatgctaattacatttaatggaacttggcacaatttctcaggaggtagtgctaatttgcagaaggtagcactttggatttgctgataaaaggctggggatcaaagggtggttgtgggagacagagaaatatgtatattttatccaccactgccatggtgggaataacaatgtgtttcacactataaacacactagtgggaagatttacttttattatatactttattaggaagatgtgtagggtactgaggagtaaaaagagataaactgctgggcatttacatgaaagaagtggtttttttgatggggtttgaaaaccctatggtggtaaatttattgaagagtatgtggattttaggtaatataagaaaatatggaattattggctcattccaatgcactttaattccaggatgcagaattctaaaaatgaaaggtcattta

SEQ ID NO: 716855 - DNA, 565 bp, Homo sapiens
cctctgcctcctgctttcagccttgtgctgcctctgttgctacaacttggcatgatgtgtgttcccagtaagtaagagagagttttcttttttttttctccaatatgaaggaaacaacaggaatgctaattacatttaatggaacttggcacaatttctcaggaggtagtgctaatttgcagaaggtagcactttggatttgctgataaaaggctggggatcaaagggtggttgtgggagacagagaaatatgtatattttatccaccactgccatggtgggaataacaatgtgtttcacactataaacacactagtgggaagatttacttttattatatactttattaggaagatgtgtagggtactgaggagtaaaaagagataaactgctgggcatttayatgaaagaagtggtttttttgatggggtttgaaaaccctatggtggtaaatttattgaagagtatgtggattttaggtaatataagaaaatatggaattattggctcattccaatgcactttaattccaggatgcagaattctaaaaatgaaaggtcattta

SEQ ID NO: 716856 - DNA, 974 bp, Homo sapiens
tttataaatataaaaattttataaaattttataaattttataaaatataatatttatataaaatattaatataaaatatatacaatataaattatattaaaaattaatactgatatataaaacatatatacaaayatataaaaaacatacataaaacaaatttaaaaataaaaatattttaaaatatataagaacataaatactaaaatattcaaaaatgtttttaaatattaaaaagtaaatatatatatatagagagagagagaaaataaaatgaaaccaagaggactcaagtagtaaccaaatgaggtgggggccgacgcaacacataagaaacaacaatttactcagcaactaactgagaagagacaagtttcccttgtcctgtgatgcttcgtttattcatttattcaacaaaaaacaatttttttgaaaaagagtcttgctctctcactcatgctggagtgcagtagcacgacctgggctcactgcagcctctgcctcccaggttcaaccgattctcctgcctcagcctccccagtagctgggattacagatgcctgccactatgcccaactaatttttgtatttttaagtagagacaggatttcaccatgttggccatgctggtctagaactcctggcctcaagcgatttgcctgtcttagcatcgcaaagttctgggattacaggcatgagccttcaagactggcctcgagaaaaattcttaagtgctcacttaagccggtcagggtggtggatactgggaacattaaggatgtgggtgggaatgcagggatttcactgagctcatggttctcagagggaaggacatttccctcctcctcttcctcttccctctgcagtgtgatgacacagacagtgtccaatgtcatttccttttctgttaatacaagttcatcactctttatgtggacatgtctgatcttctggttgctttgataaaacacaga

SEQ ID NO: 716857 - DNA, 974 bp, Homo sapiens
tttataaatataaaaattttataaaattttataaattttataaaatataatatttatataaaatattaatataaaatatatacaatataaattatattaaaaattaatactgatatataaaacatatatacaaatatataaaaaacatacataaaacaaatttaaaaataaaaatattttaaaatatataagaacrtaaatactaaaatattcaaaaatgtttttaaatattaaaaagtaaatatatatatatagagagagagagaaaataaaatgaaaccaagaggactcaagtagtaaccaaatgaggtgggggccgacgcaacacataagaaacaacaatttactcagcaactaactgagaagagacaagtttcccttgtcctgtgatgcttcgtttattcatttattcaacaaaaaacaatttttttgaaaaagagtcttgctctctcactcatgctggagtgcagtagcacgacctgggctcactgcagcctctgcctcccaggttcaaccgattctcctgcctcagcctccccagtagctgggattacagatgcctgccactatgcccaactaatttttgtatttttaagtagagacaggatttcaccatgttggccatgctggtctagaactcctggcctcaagcgatttgcctgtcttagcatcgcaaagttctgggattacaggcatgagccttcaagactggcctcgagaaaaattcttaagtgctcacttaagccggtcagggtggtggatactgggaacattaaggatgtgggtgggaatgcagggatttcactgagctcatggttctcagagggaaggacatttccctcctcctcttcctcttccctctgcagtgtgatgacacagacagtgtccaatgtcatttccttttctgttaatacaagttcatcactctttatgtggacatgtctgatcttctggttgctttgataaaacacaga

SEQ ID NO: 716858 - DNA, 974 bp, Homo sapiens
tttataaatataaaaattttataaaattttataaattttataaaatataatatttatataaaatattaatataaaatatatacaatataaattatattaaaaattaatactgatatataaaacatatatacaaatatataaaaaacatacataaaacaaatttaaaaataaaaatattttaaaatatataagaacataaatactaaaatattcaaaaatgtttttaaatattaaaaagtaaatatatatatatagagagagagagaaaataaaatgaaaccaagaggactcaagtagtaaccaaawgaggtgggggccgacgcaacacataagaaacaacaatttactcagcaactaactgagaagagacaagtttcccttgtcctgtgatgcttcgtttattcatttattcaacaaaaaacaatttttttgaaaaagagtcttgctctctcactcatgctggagtgcagtagcacgacctgggctcactgcagcctctgcctcccaggttcaaccgattctcctgcctcagcctccccagtagctgggattacagatgcctgccactatgcccaactaatttttgtatttttaagtagagacaggatttcaccatgttggccatgctggtctagaactcctggcctcaagcgatttgcctgtcttagcatcgcaaagttctgggattacaggcatgagccttcaagactggcctcgagaaaaattcttaagtgctcacttaagccggtcagggtggtggatactgggaacattaaggatgtgggtgggaatgcagggatttcactgagctcatggttctcagagggaaggacatttccctcctcctcttcctcttccctctgcagtgtgatgacacagacagtgtccaatgtcatttccttttctgttaatacaagttcatcactctttatgtggacatgtctgatcttctggttgctttgataaaacacaga

SEQ ID NO: 716859 - DNA, 974 bp, Homo sapiens
tttataaatataaaaattttataaaattttataaattttataaaatataatatttatataaaatattaatataaaatatatacaatataaattatattaaaaattaatactgatatataaaacatatatacaaatatataaaaaacatacataaaacaaatttaaaaataaaaatattttaaaatatataagaacataaatactaaaatattcaaaaatgtttttaaatattaaaaagtaaatatatatatatagagagagagagaaaataaaatgaaaccaagaggactcaagtagtaaccaaatgaggtgggggccgacgcaacacataagaaacaacaatttactcagcaactaactgagaagagacaagtttcccttgtcctgtgatgcttcgtttattcatttattcaacaaaaaacaatttttttgaaaaagagtcttgctctctcactcatgctggagtgcagtagcacgacctgggctcactgcagcctctgcctcccaggttcaaccgattctcctgcctcagcctccccagtagctgggattacagatgcctgccactatgcccaactaatttttgtatttttaagtagagacaggatttcaccatgttggccatgctggtctagaactcctggcctcaagcgatttgcctgtcttagcatcgcaaagttctgggattacaggcrtgagccttcaagactggcctcgagaaaaattcttaagtgctcacttaagccggtcagggtggtggatactgggaacattaaggatgtgggtgggaatgcagggatttcactgagctcatggttctcagagggaaggacatttccctcctcctcttcctcttccctctgcagtgtgatgacacagacagtgtccaatgtcatttccttttctgttaatacaagttcatcactctttatgtggacatgtctgatcttctggttgctttgataaaacacaga

SEQ ID NO: 716860 - DNA, 974 bp, Homo sapiens
tttataaatataaaaattttataaaattttataaattttataaaatataatatttatataaaatattaatataaaatatatacaatataaattatattaaaaattaatactgatatataaaacatatatacaaatatataaaaaacatacataaaacaaatttaaaaataaaaatattttaaaatatataagaacataaatactaaaatattcaaaaatgtttttaaatattaaaaagtaaatatatatatatagagagagagagaaaataaaatgaaaccaagaggactcaagtagtaaccaaatgaggtgggggccgacgcaacacataagaaacaacaatttactcagcaactaactgagaagagacaagtttcccttgtcctgtgatgcttcgtttattcatttattcaacaaaaaacaatttttttgaaaaagagtcttgctctctcactcatgctggagtgcagtagcacgacctgggctcactgcagcctctgcctcccaggttcaaccgattctcctgcctcagcctccccagtagctgggattacagatgcctgccactatgcccaactaatttttgtatttttaagtagagacaggatttcaccatgttggccatgctggtctagaactcctggcctcaagcgatttgcctgtcttagcatcgcaaagttctgggattacaggcatgagccttcaagactggcctcgagaaaaattcttaagtgctcacttaagccggtcagggtggtggatactgggaacattaaggatgtgggtgggaatgcagggatttcactgagctcatggttctcagagggaaggacatttccctcctcctcttcctcttccctctgcagtgtgatgacacagacagtgtccaatgtcatttccttttctgttaatacaarttcatcactctttatgtggacatgtctgatcttctggttgctttgataaaacacaga

SEQ ID NO: 716861 - DNA, 1191 bp, Homo sapiens
tgcctgatattgctatagaggaaaagtgaatggtttgaatccccaaaggggctttggaaaagtaatatatcataatggaccacaatgttccagggaccctgttagtcattttaacctaagtcatttcattatgacatatgttaatcagtagaaataattatttctgaagccagtttttagataaagaaacagagggtcatgaaggcagaaacaagactgcaatacggttgtctggttcccactcctggatggcaaaggcgatgttaggcaatgacatcatcattaccaccaatgtcacrgcagtcgctcactgctgagcatcatttctgtgctttcctgccaggcaatcatgggcgcttttgtggaccatgcttcctccctgacccaccccacaggcctcatcagctccttggaggcatccaacgacatgcacacgtggtgcagtctgacagaagagcctttctacttttctacactgactagggcaaggtggccaagtggccaccatcacagtgccaaccataacaagagaaatgcaattagaaaaactcgaagagcattgaaaatatgttgttgaccagtgcccaaaatggtaattcttgttttcagaggaaaacaaacatacccactttcttttcagtgactggaataccacagagcctgctttaaccgggagtctcataatgtgtgcgtgtgtgtgtgcctgtaaaagtgataagctatttctaaaatctagatggaaatacaaaacccaagaataaccaaagtaatgttgacaaaaacactgctaagtaacttgctactgcagatacccaggtgtgttataacacagtactggcttattcagtatactagtgatgtgaggatagaaagtttgaccaacagaacaaaataggataaataaggagatgtgtgaaaatacggccggcttttctgtgacaagagcatcaatcggtatggggggaaagaatagtcttttcaacacatggtgctgagacaatcaaacatccgtatgagagctttggacctgtaatccaaagacacctgcatattgtcaggaaaatctgcttcctgcctctcaccatatacaataacaacaataaagagtctattcttgatggattgcagatctaaatgtaaaatgtcaaccaataaaacacccagacagaaacatgagataaaagtccttca

SEQ ID NO: 716862 - DNA, 1191 bp, Homo sapiens
tgcctgatattgctatagaggaaaagtgaatggtttgaatccccaaaggggctttggaaaagtaatatatcataatggaccacaatgttccagggaccctgttagtcattttaacctaagtcatttcattatgacatatgttaatcagtagaaataattatttctgaagccagtttttagataaagaaacagagggtcatgaaggcagaaacaagactgcaatacggttgtctggttcccactcctggatggcaaaggcgatgttaggcaatgacatcatcattaccaccaatgtcacagcagtcgctcactgctgagcatcatttctgtgctttcctgccaggcaatcatgggcgcttttgtggaccatgcttcctccctgacccaccccacaggcctcatcagctccttggaggcatccaacgacatgcacrcgtggtgcagtctgacagaagagcctttctacttttctacactgactagggcaaggtggccaagtggccaccatcacagtgccaaccataacaagagaaatgcaattagaaaaactcgaagagcattgaaaatatgttgttgaccagtgcccaaaatggtaattcttgttttcagaggaaaacaaacatacccactttcttttcagtgactggaataccacagagcctgctttaaccgggagtctcataatgtgtgcgtgtgtgtgtgcctgtaaaagtgataagctatttctaaaatctagatggaaatacaaaacccaagaataaccaaagtaatgttgacaaaaacactgctaagtaacttgctactgcagatacccaggtgtgttataacacagtactggcttattcagtatactagtgatgtgaggatagaaagtttgaccaacagaacaaaataggataaataaggagatgtgtgaaaatacggccggcttttctgtgacaagagcatcaatcggtatggggggaaagaatagtcttttcaacacatggtgctgagacaatcaaacatccgtatgagagctttggacctgtaatccaaagacacctgcatattgtcaggaaaatctgcttcctgcctctcaccatatacaataacaacaataaagagtctattcttgatggattgcagatctaaatgtaaaatgtcaaccaataaaacacccagacagaaacatgagataaaagtccttca

SEQ ID NO: 716863 - DNA, 625 bp, Homo sapiens
agctaatgactattcctcactttcccaaacagtatttttaattcaatcacagctcagccctatgctcttgggcagatagatggatttgactaaatattttttcctccctcccaaacatctttctgttcttcaatcctcatatccaaagtgctaaggattttacctttagcacttcagggagcccaaagtatttccataatttttgtttgctgaaatttgaattattgaggaaattatatatttgagacaacttgtgccaaacttagacattctttttgtattttatgctctatcggaaaaaatatactccagatgaccagatttaaagtaaacaaactaggctgggcgcggtgctcatgcctgtaatcccagcactttgggaagctgaggtgggcagatcacaagatcaagagatcgagaccatcctggccaacatggtgaaatcccgtctctactaaaaaatacaaaaattagctgggtgtggtggtgtgtgcatgtagtcccagctacttgggagtctgaggcaggagaatcatttgaacctgggagatggaggttgcagtgagccgagagtcgtgccactgcacttcagcctgggmgaaagcgtgagactccatctcaaaaa

SEQ ID NO: 716864 - DNA, 1053 bp, Homo sapiens
tgatggatctgaaacttagccggccattctaccactacatgttcatgatattagatttgtcaataattgataagtggatagatgaatcagttaataattatttagtaaaacattatttgcaaattcgagatctttaggcaagaattacacatgtacctcttcacatcccctacacatttcccaaaaaacacagtatctcaacaccaccatatatctctccatttttctgcaaagccatttcatttgttttcctccagctgaatcctacacgtcgatgtaaagtcaaagagcatttttcttacaatttatctgtttcatttttacaaaccataaattgttgcttggtcatcaaggtgactgacggtccatcttacactggcgtgtaatatccacttttttccccttaactcacaatatattactttttggcatcagcaaatcccaattgattttagtcacaaattaaatgccctgatggttgtaatatagtgatttatcaccagagtcaggagtgattttgttttgtaatggatttaagaaaaggattgagggaaaaagaggcgaagggttgaaattytcaagtgtgcagacactaagtgtgaacaattcataaaggtttggtcaaaaaatctactacatttgactatgaagggagcttttaagaaattgagttatggaaggcaaacaacagtaactgtgtgagattaagctctttactttccaagtttcatgtagtcttcattgctttgtatttctcttgaaattactgagagagaaaaatgccatttgtcaactcataaagaatctcctgcttaacttctgagatataaatatttattttatattaccccaaataaataaaatctagacaattgggggaatgcagtaagtcgaagtgcactacatatacatctggtgtattgcagtcaaaatgattcctaatagtaattaacagaaaacagagtctcaaaatggcttacataaacaaaataatttattggcttctgtattagtccattcttgcatcgctataaagaaatagctcatattggg

SEQ ID NO: 716865 - DNA, 578 bp, Homo sapiens
gaaaattttagtatatgtcatttctgaaacatttcttttaaacttgacattatgcttgtaaaatgcaacaatgttaatgcattgctgtttattcatttcctatactatcctactgaatgtttactccaccatattgccatgtaatgttgatgaaattttgagttatttctaattcagaggtcttacaagttgtgtagttatgtgcattttggggccaggtattctggagaatttatgagtgcacttagcagaattctggatcaagttttgttttgttttttaccagacaatggcagttggttgtaaaatgtagattctgaataacagtatattagaatttctgttgctccacatacttgtcaccagttggttttgtcagaatgttaaatgctacctttctttaatgttcacaattttaagtcattgtgatcttaaaytgtattttagtcatgactaatgggattaacttttatttctgcaaagtttatttggctcctcttttgtaaatatatttgcaaatgttatagatttgtttttttcttatttttgtatgtctgttctattttcttctgtatgat

SEQ ID NO: 716866 - DNA, 1398 bp, Homo sapiens
tcaagatctgcaacatagcaagaccctgtctcaaatttaaaaaagaaaaaaaaaatccctcatgattgtccttttggtccaaatgtaagatatcctcagttttgtttttggttttctgtttttttgtttttttgtttttgttttgagatagagtctcattctgccttccaggctggagggcagtggtgcaatcttggctcactgcaacctccacctcccaggttcaagcaattctcatgcctcagcctcccaagtagctgggattacaggggcgcaccaccacgccctgctaatttttttgcatttttagtagagatggggttttgccatgttggccaggctggtctcgaactcctggcctcatgtgatccacctgcctcagcctcccgaagtgctgggattacagtattttttaaattattctaatcatttcataatcacayactggtcaaaaattaagagctggaagaaactagagattaaccattacacaaaggagaaaacacagatcagagaaattaaataacttgcttaaggtcacttaaaaatgtacaactagatcattaaattatacctttacatacattatctatgggtagttttacactaagtttatagttttgccacttgtgactttatggtctggggttctctgaggtacttcttttccacaattgtattaaaaatttgtattaggagccgctgataatttcctggaaactctccatttcagaggagatacagagagtctccaaaaaatctacatgaaaaaaactgagaattaaattttgtgtggttgatgctagctctagctttggacctatatgggataatttaaggagagcctgcctctcttacatgccaaaaatgtatgcagataagactttctggcaactcagaaagtgggcaatttgcctttccctaggtgacacacacaccacaaaactatgtgaatatgatggcagaaacatttttaaaggacctttttaaaaactgacaactattaaataacagggtgggacgtacaagccattttgaatatcagcattataagttgttggattagtcaccaaatagcctagaggctgtcatattttcccacggcagctgagcatgaagtctgtgaacagccacacaatacaaaagctttcaaccaaattcctagactagggatggaaatacaagttcgccccctttagacaacagaaagaaaacagagtgttccattaaatataataaaaggacatagttcaggaagatattaacaggcaatattctaagaccaacaatgcccttactacagtcctgaagaaaaaaacatgaatactgttgtaaaaataactaagaatggaaattcagttaatttgatgtttggctgtataattgccaaaaaaaaaa

SEQ ID NO: 716867 - DNA, 1353 bp, Homo sapiens
ccttgaatatgcaagcaactaagactctctatacttttcctgtcattttaggtacatgtgttacataaagtgagtttcatattttacaaaattatatacaataaacacatactactagaacaaaattaaagttacatatctttaagtaaatatgctaatttctgagtaacagtgatgagaacataataacagtgatgagaacataatcatgttggaaaacaattctccatgtccctcttgcatttctgcaggttttatcagcaaaagccctgatggtccttttattctagactatcttttcaagactgtttgtatatcaaacacccttagaagataaaaatactgtttccttccgaagcaaagggcaggtttgtttctgtccagtattataaagataatgtctcagtcaagggcaaaggtcacacaggcttactgtccactgtataaaaattcagatttcttcaggtttagatttctcagctgtgacacagcatcaacctggaccccttcgtgttgcctgcatagggcttaggaagcaaggagaaccaacgagaaggtgatgctgatgctgctggctatgcaatgagtaatacatttacctgtctctgaccctagaatgccatgacttcagccagcacccatgaaactgtgtcaggatgtaagttaacttgccagcttgcaagtacggaacaatttccgatccaccacattaacaattagtatatattatatagtattaaaaattttacacacagtggcagccaaaaatctcttgacatgttacacttctgtggtgyaatctcctaatctattttcaattgggtggatatgtctgaacgaccacaaagagacaacttatattccttttaactttcctgtagtttcccaaattttcttcaatggttatatatttcttttatttttaaaaaatttatcttgataaacttattttgtaacaacttcaggctgatacaaaaaatagtatacataaaaagtagaaataactttagtttgcaaagacagcacagaaagttcccgtttatccccactcccttcctcactggtttctccaacgttaacatcttacataaccataacacagttgtcaatactaagaaaccaacactggtacattactattaagtaaactccggactttatttggatttcacttgttttcccattagtgttctctttctgttccaggatcccatccaaatcaccacattgcatttagtgtgtgtgtgtgtgtgtgtgtgtgtgtgtgtgtgtgtgtgtgtgtgtgtgagagagagagagagagagagagtgtgtgtgtgttatcttgcattgtaacatccttagtgagatgta

SEQ ID NO: 716868 - DNA, 1353 bp, Homo sapiens
ccttgaatatgcaagcaactaagactctctatacttttcctgtcattttaggtacatgtgttacataaagtgagtttcatattttacaaaattatatacaataaacacatactactagaacaaaattaaagttacatatctttaagtaaatatgctaatttctgagtaacagtgatgagaacataataacagtgatgagaacataatcatgttggaaaacaattctccatgtccctcttgcatttctgcaggttttatcagcaaaagccctgatggtccttttattctagactatcttttcaagactgtttgtatatcaaacacccttagaagataaaaatactgtttccttccgaagcaaagggcaggtttgtttctgtccagtattataaagataatgtctcagtcaagggcaaaggtcacacaggcttactgtccactgtataaaaattcagatttcttcaggtttagatttctcagctgtgacacagcatcaacctggaccccttcgtgttgcctgcatagggcttaggaagcaaggagaaccaacgagaaggtgatgctgatgctgctggctatgcaatgagtaatacatttacctgtctctgaccctagaatgccatgacttcagccagcacccatgaaactgtgtcaggatgtaagttaacttgccagcttgcaagtacggaacaatttccgatccaccacattaacaattagtatatattatatagtattaaaaattttacacacagtggcagccaaaaatctcttgacatgttacacttctgtggtgcaatctcctaatctattttcaattgggtggatatgtctgaacgaccacaaagagacaacttatattccttttaactttcctgtagtttcccaaattttcttcaatggttatatatttcttttatttttaaaaaatttatcttgataaacttattttgtaacaacttcaggctgatacaaaaaatagtatacataaaaagtagaaataactttaktttgcaaagacagcacagaaagttcccgtttatccccactcccttcctcactggtttctccaacgttaacatcttacataaccataacacagttgtcaatactaagaaaccaacactggtacattactattaagtaaactccggactttatttggatttcacttgttttcccattagtgttctctttctgttccaggatcccatccaaatcaccacattgcatttagtgtgtgtgtgtgtgtgtgtgtgtgtgtgtgtgtgtgtgtgtgtgtgtgtgagagagagagagagagagagagtgtgtgtgtgttatcttgcattgtaacatccttagtgagatgta

SEQ ID NO: 716869 - DNA, 1353 bp, Homo sapiens
ccttgaatatgcaagcaactaagactctctatacttttcctgtcattttaggtacatgtgttacataaagtgagtttcatattttacaaaattatatacaataaacacatactactagaacaaaattaaagttacatatctttaagtaaatatgctaatttctgagtaacagtgatgagaacataataacagtgatgagaacataatcatgttggaaaacaattctccatgtccctcttgcatttctgcaggttttatcagcaaaagccctgatggtccttttattctagactatcttttcaagactgtttgtatatcaaacacccttagaagataaaaatactgtttccttccgaagcaaagggcaggtttgtttctgtccagtattataaagataatgtctcagtcaagggcaaaggtcacacaggcttactgtccactgtataaaaattcagatttcttcaggtttagatttctcagctgtgacacagcatcaacctggaccccttcgtgttgcctgcatagggcttaggaagcaaggagaaccaacgagaaggtgatgctgatgctgctggctatgcaatgagtaatacatttacctgtctctgaccctagaatgccatgacttcagccagcacccatgaaactgtgtcaggatgtaagttaacttgccagcttgcaagtacggaacaatttccgatccaccacattaacaattagtatatattatatagtattaaaaattttacacacagtggcagccaaaaatctcttgacatgttacacttctgtggtgcaatctcctaatctattttcaattgggtggatatgtctgaacgaccacaaagagacaacttatattccttttaactttcctgtagtttcccaaattttcttcaatggttatatatttcttttatttttaaaaaatttatcttgataaacttattttgtaacaacttcaggctgatacaaaaaatagtatacataaaaagtagaaataactttagtttgcaaagacagcacagaaagttcccgtttatccccactcccttcctcactggtttctccaacgttaacatcttacataaccataacacagttgtcaatactaagaaaccaacactggtacattactattaagtaaactccggactttatttggatttcacttgttttcccattagtgttctctttctgttccaggatcccatccaaatcaccacattgcatttagtgtgtgtgtgtgtgtgtgtgtgtgtgtgtgtgtgtgtgtgtgtgtgtgwgagagagagagagagagagagagtgtgtgtgtgttatcttgcattgtaacatccttagtgagatgta

SEQ ID NO: 716870 - DNA, 914 bp, Homo sapiens
ttgaggaggagaatacagaccgttcctgtaggaagaaaaataaaggcgtggaaagaaaaggggaagaggtggagccagcacctattgtggactctggaactgtatctgatcaagacagctgccttcagagcttgcctgattgtggagtaaagggcacggaaggcctttcgtcctgtggaaacagaaatgaagaaactggaacaaaatcttctggaatgcccacagaccaggagtccctgagcagtggagatgctgtgcttcagagagacttggtcayggagccaggcacagcccagtattcctctggaggtgaactgggaggcatttcaacaacaaatgtcagtaccccagacactgcaggggaaatggaacatgggctcatgaacccagatgccactgtttggaagaatgtgcttcagggaggggaaagtacaaaggaaagatttgagaactctaatattggcacagctggagcctctgacgtgcacgtcacaagtaagcctgtggataaaatcagtgttccaaactgtgcccctgctgccagttccctggatggtaacaaacctgctgagtcttcacttgcatttagtaatgaagaaacctccactgaaaaaacagcagaaacggaaacttcacgaagtcgtgaggagagtgctgatgctccagtagatcagaattctgtggtgattccagctgctgcaaaagacaagatttcagatggattagaaccttatactctcttagcagcaggcataggtgaggcaatgtcaccctcagatttagcccttcttgggctggaagaagatgtaatgccacaccagaactcagaaacaaattcatctcatgctcaaagccaaaagggcaaatcctcacccatttgttctacaactggagacgataaactttgtgcagac

SEQ ID NO: 716871 - DNA, 914 bp, Homo sapiens
ttgaggaggagaatacagaccgttcctgtaggaagaaaaataaaggcgtggaaagaaaaggggaagaggtggagccagcacctattgtggactctggaactgtatctgatcaagacagctgccttcagagcttgcctgattgtggagtaaagggcacggaaggcctttcgtcctgtggaaacagaaatgaagaaactggaacaaaatcttctggaatgcccacagaccaggagtccctgagcagtggagatgctgtgcttcagagagacttggtcatggagccaggcacagcccagtattcctctggaggtgaactgggaggcatttcaacaacaaatgtcagtaccccagacactgcaggggaaatggaacatgggctcatgaacccagatgccactgttyggaagaatgtgcttcagggaggggaaagtacaaaggaaagatttgagaactctaatattggcacagctggagcctctgacgtgcacgtcacaagtaagcctgtggataaaatcagtgttccaaactgtgcccctgctgccagttccctggatggtaacaaacctgctgagtcttcacttgcatttagtaatgaagaaacctccactgaaaaaacagcagaaacggaaacttcacgaagtcgtgaggagagtgctgatgctccagtagatcagaattctgtggtgattccagctgctgcaaaagacaagatttcagatggattagaaccttatactctcttagcagcaggcataggtgaggcaatgtcaccctcagatttagcccttcttgggctggaagaagatgtaatgccacaccagaactcagaaacaaattcatctcatgctcaaagccaaaagggcaaatcctcacccatttgttctacaactggagacgataaactttgtgcagac

SEQ ID NO: 716872 - DNA, 914 bp, Homo sapiens
ttgaggaggagaatacagaccgttcctgtaggaagaaaaataaaggcgtggaaagaaaaggggaagaggtggagccagcacctattgtggactctggaactgtatctgatcaagacagctgccttcagagcttgcctgattgtggagtaaagggcacggaaggcctttcgtcctgtggaaacagaaatgaagaaactggaacaaaatcttctggaatgcccacagaccaggagtccctgagcagtggagatgctgtgcttcagagagacttggtcatggagccaggcacagcccagtattcctctggaggtgaactgggaggcatttcaacaacaaatgtcagtaccccagacactgcaggggaaatggaacatgggctcatgaacccagatgccactgtttggaagaatgtgcttcagggaggggaaagtacaaaggaaagatttgagaactctaatattggcacagctggagcctctgacgtgcacgtcacaagtaagcctgtggataaaatcagtgttccaaactgtgcccctgcygccagttccctggatggtaacaaacctgctgagtcttcacttgcatttagtaatgaagaaacctccactgaaaaaacagcagaaacggaaacttcacgaagtcgtgaggagagtgctgatgctccagtagatcagaattctgtggtgattccagctgctgcaaaagacaagatttcagatggattagaaccttatactctcttagcagcaggcataggtgaggcaatgtcaccctcagatttagcccttcttgggctggaagaagatgtaatgccacaccagaactcagaaacaaattcatctcatgctcaaagccaaaagggcaaatcctcacccatttgttctacaactggagacgataaactttgtgcagac

SEQ ID NO: 716873 - DNA, 914 bp, Homo sapiens
ttgaggaggagaatacagaccgttcctgtaggaagaaaaataaaggcgtggaaagaaaaggggaagaggtggagccagcacctattgtggactctggaactgtatctgatcaagacagctgccttcagagcttgcctgattgtggagtaaagggcacggaaggcctttcgtcctgtggaaacagaaatgaagaaactggaacaaaatcttctggaatgcccacagaccaggagtccctgagcagtggagatgctgtgcttcagagagacttggtcatggagccaggcacagcccagtattcctctggaggtgaactgggaggcatttcaacaacaaatgtcagtaccccagacactgcaggggaaatggaacatgggctcatgaacccagatgccactgtttggaagaatgtgcttcagggaggggaaagtacaaaggaaagatttgagaactctaatattggcacagctggagcctctgacgtgcacgtcacaagtaagcctgtggataaaatcagtgttccaaactgtgcccctgctgccagttccctggatggtaacaaacctgctgagtcttcacttgcatttagtaatgaagaaacctccactgaaaaaacagcagaaacggaaacttcacgaagtygtgaggagagtgctgatgctccagtagatcagaattctgtggtgattccagctgctgcaaaagacaagatttcagatggattagaaccttatactctcttagcagcaggcataggtgaggcaatgtcaccctcagatttagcccttcttgggctggaagaagatgtaatgccacaccagaactcagaaacaaattcatctcatgctcaaagccaaaagggcaaatcctcacccatttgttctacaactggagacgataaactttgtgcagac

SEQ ID NO: 716874 - DNA, 914 bp, Homo sapiens
ttgaggaggagaatacagaccgttcctgtaggaagaaaaataaaggcgtggaaagaaaaggggaagaggtggagccagcacctattgtggactctggaactgtatctgatcaagacagctgccttcagagcttgcctgattgtggagtaaagggcacggaaggcctttcgtcctgtggaaacagaaatgaagaaactggaacaaaatcttctggaatgcccacagaccaggagtccctgagcagtggagatgctgtgcttcagagagacttggtcatggagccaggcacagcccagtattcctctggaggtgaactgggaggcatttcaacaacaaatgtcagtaccccagacactgcaggggaaatggaacatgggctcatgaacccagatgccactgtttggaagaatgtgcttcagggaggggaaagtacaaaggaaagatttgagaactctaatattggcacagctggagcctctgacgtgcacgtcacaagtaagcctgtggataaaatcagtgttccaaactgtgcccctgctgccagttccctggatggtaacaaacctgctgagtcttcacttgcatttagtaatgaagaaacctccactgaaaaaacagcagaaacggaaacttcacgaagtcgtgaggagagtgctgatgctccagtagatcagaattctgtggtgattccagctgctgcaaaagacaagatttcagatggattagaaccttatactctcttagcagcaggcataggtgaggcaatgtcaccctcagatttagcccttcttgkgctggaagaagatgtaatgccacaccagaactcagaaacaaattcatctcatgctcaaagccaaaagggcaaatcctcacccatttgttctacaactggagacgataaactttgtgcagac

SEQ ID NO: 716875 - DNA, 2459 bp, Homo sapiens
ttacaacatttttgtccagaacttttttggaatttcctttggggtatggaaggaagtagaaatttaattttttttctaattttttctcagcaagttttctttaaagttgtttcactttaaacaataagtttctttttaattcaacttatcaaaagaatgactcctctrtatgttaaaacacacttcatcttacaaaacaatgcagtcttgacagatgggctataaatagtggctttttttttttttggatgtttgaaacaaatccgaacatagactcagtcatgttactaagagctttcacaaggagtgaaggaaatgttcttctttatgtaggtggattttcattggaaattactgttaaatacaaatgagcctactattaatggcaccaatggtgtatgtatggcttgtaattcatcttgtttccaaatgaagtacatgggaagtgtgagtgttacttttatgggggagtagagcagacagtctcagttatgtctgcaaattcaagatatgtagtatctgatgatgttggaggttgggtcacacaacatgtcaaactccaatcaaaggaaaattacttgggaatctgtaacttggtacttatcattgctgggaaggtggctatgccaggggcttttgctgaagcaagaacaaaagtcattttcctagtcattgttccacatatgttttttttttttgctaacatatcttctaaaaataaagtcacatagttcacaattatggcttgatttgaactgtacacgctaccaatggacatttttctgaacacaaaaatccatcatggatctgtatcccgtgctcagtaaaaatatatccgtgtttgctcttcagcacagctctctcaccgacagttctgcagaagtgggtgagttcttcgaagatcaagacactgaaagccacctctggaatagtgaattaagtaaatttactagtttaccaagaatattgttttacggattaatctgcataatcatattgagtgattttgtatatggcttctcttaaacatacgttatttactatattaaatgagtatggtttttttcttgaatatatttaataatctactgaagaacatattcagcatgaatatattcttcataaatgcattcttcctaattgtagtgtttagagtatatttttcacatataagaatatattcattaatttattcttcttgattatgtttgtagaactgctttattggaacatgctctttattaacatatttatactcgactatattaagatatatacatgttatatattctatatatttgttaacaatattcacaaaaaagcaataagcctaggatccagcttctggcaaactgaacattatttaaaatgtatttaatgagaatgtgtatatttaaaaataatatttcttatactaaattttagtaaatttgcaaatttggtgaatttggcaagtttgtcacttggtgaattgatgctgttactgacctcgggtttaattctgttatcaatttacttacttaagaaagcataatttgtgattgtttttcaagacttaaaatggaaaaaatacatttttgtttcatagctttcattcagccgtttcaacttggcttctatgatgatgtaataaaaaccaatttaaaatcaattataattttcaacaagatactgtaatcctattcctagaactgataatgatttgattttttaggattagttatttatctaagatgaatgagcagagttactgtctttgcccaaaggaaaaacaaaagatgtaaccctgcatgccaacgaacccatcactctttctctggttctaacattttagaatagcctggaccattcttagttcaagactactttgcttacatcataagaattgagtcacagatttataatgatttactgtttctactgcaaggagaaagcagattccatctgaacatgctactttcacatgtatttagcccttattttctgagatttacagaagaatgaactgaatttgcaccataaacgtcagaagtgtaaaaaaaatctgcaattttacttagcaaaaccaagcaggaaacaaaaagagatcaaaatcaaaacaaagccctccaatgcttgaagattaaaaattaaccagcttcttttattgtgttattatggcttttagtatttttatgataacgaaaagtaacatttacccaccctttcttatggagtttatatgaataaactccttgggtttatataaatatggaataggagattttggggaaagaacctttattattaacagtgattttatcaagaaaaggtagaagcaatattgcaattagttatttaagaaatagggctaggatttactaacatttgagttcaatgtaaagaaaaaaacccattctaaatctaaaatcccaaactgttaccttttctttttttaaaatctcatttgtctgtaactt

SEQ ID NO: 716876 - DNA, 1373 bp, Homo sapiens
ttttttttttttaagactggaagtctctctctgtctctcccaggctggagtgcaggggcgcgatctcggctcactccaaccttcgcctaccaggttcaagtgattgtcttgcttcagcctcccgagtagctgggactataggcgcatgccaccacacccrgctaattttttgtattttttgtacagacggggtttcaccgtgttactcaggatggtctcaatctcctgaccttgtgatctgccggccttggcctcccaaagtgctgggattaaggcgtgagccaccgtgccctgccaatatgccttatttctaatagtatatttcagaaataagtctttgttttttggattgtattattgaaggagagtttatattccaaagtacatttgctgtaaatttgataactttaaattagataaacaaaaaggcatagtttgtacacctaaaaatgtttgagaatactatccccaatattaaggcaactatgaatagattaattttcctttggggacaaatactacaacctctaactgaataaaaattgtgattttttattgtttttctttattatgcttgcaattgacttaattaaatacacacttatcatactagttgaattatttcaattaattttatttcatgattattcaagatagtatggtttattaacatgacacaaacaatgtagagttttgaaacttcatttgaagtatgctaagtaatatgaataaaacatgtggttgatctatgtattttatagtttgtctttagtttttcttaaattgggaatcatatagtgtacatttttaatatgtgtacacttctgtatttctcaatttaatatggtcacagaacaataaatttggatccaaattgtcagttcttattaaatgccccatttggtagagacatcttaatttgaaagagtaacatttactattcaactaacatgaagactttaccctgccaagagatgaaatctatatttttatcgctttaatttttgacaactgttgatgttgtttattttaaaaattatatatttcattaacatgctccaaaacatggacttttgcatttttttgatggtagagacaagtatttttggtttaaccaaaatgagtaaattaaaatcattattcagttattttaatcagtttagcaattgtgacatcaacttctctatccattttaatgtgtctttgctcacaatctgagctaataaaatggtgacaaaaagttctaccacaaaagagtagaaagagttggtgagtaaagagaaagatttgtctataaagaaatacatggttttaaatttaggacttgtcttattaaatactatcagaaataaaatatcacattaatattttta

SEQ ID NO: 716877 - DNA, 900 bp, Homo sapiens
tcatctgtttttatacttaataatttattataaaatatttctatttctatgaatataaaaccaggttattgtggatgctaagaccatgaattacaaagatggatgactttgaaatttaacacaggaaaacaattatttgaatagagtattwcaattttttttctaatagctcaagtattttgccttcggacaaagatagacaacacaggaattaaacaactagataatcaattaaggagaatttcgttgttgcatcctggctcacctattcacaagttattaccacagtatgcattacttagcccttattcacctatggttacatgattctatattttaaaaataatttatccatttttaatatataaatatatgtagcctggtttccacatttgctattataagctattaatttttcaataagcaactttgcacatatgtttatgtgcacattggtgaggataattctcttaaatatttttgaggcgaagatttatagctaaaattgtatatacgatacagataaataggtgttcatcagcaataataggaatcctgactatactaattttagatatggtttactattttcagataagaaggaggttccatacctcagcatgctggaactgaaatctctgattattaactttccatgatgaaaacatgcaagctcttccaacttctgcttttatgcttgtgtttaagagaagaataaacaggaaagccagggttaaatgaaacaggcgacgcaacgatattcctaggaacgttctaaaataatttttcttacttctcactggctaagtaaaaccaggtcttttggcagtagttacatgcaaaacagtgtaggatgggaggagcaaggcagttgtgagacagaagagaagagacagtcta

SEQ ID NO: 716878 - DNA, 900 bp, Homo sapiens
aaaaatagaaaatattttttaagaattttcatattttcacttcccataatcacaatttgggtaacactgaatatgtttcacagtagagccatcttgtttctctgttaaagttcccctcagcttctaacaccaatcaaatcatcagagagtgcccgaagtatttcccattcagttgtaagtatgttgttgctttaagaattcaatggggacgggcgcggtggttcaagcctgtaatcccagcactttgggaggccaaggcgggcggatcacgagatcaggagatcgagaccatcctggctaacatggtgaaaacccatctctactaaaaatacaaaaaattggcagggcatggtggcaggcgcctgtagtcccagctacttgggaggctgaggcaggagaatggcgtgaacccaggaggcagagcttgcagtgagccgagatcgcaccactgcattccaggctgggcaacagagcaagactcagtctcaaaaagaaaaaaaaaaaaaaaggaattcaatggaattgactcactgtccctaaaatataagttaaaaatcrcttgtctttccaaataattactaatcaactaaattattttaataaaaaaaccatactctcagtttaattcaaaaaaggaaaaaaaaaagtgaagcaagaaatcaaattaggtcccatcaggccctgataactagaacacagacacacaggatcaacaaagagaggagtcatggaagaatgctagtttgatctctgtcaactagcctataaaatatcattattataacgatgagaggggaatgccttttccacatatcaatgaattactacagtataataaaacaacaataagaaacagcatgcaaaaagagaatgaagaaaaataaattaataaaaacaaaa

SEQ ID NO: 716879 - DNA, 900 bp, Homo sapiens
aaaaatagaaaatattttttaagaattttcatattttcacttcccataatcacaatttgggtaacactgaatatgtttcacagtagagccatcttgtttctctgttaaagttcccctcagcttctaacaccaatcaaatcatcagagagtgcccgaagtatttcccattcagttgtaagtatgttgttgctttaagaattcaatggggacgggcgcggtggttcaagcctgtaatcccagcactttgggaggccaaggcgggcggatcacgagatcaggagatcgagaccatcctggctaacatggtgaaaacccatctctactaaaaatacaaaaaattggcagggcatggtggcaggcgcctgtagtcccagctacttgggaggctgaggcaggagaatggcgtgaacccaggaggcagagcttgcagtgagccgagatcgcaccactgcattccaggctgggcaacagagcaagactcagtctcaaaaagaaaaaaaaaaaaaaaggaattcaatggaattgactcactgtccctaaaatataagttaaaaatcgsttgtctttccaaataattactaatcaactaaattattttaataaaaaaaccatactctcagtttaattcaaaaaaggaaaaaaaaaagtgaagcaagaaatcaaattaggtcccatcaggccctgataactagaacacagacacacaggatcaacaaagagaggagtcatggaagaatgctagtttgatctctgtcaactagcctataaaatatcattattataacgatgagaggggaatgccttttccacatatcaatgaattactacagtataataaaacaacaataagaaacagcatgcaaaaagagaatgaagaaaaataaattaataaaaacaaaa

SEQ ID NO: 716880 - DNA, 2210 bp, Homo sapiens
atcctcccacctcagcctctcgagtagctgggatgacaggcatgtgctaccatgccctactaaattttttattttttggtagagacagggttttgccatgtcatgcaggctggtctcaaactccagagctcaagtgacctgcccatctcagcctcccaaagtactgggattgcaggtgtcagccatcacactcggccctatttgctaatattttatttagaatgagaatctgtattcccaagggagatttgtctatgaggcattagcattaaggtgcgctggctttgtaacagatattgaggagctctcttttttttttttttctatcttcttgagtggtttcataacagtggggttatctgttcctcacaggctaaatagaactcagttgtgaagccatctgtgtctggggccctttcaaatagtaaatctttaaagacatttccaatttcttctataggaatgatctattcccattttttctcctctttgtgccattttgatgatttatatggtttatagatctttaatttcatctacattttccaatctgttgccatagttttatgtagcattgtcttgtaattattatactctgttctcttttttgattgtgatgtttttcttgttcctaatataaatggaatgttcttttaattaaaattataatttgtaattgcataaaatcatctgaagctttacatgactaaattaagtcttaacctagctttataattatgaaatagaagattgtaatcaaaaccgcatgaaattggaataataaaagtagacaacaatcatcagagcagaataaaaaacatacaaacagattttggtaaatacaggaatcgcgtatgtgaaaaagatagcattttaattcagtagaaagtggatagtttattttaataaatggtattaggaaaatgactatttaccttaaggaaaatacaattgaacccctacctcacatgatattaaaaaataaattctaggtgtatgactgaaaaaaataaaaaacaaaaatgtaattaaaagaaatgtaagaaactgtgtatataacccagagtttggagacaactactaacaaagataaaatacccagaagcgaagagagaacaaaaaaagtacaaattcataaacattaaaaatattagatggtataagaaactactcatgaagttcgtagataagcaatagattgggtaagagattgcaaagcatcagataaatgtstattcataatatatacaaagctcataaacttttgacaggaagtatattgcagcatataattcattcaatagaaaaatgtgtaaagataagaaataggaagttagtgcaacacaaacccaaatagtaaaatgtttgttataattattgtttcatttgttccttcacgctccatttctaggattaatcttctgtgagagctggaatctttgttttattcattgctgaatccaaattgctaaaccaatgtctggcacagagtgtgggcttaataaatatttattagacaaaacatgaaatattattggaagaagcaatcttttaaattcttttaaagggcaatcttttaaattctgttaaaataaaaaagcacacataccttttgattttcagtcccactctggactatctcaggttaataaaacatcattatatagacacatgtgagagatgaaaatgtttgttgtagtaatagttggaaaaacaatcccctcccccgaaaaaaaatcccaaacagaaaacaacaatgtaactgcccagcaattgaagacttgttgaataaatctacactctataaatctctcatacaactactaaaaaaaatgtgctggatcttcaccagtgaggtcaagaggaatttcggtaccatgttgttacacgagaaaagtaagacccaaagaggtgcatgagggaatcccatatttgcaaacaccaaatgaaaagaaacctctattcaggcgtgtagatatgtttgcatattacacagaaagaggctggggaggatgaacaccaagttgtttactgtggttattgttagaggaagggagagtacaaaacagaggtgtggtgtaaggcaaaacaaaacaaaaaaaaaaccagcggacttaaaaaacggtgtgtgtgctaatgcaaagcaggtcccaccaaagtattttctaaatggattttggattataagacttcatgtgactttgactttc

SEQ ID NO: 716881 - DNA, 3064 bp, Homo sapiens
tcgtaatgacggtctcaattactaacagcagtaactgttataatgatggtctcaagtagtaattgtgacagtctgccacacggggggggtcatgtcctacattacacagcatcccccccaaggggactcaccagacattccggaattttgggtgaattttgtgtgatctcaacctcaggagaactgggcttctttgaacagctggctgttttttcccttttggacatggatccatgaacggtggggctgtgctcttcaccctggctcctagataaggagtgttggggtgttgaaggctgaaagtatgagggtcgtgatcaactcagcataccactggaggctataagagtaaacagtacactgcttacccaccgccccatcacgtggagaggcactcatggcaggcttcgtgcctacagtccccactcccagctccatcatactcctctgctcttatcttcccctttgactcattccacccctcccctcaccagcttctttaaaaatgttttatttggtgtattatagttgtgcagtgttttttttagaacaaggtagtaaggcactctgtgaatgaaaagttaaagtgaagcatttcaggtagtgtgggggctatttggggcctcaccccagtgagttcggagattccaagatcttctgggggcctccaggcttccctgtcccatccagaacctctctcacctccccagagagaaccccccccacccatgccaacgtccgcagccaccacacctccccagcccaccccagctccagccacaccctcctgctcctggagtttggtttgtgtccatcgagtgatgctggctcagtctcggcttctggtgctgccctgggcgaggccaggactctcctaggcattcaggcctgaaagagcttcccttgactcagccatgactcaccaggggtgggccctaccagggcggggtggccccctgaggggtcttgggatggcctggagtttctgagctataaacattgccatttaaattattgaaattactgagaaagtttgatatgtggcagctcagccttcaggggttgaagttcctagaacatctgctttcaactcaaaccagttagtgggattgtggcatggaagtctgggaaatgtttcctaaaaggccaagtgttggagagaaaagaggactggactgcgggttgggagacctaggatccagtctgggtgtcactcctcactggactgcaaccctgagcaaatctctttccttctcttgaccctgtaaaatggggagaataaggcctgtgtgtgagggtccctttaatcactgagtaattacgaccaagcacctttaatgagctaaggagtgttcgaggttgctgggggtacagtggcggaaaagaacggcaaggcagtagcaatcaaatccaccaatgcaacaggcacctttaggtattgataaataccattaagaaaacaaaatagggtggctcacgggagagtactgggggcaggggagttaaaggtgatcagagaaggcaattgtccaggtaactgatgcctcgtcccagctgatagcaatggagatggggaaaagtgggttgactgcagataaccgtggaggtagagcccttaggatttgcagactgggagaatatagtcaccaggatgatgaccaccagggtttcagggttgagcaacatagtcaatgatgctgctgagtcattgagctggggaagaagtaggtctaagaggaaaaatcgagagcttggtcttggacatattaggtctgaagccctaagttgacacccaagtggcaccaagtgacaccaagtgaagatgtgatgcagacaggcaggcacatgactggagagcgtggtgcagagctatagccaacacaggtactcacaggtggtgaggggctaccggaggcatggctgcagggctctagaactctttactgtctcctccctgctctattccctttcaaatacactcacactcctctctgcccctagcgcctcgagcctgagcctgtgctggcccttaacttcccctgcaggtggctctggggccattgccagctctctgcacaaaatccacacataagtcctgggcccagaggccggcttcagttagctgacaaataggaaagcagccagtggactytctccaagggctgagccacactgggcatcttattttctgatagggcatttctgtctttcttttttttctttgagggggtgctcttatgtaggagcaagagaacaatgtaccaatccacaggcactattgacaaagttcccgggatatttttagagtggggcctagctttgagtagttcagaaacctctggaggcctccaaatagctcagtgtggcagcacctccagcagggagggctcctttccctgagggagctttggaagacaacagagggtgccagctcctgggatgggtgcccctgagattccacatggcagctcttagacttatatcagggctcgaaaatgagaagtttgggttctggtgatagagccatggttggtgagctctggtataaagaagcatcttagcaagccgcagatacacagagacgaactccattgtccccaagtgacaatggggtccaaataatcaggaaccctagtgagcacctgcgccttgctcaatattagatcagttcattgttcacacacacagtcactctgtctggtgatgattgctgtctctaactgcaaattgacagggcaggaggtcagtagggaagcactccagattgttggctgagttggcatctgtattagtcctttcttgcgctgctataaagaaatacctgagaccaggtaacttataaagaaaagaggtttaactggcacaagattccacagtttgtacaggaagcctggctggggaagcctcagaaaacttacaatcatggcggagggcaaaaggggaagtaggcacgtcttacatggcggggggagcaggaggaagagacagcggggaaggtgctacgtgcttttaagctagatctcaggataacccacttactatcatgaggggatatccaccccca

SEQ ID NO: 716882 - DNA, 2139 bp, Homo sapiens
ttgcgtttaaggaaatttaagacagaatttctaagagagaaagcaaatcaaacttttttaggaagtcaaacccgctgactggtgccagagtttgttgttaacagaaactgatttttttttttaatactttaagttttagggtacatgtgcacaacatacaggtttgttacatatgtatacatgtgccatgttggtgtgctgcacccattaactggtcatttagcattaggtatatctcctaatgctatccctccccgctctccccaccccacaacaggccccggtgtgtgawgttccccttcctgtgtccatgtgttctcattgctgtgtgaagacaaaaggccgagctgtattcaggaattcaatgagctgaagtctcccactccgttgggtggaacttttgggtttggtctcttgaatttcaaggtttctttggctccttcagcctcaaatagtaacatttcagtttggtaaatacagctcacctcctatggtgagtgtttgtagcaggaaagaacaattaactaaccacaaatatttgtgtgtcagtctgactccctggtgagaaatgcaaagcttacggggatccatgtgttttaaaatgccaaagcatttcctttagttaagaaccacggacggccataatcaaggcagaatctcgtactttaacacattagcaattagctttggttaaaaaagtagaaatagaagcaactgccttaacaaagaggcactttatttatgtatgtatttatttatttatttatttatttatttatttatttatttatttgagatggagtctctgtcatcctggctggagtacagtggcgctatcccggggataatatattccccatcccattactggacctctgtatgtaggcaaagatctttcgatttctttcatttcaatctcggattcccagaaagggggaaagagacagagagagaaagctgggttttttaaaaaacatttttggggccacagcccccgttgagaacctgatggaactacagacactatccctataaaatacacttatcacaaacatgccaaattttgtgctcagcttcaggacctctcccccgacaaagccccacaatcattcatggacttctgattagaaaccctggtttagatgatgggacaaatgtacccaaagccttggggtttgtttccttatgagtcatttcatttcacagagaggaaagtctgctctctggccaaagaccacaccagtaaccctggccagcaaatatggccgtcaaggagctggagaaaagagatgaaaaactcaagtcactatcacactgactttaaacgcaatttaaagcttaccccacgccagcccccaaatgaatgtttcatctccccatatcatcgtaattccttgaagggattaggaaagaacactctccagctccacgatgtaattcagaatgactttgcaagctgcatttattttttcaatcatcacctgctatggtgatacaaaaatatggaagcaaacgaaacacctgattgaaatggtgatagagttcacacagtgaaatattatgcaggcccaaaaatgatcattttgagtcctcaaaagtgatcaaaagtagcagtgggaaagatgcttatgttataataaaaagaaagaaaaagaaaagagaagaatctaaggtgctatgtctttatgattccagcaatgaaaactgcgcatcagataaatcaaaatgggtagctcttaggtaaaagtgttaggttgccagtgttattgatggtttatatctattttcaaaattttctagggtattatataatgtttacagtttaaaagtcaggagaaaatgacacatctgtacaaaatcagcctgttcttccaagtggctgtggccagactgcccctctaagtggtccagctctttctgtggcttctctggtgattaggctgaaaaggcagccgggtcgccacagacccggcagagcacccccaggcttagacaaccacagaacccgagctgggagactggaaacactggcaagggcacagtcacatcccagcgcccaccctgcttcctatcagcccccgtgcagttcaagtctgccgcacagagactggctcatggaagctggtgaggcatttccat

SEQ ID NO: 716883 - DNA, 2139 bp, Homo sapiens
ttgcgtttaaggaaatttaagacagaatttctaagagagaaagcaaatcaaacttttttaggaagtcaaacccgctgactggtgccagagtttgttgttaacagaaactgatttttttttttaatactttaagttttagggtacatgtgcacaacatacaggtttgttacatatgtatacatgtgccatgttggtgtgctgcacccattaactggtcatttagcattaggtatatctcctaatgctatccctccccgctctccccaccccacaacaggccccggtgtgtgaagttccccttcctgtgtccatgtgttctcattgctgtgtgaagacaaaaggccgagctgtattcaggaattcaatgagctgaagtctcccactccgttgggtggaacttttgggtttggtctcttgaatttcaaggtttctttggctccttcagcctcaaatagtaacatttcagtttggtaaatacagctcacctcctatggtgagtgtttgtagcaggaaagaacaattaactaaccacaaatatttgtgtgtcagtctgactccctggtgagaaatgcaaagcttacggggatccatgtgttttaaaatgccaaagcatttcctttagttaagaaccacggacggccataatcaaggcagaatctcgtactttaacacattagcaattagctttggttaaaaaagtagaaatagaagcaactgccttaacaaagaggcactttatttatgtatgtatttatttatttatttatttatttatttatttatttatttatttgagatggagtctctgtcatcctggctggagtacagtggcgctatcccggggataatatattccccatcccattactggacctctgtatgtaggcaaagatctttcgatttctttcatttcaatctcggattcccagaaagggggaaagagacagagagagaaagctgggttttttaaaaaacatttttggggccacagcccccgttgagaacctgatggaactacagacactatccctataaaatacacttatcacaaacatgccaaattttgtgctcagcttcaggacctctcccccgacaaagccccacaatcattcatggacttctgattagaaaccctggtttagatgatgggacaaatgtacccaaagccttggggtttgtttccttatgagtcatttcatttcacagagaggaaagtctgctctctggccaaagaccacaccagtaaccctggccagcaaatatggccgtcaaggagctggagaaaagagatgaaaaactcaagtcactatcacactgactttaaacgcaatttaaagcttaccccacgycagcccccaaatgaatgtttcatctccccatatcatcgtaattccttgaagggattaggaaagaacactctccagctccacgatgtaattcagaatgactttgcaagctgcatttattttttcaatcatcacctgctatggtgatacaaaaatatggaagcaaacgaaacacctgattgaaatggtgatagagttcacacagtgaaatattatgcaggcccaaaaatgatcattttgagtcctcaaaagtgatcaaaagtagcagtgggaaagatgcttatgttataataaaaagaaagaaaaagaaaagagaagaatctaaggtgctatgtctttatgattccagcaatgaaaactgcgcatcagataaatcaaaatgggtagctcttaggtaaaagtgttaggttgccagtgttattgatggtttatatctattttcaaaattttctagggtattatataatgtttacagtttaaaagtcaggagaaaatgacacatctgtacaaaatcagcctgttcttccaagtggctgtggccagactgcccctctaagtggtccagctctttctgtggcttctctggtgattaggctgaaaaggcagccgggtcgccacagacccggcagagcacccccaggcttagacaaccacagaacccgagctgggagactggaaacactggcaagggcacagtcacatcccagcgcccaccctgcttcctatcagcccccgtgcagttcaagtctgccgcacagagactggctcatggaagctggtgaggcatttccat

SEQ ID NO: 716884 - DNA, 1670 bp, Homo sapiens
cttgttggtcagcccacgcagattaggagaccggggcctgtgtcgcagctgcaatgtggtgtccctgagcacatcacagcctcgcagggctgctgtgtcctcggtcggtaacacagggaaggagctgtccttcctccctgatggtttcagagatccaaatgggacaatagacactacagggcatcgttgattacaaacagctgtgaagttggaggggttactgtcgccctgggtactttcacagaaccagtatggtcgcttctaaaggaaagttctaaaacgtgtctccccaggacccctctcggcctagctgctggaccagctcttcctcaagtgcaggaatacattagaagcggcctccagatgccacagatgctttcaaacacatctatttcagtcctgggattactgttttaaatttctgagatgccggagaagcaagagccgccctgaccacgtgctgctgcctcccgcctgtctcccggaaccttcctcccatggctgcccctccaggacgagggcagtgggggcagccccacactgcgcagctcgcagcctggtgcttggaccccggccagcccggagccaggataacgaggcagctctcctcccagcatttgagccaattaaaaagacaaatgaccgcaggcttatcttccctcctcctcagcccctctcttcctttccattcccaccccgacagggaaatggcctggggacctcagggctttgggcctcggctgctcttctctggaacagccaggctgctccaccctgcctgggcctttcaaggctgctgatggatggggcttctccagcctcctctcagagcttctgagtgttccgagacctcggactagaagggaggacaacgggagggatggggcggattgggagaaagtgaagcagaaaggccacaggctcaaagacttttgtaaaaaatgtcaaaagccttggagcttgtttttcagctctggccttggggcccagagcttkagcagaaggctctgattctgagggccatttgcttcatgtaacccggtggttagcgcagctggatcccatgtcttggaggagggccagctgcagctggaggagctctgagacccaaagcaagttcctggggtcctccaagcctgcacccgagtttgtccatgcctgtcatgggatggttgacaagtgtgaatgcctgtgagtacctggcacagcaccaggcacagacaggcaagctgctaatgtttgtcagttcccttcctcgtggcaacctcgagacactgattccaatttctccacggctcacagcttcgcctcccaccataacttatttacaggtcttacaggtttcatcaacagaatgtttatccttaaatctaactgaagaaaacaaacaaacacttctgttctcatcgctccctgataaaatcctatgcatctttcaaaacccagtttgatcgtggcctgtctggttttagcttctccgaggtcctctcagcaccgtatcgcttccatcctcaccctgtggcatcatgattgttccattaagttaatgaatattaactattaggtctgagtaacaccctggtaaacaggatgaaggaaatcccccctcctgcagtatatattcaagatggagaaaagaggcattttaaaaattctagaaatgaaattaa

SEQ ID NO: 716885 - DNA, 1775 bp, Homo sapiens
gcatttaatgctataatttacatatattataatattcatgatatatgataaatacccaaatcctatttggaaaaccttcattgtgaaaaaaattagaattttaacaaaatggtgtctcatattttaaagactgttctcatttttaaaaagtaaacataccaatttgataaaagatattaaatctattactaataaattcaggttcttgtggtatttcttgaattctaaatattgaaggtaaacaccagatatatgccaataaatttctaaatttataaaatcagcaccctgcattttaagtacatacytcagacatttcacacaggtacagggttaatttaacaaaggattatttcattataacaggcaacgtgctgccacaaactacagaggaagagagctctgaaataattgatgctctctgacccatttcatttttcaatttgtgtttcaaggaaaacttcagggttgacattttctacttgaccctacaaatgtcttttctctccacttgggcaaaaaaatcatccatatttttacacaattaaactacgcccctaccacccctgccctaaaagactaccaattaaggccatcattactcaacataaaacataggatcacacatgtaacactatccaaatcactggtgctttaaaatgtacagatagagacttccatttatcatgatggaatgaggtggttgacaaatcctccctcaaaatgcaactataaagctgaacaaaatagtcaaaagcagtaatttgagcactctgcaatccaaccacttcattagaactgctgaacttcagagaagaacaatatgagtttaagacatccttgccagcagctgctctcacctccatccccttgctttatcagcacagtagctgaatcagtgcagggtaggctgtgaaaacaagcagttttgtttcaaagctttgtcacccctgccagaggaggctcacttgattttgaagactgcacttgattttgaggactgttagttaaaagtactgatggcctgtggcatcacaagcctgaataagcaaacctgacgggggcaggcagcagacaaactagccaaatatttaacagggaattccagcaaccacagggagcttgaccccacatatttacggttgaccaggctgtgtgcattgccacagagaccagagagggcccatatatccctggctgatggagcctgcaggcatgtgcaggtgggacatgagaggtcccaaaaggaaataaaacccagagcagcctgaagtttgaatgtgctccgaagctcacacacagatccatcaggagagactggaagtctcaccgtcttaaggtgtttcagcgtaacttctgaccagtctttggttgatcactaagctatgcagacacaaggacaacaactaggaagccagacttacaaataaaaggaagggataaaatagtgagaagagacgtcacaactgcacattgtgaaggatacagacttcaaaggtttagtccaggcaagtaataaaactaacaacaaccaaggtcaccaacagaagggaaaagtgagaaactagagttgctacaatatattgtctaaaatattcagtattcaacagaaagttaggagtcatgcaagaaaccagaacatatgatccatacaaaagcagtcattagaaactatctctaagtgtctttaagatattataagcaaagggttcaaaacagctattataaatatgctcaaaaaactaaaaaccatatttaaagaattagtaaatgac

SEQ ID NO: 716886 - DNA, 1224 bp, Homo sapiens
tgtttgttggttggttggtttgttttttgagatgcagtctcgctctgttgcctagactgaagtgcagtggtgggatctcagctcactgcaaactccgcctcccaggttcacaccattctcctacttcagcctcccgagtagctgggactaccagcgcctgccaccacccccggctaattttttgtatttttagtagagacggggtttcaccrtgttagccaggatggtctcaatctcctgacctcgtgatccgcccgcctcagcctcccaacactctgtcagttttatagtcagagtagaagtcccctgggaaaggcagggaaaagtaaggaccattggtcaatgttacacccgccattggctacctccaaggctgttgggagctgaggaagcaggagttctattttgttaatgctaggactgtgtttctcaagttctccattgtgtccccaaggattggagtccagaggacaatatcagcaagacattatgaagttatagaaagtgtattagccatatacatctattgtttattagccccgtaattctaatttttattagaatatgtttttgctaatcagatgccattaatgctatttggtagcaaaaaggggagtgatacaaaccttggatgcaatgaaaaaaaaaataagagaatctgcaacattttaggaatatgtcctaagagaagcagccagaatgatgaaacatcatgagatcacaatgtctacccctgcaaagccttcctggacccgggaagacaggcacttctgtagattttgttcccaactgtattgaagtatcatacccagtggattgcacaggggtgcaagtgtgtgtttgtgtgtctcagaagcagagtccagaggattctcatgataatagatcttattttccaagtgctacgtgccaagcactaagacctttatgtaacttattttgttttaattcatacaacaacgggaacgagtttgatattatgattcccatttaggagctaaagaaaaaccgaaataacttggccaaatttggcaaattggccacaatgacacagttggtaagaggcagagctggctcaaggcccccagtgtcttaaccacaaagctcccaagggggcagatttctgccattagcccagtttccttcaaatttgaaattgctgtgagtctgtggactccacttatttcttttctattcctgatttatctgaaggaaatcacacca

SEQ ID NO: 716887 - DNA, 604 bp, Homo sapiens
taatcacatcagatgtactttctttctagtagcgatggcctttctgacactaatctctacttgttgaaattttgatcctttcaacrtctaattctgaagacattttctccctttactgattcctgatcctttcaacatctaactctgaagatatttctccctttactgattcctcccattggaaaattaatctttcttcttatgtcttttccatacagatcacttgcatccctactatgaagcatgctgttatatcctggcacgtagtaaacactaaacataatctcagcttctactgtagaatatgccactctattctcattgctcactgttcacataacttcggtaaaatcaaaccttgtcaaacaactgtcagtggctctatctctaaattcttaaaatacagagattgtgtgatcaccattttttcctccgttttctcattttcttatacactcactcttcaaactcattagattccttcattcttcccttccctatataactttccataccttcttgcccttattagcttttcccctacttgctctcttaaccccaattactgtccaatttcactaccttcactctcaacatctatacc

SEQ ID NO: 716888 - DNA, 604 bp, Homo sapiens
taatcacatcagatgtactttctttctagtagcgatggcctttctgacactaatctctacttgttgaaattttgatcctttcaacgtctaattctgaagacattttctccctttactgattcctgatcctttcaacatctaactctgaagatatttctccctttactgattcctcccattggaaaattaatctttcttcttatgtcttttccatacagatcacttgcatccctactatgaagcatgctgttatatcctggcacrtagtaaacactaaacataatctcagcttctactgtagaatatgccactctattctcattgctcactgttcacataacttcggtaaaatcaaaccttgtcaaacaactgtcagtggctctatctctaaattcttaaaatacagagattgtgtgatcaccattttttcctccgttttctcattttcttatacactcactcttcaaactcattagattccttcattcttcccttccctatataactttccataccttcttgcccttattagcttttcccctacttgctctcttaaccccaattactgtccaatttcactaccttcactctcaacatctatacc

SEQ ID NO: 716889 - DNA, 604 bp, Homo sapiens
taatcacatcagatgtactttctttctagtagcgatggcctttctgacactaatctctacttgttgaaattttgatcctttcaacgtctaattctgaagacattttctccctttactgattcctgatcctttcaacatctaactctgaagatatttctccctttactgattcctcccattggaaaattaatctttcttcttatgtcttttccatacagatcacttgcatccctactatgaagcatgctgttatatcctggcacgtagtaaacactaaacataatctcagcttctactgtagaatatgccactctattctcattgctcactgttcacataacttcggtaaaatcaaaccttgtcaaacaactgtcagtggctctatctctaaattcttaaaatacagagattgtgtgatcaccattttttccyccgttttctcattttcttatacactcactcttcaaactcattagattccttcattcttcccttccctatataactttccataccttcttgcccttattagcttttcccctacttgctctcttaaccccaattactgtccaatttcactaccttcactctcaacatctatacc

SEQ ID NO: 716890 - DNA, 604 bp, Homo sapiens
taatcacatcagatgtactttctttctagtagcgatggcctttctgacactaatctctacttgttgaaattttgatcctttcaacgtctaattctgaagacattttctccctttactgattcctgatcctttcaacatctaactctgaagatatttctccctttactgattcctcccattggaaaattaatctttcttcttatgtcttttccatacagatcacttgcatccctactatgaagcatgctgttatatcctggcacgtagtaaacactaaacataatctcagcttctactgtagaatatgccactctattctcattgctcactgttcacataacttcggtaaaatcaaaccttgtcaaacaactgtcagtggctctatctctaaattcttaaaatacagagattgtgtgatcaccattttttcctcygttttctcattttcttatacactcactcttcaaactcattagattccttcattcttcccttccctatataactttccataccttcttgcccttattagcttttcccctacttgctctcttaaccccaattactgtccaatttcactaccttcactctcaacatctatacc

SEQ ID NO: 716891 - DNA, 604 bp, Homo sapiens
taatcacatcagatgtactttctttctagtagcgatggcctttctgacactaatctctacttgttgaaattttgatcctttcaacgtctaattctgaagacattttctccctttactgattcctgatcctttcaacatctaactctgaagatatttctccctttactgattcctcccattggaaaattaatctttcttcttatgtcttttccatacagatcacttgcatccctactatgaagcatgctgttatatcctggcacgtagtaaacactaaacataatctcagcttctactgtagaatatgccactctattctcattgctcactgttcacataacttcggtaaaatcaaaccttgtcaaacaactgtcagtggctctatctctaaattcttaaaatacagagattgtgtgatcaccattttttcctccgttttctcattttcttatacactcactcttcaaactcattagattccttcattcttcccttccctatataactttccatacyttcttgcccttattagcttttcccctacttgctctcttaaccccaattactgtccaatttcactaccttcactctcaacatctatacc

SEQ ID NO: 716892 - DNA, 1261 bp, Homo sapiens
gatttgttatttttgctgttattctttgtgatccagtggatatgatctttacgatatcagtgtctaatgtcctaaaggatactaaattttataaatgtttcatgcatgcagcactctatatatgtcaagcttttaattggtgtgtgtttatatttttattaatctttgttaacatttatctgttacacatatcagtttctgagatttgtgttaggtctatcactgtgattgcatatttgtctatttctttttgaaaatctactagtatttttcttcattgatttttgaagctgttttacttggtgtatacatgagtagttatagcatgatgcttgttttctcaattctccatatagtggccttcttttcttaatattaattttgtttaaggtcaattttatttagaaactgataaaaggagagtacatcagtttcattttgagcagtattgcctagtgtgtcattcttactattttcaacttttctatgttctaaagttattgatgtacctcttatagctgtatatcataaattatctttttgaatccaatctgacaatttctgttacgcacatggagaatttaacccatgtacatttgttatgactaatggtgtatctggatttacatctgtcatcagatttttattttaaaaaatcattataaaataactacaaaagtatatgcttcaaagcattataataaaattaacttcattaatccaccacgaagttaacaattagaacattactaacattacatctatctgtgtgttgctccccatcttacatccctgcctatatttataccaaagataattactatctagaattataatttcattgatttttaaaagtcagtccttatcgaagtatgtatctccaaaatatgtatttagtttttattttttagttttacttgcttttgagcctcaaagatggttttacattgcatcacccttgtagaatgttttttacacccttattattttttaggttcatctatggtgtcatttataattccgtgattttattattagactatagccaacttgattcattttcttattgaagaatatttcttccacctcctataactacccccttattctttagctattccaaataacattgctatgaatgatagtttgcctgctygtcggtgcgaactgtctctagggtatatctctatgagtggaactgttgggtaccaagacgtgcaaatgttcaattttacacaatgatgccaaattgcttgcaaaa

SEQ ID NO: 716893 - DNA, 868 bp, Homo sapiens
ctctattctgttgtatagaaagacttgagcaatattttatacataacagcctaaatctaaaattgttccaaatgtctactaacaggaaagtgaataaacaattatactattgtcaggaaatggactatgaattagtaaaaacaggaaaagactattagtatatgtacaacatgtatacatttcaaaagctctaagttgaataataatcaagatacccacataacacataaaggatgattccactgataaaaaataaaaaagataaaactaatctattattttgaatcgaatagttattgcctatgaggattgaggattgacagagaggagcataacatctatttcttcattagcatattggttacattggtgaatatgtttttacaaattgaccaaatggtacaattaaaatctgtaccttttttgcatgtactttttatctgaatgcagaaactcttgatttctagttcagaaagggagtagaagttaaaactgcacattgctgagacagaagttcctagtccaggaacaatcaatgaaagattttgcttctgaggagggatcctattgctttattcctagcagcatgtctgagcctatcttcctccacgaatccaggattttgttttatttgacatttataaagtattccttacttcttgtttcctgtaaaaagtgtaatatggagttattctttagccaaatatattatgatctgtgggagagctgtttcatatacgtatatttaagacagagatataaaatagaggcagataacttctgtaaagagaaagtattttagtctttgcaggcaatatggtttctatcacaaatactcaccaccrccactgtggcaagaaagaagcca

SEQ ID NO: 716894 - DNA, 598 bp, Homo sapiens
gcataaatgctacttcaagataattgtaacaactgtaatgttctatggaaatatctgtgatcttaccagtgacaaattcacaggtactgctaataccacttccgtgtttgttgcctatcttcatgattggtagaaatgctgtttcagtaggagattagtgaaaataatgcaattgtcctcatccaagttagggaccccatggattctatcaagaaccccagaggtccaagacaaattcagtctttcagtcagcaaatctggggaatggatggcttagttccagggtktataggtgggggtgttaatgggcagtagggagttgggggagatgggaggggcagattgcatataatatggtccatgccctcaaggagttcacagtggattgtaggagacagacatggcccatcttactagccatctccacgtgacaagtggttcagggaaaccatgctgttcaatcttaggggaacagaaaggagcacagacaaacctagaaggactggtgctttcatgcaagtctgagaaggggccaacatttctgtggttcactaacattatctctctaacatttgcaatgacccttttgaaatggctg

SEQ ID NO: 716895 - DNA, 900 bp, Homo sapiens
tgcactaaagacaggcatgagtgaacttttgtccttgggtctgagatccaaactataaaagtggtttctggccrggtgcggtggctcatgcctgtaatccctgaactttgggaggccgaggtgggcagatcacgaggtcaggagatcgagaccatcctggctaacacggtgaaatcctgtctctactaaaataccaaaaaataaaaaataataataataattagccgggcgtggtggcaggtgcctatagtcccagctactcgggaggctgaggaaggagaatggcgtgaacccgggaggcggagcttgcagtgagccgagatcgcgccactgcactctaggctgggcgacagagcgagactctgtctctttaaaaaaaagtggtttccaaccaggccactgtcaaacattattggagctggtgattgtctcttatcgtgtgagctggtgtgaaaaaagcttgagactttagggcaccttcccagaactacgtctctgtaaggagaggtgatgattccagtctattctttgggtttgtttacctcctaaatgcttttattttttctaagtcattttcaaaaataagaatcttttagagacacaaggatgaagaataatataataagcacctgtatatacaacacccacacaggaaataaaacactgtaaacatagttggagcccctgggtagctctgcctccccctggcatggtgacaagaccctttgtaatctggcctctgctgcttctcccagcagtcatccactctctccccaaacaacaataacaataaacaagcaaatagccagtctactcccaacttttcagctgtagaaaaacaaactgtttttcctctgctctcactctacgacaatcaacacagaatacttctgtaaccaa

SEQ ID NO: 716896 - DNA, 654 bp, Homo sapiens
caactatgcatatgacgggaagcttggaagagaaagtcttgaagatgactaatgtttctgagaagaaaaaaatagaaataatgcatggctttgtgtaagttgaggagtcatattatgtgggtggaatcgagaggaaatgcagcattttttggaaaaggaaacgttgagaataatttaaccataactaggattgctgggaaaccattgtcctgtttgatgagtgtatatttcttttttttttttttttttgagatggagtcttgcgctgtcacccaggctggagtgcagtggygtgatctcggctcactgcaaactctgcctctgggttcacgccattctcctgcctcagcctctggacaagctgggactacaggtgcctgccaccatgcccagataattttttgtatttttagtggagacagggtttcaccgtgttagccagaatggtttcagtctcctgaccttgtgatcagcccgcctcatcctcccaaagtgctgggattataggtgtgagccaccgcgcccggcctggtgagtgtatatttctaagggtagattatggttccaggatgagggccattagggtgaaattaacagaatgtggctgtagaaagtgaggcaaataacagaaaatttgagccactcttcttctac

SEQ ID NO: 716897 - DNA, 654 bp, Homo sapiens
caactatgcatatgacgggaagcttggaagagaaagtcttgaagatgactaatgtttctgagaagaaaaaaatagaaataatgcatggctttgtgtaagttgaggagtcatattatgtgggtggaatcgagaggaaatgcagcattttttggaaaaggaaacgttgagaataatttaaccataactaggattgctgggaaaccattgtcctgtttgatgagtgtatatttcttttttttttttttttttgagatggagtcttgcgctgtcacccaggctggagtgcagtggtgtgatctcggctcactgcaarctctgcctctgggttcacgccattctcctgcctcagcctctggacaagctgggactacaggtgcctgccaccatgcccagataattttttgtatttttagtggagacagggtttcaccgtgttagccagaatggtttcagtctcctgaccttgtgatcagcccgcctcatcctcccaaagtgctgggattataggtgtgagccaccgcgcccggcctggtgagtgtatatttctaagggtagattatggttccaggatgagggccattagggtgaaattaacagaatgtggctgtagaaagtgaggcaaataacagaaaatttgagccactcttcttctac

SEQ ID NO: 716898 - DNA, 654 bp, Homo sapiens
caactatgcatatgacgggaagcttggaagagaaagtcttgaagatgactaatgtttctgagaagaaaaaaatagaaataatgcatggctttgtgtaagttgaggagtcatattatgtgggtggaatcgagaggaaatgcagcattttttggaaaaggaaacgttgagaataatttaaccataactaggattgctgggaaaccattgtcctgtttgatgagtgtatatttcttttttttttttttttttgagatggagtcttgcgctgtcacccaggctggagtgcagtggtgtgatctcggctcactgcaaactctgcctctgggttcacgccattctcctgcctcagcctctggacwagctgggactacaggtgcctgccaccatgcccagataattttttgtatttttagtggagacagggtttcaccgtgttagccagaatggtttcagtctcctgaccttgtgatcagcccgcctcatcctcccaaagtgctgggattataggtgtgagccaccgcgcccggcctggtgagtgtatatttctaagggtagattatggttccaggatgagggccattagggtgaaattaacagaatgtggctgtagaaagtgaggcaaataacagaaaatttgagccactcttcttctac

SEQ ID NO: 716899 - DNA, 1085 bp, Homo sapiens
gtaaattttaatataatatcttatgttattgaaaaaagcaggatgtaaaatatatactgtagggtcagaaccatttttaatcttatttaaagaaataggaaataaatgcaatcagattaatagacgttgtcattggtaggacttcgggtgagttttttcttcttcctacttttctgtattttccagttttctattctaaagttatattaatgtaataatttggagaaaagctctagttttcttttcttttcttttttttgagacagagttttgctcttgtcacccaggctgcagtgcaatggcacaatctcggctcactgcaacttctgcctcccaaattcaaggaattctcctgcctcagcctcctgagtagctagaattacaggtgtgcaccaccacgtctggctaatttttgtatttgtagtagagatggggtttcaccatattggtcaggctggccttgaactcctgacctcaggtgatccactcacctcagcctcccaaagtgctgggattacaggcgtgagccaccatgcctggccgaaattgcaagaacctttaaggtgatcccccacaaactggagctaggattaaggtggttcctcaggcctttgttctgcctacaatgttcatgagagttgctttctaggtttgattgctgctcaaacattcaaaatctgaaatagcaaagaaagaaaaaagaggaaatctattccaaagcagctactgtaactgaaagttgaatgcatgctgagaaacagtattataatttgatataatttgatatttcagccttatttattctgaattcctaaagctttgtaggtatccaatgcattatgaaaaaatattatttacctagaagcctagggtgccaaagggtataccttctgtgtttyatttggcctgtggacaggggaaatattacataattctgtaactaaggccatctctctgcaacttctccatagcattctgtgtccttgacctttacatagtgggctgtactgtccctgtcacaatgcttgtgcattattcttctctcaaccagacctccttatttactcctaagtagctaactctta

SEQ ID NO: 716900 - DNA, 598 bp, Homo sapiens
aaaataaaattctatttttagttagaaacacattaaaagttttcccccaatttgtaattagcaaaatcaattaacaaactgctaattactcaacaaatactagatacaggacactgtacaagctacggggacaacaaggaagtaaaaaattataaaaaagaaaaatcctatcctctaggagcttacaatctacacaagggcacaaaaaatattcagcaatacttttctgtcatttttagttcacaatcatttgcagactaaaatccacttaaatgtcaatatttttttcaaaagggaaaatgaatgcgtacataaagtaactttgcwgtacataatcctaatgctcctttccaaacattttcctatataaatataatcatcttgcaagaaatatgtcaactcaattgacacaattccagtttataatttgttttttgtattactttttaatcatatcgcagaactgtaatttataaaatttctaacttttggctcaatgaaatccatgtatactatgactgaactgcaaattttgagttgctgaggttcacaggggtttaactgtcttattttaataagtattgacgggtatcatttg

SEQ ID NO: 716901 - DNA, 598 bp, Homo sapiens
aaaataaaattctatttttagttagaaacacattaaaagttttcccccaatttgtaattagcaaaatcaattaacaaactgctaattactcaacaaatactagatacaggacactgtacaagctacggggacaacaaggaagtaaaaaattataaaaaagaaaaatcctatcctctaggagcttacaatctacacaagggcacaaaaaatattcagcaatacttttctgtcatttttagttcacaatcatttgcagactaaaatccacttaaatgtcaatatttttttcaaaagggaaaatgaatgcgtacataaagtaactttgctgtacataatcctaatgctcctttccaaacattttcctatataaatataatcatcttgcaagaaatatgtcaactcaattgacacaattccagtttataatttgttttttgtattactttttaatcatatcgcagaactgtaatttataaaatttctaacttttggctcaatgaaatccatgtatactatgactgaactgcaaattttgagttgctgaggttcacaggggtttaactgtcttattttaataagtattgacgggtrtcatttg

SEQ ID NO: 716902 - DNA, 614 bp, Homo sapiens
taacaattttcatattaatgtaccagttaaagcactattctttaataaaaagagccttttattaaaggctctttaggattttatagaagttgatgacacactgataaagaaattactttgaaaaataaaaggtcagataccaaaaatattaatgtgtttattttacttatttatttttaaagacagtcttactctattgcccaggctggagtgcaatggcacaatcagagctcactgtagcttccaactctgggctcaaatgatcctcccacttcagcctcctgagtagctsagactgtaggcatgcaccaccacacttggctaaattatgtttaatttttatgctagagtaccaatatcagacactgttttacaaaatggaaacaatccaaatcagtagttattaaatcaaatccatggagaatgtaataaaatagatttcaaaagtaaatcccaactatcataagaatttagtatgtgacaagtcaaaagcaaaacaattgctagtcctggcatgaaggatttggatgaggtggaagtctgagatatctctcttgctgtcagctggattccatcaggtgacaggtttcctatgtaatctgggagatgtgtca

SEQ ID NO: 716903 - DNA, 3099 bp, Homo sapiens
tgagcccctggactctggatcaatccttcactcgccttcactcctgcaaagtgggggtccatgtgcccatcctacagatgcagatatgcaggcccaggcaaagtccatggcccttcctggagtcagcagcggaaccgggtctgggcccaccaggaccgcaattgttctccctccttttgatgttcccgagaacagggagtcccctgccgtgaggagcgctggtcttacctatgatcccaaagagcctggtccaggcagcggaaacccagagggtacggcctcccgccaaatccggaccctctccagcctcagtctctggtccgcaacaggagtgaggtggccccggagctctgagcaccttctcaccggctccaaggcccccgccttctcctcacttttggtctcgggttggggcccggcaggccccgcccagcctccttcacttccttgggccagggccgcygccgcgccgggctctgccctatgtggccgttggattaatatccagatattaagtaaacactaaattagcaaaactacaagaaaattttacagccctttgcatttggcaatcattgagtgttaattagaaattcattacaattaaaaccctgcctaaacagggcctgcgcgccttaattacatctgatttttaattcagaatacgtgtttacacagtaagcgctacgtaccccgtgattatccccaatcctctttatactgtactaattatgtaaattaaacctaattaactgacgaaaactgccgttaattcaactagtaaaagatatgtgcttgcggaggaggcgcgtccgcgcagcctcagcccaagccggagcccaaatggacgccaaacccggggcacggaggcagcgcgggctcggccagtgggaggagaagcgcgcaaggcgcagctcgcatccagagtccggctttccgacccctggtgccaccgggaagcggataaaagagagagaatcttcaataatgggggtcaggaaggccaagggcagcgacgcctgcccgctctggacagggcctcaggacccagagcccccactgaggaagaggagtcccgcccatcccttcggagcctgggttgcggtcccagctctgccactcactgcctgcctgaacctgagcaagtgccctggctgtgccaggccttcctcctctacatcgtctaatgagggcgatactgaaacgcagcgctgcgccctccttaccgtcccttcttcaagctaggctctctctgcagcgtgccaagcaccactttttgagtctaggagatcagcttgcgtcccttgtgggctgagggccttggctagggagaagggcaggggttggcttccactgccggatcctcagtttcctgcctgtaaaatgggaataagtggttcctatctattcccagggcccttgttgagaatcggctctgcaatcggtaaagtgcggtccgcggtgatattaacccgccggacgccggcccatagtagagccccagctcctacccccacgacctgctccccggtgcccagccctgagcagcggggcttccccagcctctgtccacgcgcctttctccagctcagaccagggacaggagctgggtgggtctcctggcactggccagagcgcggggagctgtccgtagcttggtgctgaacggggacgcagagtcgacgctgcacaccccctggtgcggggcggtaccctttgtctaagaggtcctgggggccccccgcggccgggctgctggaaacggaggcgtctttggccctcgctgtacaacagaggcaggacaggcaggtcctgctcagggggacccagcccatcctctctttcctcccaccccccggcaccctgggggcgtcctggctccaggatcgttgtcaccaccaggccgaattctgagatgccttttaaaaaatcattaggaggctaagaataattaccgaacgagattgtaattatggggtgggggagcctgggccgagggagagggaatgagctggcggggacttgggggcagctctcggactgggaaggaaaataggttcctgtgttctccccggggaaggtgtgggaggaaagacagcgggatagttggagcgggacagaggcacagcctgggaaagacacccgaatggaggggccagaggcagaaagaaaggggccgagcgggttccaggactcccctgggagaaaagggaaaggcagggagatccgagacagaaagaccggaaccgaggagggggaagagggcaagaacgcgatctaaaagagaccctcagaggagacagagcccacaaacttgggagaggttttcggggcctaggagaacggtaacctacgtcagccagggtagccgggaagaaggcaaaggagtctgtgggctgggcctgccctctcctcagtcccttcaccaggcctgagctatcggttcgcgcttccagagtcccttcccagggtctctgcgagccaggagggaaaggaagagaggggagaagtggaggaaaaggggagacacgccccagaggagttggaacgcaggagggaaaggggaccatacccggtagcccgagggaaaaacgaggcgagaggggagaaggcgaccccgcgctgctacccgcggaagatttatggcgcctcccgggttccaaggacaggctgcgttcgtcgctgctgccaccgccggtagtcgccgtggccgctgcgccccctgcccaggcggcccgtcgcgccccaggccatccctgccattattaacttctgtttgattagggtaattgttcaaacttgggccggacagtatgattaattacagtttaattaacgtgtccattaaggacacttaatgccaggggggcagggagggaggtggtggaagcggccaacggggcgcctgggtgcgggctaagaggggcggggtgcgactagtaactcaaacgaagaagtagagacagattgagagaggaagagaaggggacccagtggggcgttaggggaaagaatggtgaagacggagagaccgactgagacaggaaagggatggagagaaacggagctttgaggagagagaggaggtacccaggggcg

SEQ ID NO: 716904 - DNA, 1437 bp, Homo sapiens
tcggctttgctcttccagaattgctgtcttcctagaaggcaggatggtttcaggccgcccaccgagccagcaggcggagggctggggctgtgtctgggacacaaacggcggggatccctgggagtccactccttctgccccagtgccggctgcccagggcagtcaaggcacacgcaggtctcctcccgagggcacggccctcgcaaccccaccgtgctctcagacaacacaagacagaggccacaaagggaaataaaatacaaaaccacaccgacagaaacgctcatggatgtcctcaagacatagtaaatccccaaaaccacctgaaacataaaaagaacattcaaagacgaaaaaactcttgggacttcatgacagaacagaaggcacttcagatgygagctcgcaagagcagagtgaggactcaaagccagcccgggagagagtgaggactcgaagccagccctagagatccaacgccgacacctgctcacaggaatttgaggcactcagggaaggacaggagaaacgatgaggagacgggaaatgctcccggagctgagcaggagcagatgccatagcctggggctgcatgctggagcgtccgggggtcaccggcaccaacaagcatcccaaggtggagccacttcccacccagcattccacccgacggccaggcaagtgcaagggaggccccttcagatgatcatccccccgccgccgacgcttcttctgagaagccacagggaccccagggggatgcatcttgggagtgaacccagagacccaggggcatcaggtcagcccaaggagacttgaagccacagcgcccggggccgggcctgaggcagacgtgggaccggagactcagaccacagcgcccgggccgggcctgaggcagacgcaggactggagagggtgggctcggttcttgtggccgacagctagcacgctccgagcacagcctcggggactgagcagagcccagctacaccccacttccatgcagagaccccgcctccccgatggcccccatggccctgaggacaggatggatcacgcaccacaatgccggtgggggctggcagcagtgccagtgtcagcaactcccggttttagcttgccagttggcagtcgcctggaacaggtgcagacacgctgtccccttgggctcactgtgctctgggcttgggggtcttagtgaacagaggcaaagacttcactttgggcagctcagagtcagatagacgagaataaacctcctacaaggaaacagcttccacacccccaaagtgccctccacgttaccttggaggccggagctgaggtcgccaaggtcagcaaatgggtccgggttctgagacttggtccagctggcctgagagccacaaggggccggctgacctccaggagagaagagggggcctggagaagggg

SEQ ID NO: 716905 - DNA, 1085 bp, Homo sapiens
taaccaaaaaataattttccaggtgaaatcccaggtttttataacacaaaatcttctgcctatgccattaaggccttgagttgtattctagaaaaataatactttsggagatttttcaaaaatctactagagaaaagcatataaactgaaataaaagagttatgattactattaggtcatatcatctttaatgttccatttattcattgagaggtctcttaattttaatgtaaaccaattagaaaagatggagtttggttcagctgcaggaggatcctccatgaatattagaggcaactcatagcctggtggccccaagatagcaaagcaaccctagcttggaaggcagccacaaggaaggctttctctggattcctaagtcctcagctctgtcctgacctgaatgccccaggtaagtgactggagaacgacttctgtccctgcttaggcctgatattttggtttgaaattgaagatgctgaaaatatttataactaggcccaagagacatgccattctggtctaatgacttcatgaaacatttgaaagtgaattattgagtttcatcttatagaatgcaaataagaaatgccttaacccccagaatttcttttggataatttaaaataaatatattgcaaataacacatgaaggcaggtgttaataattctattacttggtcataaatagagcatatgggtattgagtttgatgcatttaaatattttaatgtgtcacctgaagacagaaatctgctaaggaaattttcattaatcacacataccaagcataaagtaaagaaaatacatcttacaggaaaattgatttttatgctctcagttttgtcataaaaatatgctatagatacaatcaatcacagcttccacactaagtcctttaacactggacattgtttttgaaacaaaacagctgggttggaagtgtattcaaagtttattccacatgcaacatgagaataatagtaacgttaccccaagaacatctgaaatagtatttgcagagccatagcatcttcccagctgcaaaggacattagaatccatttagttcaataataatttaca

SEQ ID NO: 716906 - DNA, 1085 bp, Homo sapiens
taaccaaaaaataattttccaggtgaaatcccaggtttttataacacaaaatcttctgcctatgccattaaggccttgagttgtattctagaaaaataatactttgggagatttttcaaaaatctactagagaaaagcatataaactgaaataaaagagttatgattactattaggtcatatcatctttaatgttccatttattcattgagaggtctcttaattttaatgtaaaccaattagaaaagatggagtttggttcagctgcaggaggatcctccatgaatattagaggcaactcatagcctggtggccccaagatagcaaagcaaccctagcttggaaggcagccacaaggaaggctttctctggattcctaagtcctcagctctgtcctgacctgaatgccccaggtaagtgactggagaacgacttctgtccctgcttaggcctgatattttggtttgaaattgaagatgctgaaaatatttataactaggcccaagagacatgccattctggtctaatgacttcatgaaacatttgaaagtgaattattgagtttcatcttatagaatgcaaataagaaatgccttaacccccagaatttcttttggataatttaaaataaatatattgcaaataacacatgaaggcaggtgttaataattctattacttggtcataaatagagcatatgggtattgagtttgatgcatttaaatattttaatgtgtcacctgaagacagaaatctgctaaggaaattttcattaatcacacataccaagcataaagtaaagaaaatacatcttacaggaaaattgatttttatgctctcagttttgtcataaaaatatgctatagatacaatcaatcacagcttccacactaagtcctttaacactggacattgtttttgaaacaaaacagctgggttggaagtgtattcaaagtttattccacatgcaayatgagaataatagtaacgttaccccaagaacatctgaaatagtatttgcagagccatagcatcttcccagctgcaaaggacattagaatccatttagttcaataataatttaca

SEQ ID NO: 716907 - DNA, 641 bp, Homo sapiens
tagtaatgcccacgaaaatcctctgcgggccttgccaaatgcgtgctcggattcagcaagtttgggtggggcttgagaatctgtatttccaactcacctgctcctaggtgatkctgctgctgctgctgcatgctctgccttgggtagcaagagtctaggggtgaggtgtggagggagggagacagagtgagaaagagtgagggggacacaggaagacagagggatcgccatggagaattagcacgctgcagtttacgtgtatgaattgattaactcttgggaggcttaaagttcttttctctcagagagaaataatttttaaaaatctgatcatgcattgtgagtcaatacaatatatcctatttaaaaatgtttaacgtataattattattgtccccaaagaatgaaacgttccctgttctatgcctcaacatagagacaaaagattaacttgaactctacttaatgattctacagcttaatgggaatgacttaattgtggaatttaacatctttccttaggaaaagaggattcaaagaagaagtgtacctaggggtggggataaggagcaaacgtggagattgtgattttctaagactttgctatggccactctcctgcacgctcgcccttgatcagag

SEQ ID NO: 716908 - DNA, 1108 bp, Homo sapiens
ttcagaaacttcgctagtttatgttgggccacattcaaagccatcctgggccgcacgcaggccacaggccacggcttagacaagcttgaaactttaaacagaaaagagacaatgatgccaccactctcctaggctctggagaaaaatgaaagccatagaaatttaagtccctgctgaaacaatgattatcatatttttttaartcaaaactagaacaaactatatggagaaagctagggcaattttaaaatcccagaataaagtgttctaaatttttgcacttaatcgcctcagtaaaatatcctgctttatccaaagtgaaggcagtctgttgaaaattctgtccacacaaacgtgaactacaatcatcctttgcttttccttatattatatatggaggcatgaccaggaattgctagatatttcaggaaagcttgcatcatggaaaaggatgatctaaacaaacaaacaaaaaaccattgactggaggagatacacataatgcaacaaatagaactttgaggaaaattaatttgtaaacgtgatgcttacaagaagtacatttggggaccaagaaaaatccctacaaaaataaaagataaaattgctaaaataaaaaaagaaactactcacaagcatgttagaggatagagctgaagaaatccccttaatttaagcattatgctatatgcaacaattgcttaatataaacaatatatctttctaatataaacaatatatttcttatatatattttcacatataaaatattttaattgagatatcagctgactaacaggagttcaaggaaaaaaaataacagaaaatgaaggtggggtataatagaagataatttactaaaatttaagagaggtgaaaaaaaggattcaacaaattgttgagtaggatgaataaaaaattagttacccacacccagaaattttatattaccagtgataaaaagaagatttataaaagattctagagagaaaagaaaaaaataaatagattgcaaacagaccactcatctctgtcagaagaaagttatacctttaaaaatcagagggcgcctgtaatcccagcactttgggaggccgaggcaggcgga

SEQ ID NO: 716909 - DNA, 1108 bp, Homo sapiens
ttcagaaacttcgctagtttatgttgggccacattcaaagccatcctgggccgcacgcaggccacaggccacggcttagacaagcttgaaactttaaacagaaaagagacaatgatgccaccactctcctaggctctggagaaaaatgaaagccatagaaatttaagtccctgctgaaacaatgattatcatatttttttaagtcaaaactagaacaaactatatggagaaagctagggcaattttaaaatcccagaataaagtgttctaaatttttgcacttaatcgcctcagtaaaatatcctgctttatccaaagtgaaggcagtctgttgaaaattctgtccacacaaacgtgaactacaatcatcctttgcttttccttatattatrtatggaggcatgaccaggaattgctagatatttcaggaaagcttgcatcatggaaaaggatgatctaaacaaacaaacaaaaaaccattgactggaggagatacacataatgcaacaaatagaactttgaggaaaattaatttgtaaacgtgatgcttacaagaagtacatttggggaccaagaaaaatccctacaaaaataaaagataaaattgctaaaataaaaaaagaaactactcacaagcatgttagaggatagagctgaagaaatccccttaatttaagcattatgctatatgcaacaattgcttaatataaacaatatatctttctaatataaacaatatatttcttatatatattttcacatataaaatattttaattgagatatcagctgactaacaggagttcaaggaaaaaaaataacagaaaatgaaggtggggtataatagaagataatttactaaaatttaagagaggtgaaaaaaaggattcaacaaattgttgagtaggatgaataaaaaattagttacccacacccagaaattttatattaccagtgataaaaagaagatttataaaagattctagagagaaaagaaaaaaataaatagattgcaaacagaccactcatctctgtcagaagaaagttatacctttaaaaatcagagggcgcctgtaatcccagcactttgggaggccgaggcaggcgga

SEQ ID NO: 716910 - DNA, 1108 bp, Homo sapiens
ttcagaaacttcgctagtttatgttgggccacattcaaagccatcctgggccgcacgcaggccacaggccacggcttagacaagcttgaaactttaaacagaaaagagacaatgatgccaccactctcctaggctctggagaaaaatgaaagccatagaaatttaagtccctgctgaaacaatgattatcatatttttttaagtcaaaactagaacaaactatatggagaaagctagggcaattttaaaatcccagaataaagtgttctaaatttttgcacttaatcgcctcagtaaaatatcctgctttatccaaagtgaaggcagtctgttgaaaattctgtccacacaaacgtgaactacaatcatcctttgcttttccttatattatatatggaggcatgaccaggaattgctagatatttcaggaaagcttgcatcatggaaaaggatgatctaaacaaacaaacaaaaaaccattgactggaggagatacacataatkcaacaaatagaactttgaggaaaattaatttgtaaacgtgatgcttacaagaagtacatttggggaccaagaaaaatccctacaaaaataaaagataaaattgctaaaataaaaaaagaaactactcacaagcatgttagaggatagagctgaagaaatccccttaatttaagcattatgctatatgcaacaattgcttaatataaacaatatatctttctaatataaacaatatatttcttatatatattttcacatataaaatattttaattgagatatcagctgactaacaggagttcaaggaaaaaaaataacagaaaatgaaggtggggtataatagaagataatttactaaaatttaagagaggtgaaaaaaaggattcaacaaattgttgagtaggatgaataaaaaattagttacccacacccagaaattttatattaccagtgataaaaagaagatttataaaagattctagagagaaaagaaaaaaataaatagattgcaaacagaccactcatctctgtcagaagaaagttatacctttaaaaatcagagggcgcctgtaatcccagcactttgggaggccgaggcaggcgga

SEQ ID NO: 716911 - DNA, 1567 bp, Homo sapiens
tataaatggaacctttaacgaattgagcactttgtcaacactcagatttaatgaacacacatcacttgaatatttttttaaagatttttttcccagataataacctagaattttgagattgtcgaatgcaatctgttacagaaaagacccactcgtgctgtctctttcttccccaaattgcatctagctcataaactatagtattcagttattcttaattccccacagaggagctccataaacaatgacctgttatatcaatgactttgccaattagagtcacagtaggcactacaattggacacatcattttctgttcttctgacatttacaacttcaaatcctacttaaaattgcagttattagattcagtccttatagtcattaatactgaatacctttacgactctcttcagtgatagatcagatgttagacctcaacagtagggctccttgtgtgcgctctaagttttggcaaggccacgttcctcagagtccacagaaggacaccctccatttaatatgaacattgattcaggaaggtgagggtgaatggctttgtggtaattagactgagagctaatgaacaaatgtgttgtagtcgtaacttcccaggatttctaaaagtcttttcaaattgcctgttacataaattggtgttaacgattgtgcaagtctctatttaagagccactatgcttagactaaaagggaattttcaatgctttggggaaatatttttcatctatattaagaataattctttgcatacctatgttctagctctgcctctcagcaaaggaaaatgagctgttctgcatttgtttttcagtgcaaagaaagacatttaatttctcaggcaatgcgtggtaacttaagagcaatgtgtagaacgtgaaatggaaaatgcatacaactacaagatgagtggactgtctcacccacagacaataactcatccctaatgactcactttcctctatataaattgagaaatgtgacaaggatggggaatgtttttcccttatgaggaaaaaaaaaattacctgcaaagaaatgctaatcatattaggcttatgcatccattggtactacatcattctctgtcctctgtgttaggaaatgccttgttatagctactgcgcaataaaaagaaagaaataaaatttttttaataaacatgttttgccttaactttcctggaatggggctgtgttatgaactctgtaactacaaatttaaaatctaatgacaagaatgtaaataaaaattaataatttgttatgttaactttctattaatgcttttattagactgttagattattcctaactaggaattaagttaaaaatgaaaggcttttttttyccaggccacaactttatgtaattttctcattatatatgcactttaactttttatctgtttccttaaaacacttgccctgataatcagggattaaatacaagatagtcttctctgcttctctccattgtcatctgctccaagagtattctttgttgtgtactgtaatgttgattcacttgattatttttcaaattcttagt

SEQ ID NO: 716912 - DNA, 589 bp, Homo sapiens
ttttcttcatctgtaaaacaggattcataataatagtatctacttcctagtgttgtgctgtggtttgaaagaataaatcccacttaattttccatttcttacaggatttaattttttccccttggatcattttgaaatgcttagtacaaacattgacttcctgaaatgtaccacgtcttgtgtgtctgggccccaaatggatgtgggcttagtaattcctgggattctggaagacttsccttcctgaattaggatcgtgggagtgtttcagggtcagatgttcagtcagtattttccctggtctagagagctctagagtgtcaatctggcttctattctgatagatctggtaattcaggtctatcgggggtacatttcctaactcccctgttcccaccccagcacttcaaagtcatgttaaattaaattaaaatttaatgtggtataaatgaattgtgactgaatcatggaggcattctgcttgtttgattccagaatgttaaaatgtccatgtgcttggggccagtgccgtagcaaaggactgacgagctagagtctgggtacgatggaggggagtccgtgaagctca

SEQ ID NO: 716913 - DNA, 622 bp, Homo sapiens
aggaagatggatggccagggttccttcaagtctccaggatgggccagggcattgcaggtggggagaacaggttgggtaggggcccaccctcacgtgtgcaggaagtcggggtggttggggatggctgcagccaggcatgtgacaggtgggtggagtcacaagctggaaaggccagctggggctagctagggtaggggtgggcactggaggaggccttgaatgtcagcctgggagagttggattccacagggccccatcggagcgggggtgggcagggcaggatgaggtgagtggggaggacacacctcagagggtggggctgtggagtctgcgcagccctgagcacacagttatgcaaatatgccagctttgaggctctggggctctttattggtatgaagaagccaggactggggcaacagaggagttggggggcacagagaggcagggctcaaatgttcccaaggccagatctctcctgctgtgaggccatccctccctctggtccaggggacaaagcagctgtggaaagccatctyagctctggcttcagggactcttcatcagaaaagcctgtgttcaaatcctgacagcatgactttcgctcagggctcacctccgc

SEQ ID NO: 716914 - DNA, 1543 bp, Homo sapiens
tttttctttctttctctttatttatttatttattgagatggaatctcactctgtcgccgaagtgggagtgaagtagtgagatatcggctcccggtaaccttcatctcccaggtttaagtgattctcgtgcctctgcctcccaagtagctgggaatacagtcgcccaccaccatgcccaaataatttttgtgttttttttagcgatggggtttcaccatgttggacagcctagtcctgaactcctgacctcaaatgatccacccagttcagtctcccaaagtgctgggattacatgcatgagccacagcacctggcccatatatgccattgtattattgcaaataattatatgaatcttggagaacatcatggaaagatgttcatcatcctgttaactggttattttcaagagtgraactggagggggaatactgcctttcctgtgtatttatttgtaatgtttcattttcattatgaacatgtattattttaatatgtttcaatattaataatcacaggcaaaaatatgtaattttcattcaagctgaaatcgtcaaggcaatcatacataacagatggagcaaataaaacatttaaaatccctgaatgaaaaggaggggaggccgggcacggtggcttccacctataatcccagcactttgggaggccgaggcaggtggatcacttggggtcagaagtttgagaccaccttggctaacatggtgaaaccctgtctctactgtaaatacaaaaattagccgagtgtgatggcatgcacctgtaatcccagctactcagaagtctgaggcaggagaattgcctgaatctgtgaggtggaggttgcagtgagccaagattgcgccactgcactccaggctgggtgacacagcaagactctgtctcaataaacaaacaaacaaatgggggggaaaaacacaatataaaaaccaagtgattctaaaagtagcaatatatcataatgcttaaatatgtgtaattggtggggcgtggtggctccgatgtatcataatgcctaaatttgtgggatttgtcgggcgtgatggttcccacctgtaatcccagcactttgaggggccaagaccggtggatcacctgaagtcaggagtttgagaccagcctgaccaacattgtgaaaccctgtctctactaaaaatagaaaaaaattagccaggtgtagtggcggacacatgaattcccagctgctagggaggctgaggcaggagaatcacttgaacctgggaggcggaggttgcagtgagccgagatcaccccattgcactccagcctgggtgacagtgtgagactccctcaaaaaaaaaaagtttgtgggaccaattccaatcgagttcaggggagcacacactggcaaccaacatgcctcctcaggccccctcaggatcaagagagtgcgtctggaacagactgggaaactccagtaggcaaagtaaggtgccagaaataaagacaccgcctgacacgttcttcatgttccctccacccactcctctcaccaccaggcttc

SEQ ID NO: 716915 - DNA, 1065 bp, Homo sapiens
tctgggtccaggggagagtcatgctgaggtcatgcagttcctgttcttatgaatgatctccacattatgagatggccagaagcaggaaggggcatttgacatcctcccatttattcactcagcaactctgcccttagcattagtcctgtgtgccaggtgccctggtgggcccagcatatggtactgaaaatgtccacgtggtccctgaccctcaggggcccacagtctgaggacaggtagacatcaagccccaagttgatacctaggtgtcgggtggacatcacgtcccagatggacacctcggccagaggtggacttcaggtcccaaatggatattcggccataggtagatatctggccacaggtggatagccagtcccaggtggacatcaggctccaggatgacatcagtccccaagaggatatctaggccccaggtggatacccactgcgtacttgtaaattatcaagaatttttttttaaagcaagtgagagctatcataaaacatgataacttttagtagattttgaatattcctaaactccatgagaaatcataataaatattttaaaaatcagtgtgtatatggaatgagtatttttaaatgtatctttcatgttaaagtatttagaataaaatgttacaaaagttatctgtgttattcgtagaaagtgtagacaatgaaaaaaatcagagactaaaaatacctatatttttggctatgagataatcgctgctatggcacattccttctaaccttattgccatagattttttatacctaatattgattttatgccacacatttyattacatatgcaatggagtattacttattcattactaagtcacaaagagtttgattgtgtgtatatttaaaaaggcaaaggagacaaatttacaaaattcaggtttttccacttagcattttatcaataaacatgagtggttgagtgcatatgcatgagagatttggttctgcatttatttcggatggtctcatgtcctatgtgcttatcactaaatatgatgctattgtaaaccatatgcatttatttttaca

SEQ ID NO: 716916 - DNA, 1065 bp, Homo sapiens
tctgggtccaggggagagtcatgctgaggtcatgcagttcctgttcttatgaatgatctccacattatgagatggccagaagcaggaaggggcatttgacatcctcccatttattcactcagcaactctgcccttagcattagtcctgtgtgccaggtgccctggtgggcccagcatatggtactgaaaatgtccacgtggtccctgaccctcaggggcccacagtctgaggacaggtagacatcaagccccaagttgatacctaggtgtcgggtggacatcacgtcccagatggacacctcggccagaggtggacttcaggtcccaaatggatattcggccataggtagatatctggccacaggtggatagccagtcccaggtggacatcaggctccaggatgacatcagtccccaagaggatatctaggccccaggtggatacccactgcgtacttgtaaattatcaagaatttttttttaaagcaagtgagagctatcataaaacatgataacttttagtagattttgaatattcctaaactccatgagaaatcataataaatattttaaaaatcagtgtgtatatggaatgagtatttttaaatgtatctttcatgttaaagtatttagaataaaatgttacaaaagttatctgtgttattcgtagaaagtgtagacaatgaaaaaaatcagagactaaaaatacctatatttttggctatgagataatcgctgctatggcacattccttctaaccttattgccatagattttttatacctaatattgattttatgccacacattttattacatatgcaatggagtattacttattcattactaagtcacaaagagtttgattgtgtgtatatttaaaaaggcaaaggagayaaatttacaaaattcaggtttttccacttagcattttatcaataaacatgagtggttgagtgcatatgcatgagagatttggttctgcatttatttcggatggtctcatgtcctatgtgcttatcactaaatatgatgctattgtaaaccatatgcatttatttttaca

SEQ ID NO: 716917 - DNA, 1065 bp, Homo sapiens
tctgggtccaggggagagtcatgctgaggtcatgcagttcctgttcttatgaatgatctccacattatgagatggccagaagcaggaaggggcatttgacatcctcccatttattcactcagcaactctgcccttagcattagtcctgtgtgccaggtgccctggtgggcccagcatatggtactgaaaatgtccacgtggtccctgaccctcaggggcccacagtctgaggacaggtagacatcaagccccaagttgatacctaggtgtcgggtggacatcacgtcccagatggacacctcggccagaggtggacttcaggtcccaaatggatattcggccataggtagatatctggccacaggtggatagccagtcccaggtggacatcaggctccaggatgacatcagtccccaagaggatatctaggccccaggtggatacccactgcgtacttgtaaattatcaagaatttttttttaaagcaagtgagagctatcataaaacatgataacttttagtagattttgaatattcctaaactccatgagaaatcataataaatattttaaaaatcagtgtgtatatggaatgagtatttttaaatgtatctttcatgttaaagtatttagaataaaatgttacaaaagttatctgtgttattcgtagaaagtgtagacaatgaaaaaaatcagagactaaaaatacctatatttttggctatgagataatcgctgctatggcacattccttctaaccttattgccatagattttttatacctaatattgattttatgccacacattttattacatatgcaatggagtattacttattcattactaagtcacaaagagtttgattgtgtgtatatttaaaaaggcaaaggagacaaatttacawaattcaggtttttccacttagcattttatcaataaacatgagtggttgagtgcatatgcatgagagatttggttctgcatttatttcggatggtctcatgtcctatgtgcttatcactaaatatgatgctattgtaaaccatatgcatttatttttaca

SEQ ID NO: 716918 - DNA, 1065 bp, Homo sapiens
tctgggtccaggggagagtcatgctgaggtcatgcagttcctgttcttatgaatgatctccacattatgagatggccagaagcaggaaggggcatttgacatcctcccatttattcactcagcaactctgcccttagcattagtcctgtgtgccaggtgccctggtgggcccagcatatggtactgaaaatgtccacgtggtccctgaccctcaggggcccacagtctgaggacaggtagacatcaagccccaagttgatacctaggtgtcgggtggacatcacgtcccagatggacacctcggccagaggtggacttcaggtcccaaatggatattcggccataggtagatatctggccacaggtggatagccagtcccaggtggacatcaggctccaggatgacatcagtccccaagaggatatctaggccccaggtggatacccactgcgtacttgtaaattatcaagaatttttttttaaagcaagtgagagctatcataaaacatgataacttttagtagattttgaatattcctaaactccatgagaaatcataataaatattttaaaaatcagtgtgtatatggaatgagtatttttaaatgtatctttcatgttaaagtatttagaataaaatgttacaaaagttatctgtgttattcgtagaaagtgtagacaatgaaaaaaatcagagactaaaaatacctatatttttggctatgagataatcgctgctatggcacattccttctaaccttattgccatagattttttatacctaatattgattttatgccacacattttattacatatgcaatggagtattacttattcattactaagtcacaaagagtttgattgtgtgtatatttaaaaaggcaaaggagacaaatttacaaaattcaggtttttccacttagcattttatcaataaacatgagtggttgagtgcatatgcatgagagatttggttctgcatttatttcggatggtctcatgtcctatgtgcttatcactaaatatgatgctattgtaaaccatatgcrtttatttttaca

SEQ ID NO: 716919 - DNA, 3405 bp, Homo sapiens
agggtgagacccccaggaccatggctgtgtcttagttctctctagatgcaaaagctcacctgggtcttggcagatgttcaattagttcatgcctagtgattaggtgaacagacctggaggatcatggtgagaaaaggggatagagagggccggcttttcctgaaccctctgaggagataacaggcaggctcacctttcaggatattccttcccaaaatgctgctggaaaatataagatcgaggtggaggtccaactaactcctgacactggactttgttggggatggagtgtcagggaggcccacagctgactcctgaataaaacacagtcacagggactgtggtattgttgtgcccatcacatagttgkggggggggaacaggaccagagatgctgaatgacttgtggaggtcacatagtaaattagggacacaattggggtcagggagcagcctctttggccaatgtcctagttccttcctgcaaaagtccctggccccatcacctgcacccctcccgcacaggccactgcaaccatgaacctgctgggagccagaggagagatgggcagaggcactatccaacagggaccctggtactgggatgatgtcttctcagaagatgctgggacctgggatgccacgttcaccttagggcctggcccctgggatgttggcccttgggtagacctgcagagcactggctcataggtaaagggctgccactcctctaccctcctcaacacacactctgtgcactctgtctgagccagaccctgggccagaagggaggttcaaagggcatggccatttcccaacctccaggggcacctttcagagggggagacactcccaccatcaccaggacagagaatgtggagaggcctggaagtctgccaccacgagcctatgcaggaaacagagggatgccaggacaagagcactggcatccagccacccatcccagagatgctgcctggccgactttcaggggctccagacagggacccgcctagtccccatgccctcctgccaggtgctgttttctagcctggtcacaaggtgacagactgcctctgcaggagcctgagtgaaggtggcacagacctggagggaagcagaccgaggcctacccagacagtctgggtggaccacctgctgctgccaagcacttccaagcctccccttgcataaggctgacagcaaccctaattgtgtattgtgcttacacacagggatgttgggcctggaggaattaagtggctgtcagcagctggcaggtgacccagtggagtcaaattcacgttttcctggtctcaaaacctgaactctgccttataatgagaagggtggatggaagacccattagcaggctcaggggaatggtgcctccttcctctgggaatccgggactcagtcctggcacatagcaggcatcaatgttcatcgtaatgacatcaaatacaaagaaagaaatcaaaggcacccaaggttcagaggtaatctgtccaccccactccctttgggctaaagaacaagccaagaccctgagaaaggaagtgaaagtgaggaaaagaggaggccagtgcagaggccacatcccacccagcatccatccatcccaatctcatgtggcttcaggaatgaaagcccaaattgggagctgaccagaatggcccaagtttgtgctccaactgttccctgcacgttggagtactcccaactgggcactgagctacgtgtggactgcctgtgtaatgaagggaatgcgaggatggacttggaagcaccttctgtgtcatctgtctgcatcttttttgcaggtgaaggtgcaggaccccatccacacctcaccagattatatcctctcccctacctgaccttattgctgctcacactctccatccctaaatgtaatcccaatacaagggagcagtgtcctcctcacgatgggaggcacctgcttggctggaaacccaatccgaggtaaattcaaggagccctgtggacaggactgctagggtctttctctgggatggccacaggataatgaagcactgggagttgtctgttcttgggtgtggtgtggtccttttctttctagatgagtggcttctttgcagagggaggtgacttaaaccccggcgggtctcagccagcctcccaattcatcgcggattcaggaaccacggaaacacaaaggacacagagtcccacagcccaaacaaagccacacagacaggccacaaaaaggtgggggaaaaatctgtagtgagttagccgcatttctttaagccgactccacttacaggcgcgcacacacacacgtacacacatacacaaagccacacacacacgcagacatccaacacttgcaacactccctcagaaacacacagcccggcagcttctgaggctgagtgattctgaaggaagccccacctgggagacagcaaccccgcggaaaacagggggctatacctagaaatcaaagtgggcaagtttcaaaaagactcacccctacaacgactagacaggcctgaggcatccttcagatccttttggatccctagggatttcgcggtttactcctggggctctgcctgacgtttcttcaggctcgctcacatctgccctctcctaggatcctcggactatcctgtggatcccacggagaagacaggcgagagtccaccgcctttgcacctccacggtggtctccttcccagctaagccgcagggatttgtcattaggtaacagtggcattcattgtgatgctagccagagctcacagctcaggcctggcgccctgaaactagcgcatgccattagcgaggcggaccggggcgcccggctgtcagagctgtcagcctgcccaagcagaagaaaatggtacaggcagagacggcctggtatcgggagaaaggctgccttccataacccattgcgggaccctaaaagtcttgaccttagggccccctcgggtcgtctctgttgtcgggtcccgctggaggaggaggcgtttcaagagtgtgagttggttgctggaaactgctcttctgactcccttcctgaaagaggctgtttgcaggaatcgggtcccatggggattggaatatagtctggtgagttgttgaggggtctttgggtgatggaatctaaactgagaccccagaggcgggtgtcagcaaaagatggccgggcccttggcctcactgccttacttcatcccgggcctcgcagaggatctctgggaaaggcagaaaccgcgacaaatgcaagtccaaggtagagcagtgttctcacacttcgaactggcctctcatggctgcagatgaggttgagacattgtctcagaggttgtctgtggtgattgcaagcctgaaaagggtgcccagcagtgc

SEQ ID NO: 716920 - DNA, 902 bp, Homo sapiens
aaaactgatagtaataacccgtagacagtgtagaacgagaactaacaagacccctgatgtagccattattattaggtatctgggcttaattctctgggaagctatgwggaacatgcctcagaattacatcactgaatccagggagattcttcttagttaccctcaccttttcttcccacttcatgcccagtaacaagctcccgtgctgctagagaaagtcctcagctagaaacaggtgcaagttctggagatgagaccttgtagagtgttaagattccttttcttcccagcagctacaagtaaggaataggggctgggctattaatacatctgctacaaatcaatataccccttatgctccttttggtgatcgacaatgtatttaaaaatattagatgatcaagaagggctgcagaaaggaggaaacagaaacaaacagcacacctcttggtttatttttattcatttcatcagtttcaaggaaaatgtgttgggagttcctggcatagagaatgtcacaaagacatgttttccatagtggtgctatccctagggcagagaagacccagagaaagcccaagtggctgctggaacaaagtcagacaccgtgccacctgtccacactcattggctctgccatcatgctgaagatcggttgaaaggactggcttccctccccccaaaattaaaagagcacaaactgagaaactgaatgtgggagacagcagtggattatgctgttctcaggggtcacctcaggtttggaagcattctttcaaattaacccatctcaggccatctgcagagaagaaaggtggcacctaactttttttcttgtcagcatttggtaggggtgttttattaaccaaatatattcccacaacctagttttttgtaactaa

SEQ ID NO: 716921 - DNA, 902 bp, Homo sapiens
aaaactgatagtaataacccgtagacagtgtagaacgagaactaacaagacccctgatgtagccattattattaggtatctgggcttaattctctgggaagctatgaggaacatgcctcagaattacatcactgaatccagggagattcttcttagttaccctcaccttttcttcccacttcatgcccagtaacaagctcccgtgctgctagagaaagtcctcagctagaaacaggtgcaagttctggagatgagaccttgtagagtgttaagattccttttcttcccagcagctacaagtaaggaataggggctgggctattaatacatctgctacaaatcaatataccccttatgctccttttggtgatcracaatgtatttaaaaatattagatgatcaagaagggctgcagaaaggaggaaacagaaacaaacagcacacctcttggtttatttttattcatttcatcagtttcaaggaaaatgtgttgggagttcctggcatagagaatgtcacaaagacatgttttccatagtggtgctatccctagggcagagaagacccagagaaagcccaagtggctgctggaacaaagtcagacaccgtgccacctgtccacactcattggctctgccatcatgctgaagatcggttgaaaggactggcttccctccccccaaaattaaaagagcacaaactgagaaactgaatgtgggagacagcagtggattatgctgttctcaggggtcacctcaggtttggaagcattctttcaaattaacccatctcaggccatctgcagagaagaaaggtggcacctaactttttttcttgtcagcatttggtaggggtgttttattaaccaaatatattcccacaacctagttttttgtaactaa

SEQ ID NO: 716922 - DNA, 616 bp, Homo sapiens
aaataataaatagtggcaaagatgaaatgttaaaatgccagatacaccaaatcatgcaaacacaacatcaaaacacagcttggtggagatggagtgacagatggggagggggagaatgtggaaaggctggaaaacagtcccaaacggacacacgtctccatgtgacactttttttctttttttaggcagggtcttgctctgttgcccaggctggagtgcagtggtgtgatctcggctcactgcaacatccacctcccgggttcaagcgattctcctgcctcagcctcccragtagctgggactacaggcatgtgcccccatgccaggctaatttttgtatttttagtagacatggggtttccccatgttggtcagtctggtctcgaactcctatcctcaagtgatccgcccgcctctgccttccaaagtgctgggattacaggcgcccaccaccacgcccagctaagttttgtatttttagcagagacagggttttaccaggttggccaggctggtctcagactcctgacctcaagcgatccaccagcctgagcctctcaaaatgctgggattacagtgtgagccagggctcccggccagaacacatttcctttta

SEQ ID NO: 716923 - DNA, 501 bp, Homo sapiens
tctcagagtattggacaaatctgatatatttttgcttctcccaccagactgtcaaacctcttagagatgggagttgggttctatacttagtrgtgtcctcagtgactagcactatgcccagggatgaaattaaatgaatacatgattagaattcgcacaaaaagaattcttttccttggactgatcactagaagcatttttttaaactggagatctccaaagctttcttgtatacataaaagcatttgaggccctccacagttaatctcagaaaaggcagtcttcctttttaaaaaatttacttcctgtgaaggataattgacttaaaaatattaattatatatagaattaatttggagtatgttcatcataagtaaccaaaaacttaacagtgacttgaacaagtaaggactttatttgtctcacatgtaaagtgtctagagtaggcaacccatggctgatctggtggctcaattatgttgccatggatttaggctcttt

SEQ ID NO: 716924 - DNA, 501 bp, Homo sapiens
tctcagagtattggacaaatctgatatatttttgcttctcccaccagactgtcaaacctcttagagatgggagttgggttctatacttagtggtgtcctcagtgactagcactatgcccagggatgaaattaaatgaatacatgattagaattcgcacaaaaagaattcttttccttggactgatcactagaagcatttttttaaactggagatctccaaagctttcttgtatacataaaagcatttgaggccctccacagttaatctcagaaaaggcagtcttcctttttaaaaaatttacttcctgtgaaggataattgacttaaaaatattaattatatatagaattaatttggagtatgttcatcataagtaaccaaaaacttaacagtgacttraacaagtaaggactttatttgtctcacatgtaaagtgtctagagtaggcaacccatggctgatctggtggctcaattatgttgccatggatttaggctcttt

SEQ ID NO: 716925 - DNA, 1267 bp, Homo sapiens
attttcaattaaaaaatagataagatgttttagtttcagcaaatgccaatcctaacactgaattcaagtaattacatagaatttatcctaagattttaactagacataaattttttctggagagttaaagtaaaatacagtaatatttttgctttggttaaaatttgtaggatgcttgttttccttcattcatttaacaattattggttcatcaagacatttccaagccctaaaaagtatatagttttacaggcaagggaggtaattccaatttaatgcaataaatattatgacacagaaacacagactcctagaaaagaatgcagaagggtctatttcttttttctttcttttcttttcttttttcgagacagggttttactcccattgcccaggctggcatgcagtagcacaatcttggctcattacaacctccacctcctgggctcaaacgatcctcctgcctcagcctcctgggtaactaggactacaggtgtgcaccaccatgctaggttaatttttgtatttttagtagagatgtggtttcaccatattggccaggctggtcttggactcctgacctcaagtgatctaccatgcttggcctctcaaagtgctgggattataggtgtgagccactgcagctgtccagaagggtctatttctgatcagaggccaaaaagactaggaaaggagaaagttattagtaactaagacctacctaacatagtaacaaagatatgttattttgaagttgtcattactataycaatttattataaaagtgttgatcacagaactgaattgctatgcccaaggtcactcagagcccatgttcctaacccccacattttgctgctttaagggaagcctgagttagtccctgagaggttaggaaggttttgctgaaggaggggatgtggtacgaggtgaacgcgggaaggagctatatgtgaactgggcatggttgagaaacagcgtaggttgagggatctttaagagatcagaatagccaggaatgttgaattgactctcatttaaatctttctccacaacttcccattgtttatcactgtgaaactgctcaaaaggttagtagccttcaaatcagtttgaagaacatgggtagaaggcatcaggcagaaggagctccagagcacaaatcctgaaatctggagaaaggcagtggcaggagacaaggccacagaaataagtaagggctcaatgaggaacatcctccatgccttgttaagggtcaagcttgatc

SEQ ID NO: 716926 - DNA, 2703 bp, Homo sapiens
  misc_feature 386, 387, 388, 389, 390, 391, 392, 393, 394, 395, 396, 397,398, 399, 400, 401, 402, 403, 404, 405, 406, 407, 408, 409,410, 411, 412, 413, 414, 415, 416, 417, 418, 419, 420, 421,422, 423, 424, 425, 426, 427, 428, 429, 430, 431, 432: n = A,T,C or G
  misc_feature 433, 434, 435, 436, 437, 438, 439, 440, 441, 442, 443, 444,445, 446, 447, 448, 449, 450, 451, 452, 453, 454, 455, 456,457, 458, 459, 460, 461, 462, 463, 464, 465, 466, 467, 468,469, 470, 471, 472, 473, 474, 475, 476, 477, 478, 479: n = A,T,C or G
  misc_feature 480, 481, 482, 483, 484, 485: n = A,T,C or G
tcctaatttaggatttggaaacatcaccaggacaccccctgcccttcactctcttaggattcttagctaaaggctgcaggctgcagggattcctttctctggctgggcttgattggttctgggggtcatggaatgaactagaagagtcaaggatggtttggtgaatggatgccccggcccttcgcagagtgtgtctgttgcctggccacacgtgccaggtggcaggatgggggaagccctcagttctggcacgggagcctccctaagattgtgtaaggatcatcctgtggggctctaggcccaactgtaggacaagcaaaaaaagcgtccttatgccctgaatcccctgggctaatcttctgacctttaagcacgcggtgaattcnnnnnnnnnnnnnnnnnnnnnnnnnnnnnnnnnnnnnnnnnnnnnnnnnnnnnnnnnnnnnnnnnnnnnnnnnnnnnnnnnnnnnnnnnnnnnnnnnnnngccacagatcggggccagagtggcagtgtgagtagaaattcagaaacatagccttgtgtctgtgttgacattttttttttgagacagagtctcactctgttgcccaggctgtagtgcggtagtgtggtctcggctcactgcaacctccgcctcccgggctcaggcaattctcctgccgacctcagtctcctgagtagctgggactacagacgcgtgccaccacacccagctaatttttgtatttttagtagagacatcgtttcaccatattggtcaggctggtcttgaactcctgaccttgtgatctgcccacctcggccttccaaagtgctgggattataggcgtgacaccgcacgtggccgacatttttttttttttggacagggtctcactctgtcactcaggctggagtgcagtggtgcgatctcagctcactgtagccttgaattcctgggctcaagagatcctcccacctcagccccccaattagctgggaccactggtgtgcaccaccacgattggccgatttttttgtatttttttgtggagatgatgtttgccgtgttgcccgggctggtctcaaactctttttttttttttttttttgaaatggagtctcactctgtcgcccaggctggatgtgtactggcgtgatctcagctcactgcaagctctgcctcccaggttcacgccattctcctgcctcagcctcctgactagctgggactacaggcgcccgccaccatgcccagctaattttttgtatttttagtagagacagggtttcaccatgttagccaggatggtctcgatctcctgaccttgtgatccacccaccttggcctcccaaagtgctgggattacaggcgtgagccacygcgcccggccgagagtgggttccttttttgaaataatttgtctctgtagcacatggtgattgcaacactcctttccatgtctaatctgcacttctgtttttgtggccttctctcctttttctaggctactttcaagggtagttctctggaacctggcacagcaggtggttcagcacatcagcatgtcaaagtacatatatgagcttggtgataaacacatagtcataactgctgagcaggagcctctaatttcagggttgagtacctgtggcgtcattaagagagaaggcccgcctcagaaaagattttcaaaaaagccttctcattgcaaggacatagaattagttttaagacttcttgacttctgtgataatctctagggcttctttatcaatgtgtggccagatgaggttgctctcaggtcataagcaatgagcttatcagaactctctggcatcttgtagctgtgcatagccctagtggggtgaggtggagcaccactggtcagagatggattatgtttattattacgttctggtgcagacttagaggtctataatggcttgacattcctggacgtgacctcaggatggtgagtccagtaccacgagacattttcctagtaggagttaaattggttttgtgattgttgctttttgaggaagaaacacatgatagaaatggagttgccacatgaaggctgaaacgtattgtttttttttttgttttttttgagacagggtctcgctttgtcacctaggctggagtgcagtggtgcaatcataggtcactggagccttgacctcccaggctcgagtgatcctcccacctcagcctcctgagttggaagctactgttttgttttgagaacaaacacatcatgggttgtacagaccctgcttcgtggtgggagaggcgaagggctggctaattagagtaacagggatgtggtggtctaaggaggtgtcagtgaggtccaattgcacacttattttctcttcactgaggagagctgatgtgtgcagatggtgtgggatttcatgaaggcctctatgagtttctcttctcttgatttcaagatcacagcaatacagtctgggcgtggtggctcattcctgcaatcccagcactttggcaggctgcagtgggaggattgcttgaggccaggagaccctgtttctataattttttttttttaattagctgggcttggtggtgcacactattttcccagcaacttgggaggctaagatgggaggatcacttgagcccaggaggttgcgactgcagtgagctgccattgctccattgcactctaacctgggcgacagaataaggc

SEQ ID NO: 716927 - DNA, 600 bp, Homo sapiens
atttctcattcagcaaactctagaattctcaaaagtgaattgttatctgtcttcctatatacaggctagatttacttctcatcagagtaaacactttatcagcatactctttttaaaaagcttgtgtttacacataaggtatcactctaagtgatatattcctgggctttatacccccttatgctaaatgtatccggkgttagaaaagggaagtctgttttacagggttgagtatacattctaaatagtaactatcccttgctttttattatttctcttcttacctcgaagcttgcaggatgagtgctgttcatgcctgcctggttagggaattctaaatgtgttttaagagttccaggaaccctcatgctgagcatttcatgaaatgcataccacgaaatcacagaaagtgtgtacatttcctactgtcaagactgatgatgtagaatgctaatcaggacaaggggagtctagccctgctccctttccctaacaacagcaaaacaaaaataaattttacctgctagaagcagcttatatcttcatggctgaggttgtgtattatatagggattatactgaaactatgtttcagtaagtt

SEQ ID NO: 716928 - DNA, 600 bp, Homo sapiens
atttctcattcagcaaactctagaattctcaaaagtgaattgttatctgtcttcctatatacaggctagatttacttctcatcagagtaaacactttatcagcatactctttttaaaaagcttgtgtttacacataaggtatcactctaagtgatatattcctgggctttatacccccttatgctaaatgtatccggggttagaaaagggaagtctgttttacagggttgagtayacattctaaatagtaactatcccttgctttttattatttctcttcttacctcgaagcttgcaggatgagtgctgttcatgcctgcctggttagggaattctaaatgtgttttaagagttccaggaaccctcatgctgagcatttcatgaaatgcataccacgaaatcacagaaagtgtgtacatttcctactgtcaagactgatgatgtagaatgctaatcaggacaaggggagtctagccctgctccctttccctaacaacagcaaaacaaaaataaattttacctgctagaagcagcttatatcttcatggctgaggttgtgtattatatagggattatactgaaactatgtttcagtaagtt

SEQ ID NO: 716929 - DNA, 600 bp, Homo sapiens
atttctcattcagcaaactctagaattctcaaaagtgaattgttatctgtcttcctatatacaggctagatttacttctcatcagagtaaacactttatcagcatactctttttaaaaagcttgtgtttacacataaggtatcactctaagtgatatattcctgggctttatacccccttatgctaaatgtatccggggttagaaaagggaagtctgttttacagggttgagtatacattctaaatagtaactatcccttgctttttattatttctcttcttacctcgaagcttgcaggatgagtgctgttcatgcctgcctggttagggamttctaaatgtgttttaagagttccaggaaccctcatgctgagcatttcatgaaatgcataccacgaaatcacagaaagtgtgtacatttcctactgtcaagactgatgatgtagaatgctaatcaggacaaggggagtctagccctgctccctttccctaacaacagcaaaacaaaaataaattttacctgctagaagcagcttatatcttcatggctgaggttgtgtattatatagggattatactgaaactatgtttcagtaagtt

SEQ ID NO: 716930 - DNA, 600 bp, Homo sapiens
atttctcattcagcaaactctagaattctcaaaagtgaattgttatctgtcttcctatatacaggctagatttacttctcatcagagtaaacactttatcagcatactctttttaaaaagcttgtgtttacacataaggtatcactctaagtgatatattcctgggctttatacccccttatgctaaatgtatccggggttagaaaagggaagtctgttttacagggttgagtatacattctaaatagtaactatcccttgctttttattatttctcttcttacctcgaagcttgcaggatgagtgctgttcatgcctgcctggttagggaattctaaatgtgttttaagagttccaggaaccctcatgctgagcatttcatgaaatgcataccacgaaatcacagaaagtgtgtacatttcctactgtcaagactgatgatgtagaatgctaatcaggacaagggragtctagccctgctccctttccctaacaacagcaaaacaaaaataaattttacctgctagaagcagcttatatcttcatggctgaggttgtgtattatatagggattatactgaaactatgtttcagtaagtt

SEQ ID NO: 716931 - DNA, 600 bp, Homo sapiens
atttctcattcagcaaactctagaattctcaaaagtgaattgttatctgtcttcctatatacaggctagatttacttctcatcagagtaaacactttatcagcatactctttttaaaaagcttgtgtttacacataaggtatcactctaagtgatatattcctgggctttatacccccttatgctaaatgtatccggggttagaaaagggaagtctgttttacagggttgagtatacattctaaatagtaactatcccttgctttttattatttctcttcttacctcgaagcttgcaggatgagtgctgttcatgcctgcctggttagggaattctaaatgtgttttaagagttccaggaaccctcatgctgagcatttcatgaaatgcataccacgaaatcacagaaagtgtgtacatttcctactgtcaagactgatgatgtagaatgctaatcaggacaaggggwgtctagccctgctccctttccctaacaacagcaaaacaaaaataaattttacctgctagaagcagcttatatcttcatggctgaggttgtgtattatatagggattatactgaaactatgtttcagtaagtt

SEQ ID NO: 716932 - DNA, 632 bp, Homo sapiens
attttaattcaatgttttatctagcttattataagaacatttcccatcggaaaacatatcttcttaaaatttatttcaattcagttttccatctagtttattatgggaacatgttcccatcagaagacatctctttttttttttaaataggaacatataaatttagatcctccctggaagaccattaagtacagaaataataagatgctaagtataattactttattaagcatcttaatgtatctgcgtgaagactatgtatttgaaactcacaagcggatcccttaacatgccaatcatgtttatgaattcacgtcattcactgaccattgttaaattgagcttgtgctctcttattaaaatatccatatttaaagtataaatcagtgttcaatawgttgctcaagcaaaggcattccataacatgatgcaaagttcattgtgcaactttccagagcacaaaaagattgaagaagtattaacgaaagatcaattcagagttcatctgtgaaatggaacacacaaaaatgtcatctccatgaaaacaaaatgaattttaagaagcataagacatcatttacttttattaatagctaaaataaattaaaattctatttattgtacatattttt

SEQ ID NO: 716933 - DNA, 657 bp, Homo sapiens
tttcttcccctattctaactccattccaaggagggaattcagacaaatgcttctctctaaggcatctgaaaataatatgtagacacaagggaagatttttttaactgatgtagatgtatcctttggatgttctgccagaaagttcttcagcggctgcatacctcccaggcaataactagttttcctgtactccgtcactctgagttaaactcttatagactttttagtgagcaaaaatttcagatttctttggaccccactgaagactgagaaaagcaaaactgtcaatgcggtggtgtatttttaaattttcctcaatcattcacttattaagtttcagttcacaaatatgtatttagtactaagtgtcaagtgtaaataattaacatgacatagaggggaaaagtgagataaataataattatgcaacatgacaagaactgtattagacaaataggcaaactgtgatgtgaggtgacctttttcttaaattacatatgtttctttcagktatcattgagatgaaaagaaatggtggtgattatttgtactatttacctctgtttctgaaggattttgtgactgtgtaatttactactcatcaactttatttctattctattattttagtaacacagtaatatgcttaattgatca

SEQ ID NO: 716934 - DNA, 614 bp, Homo sapiens
tctcaaatgaagacatttatgcagccaaaagacacatgaaaaaatgttcatcatcactggccatcagagaaatgcaaatcaaaactacaatgagataccatctcacaccagttagaatggcgatcattaaaaagtcaggaaacaacaggtgctggagaggatatggagaaataggaacatttttacaaactacaacaactgtaactcaagggaaatatgaatctctttgagatgtgctgaaaatcagaaacagcatgtaatttctagaggtaaggattggaaatggtcttggaagggtctattttcactactgacatatggcaggagtcaaggattttctatttcttaacactaagatcatartgttaagaatatgatctagaatagtgttgattccttcattgagtttgaactaggacagtgggccagtgatacccagtcttgtttcagttaactggtaggtagttgatcatgtagacggtctttaatttttttaagagaagctccgaaagctgcctttatttctagaacaccattattatcatcaggtagtctatatattaaaatctaagttatggatttgagacacaatcagcaagaaaggatattaaaaa

SEQ ID NO: 716935 - DNA, 614 bp, Homo sapiens
ttcactctgttgcctctactggaggtcagtggcacaataatagctcactgcagcctccaacctccgggctcaagtgatcctccaaatcttaggtaatttagaacctatgcacacatgggtcagctgaaaactatatttcttctcaaagtgcataacttcaatttaatcatgtgaaaacatcagacaaatattctcaaattgaagaacwttataaaaatgtaactgtcttctattctttgaaactgtcaatgtcataaaataccaaaaaaaaaattcttttttcttttttcttttttttttttttttttgagacggagtctcgctctgtggcccaggcgggagtgcagtggcgcaatctcggctcactgcaagctccgcctccagggttcacgccattctcctgcctcagcctcccgagtagctgggactacaggcgcccaccatcacgcccggctaatttttttttttgtatttttagtagagacggggtttcaccgtgttagccaggatggtctcgatctcctgacctcgtgatccgcccgcctcggcctcccaaagtgctgggattacaagcgtgagccaccgcgcccggccaaaaaaattcttaaacatta

SEQ ID NO: 716936 - DNA, 1511 bp, Homo sapiens
taagttctcaaggtcacattaggtaggtcaacatttcagaagatggaactctcagtggacagagaaaaagggggatcatttctgttatttgcccagttcattcctttggtttaatctcttcctaaggtgattaagacaatacctgaggctgtcctctctctagggttgtctaccctttgaaagaccagatgagatccaagggatctcagaggaaaggggcagcccagttgattaagaatcagagcagtggctggcgtagttagggagaaataagatggcttagcgggctaatggccaccataggccctcacccgggtgctgctgctttttatggtacctcagtggtctcttgggagacattttcttctggtgggatgaaaataactcatggggttatggaaaaacaaactccacctgttgggttgacttcctttgtcttggtcctgtttgctaagcagagtccatgagaggtcaggaccaagcagatcaggttagagaactccaagttcccttcatgctaagaagctatgattgggcaggaggagacttaacctcttccttagatcccaaggaacccgtaagtatcaagtaaacgaagaacaaagagttgggttttttggttgttgtttgtttgattgattgattgttcgtttgtttttgagagactgagtctctctgttgcccaggctggagcacaagggtgcagtcatagctcactgcagcctcaaactcttgagctcaagtgatcctcccatctcagcctcctgagtagctgggactacttaggtatgagccaccaagcccagctgagcaaagagtattaactaggaaaaaacaagacacaaattgaagcctaaatgctattataatcttcatgacaaaagtttattttttaattaatagtctatcgagtgcctcctagatatttcctcaaattaatagtctattgagtgtctgttagatactttatggacattatatcatttagtatttactagaattccacaagacaggtattgttatgctccatttacaggtgagaaaactaaggctggaggaatttgaatagcctgtctcagttcttacagttcgcaacaggttgagccgggtctgtctgacttccagcctacgactgccacactgcctgtcttgaagagatccacatagcctgactgagcctgtcacctaggtcccagggcgtctcccccaccgccccgtacagctgcacacacttctgacactcactgggggagtttttctcagtctggtgtgcaccgcctggcaaaatgagacaggaytgggagtaactgtgacatgacatggtctggaatgaggagcagatggggcttgagtgctccgcaaccctttgggttccgattcccggagaaggtgacatggccatctgaatgatttccagtgtgcgttggcagagaaggcagggaggcagggtgacagccatggctgatgtggttggcaacagctgaagctgaaaatcacccctgcctacagtt

SEQ ID NO: 716937 - DNA, 1511 bp, Homo sapiens
taagttctcaaggtcacattaggtaggtcaacatttcagaagatggaactctcagtggacagagaaaaagggggatcatttctgttatttgcccagttcattcctttggtttaatctcttcctaaggtgattaagacaatacctgaggctgtcctctctctagggttgtctaccctttgaaagaccagatgagatccaagggatctcagaggaaaggggcagcccagttgattaagaatcagagcagtggctggcgtagttagggagaaataagatggcttagcgggctaatggccaccataggccctcacccgggtgctgctgctttttatggtacctcagtggtctcttgggagacattttcttctggtgggatgaaaataactcatggggttatggaaaaacaaactccacctgttgggttgacttcctttgtcttggtcctgtttgctaagcagagtccatgagaggtcaggaccaagcagatcaggttagagaactccaagttcccttcatgctaagaagctatgattgggcaggaggagacttaacctcttccttagatcccaaggaacccgtaagtatcaagtaaacgaagaacaaagagttgggttttttggttgttgtttgtttgattgattgattgttcgtttgtttttgagagactgagtctctctgttgcccaggctggagcacaagggtgcagtcatagctcactgcagcctcaaactcttgagctcaagtgatcctcccatctcagcctcctgagtagctgggactacttaggtatgagccaccaagcccagctgagcaaagagtattaactaggaaaaaacaagacacaaattgaagcctaaatgctattataatcttcatgacaaaagtttattttttaattaatagtctatcgagtgcctcctagatatttcctcaaattaatagtctattgagtgtctgttagatactttatggacattatatcatttagtatttactagaattccacaagacaggtattgttatgctccatttacaggtgagaaaactaaggctggaggaatttgaatagcctgtctcagttcttacagttcgcaacaggttgagccgggtctgtctgacttccagcctacgactgccacactgcctgtcttgaagagatccacatagcctgactgagcctgtcacctaggtcccagggcgtctcccccaccgccccgtacagctgcacacacttctgacactcactgggggagtttttctcagtctggtgtgcaccgcctggcaaaatgagacaggattgggagtaactgtgacatgacatggtctggaatgaggagcagatggggcttgagtgctccgmaaccctttgggttccgattcccggagaaggtgacatggccatctgaatgatttccagtgtgcgttggcagagaaggcagggaggcagggtgacagccatggctgatgtggttggcaacagctgaagctgaaaatcacccctgcctacagtt

SEQ ID NO: 716938 - DNA, 974 bp, Homo sapiens
ttttttttttttttttgagacggagtctcactgtcacccaggctggagtgcagtggcatgatctcggctcaatgcaacctctgcctcctgggttcaagtgattctcctgcctcagcctcccgagtagctgggactacaggcatgcaccaccaygcccagctaattttttgcatttttagtagagatggggtttcaccgtgttagccaggatggtctcgatctcctgaccttgtgatccgcctgcctcggcttcccaaagtgctgggattacaggcgtgagccaccgcgcccggctaggaatggttcttcatggctgatgtgagtatatatacacaaagtgtataaatgtcccagttccctcatccacaggatgaaatatctgtaatgtttgcattacactgctctcagaatttccccagcagagttaagctccagttacgtacggtggtatctacttgaccactttcccttgtaggctgcttatcctgtctcacttttcctctccactatggcgtttccttcacctcctttgacttcttacctcagatttggcttcttggaaaaaccaaatgaagatgctctgcaccatatgccaaactccttcctgaatacagaggctttgtgtataatgttcccatctgcttagaatgtgtttctctttcttctcacctgatgcactctcactctcccttcaagtcagtataaatgtcacttctcttagaaagccttatttgatccctctctctgcctgatgccagtctcccaatgcttgctctcttattctgtacttctctgtaacaaagcttatgataatcgccatttaattaattgttgtgtaattattttcattccatctttatccccaactaaactgctgcttgaaggcaaggattatgttttttggctcaccacagtgtcactggcacctagcataatgcctgtcttacttgcaaggttaaggacttactggcttt

SEQ ID NO: 716939 - DNA, 974 bp, Homo sapiens
ttttttttttttttttgagacggagtctcactgtcacccaggctggagtgcagtggcatgatctcggctcaatgcaacctctgcctcctgggttcaagtgattctcctgcctcagcctcccgagtagctgggactacaggcatgcaccaccacgcccagctaattttttgcatttttagtagagatggggtttcaccgtgttagccaggatggtctcgatctcctgaccttgtgatccgcctgcctcggcttcccaaagtgctgggattacaggcgtgagccaccgcgcccggctaggaatggttcttcatggctgatgtgagtatatatacacaaagtgtataaatgtcccagttccctcatccacaggatgaaatatctgtaatgtttgcattacactgctctcagaatttccccagcagagttaagctccagttacgtacggtggtatctacttgaccactttcccttgtaggctgcttatcctgtctcacttttcctctccactatggcgtttccttcacctcctttgacttcttacctcagatttggcttcttggaaaaaccaaatgaagatgctctgcaccatatgccaaactccttcctgaatacagaggctttgtgtataatgttcccatctgcttagaatgtgtttctctttcttctcacctgatgcactctcactctcccttcaagtcagtrtaaatgtcacttctcttagaaagccttatttgatccctctctctgcctgatgccagtctcccaatgcttgctctcttattctgtacttctctgtaacaaagcttatgataatcgccatttaattaattgttgtgtaattattttcattccatctttatccccaactaaactgctgcttgaaggcaaggattatgttttttggctcaccacagtgtcactggcacctagcataatgcctgtcttacttgcaaggttaaggacttactggcttt

SEQ ID NO: 716940 - DNA, 1145 bp, Homo sapiens
ccaagaagggaaaacaaaaagaaaaacaaaacaactttatcgcacatttcattagaatttcagggacaggctgggtgtggtggctcacaactgtaatcccagcaatttgggaggcccaggtgggtagatcactttgaggccaggagatcaagaccagcctggccaatatgtcgaaacccatctctactataaatacaaaacattagccagacatggtggcacgcacctgtgatcctagatactccagaggctgaggcacaagaatcacttgaacctgggaggcagaggttgcagtgagttgagattgcatcactgcactccagcctgggtgagagagagagactcgaatttccatggacaggcattcatgttcaggagaaggggggtctgggcactggagttggaggaaagascctcagtaaaggtacagaaacgttaagcacagggcaatcagaaaatgaggggaccggttcatacatctatgacccatccagccacctgggaaggtaggatctgggccttagcctgtcccagagaatgcagtaatgccctgtcccagagaatgcaggctccacgtgggctccttcctactgtaattgcccccattacacccacatccatcccctcacagactggtttatgtgccagactcagccagcgggtggagcttctcccgggaagccacacctccacctccccaacacgcagcaccccagcctcgctctgacaggctcttccttacatcatggcagtttttcatcagggaaccactgtctccacaagccaaatgctgttgtaggccaatcagactctgaaatccatgcacctttgttagcaggtcatcgtggaggatgcacccatcgaaggtggccttccacccccgtcctataaaaagaaggccacttcagcaaatagaataaagagtctgacaatgtctttttttttttttttttttttttaactttcttgttatggaccaatcagtaaccatgatcacgaccacatttgagaatcagggctctttgcagctggggcaatacttctggatcgggagcaacttatcatggaggacctggtattagaggacacgttgacaacatagaataatacaggcaagtacgatcaaggcattaaaagtcctcaca

SEQ ID NO: 716941 - DNA, 1145 bp, Homo sapiens
ccaagaagggaaaacaaaaagaaaaacaaaacaactttatcgcacatttcattagaatttcagggacaggctgggtgtggtggctcacaactgtaatcccagcaatttgggaggcccaggtgggtagatcactttgaggccaggagatcaagaccagcctggccaatatgtcgaaacccatctctactataaatacaaaacattagccagacatggtggcacgcacctgtgatcctagatactccagaggctgaggcacaagaatcacttgaacctgggaggcagaggttgcagtgagttgagattgcatcactgcactccagcctgggtgagagagagagactcgaatttccatggacaggcattcatgttcaggagaaggggggtctgggcactggagttggaggaaagagcctcagtaaaggtacagaaacgttaagcacagggcaatcagaaaatgaggggaccggttcatacatctatgacccatccagccacctgggaaggtaggatctgggccttagcctgtcccagagaatgcagtaatgccctgtcccagagaatgcaggctccacgtgggctccttcctactgtaattgcccccattacacccacatccatcccctcacagactggttyatgtgccagactcagccagcgggtggagcttctcccgggaagccacacctccacctccccaacacgcagcaccccagcctcgctctgacaggctcttccttacatcatggcagtttttcatcagggaaccactgtctccacaagccaaatgctgttgtaggccaatcagactctgaaatccatgcacctttgttagcaggtcatcgtggaggatgcacccatcgaaggtggccttccacccccgtcctataaaaagaaggccacttcagcaaatagaataaagagtctgacaatgtctttttttttttttttttttttttaactttcttgttatggaccaatcagtaaccatgatcacgaccacatttgagaatcagggctctttgcagctggggcaatacttctggatcgggagcaacttatcatggaggacctggtattagaggacacgttgacaacatagaataatacaggcaagtacgatcaaggcattaaaagtcctcaca

SEQ ID NO: 716942 - DNA, 760 bp, Homo sapiens
tggccatatgactgacatctagccattaggatgtgagaaaatgtgatacctgccaatttcaggtttgctcataaaacctcctatatgtgctcctctatgctcttatcctgatccagctgactagcattgagataatcttctaaatcatgtgttaaaaaagtttcagataatatcatcggtgtcctcaaattatcctgccttggacgctgtatgagtgagacacaatagtttgagtcatttttgtgttgaagcccatttgttacagaaggcaactttatcstaattcaggggactacatagtttagggaagtgagaagaggcctaagtagaagtgagaagtgagatttgagttgagacctaaaacatgagttaaggttatctaagcaatgcctgaagaggaaagtttgcagggtacatggccatttggatagaggtgctgaggaaccatttgaagaactcaatggagcccagcaaggttggggagcagtttgcttaatccacacttagagggaaaggctgaagccagatcctacaggatcttttaatcatgtaagtatctgagtctttttcctgaaataactaggggtatctttgaagaaattttagcagaggagtgatctgattgagtagagattgcatagagtcataggtaaatattttgaaagttacatgtaaacttttctcctgagtggctgtggtcctttatacttgtctttgtacacatttccctaaccctaaaaatgagcgtgcttacaaaact

SEQ ID NO: 716943 - DNA, 627 bp, Homo sapiens
tgagtggtttcatatacaactccagttatccaagttttcttggacaatctgggtatctggtcatagtgggcctacatttctgcatggcagtaattgtctagaacagagtagcggctgcttgttttgacagaaactgctctccatgtcatcagagtccctgccacttcctgttgttttgacacttttctcattctagtcatcgatatcatttttttgggtcatgtaatacttatttgctgccagcagtttagagtaagcagcggttctccacyatgtgttctgcacactcatactccactaggcctttgctgataggtcaccagattttgattcatgtgtaaaacatacattagttaaaatcaagtatgcataatagtgttttggctttgtctgtcagaagcaacattgagctgggcaggtgtgcttgtgtattagagctagatacaacttggtgaaaaggttagcccatatttaagttcaaaccaaagaacagtgattaaagcccaagccaaagaaaattgagatatgggagagctttgccttctgagtgtgtaagggagcacaggtggtgcacgccatgtgttcagtgtctcagtgctagggagtcagcagggataaagaaagata

SEQ ID NO: 716944 - DNA, 632 bp, Homo sapiens
cccagagctaacccacaggaggttccgataaattcaaatatttaataacttgtatttttctttctccttaaacacaggccctctggtcctggaggcaggatcatgtggtggattcttggcagtcagcagtctgtggagcttttgcaggtgcaaaggattatattatactgggaaagaccaaagagggggaaaaatgtgaaaatattaactatgcaaaaacaacattctttagacattccaggttgtttagatgaagagcgctccactagttgtttgagaaaagaacgtgtcttagaggggaaaaaaaaaaaaaaactgctaaaaaggtgtctgcctgaaagacaaccaatttgtttttgacaaatttttctttttctttttatctttattaaagccttcactcaggccctggaattaccttaaagatgatttataaagtcctctgtgggaagagacttgctgtgggtgcagggctcaccatgcagctgtctgccttgggcagtgcttagggggtttaagcgatttctgcagaaggcmatgattcacggtttgtgtgacatgtttgacagcactgtagattaactagtgtcaggagagcagaggctcctccataacttactgaagggtaaact

SEQ ID NO: 716945 - DNA, 601 bp, Homo sapiens
tctgagtggtctccttatgccttgattccataaattctagaatatcactttctacatttaacctctctggccctgttgagaaatggaagacattaggaaggtrttataaactcttgtttaactggattggttcaatcgattgatacattgaaaatgtagcaaaaatatgctagtaaaataacagtctttttaacaacaaactatcaagagttattatttcaagagttgaaataatgttcttattctctactactaccctttatatttgatagagcatgataagcacagtcttcctttgttcattgataattattgtcttaatcacaagctcagaaagtcttcaaagaatactttgtgctgctatttaattattaacggcaaaaaaaagtgacttcaactacacccaaacccaaattatagttcacttattggcttacattgtgatttttcacagggcttttgaaaatgaaccttcatttccccatcacaaaaaccttaacagggaggtagggtaactagtttatccctgctttatatgtgagaaaatgggagctagtggtgtttaagaatcatttatgaccaggcgcagtggctcacacct

SEQ ID NO: 716946 - DNA, 601 bp, Homo sapiens
tctgagtggtctccttatgccttgattccataaattctagaatatcactttctacatttaacctctctggccctgttgagaaatggaagacattaggaaggtattataaactcttgtttaactggattggttcaatcgattgatacattgaaaatgtagcaaaaatatgctagtaaaataacagtctttttaacaacaaactatcaagagttattatttcaagagttgaaataatgtwcttattctctactactaccctttatatttgatagagcatgataagcacagtcttcctttgttcattgataattattgtcttaatcacaagctcagaaagtcttcaaagaatactttgtgctgctatttaattattaacggcaaaaaaaagtgacttcaactacacccaaacccaaattatagttcacttattggcttacattgtgatttttcacagggcttttgaaaatgaaccttcatttccccatcacaaaaaccttaacagggaggtagggtaactagtttatccctgctttatatgtgagaaaatgggagctagtggtgtttaagaatcatttatgaccaggcgcagtggctcacacct

SEQ ID NO: 716947 - DNA, 601 bp, Homo sapiens
tctgagtggtctccttatgccttgattccataaattctagaatatcactttctacatttaacctctctggccctgttgagaaatggaagacattaggaaggtattataaactcttgtttaactggattggttcaatcgattgatacattgaaaatgtagcaaaaatatgctagtaaaataacagtctttttaacaacaaactatcaagagttattatttcaagagttgaaataatgttcttattctctactactaccctttatatttgatagagcatgataagcacagtcttcctttgttcattgataattattgtcttaatcacaagctcagaaagtcttcaaagaatactttgtgctgctatttaattattaacggcaaaaaaaagtgacttcaactacacccaaacccaaattatagttcacttattggcttacattgtgatttttcacagggcttttgaaaatgaaccttcatttccccatcacaaaaaccttaacagggaggtagggtaactagtttatccctgctttatatgtgagaaaatgggagctagtggtgtttaagartcatttatgaccaggcgcagtggctcacacct

SEQ ID NO: 716948 - DNA, 1143 bp, Homo sapiens
tttctataaaattttttggctattcattgaatataaagaaaaccgtaggaaaattaatcttttatttcatatgcgtttttgctgtaacctcttcctaacctcactatggagtcccttcatcgccttagtttcatgattaaaataaccgggtaactgagctgaaagcgggagaaaagtagctatgggacgaaagaaatccaacttccagaaaatcagcyttggtcactactgcagcaaggacaaaataacaacgctcaaaattgggcaatgaatttgtaagtattgaacaagaaagaaccaaaaggatttgttcttccagggtgcaagatatgaggcaggtcatgtttaaaatactgggccaggtccaggccacttcataatacaactgcattctataggaatgaggaagatagaattgaacacaaacagaatgacagagggacttagggagctgagcatctcatgagggatgggcaaatggtgtggataaaataagaaccaaactgaactttcacccaagccagagtgaaatcaagctcttttaagaaaaaacaaaatctgagcattgtatcatttcttttctcatcatattatatttcattttttccccttttgacatctagaaaatctcagaaatatgagggggatgaggaaatgacaagacctcttctagtattctttccagactaaaagaaataaatctcagtgagcctagggataccacccaagccaaaatatgaatgtgtgtatagatgggtgtatatgcatggtacatgcacacccacgcatgcacgaatgcatgcacacactcacacacacacacacacacatgtattcatgcaaattctagcagacaccatttaggttaaatgtactgaattaccctccatgctcagtcaccctattcaaactctcatctccccctcttctgggcttcaggcatttctacatacaaactggcagatgaaatactctggtgccttctctcctatctgtggcagcagagcccttggtttctgagaccaccctaaagccacctgtgtcaggtgcctggtgaatgagtgtttctcctacttacaactgtaggacagtcaatcattacacatcagccaaccactgactctcctgcccttggttattcca

SEQ ID NO: 716949 - DNA, 1143 bp, Homo sapiens
tttctataaaattttttggctattcattgaatataaagaaaaccgtaggaaaattaatcttttatttcatatgcgtttttgctgtaacctcttcctaacctcactatggagtcccttcatcgccttagtttcatgattaaaataaccgggtaactgagctgaaagcgggagaaaagtagctatgggacgaaagaaatccaacttccagaaaatcagctttggtcwctactgcagcaaggacaaaataacaacgctcaaaattgggcaatgaatttgtaagtattgaacaagaaagaaccaaaaggatttgttcttccagggtgcaagatatgaggcaggtcatgtttaaaatactgggccaggtccaggccacttcataatacaactgcattctataggaatgaggaagatagaattgaacacaaacagaatgacagagggacttagggagctgagcatctcatgagggatgggcaaatggtgtggataaaataagaaccaaactgaactttcacccaagccagagtgaaatcaagctcttttaagaaaaaacaaaatctgagcattgtatcatttcttttctcatcatattatatttcattttttccccttttgacatctagaaaatctcagaaatatgagggggatgaggaaatgacaagacctcttctagtattctttccagactaaaagaaataaatctcagtgagcctagggataccacccaagccaaaatatgaatgtgtgtatagatgggtgtatatgcatggtacatgcacacccacgcatgcacgaatgcatgcacacactcacacacacacacacacacatgtattcatgcaaattctagcagacaccatttaggttaaatgtactgaattaccctccatgctcagtcaccctattcaaactctcatctccccctcttctgggcttcaggcatttctacatacaaactggcagatgaaatactctggtgccttctctcctatctgtggcagcagagcccttggtttctgagaccaccctaaagccacctgtgtcaggtgcctggtgaatgagtgtttctcctacttacaactgtaggacagtcaatcattacacatcagccaaccactgactctcctgcccttggttattcca

SEQ ID NO: 716950 - DNA, 1143 bp, Homo sapiens
tttctataaaattttttggctattcattgaatataaagaaaaccgtaggaaaattaatcttttatttcatatgcgtttttgctgtaacctcttcctaacctcactatggagtcccttcatcgccttagtttcatgattaaaataaccgggtaactgagctgaaagcgggagaaaagtagctatgggacgaaagaaatccaacttccagaaaatcagctttggtcactactgcagcaaggacaaaataacaacgctcaaaattgggcaatgaatttgtaagtattgaacaagaaagaaccaaaaggatttgttcttccagggtgcaagatatgaggcaggtcatgtttaaaayactgggccaggtccaggccacttcataatacaactgcattctataggaatgaggaagatagaattgaacacaaacagaatgacagagggacttagggagctgagcatctcatgagggatgggcaaatggtgtggataaaataagaaccaaactgaactttcacccaagccagagtgaaatcaagctcttttaagaaaaaacaaaatctgagcattgtatcatttcttttctcatcatattatatttcattttttccccttttgacatctagaaaatctcagaaatatgagggggatgaggaaatgacaagacctcttctagtattctttccagactaaaagaaataaatctcagtgagcctagggataccacccaagccaaaatatgaatgtgtgtatagatgggtgtatatgcatggtacatgcacacccacgcatgcacgaatgcatgcacacactcacacacacacacacacacatgtattcatgcaaattctagcagacaccatttaggttaaatgtactgaattaccctccatgctcagtcaccctattcaaactctcatctccccctcttctgggcttcaggcatttctacatacaaactggcagatgaaatactctggtgccttctctcctatctgtggcagcagagcccttggtttctgagaccaccctaaagccacctgtgtcaggtgcctggtgaatgagtgtttctcctacttacaactgtaggacagtcaatcattacacatcagccaaccactgactctcctgcccttggttattcca

SEQ ID NO: 716951 - DNA, 1143 bp, Homo sapiens
tttctataaaattttttggctattcattgaatataaagaaaaccgtaggaaaattaatcttttatttcatatgcgtttttgctgtaacctcttcctaacctcactatggagtcccttcatcgccttagtttcatgattaaaataaccgggtaactgagctgaaagcgggagaaaagtagctatgggacgaaagaaatccaacttccagaaaatcagctttggtcactactgcagcaaggacaaaataacaacgctcaaaattgggcaatgaatttgtaagtattgaacaagaaagaaccaaaaggatttgttcttccagggtgcaagatatgaggcaggtcatgtttaaaatactgggccaggtccaggccacttcataatacaactgcattctataggaatgaggaagatagaattgaacacaaacagaatgacagagggacttagggagctgagcatctcatgagggatgggcaaatggtgtggataaaataagaaccaaactgaactttcacccaagccagagtgaaatcaagctcttttaagaaaaaacaaaatctgagcattgtatcatttcttttctcatcatattatatttcattttttccccttttgacatctagaaaatctcagaaatatgagggggatgaggaaatgacaagacctcttctagtattctttccagactaaaagaaataaatctcagtgmgcctagggataccacccaagccaaaatatgaatgtgtgtatagatgggtgtatatgcatggtacatgcacacccacgcatgcacgaatgcatgcacacactcacacacacacacacacacatgtattcatgcaaattctagcagacaccatttaggttaaatgtactgaattaccctccatgctcagtcaccctattcaaactctcatctccccctcttctgggcttcaggcatttctacatacaaactggcagatgaaatactctggtgccttctctcctatctgtggcagcagagcccttggtttctgagaccaccctaaagccacctgtgtcaggtgcctggtgaatgagtgtttctcctacttacaactgtaggacagtcaatcattacacatcagccaaccactgactctcctgcccttggttattcca

SEQ ID NO: 716952 - DNA, 1143 bp, Homo sapiens
tttctataaaattttttggctattcattgaatataaagaaaaccgtaggaaaattaatcttttatttcatatgcgtttttgctgtaacctcttcctaacctcactatggagtcccttcatcgccttagtttcatgattaaaataaccgggtaactgagctgaaagcgggagaaaagtagctatgggacgaaagaaatccaacttccagaaaatcagctttggtcactactgcagcaaggacaaaataacaacgctcaaaattgggcaatgaatttgtaagtattgaacaagaaagaaccaaaaggatttgttcttccagggtgcaagatatgaggcaggtcatgtttaaaatactgggccaggtccaggccacttcataatacaactgcattctataggaatgaggaagatagaattgaacacaaacagaatgacagagggacttagggagctgagcatctcatgagggatgggcaaatggtgtggataaaataagaaccaaactgaactttcacccaagccagagtgaaatcaagctcttttaagaaaaaacaaaatctgagcattgtatcatttcttttctcatcatattatatttcattttttccccttttgacatctagaaaatctcagaaatatgagggggatgaggaaatgacaagacctcttctagtattctttccagactaaaagaaataaatctcagtgagcctagggataccacccaagccaaaatatgaatgtgtgtatagatgggtgtatatgcatggtacatgcacacccacgcatgcacgaatgcatgcacacactcacacacacacacacacacatgtattcatgcaaattctagcagacacyatttaggttaaatgtactgaattaccctccatgctcagtcaccctattcaaactctcatctccccctcttctgggcttcaggcatttctacatacaaactggcagatgaaatactctggtgccttctctcctatctgtggcagcagagcccttggtttctgagaccaccctaaagccacctgtgtcaggtgcctggtgaatgagtgtttctcctacttacaactgtaggacagtcaatcattacacatcagccaaccactgactctcctgcccttggttattcca

SEQ ID NO: 716953 - DNA, 1143 bp, Homo sapiens
tttctataaaattttttggctattcattgaatataaagaaaaccgtaggaaaattaatcttttatttcatatgcgtttttgctgtaacctcttcctaacctcactatggagtcccttcatcgccttagtttcatgattaaaataaccgggtaactgagctgaaagcgggagaaaagtagctatgggacgaaagaaatccaacttccagaaaatcagctttggtcactactgcagcaaggacaaaataacaacgctcaaaattgggcaatgaatttgtaagtattgaacaagaaagaaccaaaaggatttgttcttccagggtgcaagatatgaggcaggtcatgtttaaaatactgggccaggtccaggccacttcataatacaactgcattctataggaatgaggaagatagaattgaacacaaacagaatgacagagggacttagggagctgagcatctcatgagggatgggcaaatggtgtggataaaataagaaccaaactgaactttcacccaagccagagtgaaatcaagctcttttaagaaaaaacaaaatctgagcattgtatcatttcttttctcatcatattatatttcattttttccccttttgacatctagaaaatctcagaaatatgagggggatgaggaaatgacaagacctcttctagtattctttccagactaaaagaaataaatctcagtgagcctagggataccacccaagccaaaatatgaatgtgtgtatagatgggtgtatatgcatggtacatgcacacccacgcatgcacgaatgcatgcacacactcacacacacacacacacacatgtattcatgcaaattctagcagacaccatttaggttaaatgtactgaattaccctccatgctcagtcaccctattcaaactctcatytccccctcttctgggcttcaggcatttctacatacaaactggcagatgaaatactctggtgccttctctcctatctgtggcagcagagcccttggtttctgagaccaccctaaagccacctgtgtcaggtgcctggtgaatgagtgtttctcctacttacaactgtaggacagtcaatcattacacatcagccaaccactgactctcctgcccttggttattcca

SEQ ID NO: 716954 - DNA, 539 bp, Homo sapiens
tggagttgtacacgtgctcacttgaggcatttttccctaaccagtcaagygtttctagaggaaggtcatataccagctaaaaactctgctgttttgcctcttcatgcccatgcttgagcccactcacccaactcctgagatcttactaggaagctgctgatcaccagtttcaggtgtttatatctattgggagactgcctttctctggcaccaggtgtgaccaattattagagcggcactgtcacaaccacctatcacctgatggttgcccgacatcctggtggtggcaggggaccctctcctgccctgctcatgtctgactagctacctactgtaacaacagaaccaggactagaaagttggtcttctgacttccagtttagttttttctttccatttttaatgtggcccccatttctttcagcccagccataattcaccttaacctttcccagactgttttattcaattctgattaaagaggacacatctgattctcaggaaggatagaaggaagcagtgtaaaaaatccaaggaac

SEQ ID NO: 716955 - DNA, 539 bp, Homo sapiens
tggagttgtacacgtgctcacttgaggcatttttccctaaccagtcaagcgtttctagaggaaggtcatataccagctaaaaactctgctgttttgcctcttcatgcccatgcttgagcccactcacccaactcctgagatcttactaggaagctgctgatcaccagtttcaggtgtttatatctattgggagactgcctttctctggcaccaggtgtgaccaattattagagcggcactgtcacaaccayctatcacctgatggttgcccgacatcctggtggtggcaggggaccctctcctgccctgctcatgtctgactagctacctactgtaacaacagaaccaggactagaaagttggtcttctgacttccagtttagttttttctttccatttttaatgtggcccccatttctttcagcccagccataattcaccttaacctttcccagactgttttattcaattctgattaaagaggacacatctgattctcaggaaggatagaaggaagcagtgtaaaaaatccaaggaac

SEQ ID NO: 716956 - DNA, 584 bp, Homo sapiens
tgaggatcagtgataaggtggatagtagatttagtctatctcttattggcgatttacttaattcctcattgcttctctttcttcatctggaaaacagccacaataccagtattctcacagattgttgttataattatatgcattgatgtaatgcaaatgcattgtaagaggtggaatgyagttttactaattaattattatgagttagtattactggatatcaatttagggagtcatctgatattcaaaatattaaggcagaaagagcataaatttttatatcagccaggattgaaatccccttgttactatttttcagctgtgggatcttatacagattaacgtcccccagaatgtctgccttgcagagtcacaaggatgaaggctagcatagtgcctggaacactcacgccatgttggtttggattctcttcttgtgtttctcgagcatcagcatggcaggtgattacttgaggtcagcaccatttttacacaggtgtactctccagcattgcattcattgggttttactcggagtcagcttcatatcaattactctttaccccttcttttcctgccctgtt

SEQ ID NO: 716957 - DNA, 1229 bp, Homo sapiens
ctcttatatttctaaatattrtttgccttattttgagaaatgagatataacaaactgtggttctgatgtgctggttatatatttttaatacatgtaaaaatgagtgcataacaacaaatttattggacatcaagcaaaaatataaaacatactttagagaaaaactggcataaacaaataagatcattttttcatagagctcaaccatgcaccaaaagtatcccttgggtggacagacacagagtctgtgcctcctaaaaaatcaatagcaacagaccatgacagaagcataagcaaaaatcgagccccaactctattttaataatctgtactccctgtaaactgctgaggcatgggacaactcgacagactgtgtttacaatgcatgaattactgtcgggcactctcagccaaaagaagctccaactttcacttctgatctgggtcactagaaacagctcttcagtctattgatttggagctcatgactagaaaagactagtgaagagcactgctatcagaggctcaagcctgtctcacctctagctcctccacgtgaaacacacacatttggttacatggaagtcttttgctgactagcaattaataaattggaacaattaagaaaataggaaataatttcacaatcaaaagcaagactaacattgaacctaatttggatgaggcagagtcttggtcagctaaaaggcaagtcagataataattgtgttgaaatttgtattagctctctcttaactctctcctcaaagagcaggtatgtagtttgtcatcttaaaaggcagaaattcacttgttcagtccaatttaaccttcagaaacatgctttaaaacaaactgctcagaagatcaatagtgttacaaatgagaggctgaggtaaaggttaggagtagaatttaccatgataaattctaatggggctttctaataatttactgttttcttccctttttcattagaaccatatttcagagtcctctatcttctctctttccctctctccctcttcctctccctctcatattcagattatattttaaactagtacataagggaattttaaatatacactataatatagaaagaatgtcatgatcgcaaattataacgttttaaaaagtgcaaattttaagctcaaattgtgtcctctctgttcattttaacttagcaaacatttgtcagtgtgtattatatgctacaatacttcctg

SEQ ID NO: 716958 - DNA, 1229 bp, Homo sapiens
ctcttatatttctaaatattgtttgcyttattttgagaaatgagatataacaaactgtggttctgatgtgctggttatatatttttaatacatgtaaaaatgagtgcataacaacaaatttattggacatcaagcaaaaatataaaacatactttagagaaaaactggcataaacaaataagatcattttttcatagagctcaaccatgcaccaaaagtatcccttgggtggacagacacagagtctgtgcctcctaaaaaatcaatagcaacagaccatgacagaagcataagcaaaaatcgagccccaactctattttaataatctgtactccctgtaaactgctgaggcatgggacaactcgacagactgtgtttacaatgcatgaattactgtcgggcactctcagccaaaagaagctccaactttcacttctgatctgggtcactagaaacagctcttcagtctattgatttggagctcatgactagaaaagactagtgaagagcactgctatcagaggctcaagcctgtctcacctctagctcctccacgtgaaacacacacatttggttacatggaagtcttttgctgactagcaattaataaattggaacaattaagaaaataggaaataatttcacaatcaaaagcaagactaacattgaacctaatttggatgaggcagagtcttggtcagctaaaaggcaagtcagataataattgtgttgaaatttgtattagctctctcttaactctctcctcaaagagcaggtatgtagtttgtcatcttaaaaggcagaaattcacttgttcagtccaatttaaccttcagaaacatgctttaaaacaaactgctcagaagatcaatagtgttacaaatgagaggctgaggtaaaggttaggagtagaatttaccatgataaattctaatggggctttctaataatttactgttttcttccctttttcattagaaccatatttcagagtcctctatcttctctctttccctctctccctcttcctctccctctcatattcagattatattttaaactagtacataagggaattttaaatatacactataatatagaaagaatgtcatgatcgcaaattataacgttttaaaaagtgcaaattttaagctcaaattgtgtcctctctgttcattttaacttagcaaacatttgtcagtgtgtattatatgctacaatacttcctg

SEQ ID NO: 716959 - DNA, 1229 bp, Homo sapiens
ctcttatatttctaaatattgtttgccttattttgagaaatgagatataacaaactgtggttctgatgtgctggttatatatttttaatacatgtaaaaatgagtgcataacaacaaatttattggacatcaagcaaaaatataaaacatactttagagaaaaactggcataaacaaataagatcattttttcatagagctcaaccatgcaccaaaagtatcccttgggtggacagacacagagtctgtgcctcctaaaaaatcaatagcaacagaccatgacagaagcataagcaaaaaycgagccccaactctattttaataatctgtactccctgtaaactgctgaggcatgggacaactcgacagactgtgtttacaatgcatgaattactgtcgggcactctcagccaaaagaagctccaactttcacttctgatctgggtcactagaaacagctcttcagtctattgatttggagctcatgactagaaaagactagtgaagagcactgctatcagaggctcaagcctgtctcacctctagctcctccacgtgaaacacacacatttggttacatggaagtcttttgctgactagcaattaataaattggaacaattaagaaaataggaaataatttcacaatcaaaagcaagactaacattgaacctaatttggatgaggcagagtcttggtcagctaaaaggcaagtcagataataattgtgttgaaatttgtattagctctctcttaactctctcctcaaagagcaggtatgtagtttgtcatcttaaaaggcagaaattcacttgttcagtccaatttaaccttcagaaacatgctttaaaacaaactgctcagaagatcaatagtgttacaaatgagaggctgaggtaaaggttaggagtagaatttaccatgataaattctaatggggctttctaataatttactgttttcttccctttttcattagaaccatatttcagagtcctctatcttctctctttccctctctccctcttcctctccctctcatattcagattatattttaaactagtacataagggaattttaaatatacactataatatagaaagaatgtcatgatcgcaaattataacgttttaaaaagtgcaaattttaagctcaaattgtgtcctctctgttcattttaacttagcaaacatttgtcagtgtgtattatatgctacaatacttcctg

SEQ ID NO: 716960 - DNA, 1229 bp, Homo sapiens
ctcttatatttctaaatattgtttgccttattttgagaaatgagatataacaaactgtggttctgatgtgctggttatatatttttaatacatgtaaaaatgagtgcataacaacaaatttattggacatcaagcaaaaatataaaacatactttagagaaaaactggcataaacaaataagatcattttttcatagagctcaaccatgcaccaaaagtatcccttgggtggacagacacagagtctgtgcctcctaaaaaatcaatagcaacagaccatgacagaagcataagcaaaaatcgagccccaactctattttaataatctgtactccctgtaaactgctgaggcatgggacaactcgacagactgtgtttacaatgcatgaattactgtcgggcactctcagccaaaagaagctccaactttcacttctgatctgggtcactagaaacagctcttcagtctattgatttggagctcatgactagaaaagactagtgaagagcactgctatcagaggctcaagcctgtctcacctctagctcctccacgtgaaacacacacatttggttacatggaagtcttttgctgactagcaattaataaattggaacaattaagaaaataggaaataatttcacaatcaaaagcaagactaacattgaacctaatttggatgaggcagagtcttggtcagctaaaaggcaagtcagataataattgtgttgaaatttgtattagctctctcttaactctctcctcaargagcaggtatgtagtttgtcatcttaaaaggcagaaattcacttgttcagtccaatttaaccttcagaaacatgctttaaaacaaactgctcagaagatcaatagtgttacaaatgagaggctgaggtaaaggttaggagtagaatttaccatgataaattctaatggggctttctaataatttactgttttcttccctttttcattagaaccatatttcagagtcctctatcttctctctttccctctctccctcttcctctccctctcatattcagattatattttaaactagtacataagggaattttaaatatacactataatatagaaagaatgtcatgatcgcaaattataacgttttaaaaagtgcaaattttaagctcaaattgtgtcctctctgttcattttaacttagcaaacatttgtcagtgtgtattatatgctacaatacttcctg

SEQ ID NO: 716961 - DNA, 678 bp, Homo sapiens
tttttttttaacacaattcttaatgtctcactgaaattttagcggaaaaggtggcacattttgacatctcaaggatgtgcaaccttatataagttgtataattaaattataaaaagccatttaatttaaattatatcacctgggtcaagattttatttttattaaaggctgaagtctatagactactctgtgccatattttgctttaatttggtgcctggagtggaactcaggtcttagttaaattttaattttgttgtgtttttgtattaaaaatgccaaacctgattcacttttaggaatgagatttttccaataatattgttgrgttacttttactcattctaggcaaataagtgatttgtttcattctctttttttttgcccatgacaaatttgtatttgctaaacttgtacatatttggtagatcctatgccaggtgatctgagtttataatatatcccttttattgatacataatacttatttgtggggtacatgtgatattttctcacatgcataaaatgggtaatgatcaagtcagggtgtttaggttgttcgtcaccttgagtatttatcatttctacgtgttgcaaccatttcaagtcctctctcctagctattttgaaatatatattactgttaactatagtcatccgactcagctatcaaacatta

SEQ ID NO: 716962 - DNA, 602 bp, Homo sapiens
agccggcgctggtgccagctcttggagctgcttaccacaccacagccagtgtgcctgcctgtgcacagtggccagacttcaagcatgcttgctcacacactctcgcctctccactcacccttggtaggcatgagatccaggttggtagygtgagctgagcgcagcctaccaggctgagtgggcccagtgggcctgaacaaaacttgggctaaggtgtcactggtcacagagatttctggctggtgaagtgacactcgaaggatcctgtaacacttccatgtccttactctgagggtgattggcctcaggtcactgacatttaggcaagtcatggcagccaacagtctgtaatattctctttgtaaattttgcagaaatgcatttgacctacaaacacttagatttgtgtagttgccttcttttaattttcacttggtttagctttctttcattgaggtcaattctgtgcttctttcagtccctttcaattgatacgtaacagattattttattaatacttcctggggggccagtagagtgtaactgattgaaagtagtgctgtggatcctaactgtggattctaatattgtgtttcttattt

SEQ ID NO: 716963 - DNA, 2288 bp, Homo sapiens
gccaggatggtctcgatctcgtgacctcgtgatctgcctgccttggtctcccaaagtgctgggattacaagcgtgagccaccgcacctggccccaaactttcaaaacatggcaatcacccactcatgtaaacaaatggtatatcacttttttcaaataaagtggttacttggtagaaaaggcaaaatagcaatgtataacaaaatctctattcttacataaaatccatggacttgggttacaccaatttggagaactcttcgttaaagagggaaatctggagtagtaaaagagatggagaaagtgagtgaatgttcccattgaagccagtcaactggcaccgtagccgtttgtggtgacaagatgggacctaaaccatctgctactcatcttattcagctaaaaacaaaccaaaccaaaacaaaacaaaaccaaaaatttctaaagagctctgatatttcttgagttgtgtttttgataatgacttgttgttcaatctagagaaaatgaaaagaacattgccactcttaaattatttctaaacaacaacaaaaaaaacacaagtaaagttaagaagacagaacatggttgtaagttttaaatatcctagttagagattgctagatttcccctcatcttaaaaattatgagcatcgaccttcatttattttgttttgatcwggagtatgggatgagagatgcatctagataattggggcattatcacatatccaggcactgtaatttcaaatggcttgaaaggggaggccaggaagcacatctaaagaagccaatgttacaacacaaagaactcatactcttggattttaaagtagaatttaaaaaaaattcaaggttcataaccagagatgaaaatgagattatagaatatgcctaaaataattatttccagaaatctaaattttaaataacgaggatttggaaaatttcaaagaaaatgagaaatgactgattttcaaagaaaaaaaaacaactaaggcaagatcatgaagcttcagcaagaggatctgagaaaaaaatgactcaattctatttttgcttctgtcttctgtgacaagagaaacaattttcaggagaaaaattgtaaagtaaatttcctattaaagagttgccactcaagatagatgagataattctaaaaaaacacccagatgctctaaatgagtacgagtctgcagtatttttttaaacctgtctagaatctatttactcctcttttccaaaaataggctttactcatttttacccagagatgggcagatgaatcagaaagagccaatcatagaattccatctttcttaacatgatgtgttataatcccaacctagccaaatgtttttctttcccaggaagctggaaggatggattttcttttgtctattgagtcaagaaactgagctggtgatcatgaagataacacctatatataatgaaagagtaaaaggcaagcagaatcagagtcagtcctaatgttcactgggttcccaattccagccctttggttcttgagagtcgtccttccttcaattcagtgaatctcaatattaataaattctgcatcctttacccgtgtatttttaggcaagtgtgagctaagttcctatcacttgaaaccaaaagaatttttaaaaatacaaaacaaaaacaaacaagaaaaacaatctttactattctgagtcttaaccttgattaaggcaaacaaaccttgtacatgaggctgctgaatgactgtgagttgtccttgaaaatttgggggcaactgaagcgatgaaggaggagctgaaagggcctcaggtgtttctacatgatatatataaagggctcaggtgtttctatatgacatatataaagggctcaggtgtttctatatgatatatataaagggctcaggtgtttctatatgacatatataaagggctcaggtgtttctatatgatgtctataaagggcctcaggtgtttatatatgatatatataaagggctcaggtgttttgacttatttctggtcaccatggaaaaagcaggatgtccctatatgccccgcaggcaggtagcccgcaatagattatcactgggaaaactctccctacatcaagtctactctcatccaagtacccagtcagagaaaatgtgaatatatgtgtgtgtgtatatataagtgcatatatatagtatatatgccatatataatatatatatattataatatattatatacattatattgtatatatactatatatggtatatatagtatacataatata

SEQ ID NO: 716964 - DNA, 2288 bp, Homo sapiens
gccaggatggtctcgatctcgtgacctcgtgatctgcctgccttggtctcccaaagtgctgggattacaagcgtgagccaccgcacctggccccaaactttcaaaacatggcaatcacccactcatgtaaacaaatggtatatcacttttttcaaataaagtggttacttggtagaaaaggcaaaatagcaatgtataacaaaatctctattcttacataaaatccatggacttgggttacaccaatttggagaactcttcgttaaagagggaaatctggagtagtaaaagagatggagaaagtgagtgaatgttcccattgaagccagtcaactggcaccgtagccgtttgtggtgacaagatgggacctaaaccatctgctactcatcttattcagctaaaaacaaaccaaaccaaaacaaaacaaaaccaaaaatttctaaagagctctgatatttcttgagttgtgtttttgataatgacttgttgttcaatctagagaaaatgaaaagaacattgccactcttaaattatttctaaacaacaacaaaaaaaacacaagtaaagttaagaagacagaacatggttgtaagttttaaatatcctagttagagattgctagatttcccctcatcttaaaaattatgagcatcgaccttcatttattttgttttgatcaggagtatgggatgagagatgcatctagataattggggcattatcacatatccaggcactgtaatttcaaatggcttgaaaggggaggccaggaagcacatctaaagaagccaatgttacaacacaaagaactcatactcttggattttaaagtagaatttaaaaaaaattcaaggttcataaccagagatgaaaatgagattatagaatatgcctaaaataattatttccagaaatctaaattttaaataacgaggatttggaaaatttcaaagaaaatgagaaatgactgattttcaaagaaaaaaaaacaactaaggcaagatcatgaagcttcagcaagaggatctgagaaaaaaatgactcaattctatttttgcttctgtcttctgtgacaagagaaacaattttcaggagaaaaattgtaaagtaaatttcctattaaagagttgccactcaagatagatgagataattctaaaaaaacacccagatgctctaaatgagtacgagtctgcagtatttttttaaacctgtctagaatctatttactcctcttttccaaaaataggctttactcatttttacccagagatgggcagatgaatcagaaagagccaatcatagaattccatctttcttaacatgatgtgttataatcccaacctagccaaatgtttttctttcccaggaagctggaaggatggattttcttttgtctattgagtcaagaaactgagctggtgatcatgaagataacacctatatataatgaaagagtaaaaggcaagcagaatcagagtcagtcctaatgttcactgggttcccaattccagccctttggttcttgagagtcgtccttccttcaattcagtgaatctcaatattaataaattctgcatcctttacccgtgtatttttaggcaagtgtgagctaagttcctatcacttgaaaccaaaagaatttttaaaaatacaaaacaaaaacaaacaagaaaaacaatctttactattctgagtcttaaccttgattaaggcaaacaaaccttgtacatgaggctgctgaatgactgtgagttgtccttgaaaatttgggggcaactgaagcgatgaaggaggagctgaaagggcctcaggtgtttctacatgatatatataaagggctcaggtgtttctatatgacatatataaagggctcaggtgtttctatatgatatatataaagggctcaggtgtttctatatgacatatataaagggctcaggtgtttctatatgatgtctataaagggcctcaggtgtttatatatgatatatataaagggctcaggtgttttgacttatttctggtcaccatggaaaaagcargatgtccctatatgccccgcaggcaggtagcccgcaatagattatcactgggaaaactctccctacatcaagtctactctcatccaagtacccagtcagagaaaatgtgaatatatgtgtgtgtgtatatataagtgcatatatatagtatatatgccatatataatatatatatattataatatattatatacattatattgtatatatactatatatggtatatatagtatacataatata

SEQ ID NO: 716965 - DNA, 2288 bp, Homo sapiens
gccaggatggtctcgatctcgtgacctcgtgatctgcctgccttggtctcccaaagtgctgggattacaagcgtgagccaccgcacctggccccaaactttcaaaacatggcaatcacccactcatgtaaacaaatggtatatcacttttttcaaataaagtggttacttggtagaaaaggcaaaatagcaatgtataacaaaatctctattcttacataaaatccatggacttgggttacaccaatttggagaactcttcgttaaagagggaaatctggagtagtaaaagagatggagaaagtgagtgaatgttcccattgaagccagtcaactggcaccgtagccgtttgtggtgacaagatgggacctaaaccatctgctactcatcttattcagctaaaaacaaaccaaaccaaaacaaaacaaaaccaaaaatttctaaagagctctgatatttcttgagttgtgtttttgataatgacttgttgttcaatctagagaaaatgaaaagaacattgccactcttaaattatttctaaacaacaacaaaaaaaacacaagtaaagttaagaagacagaacatggttgtaagttttaaatatcctagttagagattgctagatttcccctcatcttaaaaattatgagcatcgaccttcatttattttgttttgatcaggagtatgggatgagagatgcatctagataattggggcattatcacatatccaggcactgtaatttcaaatggcttgaaaggggaggccaggaagcacatctaaagaagccaatgttacaacacaaagaactcatactcttggattttaaagtagaatttaaaaaaaattcaaggttcataaccagagatgaaaatgagattatagaatatgcctaaaataattatttccagaaatctaaattttaaataacgaggatttggaaaatttcaaagaaaatgagaaatgactgattttcaaagaaaaaaaaacaactaaggcaagatcatgaagcttcagcaagaggatctgagaaaaaaatgactcaattctatttttgcttctgtcttctgtgacaagagaaacaattttcaggagaaaaattgtaaagtaaatttcctattaaagagttgccactcaagatagatgagataattctaaaaaaacacccagatgctctaaatgagtacgagtctgcagtatttttttaaacctgtctagaatctatttactcctcttttccaaaaataggctttactcatttttacccagagatgggcagatgaatcagaaagagccaatcatagaattccatctttcttaacatgatgtgttataatcccaacctagccaaatgtttttctttcccaggaagctggaaggatggattttcttttgtctattgagtcaagaaactgagctggtgatcatgaagataacacctatatataatgaaagagtaaaaggcaagcagaatcagagtcagtcctaatgttcactgggttcccaattccagccctttggttcttgagagtcgtccttccttcaattcagtgaatctcaatattaataaattctgcatcctttacccgtgtatttttaggcaagtgtgagctaagttcctatcacttgaaaccaaaagaatttttaaaaatacaaaacaaaaacaaacaagaaaaacaatctttactattctgagtcttaaccttgattaaggcaaacaaaccttgtacatgaggctgctgaatgactgtgagttgtccttgaaaatttgggggcaactgaagcgatgaaggaggagctgaaagggcctcaggtgtttctacatgatatatataaagggctcaggtgtttctatatgacatatataaagggctcaggtgtttctatatgatatatataaagggctcaggtgtttctatatgacatatataaagggctcaggtgtttctatatgatgtctataaagggcctcaggtgtttatatatgatatatataaagggctcaggtgttttgacttatttctggtcaccatggaaaaagcaggatgtccctatmtgccccgcaggcaggtagcccgcaatagattatcactgggaaaactctccctacatcaagtctactctcatccaagtacccagtcagagaaaatgtgaatatatgtgtgtgtgtatatataagtgcatatatatagtatatatgccatatataatatatatatattataatatattatatacattatattgtatatatactatatatggtatatatagtatacataatata

SEQ ID NO: 716966 - DNA, 2288 bp, Homo sapiens
gccaggatggtctcgatctcgtgacctcgtgatctgcctgccttggtctcccaaagtgctgggattacaagcgtgagccaccgcacctggccccaaactttcaaaacatggcaatcacccactcatgtaaacaaatggtatatcacttttttcaaataaagtggttacttggtagaaaaggcaaaatagcaatgtataacaaaatctctattcttacataaaatccatggacttgggttacaccaatttggagaactcttcgttaaagagggaaatctggagtagtaaaagagatggagaaagtgagtgaatgttcccattgaagccagtcaactggcaccgtagccgtttgtggtgacaagatgggacctaaaccatctgctactcatcttattcagctaaaaacaaaccaaaccaaaacaaaacaaaaccaaaaatttctaaagagctctgatatttcttgagttgtgtttttgataatgacttgttgttcaatctagagaaaatgaaaagaacattgccactcttaaattatttctaaacaacaacaaaaaaaacacaagtaaagttaagaagacagaacatggttgtaagttttaaatatcctagttagagattgctagatttcccctcatcttaaaaattatgagcatcgaccttcatttattttgttttgatcaggagtatgggatgagagatgcatctagataattggggcattatcacatatccaggcactgtaatttcaaatggcttgaaaggggaggccaggaagcacatctaaagaagccaatgttacaacacaaagaactcatactcttggattttaaagtagaatttaaaaaaaattcaaggttcataaccagagatgaaaatgagattatagaatatgcctaaaataattatttccagaaatctaaattttaaataacgaggatttggaaaatttcaaagaaaatgagaaatgactgattttcaaagaaaaaaaaacaactaaggcaagatcatgaagcttcagcaagaggatctgagaaaaaaatgactcaattctatttttgcttctgtcttctgtgacaagagaaacaattttcaggagaaaaattgtaaagtaaatttcctattaaagagttgccactcaagatagatgagataattctaaaaaaacacccagatgctctaaatgagtacgagtctgcagtatttttttaaacctgtctagaatctatttactcctcttttccaaaaataggctttactcatttttacccagagatgggcagatgaatcagaaagagccaatcatagaattccatctttcttaacatgatgtgttataatcccaacctagccaaatgtttttctttcccaggaagctggaaggatggattttcttttgtctattgagtcaagaaactgagctggtgatcatgaagataacacctatatataatgaaagagtaaaaggcaagcagaatcagagtcagtcctaatgttcactgggttcccaattccagccctttggttcttgagagtcgtccttccttcaattcagtgaatctcaatattaataaattctgcatcctttacccgtgtatttttaggcaagtgtgagctaagttcctatcacttgaaaccaaaagaatttttaaaaatacaaaacaaaaacaaacaagaaaaacaatctttactattctgagtcttaaccttgattaaggcaaacaaaccttgtacatgaggctgctgaatgactgtgagttgtccttgaaaatttgggggcaactgaagcgatgaaggaggagctgaaagggcctcaggtgtttctacatgatatatataaagggctcaggtgtttctatatgacatatataaagggctcaggtgtttctatatgatatatataaagggctcaggtgtttctatatgacatatataaagggctcaggtgtttctatatgatgtctataaagggcctcaggtgtttatatatgatatatataaagggctcaggtgttttgacttatttctggtcaccatggaaaaagcaggatgtccctatatgccccgcaggcaggtagcccgcaatagattatcactgggaaaactctccctacatcaagtctactctcatccaagtacccagtcagagaaaatgtgaatatatgtgtgtgtgtatatataagtgcatatatatagtatatatgccatatataatrtatatatattataatatattatatacattatattgtatatatactatatatggtatatatagtatacataatata

SEQ ID NO: 716967 - DNA, 1649 bp, Homo sapiens
gcctgaagcctccctctcaagggtcgcctcactgtccccaagtccctccctgtacctcaccatggatacccctctccctcccctacccagcccaccaaccccatggcctgtccactaggcctcccgagtgtctctcccacccacctcctccctactctacccatcctggtcctgtcctttgctccccctkggctccctgcctcagtgtcccccttctgatacaccctccacaaggcagccaggggaatcttcctgaaaaataacaaacctgaccctgatcttcccttgcttggaaacttccatgactccacagcacccaggggtggagtctgcactcctcagcctggcactcacaggtgtacaccttccctcaccatcatttgtggtcacacccacttctcttttctttctttcttttcttttcttttctttctttttttttttttttgagacagggtctcaatctatcacccaggctggagtgcagtggtgtgatctcagctcactgcaacctccgcctccccggctccagcgatcctcctgcctcagcctcctgagtagctgggactacaggcttgtgccaccacacctggctaattttttttttttttttgtattttttatagagacagcgtttcgctatgttgcccaggctggtctcaaactcctgacctcaagtgatctgccagcctcggcctcccaaagtgttgggattacaggtgtgagccaccgcacccagcctcccactttgttttaataacacttttgccatgggacatcctacatcattttactattatctttctgtctaaattctgcacccctcccactgcccttaccatgccaggcctgggatccggtcagctccgccccaacccaaaattctctcctctttctaagcttcacccattgaccacagttcctattttctaggattactggaatatagtgactgtgaggattaagagtgcctgtacttcaggctcacagcaagatgtgtgactctgatcactgctggaaatggggaaactgaggggaagccaagaaaagagaacttctcggctgggcgcggggactcacgcctgtaatctcagcactttgggaggctaaggcgggaggatcgcttgagaccaggagttcgagaccagcctgggcaatatagcgatactccgtctctatttaaatattttaaaaatttaaattaaaaaaaagaggaaagaaaagggcccttctcagagttaccggctcaggattccccatgtcctaccacgcacgtcattgcccgagccaccccattcaatctcaaagcgacttcaagcgcacaccgggagggtgtgaaggtggcaggcaacgctcgctgcctgatacagcgattgtcaggtgggcttcagggaaaagtcgtgcagtcccctttccgcgatactcccttccaccgggactccacaccctgtcaacccgatggtcccgacaggcccccgacgtcagggtcctcacctgatttctccactttcaccttcacagggaacatggtttgggtccgggatctggctagctgggtcagaggcgccccaaagggcctagggtcacaagtcaaggcgggagaaggcggggacagttcaaagatgagcttcgtgggccacgggtcctcc

SEQ ID NO: 716968 - DNA, 1649 bp, Homo sapiens
gcctgaagcctccctctcaagggtcgcctcactgtccccaagtccctccctgtacctcaccatggatacccctctccctcccctacccagcccaccaaccccatggcctgtccactaggcctcccgagtgtctctcccacccacctcctccctactctacccatcctggtcctgtcctttgctccccctgggctccctgcctcagtgtcccccttctgatacaccctccacaaggcagccaggggaatcttcctgaaaaataacaaacctgaccctgatcttcccttgcttggaaacttccatgactccacagcacccaggggtggagtctgcactcctcagcctggcactcacaggtgtacaccttccctcaccatcatttgtggtcacacccacttctcttttctttctttcttttcttttctttyctttctttttttttttttttgagacagggtctcaatctatcacccaggctggagtgcagtggtgtgatctcagctcactgcaacctccgcctccccggctccagcgatcctcctgcctcagcctcctgagtagctgggactacaggcttgtgccaccacacctggctaattttttttttttttttgtattttttatagagacagcgtttcgctatgttgcccaggctggtctcaaactcctgacctcaagtgatctgccagcctcggcctcccaaagtgttgggattacaggtgtgagccaccgcacccagcctcccactttgttttaataacacttttgccatgggacatcctacatcattttactattatctttctgtctaaattctgcacccctcccactgcccttaccatgccaggcctgggatccggtcagctccgccccaacccaaaattctctcctctttctaagcttcacccattgaccacagttcctattttctaggattactggaatatagtgactgtgaggattaagagtgcctgtacttcaggctcacagcaagatgtgtgactctgatcactgctggaaatggggaaactgaggggaagccaagaaaagagaacttctcggctgggcgcggggactcacgcctgtaatctcagcactttgggaggctaaggcgggaggatcgcttgagaccaggagttcgagaccagcctgggcaatatagcgatactccgtctctatttaaatattttaaaaatttaaattaaaaaaaagaggaaagaaaagggcccttctcagagttaccggctcaggattccccatgtcctaccacgcacgtcattgcccgagccaccccattcaatctcaaagcgacttcaagcgcacaccgggagggtgtgaaggtggcaggcaacgctcgctgcctgatacagcgattgtcaggtgggcttcagggaaaagtcgtgcagtcccctttccgcgatactcccttccaccgggactccacaccctgtcaacccgatggtcccgacaggcccccgacgtcagggtcctcacctgatttctccactttcaccttcacagggaacatggtttgggtccgggatctggctagctgggtcagaggcgccccaaagggcctagggtcacaagtcaaggcgggagaaggcggggacagttcaaagatgagcttcgtgggccacgggtcctcc

SEQ ID NO: 716969 - DNA, 1272 bp, Homo sapiens
atttttgtatttttagtagagacggggtttctccatgctggccatgctggtgtcgaactcctgacctcaagtgatctgcccgcctcggcctcccaaagtgttgggattacaggcgtgagccaccacgcctggcctaatattctatattttgtttaatgttaattttgttcattgtcttctcccagtagcttttgagctccaatgtgggcagggtatattttctcctggtttggttgttgatgtatgtacaaattgattagagtttgagtgaatgaatgaatgaatgaatgaacagaccaagaccctctgagatgagaatttgttgagggcatgactaaggagagaccctcctgtgaagggcgttattacagtgttatctgggcatgctcagtattagcaggctccattgggaatggctttatggggggcataagcatgatctggcatttccccctaaacattttcctagaaaaaaaaaatcaaggctggagattggcccgtaataagcagtagaaggggaaacaagaaaatgtccagtgggcaggggaggccaaatcgcagaaagcctcgggttatgtcctaggcaaggtatatgaggcaaygagaaacatccatgggcggagcgtcctcggcattatgtgagcggggtcgggatcaggactgaaaaggtgagacttgggactgggactttgaaaagctgcttaaggaactgggcactgctctgaggccgtgggagaatccaattaagactatcaggggctggctggcgtggtggctcacgcctgtcatcccagcgctttgaaaggaggctgaggagggagtatctcttgagccccagagatcaagaccatcctgggtaacatagtgagacccccatgtctaaaaaaaattagccaggcgtggtggcgcacgcctgtagtcccagctacatgggaggtatggcttgagcccaggaggttgaggctgcagtaagccacgattgcaggactgcgctccagcctgggcgacagagtgagaccctgtctcttaaagaaataaaaataaaaaagtcagaagaatggacactgggagtggacgaaaggtagggtccattgcttggtgttggaagtgtcggaagcaaagcataaagaacctgggggcttgtctcaggagggcgatgacagccaatgaaaagcagtcatgggcgtggcgctgtcaaacttcgaggggcgggaccgaggacacagagccggggcggagcccaaggtgaaaccaatgagaagcctccgggtg

SEQ ID NO: 716970 - DNA, 960 bp, Homo sapiens
ttagacacaaagctaaaaagtactacgaattatctcatttaattctcacaacaaccctatgagattatcttcatttcatagatgagaaagtctacgataaggaaggttaattcacctccccaaggttaaatctggtaaatgttaaagcatttacacacagtaaggttgctcactactgattttattttgttcaacccttctatctgtaatgtatgtgtctttttttttttttttttgagatggagtctcgctctgtcgcccaggctggagtgcagtggcacagtctctgctcactgcaagctccacctcccgggttcacgccattctcctgcctctcagcctcccgcgtagctgggactacaggcgcctgccacctcgcccggctaattttttgtatttgtagcagagacggggtttcactgtgttaacaaggatggtctccatctcctgacctcgtgattcacccacctcggtctcccaaagtgctgggattacaggcgtgagccaccgcgcccagcctgaaatgtatgtttttgttaactatactatgaaattcaaatgatgcctcatccgcatccataaaatatyccttaaacccgtgtcttccctggtctagacttccatatttgtacctagtaggtgcttactcattttgagtaaattaatgaataagtgaacaagtggaaataaattaacggaaaaactaagggaaaggagaattaggttttaaaatgcctactatgcacatttccccctatgatttaggcaatcttctcaagacaaatctcttgtgtccattgtacccctaggatagtcttagaatatatgagatattttaggtgtctggtagtagaagtttcagcatggttaaagatgagaattgtgagcaatcaatgataccaatgtttctcaacctatgacctagccaaatgacaaggagagacctatgaatgcatacat

SEQ ID NO: 716971 - DNA, 620 bp, Homo sapiens
cagctaatttttgtgcttttttttgtttgttttttagtagaaacaggatttcaccatgttggccaggctggtcttgaactcctgacctcagatgatccacctgcctcggcctcccaaagtgctggaattacaggcgtgagccaccgtgccyggccaagctacttttataattgccactggagagtcaatcagaattgctaatggtgcgtctaccattctgaaattatcataaaaatgtatgtatgaatgttcaagtatctcagtattcatcctcaaaatttctctacggagtcctactccatgattctgatagagttcatttcctccattgcaaagagctcaaagaaagcaatcaaaaaaccttgagaagcacagaaaaataacaagagtccaataaaacaactgttccttcagattaaagacattcaaatgaagcatttacactcaatggggaaacaacaataacactaggctattaatcatagcactttattaaaaataaaaacactaacaaaatgtgagaagagctgcatattatttgctcctgagagtaatctgtcatgtaaaggagccactgaaaaatacatggcagatacaatgagttcaggctgtacacaggt

SEQ ID NO: 716972 - DNA, 1541 bp, Homo sapiens
cagattcttgtcttattcagtgggttataatgcatgttaataccattatcccagatttaatcagaggaagctcccttcagtctgacttctgtgcccttttgatatgtccacattgttctttggacagttttcttactttacgtcgtaagatgtaccaggttcatcttgtgctttctctccttctgcactcttagaattggccatttctccaagaaattatttagaaaaggtagagacaccatatgtaccattgctactgaagtaatatggatgctgcaccttctctgtggacagggctaggaaatatataggggtgtgtgtgtgtgtrtatatatatatatatatatatacacattatatatattatatatatgtatagcaatgaatatgtaaagactagacaaaatgtgtacatgtttcacacatacttttatatttatatagatatcatatatatttttatatctatgattatataaaaccatgatgtttacactgatacctccattctagaccagtaccataggacttattctacccatctccttttcaatgtttataccttgcttctctaactgtgaggaatctgattccagttatccttaatgcatttacttatttgcccagtatccctgtatttagctaatttccatggactttcttctcaaccctggttctgccatatgttgtagccatgtgagctgacttgctcctggctcccaagacaaaattttaaagtaatatttaaataaattttatttcttctcttcctttattgtccaggtcttccaagatttaccagccaaccagaaccttcctcagtttatgctgggaacaatgcaattctgaattgtgaagttaatgcagatttggtcccatttgtgaggtgggaacagaacagacaaccccttcttctggatgatagagttatcaaacttccaagtggaatgctggttatcagcaatgcaactgaaggagatggcgggctttatcgctgcgtagtggaaagtggtgggccaccaaagtatagtgatgaagttgaattgaaggttcttccaggtattaactcattatcaggactgatggttttatgtttatgaatgggtaaacattgttctgttagaatttttaaaaataatgaatgttggccgggcgcagtggctcacacctgtaatcccagcactttgggaggttgaagcgggtggatcacctgagttccagcctggccaacatggcgaaaccccatctctactaaaaatacaaaaattagccagacatggtggcaggcgcttataactccagctactctggaggctgaggaaggagaattacttgaacccgggaggtggagggtgcagtgagctgagattgtgccattgcactccagcctgggcgatagagcaagactccatctcaaaaaaaaaaaaaagaggaatgttaatatgcggtatgacattttactgtcagcataggaagtctcagtttcttacagaagtgaaaagaagaaaatgtgccagaagatccactctttagggaatgca

SEQ ID NO: 716973 - DNA, 1541 bp, Homo sapiens
cagattcttgtcttattcagtgggttataatgcatgttaataccattatcccagatttaatcagaggaagctcccttcagtctgacttctgtgcccttttgatatgtccacattgttctttggacagttttcttactttacgtcgtaagatgtaccaggttcatcttgtgctttctctccttctgcactcttagaattggccatttctccaagaaattatttagaaaaggtagagacaccatatgtaccattgctactgaagtaatatggatgctgcaccttctctgtggacagggctaggaaatatataggggtgtgtgtgtgtgtatrtatatatatatatatatatacacattatatatattatatatatgtatagcaatgaatatgtaaagactagacaaaatgtgtacatgtttcacacatacttttatatttatatagatatcatatatatttttatatctatgattatataaaaccatgatgtttacactgatacctccattctagaccagtaccataggacttattctacccatctccttttcaatgtttataccttgcttctctaactgtgaggaatctgattccagttatccttaatgcatttacttatttgcccagtatccctgtatttagctaatttccatggactttcttctcaaccctggttctgccatatgttgtagccatgtgagctgacttgctcctggctcccaagacaaaattttaaagtaatatttaaataaattttatttcttctcttcctttattgtccaggtcttccaagatttaccagccaaccagaaccttcctcagtttatgctgggaacaatgcaattctgaattgtgaagttaatgcagatttggtcccatttgtgaggtgggaacagaacagacaaccccttcttctggatgatagagttatcaaacttccaagtggaatgctggttatcagcaatgcaactgaaggagatggcgggctttatcgctgcgtagtggaaagtggtgggccaccaaagtatagtgatgaagttgaattgaaggttcttccaggtattaactcattatcaggactgatggttttatgtttatgaatgggtaaacattgttctgttagaatttttaaaaataatgaatgttggccgggcgcagtggctcacacctgtaatcccagcactttgggaggttgaagcgggtggatcacctgagttccagcctggccaacatggcgaaaccccatctctactaaaaatacaaaaattagccagacatggtggcaggcgcttataactccagctactctggaggctgaggaaggagaattacttgaacccgggaggtggagggtgcagtgagctgagattgtgccattgcactccagcctgggcgatagagcaagactccatctcaaaaaaaaaaaaaagaggaatgttaatatgcggtatgacattttactgtcagcataggaagtctcagtttcttacagaagtgaaaagaagaaaatgtgccagaagatccactctttagggaatgca

SEQ ID NO: 716974 - DNA, 1657 bp, Homo sapiens
gggaattttgagctgggaaaatataagccatatttatctttttgaaaaatctttattaaaaatataccagaagtatgtggaagaaatgtagaagaaaaacagattgacaactaagagaatgaagtcactacagcaaagtttcaactgttgtgcagtgtttgagggtctgtaaatagttccactataaaccttcactccccacattttaattattttcacatataagtttgttcctagctgaaagtgtctagagtgaacttttttaggcttctcttttccaaattatggacaaattataactacagacaaaactgattatatgtatgggggcaggggtggcacaaacagggtcagggtagacccaaacaaagttagtttaacaagatggattgtctctaaagacaagatttgatttactgacatgtgtaaagaaagtgtttctaagaatagaagctgaccagcccttaacttgaaacagaaattgtcagagatgttggagataatgatgccacaatctgccccaggaagtacatgctttgctgggccaccatgatccattctttctacctggctgagatattctactgtctaagcggtgtgtggccaatggtaactcccaatccattcatttcttaattcactcactcattcttgtattcttactgaacttatgttttatgctaactcacttccagacaggtggtgcatacttattgaatcatgaataaattctgcgaccccttcttctgatgccctggtcatgatgaagtgatcttctgccaaggcatcttcctcttcacacagaatgccccagcttgaccttgggcagttctgtctcatgtacagttacggttttcattgcatctggtttttcatatcagttcttgcggcctttgccaatgtgacctggcatcttcgaagatgacactgagcatctggatcctctaaacataaaaagaagtcagtgatggtggagataaggtcagtggcatgtggtggggacctatctggatggccagttcttcacaggtcataatctctatgaattgttccaagccttcttaactatgtacagcttaagtttattcacatgtaagaaatgaaaaattcatgtcactagctatttaggggtttacataaggctacttacattttgaaatgtgaacatatgcaattaataagacctactctgttttatccgagtatattttcaaagtcagcaaagaaggacattatttttgtaaatgggcacttcctaggtattaagaagaaagtatctttgctggggcctaygtcaaaaatgctaattcctaggttatattgaaggatttttatagtttgaggtttcacatttaattctttaattcatcttgagttgatatttgtatatggtgtaaggaaggggtccagtttcaatcttttgcatgtggctacccagttatcccagcaccatttattgaatagggagtcctttccccattgcttttgtcaactttgtcaaagatcagatgattacaggtgtgtggcattatttctaggctctctattctgttctgttggtctatgtgtatgcttttgtaccagtaccaggctgttttggttacggtagccctgtagtgtagtttcaagtcacataaattgatgcctccaagttttg

SEQ ID NO: 716975 - DNA, 1657 bp, Homo sapiens
gggaattttgagctgggaaaatataagccatatttatctttttgaaaaatctttattaaaaatataccagaagtatgtggaagaaatgtagaagaaaaacagattgacaactaagagaatgaagtcactacagcaaagtttcaactgttgtgcagtgtttgagggtctgtaaatagttccactataaaccttcactccccacattttaattattttcacatataagtttgttcctagctgaaagtgtctagagtgaacttttttaggcttctcttttccaaattatggacaaattataactacagacaaaactgattatatgtatgggggcaggggtggcacaaacagggtcagggtagacccaaacaaagttagtttaacaagatggattgtctctaaagacaagatttgatttactgacatgtgtaaagaaagtgtttctaagaatagaagctgaccagcccttaacttgaaacagaaattgtcagagatgttggagataatgatgccacaatctgccccaggaagtacatgctttgctgggccaccatgatccattctttctacctggctgagatattctactgtctaagcggtgtgtggccaatggtaactcccaatccattcatttcttaattcactcactcattcttgtattcttactgaacttatgttttatgctaactcacttccagacaggtggtgcatacttattgaatcatgaataaattctgcgaccccttcttctgatgccctggtcatgatgaagtgatcttctgccaaggcatcttcctcttcacacagaatgccccagcttgaccttgggcagttctgtctcatgtacagttacggttttcattgcatctggtttttcatatcagttcttgcggcctttgccaatgtgacctggcatcttcgaagatgacactgagcatctggatcctctaaacataaaaagaagtcagtgatggtggagataaggtcagtggcatgtggtggggacctatctggatggccagttcttcacaggtcataatctctatgaattgttccaagccttcttaactatgtacagcttaagtttattcacatgtaagaaatgaaaaattcatgtcactagctatttaggggtttacataaggctacttacattttgaaatgtgaacatatgcaattaataagacctactctgttttatccgagtatattttcaaagtcagcaaagaaggacattatttttgtaaatgggcacttcctaggtattaagaagaaagtatctttgctggggcctatgtcaaaaatgctaattcctaggttatattgaaggatttttatagtttgaggtttcacatttaattctttaattcatcttgagttgatwtttgtatatggtgtaaggaaggggtccagtttcaatcttttgcatgtggctacccagttatcccagcaccatttattgaatagggagtcctttccccattgcttttgtcaactttgtcaaagatcagatgattacaggtgtgtggcattatttctaggctctctattctgttctgttggtctatgtgtatgcttttgtaccagtaccaggctgttttggttacggtagccctgtagtgtagtttcaagtcacataaattgatgcctccaagttttg

SEQ ID NO: 716976 - DNA, 2326 bp, Homo sapiens
tggaggggcaraagtgaaaaggacaaacagaagattggccaggagtggacactggttgaagctgagtgatgaggacacagggcttattatagtgtactctcaacttcagtcaaatatggcacatttcaatattaaaagttaaatacattagtctaaatactatttataagaaaaacaggccaggcacagtggctcacacctgaatctctgtaatactgggtaagcagaggagggaggatagcttgagcctaggagttaaagaccagcctgggcaacatagccagacccgtttctacaaataaataaaataattatccaggtgtggtggtgtgtacctgtggtcccagctattggaggctgagatggaagcatcacttgagcctgggaggtccaggctgcagtgagctgtgattgcaccactgcactccagcttcggcaatggagcaagaccatgtctcaaagaaaaaaataagaaagaaaattaaaaaagagaaaaacaggaaaaacatcctctccctagatgacaaaccaaaggttcaagagaatgaaagcaaacagaccagcttaataccatcctcttcagtgagaaactaccccaagggagacaccaaatggaataaagggagagaatcaaagaaacagttttagctctgggttaagatgtaagttggagcctatagtgtctgagaacttcttgtatactgcaggcattctgcctctcctgttgactcttgttgagtcagtgaaggaaataaatcctatctaaaaagccttgcctctgcctctccactcacttgcatgcctgtttagaagaaatggtagaacatgggaaggcacagaccgtaggtgagaggtgccagggagcctgctgcttagattctgctcctgcccttggggttgcccagtaaggctctcccatggagggtgggaaaggaaggggtgaatggaacagactctcaatcccacacctgatgaaaaccagtttcttacagactcacttcattgagtctttctaaaacattcaatttcttttcttgttttttgtttgtttgtttgtttttttactattcacagaagtttactgacctccccggcacctccccggccaggcaggccaacctttccgaccaggggaaatgtccttctacctgccctctgctgggttgcagcctattccatgagggggcactggaagcaggagggagttctggctagggcagaccttaaacgcaagggaagctgagcagaggtttgcacactcaaccccacttgatgttcttctcctcctcagtcatggccagcgtgttggtgactagaccggtgccaataatccagttgccatctctcagggtgaagcactggcctttctctaagatcactggctgccgcaagattaggttgaacttcaggttctccccgggcatggcaagctacttctctgggggcaggataatccaacaggccatgtcccaagtcagggagaacatgactggcatgaagtaggacacaaagggcttgtggtggccaccttcctccttgctgaggatgtaaacctgggcgcgtgcaccttctggtggggcttgatggaacccggcttgaccatgaccagaccccgccacaagtcctccctcggaccagggccctgaggttatctccagcctcggccctctccaggctcttgtggaacatctcaatgcctgtcagcacagtgcagatgttcttattatgtcctaggagctcacgcttgtctcctttctttaaaatgtcatgctctagcatacctgtcaccatggtgccacggccagacatggagtacactgcctctacagtcagcaggaaaggcttctccaggtcacgggcaggcactgggatgtaagtgtccacagcatccagtagcttctgcacagacttcagacctaactcagggtcccgaccctcaagggcagacagtagagcctacaatgactggggtctcctcccctttatagccaaactcagtgaacagctcctgaatctccagttccaccagctccaccatctcagagtcctggacagcatcagccttgttcacatacaccaccacatgctccaccccaatctatttggccagtaataagtgctctcgggtctagggcatggggctgtcattggctgctaccaccaggaggcagccgtcaaggggtgtggtgcccgtgatcatatacttaacataatctgcatgacccgggctgtctgtgtgggcatagtggtgggcgacagtgctatactccacatgagccacactgatggtgatacctggagcttgctcctctgggggcattgtcaa

SEQ ID NO: 716977 - DNA, 2326 bp, Homo sapiens
tggaggggcagaagtgaaaaggacaaacagaagattggccaggagtggacactggttgaagctgagtgatgaggacacagggcttattatagtgtactctcaacttcagtcaaatatggcacatttcaatattaaaagttaaatacattagtctaaatactatttataagaaaaacaggccaggcacagtggctcacacctgaatctctgtaatactgggtaagcagaggagggaggatagcttgagcctaggagttaaagaccagcctgggcaacatagccagacccgtttctacaaataaataaaataattatccaggtgtggtggtgtgtacctgtkgtcccagctattggaggctgagatggaagcatcacttgagcctgggaggtccaggctgcagtgagctgtgattgcaccactgcactccagcttcggcaatggagcaagaccatgtctcaaagaaaaaaataagaaagaaaattaaaaaagagaaaaacaggaaaaacatcctctccctagatgacaaaccaaaggttcaagagaatgaaagcaaacagaccagcttaataccatcctcttcagtgagaaactaccccaagggagacaccaaatggaataaagggagagaatcaaagaaacagttttagctctgggttaagatgtaagttggagcctatagtgtctgagaacttcttgtatactgcaggcattctgcctctcctgttgactcttgttgagtcagtgaaggaaataaatcctatctaaaaagccttgcctctgcctctccactcacttgcatgcctgtttagaagaaatggtagaacatgggaaggcacagaccgtaggtgagaggtgccagggagcctgctgcttagattctgctcctgcccttggggttgcccagtaaggctctcccatggagggtgggaaaggaaggggtgaatggaacagactctcaatcccacacctgatgaaaaccagtttcttacagactcacttcattgagtctttctaaaacattcaatttcttttcttgttttttgtttgtttgtttgtttttttactattcacagaagtttactgacctccccggcacctccccggccaggcaggccaacctttccgaccaggggaaatgtccttctacctgccctctgctgggttgcagcctattccatgagggggcactggaagcaggagggagttctggctagggcagaccttaaacgcaagggaagctgagcagaggtttgcacactcaaccccacttgatgttcttctcctcctcagtcatggccagcgtgttggtgactagaccggtgccaataatccagttgccatctctcagggtgaagcactggcctttctctaagatcactggctgccgcaagattaggttgaacttcaggttctccccgggcatggcaagctacttctctgggggcaggataatccaacaggccatgtcccaagtcagggagaacatgactggcatgaagtaggacacaaagggcttgtggtggccaccttcctccttgctgaggatgtaaacctgggcgcgtgcaccttctggtggggcttgatggaacccggcttgaccatgaccagaccccgccacaagtcctccctcggaccagggccctgaggttatctccagcctcggccctctccaggctcttgtggaacatctcaatgcctgtcagcacagtgcagatgttcttattatgtcctaggagctcacgcttgtctcctttctttaaaatgtcatgctctagcatacctgtcaccatggtgccacggccagacatggagtacactgcctctacagtcagcaggaaaggcttctccaggtcacgggcaggcactgggatgtaagtgtccacagcatccagtagcttctgcacagacttcagacctaactcagggtcccgaccctcaagggcagacagtagagcctacaatgactggggtctcctcccctttatagccaaactcagtgaacagctcctgaatctccagttccaccagctccaccatctcagagtcctggacagcatcagccttgttcacatacaccaccacatgctccaccccaatctatttggccagtaataagtgctctcgggtctagggcatggggctgtcattggctgctaccaccaggaggcagccgtcaaggggtgtggtgcccgtgatcatatacttaacataatctgcatgacccgggctgtctgtgtgggcatagtggtgggcgacagtgctatactccacatgagccacactgatggtgatacctggagcttgctcctctgggggcattgtcaa

SEQ ID NO: 716978 - DNA, 2326 bp, Homo sapiens
tggaggggcagaagtgaaaaggacaaacagaagattggccaggagtggacactggttgaagctgagtgatgaggacacagggcttattatagtgtactctcaacttcagtcaaatatggcacatttcaatattaaaagttaaatacattagtctaaatactatttataagaaaaacaggccaggcacagtggctcacacctgaatctctgtaatactgggtaagcagaggagggaggatagcttgagcctaggagttaaagaccagcctgggcaacatagccagacccgtttctacaaataaataaaataattatccaggtgtggtggtgtgtacctgtggtcccagctattggaggctgagatggaagcatcrcttgagcctgggaggtccaggctgcagtgagctgtgattgcaccactgcactccagcttcggcaatggagcaagaccatgtctcaaagaaaaaaataagaaagaaaattaaaaaagagaaaaacaggaaaaacatcctctccctagatgacaaaccaaaggttcaagagaatgaaagcaaacagaccagcttaataccatcctcttcagtgagaaactaccccaagggagacaccaaatggaataaagggagagaatcaaagaaacagttttagctctgggttaagatgtaagttggagcctatagtgtctgagaacttcttgtatactgcaggcattctgcctctcctgttgactcttgttgagtcagtgaaggaaataaatcctatctaaaaagccttgcctctgcctctccactcacttgcatgcctgtttagaagaaatggtagaacatgggaaggcacagaccgtaggtgagaggtgccagggagcctgctgcttagattctgctcctgcccttggggttgcccagtaaggctctcccatggagggtgggaaaggaaggggtgaatggaacagactctcaatcccacacctgatgaaaaccagtttcttacagactcacttcattgagtctttctaaaacattcaatttcttttcttgttttttgtttgtttgtttgtttttttactattcacagaagtttactgacctccccggcacctccccggccaggcaggccaacctttccgaccaggggaaatgtccttctacctgccctctgctgggttgcagcctattccatgagggggcactggaagcaggagggagttctggctagggcagaccttaaacgcaagggaagctgagcagaggtttgcacactcaaccccacttgatgttcttctcctcctcagtcatggccagcgtgttggtgactagaccggtgccaataatccagttgccatctctcagggtgaagcactggcctttctctaagatcactggctgccgcaagattaggttgaacttcaggttctccccgggcatggcaagctacttctctgggggcaggataatccaacaggccatgtcccaagtcagggagaacatgactggcatgaagtaggacacaaagggcttgtggtggccaccttcctccttgctgaggatgtaaacctgggcgcgtgcaccttctggtggggcttgatggaacccggcttgaccatgaccagaccccgccacaagtcctccctcggaccagggccctgaggttatctccagcctcggccctctccaggctcttgtggaacatctcaatgcctgtcagcacagtgcagatgttcttattatgtcctaggagctcacgcttgtctcctttctttaaaatgtcatgctctagcatacctgtcaccatggtgccacggccagacatggagtacactgcctctacagtcagcaggaaaggcttctccaggtcacgggcaggcactgggatgtaagtgtccacagcatccagtagcttctgcacagacttcagacctaactcagggtcccgaccctcaagggcagacagtagagcctacaatgactggggtctcctcccctttatagccaaactcagtgaacagctcctgaatctccagttccaccagctccaccatctcagagtcctggacagcatcagccttgttcacatacaccaccacatgctccaccccaatctatttggccagtaataagtgctctcgggtctagggcatggggctgtcattggctgctaccaccaggaggcagccgtcaaggggtgtggtgcccgtgatcatatacttaacataatctgcatgacccgggctgtctgtgtgggcatagtggtgggcgacagtgctatactccacatgagccacactgatggtgatacctggagcttgctcctctgggggcattgtcaa

SEQ ID NO: 716979 - DNA, 2326 bp, Homo sapiens
tggaggggcagaagtgaaaaggacaaacagaagattggccaggagtggacactggttgaagctgagtgatgaggacacagggcttattatagtgtactctcaacttcagtcaaatatggcacatttcaatattaaaagttaaatacattagtctaaatactatttataagaaaaacaggccaggcacagtggctcacacctgaatctctgtaatactgggtaagcagaggagggaggatagcttgagcctaggagttaaagaccagcctgggcaacatagccagacccgtttctacaaataaataaaataattatccaggtgtggtggtgtgtacctgtggtcccagctattggaggctgagatggaagcatcacttgagcctgggaggtccaggctgcagtgagctgtgattgcaccactgcactccagcttcggcaatggagcaagaccatgtctcaaagaaaaaaataagaaagaaaatwaaaaaagagaaaaacaggaaaaacatcctctccctagatgacaaaccaaaggttcaagagaatgaaagcaaacagaccagcttaataccatcctcttcagtgagaaactaccccaagggagacaccaaatggaataaagggagagaatcaaagaaacagttttagctctgggttaagatgtaagttggagcctatagtgtctgagaacttcttgtatactgcaggcattctgcctctcctgttgactcttgttgagtcagtgaaggaaataaatcctatctaaaaagccttgcctctgcctctccactcacttgcatgcctgtttagaagaaatggtagaacatgggaaggcacagaccgtaggtgagaggtgccagggagcctgctgcttagattctgctcctgcccttggggttgcccagtaaggctctcccatggagggtgggaaaggaaggggtgaatggaacagactctcaatcccacacctgatgaaaaccagtttcttacagactcacttcattgagtctttctaaaacattcaatttcttttcttgttttttgtttgtttgtttgtttttttactattcacagaagtttactgacctccccggcacctccccggccaggcaggccaacctttccgaccaggggaaatgtccttctacctgccctctgctgggttgcagcctattccatgagggggcactggaagcaggagggagttctggctagggcagaccttaaacgcaagggaagctgagcagaggtttgcacactcaaccccacttgatgttcttctcctcctcagtcatggccagcgtgttggtgactagaccggtgccaataatccagttgccatctctcagggtgaagcactggcctttctctaagatcactggctgccgcaagattaggttgaacttcaggttctccccgggcatggcaagctacttctctgggggcaggataatccaacaggccatgtcccaagtcagggagaacatgactggcatgaagtaggacacaaagggcttgtggtggccaccttcctccttgctgaggatgtaaacctgggcgcgtgcaccttctggtggggcttgatggaacccggcttgaccatgaccagaccccgccacaagtcctccctcggaccagggccctgaggttatctccagcctcggccctctccaggctcttgtggaacatctcaatgcctgtcagcacagtgcagatgttcttattatgtcctaggagctcacgcttgtctcctttctttaaaatgtcatgctctagcatacctgtcaccatggtgccacggccagacatggagtacactgcctctacagtcagcaggaaaggcttctccaggtcacgggcaggcactgggatgtaagtgtccacagcatccagtagcttctgcacagacttcagacctaactcagggtcccgaccctcaagggcagacagtagagcctacaatgactggggtctcctcccctttatagccaaactcagtgaacagctcctgaatctccagttccaccagctccaccatctcagagtcctggacagcatcagccttgttcacatacaccaccacatgctccaccccaatctatttggccagtaataagtgctctcgggtctagggcatggggctgtcattggctgctaccaccaggaggcagccgtcaaggggtgtggtgcccgtgatcatatacttaacataatctgcatgacccgggctgtctgtgtgggcatagtggtgggcgacagtgctatactccacatgagccacactgatggtgatacctggagcttgctcctctgggggcattgtcaa

SEQ ID NO: 716980 - DNA, 2326 bp, Homo sapiens
tggaggggcagaagtgaaaaggacaaacagaagattggccaggagtggacactggttgaagctgagtgatgaggacacagggcttattatagtgtactctcaacttcagtcaaatatggcacatttcaatattaaaagttaaatacattagtctaaatactatttataagaaaaacaggccaggcacagtggctcacacctgaatctctgtaatactgggtaagcagaggagggaggatagcttgagcctaggagttaaagaccagcctgggcaacatagccagacccgtttctacaaataaataaaataattatccaggtgtggtggtgtgtacctgtggtcccagctattggaggctgagatggaagcatcacttgagcctgggaggtccaggctgcagtgagctgtgattgcaccactgcactccagcttcggcaatggagcaagaccatgtctcaaagaaaaaaataagaaagaaaattaaaaaagagaaaaacaggaaaaacatcctctccctagatgacaaaccaaaggttcaagagaatgaaagcaaacagaccagcttaataccatcctcttcagtgagaaactaccccaagggagacaccaaatggaataaagggagagaatcaaagaaacagttttagctctgggttaagatgtaagttggagcctatagtgtctgagaacttcttgtatactgcaggcattctgcctctcctgttgactcttgttgagtcagtgaaggaaataaatcctatctaaaaagccttgcctctgcctctccactcacttgcatgcctgtttagaagaaatggtagaacatgggaaggcacagaccgtaggtgagaggtgccagggagcctgctgcttagattctgctcctgcccttggggttgcccagtaaggctctcccatggagggtgggaaaggaaggggtgaatggaacagactctcaatcccacacctgatgaaaaccagtttcttacagactcacttcattgagtctttctaaaacattcaatttcttttcttgttttttgtttgtttgtttgtttktttactattcacagaagtttactgacctccccggcacctccccggccaggcaggccaacctttccgaccaggggaaatgtccttctacctgccctctgctgggttgcagcctattccatgagggggcactggaagcaggagggagttctggctagggcagaccttaaacgcaagggaagctgagcagaggtttgcacactcaaccccacttgatgttcttctcctcctcagtcatggccagcgtgttggtgactagaccggtgccaataatccagttgccatctctcagggtgaagcactggcctttctctaagatcactggctgccgcaagattaggttgaacttcaggttctccccgggcatggcaagctacttctctgggggcaggataatccaacaggccatgtcccaagtcagggagaacatgactggcatgaagtaggacacaaagggcttgtggtggccaccttcctccttgctgaggatgtaaacctgggcgcgtgcaccttctggtggggcttgatggaacccggcttgaccatgaccagaccccgccacaagtcctccctcggaccagggccctgaggttatctccagcctcggccctctccaggctcttgtggaacatctcaatgcctgtcagcacagtgcagatgttcttattatgtcctaggagctcacgcttgtctcctttctttaaaatgtcatgctctagcatacctgtcaccatggtgccacggccagacatggagtacactgcctctacagtcagcaggaaaggcttctccaggtcacgggcaggcactgggatgtaagtgtccacagcatccagtagcttctgcacagacttcagacctaactcagggtcccgaccctcaagggcagacagtagagcctacaatgactggggtctcctcccctttatagccaaactcagtgaacagctcctgaatctccagttccaccagctccaccatctcagagtcctggacagcatcagccttgttcacatacaccaccacatgctccaccccaatctatttggccagtaataagtgctctcgggtctagggcatggggctgtcattggctgctaccaccaggaggcagccgtcaaggggtgtggtgcccgtgatcatatacttaacataatctgcatgacccgggctgtctgtgtgggcatagtggtgggcgacagtgctatactccacatgagccacactgatggtgatacctggagcttgctcctctgggggcattgtcaa

SEQ ID NO: 716981 - DNA, 2326 bp, Homo sapiens
tggaggggcagaagtgaaaaggacaaacagaagattggccaggagtggacactggttgaagctgagtgatgaggacacagggcttattatagtgtactctcaacttcagtcaaatatggcacatttcaatattaaaagttaaatacattagtctaaatactatttataagaaaaacaggccaggcacagtggctcacacctgaatctctgtaatactgggtaagcagaggagggaggatagcttgagcctaggagttaaagaccagcctgggcaacatagccagacccgtttctacaaataaataaaataattatccaggtgtggtggtgtgtacctgtggtcccagctattggaggctgagatggaagcatcacttgagcctgggaggtccaggctgcagtgagctgtgattgcaccactgcactccagcttcggcaatggagcaagaccatgtctcaaagaaaaaaataagaaagaaaattaaaaaagagaaaaacaggaaaaacatcctctccctagatgacaaaccaaaggttcaagagaatgaaagcaaacagaccagcttaataccatcctcttcagtgagaaactaccccaagggagacaccaaatggaataaagggagagaatcaaagaaacagttttagctctgggttaagatgtaagttggagcctatagtgtctgagaacttcttgtatactgcaggcattctgcctctcctgttgactcttgttgagtcagtgaaggaaataaatcctatctaaaaagccttgcctctgcctctccactcacttgcatgcctgtttagaagaaatggtagaacatgggaaggcacagaccgtaggtgagaggtgccagggagcctgctgcttagattctgctcctgcccttggggttgcccagtaaggctctcccatggagggtgggaaaggaaggggtgaatggaacagactctcaatcccacacctgatgaaaaccagtttcttacagactcacttcattgagtctttctaaaacattcaatttcttttcttgttttttgtttgtttgtttgtttttttactattsacagaagtttactgacctccccggcacctccccggccaggcaggccaacctttccgaccaggggaaatgtccttctacctgccctctgctgggttgcagcctattccatgagggggcactggaagcaggagggagttctggctagggcagaccttaaacgcaagggaagctgagcagaggtttgcacactcaaccccacttgatgttcttctcctcctcagtcatggccagcgtgttggtgactagaccggtgccaataatccagttgccatctctcagggtgaagcactggcctttctctaagatcactggctgccgcaagattaggttgaacttcaggttctccccgggcatggcaagctacttctctgggggcaggataatccaacaggccatgtcccaagtcagggagaacatgactggcatgaagtaggacacaaagggcttgtggtggccaccttcctccttgctgaggatgtaaacctgggcgcgtgcaccttctggtggggcttgatggaacccggcttgaccatgaccagaccccgccacaagtcctccctcggaccagggccctgaggttatctccagcctcggccctctccaggctcttgtggaacatctcaatgcctgtcagcacagtgcagatgttcttattatgtcctaggagctcacgcttgtctcctttctttaaaatgtcatgctctagcatacctgtcaccatggtgccacggccagacatggagtacactgcctctacagtcagcaggaaaggcttctccaggtcacgggcaggcactgggatgtaagtgtccacagcatccagtagcttctgcacagacttcagacctaactcagggtcccgaccctcaagggcagacagtagagcctacaatgactggggtctcctcccctttatagccaaactcagtgaacagctcctgaatctccagttccaccagctccaccatctcagagtcctggacagcatcagccttgttcacatacaccaccacatgctccaccccaatctatttggccagtaataagtgctctcgggtctagggcatggggctgtcattggctgctaccaccaggaggcagccgtcaaggggtgtggtgcccgtgatcatatacttaacataatctgcatgacccgggctgtctgtgtgggcatagtggtgggcgacagtgctatactccacatgagccacactgatggtgatacctggagcttgctcctctgggggcattgtcaa

SEQ ID NO: 716982 - DNA, 2326 bp, Homo sapiens
tggaggggcagaagtgaaaaggacaaacagaagattggccaggagtggacactggttgaagctgagtgatgaggacacagggcttattatagtgtactctcaacttcagtcaaatatggcacatttcaatattaaaagttaaatacattagtctaaatactatttataagaaaaacaggccaggcacagtggctcacacctgaatctctgtaatactgggtaagcagaggagggaggatagcttgagcctaggagttaaagaccagcctgggcaacatagccagacccgtttctacaaataaataaaataattatccaggtgtggtggtgtgtacctgtggtcccagctattggaggctgagatggaagcatcacttgagcctgggaggtccaggctgcagtgagctgtgattgcaccactgcactccagcttcggcaatggagcaagaccatgtctcaaagaaaaaaataagaaagaaaattaaaaaagagaaaaacaggaaaaacatcctctccctagatgacaaaccaaaggttcaagagaatgaaagcaaacagaccagcttaataccatcctcttcagtgagaaactaccccaagggagacaccaaatggaataaagggagagaatcaaagaaacagttttagctctgggttaagatgtaagttggagcctatagtgtctgagaacttcttgtatactgcaggcattctgcctctcctgttgactcttgttgagtcagtgaaggaaataaatcctatctaaaaagccttgcctctgcctctccactcacttgcatgcctgtttagaagaaatggtagaacatgggaaggcacagaccgtaggtgagaggtgccagggagcctgctgcttagattctgctcctgcccttggggttgcccagtaaggctctcccatggagggtgggaaaggaaggggtgaatggaacagactctcaatcccacacctgatgaaaaccagtttcttacagactcacttcattgagtctttctaaaacattcaatttcttttcttgttttttgtttgtttgtttgtttttttactattcacagaagtttactgacctccccggcacctccccggccaggcaggccaacctttccgaccaggggaaatgtccttctacctgccctctgctgggttgcagcctattccatragggggcactggaagcaggagggagttctggctagggcagaccttaaacgcaagggaagctgagcagaggtttgcacactcaaccccacttgatgttcttctcctcctcagtcatggccagcgtgttggtgactagaccggtgccaataatccagttgccatctctcagggtgaagcactggcctttctctaagatcactggctgccgcaagattaggttgaacttcaggttctccccgggcatggcaagctacttctctgggggcaggataatccaacaggccatgtcccaagtcagggagaacatgactggcatgaagtaggacacaaagggcttgtggtggccaccttcctccttgctgaggatgtaaacctgggcgcgtgcaccttctggtggggcttgatggaacccggcttgaccatgaccagaccccgccacaagtcctccctcggaccagggccctgaggttatctccagcctcggccctctccaggctcttgtggaacatctcaatgcctgtcagcacagtgcagatgttcttattatgtcctaggagctcacgcttgtctcctttctttaaaatgtcatgctctagcatacctgtcaccatggtgccacggccagacatggagtacactgcctctacagtcagcaggaaaggcttctccaggtcacgggcaggcactgggatgtaagtgtccacagcatccagtagcttctgcacagacttcagacctaactcagggtcccgaccctcaagggcagacagtagagcctacaatgactggggtctcctcccctttatagccaaactcagtgaacagctcctgaatctccagttccaccagctccaccatctcagagtcctggacagcatcagccttgttcacatacaccaccacatgctccaccccaatctatttggccagtaataagtgctctcgggtctagggcatggggctgtcattggctgctaccaccaggaggcagccgtcaaggggtgtggtgcccgtgatcatatacttaacataatctgcatgacccgggctgtctgtgtgggcatagtggtgggcgacagtgctatactccacatgagccacactgatggtgatacctggagcttgctcctctgggggcattgtcaa

SEQ ID NO: 716983 - DNA, 2326 bp, Homo sapiens
tggaggggcagaagtgaaaaggacaaacagaagattggccaggagtggacactggttgaagctgagtgatgaggacacagggcttattatagtgtactctcaacttcagtcaaatatggcacatttcaatattaaaagttaaatacattagtctaaatactatttataagaaaaacaggccaggcacagtggctcacacctgaatctctgtaatactgggtaagcagaggagggaggatagcttgagcctaggagttaaagaccagcctgggcaacatagccagacccgtttctacaaataaataaaataattatccaggtgtggtggtgtgtacctgtggtcccagctattggaggctgagatggaagcatcacttgagcctgggaggtccaggctgcagtgagctgtgattgcaccactgcactccagcttcggcaatggagcaagaccatgtctcaaagaaaaaaataagaaagaaaattaaaaaagagaaaaacaggaaaaacatcctctccctagatgacaaaccaaaggttcaagagaatgaaagcaaacagaccagcttaataccatcctcttcagtgagaaactaccccaagggagacaccaaatggaataaagggagagaatcaaagaaacagttttagctctgggttaagatgtaagttggagcctatagtgtctgagaacttcttgtatactgcaggcattctgcctctcctgttgactcttgttgagtcagtgaaggaaataaatcctatctaaaaagccttgcctctgcctctccactcacttgcatgcctgtttagaagaaatggtagaacatgggaaggcacagaccgtaggtgagaggtgccagggagcctgctgcttagattctgctcctgcccttggggttgcccagtaaggctctcccatggagggtgggaaaggaaggggtgaatggaacagactctcaatcccacacctgatgaaaaccagtttcttacagactcacttcattgagtctttctaaaacattcaatttcttttcttgttttttgtttgtttgtttgtttttttactattcacagaagtttactgacctccccggcacctccccggccaggcaggccaacctttccgaccaggggaaatgtccttctacctgccctctgctgggttgcagcctattccatgagggggcactggaagcaggagggagttctggctagggcagaccttaaacgcaagggaagctgagcagaggtttgcacactcaaccccacttgatgttcttctcctcctcagtcatggccagcgtgttggtgactagaccggtgccaataatccagttgccatctctcagggtgaarcactggcctttctctaagatcactggctgccgcaagattaggttgaacttcaggttctccccgggcatggcaagctacttctctgggggcaggataatccaacaggccatgtcccaagtcagggagaacatgactggcatgaagtaggacacaaagggcttgtggtggccaccttcctccttgctgaggatgtaaacctgggcgcgtgcaccttctggtggggcttgatggaacccggcttgaccatgaccagaccccgccacaagtcctccctcggaccagggccctgaggttatctccagcctcggccctctccaggctcttgtggaacatctcaatgcctgtcagcacagtgcagatgttcttattatgtcctaggagctcacgcttgtctcctttctttaaaatgtcatgctctagcatacctgtcaccatggtgccacggccagacatggagtacactgcctctacagtcagcaggaaaggcttctccaggtcacgggcaggcactgggatgtaagtgtccacagcatccagtagcttctgcacagacttcagacctaactcagggtcccgaccctcaagggcagacagtagagcctacaatgactggggtctcctcccctttatagccaaactcagtgaacagctcctgaatctccagttccaccagctccaccatctcagagtcctggacagcatcagccttgttcacatacaccaccacatgctccaccccaatctatttggccagtaataagtgctctcgggtctagggcatggggctgtcattggctgctaccaccaggaggcagccgtcaaggggtgtggtgcccgtgatcatatacttaacataatctgcatgacccgggctgtctgtgtgggcatagtggtgggcgacagtgctatactccacatgagccacactgatggtgatacctggagcttgctcctctgggggcattgtcaa

SEQ ID NO: 716984 - DNA, 583 bp, Homo sapiens
tatatgcaatctttaataattaaactactgtgatgttgataaatttaatacaaactcttcaaacatgtaaaaaggtaggcaagcatacccaagaggattttttttctcaaggcacttaatcaattctttcaatctaatcaatcacacttacaaatttactgaatcgaattatttaaaactgaaatggtgtttaaaagcttagtcaaaatttttatatttwaaatcacatatctaacaacaactactttctacagttgcattttcactaaaaaaaggaatttcacaagttgaaatgaagttttagttaaaaaaaagggggggatcttcagcttggtagagatttaatttcttggttagggaattgaagaaaaacccaaaatttgaggtttataattgattctaatggagacacaggttaagaggttgagctttttcatcaagtagggcttttttggcttttatcttttcaaatcaatctttcatatacattttaaaactatatttttggctgggctcagtagctcacacctgtaatcccagcactttgggaggccatggtggatggatcacttgaggtcagggg

SEQ ID NO: 716985 - DNA, 583 bp, Homo sapiens
tatatgcaatctttaataattaaactactgtgatgttgataaatttaatacaaactcttcaaacatgtaaaaaggtaggcaagcatacccaagaggattttttttctcaaggcacttaatcaattctttcaatctaatcaatcacacttacaaatttactgaatcgaattatttaaaactgaaatggtgtttaaaagcttagtcaaaatttttatattttaaatcrcatatctaacaacaactactttctacagttgcattttcactaaaaaaaggaatttcacaagttgaaatgaagttttagttaaaaaaaagggggggatcttcagcttggtagagatttaatttcttggttagggaattgaagaaaaacccaaaatttgaggtttataattgattctaatggagacacaggttaagaggttgagctttttcatcaagtagggcttttttggcttttatcttttcaaatcaatctttcatatacattttaaaactatatttttggctgggctcagtagctcacacctgtaatcccagcactttgggaggccatggtggatggatcacttgaggtcagggg

SEQ ID NO: 716986 - DNA, 763 bp, Homo sapiens
ggtctgcttgtacttttaattttaactgcagcaatttgatggtctgaaaataataaaatcttgcagtattctgaaggtatgaacctttcccatttacaccagtctgagaattaaatatggcaattccctgaaagtctttatattttatctcttagtccagttaataccgtcagcaaatgctaataagtactaataagcatttttgaccttagtaatatgatttttattgcttattatcttgttcatttttgcttttggcagcaagaaatggccttttatttcatgaaaaattatcaatggtaactgtgaataaactgttgccgtctttttgttttatgttttacacatatatacatagtcttttattttcttgctggtttttatgtatattctgtgcttcttttatttcagttgtaaagaaagtacattttacatttcaaaaaattttgttaatgttcccaatttaatgaaaaataatatataactcctttatatgcttaaatctatataaattcctagtagctgtaggatgaaaaatgttattckttggttaattgcatgcctccacttacattcattttttttttctcatagaactctatattgccaattgtaaaaatcttgggaacttgcttaagctcacagttagtaagtagtgtgcggccaagattctgaacatagatcttttgacattaaaccctgtatcaattacctgttattgtataacagtatcattaaaattagataattaaaaaaacacaca

SEQ ID NO: 716987 - DNA, 620 bp, Homo sapiens
tgtgatatgcatacacaaaatttcttcattttattttgtttccataggtttttggggaacaggtggcgtttgattgtaagagtaakttccttagaggtaggtgattaatgagattttgatgcacccaacacctatgcagtatacactgtccaacttgtagtcttttattcctcatgccccacaccctttctcccaagtccccaaagtccattgtagtattctaatgcctttgcatcctcatagcttagttcccacttacaagcgagggcatacgatgtttggttttccattctgacattattacttcacttagaataatagtctctgattccacccaggttgctgtgaatcccattttttttccttttgtggctgaatagtattcatatatatatatatatatatatatatatatatcacaatttcgtaatctacttattgatgggcatttgggctggttacatatttttgcaattgtgaattgtgctgctataaacatgcatgtgcaagcacctttttcatataatgacttcttttcctctgggtagatacccagtaatggaattgctggattaaatggtagttctacttttgttctttaagaaatctgcacactgttt

SEQ ID NO: 716988 - DNA, 1305 bp, Homo sapiens
tttactcaatatatagattatttgtggagaaagttgatatctttatcatctttcctccaaaaaatactgtatgtgtttcttcatatattgttttgtatctttcatgtatgtttcataatgctctttatagaaatgtcttcctagacactttttagtttttattgctattgtaaatcttgaatatttttgtaccaattatacataactgaataacaaamtctaaaatttaatggtttaaaacaatacccatttatttgttcaacattttgttaattggacatttgaactaagctcagctaggaaaagggcactttttctggtctaaccagggtcattgatacagatgtagtcatctggtggtttcactggcaatagatttcctagcatggctttactcatatgtctggtgttgatgctggctattagctgattagtttagtgggtatcagctggttaagctcatttctgcttcgcatggccttttatcctagagactagaggatagtattggactcatccagaggactctagactagatactgcagttcttcacatcatggaatagtgtttcaaaagaaccaaagtgaaagctgcaggacctcttgaaactgagactcaaagctacatagcctcaattcccacacattgtgttagtcaaagcaagtccaaagccagcccagatttatgagagtgtagaaatcaatgccactgctcatgaaaggagctgaaaagaatctgtggttatctttaatattccacatttatccatcacatatataatttgctatgtaagagaaagttttttatttgtacacagtaatcttaaaatgtaccaatgagttgagcttctttttaccttgaatattttaatgtatagtctcttggctattctattcataaaatcctatcatttgaaaataatgatagttttttcttcctatctataacgaacatttttgttttattttcttgcttgttgtatcggctagaatctccaaaactggtgataatgaaaatagtttcatcttatttcagacactagaaagaatatctttaggttttaaatagctaatataatttttaatattgactcctaataggtttcttcttttttccaaccaaggacatgaaattcaattaatcaaaactcttgggtcatgataccattctcattattggaccatgaacagctcttttttctgtttactttaaggatgtttcttctatttttacttcattaagggtttaacagtagatattggactaaatcaaattcctcttctacatttactaatatgattttcc

SEQ ID NO: 716989 - DNA, 1061 bp, Homo sapiens
ttccaaaacagaaagaaacaggcctacatggtttcactgttgaattctaccaaatacctaagaattaatttatatcaattctctacagtttttttcagaggttagaagcagaaaaaaatacttcctatctcatttattgaggccaacattaacctaataccaagaccacacaaagatattacaagtaagtccttaaactgataaaatatatttcaaaaataaatgtactaaaacttggaaataggcaaatgtaaccagcaccacttgcattcagcaatggatttcacaaaatataatatttataagaatcaaggagcacagacaaatacyaaaacaaagtaccattttatgcctacttaaattgcaaaaatctagaagtcacataattccaaatattggagtgaatgtattctcaaattttcatttatgtattactcgtgatcaagtaaattaatgtagtcactttaaaaagaaacagcttccagatgtgatggctcatacctgtaattccagcactttaggaggccaaggcgggctgattgcttgagcctaggaatttaagaccagcctggcaacaaggtaagacctcatctctactaaaaaaaaaaaaaaaaaaaaaaaaaatgaaaaaaatgctgggtgaagtggcatgtgcctgtagttccagctactcaggaggtgggagaatcacttgagcctgggaggtggagtttgcagtgagccaagattatgccactgcactccagcctgggtgacagaggccctgtctcaaaaaaagtgcagcaactataatgctactatgttggaactttccaatttattgagtttctatgtaacactgtgctaagcaccttataaatatcctgacaactctgagataaatattatttcaatttattcattttctatcttatggatgtcatgatacatgagtcatgaagacaacaaaacggttgggtcttgcttctttatccaacttgctattctatgccttttaagtgtaggcatttaacccatttacattcaagattaatactgatatgtgaggatttgattctgtc

SEQ ID NO: 716990 - DNA, 1064 bp, Homo sapiens
tcagatatatttaattgtatatatttattagattttctttgtaagtaaaattctttaaattaattagataactttaaaagccacagggaaattttaaggatatactttcatctctaaaatattctgatacctcttgaccatctaattccaatttttttttactgtaaaatagcatttttttttttacttaaagaaaaccacatcatttactattttgcccaaatcaaagggatgcctaaataaatcactatggcatcttgaaaataagtatatctgtattaagaaattatttttaaaatagtaagaatataagatgtactaagaaagttattttttaaagtcataaawatttatattcaagatacattttcccttttaaaatgaaaataaattttgttattgagaaaaattatatttttaagctagattacctgttttatagaacgagaaagtgccagtttaaaaattgttaaatattcatatttggagtaatttaaaaagtagctttataatattttaactgtaatatctgtatagtcctttagaattcacaagagatagtcacataccatgtaattatatattccaaaaaataaaacaaactaaaaagatagatttaaaaaaattattttttgtcataagaaaaaatattcagctcatatgtttcaaatcattttaataaatggacttctctagaagtgtgaggatgttgaggaaacaacagagtgtgccaagtcacccagatatcagcaacaacatgaaaccattctggtcactacaggtcccaagggaattagagggtaggtagcatattcttagactggtgagaaatggagccctggagaagattcctctttacagaaaatgtgatcattgagggattgagtcatttccagaaaggtggctcaaagaggtgaagaagcagggaacaaattcccagatattctcccattttgcattagtaataaatcttttattttcgcttgagtctgtttgctgacagaaataaaaacaaaatatcccaacctcccttgcaattagtcatataactaagctctgaccaa

SEQ ID NO: 716991 - DNA, 1064 bp, Homo sapiens
tcagatatatttaattgtatatatttattagattttctttgtaagtaaaattctttaaattaattagataactttaaaagccacagggaaattttaaggatatactttcatctctaaaatattctgatacctcttgaccatctaattccaatttttttttactgtaaaatagcatttttttttttacttaaagaaaaccacatcatttactattttgcccaaatcaaagggatgcctaaataaatcactatggcatcttgaaaataagtatatctgtattaagaaattatttttaaaatagtaagaatataagatgtactaagaaagttattttttaaagtcataaatatttatattcaagatacattttcccttttaaaatgaaaataaattttgttattgagaaaaattatatttttaagctagattacctgttttatagaacgagaaagtgccagtttaaaaattgttaaatattcatatttggagtaatttaaaaagtagctttataatattttaactgtaatatctgtatagtmctttagaattcacaagagatagtcacataccatgtaattatatattccaaaaaataaaacaaactaaaaagatagatttaaaaaaattattttttgtcataagaaaaaatattcagctcatatgtttcaaatcattttaataaatggacttctctagaagtgtgaggatgttgaggaaacaacagagtgtgccaagtcacccagatatcagcaacaacatgaaaccattctggtcactacaggtcccaagggaattagagggtaggtagcatattcttagactggtgagaaatggagccctggagaagattcctctttacagaaaatgtgatcattgagggattgagtcatttccagaaaggtggctcaaagaggtgaagaagcagggaacaaattcccagatattctcccattttgcattagtaataaatcttttattttcgcttgagtctgtttgctgacagaaataaaaacaaaatatcccaacctcccttgcaattagtcatataactaagctctgaccaa

SEQ ID NO: 716992 - DNA, 642 bp, Homo sapiens
ttttatggctgagtagcattccattgtacataaacaacgatggatacagatccacttttacatggtgtgttagattcctagggctgccatgaatagagccatttatgaaaaacccacagtcaacatcatactgaatgggcttaaattggaattactccccttgaaaattggaacaggacaaggatgccctctctcaccactcttattcaacatagtactggaagtcctggctagagcaatcaagcaggataaagaaatataagacacccaaataggaagacagggagtcaaactgtccttgtttgcagatgatatgattctatacctagaaaacctcattgtttctgccccagatcttcttgatgtgataaacaacttcagcgaagtttcaggatacaaaatcaatttaccaaaatcagtagtatttctataaaccaacaacatccaagctgagaacaatcccattcacaactgccacaaaaataataaaatatccaggaatacagattaccagggaggtgaaagatctctacactgagaattacaaacatcactcaaaagaatcagaactgacacaaacaaattttaaaaatccatgtccatggataagaagactcaatgtagtcaaaaacgtcaygttgt

SEQ ID NO: 716993 - DNA, 639 bp, Homo sapiens
gcagtgctagacgttggtcaaaatttggcagcatgtctaagaaggggctgaggtgcacgtgtgctctgtgactaagggatgggagccaagccccagggctgagtgaccggaatccatgccagtgaaggccaagatgggcagcagagtggactgggggcagaagatgccaggtcattagcaaaccagagacttcaaggactggaattccagcttgtggttttaggtattaccactaacctatgctgccaccaagtgctcattttaccagcaaaggcttcttagagccagggctggagatrcctctctcctccaggcttgcctggcttccaccacccctgcaacacacacagcacacacattcagaaatgggaaaggtcaaaccgcaaacctccctgactgctctgtccccatggctttatttttaggctagaaaagaccctttcctcttctgactcatgatcccgctgacaaatattcccttagtggagaaagctaaatagaatcattcctcatgtcacattctcttgaatcaaagaagctcttgtgactggagcctgttttgtcattctgcatgctgcatgcacccaatgtccatgctctgtggacacttcttcagaccaggacactaaggccaaagaa

SEQ ID NO: 716994 - DNA, 1175 bp, Homo sapiens
tttgtctttaagtcaggcagccttacactgctatgcttttgtagtttttctctttgtctttccccccttggaccatcatctgctgctgaccagaatctgcttgctcttggggggctttctgacactgcttgttttctccagatcccattgctcacttcagccaggtgctttcatttatctttagctgcagccctcaggattggccactgctctagcaggaaaagtatcaaagtccctgataaggcagggacagaaagagggttttattctttcttttctcactgttgagcccatgccaagcagtatccacatactgcctgccccgctttcagtcctcttttttggtccaaatgatgttggatctgtcattcgactctggatgaatgagagctcctgaagggacaaccctttcagtgaaggggtgagggtggggcatgctcagaccacttttattaccttttctggggcagaaattgtaggttaaggtgacatcctctcacagtttctttatgacttcatcaggatacaaagaatacaagcttctccccttctcattttctgtctccctctctcttctatagataagtatagagacagaaaagtagacgtagataaaaacgtggatatcagagagagggagcaatcaagaaaggagataggcagtgtattgtttttagaagagcagagagacctttgggaagccctgttcaagaacaagcagataataaagagttcctttgcttttcttgagaaagaaaaatcgttgcatggaagtatccaatagtctcaggccctctgtagaaaaatttcctaaccatcttctataacacacatatagttcaacaaatggtagccagtattttaatcatcattaatctatctactttgaaataattaaatattaacggttaaaactttaactgtttccctcctttgggagtgaagaaatgcaagtcaatctcatttttagtttaaaatgtgaataagtgaccaccaaattttattgcagatgtgctttaaatatttggcaaattttaatatttttctgctggatctgtaggttggacttctgggaattcagatgttgtggacacaygattcagaagaggctttacgtaatgcaaaagatgacaggaaaatcatgcaagtgaccaatcagaaatttttggatattc

SEQ ID NO: 716995 - DNA, 538 bp, Homo sapiens
catgaagtgttactttatttagcaagcagttattaagttatcttggtayaatagtattataccaagatataataataataatataccaaggttataataatagtattataccaagatatattataatattgttataccattaaaagtaatggcaaaaactgcaattacttttgcaccaacctaatataaatgttaaatagttctgggccattgatattctttatacacacatccgtagacacactacacaggacgattcctccactggcagtcaaacagctaaaagtataggtgaaattctcttttaggttactgtaaggaggggcttgtatacatgagatgggactcaaacagtttgaagtctgccaagaagttgatccatttgggattagagtatcaaaggatgaggagacaatcattaatgcttgaaatagaaagatgactttattgcttgctgtagtgacagagagctgtactggtcaggcacagtgtacctggcagggcagactgctagtctcatacagggtgtctgggcagc

SEQ ID NO: 716996 - DNA, 538 bp, Homo sapiens
catgaagtgttactttatttagcaagcagttattaagttatcttggtataatagtattataccaagatataataataataatataccaaggttataataatagtattataccaagatatattataatattrttataccattaaaagtaatggcaaaaactgcaattacttttgcaccaacctaatataaatgttaaatagttctgggccattgatattctttatacacacatccgtagacacactacacaggacgattcctccactggcagtcaaacagctaaaagtataggtgaaattctcttttaggttactgtaaggaggggcttgtatacatgagatgggactcaaacagtttgaagtctgccaagaagttgatccatttgggattagagtatcaaaggatgaggagacaatcattaatgcttgaaatagaaagatgactttattgcttgctgtagtgacagagagctgtactggtcaggcacagtgtacctggcagggcagactgctagtctcatacagggtgtctgggcagc

SEQ ID NO: 716997 - DNA, 1777 bp, Homo sapiens
actttaaactgggacattagaatgaatgaccatatcatttgctatataaatatcaggaatagaaagcttgtttgttatttgctgtttgtttaatctggttggttcctggctgtaaagggaacattgggctcatcctaattgattaagtaccttgtttctccatattctttaattttggattcaaggcttgtatgtaatctgtttgatggttttatttgcttttttgctgtaatgcaactttgctgactagraattggtttactctttcatgtctgacggctctaataaattgaggagcttaggcagacagctcttttatccaagggcccttactgggctggtgatactgctgaaacctgcctagcctcaaaaaatgctcagagagggataagagtcctgtagggaggaagaaacaggggaatttttttgcagtgacctcaaaatagagacagagagacagagacagagagagagagagagaggacaaatcactcacatggaagtctgtcaaaatgagaatgagagtaggctggttctgctttggctgatgaaaggatggtgaattgaaaaaatgatcaaaagtgacattgtgggccaactaagaaatatcaaaggagaccgtactgccgatcagtcatggaattcaccatctgctagggagcagctgcacaaacatttgctgagtgattatatagaaactgtagtggttggtgggatagatgcagccataatgaacgctcactgggttctgtctgtctcttgctttgctccttgtctttccttttgccttttcccttgcccttgaccttctctttcttttcacaaagacagagctatgtcagggacattctgggagatacaaagatgcatgagacataattcctgccttcagggaagtctcaatctgatggaagcgacagaagtagaatgggcaatgtttacctgtattttttgttttgcttgaaaacagattctgataaaattgcaggaaatcaatggggttgggggaagtctagttacattaattaatgagatgtgcattttattactgtcaaagggcatccattatatctgatttcctctattttgggagtgccagttgattaaaagctttactaattatgttccaagtggatggtatctttctctttctgagaaatttaatctacattcctgtctttgcctgtcttagtcacacatatcaacttaggattctgacttacaaatctgacatgaatatggcgacatgcagtgtgttcttcgggattcatctttaatattttcaagatccacatcagttgaaggatctgagctgatgaaaagatgactttcagctttctggaggaactcaagagggactggggagtttattttgtccttggatgaaagagaaagggttttgttgtggggataaagcgaaggcactttccatggtgagctgacgtcttggtgttttttttgtttttgctttattttctggctgcctcgagcaactcatcgtcagaggagccatcagtgcctttggtcttttatgtacaaaaacacaccaaccagtggagaaatatggtgtttgtgatcagtgcttatgggtagtggtgacttttgatagttttgggtttttagtgctagcaagctacctgagtgtcagtgaagagtggccccagtgatactgtggcacagacacagttcataataaatgctctctctatgcctggaaggcccttctccactttttccaaatacatacatcatcctggcctcatggactttcacctgc

SEQ ID NO: 716998 - DNA, 618 bp, Homo sapiens
tgactcgggacctcccactgtctggggtattcctcctccagatagccacatggctcactcccttgcttccttcaagtcttatctcaaaagttatctttccagaatatcctctctggcaacacagcacagcagttaagagtccagtcagccagcctgggtgtcaatcgtgactttgccacttcctggtggtgtgaccttaaataaattacctaatctatctcggctccagtttcctcatcttttaaatggggataattatagtaccaaccaaataaggttgttaaattttttttcttggtgatctcccccagttaaaatgtaagtactcagaaaacaagaatttttagttttktttttttttctgctgtaactcagtgtctcaaacattgactgacacatattaggcccccacttcaatcaatatctgccaaacaaatagacgaatgaaggtgtaagtgaaaaaaagagaaggatatgaagaaaatattccttattgacaaaaagatgaacacagaatttcaagatgcattgaatgaatgaatggatgaatgaatgaaaatggtgaataaattacaacataagcactatgagtgtaaggaccttgtttgtattccctga

SEQ ID NO: 716999 - DNA, 567 bp, Homo sapiens
gcaatgccttcaattttgtaaaagaraatagttaaacttataattttataccccattcatatcaccaaccatgatatatgaataacatatttatggaaaacaataacttatgatttttaccacctgcatatgctctaaggattaagtaattagagaatatgctaaaaaaatagaaaaaaataatatctgaaaaaatgtcaaggaaacaagggaactagccaagggttcagttgaagttattcagggataattactattcaataaggttcagaatccataggtccaagttacatgagggattcaattgtgtccaatgtctaagaagaaattaatgtgatttcctaaataatgttgttaggaagttgactgatttttataaaaatgtatcaaaaaagacattgccaatataaggtagtaaataaaattagtattacacttctaacattataatgtggtaaactacagtttatttttctcgtttactagcctatggctatttttgggtagttaaatattcctgagtagtgctatctgtacgtttataagatttattttctactcattcca

SEQ ID NO: 717000 - DNA, 567 bp, Homo sapiens
gcaatgccttcaattttgtaaaagaaaatagttaaacttataattttataccccattcatatcaccaaccatgatatatgaataacatatttatggaaaacaataacttatgatttttaccacctgcatatgctctaaggattaagtaattagagaatatgctaaaaaaatagaaaaaaataatatctgaaaaaatgtcaaggaaacaagggaactagccaagggttcagttgaagttattcagggataattactattcaataaggttcagaatccataggtccaagttacatgagggattcaattgtgtccaatgtctaagaagaaattaatgygatttcctaaataatgttgttaggaagttgactgatttttataaaaatgtatcaaaaaagacattgccaatataaggtagtaaataaaattagtattacacttctaacattataatgtggtaaactacagtttatttttctcgtttactagcctatggctatttttgggtagttaaatattcctgagtagtgctatctgtacgtttataagatttattttctactcattcca

SEQ ID NO: 717001 - DNA, 2025 bp, Homo sapiens
tttcaccagaagtattctttaaccagtctgccctcctcctgaaggaaatgatttaacaggggttattggactaccttgaagactagtaaataaaaatctgtcaccattttacaaaacatgcagcaaaaaagatggtgaatacagtagtggtcattaccaattattgcgtctttgagccttttaagttttcatttattagaagtgatattaagttgatatgataatgtgagggaagtgtccaagtatagcccaacagctctactgtgtttccaaagagtcttaggtacaggatgtgctggctaactcgtgcttttaattgcatgcaaacagctcagccagtacatccccgttccctctatatctgacacatgaaaacctttctcagaactgcttagttatgtgttatctgtgtcccttcagcacattcctcctcttcccccaaatcctgtatttcggacactgcaggaaaagggtttggatccatctactgcagcaagaagtggggtgcacgcagccaaagggccactgtcatcttcaaaatggacctactagccttaacattgcaagggcctgaatcttgtgtactctctctgtcttgctgtaagtaaatactctagcacctgaacttggtgtgcatgttatctgttttcagcaactttgaatcatttactggtctcttcctaggtgggatttatctgccttttaacatgggccgcacctatgtgaaattctatcctacagcacaacccagccacatcgtgaaacagacaaaaagttaactgtatattgaactagtattgtaataaaacacattgattttaaataattatgatgtatactgccctgatggcctcaattctttacgactccctgcattcacacacattggcagtgctgtctcactttgtttcttcgagtataaggcttgctttggctattagaatgagacagcagtaaactgtgtgccagttctgagcctagtgtgtcactgctcttctcctttacttcttccattgccatgaaaagagcatgctcagagtaacttgcaggtcacaggaggatgatgaaattacctagggtagagctgtcccaggtaatgtgccccaaccaagcagagcctagaacacagttcccagcagatgtgctgatgcttgtgtgaggcccacaaagaccagcagaactacccagttgatttgggggggatgcatctttagcatctttaagtaaaagtgtaggtgataatgctgcagtacaacaacaacaacaacgataataataataaagagaggaataggccacttctgtaggttcagaggaatctgctattttaatatttttggttgtatcaaccaacatacaaccatccatgttcaaaatcccattttttcccaaaaaagtccctgactgtgttagggagtttaactttccatggagctcagccactcttacttttaattgttgatttaattattcatctttttgttaacttttttctcagcatttagcaacgacttccgagttccactttcttcgtaatcgctattttccctgcatgtctcagatatttgatacatggtaccagctaggcatttgcttcacccagtaaagtcatgctagtgtaccactgctgagaattttaacaatcgcactgccaccttrtgcccattgccagccaggcagaaaagaattcagctccaagataccattcaagtctttgctttttgggccactcctaataccagttagtccaggttgggttctccaagaagtagattctgagccagagattaatgtgtaggaggtttattagagcatgctcttggtatcaagggaaagaaagggaagggaaagaagcatgatttggcagaagctgacctgagatgcaccctcagccaattctatagggagttctgagctggagtgacagtgagccttaagagttgtgctgagttgtccttccattgacaaaaaacgaaaatagtccaccttggaaagtcagttattttagctaaagcaatcctggca

SEQ ID NO: 717002 - DNA, 2025 bp, Homo sapiens
tttcaccagaagtattctttaaccagtctgccctcctcctgaaggaaatgatttaacaggggttattggactaccttgaagactagtaaataaaaatctgtcaccattttacaaaacatgcagcaaaaaagatggtgaatacagtagtggtcattaccaattattgcgtctttgagccttttaagttttcatttattagaagtgatattaagttgatatgataatgtgagggaagtgtccaagtatagcccaacagctctactgtgtttccaaagagtcttaggtacaggatgtgctggctaactcgtgcttttaattgcatgcaaacagctcagccagtacatccccgttccctctatatctgacacatgaaaacctttctcagaactgcttagttatgtgttatctgtgtcccttcagcacattcctcctcttcccccaaatcctgtatttcggacactgcaggaaaagggtttggatccatctactgcagcaagaagtggggtgcacgcagccaaagggccactgtcatcttcaaaatggacctactagccttaacattgcaagggcctgaatcttgtgtactctctctgtcttgctgtaagtaaatactctagcacctgaacttggtgtgcatgttatctgttttcagcaactttgaatcatttactggtctcttcctaggtgggatttatctgccttttaacatgggccgcacctatgtgaaattctatcctacagcacaacccagccacatcgtgaaacagacaaaaagttaactgtatattgaactagtattgtaataaaacacattgattttaaataattatgatgtatactgccctgatggcctcaattctttacgactccctgcattcacacacattggcagtgctgtctcactttgtttcttcgagtataaggcttgctttggctattagaatgagacagcagtaaactgtgtgccagttctgagcctagtgtgtcactgctcttctcctttacttcttccattgccatgaaaagagcatgctcagagtaacttgcaggtcacaggaggatgatgaaattacctagggtagagctgtcccaggtaatgtgccccaaccaagcagagcctagaacacagttcccagcagatgtgctgatgcttgtgtgaggcccacaaagaccagcagaactacccagttgatttgggggggatgcatctttagcatctttaagtaaaagtgtaggtgataatgctgcagtacaacaacaacaacaacgataataataataaagagaggaataggccacttctgtaggttcagaggaatctgctattttaatatttttggttgtatcaaccaacatacaaccatccatgttcaaaatcccattttttcccaaaaaagtccctgactgtgttagggagtttaactttccatggagctcagccactcttacttttaattgttgatttaattattcatctttttgttaacttttttctcagcatttagcaacgacttccgagttccactttcttcgtaatcgctattttccctgcatgtctcagatatttgatacatggtaccagctaggcatttgcttcacccagtaaagtcatgctagtgtaccactgctgagaattttaacaatcgcactgccaccttgtgcccattgccagccaggcagaaaagaattcagctccaagataccattcaagtctttgctttttgggccactcctaataccagttagtccaggttgggttctccaasaagtagattctgagccagagattaatgtgtaggaggtttattagagcatgctcttggtatcaagggaaagaaagggaagggaaagaagcatgatttggcagaagctgacctgagatgcaccctcagccaattctatagggagttctgagctggagtgacagtgagccttaagagttgtgctgagttgtccttccattgacaaaaaacgaaaatagtccaccttggaaagtcagttattttagctaaagcaatcctggca

SEQ ID NO: 717003 - DNA, 640 bp, Homo sapiens
catttcagattttggattttcagattagggatgctcaacctgtagtaaaaacccaagcagagtaaatttagaattcatttgggtaagagagactgccaaataagcggcctagaatttttttctaacaacaaaaatcactcagcaaaggaaatgagtccatactatcatttacaggtaaaattcatagtgacactgtaccagctactaacttctgtatgtaattttaatcactgcctcaaaatattgctatagtgtcttaggagtggtctaatagagtattttaaattctatttttgcraagattacactgatactgaaaaagagagctttatcccatatttgcctctacagagtagtaataaagcaactctgacctaaccatctgagagaattttatgcccttgtttacattgtatcataatcacacacaaacatacatatatgtgtgtatgtatatatgtatgtatgtatagagagtttatccccatttaaaccttttcttgacattttttcagctatgaacaatctgtctagaaagcacttcagttgatgaactcatttaaagcatgttcaagtctgtatcttggttctgtaagagcctaagaaacacctatacttttgggcttactccaaaacttca

SEQ ID NO: 717004 - DNA, 593 bp, Homo sapiens
tgggttcttctttatagaaaactggaaggaaatacaccaaaatattaatcttacttatctttgggattatgtgtgctcaactttttttgtgctttctgcattttccaaatgatctccaatgaacatgcaactatttttatacttaaaaaaactatatttttctaaatyagaatatgttaaagatcaaccacaggcatcttttttaaatgcaaacgttgtaaggtcgagattttctaatactgagagaaaaccttcagccacactgtccattacaggagccattacccacatagagctatttaaattaatttaaaaattcatctcttcagtggcactagccacatttcacgtatacaatagtgacgtatggccagtggctacaccccacaggaacagaacattttcatcatcaaagaaagttctagcggactatcttaaaattttaagttgctgtcttaaaatatattaccattcaactggacagagacacaattattttcctatacttaatactaaacaacataggcctatgatgaagtaatcattcctaaagctgccctctcattgtaattagaaatctccataaaatatac

SEQ ID NO: 717005 - DNA, 2435 bp, Homo sapiens
acaatagaaacagaagcagatcactattactttatttctacccctacctccataaaaatcagcccacaaaaacaaaaacaggccaacagtttagcctgatctcaagcacttcaggatcattttctgatgaagacaatggaataacatctaaagaatgcagaggggaaagagtgtcactcagccaagatgtctttctcatgtaagggaaatactaaaatattcacaggaatggaattattcatgtacccttcctggaaaattttttgagaaacataactcagctaaccagattaaatgtaataacaatgatgtaaaaagaaagaaagaatcctaactttataagtgaaataaaaagaactggaaataacatcgaattgatttagattttaaattaagggcaataattttaattgaaagtatagagaaatttcttcctatacggatacctgaaattaatatttataaaggcaggactgagctggtggtaaagtggggaaacaattggaggccagagacggaagaaaggatgataccacaggtagaagtgaactctgatctgtgtttgccttgtgcaatatccccttatactcccttaaatccctggaggattttgtctagatttccatgggccagatattctcaagggacaggagcaaaaactggagcttaatccaggacagggtggattgaatgccttcacataaatttagaacttctaaaagatgtcatcttcagtgagtaaaaaatcaatgaggcaaaaaaggactattcaattagaagtaatgggagaaaattggttgtccttacaaaggataaaaaaattaaaaatgcctttctctttagaccttacacaaaaatcatttccagattcattcatgacttaaaaatggaaaggccaaatttaagccttttagaaaaaaataggaaatatctttatgattttgaggtagggaaagacttcctatgcaagacaccaaaagcatctaaacataaaggaaaagattattatacttgactatattaaaatcaagaacttcagcttatcagaagaaaccttattttctctgagagagaaaaaataagagtcataaagagggagaagacatttgccacacatgtgaccaaagggctagtctcagaatgcaaaagaaccctttgaatcattaagaaagagaggaataaactaatagaaaaatgggcaattttcatgaacagtcattttctagaggaggaaatacaaacagccagtaaatatataaaatattattgctcttattatatgtcaagacaatgtaaataaatactacaatagtatcctttcatatcagattaatgacagttaaaaagtcagttaataccaagtgttggcgagaaagcaacaggagctttcaaaggctgcttgtgggagcgtacttgttacaattgctttgttaaacaatccagcactaactggtaaaggtgaatatgtgcatactctaaagacccaggtatatatcttctatgtataaatcttagagaaacttttacaggtgaaccagcgcatgtacagaaaagcgttattcctattagcaaaaatcttaaagtaatataaatatccatcaacaatgaattggattaaaaaacttaaggatataataatatactgtactaccatgtagcagtaaaaataaatgaacatgctgtatctatcttgtaattatgtaaacacatatgatgctgaaccacagaaggaagttaacaaaaatatagaaatgatttcgttaagaaaagttgaaacaaggcaaatgaaatgatatattgcttggaggaaacacaggtggtaaaactatgaagaaaagcaagggaatgctcagtgctatttcaatgtaggatackgctgagggcatagaaatggacagatcagaaagcagcacataagccctctgcatggatcagagcacagtgtgagggacatgggtgtcattttttatttttcattaagtagtgaaaatatactgtatgtacttttagtacatacaatttttaagtattttaagaagttaaatggaaaactataataaatatggtgaaaagtgattttattgtaataaactgacaaaagtacaggtgtacatcaagaaaattaatttagtgtaaaaagtattaataaaagcaaagcaaatgattttatatgttggtcaaatacaaaattaagacaataattataaagagaacacataggagccaaaaagaggctagcttttaaaaaaataggatgcaaagcccagaaacagacccaagcacatatagaaatccaacatgtaaaagcaatgatagctcttattttgatcacatttactaggtacattgctgcttgaacttaaattaactcctgatttaaatgtagaatgaagccataaatataagactcagaatgcagcttaaatgtcacttcc

SEQ ID NO: 717006 - DNA, 664 bp, Homo sapiens
ctcagcctcttgagtagctgggaatacaggcatgtgccaccatgcctggctaatttttgtatttttagtagagatggggtgtcaacatactggccacgctggtcttgaactcctgacctcatgatccacctgcctcagcctcccaaaatgctgggattacaggcatgagccactgtgcccagccttgtacttgatattttatcaagattatctgccaacaagttacccatattcgggtttcaatgagcctggaatcttctttccacttgataggggtatgtattaggaaatccagttgatgacatttttatttaaaaaatcaaaaagaatcagcacagtcaggttgtcttagtcttaaggatttctggattcctttcttggaggaggtcaggatctttccaaggcttgggtccttggatattcttccagtcatcaaaagtggagtcttttctcatattctgactctaatgatactatttgctttcagtttttttccaactcaggatcaattttaatcttcactgcatcatgtcagatttgtaaaaaytcacgaacaccaaaagaaactccaacaattagcaacaacatggggacttcgtagtggagagtcttattcttgcgcaaagcacgcatcactgcgggtgcaaacgactgaactcttcca

SEQ ID NO: 717007 - DNA, 1276 bp, Homo sapiens
tatgaccttatacgcaaggttgaatgcaaataccctttggggtgggcctatctcagctcaaggaggaagccctgcctgaaaaggctgcagcctaggcggtcactctttcttcattcagcccagcatctaattacatcttctgtcagtcagggcctgagagggtggggttttaaacgttatccawtcagcgacgctgggctgggaactgtccaatcaggcacgcagcttgagcggagaggacggcttccgggatgtggcgggatttgtccgcttctttgtctttggctgccgctggaactccgggtctcgtcttcactgctctgtgtcctctgctcctagaggcccagcctctggtcctgtgacctgcaggtattgggaatccacagctaagacgccgggacaccctggaagcctagaaatggtgagagtgcggggtccaacatcccgagagaggggaagggctggttggaaccggtgggaagtggctgtggcgagactcaggcctccccgcagtcagctctacaatctgcgccccgagttctccttgcccagctcggcctcagtcgccttcagccataagatggcggttgcgccgacagcccggcccccgggcgtcctgtctcttccctgcatagtgactgtgcccttgcctggagccctctctggggaatctctgcacccgcagcgccgcttctctaccggattgtgcagggaccgtgggagggtcgtcaggggagaatcctgacttggggtgcgggttcatgaatgggaagaggtttgttccgtggggttcccagttcctattatctcctattaaaagttaatgggagtcactgcaaaaatattaaaagaatttaatcaaagagtggttctaggctgggcgcggtggctcacgcctgtaatcccagcactttggaaggccgaggtgggcggatcagaggtcaggagatcaagaccatcctggctaacacggtgaaaccccgtctctactaaaaatacaaaaaatgagccgggcgtggtggcgggcgcctgtagtcccagctactcaggaggctgaggcaggagaatggcgtgaacccaggaggcagagcttgcagtgagccgagatcgtgccactgcactccagcctgggcgacagagcgagactcttgtctcaaaaaaaaaattaacttattaaataatttaatcaaaaagtggttctagaattgtagagcaccaagctgtggtttttagtttgtggtctatgggagaggcttgaaagaaagtcttttgtaaa

SEQ ID NO: 717008 - DNA, 578 bp, Homo sapiens
cttaagtctaacccccatccctcattactccaacctcattcttgcttgcagtaagatactaaatttccaatttcttctggggttcccaaatgccagcttttcctccctaattcacattatcacgtatttgtgtttttttgtttgttttgttttgtttttgagatggagtctcgctctgtctcccaggctggagtgcaatggcgcgatctcggctcacctcaacctccgcctcccggwtttaaacaattctcccacttcagcctccttagtagctgggattacaggtgcgcgccatcatacctggctaatttttgtgtttttgtaaagacgggggtttcaccatgctggccaggctggtctcgaactcctgacctcaggtgatccgcccgcatcagcttgccaaagtgctggaattacaggcgtgagccaccgggcctggccacttattttgtagtgtacttttttataccgtattttaattaattattttttggcaaggcattaaatggtgcttttttcttttcttttttttttgagacggagtttcactcttgttgcaaaggcacattctcggctca

SEQ ID NO: 717009 - DNA, 578 bp, Homo sapiens
cttaagtctaacccccatccctcattactccaacctcattcttgcttgcagtaagatactaaatttccaatttcttctggggttcccaaatgccagcttttcctccctaattcacattatcacgtatttgtgtttttttgtttgttttgttttgtttttgagatggagtctcgctctgtctcccaggctggagtgcaatggcgcgatctcggctcacctcaacctccgcctcccggttttaaacaattctcccacttcagcctccttagtagctgggattacaggtgcgygccatcatacctggctaatttttgtgtttttgtaaagacgggggtttcaccatgctggccaggctggtctcgaactcctgacctcaggtgatccgcccgcatcagcttgccaaagtgctggaattacaggcgtgagccaccgggcctggccacttattttgtagtgtacttttttataccgtattttaattaattattttttggcaaggcattaaatggtgcttttttcttttcttttttttttgagacggagtttcactcttgttgcaaaggcacattctcggctca

SEQ ID NO: 717010 - DNA, 578 bp, Homo sapiens
cttaagtctaacccccatccctcattactccaacctcattcttgcttgcagtaagatactaaatttccaatttcttctggggttcccaaatgccagcttttcctccctaattcacattatcacgtatttgtgtttttttgtttgttttgttttgtttttgagatggagtctcgctctgtctcccaggctggagtgcaatggcgcgatctcggctcacctcaacctccgcctcccggttttaaacaattctcccacttcagcctccttagtagctgggattacaggtgcgcgccatcatacctggctaatttttgtgtttttgtaaagacgggggtttcaccatgctggccaggctggtctcgaactcctgacctcaggtgatccgcccgcatcagcttgccaaagtgctggrattacaggcgtgagccaccgggcctggccacttattttgtagtgtacttttttataccgtattttaattaattattttttggcaaggcattaaatggtgcttttttcttttcttttttttttgagacggagtttcactcttgttgcaaaggcacattctcggctca

SEQ ID NO: 717011 - DNA, 1383 bp, Homo sapiens
tggtaaaaacagcaattacttttgcaccaatctaatatgaactcgacactggcagccctgagtacttcctttgctttctctgcaaactgctcaggggtctctccccactaggccttggcaatggtggtttcctctgccaggagcaccctttcccacaggtctactctatctggtragctcttatattacctccaaaacccaatcccattgtgcccttccccagcagagtcatgggttcaagcctcgactcaggggcactggggggcatttatgatcggctgtgtcttctctccagattgaggaagagtctggggacacaccagaaaaggacaggatcaaggtgggacctgagggcccttggggcctctcccaacttccccagggacccttgcccatgtagaaagggcctgttgtctaatgggtgggaggaagtggactctgggccaagctccctttgttcaaacaccagctgtgctgacttttgctgtgagtcacttggtctcagttttctcatctgtgtaacaggaataataacagctcttctcaggactcatggcctggagctttggtaagcaggagattgtcatcaatgaccctcactcctctctccccacttcccagatactctgacccatggatcccctgggcccggccaagccacagtggtcgtggcgctgctgtctgaccacgctgctgtttcagctgctgatggctgtgtgtttcttctcctatctgcgtgtgtctcaagacgatcccactgtgtaccctaatgggtcccgcttcccagacagcacagggacccccgcccactccatccccctgatcctgctgtggacgtggccttttaacaaacccatagctctgccccgctgctcagagatggtgcctggcacggctgactgcaacatcactgccgaccgcaaggtgtatccacaggcagacgcggtcatcgtgcaccaccgagaggtcatgtacaaccccagtgcccagctcccacgctccccgaggcggcaggggcagcgatggatctggttcagcatggagtccccaagccactgctggcagctgaaagccatggacggatacttcaatctcaccatgtcctaccgcagcgactccgacatcttcacgccctacggctggctggagccgtggtccggccagcctgcccacccaccgctcaacctctcggccaagaccgagctggtggcctgggcagtgtccaactgggggccaaactccgccagggtgcgctactaccagagcctgcaggcccatctcaaggtggacgtgtacggacgctcccacaagcccctgccccagggaaccatgatggagacgctgtcccggtacaagttctatctggccttcgagaactccttg

SEQ ID NO: 717012 - DNA, 616 bp, Homo sapiens
tatcrcatcctcatcacatcctcctagaaacccttgattggctttccattaccttcaggggcctcttagcaccacgtacagtcttccaggcctggcacctgcccacttctccagtctttcttctttccccatccctcacgtcttctactctccagccattcgctcattcactttccattcattcattcttcaaatgcgtactgggcagccactccaagtcagatgctgtgttagctgctagaaccacagtgcacagtggggggacaagacaaacaagagcctttctcttaagaagcttacatgccagggaatgtaaataacaatgagagaaagaaagagatgagagcatttctttctttctgtgaaaagtgttgctaggagaatgccacagggcgatgtgattgagagtgaatggaagaggccgtgtgcctttaattgggtggccagggaaggaaggcatgagttgagaaccagccactccaaatttcttgcagttccatgatcgtcccaggtttcgtctatcctctgtgcacgtgcatacgccactgcctcctccaaaatgcccactccaccccagccccacaatccctcgtctacttgtaatcctggctcagtt

SEQ ID NO: 717013 - DNA, 1284 bp, Homo sapiens
cctgcctgcactgactttaacaataaagatactggaataatgagatcccatggaatttagcaaaatacgagtagaaacaagtggtaaagacagcccagactgtagttcaaagtctaagaacatctaagctgcgggttcaggtataaaattagggccctgtggcttatctcaagacagtaactttcaaaggggggtttgaatagtctttccaactgtagctacattacctgaggcaattagtttacttattttttgtttttgttttttttttttgtggttagcttttctttttttttaatttattattattatactttaagttttagggtacatgtgcacaatgtgcaggttagttacatatgtatacatgtgccatgctggtgcgctgcacccactaactcgtcatctagcattaggtatatctcccaatgctatcccgcccccctcccctcaccccacaacagtccccagagtgtgatgttccccttcctgtgtccatgtgttctcattgttcaattaccacctgtgagtgagaatatgcggtgtttggttttttgttcttgcgatagtttactgagaatgatgatttccagtttcatccatgtccctacaaaggacgtgaactcatcattttttatggctgcatagtattccatggtgtatatgtgcatccatcaaaaagtgggcgaaggacatgaacagacacttctcaaaagaagacatttatgcagccaaaaaacacatgaaaaaatgctcaccatcactggccatcagagaaatgcaagtcaaaaccacaatgagataccatctcacaccagttagaatggcaatcattaaaaagtcaggaaacaacaggtgctggagaagatgtggagaaatagtttacttattttttaaggcaagcaaggtgggcctgattgttacatgaattaycaaatctaatgacaaagccaggtgccctggtactgaggctgtgtctcctctactccccatttcctcccctttccatcactattttctccaccctgcctatcctcatttctctttgctcctcctctttttccttctactctcttctatcctcccattcttttatttctcctctcttacatcccttccactccctttccttctcttcctttttttcttctctctgtctctctgcatgtgtctgaattaactcttgagtcagcatttaaatttggtaattgaatgttatgggtctttatgggcttcactttgggagaactgcttttcaaacagagaacctgataagtggtggac

SEQ ID NO: 717014 - DNA, 943 bp, Homo sapiens
tagtatttaagtgtgtcagaactttcttgctcttctaccttcctcctttttggttattgttgaaaatatatggggaaaaaatggcaaaagaaataggccctacatctgaattttaagttcctgttttttgagagaaagaaatattttgtttattttatttgttttttttttctttcccattagtaaaataattccaactaaggtaaagtttagtggaactaaacttttactgtgtgcaactctgactttcaagagtaaaaggaaagtaaatgtaataccccagtacacctaaaaccaggattaatgttttactttatcttgcaacagtactaaaattaaaagcaaaacaagacacattttagatatgatacagtgagcactagagaaaacctcttttattgatgggagcatattttaaaatatcttctcacctttagtctttgggttagtctcagtccctctgcatagggagcaaacaatacatgaagaactatttgggggaaattgctataaagaaacaataacttgctagggaaaaaaaaaacaattaactgtgaagcatgtatccctgaatctgaatcatggccataatacttattagwcccccaaatttgagcttccattgccttacttgtagaatggagaaaaaaaattcctcttgaggtgtcagtaaaagaagatgaatgtatccctcatgtttattctgatcagattatttttattttttgccttatggcatttacctttaacaattttgaatatctctgaaagaaagggagaaaggatggaaggtacgaaggagggtgaaaaggaaggaaggaaggaaaggtctttgttttccttacctggcacagctaaatattggcaaatcacaatagatagcaaaaatctaaaatacctaggagtacatttaacaagaatttatatttttaaactataaaaa

SEQ ID NO: 717015 - DNA, 1556 bp, Homo sapiens
ttatatatttggaaatgtaataaaatgtgtccatgagaattacaagtagttataaccaaaaacccaagtaactgtggcttggacaaattaggtgtcttaatttttgacatgtaataagaagttggaaggtaggcaatccagacctcatacaatgactccatgtggtaatcacaaactgagctcattctacctgtctccttagctgtcctgactatataggctttcatcctcatatttgtcacttcatgttcactgaatggcttctccaccttaaggcaggaaataaaagaaaacaggaaggtgaaagcaaaaaatgtatatgtgggctaagtttgtatcttttaaaagaagagacccagaagtctcttctagtaaattatggttatatatctttatccataaatgtgtctatcccagttgcaaggacaactggttaatatgatttgttttgtaattgtttttgtttctctaatctgggcatatttgcaactttagcattagagttattttactatggggagaagggcaatattaattccagaaaggtggctagcagtgcctgccacacaaatgaaggtagcgttaatgtctagactctacctaaaatttttgcaaattgataactgaggaaaacaacccaatagaaaaattggtgataaatatgaataaacaattcacagaagaaaaaattcagattatccttaaaccaatgaaaagatgcccaacctccttcatcgtcagacaatttcaaatttaagtaacaatgagatgttttgtattcatatgattggcatgaatttaaaagtgtggtaactcctattgccgtttgagatgtagaaaaattttaaattgttacagctttttttwaaaaaagattaacttttgaatggcagtttctattgaaagttttatatatatatatatatacacacacatatatatgctttgatcagaaatcctaattatgagactctcatagaaataaaaataccagtatctagctatacatacccaatattgcatcatattttgcggtggtttaaaaaaaaaaaaagaggaaagattaagtaaatgttcactaatagaaaaatggaattaagtaaattatagtaaatccctatcagggactattatgcagtcattttgcagaatggacttgatctgtcttcatctaaagcagatgacttagaaatatttccacaatgtattgttaagtgaggaaatgagatagtaatggagaaagataagaatgatgcaggttattaatctgggtggccagcgcttggagagaggaaggggagcaataggggaatatggaatggggaaagcaaaagaaatcaaattttagatatgtacacaagtaaaataacttagaattcagatttcctttttttttttttttttctgaggcggagtctctctctgttgcccaggctggagtgcagtggtgccatctcggctcactgcaagctccgtctcccgggttcacgccattctcctgcctcagcctcccgagtagctgggactacaggcgcccaccaccatatgcggctaat

SEQ ID NO: 717016 - DNA, 1556 bp, Homo sapiens
ttatatatttggaaatgtaataaaatgtgtccatgagaattacaagtagttataaccaaaaacccaagtaactgtggcttggacaaattaggtgtcttaatttttgacatgtaataagaagttggaaggtaggcaatccagacctcatacaatgactccatgtggtaatcacaaactgagctcattctacctgtctccttagctgtcctgactatataggctttcatcctcatatttgtcacttcatgttcactgaatggcttctccaccttaaggcaggaaataaaagaaaacaggaaggtgaaagcaaaaaatgtatatgtgggctaagtttgtatcttttaaaagaagagacccagaagtctcttctagtaaattatggttatatatctttatccataaatgtgtctatcccagttgcaaggacaactggttaatatgatttgttttgtaattgtttttgtttctctaatctgggcatatttgcaactttagcattagagttattttactatggggagaagggcaatattaattccagaaaggtggctagcagtgcctgccacacaaatgaaggtagcgttaatgtctagactctacctaaaatttttgcaaattgataactgaggaaaacaacccaatagaaaaattggtgataaatatgaataaacaattcacagaagaaaaaattcagattatccttaaaccaatgaaaagatgcccaacctccttcatcgtcagacaatttcaaatttaagtaacaatgagatgttttgtattcatatgattggcatgaatttaaaagtgtggtaactcctattgccgtttgagatgtagaaaaattttaaattgttacagcttttttttaaaaaagattaacttttgaatggcagtttctattgaaagttttatatatatatatatatacacacacatatatatgctttgatcagaaatcctaattatgagactctcatagaaataaaaataccagtatctarctatacatacccaatattgcatcatattttgcggtggtttaaaaaaaaaaaaagaggaaagattaagtaaatgttcactaatagaaaaatggaattaagtaaattatagtaaatccctatcagggactattatgcagtcattttgcagaatggacttgatctgtcttcatctaaagcagatgacttagaaatatttccacaatgtattgttaagtgaggaaatgagatagtaatggagaaagataagaatgatgcaggttattaatctgggtggccagcgcttggagagaggaaggggagcaataggggaatatggaatggggaaagcaaaagaaatcaaattttagatatgtacacaagtaaaataacttagaattcagatttcctttttttttttttttttctgaggcggagtctctctctgttgcccaggctggagtgcagtggtgccatctcggctcactgcaagctccgtctcccgggttcacgccattctcctgcctcagcctcccgagtagctgggactacaggcgcccaccaccatatgcggctaat

SEQ ID NO: 717017 - DNA, 1316 bp, Homo sapiens
tgcatgccaggttaagaagttggagataatttggtagcatttgagctgcaatagatcgtgtcagagagaactatgccatgaccagatgtatgacttagataaccctgacagccatggggtggacaaatggctagggttgagactgcagccaaactcttcacaatttcaggagagaaatgatgaggaatgagattgaagaagtggccatggaggtggggaaaagagagcaaattccagaaaaatattgtggatttgctcagtggaacttggcactggatgaaatatacagaataagtgcaagggaggaggcagaagattaacttggatagatgggttgataactgtagccataactaagggaaatatattaagctcctcttctcaataaagattagatttaattacgaaaatatcatctatttatttgccatcttgttttacaataatatatcttgtatcttcatataaaagcagttacggcagccctctgcactgtattttcatagggttctgtttttatcttacttaactgtaaggtccttgagggcaaaaacagtcaagcctttctcattcatcctttgcaaacccagcaccctgattcccaacagggtagaactcagcacatatttgatgaattagattgaatttaaatctatatatagttataggaataaatgcttggaggattttcctatctctgtttcaattctttgttttagctcagtctttttatgttggctcctgtaagctttttgcagtgctgcaaacacttctagctgacaagagagaaaaagaaagtcagtgaaaaggaggagggggcattgcagcatctagattgaactctccaggcttgcctgtctcataattttcacctttggtggggaactgtcccagatttcatccaccaggctaaggttctgacatggtaccttcttaaatcaagcttgaagggaaattgattgaaaagaaaacaccattatgggaaaacaattcattttcttccccatgacagaaggtagacttttgtctatrctgcagaataaatatgatctggctgattgctttaagatctggaagctcagaggagtcataatggctttgctcactctttagagggaaattaccttccattttggagacatttgatacaaaggttttggttagctttcaaaaagtaatattttttctccctgtgtgattatttatattagctagatataggtgcatgaaaacttgcaaatatttctgtgtgcagttgtgtgtttctactgaagtaccctccagacagggagtaagcagattttttttaaaacttt

SEQ ID NO: 717018 - DNA, 1316 bp, Homo sapiens
tgcatgccaggttaagaagttggagataatttggtagcatttgagctgcaatagatcgtgtcagagagaactatgccatgaccagatgtatgacttagataaccctgacagccatggggtggacaaatggctagggttgagactgcagccaaactcttcacaatttcaggagagaaatgatgaggaatgagattgaagaagtggccatggaggtggggaaaagagagcaaattccagaaaaatattgtggatttgctcagtggaacttggcactggatgaaatatacagaataagtgcaagggaggaggcagaagattaacttggatagatgggttgataactgtagccataactaagggaaatatattaagctcctcttctcaataaagattagatttaattacgaaaatatcatctatttatttgccatcttgttttacaataatatatcttgtatcttcatataaaagcagttacggcagccctctgcactgtattttcatagggttctgtttttatcttacttaactgtaaggtccttgagggcaaaaacagtcaagcctttctcattcatcctttgcaaacccagcaccctgattcccaacagggtagaactcagcacatatttgatgaattagattgaatttaaatctatatatagttataggaataaatgcttggaggattttcctatctctgtttcaattctttgttttagctcagtctttttatgttggctcctgtaagctttttgcagtgctgcaaacacttctagctgacaagagagaaaaagaaagtcagtgaaaaggaggagggggcattgcagcatctagattgaactctccaggcttgcctgtctcataattttcacctttggtggggaactgtcccagatttcatccaccaggctaaggttctgacatggtaccttcttaaatcaagcttgaagggaaattgattgaaaagaaaacaccattatgggaaaacaattcattttcttccccatgacagaaggtagacttttgtctatactgcagaataaatatgatctggctgattgctttaagatctggaagctcagaggagtcataatggctttgctcactctttagagggaaattaccttccattttggagacatttgatacaaaggttttggttagctttcaaaaagtaatattttttctccctgtgtgattatttatattagctagatatagrtgcatgaaaacttgcaaatatttctgtgtgcagttgtgtgtttctactgaagtaccctccagacagggagtaagcagattttttttaaaacttt

SEQ ID NO: 717019 - DNA, 2485 bp, Homo sapiens
tctttcactccctacttttcaaagcactattaaatcatctaatccttatagtttagaatgtctgaattatgaaacagagaccaatgccacagtggaaagtacagtaaaacattaaattattactaagatacatttagaggcaatttattaaaaaggaaggaaaatctctgccagatgataatcaataaattgaacaaatcaatagcaaattgaaataaatgacagaatcaaatgttaggatttatctaatcataaaagaaaccagtacataaagttacctatacaacctggtttgacatgggcagttatagctaattcctgctgttcaggcttagccttttcctgaattttttattttctttgaactaaatatagttgttaatggttgcatatgccaggatggggttggtagactctcacttgctactgcctgcctttgccatattctcttcttgtattgtattagaaacacatgcaaagcacagagttctcactttaacatgtagttaactatggaagattactaattacacatctctttttttccttttgttagatttttttcagtctgaactcccacctgtctttccacctcagcattcaggatagttgttgatataaggaaagtacttggatacttgtagtcaaggacatacctcatgctgagaggggggccatggtggtgctgaaggctgccagatgcatgaagccaccagaatgcgtcagtgggatcagcgggaggtaaaagttctatttttgtgaatgtgaaatctgtgtgggtaataaataataaggagctgtaccatagagtttaaagagagtttatagaaagaagttcaaatattttttcttctgtagtttgcagtataattcaatgatataattagctgctatttatgttactatttgaaaatactttttatgttgcaatagtactttgcagcaatccgatttttaaaagtccatgtttaatttaaaaaagtattttatttcccttttcaaaaaatgttgatagaatcactaaaggctatgtgatattacttcttatgaagacaaccactgcaagtctgctaaacaagttctaggaactagttaaaatgttacagctagtttaattcaaatgtgctcacaatgatttatcatacagagctccagaagggcacttacatatcattttgtgaagtatgtgttttcaattaaatcatatgacttcttctaagccaacttttattcttttgaattctaagatttttttctgtatgtatgaaaaatgaaatgtaagtattgagcctttagaataaaagtagcacaagaagataaaaataatttgaaaatagcacattctgaaatgtaaaatataaattttaaattttataaaaatttaataatggtttgaaaattttttctctagttcttggaatcaaagaaaagctactggaatttaatctgacttttagcatcattgtacatgttatcataaactcaattaaaactcactattaaagataaaaggaatggttttgtaattaaaagtgyaagttttggtaaagcagataatcataagagcaacatttttactaaataagttataaagtggaattggaatgtattgaaattgtagtgcataaataattcataattgatttcaaacaatctaatatttttctaatgcaagataaggtgtgcctttaataattttcaaatatttgtatatatacacagctagagttttgaactacaatgtttttgtaaagaagctgatagctaatgttgaaaatatgtatatacatacatattgttgaatatatgtatatgcatacatatataatatgtgtgtgtgtgtgttgaatatatatttagcctagcaggatgtgctttctttgctgtgatcaatcagattttagaggtatttcatcttctgaagaactattttgtaaatcaacctaagtgtcctataaaggtatttatttttcttttttaaaaaatatgtataaatttaaagactgtaagtagaattgcttaatttgatgtctggactttcagcatcaccatcactcaaataatttacattgtatccactaagtaatacctcatcatccacctttctcccgccccctaacccttctgagtcaccattgtctatcatttcacactctatattcatgtgtacacattatgtagctcccagttataactgagaacatacagtgttcctcttatcatttctgagttgttttctttaagataatggcctccacttccatccatgtggctgcaaaaggcacgatgtcattcattttatggttaagtggcattccattgtgtatgtatatcacattttctatatctaatcatcctttgagggacgcaggtttatttcatatctttactattgtgaagagtactgaaataaacatgagtgcatgtatctttttgatatagtcatttattttcctctgggtagatactaattagtgagattgct

SEQ ID NO: 717020 - DNA, 662 bp, Homo sapiens
attcgagaatggcctaatagtgtgtgtgtgtgtaactacagtatatatacagtatatatatatatatagtatgtatatatacagtatatatatatagtatgtatatatacagtatatatatagtatgtatatatacactatatagtatgtatatatacacaatatatatactgtatatatagtgtrtatatagtatactcatacacacaatatatactgtatatatacacacacactgagcatatattcatccacacatccagtcctctcagccatggctctaccctgaatttatacactatgtatgtgtatatatacggtatatacattgtgtatgtatatatacatactatatatgtaatctgatatatgtgtaactactgattatataattcataatatttaaattcccttatgcaattttttactctgctattatcctaaatttataatcattccataatgaagcaaataagcctatgcctcattcctggggtgtttagaccctgtttagatcctgacagatgcaatgtcttcaattaagttcttttacacactgaagggatagttcaggaggatcattaatactgataccatctaagcagaaaatagtcacagataattaactaaacttaatcgtactttagtatggataccttctt

SEQ ID NO: 717021 - DNA, 2299 bp, Homo sapiens
aaaaggaggaggtagggggaagggaacactctcttgtcttctgagaagttcagtctatggggcaaatcacacacaaatacaccaattacaatacaacctacaagcgactgacaaggaaaggctttccctggttgcgatcctccagagtcctggttgaccgctagctttggagcatagaatggataattcaatgtctaagcctaagtatcctgattcacacttcctccttggtcttcaagccacctttagctgctactcctctatctgatgacccaacgccatgctttgtgaaaatagaagctaccagacaacagctcctttaccatccttcctttagtggaagcaatgtcctcatgcctttcagggctaatttttcacctgatctgcaatgatgccctcctttaacacccctctctcccagatcattttcatcagcatacaaacagggccaactacctgatattaaaaacaacataaaatttaaatccctgtcttttcttcacatcaccttcaattacatccaaaaatccctaccatccttctcagcaaaacattactcatctctctgaacaccagagtatttttttctttaaaagggggctaatattaatagttgtcccatgtggttattaaaaagtagacatggatccatgaattcatgtaaaacatatagaaagagcctggcccgagatgagctttcactatatgttagtgcttattactctccaatgccttgcgtactcatggccccgcctcctcactttattactctctctcccctccaggctgtcctcccttcctaatatgtatctgaaactgcctttgtcaaggtcaccagtaaatgacctgatgctaaatcagataagtgcttcccctccccccccaactttctgctggacctctcccatcactcagcaatgctgactgcccctcccctttgaaacacctttctctcctgcattctgtgattccattgtctcttgaacttccttctcagttgtctttgctgcctccttttcttccaccagacagccaaataatggagtcttttattcattgtttctgccccttcctccaaaattatcctctgggccatccatatgctggcaacttcccccatctccagacgagatctctcatgaactccagtcctgcgtattcccctgtctgcttggcatctccactctaccatctcaagcactttaatccaatgccaaaaggagaactttgccgcctcctcacacctcaaatgattgtccctcagtcatccgtgtctgaaagatgagcttccaaccactccaactcagaatcagccttgattcctctgcccattaacaccacagtacaagtctcaccagctgccgcttgaaaacttgtctcaaactggtgtgtcctctccatctccatcccacctggaggaccacatgagcctcctaactggtctccctactccacctcacctttcctcaatgtattctccactcaaagctggaggatctttctaaaacaaaatctagatcatctttctcccctcctcaattcaattcaaagactttcaatrtctttacagtaaaaacaatgcctctgtccatggcctataaaacccccatgacctatctaaggcttgcctcccaagcactcctcttgccacccctttccttgctcaggacacccaaaccctctcacctctctccattcctccaacaggctggatccttgcatgtgctgctcctcctcctgggagctgttgcctcattcttcccatggctgtcagccgcttctttcctgttacgaatatcctgcccaaaatatctcctcctcaattaggtcttctctgattcacccagttaactatgttgtcaatatttgttttttttcttcttccctactaaaatagagcccccaatgtgcaggaacattatctgccttgagcattactgtgtcctgagtgactcacatagtgatggactcattcctcagcaaatctttgtccaagaattaacaaattgatacctttacccataagctgcaacattaatctctagttaccccagcacttcaggcctgttagaactactgcatagagaagagaatcatgcaagttgcacagtcagaaaacttggatgtaaattcaccttgcaacctttattaatcaaatgacattaagtaagttacttaacctctctcaggctcaattttatcatttgccaaatgagggtgagcatagcaatatagccgtcatggggctgctgggagaactacgcaagataatgtgtgtgtctgtgctttaaaaatcaca

SEQ ID NO: 717022 - DNA, 2299 bp, Homo sapiens
aaaaggaggaggtagggggaagggaacactctcttgtcttctgagaagttcagtctatggggcaaatcacacacaaatacaccaattacaatacaacctacaagcgactgacaaggaaaggctttccctggttgcgatcctccagagtcctggttgaccgctagctttggagcatagaatggataattcaatgtctaagcctaagtatcctgattcacacttcctccttggtcttcaagccacctttagctgctactcctctatctgatgacccaacgccatgctttgtgaaaatagaagctaccagacaacagctcctttaccatccttcctttagtggaagcaatgtcctcatgcctttcagggctaatttttcacctgatctgcaatgatgccctcctttaacacccctctctcccagatcattttcatcagcatacaaacagggccaactacctgatattaaaaacaacataaaatttaaatccctgtcttttcttcacatcaccttcaattacatccaaaaatccctaccatccttctcagcaaaacattactcatctctctgaacaccagagtatttttttctttaaaagggggctaatattaatagttgtcccatgtggttattaaaaagtagacatggatccatgaattcatgtaaaacatatagaaagagcctggcccgagatgagctttcactatatgttagtgcttattactctccaatgccttgcgtactcatggccccgcctcctcactttattactctctctcccctccaggctgtcctcccttcctaatatgtatctgaaactgcctttgtcaaggtcaccagtaaatgacctgatgctaaatcagataagtgcttcccctccccccccaactttctgctggacctctcccatcactcagcaatgctgactgcccctcccctttgaaacacctttctctcctgcattctgtgattccattgtctcttgaacttccttctcagttgtctttgctgcctccttttcttccaccagacagccaaataatggagtcttttattcattgtttctgccccttcctccaaaattatcctctgggccatccatatgctggcaacttcccccatctccagacgagatctctcatgaactccagtcctgcgtattcccctgtctgcttggcatctccactctaccatctcaagcactttaatccaatgccaaaaggagaactttgccgcctcctcacacctcaaatgattgtccctcagtcatccgtgtctgaaagatgagcttccaaccactccaactcagaatcagccttgattcctctgcccattaacaccacagtacaagtctcaccagctgccgcttgaaaacttgtctcaaactggtgtgtcctctccatctccatcccacctggaggaccacatgagcctcctaactggtctccctactccacctcacctttcctcaatgtattctccactcaaagctggaggatctttctaaaacaaaatctagatcatctttctcccctcctcaattcaattcaaagactttcaatgtctttacagtaaaaacaatgcctctgtccatggcctataaaacccccatgacctatctaaggcttgcctcccaagcactcctcttgccacccctttccttgctcaggacacccaaaccctctcacctctctccattcctccaacaggctggatccttgcatgtgctgctcctcctcctgggagctgttgcctcattcttcccatggctgtcagccgcttctttcctgttacgaayatcctgcccaaaatatctcctcctcaattaggtcttctctgattcacccagttaactatgttgtcaatatttgttttttttcttcttccctactaaaatagagcccccaatgtgcaggaacattatctgccttgagcattactgtgtcctgagtgactcacatagtgatggactcattcctcagcaaatctttgtccaagaattaacaaattgatacctttacccataagctgcaacattaatctctagttaccccagcacttcaggcctgttagaactactgcatagagaagagaatcatgcaagttgcacagtcagaaaacttggatgtaaattcaccttgcaacctttattaatcaaatgacattaagtaagttacttaacctctctcaggctcaattttatcatttgccaaatgagggtgagcatagcaatatagccgtcatggggctgctgggagaactacgcaagataatgtgtgtgtctgtgctttaaaaatcaca

SEQ ID NO: 717023 - DNA, 2299 bp, Homo sapiens
aaaaggaggaggtagggggaagggaacactctcttgtcttctgagaagttcagtctatggggcaaatcacacacaaatacaccaattacaatacaacctacaagcgactgacaaggaaaggctttccctggttgcgatcctccagagtcctggttgaccgctagctttggagcatagaatggataattcaatgtctaagcctaagtatcctgattcacacttcctccttggtcttcaagccacctttagctgctactcctctatctgatgacccaacgccatgctttgtgaaaatagaagctaccagacaacagctcctttaccatccttcctttagtggaagcaatgtcctcatgcctttcagggctaatttttcacctgatctgcaatgatgccctcctttaacacccctctctcccagatcattttcatcagcatacaaacagggccaactacctgatattaaaaacaacataaaatttaaatccctgtcttttcttcacatcaccttcaattacatccaaaaatccctaccatccttctcagcaaaacattactcatctctctgaacaccagagtatttttttctttaaaagggggctaatattaatagttgtcccatgtggttattaaaaagtagacatggatccatgaattcatgtaaaacatatagaaagagcctggcccgagatgagctttcactatatgttagtgcttattactctccaatgccttgcgtactcatggccccgcctcctcactttattactctctctcccctccaggctgtcctcccttcctaatatgtatctgaaactgcctttgtcaaggtcaccagtaaatgacctgatgctaaatcagataagtgcttcccctccccccccaactttctgctggacctctcccatcactcagcaatgctgactgcccctcccctttgaaacacctttctctcctgcattctgtgattccattgtctcttgaacttccttctcagttgtctttgctgcctccttttcttccaccagacagccaaataatggagtcttttattcattgtttctgccccttcctccaaaattatcctctgggccatccatatgctggcaacttcccccatctccagacgagatctctcatgaactccagtcctgcgtattcccctgtctgcttggcatctccactctaccatctcaagcactttaatccaatgccaaaaggagaactttgccgcctcctcacacctcaaatgattgtccctcagtcatccgtgtctgaaagatgagcttccaaccactccaactcagaatcagccttgattcctctgcccattaacaccacagtacaagtctcaccagctgccgcttgaaaacttgtctcaaactggtgtgtcctctccatctccatcccacctggaggaccacatgagcctcctaactggtctccctactccacctcacctttcctcaatgtattctccactcaaagctggaggatctttctaaaacaaaatctagatcatctttctcccctcctcaattcaattcaaagactttcaatgtctttacagtaaaaacaatgcctctgtccatggcctataaaacccccatgacctatctaaggcttgcctcccaagcactcctcttgccacccctttccttgctcaggacacccaaaccctctcacctctctccattcctccaacaggctggatccttgcatgtgctgctcctcctcctgggagctgttgcctcattcttcccatggctgtcagccgcttctttcctgttacgaatatcctgcccaaaatatctcctcctcaattaggtcttctctgattcacccagttaactatgttgtcaatatttgttttttttcttcttccctactaaaatagagcccccaatgtgcaggaacattatctgccttgagcattactgtgtcctgagtgactcacatagtgatggactcattcctcagcaaatctttgtccaagaattaacaaattgatacctttacccataagctgcaacattaatctctagttaccccagcacttcaggcctgttagaactactgcatagagaagagaatcatgcaagttgcacagtcagaaaacttggatgtaaattcaccttgcaacctttattaatcaaatgacattaagtaagttacttaacctctctcaggctcaattttatcatttgccaaatgagggtgagcatagcaatatagccgtcayggggctgctgggagaactacgcaagataatgtgtgtgtctgtgctttaaaaatcaca

SEQ ID NO: 717024 - DNA, 1385 bp, Homo sapiens
tattctaatatataaatttcagctagcataaaagtttgcagttgatgctttaatcctatgcctaggaatttaaaatgatatttattattattaatgattaagtaagtatatttcctggaaatgacagtataatacatacaaatgttatatgaatatgaacactggtttatgaactaacaaaatcactttcttctctatcgaatcatttttatccatcaaaatatcagaatataaatggagtattatttaaggaaccatatttttaatagacagtttatatgtaggatcagaaatatctgaatttagaatatcattaaaactccttttgaaaaacataaaaggaaaaaaattacattttagacaagcatactagaaataagcagcaaatttgcacaacagcaaatcctaattaaaagctttaatttaatatgtaatttctacctcacctaggaattcagaggagatatatcaattccaaagctactttcaagacttatcatctttttatgttttttacgttttatctctttcaagtagataaaaagcaagacttgaaaaagagctgcataataaaaatctacaaatatttctgaagtgacaaaacagccaataataaattattttaaaattcactttaattcctctatttccaaagtatgtgaatactaaatgtatctaagtgtaagaaaaatatcttctaacataactataaatttattcttaccctccttattatcaccattctagcacacaatgcatttttctacctccaaatgttttaccactttttaataatctcaagttattagtagacttctcaagttgccatgagagtaacgacttaaagtctattatctatctactttgtatgaactgaagtcaattcaaaggtcaaactttactgtatcttgagattcttttaggattccttttctgagaaaatttcataaaccatcaattgcatttgtgttataactacgaccattaaaaaagtcttaatttgaaaaraaaagtcattcatttatgtaaatcttctccttatttatatatattaatgtctgtctcaactaccccaaactgggtttcaagagatggatttcctaaaactcagacttttggatctggaaaagacattagagatcatctacttcaaccccttcattttatggttgaggacactgagcccagaaaagatagctgagtgactttgggcaagtttcctaccaagtagcagagccagaaccagaggccaggtctcctgacgcccagttaggagccaggtctcctgatttttaatccaaggatctttccattacacacactgactctctattctttgaggctgtcttgggctgctcacactgatcaagctgccttgtaaatga

SEQ ID NO: 717025 - DNA, 1385 bp, Homo sapiens
tattctaatatataaatttcagctagcataaaagtttgcagttgatgctttaatcctatgcctaggaatttaaaatgatatttattattattaatgattaagtaagtatatttcctggaaatgacagtataatacatacaaatgttatatgaatatgaacactggtttatgaactaacaaaatcactttcttctctatcgaatcatttttatccatcaaaatatcagaatataaatggagtattatttaaggaaccatatttttaatagacagtttatatgtaggatcagaaatatctgaatttagaatatcattaaaactccttttgaaaaacataaaaggaaaaaaattacattttagacaagcatactagaaataagcagcaaatttgcacaacagcaaatcctaattaaaagctttaatttaatatgtaatttctacctcacctaggaattcagaggagatatatcaattccaaagctactttcaagacttatcatctttttatgttttttacgttttatctctttcaagtagataaaaagcaagacttgaaaaagagctgcataataaaaatctacaaatatttctgaagtgacaaaacagccaataataaattattttaaaattcactttaattcctctatttccaaagtatgtgaatactaaatgtatctaagtgtaagaaaaatatcttctaacataactataaatttattcttaccctccttattatcaccattctagcacacaatgcatttttctacctccaaatgttttaccactttttaataatctcaagttattagtagacttctcaagttgccatgagagtaacgacttaaagtctattatctatctactttgtatgaactgaagtcaattcaaaggtcaaactttactgtatcttgagattcttttaggattccttttctgagaaaatttcataaaccatcaattgcatttgtgttataactacgaccattaaaaaagtcttaatttgaaaaaaaaagtcattcatttatgtaaatcttctccttatttatatataytaatgtctgtctcaactaccccaaactgggtttcaagagatggatttcctaaaactcagacttttggatctggaaaagacattagagatcatctacttcaaccccttcattttatggttgaggacactgagcccagaaaagatagctgagtgactttgggcaagtttcctaccaagtagcagagccagaaccagaggccaggtctcctgacgcccagttaggagccaggtctcctgatttttaatccaaggatctttccattacacacactgactctctattctttgaggctgtcttgggctgctcacactgatcaagctgccttgtaaatga

SEQ ID NO: 717026 - DNA, 624 bp, Homo sapiens
tccattatgattttataagtaactccatagcctcactttcaaaaaggaagaaaaagaaaacccttgacaattaacatttagttctttctgaaaaagtagctttaatttttttctgatcttttttacattatgacttcctaaaattgtgctccaagtataagacccagtacctgcatagactgcataagacctagtacctgactcagctaagttatgaggctgctggaacctggaaagatagctttattatcattattattattattatatattatatctttaatatatcacatatttcttacacattcatctgttgatgaacacttaggttgactctatatcaacctaagttggcttaggttggctattgtgaataatacttcaacaygggcatgtagatatctctttgatgtactgattttatttcctcatagtttataccgagtagtggggttgtgaatcatatggtagttccattttaatttttgagaaatcttcatactgattttcataatagctgtactaatttacatttctactgacagtgtgcaaggatatccttttctgtacatccttaccaacacttttgacctttagtctttttgacagtagccatttcaacag

SEQ ID NO: 717027 - DNA, 624 bp, Homo sapiens
tccattatgattttataagtaactccatagcctcactttcaaaaaggaagaaaaagaaaacccttgacaattaacatttagttctttctgaaaaagtagctttaatttttttctgatcttttttacattatgacttcctaaaattgtgctccaagtataagacccagtacctgcatagactgcataagacctagtacctgactcagctaagttatgaggctgctggaacctggaaagatagctttattatcattattattattattatatattatatctttaatatatcacatatttcttacacattcatctgttgatgaacacttaggttgactctatatcaacctaagttggcttaggttggctattgtgaataatacttcaacacgggcatgtagatatctctttgatgtactrattttatttcctcatagtttataccgagtagtggggttgtgaatcatatggtagttccattttaatttttgagaaatcttcatactgattttcataatagctgtactaatttacatttctactgacagtgtgcaaggatatccttttctgtacatccttaccaacacttttgacctttagtctttttgacagtagccatttcaacag

SEQ ID NO: 717028 - DNA, 1376 bp, Homo sapiens
ggaaagacaggcactaccaaggcttccgaggactgccaggcagctttgcacggcatcccaggtctcatttgcagggaaaaagcttgagaataaaaaaacaaaaatcaaaactgaactctggaaagatacatacacaattgtcaccagtggatgccttagaggaggttgacggagtgggtgggaggcggtgcagtcctttgagaggactttggctcttgttttgtgtgaacagggggacgtggggaggttttgagcagaggagtacactgtctgtcttgaattaacttttttctttttctttcttttttttcttttcttttcttttttttttcttttctttwtttttttttttccaagggagacagggtctctctctattgtccaggagtgcagtggtgtgatcatggctcactgcagcctcgaactcccgggctcaggtgatcctcccatctcagcctcccaagtagctgggactgcaggcgtgcaccaccatgcttgactagtttttgtattttttgtagggatgaggttttgccttgttgcccaggctggtctcgaagtcctgggctcaagtgatccgcctgccttggcctcccaaagtgctgggattacaggcgtgagccaccgcgcctggcctgatttgacttttaaaagaactactctggctgttgttggagaacagagtgagggggagaggggtggaagtgggaagaccattgccctaatgtaggagggggatggtggcacggaccaggcaattcccatggcagtggtggtgagaaggggtcagtttctgggtgtgtgtatatatgtatatgacagagtcttgctcagtcagccaggctgaagtgcagtggtgcgatcatggctcactgcagcctcgatctggggtatattttagggagtagagttgacaggcttttctgatgaatgggatgtggcatgtgaaagaaaaagggaaagaagtcggggatgactccaaggactttggcttgagcaactgcaagaatggagctgccatttgctgagaagacaaagatgtgaaatcctctcctttgcctggcctgtattccctcctgaatatacgggaatagaagccatggaaggaaaggagttgccttgggtgcctggcatcagtcctcccacattgtcaacaaaccatgtggaaggaatggaaaaaagggaaaaagaaaaggagagcaaatatttgcctaaagctatctgagcagctcttgggcttccaagggccaagtggtctctacagtttgggaaagtgggtcaaagaagtgttggggtcgtcacgagtgccatgattcctgtggattctcatcttggcgtttggggtctctagcctcatttttaaagttgtaaagctc

SEQ ID NO: 717029 - DNA, 1010 bp, Homo sapiens
tattgatcgttcctgagcagtgttatctccattctacacataacaaaactgagacacagagacgccaagactggtagaaccagaattcaaagctacgtctctgtctccaaaaactgtgccctttatacattatgctcaacttcttctcttaggcaatttaatttgaaatggatgagtagtttaagctcaaaatatgttgaaaagtgggcaaaatttaacctcctgaaaacggtgaggtttctgttctcttraagaggcccacatattattccttttcttcagcgttaatacaatcctaaacaggttaggccagtgatgctgccccccaaacctccaggaccatacaatgctgccaataaaggggctacaggtaatcccagcatgtttgcccccaaaactctgggcattaagaatggctgggaggggtcaacaatgggtttgagaacaaaataactcaaagttcagcaccataagatagggcagggaaaaaataaataaataaaagatggccaggcaaggtggctcatgcctataatcccagcactctgggaggctgaggcaggtagattgcttgagcccaggagttcaagaccagcctgggcaacatggcaaaacttggcctctatgaaaaattaaaaaaaaaaaaatagctcagcatcgtgccatgcgtctgtagtcccagctactccagaggattgcttgagcctggaaggcagaggttgcagtgagccgtgattgtaccactgcactccacagagtgagaccctgtctcaagaaaaaaaaaaagataactcaaggtttccttctcagctctgacatttgctctatgacatcaactaaatcacagttaaatttattgtcctatttcttagcccccgatttagcaaatggccttagctatacttgtgttatatgttgtgctagtcatctggaggattaaaaatcagtaattaatatacaaatattttaaaaactaaaaataattgtgtagatcttgaaatatgtataca

SEQ ID NO: 717030 - DNA, 1010 bp, Homo sapiens
tattgatcgttcctgagcagtgttatctccattctacacataacaaaactgagacacagagacgccaagactggtagaaccagaattcaaagctacgtctctgtctccaaaaactgtgccctttatacattatgctcaacttcttctcttaggcaatttaatttgaaatggatgagtagtttaagctcaaaatatgttgaaaagtgggcaaaatttaacctcctgaaaacggtgaggtttctgttctcttgaagaggcccacatattattccttttcttcagcgttaatacaatcctaaacaggttaggccagtgatgctgccccccaaacctccaggaccatacaatgctgccaataaaggggctacaggtaatcccagcatgtttgcccccaaaactctgggcattaagaatggctgggaggggtcaacaatgggtttgagaacaaaataactcaaagttcagcaccataagatagggcagggaaaaaataaataaataaaagatggccaggcaaggtggctcatgcctataatcccagcactytgggaggctgaggcaggtagattgcttgagcccaggagttcaagaccagcctgggcaacatggcaaaacttggcctctatgaaaaattaaaaaaaaaaaaatagctcagcatcgtgccatgcgtctgtagtcccagctactccagaggattgcttgagcctggaaggcagaggttgcagtgagccgtgattgtaccactgcactccacagagtgagaccctgtctcaagaaaaaaaaaaagataactcaaggtttccttctcagctctgacatttgctctatgacatcaactaaatcacagttaaatttattgtcctatttcttagcccccgatttagcaaatggccttagctatacttgtgttatatgttgtgctagtcatctggaggattaaaaatcagtaattaatatacaaatattttaaaaactaaaaataattgtgtagatcttgaaatatgtataca

SEQ ID NO: 717031 - DNA, 1010 bp, Homo sapiens
tattgatcgttcctgagcagtgttatctccattctacacataacaaaactgagacacagagacgccaagactggtagaaccagaattcaaagctacgtctctgtctccaaaaactgtgccctttatacattatgctcaacttcttctcttaggcaatttaatttgaaatggatgagtagtttaagctcaaaatatgttgaaaagtgggcaaaatttaacctcctgaaaacggtgaggtttctgttctcttgaagaggcccacatattattccttttcttcagcgttaatacaatcctaaacaggttaggccagtgatgctgccccccaaacctccaggaccatacaatgctgccaataaaggggctacaggtaatcccagcatgtttgcccccaaaactctgggcattaagaatggctgggaggggtcaacaatgggtttgagaacaaaataactcaaagttcagcaccataagatagggcagggaaaaaataaataaataaaagatggccaggcaaggtggctcatgcctataatcccagcactctgggaggctgaggcaggtagattgcttgagcccaggagttcaagaccagcctgggcaacatggcaaaacttggcctctatgaaaaattaaaaaaaaaaaaatagctcagcatcgtgccatgcgtctgtagtcccagctactccagaggattgcttgagcctggaaggcagaggttgcagtgagccgtgattgtaccactgcactccacagagtgagaccctgtctcaagaaaaaaaaaaagataactcaaggtttycttctcagctctgacatttgctctatgacatcaactaaatcacagttaaatttattgtcctatttcttagcccccgatttagcaaatggccttagctatacttgtgttatatgttgtgctagtcatctggaggattaaaaatcagtaattaatatacaaatattttaaaaactaaaaataattgtgtagatcttgaaatatgtataca

SEQ ID NO: 717032 - DNA, 637 bp, Homo sapiens
cgtgtttaagcaacatgcctagatgcttatgattgatgactgcggcacttcttgatgcttgtacctttccgattataaatactctgtctttgtccgtttcatgatctggccttgaattctgttttgtagatgcatttcttttcttttggttaccatgtggctggcatgttctttttatccttccatttttcatcctctctgtcattttgctttatatgtgtctttgaaagaaggcaggcaaatggattttgtatttagtatctrcttttaatagatggatttaatccatttgcatttattgtgatgagtcatagatttatttcagccatcttatttcatgcctactttttattatatttgcttatttttgttaagtttatttttgccttttgttggattggtttcatttactttgtcctgtttttcctctgttgcttaggaagtttgaggtgttgcttaggaagtttgaggttttacttccgttcttctattggttatgctatatatgtatgtgtgtgtatactcgtatttttctatcagcatctagatgtaatcaggatcattagcctcttgacaaatgaggcgagaactttagtacttattttttcctggctcctaccctcacacattggatcat

SEQ ID NO: 717033 - DNA, 1133 bp, Homo sapiens
cccaagctcagttacattttaaagctcccgagagtttagaactattgatctagtcttgatttcgtatcaatttctctgatggtatcttgcttgacatcttacttactgggctgcatttttgtgctgtgtctccctgacacccaagtgaaaactgctggatgaaccgaaaattcacccaaacaacgtgaatgtaatggaaactcttgaaaaggcttacaagccttgaagtaaatgttgggcgaagggagcgaaagggttagcgtttttttgcattgggacctgccttctttttatgcttctaggaacgtttaaaaatgagagcaaggaatatatttcattgctttaattgttcaaggtcttttaaaagcgtgtgcaataaaatgccttttaagataactgacctttgtattttaatgctttttggaagggaacaatacctagtgttcagctgcagtataactttatatatatatatatatatatatatatatacagtcagcagagcttgttttggaatcagagggctgagggttttgctgccttcccagatattttacctgtttctgtttcaacatcaagttccattcagttgatgtttcttgacctcataatgtctaacctttatatctttgttttttccctttccaaacttatccaagaaggagacttcaaggcctgattcattaatttttccttctgctgggaactcaggtgtgtggtggaaggcagcacatgtgacctaatctatattttgacaargaagaaagctccctgccctcccttgcaccagttcgtttggtaatttttaatcccaaaagccactgctaatacgtttttaaaaattgatgctagctattacgttgttagataaagctcatcttccaactctaaacttgctctttctaaaagtgaaataacactcaggttgcaaacatagtgaactggaatttcagaggcttgaactgacctacaaaacttgtaactgtagctctagttatacatccactgtggtcttggacatgtgaggtgtttgtctaccctcaggagttttagaagaagaaattttatggaattgctttccatattaagaaattaaaatagccaggtgctattttaattttacagattcacaa

SEQ ID NO: 717034 - DNA, 1133 bp, Homo sapiens
cccaagctcagttacattttaaagctcccgagagtttagaactattgatctagtcttgatttcgtatcaatttctctgatggtatcttgcttgacatcttacttactgggctgcatttttgtgctgtgtctccctgacacccaagtgaaaactgctggatgaaccgaaaattcacccaaacaacgtgaatgtaatggaaactcttgaaaaggcttacaagccttgaagtaaatgttgggcgaagggagcgaaagggttagcgtttttttgcattgggacctgccttctttttatgcttctaggaacgtttaaaaatgagagcaaggaatatatttcattgctttaattgttcaaggtcttttaaaagcgtgtgcaataaaatgccttttaagataactgacctttgtattttaatgctttttggaagggaacaatacctagtgttcagctgcagtataactttatatatatatatatatatatatatatatacagtcagcagagcttgttttggaatcagagggctgagggttttgctgccttcccagatattttacctgtttctgtttcaacatcaagttccattcagttgatgtttcttgacctcataatgtctaacctttatatctttgttttttccctttccaaacttatccaagaaggagacttcaaggcctgattcattaatttttccttctgctgggaactcaggtgtgtggtggaaggcagcacatgtgacctaatctatattttgacaaagaagaaagctccctgccctcccttgcaccagttcgtttggtaatttttaatcccaaaagccactgctaatacgtttttaaaaattgatgctagctattacgttgttagataaagctcatcttccaactctaaacttgctctttctaaaagtgaaatarcactcaggttgcaaacatagtgaactggaatttcagaggcttgaactgacctacaaaacttgtaactgtagctctagttatacatccactgtggtcttggacatgtgaggtgtttgtctaccctcaggagttttagaagaagaaattttatggaattgctttccatattaagaaattaaaatagccaggtgctattttaattttacagattcacaa

SEQ ID NO: 717035 - DNA, 1256 bp, Homo sapiens
gaaaaaatatatatgaaaagtattgtgcctgatgtatcatattaaagaaagtatttttaaatgcatacttttttggaaattatttgccaaatgctggcccaaagggatataaattttgtttctacgtaacctgtagaatcgtcaagaattgttcccgttttggggcaatctttttctctcctggttaaatggggctgttgatcattttctctacgtaagggaatttattgattaagtttaattaatttgatatagactgtcatgtagtgatgtagtgctatactgtagtcggaagtttttcttaaaagcaaagagcaaaaatgcaaagttttatttgtaaaagctgaggacccttggggatggattaggtttgccgatgatcctaaaagtaagcaaactgtatgacaagactactattgcaaatgaaggatatttatagctaaactgcgcagcacaaagaagttttatattgtgagttatagttggttcagaaaacagtttgtactctccctggcccaggaaggcacacagacaaaaatgtcggccacttttactcaaatacagcccaagcacagacagtcaggttcgtgatcatcaccaacatctgataaaatctcattgaaggcaatgccatcacagctttgctcaattactacgaggaagagacaacaagcatctttcgtgttgtctcgtctgattggaggctgaatagtagatggaatggggggacagtgtgcctggtgtgaggaagacgtaagatccccaatttggaaagcatgcccccctcccttttagtagaagcccatggttgccctttgccaaactggggaggaggcaatgagccttggtggaaggaacctctctgttgatatttaaagaagtgagggctgtgggtattcattgttagaaatgccaatttcactttgaaaccatagtccaagtctctaggttggtagaagggaaaggaaggaagtggtcccagtgattctagrtctggttgggaaacttctgcctcatgactctgtcctttgagtcctttggacagcagcacaaaacataacaatttttatttttaaacagacccattctttttgatcccacaggagctgtggttgggtcggccgtagccccgggatgtggtttaagtggattactgcctagctgagccaaaatgtttgcttgtacctgttggaccactacagcaaaccgctgcttacagtgcattgtgtatttctgtagtactgttttgcattttc

SEQ ID NO: 717036 - DNA, 1196 bp, Homo sapiens
ttggcgatagaatctagttctaccctgggattatattacaggtaaaattgttcattttcattgacttggaacaatggttttatcttttattagatatatagcttcttgtcagttacaaataagagtgatatcaacaaaataagagcccctattcattaatcccgtaacatgttcccagcaaggtggcattacataaatatgtctcacttagttctaatagtgatcttttggagaaatattattatttccattttaaggatgaataactggattttgaggtatgaaacttacacaaattcctgtgactggaaagcaataaagtataagctctggcctgacagcaaagcccatgttcctgacctctattgtcaatctccagtgtccctaactccaaaatataggtcttcttaatgtgatcacctcacaaaatgattttgcccattattggtgcacgctgatattcttaggtagaaacgatagaatatgatctacaaggcttagttacattaaatttgaaaacaaataaggagataaaaaatttcagggaggataaagattagtctgcatgtgcccattgcagtgaattgtaacagttttattaaaagggcaatgtgtgggtgcatgtgtggggaacaacactcgggcacactggcggtgatcttgagaagcagggtgctgatgtgaatacatttgtttcaagtactgtctgtttttctgaatgmcaacattagtggtacattagtacattgatgaaactagtacatctactcctgagacattgtatttactagtagatgaatggtggtgaaggttggagagagaacctatgggctaaataatagagaattgaaggagaaaaagtcaaagcaaaatgttgggtaggcagactaaatgcattatcaccttctaagccatgagggaaaatccatgtaggagaaaatgggatggaaataaggaggagatggggcagatggttatgctgggaggcagagaactggagacaaagcctgcagtgattccccaacataagcagaacaccagttcaagcaataccttatgcatgtcctctggggtttgggtaggcttgtgccatgtgagttttgctaaaacaaaacaagagtcacctttgctccagttctcaacaagttcctcatcgccatctgagaccacctcagcctggaccttattgttcatat

SEQ ID NO: 717037 - DNA, 1196 bp, Homo sapiens
ttggcgatagaatctagttctaccctgggattatattacaggtaaaattgttcattttcattgacttggaacaatggttttatcttttattagatatatagcttcttgtcagttacaaataagagtgatatcaacaaaataagagcccctattcattaatcccgtaacatgttcccagcaaggtggcattacataaatatgtctcacttagttctaatagtgatcttttggagaaatattattatttccattttaaggatgaataactggattttgaggtatgaaacttacacaaattcctgtgactggaaagcaataaagtataagctctggcctgacagcaaagcccatgttcctgacctctattgtcaatctccagtgtccctaactccaaaatataggtcttcttaatgtgatcacctcacaaaatgattttgcccattattggtgcacgctgatattcttaggtagaaacgatagaatatgatctacaaggcttagttacattaaatttgaaaacaaataaggagataaaaaatttcagggaggataaagattagtctgcatgtgcccattgcagtgaattgtaacagttttattaaaagggcaatgtgtgggtgcatgtgtggggaacaacactcgggcacactggcggtgatcttgagaagcagggtgctgatgtgaatacatttgtttcaagtactgtctgtttttctgaatgacaacattagtggtacattagtacattgatgaaactagtacatctactcctgagacattgtatttactagtagatgaatggtggtgaaggttggagagagaacctatgggctaaataatagagaattgaaggagaaaaagtcaaagcaaaatgttgggtaggcagactaaatgcattatcaccttctaagccatgagggaaaatccatgtaggagaaaatgggatggaaataaggaggagatggggcagatggttatgctgggagrcagagaactggagacaaagcctgcagtgattccccaacataagcagaacaccagttcaagcaataccttatgcatgtcctctggggtttgggtaggcttgtgccatgtgagttttgctaaaacaaaacaagagtcacctttgctccagttctcaacaagttcctcatcgccatctgagaccacctcagcctggaccttattgttcatat

SEQ ID NO: 717038 - DNA, 1196 bp, Homo sapiens
ttggcgatagaatctagttctaccctgggattatattacaggtaaaattgttcattttcattgacttggaacaatggttttatcttttattagatatatagcttcttgtcagttacaaataagagtgatatcaacaaaataagagcccctattcattaatcccgtaacatgttcccagcaaggtggcattacataaatatgtctcacttagttctaatagtgatcttttggagaaatattattatttccattttaaggatgaataactggattttgaggtatgaaacttacacaaattcctgtgactggaaagcaataaagtataagctctggcctgacagcaaagcccatgttcctgacctctattgtcaatctccagtgtccctaactccaaaatataggtcttcttaatgtgatcacctcacaaaatgattttgcccattattggtgcacgctgatattcttaggtagaaacgatagaatatgatctacaaggcttagttacattaaatttgaaaacaaataaggagataaaaaatttcagggaggataaagattagtctgcatgtgcccattgcagtgaattgtaacagttttattaaaagggcaatgtgtgggtgcatgtgtggggaacaacactcgggcacactggcggtgatcttgagaagcagggtgctgatgtgaatacatttgtttcaagtactgtctgtttttctgaatgacaacattagtggtacattagtacattgatgaaactagtacatctactcctgagacattgtatttactagtagatgaatggtggtgaaggttggagagagaacctatgggctaaataatagagaattgaaggagaaaaagtcaaagcaaaatgttgggtaggcagactaaatgcattatcaccttctaagccatgagggaaaatccatgtaggagaaaatgggatggaaataaggaggagatggggcagatggttatgctgggaggcagagaactggagacaaagcctgcagtgattccccaacataagcagaacaccagttcaagcaataccttatgcatgtcctctggggtttgggtaggcttgtgccrtgtgagttttgctaaaacaaaacaagagtcacctttgctccagttctcaacaagttcctcatcgccatctgagaccacctcagcctggaccttattgttcatat

SEQ ID NO: 717039 - DNA, 1196 bp, Homo sapiens
ttggcgatagaatctagttctaccctgggattatattacaggtaaaattgttcattttcattgacttggaacaatggttttatcttttattagatatatagcttcttgtcagttacaaataagagtgatatcaacaaaataagagcccctattcattaatcccgtaacatgttcccagcaaggtggcattacataaatatgtctcacttagttctaatagtgatcttttggagaaatattattatttccattttaaggatgaataactggattttgaggtatgaaacttacacaaattcctgtgactggaaagcaataaagtataagctctggcctgacagcaaagcccatgttcctgacctctattgtcaatctccagtgtccctaactccaaaatataggtcttcttaatgtgatcacctcacaaaatgattttgcccattattggtgcacgctgatattcttaggtagaaacgatagaatatgatctacaaggcttagttacattaaatttgaaaacaaataaggagataaaaaatttcagggaggataaagattagtctgcatgtgcccattgcagtgaattgtaacagttttattaaaagggcaatgtgtgggtgcatgtgtggggaacaacactcgggcacactggcggtgatcttgagaagcagggtgctgatgtgaatacatttgtttcaagtactgtctgtttttctgaatgacaacattagtggtacattagtacattgatgaaactagtacatctactcctgagacattgtatttactagtagatgaatggtggtgaaggttggagagagaacctatgggctaaataatagagaattgaaggagaaaaagtcaaagcaaaatgttgggtaggcagactaaatgcattatcaccttctaagccatgagggaaaatccatgtaggagaaaatgggatggaaataaggaggagatggggcagatggttatgctgggaggcagagaactggagacaaagcctgcagtgattccccaacataagcagaacaccagttcaagcaataccttatgcatgtcctctggggtttgggtaggcttgtgccatgtgagttttgctaaaacaaaacaagagtcacctttgctccagttctcaacaagttcctcatcgccatctgagaccrcctcagcctggaccttattgttcatat

SEQ ID NO: 717040 - DNA, 635 bp, Homo sapiens
gagcctaggaaattctcccatgcttttagcattcatgagaaggaatccggggaaactaaaatggtactcacaaatttcaggcatatttaagatagattktcttcagttttgaaatccaataaaaatacatgatctttatttggccaacccaatttttgtcttttgtctaggacttttcaggttgtcagccatcaatgcagatactccacagtcaggtttcaggtatcagacatggagtgattgagcattttctacaagtggagtggggggtgtctcacaaggaaaatgaataaagagtaacctatcactaacacacctattacttaaaatgatgctttagactgacattctgtttctcccatttcttttgttgttgttagaaacagcttctaaggtagaaattatgtaggcggctacaactgcactctaaaacatctgccgagaagcatctctgtatgagggaaatcattacatgtgaaccaaaacaatagcaaatatgtgccaaaaacatcaaatatttatttgattctttcatcaaggaaagtgttaaataggaagtctgctttgcatttagatacagaacctcacccttagtgggcctttgctaagacaaaagaagaccaatttctggaata

SEQ ID NO: 717041 - DNA, 635 bp, Homo sapiens
gagcctaggaaattctcccatgcttttagcattcatgagaaggaatccggggaaactaaaatggtactcacaaatttcaggcatatttaagatagattgtcttcagttttgaaatccaataaaaatacatgatctttatttggccaacccaatttttgtcttttgtctaggacttttcaggttgtcagccatcaatgcagatactccacagtcaggtttcaggtatcagacatggagtgattgagcattttctacaagtggagtggggggtgtctcacaaggaaaatgaataaakagtaacctatcactaacacacctattacttaaaatgatgctttagactgacattctgtttctcccatttcttttgttgttgttagaaacagcttctaaggtagaaattatgtaggcggctacaactgcactctaaaacatctgccgagaagcatctctgtatgagggaaatcattacatgtgaaccaaaacaatagcaaatatgtgccaaaaacatcaaatatttatttgattctttcatcaaggaaagtgttaaataggaagtctgctttgcatttagatacagaacctcacccttagtgggcctttgctaagacaaaagaagaccaatttctggaata

SEQ ID NO: 717042 - DNA, 585 bp, Homo sapiens
tgctagaaagacaaaaaccccacaacagacacattgccawagataaaagatccaccttgagggctttcatgttacaaaaatgaaatggagaaagataattcagattttaatgtagctcatattctacaatctatacaaatttccttatgttactttttaggattaggtttggctataagtgacagattatccaaattaatggtggcttaaacacagtaggatttcttgtctcttataaaatatgagtccagatctcaaaatttagaggcaataaatgcagggctgcaacggctcatcacaatgccacaggcccaggatctttcaatgttgttgctccacaattctcagcacacagtcacccctgctgccaaactctaagatggcctcctgacatccagccatcacacccgtattcagggggcagaatagaggaaacaataaagaagaacacgccctttctctggaagggcacttcccagacatctcatgtgatattttagtttatgcctttattggccagaacttaggttcacaggtacttttaaaccattatactcagaaaagaaactgagaattattttatca

SEQ ID NO: 717043 - DNA, 777 bp, Homo sapiens
tcacaagcaatttgtctgtcttctagatttacacagttccctattttcagatataaattgataatgatggagcagggagaaatttacttagaaaggcaaatattcatcagccaagaacatatcacatctaaaatatgtagttactttcaatggttctgtgaagttcctttattcccagaagtttcccattttgtatgccttaggagtaagtttgtggaaagaaacactaacttaatgatgctgacaaaaagatgctataaaatgttttatgaacatctttaaattaaaaaaatcacttgtccttaggtttcttttttttttcttttttttttttttggtttcaaatcctttattattctgattccctcaaccaaaacaaactagaacaattaacaaataatgaatgagaaatttgaagatctggattttagacctgaatagtcactaaatatatgacaataataatacacaatcttttaatttaacctaacagctctaataatgaggtgaatgtcattatacctctatggatgagcaaaaaaaggttcaatggtgttttagtggtttgtccaagatcacaaagctaatattatcatggcaggtagtagcaggtatttttcataccagttcagagattattttgtctatctaagaattacatgcattcaagttcattcttttctakgtaaattttctcttgaaatggaatttgaaaaaattgtcaactttcatttttaatggaccaaacatatatcttggtttatgtgattaattcaa

SEQ ID NO: 717044 - DNA, 607 bp, Homo sapiens
tggagctatgcctaaaatatagctacaccagagccctggaaactgtagtcaagtaacaggcctcactgttttttttctttggattaaaagtgtatatctctctactgaggggtttccagctttacacttctataggttgttctgacagtgagaacacattatgtacatgttttctattcatgtccagggcatgagaatcttaatattcttatacttccctttttgcatgcagtatgtctggaatatgtttataaaattttagcaaggggtgagatcaagggacaaagagtagagtggttatttaaagacaatcagatatgaacttaaaagctgccctgcatagccgatcctttcctatcatgaagagtaccttcatattttctagagattgtctctgaaccgttgctacatagccataaatttctgtaaatcatgttggctatcagttcttgctattctcagagcactctatcatgtttttaggtgtatattgtgtattcaggatagcattaaaaagaactgatggcaaatgtattgactcacagtggaaacattcrtttggatgaagaattagtggtttagcctttgaaatgaataccttgaatca

SEQ ID NO: 717045 - DNA, 591 bp, Homo sapiens
atgcttatctctcattctagaggcatcctaggtgccaatttccaagatggacatttttccaagcagaaagggttttgttttcttttaaaaattcatggccgggcgtggtggctcacacctgtaatcccagcactttgggaggccaaggtgggtggatcgcctgaggtcaggagtttgagaccagcctggccaacatagtgaaaccccatctctactaaaaaaaatacaaaaattagctgggcgtggtggygagcacctgtaatcccagctactcgggaagctgaggcaggagaatcgcttgaacctggaaggcggaggttgcagtgagccaagattgcgccattggactccagcctgggcaacaagagcgaaactccatctcaaaaaataaaataagataaaataaaaattcatgctaagggaaggaaatagagttaaaagcaaaacattcaagattcttagggtgattggtaggccagattgtttagtgccttgccttgtgctccctaaaaatacagtcacaaagtgttctttcttccttgacaagatagagtccaaatgctcagagcagctgagactggggatgcccag

SEQ ID NO: 717046 - DNA, 818 bp, Homo sapiens
accatatgacttggaagaacaaggaatttttacatattaactaatgaatgaagcattttcattttcatagataattcataaaaccactgtgaattataaaattaaaacttaatatccatctaaataacttgtataatattaagtaagatttaaatggctttaaaattgtgattgctgaggacccttttttcatactttggatagcataaatttggtattctgaatgtagaggcaacacttaaatgaaatttgaatcatagattaaagtcataattatagcatctaattgcaagaaatcaaggtataaagaataagagatcagtcaaataaggagtaacatgtgctgggaatctccatggtgctaggaacagatgtatgttaccttcatttttcagttggagaaactagatttggaccttataaaacttaagttgtttattcagttacacaagattcaaacacatgtttgttcaagaccaatgttwcactaaatttatctacctatgtttttaaatgaaattgtgtgtaagatcctcattttgctttttattttaaagctggagccatattcctgtagctatcctaaaccttctctgatgaccattggcttgatattgaacatttctcgcgtccctgcagcaatatttactttacctttacactgatgttaactggaccctccactcctgatcacaactcctctcccagtttagccaaatttaaggttgcttttggtgatagtgagtcactttaacaagttgcttagaatcacttggtgcaattatttaaagggaggcagagtgatacaaaggaagtca

SEQ ID NO: 717047 - DNA, 722 bp, Homo sapiens
agtagaaattccaggggaattctggttggaatagcattgtgagttcatgagttcatgcaatacactccccctttccacctgaaacacacaacctgacggcgaaaatatactcagaaaaactgaaaagacatttacatctcagaaggaaagtgactcacgcctgtaatcccagcactttgggaggccaaggtgggyggatcacgagatcaggagatcgagaccatcctggctaacacggtgaaaccccgtctctactaaaaatacaaacaattagccgggtgtggtggcgggcgcctgtagtcccagctactcaggaggctgaggcaggagaatggcgtgaacccgggaggcggagcttgcagtgagccgagattgtgcccctgcactccagcctgggcgacagagtgagactctgtctcaaaagaaaaaaagcaaggtgaacagagcattggactacatacagaagagaaagacaagcaagactgaagctgtgacctgctgcgtccaggtgtggaactaggtggacatggagttggtgtcctgtggggtgatgaggactaaaagaaccctaggcaaggcagaaactaagcgagccaagctgacccttactcctgcatcaatggaaactgagaaaagcttcaagcttcaaccacctgccacctgggcctccacctatgtgagcttcatacctagagagagagaaagatgcaaacacagctcac

SEQ ID NO: 717048 - DNA, 973 bp, Homo sapiens
  misc_feature 172, 173, 174, 175, 176, 177, 178, 179, 180, 181, 182, 183,184, 185, 186, 187, 188, 189, 190, 191, 192, 193, 194, 195,196, 197, 198, 199, 200, 201, 202, 203, 204, 205, 206, 207,208, 209, 210, 211, 212, 213, 214, 215, 216, 217, 218: n = A,T,C or G
  misc_feature 219, 220, 221, 222, 223, 224, 225, 226, 227, 228, 229, 230,231, 232, 233, 234, 235, 236, 237, 238, 239, 240, 241, 242,243, 244, 245, 246, 247, 248, 249, 250, 251, 252, 253, 254,255, 256, 257, 258, 259, 260, 261, 262, 263, 264, 265: n = A,T,C or G
  misc_feature 266, 267, 268, 269, 270, 271: n = A,T,C or G
taagactaacattggtgccaaaagtcaaatgccatgggcttgattttaaaaccatccttctctgattccyttcagctctggacaccagtggtccacataggctgctcctactcttttctctaaaagtctcatgtttttacttcaattcccaggaaaaatggctctgaattcnnnnnnnnnnnnnnnnnnnnnnnnnnnnnnnnnnnnnnnnnnnnnnnnnnnnnnnnnnnnnnnnnnnnnnnnnnnnnnnnnnnnnnnnnnnnnnnnnnnncgtgcctggcactcccatagtgtttggattacaggtgtgagtcaccgcgcccggccaaatgaagtttttacacagtcagcccctctccaaggggacttcggtttccaaaggccaaaggttcaaagggctcaaaggttctacccaggtccctgaagctttgtgaagagcccaggcttcccacagaagcccctttcctcctccttactttgcacagttgaggctggagggacatctcaggaatatgatggggcaggtggacagacactgagcagaatcagaaggctgggcaaagatagatgggtacctcctaggctgtattaatccaggcttcttgtccatctcctttagtctgtgtgcccctccatggctagagcatattctcaatattctctgtgccccaccctatcccagctatagacctacctgcacacttgaaggtgcagagggctgtgagtgtgcatgcacaaggcagggaggctacagctgccgcccctggaaactggaagctgccctttctcctcccctccaatcacttgtcacctctgggatttgcctctcatgttgctgccaccagggacacacagggaccacagaaaagaagaaagcatagctgctgcccagactgtagttggagggagaaaataaagccacttgagcagatcaaaagaccgctgtcccagcatcccactgggaggtgcctta

SEQ ID NO: 717049 - DNA, 945 bp, Homo sapiens
gagaggttcctcctggtgacttgcagggttaacctgggacctctcggattaggatttcagtggtctcactggcatttcatgactgacatctactgccacacagcattgtgggttacagtgagcaaagttgtttctcagaaactctttagaaaacgtgagtgtgaatgaaactaatagcatcttgtccaacttcagtcatcttcagataagaaactttaacttcctcaagatttcatgatggctgagaatgaacttactaggtcagttctgagaaaagtagtttggtctctttaaaaccacaaagcaacaagtcaactctaaaaaggatgtttgtggctggatacggtggctcacacctgtaatcccagtactttaggaggccaaggtgggaggattgctcgagttcaacaacagcctgagcaacatagtgagaccctgtctctacaaaaataaaaattagctgggtatgatggcacacatctgtggtcccagctacttgggaggctgaggcaggaggatcaactgagcccaggagttagttcaaggctgtagtgagctatgactgccccactscactccagcctgggtgacagagggagaccctgtctcaataaataactaaataataaaaataaaaaaggtgtttgtgagatgttcaaatctgtgaaaattgaacaccattctttgcttatattaaggaataattttttaggtatgataacgtaagttttaaaaaaaaagagctcttagtgttgagagatacatgctgaaatacatacagtttgctacaaaacaatccagtgggtgtggggaagtgggtcagggtataaatggagttagtgtggccatgagttgctaattgttgaaggtaggtggtaggtatgtgatggtttattatgctgttctacttctgcatatgtttggaattttccattaaaaactcca

SEQ ID NO: 717050 - DNA, 1353 bp, Homo sapiens
tttaataagtgagtatgtgaggagcgggtggagaagtctagctgatgatgaaggtagcttgaaagtgagtcagggtagaaggaccattgatgtttgtttcataagttgaggatgttgggagtctgagggtaaagaaaaggggagattgaatatcttagagaaggatgagaggcagtaaggttggaggcaggcggcaactagaggaagacctgaagaggagtgcatcgtcctcagagaccaggcaaggtgcaggtatagaggcattttgaggctgtggccagaagaggggcataggagcttgatcagctggcattttctttttttgcgggggacggtgtcttgctctgtcgcccaggctggagtgcagtggcgcgatctcaacttactgcaacctctgcctcctgggttcaagcaattctcctgtctcagcctcctgagtagctgggattacaggtgtgtaccaccacgcccggttaatttttgtgttttttcagtagagacggggtttcgccatgttggccaggctggtctcaaactcctgacttcaggtgatccacccacctcagcctcccaaagtgctgggattacaggcatgagccaccatgcccagctgagctggcattttcttctctgtgtgagataagggattgatctgagaaccggagggtagatcaagaaggaaaatgggttgataaagctggttgtagggttggggcgaggagtgagctgaagcaaatactgactagagaacagccttcagggaccggttgaagattgaagactgtgactttgtaaagctgccagtggccactggtagatggtgtgccaacatgccaagcaaccagggagtaagaacagatgcaagcagtcccagacccagaaggtgggtgcacagggacagccaccctgatcggactcggagtgctttgccatccacagccctgggcacaccatgtgggaggagggggagcctgctctgtctccattggtcacctctttgccctcacttctctgagttgccagtcattgttctgttgttaattcttccagaccctttctgaaaaatgcattaaaattctcaccagcatgacctctttgagtaatgagatctgtaagtttattaacctctgtgagaagtggattttcttgctccatgggagcggataatgtcttggagggaacgaacattaatgtgctgacctggagggcagaggcagtgtgrgggcagcttatctgtgtccctcccaactctctgacttaacgtgtgtctcatggaactcagggaatatgggctgattgcttctgcacatcactgtccctcagcccactcagtccagcagcagcccagagtca

SEQ ID NO: 717051 - DNA, 595 bp, Homo sapiens
gagcaggacaagtgcctctggggctgtggattactagggcatttttattccctcaaacagagaccaagttcacccacacactcgatgctaaaccaacacccttccagcagctgggtgacagctgttagaaacaaaaggaagattctcactgtaatttcccgcatctgctgtcaagagaggccagacgacagggagtgtgtgcatatcartgcaagccctcataccccatccatgtgatataatccagtctgcagtctggatcacccagctgtgccactctcagcccagcaccatattttgctaatcatctaagtacaacaccataaaggaaaacacttccacacacagtattctcctacatacgtgaaaggaaggagcaatttaaagggcagcaactacagaacatttgttgaagaatcaaattatgcctcattgtcagagcactaaatgggctgggctgggggcccacgggttagagaaggcctttctgggaagggacccagactttcagatcttccctcctattccctacatcagaaaagagggattgggtctcggtttgggcatgcttagacgggtgttccctaaatctcca

SEQ ID NO: 717052 - DNA, 655 bp, Homo sapiens
aaaacagccttccctccccagcctgccatttgggaagggtrcattctcacctttttgtctcaagatggcactccatttctctttgtaaatcctgagttaatggcataaggggactgagaagtgaaaagtcttcatgctgcttccacttagacaagagaaaataataagaaccagcatgtatcaaaggcctattgtgttccaggcactctactagaaactttatgtaaaaatttccctcataccagtatcaagacataagtaatagcatcatccccattttatagatggggaaacagagaattaggcagtaacttgccaaagtttgtgtgtcaggtaagcggtaaagcttggatttgaactcgtgtctaattccaaaacccattctctttttcctatagtgctctgcctcccaaaggctgtggaactgttctattatcagattgttctcaagaaactaccttatggtctgccagagcttacatcctagaagaaaagcctaacatgcacactcccactccccttgcttgggtgtttaggtggctgaactctaagcccacgtcaacagtcctcaagagtttatggctaactaaatacacacatttcccatcctcttgaatttactcttgagactaccaggcatcacttatgaagaaaa

SEQ ID NO: 717053 - DNA, 607 bp, Homo sapiens
gagacagcctgttttctaattgtcctcagtcctacattggactggcattttaggtcacccctggctgactttctttagatataaacaagttagtccagatttaacttaacccatctcccaaatattgccatgaagatgctgtctcagtactgcccatgcccttgtctggacaacaggaagctttgggccacataagccagagtaggtccctgtccacacaggkgtgatgtgatcagctgaccattctcctgccactggcatgctccatgcaaacagtgaacaggcttaggtttttgagttaagtttttaaaatgacatacaaatcgttgtttctactactatttcaacattctcctctatttctgtcttgatttgggaaatgattttgactaattttacccttttcctctgtcaaatgggaatgatcattcctgttctatctcacagggctgctgccaacacacagaagcaaggttcgtacaacaccgatttgtcttctacaaagtgggctgcaaatgatgccttgttattcaccgcagactttaccatgactagactgaagaaaaaactcacatgcaacagaaaaacagcactgaagtcttcattt

SEQ ID NO: 717054 - DNA, 645 bp, Homo sapiens
gcttttttgcttccctgtgctctgaccagcccaatttgcccaactctgttgttcaagactggagaagagaagctcaaacttcaagtctaaaatgacctaagttacatcttcctttttagggtgatgagttgaggggagacagcattgcctgttcatgtataagagtgtatttaggctgctctaaattcctaaacctttaacatgaccagttttattcacatgaactaaagaagggcttctgacttaaaaaaaaaaatagtaaaasgctgtgggggcaacaaacttcaaagggagaaaatggcaaaggaaaatgggtaagaccaaagtgaagatgtgttagcagcctgaagaaaccaaatgagaggtaatgaaacaacagcaaaacatgccaattcagaaaccaggtaattttttctacttcagttcttagaaaaactagtacattcaaatatgttaccacctggaatcataatgatagaagcagggtttgtttttggttagcaagtgggctttctggtttggtcagagataaatgacaatgctctcttttttgcactgactacctctctaataatggaagcatctgagcttctctcatgcatgaaacaggaatagaccaggactggcacatatttgaggatttca

SEQ ID NO: 717055 - DNA, 1247 bp, Homo sapiens
ggcaaatcagggccacatttcatgctgaaagatgatgtgaaatgatgagtaaacattgccctttaaataataataacatagatggtgaattacaatttgcacttttggttttatttgcttaaagatagtgttttactgtctaggttttactgaaagaatacttaactaaacacttgagtcaaatcattccagtgtaacagtcctcacaaggaggaaggcagaagggcaaaagtgccaagctattgcctccagcccttctatttttattgattgactgattgattgattgagacagggcctcgttctgttacccatgctggagtacagtggtgcattcatggttcactgcaactttgaacttctgggctcaagtagtcttcccacctcagcctccaaagtaactaagaccacaggtgcatgccaccatgtttatttctttaattttttaaattttatttggacatgggggtctcactatgttttccaggcaggtctctaactcctagcctcaagcaatcttcctcctcagcctcccaaagtgctgggattacaggcatgagccatcatccctgctctctctagccctttttaaagtctctaatcccattcaggaggcctctgcattcatgacttaatcacctcctaaagggcccaccttttgatactatcacattggtgattaaattgcaacacttgaattttgagtgacattcagaccacagcattttggagaaaatgtcccctttcttctcttttttctcttcagtttctcctttctacagataccttgcacttcacttgcaaccttgttgaagtctctcctgtcttaaaagtttcttttcccaaaacaccagaactcattccttctgtctaactgtaactttgtacttgttaccaacctctacccatttctacccctgactccccagcctctggtaactactaacgtactctttacttcgatgaggtcaacttttttagattccacatatgagtgaaatcacgtaatatagtccttctgttcttggcttatttcacttaacatagagccctccaggttcacccatgttgttgaaaatgacaggatttcatgcttttttatggcggaatagtattccatcatgtatatatrtcacatactaattaccctgatttgatcaatacacaatgtataggtgtgttggaacatcatgctgtaccccataaatatgtacaattattacgtgtcaatttaaaaaacccaagaa

SEQ ID NO: 717056 - DNA, 977 bp, Homo sapiens
gtaaaactagctctatttgcacttgaaattatctttcacatataagatcctaaagcaaccagaaagaagccattagaatgaagagctggtaagtttagcaaggktttggtatactcagtcaatatacaaaaatcaatctgcctttatgcactagcaatgaaacaatccaaaatttaaatgaaaacaattccatttacaacaatagcatccaaaatgaaatgcttaagaacacatttagcaaaagaagtgcaagacttctacactgaaaactaaaaaacatcgttatgtgtgaaggggagggaagaaaggaggctagaggataacttaagaattaagggcatcttattttgggttgataatgttgaggatgcttatgactgaaagggagttattcattcttcagtgatttcttaatttgaaatatggaaccaatgtttctgcataacataaacatacaaatgaattaaagtgaaaattctaaggttcccattattgctatgcttatgtttatgagagaattttaagattttatcaagttcccaaagtactcgaaaaagaaaaaaaaatcatggtgggtattatatagcttaaacattccagtttgcccagtcttgataaaaatcacttaaaaaaacagaaaaaaattgaatttttttaggtttgatttggttgttgtcatttcaaaatcaaggttcccaatcagctttctgattgctatctgataaaggtaattaaaaatagatacatacagcacattagagcattactgcttatgaaaggattccaaataaagtgttcaaatacaggggttatcttagtctagagatgttaatattttataatatcaagctccatggtacatataattcactttataagctattaaaaagatataacactttatatgttttataaatgattttccccaagcccagatcacttacagtaataaatacataaatacacaaacatgtgta

SEQ ID NO: 717057 - DNA, 913 bp, Homo sapiens
ttattgataatttatttcattatttttaaatttaaaaaatcatctcaaattgtcttatttaggtatatgaactaggaaaatcctaaatgacagtggtactctagaactcttgaacttaagactgtctataaccaggtaaataacatcagtaaagaaatactgtctaaatgatgcctgatagaaatgtattgatgcggagaaaagaagtgggaaattgaaggggaaggcttcttttttttataagaagttaagaaaattggaataagaaacaacagaatggagagtactttataacactgaagagaacrgaaatgtattgcattggagaagatattttaagatcagaagtaaacatattaagtgttttgttagagggttttaaagtgtaattatggccgggcatggtggttcatgcgtgtaatcccagcactttgggaggccaaggtgggcagatcacctgaggtcaggagttcgagaccagcctggccaacatagtgaaacctcgtctccactaaaagtacaaaaattagccgggcctggtgtcacatgcctgtaatcccagatacttgggaggctgaggcaggagaatcgcttgaaccaggaggcagaggttgcagtaagccaagaccacactactacactgcaccctgggcaacagagcaagactccgtctcaaaaaaaagaaagtgtaattatataaattttgcaaggttagaaatatcccatatgattaaggtatagtctactaagtcagtaaatttaagagagccccaacttgccacaatatggggcttctacctcattatgcggtgttagaatgaggaaatgcacatagcaatgcagtaggctataattagggaaaaagtgacctgaggagaagttggagaaaggtttacctgtggtaaatgatgat

SEQ ID NO: 717058 - DNA, 913 bp, Homo sapiens
ttattgataatttatttcattatttttaaatttaaaaaatcatctcaaattgtcttatttaggtatatgaactaggaaaatcctaaatgacagtggtactctagaactcttgaacttaagactgtctataaccaggtaaataacatcagtaaagaaatactgtctaaatgatgcctgatagaaatgtattgatgcggagaaaagaagtgggaaattgaaggggaaggcttcttttttttataagaagttaagaaaattggaataagaaacaacagaatggagagtactttataacactgaagagaacagaaatgtrttgcattggagaagatattttaagatcagaagtaaacatattaagtgttttgttagagggttttaaagtgtaattatggccgggcatggtggttcatgcgtgtaatcccagcactttgggaggccaaggtgggcagatcacctgaggtcaggagttcgagaccagcctggccaacatagtgaaacctcgtctccactaaaagtacaaaaattagccgggcctggtgtcacatgcctgtaatcccagatacttgggaggctgaggcaggagaatcgcttgaaccaggaggcagaggttgcagtaagccaagaccacactactacactgcaccctgggcaacagagcaagactccgtctcaaaaaaaagaaagtgtaattatataaattttgcaaggttagaaatatcccatatgattaaggtatagtctactaagtcagtaaatttaagagagccccaacttgccacaatatggggcttctacctcattatgcggtgttagaatgaggaaatgcacatagcaatgcagtaggctataattagggaaaaagtgacctgaggagaagttggagaaaggtttacctgtggtaaatgatgat

SEQ ID NO: 717059 - DNA, 913 bp, Homo sapiens
ttattgataatttatttcattatttttaaatttaaaaaatcatctcaaattgtcttatttaggtatatgaactaggaaaatcctaaatgacagtggtactctagaactcttgaacttaagactgtctataaccaggtaaataacatcagtaaagaaatactgtctaaatgatgcctgatagaaatgtattgatgcggagaaaagaagtgggaaattgaaggggaaggcttcttttttttataagaagttaagaaaattggaataagaaacaacagaatggagagtactttataacactgaagagaacagaaatgtattgcattggagaagatattttaagatcagaagtaaacatattaagtgttttgttagagggttttaaagtgtaattatggccgggcrtggtggttcatgcgtgtaatcccagcactttgggaggccaaggtgggcagatcacctgaggtcaggagttcgagaccagcctggccaacatagtgaaacctcgtctccactaaaagtacaaaaattagccgggcctggtgtcacatgcctgtaatcccagatacttgggaggctgaggcaggagaatcgcttgaaccaggaggcagaggttgcagtaagccaagaccacactactacactgcaccctgggcaacagagcaagactccgtctcaaaaaaaagaaagtgtaattatataaattttgcaaggttagaaatatcccatatgattaaggtatagtctactaagtcagtaaatttaagagagccccaacttgccacaatatggggcttctacctcattatgcggtgttagaatgaggaaatgcacatagcaatgcagtaggctataattagggaaaaagtgacctgaggagaagttggagaaaggtttacctgtggtaaatgatgat

SEQ ID NO: 717060 - DNA, 913 bp, Homo sapiens
ttattgataatttatttcattatttttaaatttaaaaaatcatctcaaattgtcttatttaggtatatgaactaggaaaatcctaaatgacagtggtactctagaactcttgaacttaagactgtctataaccaggtaaataacatcagtaaagaaatactgtctaaatgatgcctgatagaaatgtattgatgcggagaaaagaagtgggaaattgaaggggaaggcttcttttttttataagaagttaagaaaattggaataagaaacaacagaatggagagtactttataacactgaagagaacagaaatgtattgcattggagaagatattttaagatcagaagtaaacatattaagtgttttgttagagggttttaaagtgtaattatggccgggcatggtggttcatgcgtgtaatcccagcactttgggaggccaaggtgggcagatcacctgaggtcaggagttcgagaccagcctggccaacatagtgaaacctcgtctccactaaaagtacaaaaattagccgggcctggtgkcacatgcctgtaatcccagatacttgggaggctgaggcaggagaatcgcttgaaccaggaggcagaggttgcagtaagccaagaccacactactacactgcaccctgggcaacagagcaagactccgtctcaaaaaaaagaaagtgtaattatataaattttgcaaggttagaaatatcccatatgattaaggtatagtctactaagtcagtaaatttaagagagccccaacttgccacaatatggggcttctacctcattatgcggtgttagaatgaggaaatgcacatagcaatgcagtaggctataattagggaaaaagtgacctgaggagaagttggagaaaggtttacctgtggtaaatgatgat

SEQ ID NO: 717061 - DNA, 608 bp, Homo sapiens
ccacctgttccctaaaaacctatggaaataaaaaaaattttttttaatcactcacacaaaaaagaaaatgtggtcagaaaaagaaaataaaacaaaatgattcacaaagttgaaaaaagagaaaacccctacaggatttgaattataattctatatgctattttaaattatgatcattaaaaggataaaataggctgggcacagggtggctcatgcctgtaatcccagcgctttgggaggcctaggcgggtggatcacgtgagctcaggagttctagaccagcctggccaacatggcgaaacccagtctctactgaaaaaaaaaacttakccaggcatggtggtgcatgcatgtagtcccagctacttgggaggctgaggcagaagaatcgctcgaatccaagaggcagaggttgtaatgagccgagattgtgccactgcactctagcctgggtgacagagcaagcctccctctcaaaaaaaaaaaaaaatgcataaaacaattttcaggcctccaaggaaaatgttggtccttcccctcatcttcctgccaccactcccaccaccatggcctccagattccctaaggcacccccagttttcaaagga

SEQ ID NO: 717062 - DNA, 647 bp, Homo sapiens
attacaccttcccaacttgagtgtaggcttctttgggcaaagatcagtgtatgtcttgtgtactgacatatcccccatacctggaacattataagtgttcaaaaaatacttactgaattagtaaatcaacattttgagactactggggaggagctcttgaacaagaaaatgatgtcaaagatagtgtatggttcagtacctattaattttaaatgaataaaataccactggwggtctacctagtgtgttgacattaagttgtatttcagaaatgaaaaatatttatagatatcttctgggtttaccccaatgctcagtatccatccattttcacactgtattagttcgttttcacactgctataaagaacttccctgagactgggtagtttataaaggaaagaggtttaactgactcgccattccatgtggctggggaggcctcaggaaacttacaatcatggcagaaggtgaaggagaagcaagtaccttcttcacaaggcagcaggagagagaagagagcaagagaagaactaccaaacacttataaaaccatcagctctcatgcgaactcactcactattatgagaacagcatgggggaaactgcccccatgatccaatcgcctccctcacttggcacataggg

SEQ ID NO: 717063 - DNA, 960 bp, Homo sapiens
aaaaccaatttgaaaatatttttcaataattaaaaaattgtcacaccatatgacctaataattctacttctagtgatccatttaaaagaaatatccaagaatgcaaatgaagacctatctaaggtctatctacttaatgtgaggaaaaaaagccaaaaaattcaagcatcaatattaaggactaaataaattataatatttatagtatwgaaaaatgtacagccattcgaattatctttaataacctgtttagaatataatgttaagttttagagaagcagaatttaaaactatagtataatccaaagtattcaaataatgcacacatacatacacatatacacacacacacaaatgttggctgagattatctcgactctgaattgtaagattatgagttatcttggttttcttctttttgcattttttttgtttttaaacaataaagaacataatactgtggtaatctctaagggtgttaatgtacaaaaatatacaggcataataaagaaatacaaactcagttttagacaatgaaatgttatatcaacttttaaaatattgtttagattaacagtttgatattttaaaaaggtgtcatttaaaatacttagttgaaataatatttttggtttgtttaattattgggtatgtgggaatggtggtggtgaatatttttcactaagaagaaagtcaagtggtaattaactgttttttaggatgtatttgagcctcatttactgaactaccaaaaacatttacagaataaaataaaatgtaaaagaaacagctaagtaagaaataataaatggaaaagttgtaattttattgtcctctattacaaatgtgaaatattcccacattttttcatattttatgagaactgtttatacagttgaaagtttctatagaagaattacattatcttcatatgaaccatattgtattttcttccttttt

SEQ ID NO: 717064 - DNA, 960 bp, Homo sapiens
aaaaccaatttgaaaatatttttcaataattaaaaaattgtcacaccatatgacctaataattctacttctagtgatccatttaaaagaaatatccaagaatgcaaatgaagacctatctaaggtctatctacttaatgtgaggaaaaaaagccaaaaaattcaagcatcaatattaaggactaaataaattataatatttatagtatagaaaaatgtacagccattcgaattatctttaataacctgtttagaatataatgttaagttttagagaagcagaatttaaaactatagtataatccaaagtattcaaataatgcacacatacatacacatatacacacacacacaaatgttggctgagattatctcgactctgaattgtaagattatgagttatcttggttttcttctttttgcattttttttgtttttaaacaataaagaacataatactgtggtaatctctaagrgtgttaatgtacaaaaatatacaggcataataaagaaatacaaactcagttttagacaatgaaatgttatatcaacttttaaaatattgtttagattaacagtttgatattttaaaaaggtgtcatttaaaatacttagttgaaataatatttttggtttgtttaattattgggtatgtgggaatggtggtggtgaatatttttcactaagaagaaagtcaagtggtaattaactgttttttaggatgtatttgagcctcatttactgaactaccaaaaacatttacagaataaaataaaatgtaaaagaaacagctaagtaagaaataataaatggaaaagttgtaattttattgtcctctattacaaatgtgaaatattcccacattttttcatattttatgagaactgtttatacagttgaaagtttctatagaagaattacattatcttcatatgaaccatattgtattttcttccttttt

SEQ ID NO: 717065 - DNA, 960 bp, Homo sapiens
aaaaccaatttgaaaatatttttcaataattaaaaaattgtcacaccatatgacctaataattctacttctagtgatccatttaaaagaaatatccaagaatgcaaatgaagacctatctaaggtctatctacttaatgtgaggaaaaaaagccaaaaaattcaagcatcaatattaaggactaaataaattataatatttatagtatagaaaaatgtacagccattcgaattatctttaataacctgtttagaatataatgttaagttttagagaagcagaatttaaaactatagtataatccaaagtattcaaataatgcacacatacatacacatatacacacacacacaaatgttggctgagattatctcgactctgaattgtaagattatgagttatcttggttttcttctttttgcattttttttgtttttaaacaataaagaacataatactgtggtaatctctaagggtgttaatgtacaaaaatayacaggcataataaagaaatacaaactcagttttagacaatgaaatgttatatcaacttttaaaatattgtttagattaacagtttgatattttaaaaaggtgtcatttaaaatacttagttgaaataatatttttggtttgtttaattattgggtatgtgggaatggtggtggtgaatatttttcactaagaagaaagtcaagtggtaattaactgttttttaggatgtatttgagcctcatttactgaactaccaaaaacatttacagaataaaataaaatgtaaaagaaacagctaagtaagaaataataaatggaaaagttgtaattttattgtcctctattacaaatgtgaaatattcccacattttttcatattttatgagaactgtttatacagttgaaagtttctatagaagaattacattatcttcatatgaaccatattgtattttcttccttttt

SEQ ID NO: 717066 - DNA, 960 bp, Homo sapiens
aaaaccaatttgaaaatatttttcaataattaaaaaattgtcacaccatatgacctaataattctacttctagtgatccatttaaaagaaatatccaagaatgcaaatgaagacctatctaaggtctatctacttaatgtgaggaaaaaaagccaaaaaattcaagcatcaatattaaggactaaataaattataatatttatagtatagaaaaatgtacagccattcgaattatctttaataacctgtttagaatataatgttaagttttagagaagcagaatttaaaactatagtataatccaaagtattcaaataatgcacacatacatacacatatacacacacacacaaatgttggctgagattatctcgactctgaattgtaagattatgagttatcttggttttcttctttttgcattttttttgtttttaaacaataaagaacataatactgtggtaatctctaagggtgttaatgtacaaaaatatacaggcataataaagaaatacaaactcagttttagacaatgaaatgttatatcaacttttaaaatattgtttagattaacagtttgatattttaaaaaggtgtcatttaaaatacttagttgaaataatatttttggtttgtttaattattgggtatgtgggaatggtggtggtgaatatttttcactaagaagaaagtcaagtggtaattaactgttttttaggatgtatttgagcctcatttactgaactaccaaaaacatttacagaataaaakaaaatgtaaaagaaacagctaagtaagaaataataaatggaaaagttgtaattttattgtcctctattacaaatgtgaaatattcccacattttttcatattttatgagaactgtttatacagttgaaagtttctatagaagaattacattatcttcatatgaaccatattgtattttcttccttttt

SEQ ID NO: 717067 - DNA, 960 bp, Homo sapiens
aaaaccaatttgaaaatatttttcaataattaaaaaattgtcacaccatatgacctaataattctacttctagtgatccatttaaaagaaatatccaagaatgcaaatgaagacctatctaaggtctatctacttaatgtgaggaaaaaaagccaaaaaattcaagcatcaatattaaggactaaataaattataatatttatagtatagaaaaatgtacagccattcgaattatctttaataacctgtttagaatataatgttaagttttagagaagcagaatttaaaactatagtataatccaaagtattcaaataatgcacacatacatacacatatacacacacacacaaatgttggctgagattatctcgactctgaattgtaagattatgagttatcttggttttcttctttttgcattttttttgtttttaaacaataaagaacataatactgtggtaatctctaagggtgttaatgtacaaaaatatacaggcataataaagaaatacaaactcagttttagacaatgaaatgttatatcaacttttaaaatattgtttagattaacagtttgatattttaaaaaggtgtcatttaaaatacttagttgaaataatatttttggtttgtttaattattgggtatgtgggaatggtggtggtgaatatttttcactaagaagaaagtcaagtggtaattaactgttttttaggatgtatttgagcctcatttactgaactaccaaaaacatttacagaataaaataaaatgtaamagaaacagctaagtaagaaataataaatggaaaagttgtaattttattgtcctctattacaaatgtgaaatattcccacattttttcatattttatgagaactgtttatacagttgaaagtttctatagaagaattacattatcttcatatgaaccatattgtattttcttccttttt

SEQ ID NO: 717068 - DNA, 960 bp, Homo sapiens
aaaaccaatttgaaaatatttttcaataattaaaaaattgtcacaccatatgacctaataattctacttctagtgatccatttaaaagaaatatccaagaatgcaaatgaagacctatctaaggtctatctacttaatgtgaggaaaaaaagccaaaaaattcaagcatcaatattaaggactaaataaattataatatttatagtatagaaaaatgtacagccattcgaattatctttaataacctgtttagaatataatgttaagttttagagaagcagaatttaaaactatagtataatccaaagtattcaaataatgcacacatacatacacatatacacacacacacaaatgttggctgagattatctcgactctgaattgtaagattatgagttatcttggttttcttctttttgcattttttttgtttttaaacaataaagaacataatactgtggtaatctctaagggtgttaatgtacaaaaatatacaggcataataaagaaatacaaactcagttttagacaatgaaatgttatatcaacttttaaaatattgtttagattaacagtttgatattttaaaaaggtgtcatttaaaatacttagttgaaataatatttttggtttgtttaattattgggtatgtgggaatggtggtggtgaatatttttcactaagaagaaagtcaagtggtaattaactgttttttaggatgtatttgagcctcatttactgaactaccaaaaacatttacagaataaaataaaatgtaaaagaaacagctaagtaagaaataataaatggaaaagttgtaattttattgtcctctattacaaatgtgaaatattcccacattttttcatattttatgagaactgtttatacagttgaaagtttctatagaagaattacattrtcttcatatgaaccatattgtattttcttccttttt

SEQ ID NO: 717069 - DNA, 827 bp, Homo sapiens
ctatataagctacagattaaaacagtctttgacgttttttcacctgaatagctctactccctccacacacatgcccgcccccaccccccccacccaatacacacacacgttgtaaaaatgaaaatgttaggccgggtgcggtgccttatgcctgtaaccccagcactttggtaggccgaggcaggcagatcacttgaggtcaggagttcgagaccagcctggccaacatggtgaaaacccgtctctactaaaaataaaaaaaattagctggamgtgttcacttgaacccaggaggcagatgttgctgtgagccgagatcacaccactgcattccagcttgggcaacagagcaagactctgtctcaaaaaaaaaaaaaaaagaaagaaaaaaagaaagttaggatgcttggagattaagtgacttggcaaaggttataaaattaacaagtggcaggggctgggaggacttcagtgtagtgctctcctgatctgtgttgtgaagactgattctgagcttgagcagtcactggtgttcaccctctagatttgcactgggtgacatagggttatgctgtgggtccctttcctcacttcactttgcagtgaccagtagaacacatgttgatgaactttaattcttttcagggcattgatacaaatcttgctttctgatgcatctttgagaagacacctgcagttggaaggtgcaaatcaatttactaaacctttagccaaatttctccacttcttcctgcatcactgaaaagaaataaaagcactttacagagttacggtggcccagatgcattgaaatatcttaaattttc

SEQ ID NO: 717070 - DNA, 871 bp, Homo sapiens
taaataatcttgtttctttgcagtagtgggggtaccttgagatattttgcacttgacacctacatataaaaacaaagtctgccaatgagggctatgttccttattatgcctctgccttgcatttgtattttgggcttgcatccctaaataaatgagcaactaatcttcacaaaacttgggtcttctgccaagtatagatattatacgtaagtatagatgttatrcttaaagagtcattgcatgctactacaatgtttatgaagcctttacattctctggttgtggtttctaaatgcctctagttaaagtgctgaaatttcaagcaaattggaaattgttacttccatataggtctcttgggctccattcattaagtaaacacctgctatgtgccaggcacaattcaaagcattaagaatacaatgagaaggccgggcgcggtggctcacacctgcaatcctagctactcaggagtctgaggcaggagaatcccttgaacccaggcggcggaggttgcggtgcctgcgcaacaagagtgaaactctgtcttaaaaaaaaaaaaagaatactatgagaatatgaaagacattgtccttgtcactaaatatttattatctgaactcctaagctctttagacaatccagtaataatttaacataattagaagaaatttcctcagtaaaaagctaaattgttttcagaattattgtaatacagtagaaaatttggaaattggaaaggaccagtgaatgtttccttttgagtcaagaatacattttaaaatgactagtagttctagataaatcaggttttccaacttattcataatgtggaagaatagagtatattttcatagatcctgcaacagca

SEQ ID NO: 717071 - DNA, 625 bp, Homo sapiens
gccgttcctattcgtccatcttggctccaccccccacccccccagatatgtcttaattaggttctcctataagcagggcatgagaaaaagtcttaagtactgattattgataaatttggggatgaggaagagtagaatgagttgaaaagggggaaattgacaatattaaggttgctgctctaggaactaggagcttgacatctgctgcaatctcctaagaaactataatggtcctcccagccttgtccacctgaggatggggaaacctcaacatttatctacttattcccatctcctgttggttgtgcttgtgctgggamcaacaactcccctgtggcaccagagaaagtcctggagcaaaaagtagaaagataagaagtggagtgtgctcgaggagggtcactgttctggagataagtctgagttttcagggaattgtctgttgtagctgcagttgaaatcatagtaggccaaggaaatcatagtaggccaaggggatgtgacaagatttccacctgtggccccacaggcagctgccacaggtggaaatattagactacgtacagatattctctcacaactataaataccatataaaagttagcaataaaatagagtgaaagtg

SEQ ID NO: 717072 - DNA, 1717 bp, Homo sapiens
ttttttttttgagacagagtctcactctgttgcccaggctggagtgcagtggcacaatctcggctcactgcaagctccacctcccgggttcatgccattctcctgcctcagcctcccaagtagctgggactacaggcatccaccactacacctggctattttttttgtatttttaatagagacggggtttcactgtgttagccaggatggtcttgatctcctgaccttgtgatccgcccgccttggcctgccaaagtgctgggattgcaggcgtgagccaccgtgcccggccagatactaatatctttcaagatttagaaaagagtattttagttaaataaatagttcagaagtatgaaacaatatgataaaatatacctaacattcatggctttttgccgagggacagcagaatcagccaaatagaggaaggtatactatgtagctcatgaaaattcaacttcttggcctctttctttcacgaatctcaagtctccatttctctcattctaaataaatattgttccctgttgaattctatagtcttaattttgtctccttcttcttaaagagggttgccaaatatatgaatttcaggcctgcaaaacttgaatctatccttttatgtcaatgcttgtagttaagagaaaagaagaaacaaagttcttataccttctgtctccatttaaatagctcttattctatagaagctattaaaacttttctttttataaaatagaaagcaactatgtgtatgcattcartcgaactacaagaggaagaaaagttccttaaagaagggttgaattggttatcttaatcatgtgccaccttttcagcatgcaaagctgaggttataattgctgataccggttaaagaagggggctactgtcttggctgatgtcatgttagccaactggccataggatgctcatctctgtgggtattctacctatttactcttttttttttttttttttttgagacagagtcttgctctgtcacctaagctggagtgcagtggcacaatcttggctcactgcaacctctttctcctgggtttaagcgattctccctgcctcagcctcctgagtagcttcgattacaggcacctgccaccacgccttgctaatttttgtatttttagtagagacagggtttcagcatgttgaccagactggtcccaaactcctgacctcaggtgattcgctcacctcagcctccccaagtgctaggattacaggcgtgagccaccattcccaaccctgttctgcctatttacttcttcaagctccatgacagccattctgagttgtcatgttgtatccattttttttttcactgtagaagaccagcatatgccaccccaaagtaagccattttggcataaggattattttgagctgaagatatttgcgatttaccagatggcagaaagaagcctttcttggagcttcccttaactgactaaaagcagaaacttctgagaaatgtggaccaccataaatcccgtctcccagggaagttttatggccatgaagaagatgggaagtgagtgctgagatggatttaaataaaccttactctattacttatatttatataccttcccacagttcaccatccttgggagcttaaacctctttcctttgtctggtcatgtttctacaaagtcatagcttttgttaagataatatattagcccaagttctaacc

SEQ ID NO: 717073 - DNA, 1717 bp, Homo sapiens
ttttttttttgagacagagtctcactctgttgcccaggctggagtgcagtggcacaatctcggctcactgcaagctccacctcccgggttcatgccattctcctgcctcagcctcccaagtagctgggactacaggcatccaccactacacctggctattttttttgtatttttaatagagacggggtttcactgtgttagccaggatggtcttgatctcctgaccttgtgatccgcccgccttggcctgccaaagtgctgggattgcaggcgtgagccaccgtgcccggccagatactaatatctttcaagatttagaaaagagtattttagttaaataaatagttcagaagtatgaaacaatatgataaaatatacctaacattcatggctttttgccgagggacagcagaatcagccaaatagaggaaggtatactatgtagctcatgaaaattcaacttcttggcctctttctttcacgaatctcaagtctccatttctctcattctaaataaatattgttccctgttgaattctatagtcttaattttgtctccttcttcttaaagagggttgccaaatatatgaatttcaggcctgcaaaacttgaatctatccttttatgtcaatgcttgtagttaagagaaaagaagaaacaaagttcttataccttctgtctccatttaaatagctcttattctatagaagctattaaaacttttctttttataaaatagaaagcaactatgtgtatgcattcagtcgaactacaagaggaagaaaagttccttaaagaagggttgaattggttatcttaatcatgtgccaccttttcagcatgcaaagctgaggttataattgctgataccggttaaagaagggggctactgtcttggctgatgtcatgttagccaactggccataggatgctcatctctgtgggtattctacctatttactcttttttttttttttttttttgagacagagtcttgctctgtcacctaagctggagtgcagtggcacaatcttggctcactgcaacctctttctcctgggtttaagcgattctccctgcctcagcctcctgagtagcttcgattacaggcacctgccaccacgccttgctaatttttgtatttttagtagagacagggtttcagcatgttgaccagactggtcccaaactcctgacctcaggtgattcgctcacctcagcctccccaagtgctaggawtacaggcgtgagccaccattcccaaccctgttctgcctatttacttcttcaagctccatgacagccattctgagttgtcatgttgtatccattttttttttcactgtagaagaccagcatatgccaccccaaagtaagccattttggcataaggattattttgagctgaagatatttgcgatttaccagatggcagaaagaagcctttcttggagcttcccttaactgactaaaagcagaaacttctgagaaatgtggaccaccataaatcccgtctcccagggaagttttatggccatgaagaagatgggaagtgagtgctgagatggatttaaataaaccttactctattacttatatttatataccttcccacagttcaccatccttgggagcttaaacctctttcctttgtctggtcatgtttctacaaagtcatagcttttgttaagataatatattagcccaagttctaacc

SEQ ID NO: 717074 - DNA, 1717 bp, Homo sapiens
ttttttttttgagacagagtctcactctgttgcccaggctggagtgcagtggcacaatctcggctcactgcaagctccacctcccgggttcatgccattctcctgcctcagcctcccaagtagctgggactacaggcatccaccactacacctggctattttttttgtatttttaatagagacggggtttcactgtgttagccaggatggtcttgatctcctgaccttgtgatccgcccgccttggcctgccaaagtgctgggattgcaggcgtgagccaccgtgcccggccagatactaatatctttcaagatttagaaaagagtattttagttaaataaatagttcagaagtatgaaacaatatgataaaatatacctaacattcatggctttttgccgagggacagcagaatcagccaaatagaggaaggtatactatgtagctcatgaaaattcaacttcttggcctctttctttcacgaatctcaagtctccatttctctcattctaaataaatattgttccctgttgaattctatagtcttaattttgtctccttcttcttaaagagggttgccaaatatatgaatttcaggcctgcaaaacttgaatctatccttttatgtcaatgcttgtagttaagagaaaagaagaaacaaagttcttataccttctgtctccatttaaatagctcttattctatagaagctattaaaacttttctttttataaaatagaaagcaactatgtgtatgcattcagtcgaactacaagaggaagaaaagttccttaaagaagggttgaattggttatcttaatcatgtgccaccttttcagcatgcaaagctgaggttataattgctgataccggttaaagaagggggctactgtcttggctgatgtcatgttagccaactggccataggatgctcatctctgtgggtattctacctatttactcttttttttttttttttttttgagacagagtcttgctctgtcacctaagctggagtgcagtggcacaatcttggctcactgcaacctctttctcctgggtttaagcgattctccctgcctcagcctcctgagtagcttcgattacaggcacctgccaccacgccttgctaatttttgtatttttagtagagacagggtttcagcatgttgaccagactggtcccaaactcctgacctcaggtgattcgctcacctcagcctccccaagtgctaggattacaggcgtgagccaccattcccaaccctgttctgcctatttacttcttcaagctccatgacagccattctgagttgtcatgttgtatccattttttttttcactgtagaagaccagcatatgccaccccaaagtaagccattttggcataaggattattttgagctgaagatatttgcgatttaccagatggcagaaagaagcctttcttggagcttcccttaactgactaaaagcagaaacttctgagaaatgtggacyaccataaatcccgtctcccagggaagttttatggccatgaagaagatgggaagtgagtgctgagatggatttaaataaaccttactctattacttatatttatataccttcccacagttcaccatccttgggagcttaaacctctttcctttgtctggtcatgtttctacaaagtcatagcttttgttaagataatatattagcccaagttctaacc

SEQ ID NO: 717075 - DNA, 1717 bp, Homo sapiens
ttttttttttgagacagagtctcactctgttgcccaggctggagtgcagtggcacaatctcggctcactgcaagctccacctcccgggttcatgccattctcctgcctcagcctcccaagtagctgggactacaggcatccaccactacacctggctattttttttgtatttttaatagagacggggtttcactgtgttagccaggatggtcttgatctcctgaccttgtgatccgcccgccttggcctgccaaagtgctgggattgcaggcgtgagccaccgtgcccggccagatactaatatctttcaagatttagaaaagagtattttagttaaataaatagttcagaagtatgaaacaatatgataaaatatacctaacattcatggctttttgccgagggacagcagaatcagccaaatagaggaaggtatactatgtagctcatgaaaattcaacttcttggcctctttctttcacgaatctcaagtctccatttctctcattctaaataaatattgttccctgttgaattctatagtcttaattttgtctccttcttcttaaagagggttgccaaatatatgaatttcaggcctgcaaaacttgaatctatccttttatgtcaatgcttgtagttaagagaaaagaagaaacaaagttcttataccttctgtctccatttaaatagctcttattctatagaagctattaaaacttttctttttataaaatagaaagcaactatgtgtatgcattcagtcgaactacaagaggaagaaaagttccttaaagaagggttgaattggttatcttaatcatgtgccaccttttcagcatgcaaagctgaggttataattgctgataccggttaaagaagggggctactgtcttggctgatgtcatgttagccaactggccataggatgctcatctctgtgggtattctacctatttactcttttttttttttttttttttgagacagagtcttgctctgtcacctaagctggagtgcagtggcacaatcttggctcactgcaacctctttctcctgggtttaagcgattctccctgcctcagcctcctgagtagcttcgattacaggcacctgccaccacgccttgctaatttttgtatttttagtagagacagggtttcagcatgttgaccagactggtcccaaactcctgacctcaggtgattcgctcacctcagcctccccaagtgctaggattacaggcgtgagccaccattcccaaccctgttctgcctatttacttcttcaagctccatgacagccattctgagttgtcatgttgtatccattttttttttcactgtagaagaccagcatatgccaccccaaagtaagccattttggcataaggattattttgagctgaagatatttgcgatttaccagatggcagaaagaagcctttcttggagcttcccttaactgactaaaagcagaaacttctgagaaatgtggaccaccataaatcccrtctcccagggaagttttatggccatgaagaagatgggaagtgagtgctgagatggatttaaataaaccttactctattacttatatttatataccttcccacagttcaccatccttgggagcttaaacctctttcctttgtctggtcatgtttctacaaagtcatagcttttgttaagataatatattagcccaagttctaacc

SEQ ID NO: 717076 - DNA, 959 bp, Homo sapiens
aatttcaaggcagtggttcttagcttgctgggctctgtggaagtgggacccgctgagtgagaccacttgacttcctggmttcagccccctttccaggggagtggagaattatcctgtctcattggagttccaggtgctgctggattacgaaaaacctcctgcagcttggtgcctgcccaaacagctgcccagttttgtccttgaaacccgggtccctggtggtgtaggctcatgagggaaactcctgatccaaggattgcaaaaatccatgggaaaagcatagtaccctgggcaggtggcacagtccctcaccgcttcccttggctaggggagggagatcctccggctccgtgcacttttgggtgaagcaacgtcccactctgcttctgctcactgtctgtgggttgtacccaccacctaaccagtcccaatgagatgaactgagtacctcagttggaaatgcagaaatcgcctgccttctgcattggtcttgctgggagctacagaacggagctgtttctattcagccatcttgacccctcctgccaagcatcgtttatttaaaacattttttatagttttatggtgctgacacacaggatatgcctgaaattttgtaaaataaataacaatgttcaagcaaataacacatttataaacctgccccaaagatgcaataaataacagtcctggaaagaagtaactattctcagagttcccagggcccagaagggtacacaaccaaccagcccagggacaccaaggctctgtctctatcccacaaacaaaacctgcgatgctgcattgaggtcactgcccagcaccacctgcccggcctccaggttcaagccccaggaaagtcagaatagaagaaaatagaagtgagcagtaagcagtaagaacttacttttatagatagtttaatttctatgaaaatgttcattatatttttggataac

SEQ ID NO: 717077 - DNA, 959 bp, Homo sapiens
aatttcaaggcagtggttcttagcttgctgggctctgtggaagtgggacccgctgagtgagaccacttgacttcctggattcagccccctttccaggggagtggagaattatcctgtctcattggagttccaggtgctgctggattacgaaaaacctcctgcagcttggtgcctgcccaaacagctgcccagttttgtccttgaaacccgggtccctggtggtgtaggctcatgagggaaactcctgatccaaggattgcaaaaatccatgggaaaagcatagtaccctgggcaggtggcacagtccctcaccgcttcccttggctaggggagggagatcctcyggctccgtgcacttttgggtgaagcaacgtcccactctgcttctgctcactgtctgtgggttgtacccaccacctaaccagtcccaatgagatgaactgagtacctcagttggaaatgcagaaatcgcctgccttctgcattggtcttgctgggagctacagaacggagctgtttctattcagccatcttgacccctcctgccaagcatcgtttatttaaaacattttttatagttttatggtgctgacacacaggatatgcctgaaattttgtaaaataaataacaatgttcaagcaaataacacatttataaacctgccccaaagatgcaataaataacagtcctggaaagaagtaactattctcagagttcccagggcccagaagggtacacaaccaaccagcccagggacaccaaggctctgtctctatcccacaaacaaaacctgcgatgctgcattgaggtcactgcccagcaccacctgcccggcctccaggttcaagccccaggaaagtcagaatagaagaaaatagaagtgagcagtaagcagtaagaacttacttttatagatagtttaatttctatgaaaatgttcattatatttttggataac

SEQ ID NO: 717078 - DNA, 959 bp, Homo sapiens
aatttcaaggcagtggttcttagcttgctgggctctgtggaagtgggacccgctgagtgagaccacttgacttcctggattcagccccctttccaggggagtggagaattatcctgtctcattggagttccaggtgctgctggattacgaaaaacctcctgcagcttggtgcctgcccaaacagctgcccagttttgtccttgaaacccgggtccctggtggtgtaggctcatgagggaaactcctgatccaaggattgcaaaaatccatgggaaaagcatagtaccctgggcaggtggcacagtccctcaccgcttcccttggctaggggagggagatcctccggctccgtgcacttttgggtgaagcaacgtcccactctgcttctgctcactgtctgtgggttgtacccaccacctaaccagtcccaatgagatgaactgagtacctcagttggaaatgcagaaatcgcctgccttctgcattggtcttgctgggagctacagaacggagctgtttctattcagccatcttgacccctcctgccaagcatcgtttatttaaaacattttttatagttttatggtgctgacacacaggatatgcctgaaattttgtaaaataaataacaatgttcaagcaaataacacatttataaacctgccccaaagatgcaataaataacagtcctggaaagaagtaactattctcagagttcccagggcccagaagggtacacaaccaaccagcccagggacaccaaggctctgtctctaycccacaaacaaaacctgcgatgctgcattgaggtcactgcccagcaccacctgcccggcctccaggttcaagccccaggaaagtcagaatagaagaaaatagaagtgagcagtaagcagtaagaacttacttttatagatagtttaatttctatgaaaatgttcattatatttttggataac

SEQ ID NO: 717079 - DNA, 1047 bp, Homo sapiens
aaaaatgttctgaccggtattactttaacatggaaatgaataaatttcctcattggtgtgaaaaatcatggtaataattggatggatcttggtgctagaggcctattatcactaaatcacctcaatccatcattatatagaaaaaagttatataayttccaatatctttttcagaaggctgagctgatagttgtaagttatagtcatctaaattgacccaatcattctttctgaaggtttggtggggacaaatgtgaattagtatcacctaatatagctggagtagtaacggtccctcatttagcacataagtcagcctggacattaccttcggcttctcctgtggtattttgactacagacttctgtggtaatagctgtaatgttcttggaatactgaataccttctaagaagtcattggtatgtttactattcttaattggagtatccaaaaaggtcataaatcctctctgtttccataacacaattcaaaaagcctacctactggccatatacatgatcaacatttgccacagtgcaggctccagtcacagatactagtttggctactgggtagatcaagcattaggtggtggagctgcttcaggacttgatgtccagaggaatgacatatcctgcataggaatgcctttgtcatttttaatctgagagccattaatgaacaatattaaatcatgtttaacccaacaagctacccagagtagctaaacccctttagtttgccatatgaaagcaggaagtgaaaaagtatacagctacccacacaggccaggctcttctgctcactactggttgcactgacgtgaaaaagataatctacatgtgtactaacctgagagtttcagaatcctgcttattggtaactagtctaataaatgtcctgaattctggcttatccagttagccactcttctcatagaaggtaggtagaaagaggcagagcaagatgggaagttcctttcatttgtgggaaaggagaaaatcatttgttaaaagtcgtaacttgtaaagaagacaaaaggacat

SEQ ID NO: 717080 - DNA, 1047 bp, Homo sapiens
aaaaatgttctgaccggtattactttaacatggaaatgaataaatttcctcattggtgtgaaaaatcatggtaataattggatggatcttggtgctagaggcctattatcactaaatcacctcaatccatcattatatagaaaaaagttatataatttccaatatctttttcagaaggctgagctgatagttgtaagttatagtcatctaaattgacccaatcattctttctgaaggtttggtggggacaaatgtgaattagtatcacctaatatagctggagtagtaacggtccctcatttagcacataagtcagcctggacatwaccttcggcttctcctgtggtattttgactacagacttctgtggtaatagctgtaatgttcttggaatactgaataccttctaagaagtcattggtatgtttactattcttaattggagtatccaaaaaggtcataaatcctctctgtttccataacacaattcaaaaagcctacctactggccatatacatgatcaacatttgccacagtgcaggctccagtcacagatactagtttggctactgggtagatcaagcattaggtggtggagctgcttcaggacttgatgtccagaggaatgacatatcctgcataggaatgcctttgtcatttttaatctgagagccattaatgaacaatattaaatcatgtttaacccaacaagctacccagagtagctaaacccctttagtttgccatatgaaagcaggaagtgaaaaagtatacagctacccacacaggccaggctcttctgctcactactggttgcactgacgtgaaaaagataatctacatgtgtactaacctgagagtttcagaatcctgcttattggtaactagtctaataaatgtcctgaattctggcttatccagttagccactcttctcatagaaggtaggtagaaagaggcagagcaagatgggaagttcctttcatttgtgggaaaggagaaaatcatttgttaaaagtcgtaacttgtaaagaagacaaaaggacat

SEQ ID NO: 717081 - DNA, 642 bp, Homo sapiens
aaacccattcgtcaagtactaaataagcattgaatcaatgctgggcatagtaccatgttgggtagggcagtgacagttcgaagtgaggggatagagggattacaaagactaagatagtgcaagtggagattgagaatgcaactctatacccagtgctgaatcttgatstggctcttgctacatatgtgatttttggcaaactaacctctcagacctcagtcctctcatttttaagttagtacaattcctggtacattgccagaactcaaacatgggatattagcattactgtgccagtccttatggagcgtgcgatctagggataagacagaaattgaaacagtaaaatagcatgtgatgcttactgtgatagagccgagcaaagctctgtgggatcgccaatgcatggaggcctaaccacctctaagggtatactggagtggttgtgaactaaaccatgttctaaagctttgcaggcaatcctcacgccatcctcataaggtaaatacagtactattatccttttttaaaaattttttccacctttattgagatataattgacaaataaaaattgtatatgtttaaagtagacaacatgatgttttaatatatgtatacattatgaaataattaccacaat

SEQ ID NO: 717082 - DNA, 635 bp, Homo sapiens
tagtgaaattagtaatgctaagtgactgttagttataatacatagtcatatgtaatagatacccaaaataaaatgggttaaataagataaacatctattactttctcacttaaaagtcttgatgtaaatatttcaccattggtatggcagctcaatagtcatattggactcaggcaacatttgtgcttctgctcttctatctctaggacaggtctgacacaataaatggaataaataaacatcttattaaaggctattaggatggagtgacatcagcaagatggagaggaaagactttctagcactcatccccttgcagaaacataaattcaatcaactatccatgcatgaaaatgytttcatagtagctaaagaatccaggtgagaggttagattgtttcagtggagcacagaaattaaaaaaaaaaagaggcgttgatgggagtaagaacagtttcacattatcacatcaccaattccctgaacccaggtagcacaaagaagatactcttcacctagaaaaaagagaatgaagtaagaatgaagtaagtatctaacttcactgtggaacaccagcaaaattcagcactaggctagtccccacagcctcaggctccaggttagcccttatatct

SEQ ID NO: 717083 - DNA, 1592 bp, Homo sapiens
ttttcactttaacacagcttttatttatatatatatattagtgtcaatatgtcaatggaactttttcctgcactacaccataaactcaatgagagctgcaaccctgttcttctttttactattgtatacccattgttaaccactgagattggcacatactaggaactgtaataaaatctgctgaataaatgaatgaataaacataaaaatatgtttaactacatatttttccataatgttttattacatggatgattatttaatttatttattttcagacagaatctcgctccgtcgcccaggctggagtgcagtggcatgatctcagctcactgcaaccttcacttcccaggttcaagtgattctccttcctcaacctcccaagtagctgggattacaggcacatgccaccacacccagatagtttttgtatttttaatagagacaacgtttcaccacattgctcaggtgggcctcaaatgccttacctcgtatgatctgccctccttggcctcctaaaatgtgattacaggtgtgagccactacacccagcctggttttatawagtgataatcgattatgttattctagaatttacctaatgatcacataggaaattaatgaaaagaaatgacctttgttttcttcaaccatgactttttaatatcaaaaaataatgaaaccgtaacgaccaaaataaataaaaaataaactgaacattttttcttctctccaatcagcactacctgaaccctaatctggaagaaaatatccttgccaattcttttttgagagaatagtgaccatcatgctggggtggcttaacatatgtgtgctggactgaatgtcttgcttctgaggaacagagtaatgtggaagtaaaaggttgtgacttctgagacaaggccagcgaaggaatgtagcttcctcctcgctctctctcacgaaaggctaattctggagaacttcaggggtcataccgtgaggacagtcaagccgccttagggagtggtccatgtgaagaagaacagaggcttcatgccagcagccactggttgaaccctatagaaagcagttgcttcaaccccactcaagacctaagaaaactgtaggcctggcaagctgtgatatagtttttaaaatgctatctgaaccattttgagaccctagctagtgtccagtcagttgttcttgagagagtaagtccaaatcccaaacaactcccttcttgggctctcacaatctgtgccactatacctcaaccctaatcactcagggccaagtaccaggaaatcaggaacagtccctctgaccagagcccattgaacatactcaagccgcctgatcacaagcctgcttaccctgcctggcctgctccttcctccagaaagaacaataaggacttttgcccaccaatcccctttctccctctgcctcatgaccaatgcccagtgctttctgtgaacagcactgcatggcctgctatttctccccagtgagctgtgagtatagcagaactgtaggactccctccagtttctccctctgtctttctaaattattactattatttagagattgtctcactctgtt

SEQ ID NO: 717084 - DNA, 1206 bp, Homo sapiens
tggtcattactgagaaatactaatctatataaaaatgcagcattctgatccgcatgaaaccatttacaaaattattgaaaagcatgtctctttaaccatgcaccctgacaactggtgcaaccaaatgaggggtgatgacaatgaaagttcttgtagcagcctgatgatattttattttgtttttgttttgttttgaaagatggtgtccctccctgtcccccaggctggagtgtaatggtgcaatcacagcttaccgcagccttgaactcttgaactcaagtgatcattgagcctcagcctcccaagtagctgggagtacaggtgcatgccaccatgccaggctctgatgatgattctaattgtcattgaggaagtcagatggtggaattcagaactgactctacagttataaccaagaggctgtgtattcttccagtattctctcaaagttctagatatggttagcaaactgcatcagaggaactccagacatcttctggatctccttccaaggtcttggttgtccgtggccacagcattgacatttgggctaagaaacactatatgccaaacaataatttgtgccacactctgtatttgatagttattcaccacttggatccttggccaacttgagaggcactgaaacttctgccgtggcttctacaattcagtcagttatttgcagtttacccctagttattcgtgggttaatagagggcccctaattactactctacatagtaaggaagacgctcttttgtgttcatttgaaaagggtagttatgttgtgggatttctcctttttgaaggctctaatgtcttccttagctttctctttaraattgaatcaatttctccttaaatttctgatatttctggctaagcatttactccacgattgcatatctctttgcttttctcttcttcgtcacattcacatatctgtcccgtatctaattctcagtgttatatttacataattaataggttaatagtattcgattctaggttcctttaaaattattaggattgtaatcaattatggaatgttatttctttgctaagaaacattattttgtgaattattcttgcaaatgactgaaaatatttccttctttattcttttataacaaagcatatactaccttatctgaatcaagatcatattaatgcagtaaagacatctctgtgaacaaacatcat

SEQ ID NO: 717085 - DNA, 1534 bp, Homo sapiens
tttttctaaatattcttccaaattgatactgatgtatgcagtggtcaggttgaaaactgatgttctatactctgctcttctttctagatcacttcacacggtgcgctagatggcagaggcttcctaagggaaaggaagcctcatgccggctagtaagttactcatggggagatccttcacattacttttcataaaacgtagtacagtctctgaatgtggagaggcatcaaaagttcaaaaggcatggtacccaaaggcaccatttagcaccatctcaaaatgatggtagcaggtttcaaacccacatcgtctgtttccggagccccctccccacgccccctcccccgtttttttcttttttttttttttttttttttttgacatggagtttcattcttgttgcccaggctggagtgcagtggcgtgatctcggctcatcacaacctctgcctcctgggttcgagcgattctcctgcctcagcctcccgagtagctgccattacaggcatgcgccaccactcccagctaattttgtattttcagtagagatggtgtttctccatgttcgttaggctggtctcgaactcctgacctcaggtgttccgcccaccttggcctcccaaagtgctgggattacaggcatgagccactgcacccggcaatcccccatttttttttttttaccagagtctctgtaaataatacagccctagaacgtggcttcattttatccatattaatttaaagtcttcataagaagcaaattgaaccttagctaatatttaaccttattatcaaaagacttaactagtctttattatgctgacaccagtctcctaaaataaaatagttctgaccttataaggtttgactgtttcattgtaatatgacatttcagattcttaggaataattgctgtgctattttattttaattgccatgcacaacataaaacggaatgagaaattcttctcccaccaaacttgaactaacagatacttttttgataatgaatcatggaattttaagtgtttggttctgttttatttattttgtcattgacggtaatcacattgtttatattagcacgactaggctgactccacctgtgatatcaccatatatattattgtattttatatttatgcattgtgggaaagagagaggaataaatacaaaacatattttaatgtctgtttagaaattacacaacgtggaagaataccctwaaaatagcactagacatactgatgatgagtacacttcagtctccagaacggaatagcaatggccatgattttctataaaagcttccagttattcatttgcagtaattcagaactgtgtccccatttgagtggcactcaaaaatcccttggtactgaagcaaaacaagatattgtgaaaattctgctatccaatagctggatttagaaaatgatttaaataataattggacattcaacactgaagaacactaagggaagaaccttacgaagcctaattttgtttagacaattttgaatttactgat

SEQ ID NO: 717086 - DNA, 1534 bp, Homo sapiens
tttttctaaatattcttccaaattgatactgatgtatgcagtggtcaggttgaaaactgatgttctatactctgctcttctttctagatcacttcacacggtgcgctagatggcagaggcttcctaagggaaaggaagcctcatgccggctagtaagttactcatggggagatccttcacattacttttcataaaacgtagtacagtctctgaatgtggagaggcatcaaaagttcaaaaggcatggtacccaaaggcaccatttagcaccatctcaaaatgatggtagcaggtttcaaacccacatcgtctgtttccggagccccctccccacgccccctcccccgtttttttcttttttttttttttttttttttttgacatggagtttcattcttgttgcccaggctggagtgcagtggcgtgatctcggctcatcacaacctctgcctcctgggttcgagcgattctcctgcctcagcctcccgagtagctgccattacaggcatgcgccaccactcccagctaattttgtattttcagtagagatggtgtttctccatgttcgttaggctggtctcgaactcctgacctcaggtgttccgcccaccttggcctcccaaagtgctgggattacaggcatgagccactgcacccggcaatcccccatttttttttttttaccagagtctctgtaaataatacagccctagaacgtggcttcattttatccatattaatttaaagtcttcataagaagcaaattgaaccttagctaatatttaaccttattatcaaaagacttaactagtctttattatgctgacaccagtctcctaaaataaaatagttctgaccttataaggtttgactgtttcattgtaatatgacatttcagattcttaggaataattgctgtgctattttattttaattgccatgcacaacataaaacggaatgagaaattcttctcccaccaaacttgaactaacagatacttttttgataatgaatcatggaattttaagtgtttggttctgttttatttattttgtcattgacggtaatcacattgtttatattagcacgactaggctgactccacctgtgatatcaccatatatattattgtattttatatttatgcattgtgggaaagagagaggaataaatacaaaacatattttaatgtctgtttagaaattacacaacgtggaagaataccctaaaaatagcactagacatactgatgatgagtacacttcagtctccagaacggaatagcaatggccatgattttctataaaagcttccagttattcatttgcagtaattcagaactgtgtccccatttgagtggcactcaaaaatcccttggtactgaagcaaaacaagatattgtgaaaattctgctatccaatagctggatttagaaaakgatttaaataataattggacattcaacactgaagaacactaagggaagaaccttacgaagcctaattttgtttagacaattttgaatttactgat

SEQ ID NO: 717087 - DNA, 588 bp, Homo sapiens
gaccttggggaagggaaccagctgtgtaaaagatgatgcagtagcagctggagaaataccacaagcagaaaatgactgcgtacgactgtccttccttgtgaaataggtgtaggcacttattyttgggctaaccatgtcttataaaatatatgtgatactgaaggattaaagacagtctttcagtaatactgctttcaaactaaaaacatcatgcactcagatgtgcttacagaaaaaaattatttatataaataaatattgagaaaacagtgattcgagtgaatatgggctacctaatttttatgtttttgtattttttatttattgttattttttgagatggagtttcgctcttgttgcccaggctggagtgcaatggcgcgatttcggctcaccacaacctctgcctcccgggttcaagctattctcctgcctcagcctcccaggctacctaatcctaaactatattcctagattctcaatagaacttcaccttgagaatcatgaatacaaaaacacttacaaatgaaatagtttggggtattccactagaccaagggatataaagcaatctaagatatgattcta

SEQ ID NO: 717088 - DNA, 630 bp, Homo sapiens
cgaagattattttgaatgcaagggatttgagattcaacaaatacagaaagaagccttctcagagcttcccttatgtgacaaaaggcagcaacttctggaaaataaggctgtcataaattactcccaggacagagacagagggtaaaccttccctaaatcccctcttaaggggagtttcatggttgtgatgaaggcagtaaagccactcgcacctgcataaatgaacatcacaagtttttgtctcacgtttgttctaaaaatcctttagtctttaagaaaacctatttgttgttcccacagtagtgttttcatttcttttctttctcctactaatgtatataagcctctaactttaagcatttagtaagctagttacatcttctgttagttcctgtatagaaatgaagwttttcactcctgttaatctatggtttgtcaattactttgtagacctgctgtaaatgaacccaagaaggcagaataaaatgttttcctacatgacactagagatgaaagcacctaataagatttcaaatgtcaactataaggatattacagaaaattagctttgttaaaagcaaaatccattaataggttttatattttgtggtattctttaataaaggtgaa

SEQ ID NO: 717089 - DNA, 630 bp, Homo sapiens
cgaagattattttgaatgcaagggatttgagattcaacaaatacagaaagaagccttctcagagcttcccttatgtgacaaaaggcagcaacttctggaaaataaggctgtcataaattactcccaggacagagacagagggtaaaccttccctaaatcccctcttaaggggagtttcatggttgtgatgaaggcagtaaagccactcgcacctgcataaatgaacatcacaagtttttgtctcacgtttgttctaaaaatcctttagtctttaagaaaacctatttgttgttcccacagtagtgttttcatttcttttctttctcctactaatgtatataagcctctaactttaagcatttagtaagctagttacatcttctgttagttcctgtatagaaatgaagattttcactcctgttaatctatggtttgtcaattactttgtagacctgctgtaaatgaacccaagaaggcagaataaaatgttttcctacatgacactagagatgaaagcacctaataagatttcaaatgtcaactataargatattacagaaaattagctttgttaaaagcaaaatccattaataggttttatattttgtggtattctttaataaaggtgaa

SEQ ID NO: 717090 - DNA, 574 bp, Homo sapiens
tgacatcaatatttcccctgtttttctcctttctttcttataggagtcattcttgccttgggtttgtttatatttttggttatctgttttctagtgtattttttatttcctaatttatttattttgtattctaaagcctttcttwtagcttttcaggtgtctcttcatgttcagtttttaagtcttgttgacataagtaaattcattagttaactaagtcacatcatcataataaaagcaataagactattacttttttcagtgctgcttgagagcattctgtaggtttttaaatctaaacaatctcccattttagttttggtttcttcttcgatcatgagttagaggtagagtattgtttattcttttaattccaaattttaatacaatcctattattattagatttgccctgctgtagtttatgatatatcttgaaagatatgtacttactagcattggatatttatattctttcactgtttataagtaaaatattatacataggaaatttgacattaatacagatttgaaaattattggtagtattattcaaattgtccatattatatttt

SEQ ID NO: 717091 - DNA, 1792 bp, Homo sapiens
cctctcgagtatcgggattgtcctgataggctgttatgtccccactcccaagaaacatattttgtgactcttagcatgtagaagtcttacctcgggaatgggggacacaaatgagtctcctcctgggtggattagaactgagtgggtaaaaggtaaatggtctgtctgcctgagctcccacaagcgagttgagtggccttagggttcaccaggttcagtcagttcaaaagatgctaaatgatgtccagtagaagcgcccacataacctgcatagcttcctacctcccttttgcaggtatataagtagtgggttctgtggtacacccccagattcctcattcagaactatgggaaactgacagctcctagtagagttctgtgagaattgctctgggctggactgcaaggagctgcttttcccgagaactgccatctccaataactactcaatgcagaattatttaaaaaagaaccataacgcttgtttcaattcaggaccacttttcagggttatcccattgcaaagctacgtgtgggattggctgaattcaaatattctctctaccccatcctgctttctgtcctctccagcaagtggtgatcctgagagtttgcgctaatgaaattcctgcatgcaaatcacaatctttttgttttagaggtaacccagttagcatcaccatctccaaaaaatttgaagctctaaagtcctaggcagggcatcttcctgatatctattggtgaaaaggctttcttctttatatcaaggcatttcagtgagaaataagacatgaggaatagtcaaatttgtatgcggaggctctatcttgtttacatgtcttgtgatatgacagaacagattttatctgtgtcattttagtgagctaatgtattttgtgctgcaatcttgaaaatagggctaaatgagagaaaaaaaggtttgaagaagtgatctagcaataacagtagtgacaaaaatcacttaatggaagaagtggaggggattaactaaagcaaacctttccatttacagatgtgtatgacttagtctgtttcttcagtgcatggcttataagatcaatttatttttagccttgtaacctttgcataggatttaaaggagaagggttttatttacgcttgtgacctttattggatccacgtgctatcatttgagggctatattaaacaacttagaaaaaattttttctgggataaaaaaatcataggtgaaaagttttattttagaaagcactgaaaagaaataaatttgaaggaaagcgtgaaactttggggttgcaatgagtgatctctcctacagaggaataaacagtcttgtaagtagtgaaatttgaataaggctgaaagggatgacctgcgtgaaagtgttttccatacattttcttgaattttaacaaccatgacttttctagagctagcttgaattccaaaacaatactatttgaaaattagaaaatgaatttaggccaggcaacagtggctcacacccgtaatcctagcactttgagaggctgaggcgggtggatcacttgaggtcaggtgttcgaaaccagcctgggcaacatgttgaaaccctgtcygtactaaaaatacaaaagaaagaacaatgtagccagggtggtggcacacgcctgtaattcccgctactcaggaggctgaggcaggagaatcacttgaacccgggaggcgcaggatgcagtgagccaagattgtgccgctggactccaggctcggcaatagagtgagactctgtctccaaacaaaaaaaaaa

SEQ ID NO: 717092 - DNA, 1219 bp, Homo sapiens
ccccataaaataaatgttttgtattaatagttattttccatattaaaaataattcttttgaatcattcsttacaaaatatctacaagtattgttgggatggctaagacaaggaccttaaataataaaatcttgacatacttcatgctatggaagcaataaatttgaaatttaacatttgaagtaatcatacaaataataaaaatgttataagcaataaaattattgtttctttttcctaagatgtaatagtgaaacatactgtttttacaaacaaattttcacaagcaactgattttgtaaaccaatttgactttcttttaatcagtattaacccttgccaatagtaatcatattaaaattttctcagtctctccccaataggaaataagtaggagggacatcaagaatgaagggtttatttattaaaagggtgctaactcattccatttggagacaatgacagtcgtagaagaaccagcttggttaagagaagaagacatctgaccagaacatagaggagaaaccccctgtctaaggtatctattcagggaagaatttgggacatagagttttcttttaggatctgggatttccgccattttgacaaaacagtaatagctaaataaatcaataactggaatttaaatctgctgatttaggcaaattaaacttgtttttaacactcttttattaattactggtgggaactggtcatacatactcactaaaagatagattcccactcactttcgctaattctacagataaagcttattcttatgaattattcaagttttattgctgtatagcaaccattggtaaaatgggatttaagttaaaaaatcataaagcaaacctgtctttgttcagaaaaatttctataccagaaatgcttcacctctgcctaagacgtttcctggtattaaagtagatactgaattcaatacctgcctcaacactttgagacctctgtggaagcattgactatagtattgtcctgagatcctaaaagcatgagttgctactttttaaagctaaaaacttctgtaaaataaaattttatttaaataatgggcttattcttatatttaaagaagcacttagctcctaaccctaattactctaaattactcttctattatcagacctttataaagttcacagaaagctctctagtaaccagcaaattattttgtgatagcattgctgcctgagaag

SEQ ID NO: 717093 - DNA, 1219 bp, Homo sapiens
ccccataaaataaatgttttgtattaatagttattttccatattaaaaataattcttttgaatcattccttacaaaatatctacaagtattgttgggatggctaagacaaggaccttaaataataaaatcttgacatacttcatgctatggaagcaataaatttgaaatttaacatttgaagtaatcatacaaataataaaaaygttataagcaataaaattattgtttctttttcctaagatgtaatagtgaaacatactgtttttacaaacaaattttcacaagcaactgattttgtaaaccaatttgactttcttttaatcagtattaacccttgccaatagtaatcatattaaaattttctcagtctctccccaataggaaataagtaggagggacatcaagaatgaagggtttatttattaaaagggtgctaactcattccatttggagacaatgacagtcgtagaagaaccagcttggttaagagaagaagacatctgaccagaacatagaggagaaaccccctgtctaaggtatctattcagggaagaatttgggacatagagttttcttttaggatctgggatttccgccattttgacaaaacagtaatagctaaataaatcaataactggaatttaaatctgctgatttaggcaaattaaacttgtttttaacactcttttattaattactggtgggaactggtcatacatactcactaaaagatagattcccactcactttcgctaattctacagataaagcttattcttatgaattattcaagttttattgctgtatagcaaccattggtaaaatgggatttaagttaaaaaatcataaagcaaacctgtctttgttcagaaaaatttctataccagaaatgcttcacctctgcctaagacgtttcctggtattaaagtagatactgaattcaatacctgcctcaacactttgagacctctgtggaagcattgactatagtattgtcctgagatcctaaaagcatgagttgctactttttaaagctaaaaacttctgtaaaataaaattttatttaaataatgggcttattcttatatttaaagaagcacttagctcctaaccctaattactctaaattactcttctattatcagacctttataaagttcacagaaagctctctagtaaccagcaaattattttgtgatagcattgctgcctgagaag

SEQ ID NO: 717094 - DNA, 1219 bp, Homo sapiens
ccccataaaataaatgttttgtattaatagttattttccatattaaaaataattcttttgaatcattccttacaaaatatctacaagtattgttgggatggctaagacaaggaccttaaataataaaatcttgacatacttcatgctatggaagcaataaatttgaaatttaacatttgaagtaatcatacaaataataaaaatgttataagcaataaaattattgtttctttttcctaagatgtaatagtgaaacatactgtttttacaaacaaattttcacaagcaactgattttgtaaaccaatttgactttcttttaatcagtattaacccttgccaatagtaatcatattaaaattttctcagtctctccccartaggaaataagtaggagggacatcaagaatgaagggtttatttattaaaagggtgctaactcattccatttggagacaatgacagtcgtagaagaaccagcttggttaagagaagaagacatctgaccagaacatagaggagaaaccccctgtctaaggtatctattcagggaagaatttgggacatagagttttcttttaggatctgggatttccgccattttgacaaaacagtaatagctaaataaatcaataactggaatttaaatctgctgatttaggcaaattaaacttgtttttaacactcttttattaattactggtgggaactggtcatacatactcactaaaagatagattcccactcactttcgctaattctacagataaagcttattcttatgaattattcaagttttattgctgtatagcaaccattggtaaaatgggatttaagttaaaaaatcataaagcaaacctgtctttgttcagaaaaatttctataccagaaatgcttcacctctgcctaagacgtttcctggtattaaagtagatactgaattcaatacctgcctcaacactttgagacctctgtggaagcattgactatagtattgtcctgagatcctaaaagcatgagttgctactttttaaagctaaaaacttctgtaaaataaaattttatttaaataatgggcttattcttatatttaaagaagcacttagctcctaaccctaattactctaaattactcttctattatcagacctttataaagttcacagaaagctctctagtaaccagcaaattattttgtgatagcattgctgcctgagaag

SEQ ID NO: 717095 - DNA, 1219 bp, Homo sapiens
ccccataaaataaatgttttgtattaatagttattttccatattaaaaataattcttttgaatcattccttacaaaatatctacaagtattgttgggatggctaagacaaggaccttaaataataaaatcttgacatacttcatgctatggaagcaataaatttgaaatttaacatttgaagtaatcatacaaataataaaaatgttataagcaataaaattattgtttctttttcctaagatgtaatagtgaaacatactgtttttacaaacaaattttcacaagcaactgattttgtaaaccaatttgactttcttttaatcagtattaacccttgccaatagtaatcatattaaaattttctcagtctctccccaataggaaataagtaggagggacatcaagaatgaagggtttatttattaaaagggtgctaactcattccatttggagacaatgacagtcgtagaagaaccagcttggttaagagaagaagacatctgaccagaacatagaggagaaaccccctgtctaaggtatctattcagggaagaatttgggacatagagttttcttttaggatctgggatttccrccattttgacaaaacagtaatagctaaataaatcaataactggaatttaaatctgctgatttaggcaaattaaacttgtttttaacactcttttattaattactggtgggaactggtcatacatactcactaaaagatagattcccactcactttcgctaattctacagataaagcttattcttatgaattattcaagttttattgctgtatagcaaccattggtaaaatgggatttaagttaaaaaatcataaagcaaacctgtctttgttcagaaaaatttctataccagaaatgcttcacctctgcctaagacgtttcctggtattaaagtagatactgaattcaatacctgcctcaacactttgagacctctgtggaagcattgactatagtattgtcctgagatcctaaaagcatgagttgctactttttaaagctaaaaacttctgtaaaataaaattttatttaaataatgggcttattcttatatttaaagaagcacttagctcctaaccctaattactctaaattactcttctattatcagacctttataaagttcacagaaagctctctagtaaccagcaaattattttgtgatagcattgctgcctgagaag

SEQ ID NO: 717096 - DNA, 640 bp, Homo sapiens
ggtgacattataatttgacacaacttttctataccacaatttcataatttctatcaaagaatcaaatctcatttgtgaaaaatcattttaaggtattaacgaaaattattaaaaaggccactggtatacagatgttaatcatcwctctgtttataattaaaattttatcttaatagataacgataagaaataaacatttcatgacataatcattgatcacttagttatcaactataaaaatgtaactatgaaacctatgatataaataaaaaaaagagacaccacatttcctataaaaatgcaggatactttttagacaagcatataccaggaatacataacataggttgatatcgcattaaggtatctagattgtcagaattttttaaagtatactttctacaatattcatattacttcttttttttttttttttttgagacagagtctcgcttggtcgcccaggttggagtgcagtggcacaatcttggcttactgcaacctctgcttcccaggtttaagcgattttcctgcctcagcctcccaagtagctgggactacaagtgcccgccaccatgcccagctaatttttgtatttttagtagaggcagggtttcaccatgttggccaggctggtctt

SEQ ID NO: 717097 - DNA, 1187 bp, Homo sapiens
tgcaaatgctctggggtaagaatgaagttccactctactgacggcaagaactccaggttgcttggagcagatggtttatatagggcacaaaactacattcacttcttgtggttctcagtcccttcacctatttgtctggccattacccttgctaatcctaaactttagtattacggtaaaccatctttctcctggattcctagttccaggttcttaacaatgctagaggatgtcacaagcactgtaccatcagaaagttagcgtccttcagtgctgcctgaaatccttttttgagtatcttaccttagattatctcttcccacttccccagaggcctgtaattttccaagttgatgccaattttataaacattctccacttcatcctgagctctcatctacccccaccaaactggcttttctcctgcttcaccaagatatttcaggcaattagaaacgaacttccctgatttactggccacacaaccatggagtcattgatagctagacagtttctttttctttataattgttttctgagggacctggctctgtcagtcttctcttttactttctgcaagtaatatctgccatttaattagctcattttcttcagaaaaacactatcatttatgttcaactcaattttttttctccctatcctatcagctcttcatcccactccctgaattctaaatctaaccacttcttatcatctttcttgctttcattctcatctgtcatttacttttacccaaattactgtagggcccgttgatttgacctcttgattctaatcttgccgctttcacctaacacgtacagagaggtcgaagacatcatttgrgaaataaatataaattgatatttccctgtttataaaagattcagtttcaaccaccaatacccttgttgttgtgacctccttttcacctctttcctgcaaagcaaagctctatgaaagagtattctaaatttgccaaccccacttctcacttcccatttgctcttcaacctggcttttgcccttaacatgccggtaaaagttttattcatatcaccaatgaaacaaacaaaaaattccaaggcacttctgtgggaccagccttgcatttgtcttctctagctagtgatggttcaagttgttatgcagggtgtttgacccaagggctgccaatccaaggacta

SEQ ID NO: 717098 - DNA, 650 bp, Homo sapiens
aagcctgctttaacattctaacaatgttgttttctcttctcttgacccttttcaagatttttattgctctgtagatgtgagatctcatgtatatttcccaaattgatgccttggtatatgtggctacatttacctttaggcaatcaaaaggaaacgtgatataataatataaatcagtgatcagtgagtgagaaaaatatcctactctgcagcttctgtcttccctacttacaactccaacagttaggtagatgtgagtagctgatttcagggatactatggaatgatcagtgtttgagacaaattgaatattcacagattggtctaggtttcactgaatggaggttgtcagaccaatcctgttacaggtatctggccatttctcagaattatttcacattgagaattataaggtgatgaagctgaaggggtggagaaaaaaagagaatggagaagaagtacattgctgaaattttcaaggcaggtttggaatgtttttttttttcttctgaatattagaacaatttgggtcgttaaacttagaaatgtatattccacaggattagaggcaggataactttttttkttttttttttttggttttaaggcttcctttagagtacatgtctggttgtggggaaaaaggagaa

SEQ ID NO: 717099 - DNA, 653 bp, Homo sapiens
agaccccaaataatgtgcaaagtaatgttatctttaagtcattttgagattagattcaacaaaaagttctcaaaaaaaccagtgccaattaagtactatcactcttcttcatcatcatttttcttctaaaatttgaaactatttaaaaggaaatctctatttaaataggcattgtatttatatatactataaatagaacaaagaatatattgtacattagaaaaataccctatcttttagctttgattcttgttttacatctgttcctagtgcttttctttgaaataaaagttacttcttttatatgttgtatgatttaaaggaagatgatcaattatcatgttttaatttagtrctgaataaccccttttcttcttccaaggtcttattttctgccaatattgagagtttgaatcagctctttgtgatggtccagagcaagatagagccttcttcacctacctcgcacatgctgccctcttctgaatgccttgctgtccatcgttttctctgagtagtgacagcctgaacaggactttgagaatcagggatcatgtagccaacagcctaaaggatggctctttctagcatgagagagctccggacacctgctctattctagatgctagttgatgtctcagaagaacaagcaa

SEQ ID NO: 717100 - DNA, 653 bp, Homo sapiens
agaccccaaataatgtgcaaagtaatgttatctttaagtcattttgagattagattcaacaaaaagttctcaaaaaaaccagtgccaattaagtactatcactcttcttcatcatcatttttcttctaaaatttgaaactatttaaaaggaaatctctatttaaataggcattgtatttatatatactataaatagaacaaagaatatattgtacattagaaaaataccctatcttttagctttgattcttgttttacatctgttcctagtgcttttctttgaaataaaagttacttcttttatatgttgtatgatttaaaggaagatgatcaattatcatgttttaatttagtgctgaataaccccttttcttcttccaaggtcttattttctgccaatattgagagtttgaatcagctctttgtgatggtccagagcaagmtagagccttcttcacctacctcgcacatgctgccctcttctgaatgccttgctgtccatcgttttctctgagtagtgacagcctgaacaggactttgagaatcagggatcatgtagccaacagcctaaaggatggctctttctagcatgagagagctccggacacctgctctattctagatgctagttgatgtctcagaagaacaagcaa

SEQ ID NO: 717101 - DNA, 653 bp, Homo sapiens
agaccccaaataatgtgcaaagtaatgttatctttaagtcattttgagattagattcaacaaaaagttctcaaaaaaaccagtgccaattaagtactatcactcttcttcatcatcatttttcttctaaaatttgaaactatttaaaaggaaatctctatttaaataggcattgtatttatatatactataaatagaacaaagaatatattgtacattagaaaaataccctatcttttagctttgattcttgttttacatctgttcctagtgcttttctttgaaataaaagttacttcttttatatgttgtatgatttaaaggaagatgatcaattatcatgttttaatttagtgctgaataaccccttttcttcttccaaggtcttattttctgccaatattgagagtttgaatcagctctttgtgatggtccagagcaagayagagccttcttcacctacctcgcacatgctgccctcttctgaatgccttgctgtccatcgttttctctgagtagtgacagcctgaacaggactttgagaatcagggatcatgtagccaacagcctaaaggatggctctttctagcatgagagagctccggacacctgctctattctagatgctagttgatgtctcagaagaacaagcaa

SEQ ID NO: 717102 - DNA, 900 bp, Homo sapiens
aaaccccatctctactaaaaatacaaaaattagccaggcatggtggtgtgcacctgtagtcccagctacttgggtggctgaggcacaagcattgtttgaacccaggaggcggaggttgcagtgagtcacgattatgccactgtactctagcctgggcaataaagcaagactgtctcaaaagaamaagaaaacccttatgtgtgggccttgttacagaattaatgtttatatggacaatatgtacatgggtgtatgttaaaagcatgagtcatccacaagattttagcaaagtccatttagaaagctcaatgctttgggcttccacttgctttgctgcctctgtcctcaggaggcttcatccttccatgtaaacagcaaatcctttaggcagagatgtacacaacacacccctctccttggctatgataccttgaaagggtcctcttggtggcccctggtgctcatttcagagtagttcaaaataagatgatcagctttcatgccaatcactctacaaatcactcctattatgaccaatttttctaaatgatttattgaattattacttaaagaaatgtgcacatagaagaggtcaacacagtacttttcttacaaactgaacatactggccaggcgcagtggctcatgcctgtcatcccagcattttgggaggctgaggtgagcagattacttgagcccaggagctcaagaccagcctgggcaacatagtgagaaccccccctctacaaaaaataaataaatacaaaaattaggcagcagtggtggcacatgcttgtagttccagctactcaggagggctgaggtgggaggacagcttgagcccaggaggcagaggctgcagtgagccatgacggtgccacagtgctccaggctgggtga

SEQ ID NO: 717103 - DNA, 900 bp, Homo sapiens
aaaccccatctctactaaaaatacaaaaattagccaggcatggtggtgtgcacctgtagtcccagctacttgggtggctgaggcacaagcattgtttgaacccaggaggcggaggttgcagtgagtcacgattatgccactgtactctagcctgggcaataaagcaagactgtctcaaaagaaaaaraaaacccttatgtgtgggccttgttacagaattaatgtttatatggacaatatgtacatgggtgtatgttaaaagcatgagtcatccacaagattttagcaaagtccatttagaaagctcaatgctttgggcttccacttgctttgctgcctctgtcctcaggaggcttcatccttccatgtaaacagcaaatcctttaggcagagatgtacacaacacacccctctccttggctatgataccttgaaagggtcctcttggtggcccctggtgctcatttcagagtagttcaaaataagatgatcagctttcatgccaatcactctacaaatcactcctattatgaccaatttttctaaatgatttattgaattattacttaaagaaatgtgcacatagaagaggtcaacacagtacttttcttacaaactgaacatactggccaggcgcagtggctcatgcctgtcatcccagcattttgggaggctgaggtgagcagattacttgagcccaggagctcaagaccagcctgggcaacatagtgagaaccccccctctacaaaaaataaataaatacaaaaattaggcagcagtggtggcacatgcttgtagttccagctactcaggagggctgaggtgggaggacagcttgagcccaggaggcagaggctgcagtgagccatgacggtgccacagtgctccaggctgggtga

SEQ ID NO: 717104 - DNA, 900 bp, Homo sapiens
aaaccccatctctactaaaaatacaaaaattagccaggcatggtggtgtgcacctgtagtcccagctacttgggtggctgaggcacaagcattgtttgaacccaggaggcggaggttgcagtgagtcacgattatgccactgtactctagcctgggcaataaagcaagactgtctcaaaagaaaaagaaaacccttatgtgtgggccttgttacagaattaatgtttatatggacaatatgtacatgggtgtatgttaaaagcatgagtcatccacaagattttagcaaagtccatttagaaagctcaatgctttgggcttccacttgctttgctgcctctgtcctcaggaggcttcatccttccatgtaaacakcaaatcctttaggcagagatgtacacaacacacccctctccttggctatgataccttgaaagggtcctcttggtggcccctggtgctcatttcagagtagttcaaaataagatgatcagctttcatgccaatcactctacaaatcactcctattatgaccaatttttctaaatgatttattgaattattacttaaagaaatgtgcacatagaagaggtcaacacagtacttttcttacaaactgaacatactggccaggcgcagtggctcatgcctgtcatcccagcattttgggaggctgaggtgagcagattacttgagcccaggagctcaagaccagcctgggcaacatagtgagaaccccccctctacaaaaaataaataaatacaaaaattaggcagcagtggtggcacatgcttgtagttccagctactcaggagggctgaggtgggaggacagcttgagcccaggaggcagaggctgcagtgagccatgacggtgccacagtgctccaggctgggtga

SEQ ID NO: 717105 - DNA, 597 bp, Homo sapiens
atttaccatctggccctcaagagaaaggaaaaaaaatgctgatccttgtaccctgacagtcttagtttaagaggactttgtaccaccctgacgtcccaggcgtccatgagtccagctgcccttgaaatgtacataagtctgggctagggtttcagcaggtgagtcccagttttgcaggtctttggcatcaggggcacaacccaggattttgagtggggtttcctcaccactatggctgggcactgggctagcgtgctttctgatttttgtatggggaagagaaaggagggaggaaatggccacttgttgccctgttctaacattttcctaagatgggtctccaggcaagggcttgggatctcaccttgcacagcttacaaaacccagtgagrccagctgtcttggcgctgccactctgagggatggagaccccaacttaccaggaagggagataaaagaatggtttctgcaagcacgagaacgggcgttattgaaattaacatttcccccaagttttataaagtctaggcatgcatatttaagtgtctgtctcaaaagttcatgctaataaccagatggtgcatttaatttcctttt

SEQ ID NO: 717106 - DNA, 960 bp, Homo sapiens
tcattgattttgcacacctgtaattctgatgcaaaacctggtactaacagatcaattacacttgcatcaggtgtgtaacagacacaagtttttaaaatttatcttgttctgctaaatacaagttttttgttttgttttgttttgtttttgtttttgtttttgtttttgaratggagtctcgctctgtcacccaggctggagtgcagtggtgcgatgtcagctcactgcaagctcctcctcctgggttcacgctattctcccacctcagcctcccaagtagctgggactacaggcgcccaccaccatgcccggctaatttttttgtatttttagtagagacagggtttcactgtgttagccaggatggtctcgatctcctgacctcgtgatccgcccacctcggcctcccaaagtgctgggattacaagcgttaagccaccgcgcctggcctaaatacaagttttttaaaaagattaatgaagaaaggcatatccacgctgaggagtcattaatagctagtaaattagtttgttcttcagatctgaaagaactttaattaagtactttccatttattggattttctctagattataagcattattatttataaagaaattaagaattttaaatagaaatatttcatataaacaaaataaccaaaataattgtgtatgaatgactcccaagaaatcttcaaatacaaaatgtaacatatgatcaaagttgcttctcttacaaaatgtcctaaattattatcatgactcattcttcaaagcccagtgcaggttctacccttccaaaaaaatcccctccaaggacttcaattcaaagttttttccctactttttggaaactgaaaccacttctccttgtaccttagctaaagtttaagacaatgttaggcacttttttttttttttttcctgaaatggagtcctgctctgttgcctaggctgga

SEQ ID NO: 717107 - DNA, 960 bp, Homo sapiens
tcattgattttgcacacctgtaattctgatgcaaaacctggtactaacagatcaattacacttgcatcaggtgtgtaacagacacaagtttttaaaatttatcttgttctgctaaatacaagttttttgttttgttttgttttgtttttgtttttgtttttgtttttgaaatggagtctcgctctgtcacccaggctggagtgcagtggtgcgatgtcagctcactgcaagctcctcctcctgggttcacgctattctcccacctcagcctcccaagtagctgggactacaggcgcccaccaccatgcccrgctaatttttttgtatttttagtagagacagggtttcactgtgttagccaggatggtctcgatctcctgacctcgtgatccgcccacctcggcctcccaaagtgctgggattacaagcgttaagccaccgcgcctggcctaaatacaagttttttaaaaagattaatgaagaaaggcatatccacgctgaggagtcattaatagctagtaaattagtttgttcttcagatctgaaagaactttaattaagtactttccatttattggattttctctagattataagcattattatttataaagaaattaagaattttaaatagaaatatttcatataaacaaaataaccaaaataattgtgtatgaatgactcccaagaaatcttcaaatacaaaatgtaacatatgatcaaagttgcttctcttacaaaatgtcctaaattattatcatgactcattcttcaaagcccagtgcaggttctacccttccaaaaaaatcccctccaaggacttcaattcaaagttttttccctactttttggaaactgaaaccacttctccttgtaccttagctaaagtttaagacaatgttaggcacttttttttttttttttcctgaaatggagtcctgctctgttgcctaggctgga

SEQ ID NO: 717108 - DNA, 599 bp, Homo sapiens
attatttttaaccaatcgcatcatacagatagaaaattaagacccagaaggaggaaaccaaaagaagatctagtctatgaggctccaggagctgggcygtatgtgtcatctgcacccacaatggcacatgacccagagcagtcaggtagcctgcctggaatctgctgctattggagaccaaatcatttcttctgataccccatatttagtccaattcccaaaaggacagatgcctctttaaataagctttatcactgacattctaactatgaccctctccgtctattttagggttaaaaaagacctaatggtgtcactcagaccacctcagggattttccttttaatctttctctagtttctcctacaatcagcaatctatatcagttctatacatatactagatgtagaattgatgttttatgatgataagaattacagtgatgatggtggtggtagtaacagtggaggctgcaaacgttttgagtagactgaagcataaaaaataccaaaaattcttccatatataagtatattttcagatagtcaagtataggtaagaattcaatgaaaaatacctatcagatagcttctccaccc

SEQ ID NO: 717109 - DNA, 599 bp, Homo sapiens
attatttttaaccaatcgcatcatacagatagaaaattaagacccagaaggaggaaaccaaaagaagatctagtctatgaggctccaggagctgggccgtatgtgtcatctgcacccacaatggcacatgacccagagcagtcaggtagcctgcctggaatctgctgctattggagaccaaatcatttcttctgataccccatatttagtccaattcccaaaaggacagatgcctctttaaataagctttatcactgacattctaactatgaccctctccgtctattttagggttaaaaaagacctaatggtgtcactcagaccacctcagggattttccttttaatctttctctagtttctcctacaatcagcaatctatatcagttctatacatatactagatgtagaaytgatgttttatgatgataagaattacagtgatgatggtggtggtagtaacagtggaggctgcaaacgttttgagtagactgaagcataaaaaataccaaaaattcttccatatataagtatattttcagatagtcaagtataggtaagaattcaatgaaaaatacctatcagatagcttctccaccc

SEQ ID NO: 717110 - DNA, 1526 bp, Homo sapiens
ggaggacgtgctgtaggaggtgaaggagccagaagatggaaggaacctggagtcctgaatgactctgtggagtaaaggctgccattgaatagaatgctttcctcagactkttacatgagaaagaaagaaacatctttgccctttaagccatgttattactgttcttcttgttactttagcagagggttttactgtaactaataaagagaaacatgaagcaagaagcattaagatgtaaaaatgaaaatgatcactgtaatttattgacttgcagagctttttccaaaactatagagctgatttctttccttcagttgctggtgctttttaatcagaggatctgaatagagttggacaagattcccaacctctcaaactcttatttttctcattcataaaataaagttactataattatattaacatcacaagattattgttgtgaaaaatatctgatatatgtttgcaaattctctggtacatagaagattttcaacctcgcccactactttgcagttttgaagaaaaaaagaaaacccacaacaataaatataatcaagttatctgagtcagaatgaaaagacgattgtcattgcccacacttcaccagccttcaggaagtttctgcagcaacgtcaagcacctcttcttttaaattgattatcttatgataactgtcacaaagcaaagttccccagagaagatgcgtgtcaaaacacaaaggaggtgtgttcaggctcatggcattgcttgtaagaaaatccaagcaggttgccaaacaatgtgaagatgtcaagaatgaggggaaatgatgacaattcctgtttgaggagatgatgtcccattgccaaaagcaagacagagtcatgtgaatgggaagaggagtgcagataaactggttttggcattgttagaaagcagacctaggttttataaaggctcttaaacaaaacgtgaccatgccaaagctcttggggatagaagagaacagagacacaacaaaattgtggcaggtagaagacgtaagaaaagaattttctcagctacagaacaagaatttgagatgaactcatcccttttcaaccacaaaaacaaaatttggaatcacaatatgggattattttcagcatagaaacataattcccaatgggaaaggaatgctagaaggaacagcactcagcgagcctataaaaaccctaacatattttgaccttcacaaaaatagacaacaatgacatttatttcatttgttctaatgaatctatactatccgtaacttttatttgctaaaaacgcttcagccattgcatactcataaatttcaataagatgttcaaaacacttctgactttcttgtgggtaacacatatgaagaagagtttctctctactgtcctcactactctgccccggctccactatgttaatgcacaatgcatttcttaatttgtacctggagttttctgccactgccactcaggttccaccaaggttctggttatgcagagaacttggatgcttgacacg

SEQ ID NO: 717111 - DNA, 1526 bp, Homo sapiens
ggaggacgtgctgtaggaggtgaaggagccagaagatggaaggaacctggagtcctgaatgactctgtggagtaaaggctgccattgaatagaatgctttcctcagactgttacatgagaaagaaagaaacatctttgccctttaagccatgttattactgttcttcttgttactttagcagagggttttactgtaactaataaagagaaacatgaagcaagaagcattaagatgtaaaaatgaaaatgatcactgtaatttattgacttgcagagctttttccaaaactatagagctgatttctttccttcagttgctggtgctttttaatcagaggatctgaatagagttggacaagattcccaacctctcaaactcttatttttctcattcataaaataaagttactataattatattaacatcacaagattattgttgtgaaaaatatctgatatatgtttgcaaattctctggtacatagaagattttcaacctcgcccactactttgcagttttgaagaaaaaaagaaaacccacaacaataaatataatcaagttatctgagtcagaatgaaaagacgattgtcattgcccacacttcaccagccttcaggaagtttctgcagcaacgtcaagcacctcttcttttaaattgattatcttatgataactgtcacaaagcaaagttccccagagaagatgcgtgtcaaaacacaaaggaggtgtgttcaggctcatggcattgcttgtaagaaaatccaagcaggttgccaaacaatgtgaagatgtcaagaatgaggggaaatgatgacaattcctgtttgaggagatgatgtcccattgccaaaagcaagacagagtcatgtgaatgggaagaggagtgcagataaactggttttggcattgttagaaagcagacctaggttttataaaggctcttaaacaaaacgtgaccatgccaaagctcttggggatagaagagaacagagacacaacaaaattgtggcaggtagaagacgtaagaaaagaattttctcagctacagaacaagaatttgagatgaactcatcccttttcaaccacaaaaacaaaatttggaatcacaatatgggattattttcagcatagaaacataattcccaatgggaaaggaatgctagaaggaacagcactcagcgagcctataaaaaccctaacatattttgaccttcacaaaaatagacaacaatgacatttatttcatttgttctaatgaatctatactatccrtaacttttatttgctaaaaacgcttcagccattgcatactcataaatttcaataagatgttcaaaacacttctgactttcttgtgggtaacacatatgaagaagagtttctctctactgtcctcactactctgccccggctccactatgttaatgcacaatgcatttcttaatttgtacctggagttttctgccactgccactcaggttccaccaaggttctggttatgcagagaacttggatgcttgacacg

SEQ ID NO: 717112 - DNA, 615 bp, Homo sapiens
tgctagtggtttgagaaattactcaatcaggtaagccaaatatgcaaattagcaaaagtctaaaggaggtgaagtcattcaaataactgaaaatgatactttttcttctttttctttcttttttttttgtagtgattattttagaaaggagagtgggactatatactaaccaaaaaaagtatatttgtttgcctgagaatctgcatgactgagatggttcatatgaaataaataggaaaatgcagaatggataagttaaggcaatcttgttcataaagcagtcttatagattgaggtagcctggaattgcaatatctgatgcaactctagatcagagtttgtcctcagaaaatatttgggttcatatccgcacattgggccagcacctaggggaacaaactaatcaccatgatttatgtttgtgtacatagagggtgacatacacagccaggaaaccctgttaggattagaaagtggttgtatagccaggtgacccctttggggtgagaagttggccccctgatgatttatacaatctaggatccaaaagggagtgaaggagtggttaayaggagtccagagagccactcttgagggctctgttgaaagtaaaaa

SEQ ID NO: 717113 - DNA, 2750 bp, Homo sapiens
cgccactatgcagaatatccttgtaacaaaaccgcacttgtctcccctaagtttatataaataaataaacaaaccctgatccatactgtttaaaaagtgcttcagttttgtaaactaatatgtttgtataactgagcttagaaaaaaagactacaagtatatatatatatcaattaactatggttatccatacacgttgtgattactgttcatttttgttttccctatacttttatgtaccttttgaatgtttaacaatgagcatctatttttaaaatcagaaacaaatcatgttaatagaaagcttgcttagggcatctgatagttgacaatccagtctagtagacatattaaacatctatttaacatttccatgttctattctccaatttagatcattcaaagggaaagtacctggaatgcatttccttactgcttatagaaagtcctttattgaattataatttaatatttgccttcttcctttacaaagcatcagtaaagaaatgccagacaattcttttttctatgaaaccaaggttacccagaatgtgccttattcaaacatcccaggatcaatactgcttgagtgggttagaggtgggaataatctctgtagatgaaactgtaaattttctcttgacaacaaacccaaagtttctcttttcatccttttgggaggcataagccagatttacattataaatgctataatctactaaaccaaatgttaaaaacatctattccttctattttcttcagatgatctctattttatttcatctttaaaaacattatcttgcccctattctttcatctctaatgtgtatctaacctttctagaagcagacaggctataaatcttaaatggataaaatattctttgcaattaccttgtgacaatattaaatatccatgtggtttgctccaagtacacaaaaccagggccttcgtttcccttgttccacctccccagcccctatactattctcctttagtttycagtccagaaggcaagaattcttttcaatttgtaagtagtgaatctttacttcatagaacacgaatgattcaaccaataccacacggcaaacaagggaagactgaccggaaaccaggtctcttgactttaagcacagtcctctttccattaaactatgaagacattccaatcctactgagaagtcagggaaatataagaagcatagacatagacgcacatacttttaaccttcctcactactttcctttggcttagcaaatgtaggttcctgaaaaatttttagtccttgtctcagtcttttaactcccaaatagtatactatccctcttaggaatttgggttagaaaatttttattcatttacttggatcatctcttatgtgttaagtggctgccatgtataaaggactgggcttctattcaagacaatgaactgacttcctcaaagaattccaagaggcagatgggtatagtgaacagaacacttaattcggagacctgggttttggttctagctctggctgggacttgctgcttgtccttgtacaaagtcacttgatttcattgagtttcaagtttctcaccttaaaattaaggggataatatctttggcttgtaagagagttgctctaatagcaactacttatgaaaaacttactatgtgccagccactatgcaaagcacttggtgtacacaatctcgtttcttcttcaaatgacaatgctcacgctcattatgctattatttcccccactgtactgataagaaaacgaaagctggagaggttaggtaacattcccaaggtacataagtaagtcaaggagctggggattggatctaggctaactacagagcctccatgacaaaacctactgccccctcaccaaaataaaaaacagttaagaatatactttgaaaagcattaagctatctaattttaggtattcctttcgtctaattccacttaattaaacttctaagatgtgaacaggtccacgcatttgcttgctcaataatcacctcaaatgaccaagggagaatgtggaggaggaaaacccacgccttcctgggtggctctcacaatagagaagttctaagtgggcttcacatgtttcaaactctctaagtatcttcttccttcccttcaatcttttggtggctcgcctttcctgtgaagtccagaggcccacttttagccaaatctgaatattggaagcttttctcttgaggagaaaaataagtgacaatctagctccttgaagatccagttaactaccttgtaaagcaggagtggactgcatgaaatacatgaacaatttctctctccagaacctttgccagacttggcacaggctggtctattagaaatacataattgaatattcttaacaattcaattcttcaacctcactttgatcaatagttcattacctaagttagatctgccaaatgggcaaactcttcagcccatttatcccatatttgcatgaatattatgctgtgaatgttacgctcctttgaacttcaaaagagtttcctggcctcattgactacaactttaacaacagagcataatggagttatacacaaggaccttttcccagctaaagaactcaaaccttgctgatgctaaacagtaacaaacttttatgtaagcaacaaatggctcattcatccattgcaatgcactatcagtattttcgggtttcctgagcctgtcttctctcttataagagaaattgtaacta

SEQ ID NO: 717114 - DNA, 2750 bp, Homo sapiens
cgccactatgcagaatatccttgtaacaaaaccgcacttgtctcccctaagtttatataaataaataaacaaaccctgatccatactgtttaaaaagtgcttcagttttgtaaactaatatgtttgtataactgagcttagaaaaaaagactacaagtatatatatatatcaattaactatggttatccatacacgttgtgattactgttcatttttgttttccctatacttttatgtaccttttgaatgtttaacaatgagcatctatttttaaaatcagaaacaaatcatgttaatagaaagcttgcttagggcatctgatagttgacaatccagtctagtagacatattaaacatctatttaacatttccatgttctattctccaatttagatcattcaaagggaaagtacctggaatgcatttccttactgcttatagaaagtcctttattgaattataatttaatatttgccttcttcctttacaaagcatcagtaaagaaatgccagacaattcttttttctatgaaaccaaggttacccagaatgtgccttattcaaacatcccaggatcaatactgcttgagtgggttagaggtgggaataatctctgtagatgaaactgtaaattttctcttgacaacaaacccaaagtttctcttttcatccttttgggaggcataagccagatttacattataaatgctataatctactaaaccaaatgttaaaaacatctattccttctattttcttcagatgatctctattttatttcatctttaaaaacattatcttgcccctattctttcatctctaatgtgtatctaacctttctagaagcagacaggctataaatcttaaatggataaaatattctttgcaattaccttgtgacaatattaaatatccatgtggtttgctccaagtacacaaaaccagggccttcgtttcccttgttccacctccccagcccctatactattctcctttagttttcagtccagaaggcaagaattcttttcaatttgtaagtagtgaatctttacttcatagaacacgaatgattcaaccaataccacacggcaaacaagggaagactgaccggaaaccaggtctcttgactttaagcacagtcctctttccattaaactatgaagacattccaatcctactgagaagtcagggaaatataagaagcatagacatagacgcacatacttttaaccttcctcactactttcctttggcttagcaaatgtaggttcctgaaaaatttttagtccttgtctcagtcttttaactcccaaatagtatactatccctcttaggaatttgggttagaaaatttttattcatttacttggatcatctcttatgtgttaagtggctgccatgtataaaggactgggcttctattcaagacaatgaactgacttcctcaaagaattccaagaggcagatgggtatagtgaacagaacacttaattcggagacctgggttttggttctagctctggctgggacttgctgcttgtccttgtacaaagtcacttgatttcattgagtttcaagtttctcaccttaaaattaaggggataatatctttggcttgtaagagagttgctctaatagcaactacttatgaaaaacttactatgtgccagccactatgcaaagcacttggtgtacacaatctcgtttcttcttcaaatgacaatgctcacgctcattatgctattatttcccccactgtactgataagaaaacgaaagctggagaggttaggtaacattcccaaggtacataagtaagtcaaggagctggggattggatctaggctaactacagagcctccatgacaaaacctactgccccctcaccaaaataaaaaacagttaagaatatactttgaaaagcattaagctatctaattttargtattcctttcgtctaattccacttaattaaacttctaagatgtgaacaggtccacgcatttgcttgctcaataatcacctcaaatgaccaagggagaatgtggaggaggaaaacccacgccttcctgggtggctctcacaatagagaagttctaagtgggcttcacatgtttcaaactctctaagtatcttcttccttcccttcaatcttttggtggctcgcctttcctgtgaagtccagaggcccacttttagccaaatctgaatattggaagcttttctcttgaggagaaaaataagtgacaatctagctccttgaagatccagttaactaccttgtaaagcaggagtggactgcatgaaatacatgaacaatttctctctccagaacctttgccagacttggcacaggctggtctattagaaatacataattgaatattcttaacaattcaattcttcaacctcactttgatcaatagttcattacctaagttagatctgccaaatgggcaaactcttcagcccatttatcccatatttgcatgaatattatgctgtgaatgttacgctcctttgaacttcaaaagagtttcctggcctcattgactacaactttaacaacagagcataatggagttatacacaaggaccttttcccagctaaagaactcaaaccttgctgatgctaaacagtaacaaacttttatgtaagcaacaaatggctcattcatccattgcaatgcactatcagtattttcgggtttcctgagcctgtcttctctcttataagagaaattgtaacta

SEQ ID NO: 717115 - DNA, 2750 bp, Homo sapiens
cgccactatgcagaatatccttgtaacaaaaccgcacttgtctcccctaagtttatataaataaataaacaaaccctgatccatactgtttaaaaagtgcttcagttttgtaaactaatatgtttgtataactgagcttagaaaaaaagactacaagtatatatatatatcaattaactatggttatccatacacgttgtgattactgttcatttttgttttccctatacttttatgtaccttttgaatgtttaacaatgagcatctatttttaaaatcagaaacaaatcatgttaatagaaagcttgcttagggcatctgatagttgacaatccagtctagtagacatattaaacatctatttaacatttccatgttctattctccaatttagatcattcaaagggaaagtacctggaatgcatttccttactgcttatagaaagtcctttattgaattataatttaatatttgccttcttcctttacaaagcatcagtaaagaaatgccagacaattcttttttctatgaaaccaaggttacccagaatgtgccttattcaaacatcccaggatcaatactgcttgagtgggttagaggtgggaataatctctgtagatgaaactgtaaattttctcttgacaacaaacccaaagtttctcttttcatccttttgggaggcataagccagatttacattataaatgctataatctactaaaccaaatgttaaaaacatctattccttctattttcttcagatgatctctattttatttcatctttaaaaacattatcttgcccctattctttcatctctaatgtgtatctaacctttctagaagcagacaggctataaatcttaaatggataaaatattctttgcaattaccttgtgacaatattaaatatccatgtggtttgctccaagtacacaaaaccagggccttcgtttcccttgttccacctccccagcccctatactattctcctttagttttcagtccagaaggcaagaattcttttcaatttgtaagtagtgaatctttacttcatagaacacgaatgattcaaccaataccacacggcaaacaagggaagactgaccggaaaccaggtctcttgactttaagcacagtcctctttccattaaactatgaagacattccaatcctactgagaagtcagggaaatataagaagcatagacatagacgcacatacttttaaccttcctcactactttcctttggcttagcaaatgtaggttcctgaaaaatttttagtccttgtctcagtcttttaactcccaaatagtatactatccctcttaggaatttgggttagaaaatttttattcatttacttggatcatctcttatgtgttaagtggctgccatgtataaaggactgggcttctattcaagacaatgaactgacttcctcaaagaattccaagaggcagatgggtatagtgaacagaacacttaattcggagacctgggttttggttctagctctggctgggacttgctgcttgtccttgtacaaagtcacttgatttcattgagtttcaagtttctcaccttaaaattaaggggataatatctttggcttgtaagagagttgctctaatagcaactacttatgaaaaacttactatgtgccagccactatgcaaagcacttggtgtacacaatctcgtttcttcttcaaatgacaatgctcacgctcattatgctattatttcccccactgtactgataagaaaacgaaagctggagaggttaggtaacattcccaaggtacataagtaagtcaaggagctggggattggatctaggctaactacagagcctccatgacaaaacctactgccccctcaccaaaataaaaaacagttaagaatatactttgaaaagcattaagctatctaattttaggtattcctttcgtctaattccacttaattaaacttctaagatgtgaacaggtccacgcatttgcttgctcaataatcacctcaaatgaccaagggagaatgtggaggaggaaaacccacgccttcctggstggctctcacaatagagaagttctaagtgggcttcacatgtttcaaactctctaagtatcttcttccttcccttcaatcttttggtggctcgcctttcctgtgaagtccagaggcccacttttagccaaatctgaatattggaagcttttctcttgaggagaaaaataagtgacaatctagctccttgaagatccagttaactaccttgtaaagcaggagtggactgcatgaaatacatgaacaatttctctctccagaacctttgccagacttggcacaggctggtctattagaaatacataattgaatattcttaacaattcaattcttcaacctcactttgatcaatagttcattacctaagttagatctgccaaatgggcaaactcttcagcccatttatcccatatttgcatgaatattatgctgtgaatgttacgctcctttgaacttcaaaagagtttcctggcctcattgactacaactttaacaacagagcataatggagttatacacaaggaccttttcccagctaaagaactcaaaccttgctgatgctaaacagtaacaaacttttatgtaagcaacaaatggctcattcatccattgcaatgcactatcagtattttcgggtttcctgagcctgtcttctctcttataagagaaattgtaacta

SEQ ID NO: 717116 - DNA, 2750 bp, Homo sapiens
cgccactatgcagaatatccttgtaacaaaaccgcacttgtctcccctaagtttatataaataaataaacaaaccctgatccatactgtttaaaaagtgcttcagttttgtaaactaatatgtttgtataactgagcttagaaaaaaagactacaagtatatatatatatcaattaactatggttatccatacacgttgtgattactgttcatttttgttttccctatacttttatgtaccttttgaatgtttaacaatgagcatctatttttaaaatcagaaacaaatcatgttaatagaaagcttgcttagggcatctgatagttgacaatccagtctagtagacatattaaacatctatttaacatttccatgttctattctccaatttagatcattcaaagggaaagtacctggaatgcatttccttactgcttatagaaagtcctttattgaattataatttaatatttgccttcttcctttacaaagcatcagtaaagaaatgccagacaattcttttttctatgaaaccaaggttacccagaatgtgccttattcaaacatcccaggatcaatactgcttgagtgggttagaggtgggaataatctctgtagatgaaactgtaaattttctcttgacaacaaacccaaagtttctcttttcatccttttgggaggcataagccagatttacattataaatgctataatctactaaaccaaatgttaaaaacatctattccttctattttcttcagatgatctctattttatttcatctttaaaaacattatcttgcccctattctttcatctctaatgtgtatctaacctttctagaagcagacaggctataaatcttaaatggataaaatattctttgcaattaccttgtgacaatattaaatatccatgtggtttgctccaagtacacaaaaccagggccttcgtttcccttgttccacctccccagcccctatactattctcctttagttttcagtccagaaggcaagaattcttttcaatttgtaagtagtgaatctttacttcatagaacacgaatgattcaaccaataccacacggcaaacaagggaagactgaccggaaaccaggtctcttgactttaagcacagtcctctttccattaaactatgaagacattccaatcctactgagaagtcagggaaatataagaagcatagacatagacgcacatacttttaaccttcctcactactttcctttggcttagcaaatgtaggttcctgaaaaatttttagtccttgtctcagtcttttaactcccaaatagtatactatccctcttaggaatttgggttagaaaatttttattcatttacttggatcatctcttatgtgttaagtggctgccatgtataaaggactgggcttctattcaagacaatgaactgacttcctcaaagaattccaagaggcagatgggtatagtgaacagaacacttaattcggagacctgggttttggttctagctctggctgggacttgctgcttgtccttgtacaaagtcacttgatttcattgagtttcaagtttctcaccttaaaattaaggggataatatctttggcttgtaagagagttgctctaatagcaactacttatgaaaaacttactatgtgccagccactatgcaaagcacttggtgtacacaatctcgtttcttcttcaaatgacaatgctcacgctcattatgctattatttcccccactgtactgataagaaaacgaaagctggagaggttaggtaacattcccaaggtacataagtaagtcaaggagctggggattggatctaggctaactacagagcctccatgacaaaacctactgccccctcaccaaaataaaaaacagttaagaatatactttgaaaagcattaagctatctaattttaggtattcctttcgtctaattccacttaattaaacttctaagatgtgaacaggtccacgcatttgcttgctcaataatcacctcaaatgaccaagggagaatgtggaggaggaaaacccacgccttcctgggtggctctcacaatagagaagttctaagtgggcttcacatgtttcaaactctctaagtatcttcttccttcccttcaatcttttggtggctcgcctttcctgtgaagtccagaggcccacttttagccaaatctgaatattggaagcttttctcttgaggagaaaaataagtgacaatctagctccttgaagatccagttaactaccttgtaaagcaggagtggactscatgaaatacatgaacaatttctctctccagaacctttgccagacttggcacaggctggtctattagaaatacataattgaatattcttaacaattcaattcttcaacctcactttgatcaatagttcattacctaagttagatctgccaaatgggcaaactcttcagcccatttatcccatatttgcatgaatattatgctgtgaatgttacgctcctttgaacttcaaaagagtttcctggcctcattgactacaactttaacaacagagcataatggagttatacacaaggaccttttcccagctaaagaactcaaaccttgctgatgctaaacagtaacaaacttttatgtaagcaacaaatggctcattcatccattgcaatgcactatcagtattttcgggtttcctgagcctgtcttctctcttataagagaaattgtaacta

SEQ ID NO: 717117 - DNA, 938 bp, Homo sapiens
ctacttgtcccacagaatgctggcatctgggtttatagttcccaggtgagagaataaaggatatgattcttctctataaaccaatgactgataaaatgcctacagaaaattacagttgattgttcctggtctgcatctatctcaatctcccaactctaaaacctactttgtaaaaagtttttgcccattcaaagmaatcacaacaaaacaaaaataaaaacaaagcaaaatgtatcagagaaacataaataataaaaacagattatttaaaaaatactttccttaggtaaaataacatattttacttattaaatgaagggaaatttgtagaaaaatatttatagaataaagggaactcttgtatattaaaataattaatgatgaaaacatcagctcaagtagccactttgcaaaagagtttggtgatatctgttaaatatgcaactacagcaaatccaccctttgatgcatacttagaagaaatgtgggaaaatatatatttggcaataccaggcattggtatgggtgtgaacagtgggagcatttttatactgctgattcatgtgtaaacttgtacaaccattttggaaaaataatttggcaatatctcttaaatttgggcactgacataccctgcaaatcagcagttatttcattctcagccaaatactgtatataaattcttacattttcttaggagacacgtagaagaattctcatagcagcttcgtgcatagtaaaaaaaacaaaactccaggcccatcaacagaagcatttgtaaatattagattggtgcaaaagtaattgtggctttttgcccatttggtttcaatatattgtggtgtgtatttacatgatggaatttcatacctcaatgaatgtgaaagtatcacaactatcaagtatcaatgtgatattgagataaaaagcaatgtcaa

SEQ ID NO: 717118 - DNA, 2422 bp, Homo sapiens
attccaggatattaaaccattaatgtcctaacagctcccagcaccttcattcattttaatcatatttcttattttaatatatataaatccagataaaaatctcatcaattcttagggtttgtagaaaaaaaaatccactcacatacaattttagaagatggtaatgaaatatttttaaaataattaaaatagtttcagagacattcaaaaccaaaaccaagtataagtaactctatggaagactaatgagattcttgaccactgaaaattatctagcctacaatgatagtttataagggctagatgttttatattcccacaaaaaaaatacattaaaattctggggaaaaaatttaaggaatttctgttagattacacaaaatagtaatgaagcatttctaagctttctagatattaaaataggctcttttacttatttttcttattatttatccactctcagtgataaagaaagtggattgccacatgaatacatagacaataaatagctttacagaatgaagtcaaaaagtttattcgaatacaccggaatattcattatataataaaagcatttcataactatagggagataatggactcttcaagaaatcatgtttacgcaattctgagacccactaaaaagcttggtgccaaatcacactcctttcaatcaaatacatttgataaatcaacactattccttttgaatgtgaaaaaaaagacaaactccgaaagctgaaaaaaatgagtaagtttgactaaatgaatcttcaacatgaaaaagaataacacaaaattaaatatcccactttcaaaaatgaatggaaatagaaatcaacaaggaaaaagcagccttggacaacactataaaccaacgacatctaaaacacgtgtatagcacactccaccaaacaacagcaaagtgtgcattcctcttcactataccagaagcctttttcagaggactgcatgctgggtcataaaacagatagaaatattataaaatatgttttctaaacacagtagaatgtacacatgatctctgaattatgaakatttgacttatgatcttctgacttcgcaatggtacgaaagcaatacatattcagtagaaatgagattttgagtacccatacaaccattttactttcagaactcaataaattatatgagatactcaacactttttataaaatagcctttgtgttagatgattttgcccagccataggttcacgtaactattctgagcacatttaagttgggctaagctaaactacgatgttcggtagcttaggcgcattaaatgcattttttatttatgatattttcaactatgtactcactaagagtaaagttgtaggaagcgacaatcttatctctgtcctttggacctaattaattacaaaaatctttcataacaaactctatgtatccctattttaatgtttaacagacaatttgctcattaatgaattttcaaacacttgtggctggatagaaattgtctattcaaaaagtaatgagaaaaacacttccagctttctgacaggttgtttttaaagactctttaagtgaaaacacttacttgcaagagggaaaactgttctgcagcctgatttgcatgttaacttttttaaaagtgccattttctcaaacatcagtagttgctatatttcaaaaagttccagctttttaggtatattttataggcaaacggaatgtttgtataatagtctgaaacttaaaccttgaaatttatggaaacagattaaaatatacaaattgaagagctttgtatttgtcattgaattatcttttcttgtcaaacgaatgactgccagtaaatgaaggccattcatctctttagaaaatacagtttttaaataaaagtctagcgattagtacatagttgaattattattttgctgatgattagtaaatgaaatctagttatgaagaatactgaatttcagtttgaatacccactttttaaatttcaactttaaatgttgtaacctcagtcaaattcattaagatctctgttcttcatttattcatctagcaagttgtacctaccttgtagtgtgttatcaatgagaaaagtatcccttgctttcttacgtttgtttctatgatttccattattgtttccatgactgtaaacatattttacaggcattgcatggataaaaattacgtggctcttcatttatatcaggacatagcaactgttgtttaatatattttataaacataattcttgaaattactgctctatttctgtcattttcttcacatcaagcagccttctttggcttttagatacaagtattacacagctccataaaaacctcgatttttctctcatttattttattctattataaaatttactgagaaaaaataaatggcacatt

SEQ ID NO: 717119 - DNA, 2422 bp, Homo sapiens
attccaggatattaaaccattaatgtcctaacagctcccagcaccttcattcattttaatcatatttcttattttaatatatataaatccagataaaaatctcatcaattcttagggtttgtagaaaaaaaaatccactcacatacaattttagaagatggtaatgaaatatttttaaaataattaaaatagtttcagagacattcaaaaccaaaaccaagtataagtaactctatggaagactaatgagattcttgaccactgaaaattatctagcctacaatgatagtttataagggctagatgttttatattcccacaaaaaaaatacattaaaattctggggaaaaaatttaaggaatttctgttagattacacaaaatagtaatgaagcatttctaagctttctagatattaaaataggctcttttacttatttttcttattatttatccactctcagtgataaagaaagtggattgccacatgaatacatagacaataaatagctttacagaatgaagtcaaaaagtttattcgaatacaccggaatattcattatataataaaagcatttcataactatagggagataatggactcttcaagaaatcatgtttacgcaattctgagacccactaaaaagcttggtgccaaatcacactcctttcaatcaaatacatttgataaatcaacactattccttttgaatgtgaaaaaaaagacaaactccgaaagctgaaaaaaatgagtaagtttgactaaatgaatcttcaacatgaaaaagaataacacaaaattaaatatcccactttcaaaaatgaatggaaatagaaatcaacaaggaaaaagcagccttggacaacactataaaccaacgacatctaaaacacgtgtatagcacactccaccaaacaacagcaaagtgtgcattcctcttcactataccagaagcctttttcagaggactgcatgctgggtcataaaacagatagaaatattataaaatatgttttctaaacacagtagaatgtacacatgatctctgaattatgaagatttgacttatgatcttctgacttcgcaatggtacgaaagcaatacatattcagtagaaatgagattttgagtacccatacaaccattttactttcagaactcaataaattatatgagatactcaacactttttataaaatagcctttgtgttagatgattttgcccagccataggttcmcgtaactattctgagcacatttaagttgggctaagctaaactacgatgttcggtagcttaggcgcattaaatgcattttttatttatgatattttcaactatgtactcactaagagtaaagttgtaggaagcgacaatcttatctctgtcctttggacctaattaattacaaaaatctttcataacaaactctatgtatccctattttaatgtttaacagacaatttgctcattaatgaattttcaaacacttgtggctggatagaaattgtctattcaaaaagtaatgagaaaaacacttccagctttctgacaggttgtttttaaagactctttaagtgaaaacacttacttgcaagagggaaaactgttctgcagcctgatttgcatgttaacttttttaaaagtgccattttctcaaacatcagtagttgctatatttcaaaaagttccagctttttaggtatattttataggcaaacggaatgtttgtataatagtctgaaacttaaaccttgaaatttatggaaacagattaaaatatacaaattgaagagctttgtatttgtcattgaattatcttttcttgtcaaacgaatgactgccagtaaatgaaggccattcatctctttagaaaatacagtttttaaataaaagtctagcgattagtacatagttgaattattattttgctgatgattagtaaatgaaatctagttatgaagaatactgaatttcagtttgaatacccactttttaaatttcaactttaaatgttgtaacctcagtcaaattcattaagatctctgttcttcatttattcatctagcaagttgtacctaccttgtagtgtgttatcaatgagaaaagtatcccttgctttcttacgtttgtttctatgatttccattattgtttccatgactgtaaacatattttacaggcattgcatggataaaaattacgtggctcttcatttatatcaggacatagcaactgttgtttaatatattttataaacataattcttgaaattactgctctatttctgtcattttcttcacatcaagcagccttctttggcttttagatacaagtattacacagctccataaaaacctcgatttttctctcatttattttattctattataaaatttactgagaaaaaataaatggcacatt

SEQ ID NO: 717120 - DNA, 2422 bp, Homo sapiens
attccaggatattaaaccattaatgtcctaacagctcccagcaccttcattcattttaatcatatttcttattttaatatatataaatccagataaaaatctcatcaattcttagggtttgtagaaaaaaaaatccactcacatacaattttagaagatggtaatgaaatatttttaaaataattaaaatagtttcagagacattcaaaaccaaaaccaagtataagtaactctatggaagactaatgagattcttgaccactgaaaattatctagcctacaatgatagtttataagggctagatgttttatattcccacaaaaaaaatacattaaaattctggggaaaaaatttaaggaatttctgttagattacacaaaatagtaatgaagcatttctaagctttctagatattaaaataggctcttttacttatttttcttattatttatccactctcagtgataaagaaagtggattgccacatgaatacatagacaataaatagctttacagaatgaagtcaaaaagtttattcgaatacaccggaatattcattatataataaaagcatttcataactatagggagataatggactcttcaagaaatcatgtttacgcaattctgagacccactaaaaagcttggtgccaaatcacactcctttcaatcaaatacatttgataaatcaacactattccttttgaatgtgaaaaaaaagacaaactccgaaagctgaaaaaaatgagtaagtttgactaaatgaatcttcaacatgaaaaagaataacacaaaattaaatatcccactttcaaaaatgaatggaaatagaaatcaacaaggaaaaagcagccttggacaacactataaaccaacgacatctaaaacacgtgtatagcacactccaccaaacaacagcaaagtgtgcattcctcttcactataccagaagcctttttcagaggactgcatgctgggtcataaaacagatagaaatattataaaatatgttttctaaacacagtagaatgtacacatgatctctgaattatgaagatttgacttatgatcttctgacttcgcaatggtacgaaagcaatacatattcagtagaaatgagattttgagtacccatacaaccattttactttcagaactcaataaattatatgagatactcaacactttttataaaatagcctttgtgttagatgattttgcccagccataggttcacgtaactattctgagcacatttaagttgggctaagctaaactacgatgttcggtagcttaggcgcattaaatgcattttttatttatgatattttcaactatgtactcactaagagtaaagttgtaggaagcgacaatcttatctctgtcctttggacctaattaattacaaaaatctttcataacaaactctatgtatccctattttaatgtttaacagacaatttgctcattaatgaattttcaaacacttgtggctggatagaaattgtctattcaaaaagtaatragaaaaacacttccagctttctgacaggttgtttttaaagactctttaagtgaaaacacttacttgcaagagggaaaactgttctgcagcctgatttgcatgttaacttttttaaaagtgccattttctcaaacatcagtagttgctatatttcaaaaagttccagctttttaggtatattttataggcaaacggaatgtttgtataatagtctgaaacttaaaccttgaaatttatggaaacagattaaaatatacaaattgaagagctttgtatttgtcattgaattatcttttcttgtcaaacgaatgactgccagtaaatgaaggccattcatctctttagaaaatacagtttttaaataaaagtctagcgattagtacatagttgaattattattttgctgatgattagtaaatgaaatctagttatgaagaatactgaatttcagtttgaatacccactttttaaatttcaactttaaatgttgtaacctcagtcaaattcattaagatctctgttcttcatttattcatctagcaagttgtacctaccttgtagtgtgttatcaatgagaaaagtatcccttgctttcttacgtttgtttctatgatttccattattgtttccatgactgtaaacatattttacaggcattgcatggataaaaattacgtggctcttcatttatatcaggacatagcaactgttgtttaatatattttataaacataattcttgaaattactgctctatttctgtcattttcttcacatcaagcagccttctttggcttttagatacaagtattacacagctccataaaaacctcgatttttctctcatttattttattctattataaaatttactgagaaaaaataaatggcacatt

SEQ ID NO: 717121 - DNA, 1097 bp, Homo sapiens
aatctttaactgttctgttttgttttgttttgtttttgagacagagtctccctctgtcacccagtggcatgatctcagctcactgcaacctctgcctacctgttcaagcgactctcatgcctcagcctccctagtagctggaattacaggcatgcgccaccatgcccagctcatttttttgtatttttaatagatacagggtttcctcatgttggccaggctggtctgaaacttctggcctcaagtgatccacccaccttggcctcccaaagtgctgggattacaggcatgagctgccatacccagccccagtctttaacccttaaataaactcagaaccattagttctttaaaataggcattttttctaaatctttctatttctaattttattgattttttttttcaagaagaatggtaatgactttgctataactacctgcacatattgatgctgcatgtttttactggaaaatgagcttaatgtggacattgattaattttcatgttttgttctttgtaagtgaaatcataaacatacacccatgcaggtracagtacaagtgatcatattctattgccaacaaaaataaaatttaacaaattagaattccacaatttattttcccccaaaggtggttctaagaatgattcccagctttccagtaagagtacttttgcaccataggtttgggaatgtgctgagcaattttgtcttgggcaaatgtggaacatactttaaaatgagtacctagttttcagagaccaagtaagcatccaagaccatttgcatttggtgattactaactaaaatcactctaagtaagtgaaagctgtaataggcagatttgaatagatctctttaatcaaaataatcctgaactcaatagcttaatttttaatttaaaaatttttcatctgccccatgcttcaagttcttcatttcagcctctccaatcctgttttctttaaatcatcaatttgagctaacctaatattctatgtcttctaagatttaatccctttatggtattttatttgtatacattttaggtgacgatagatgatgtcaaaaggaaaatattttctaattttat

SEQ ID NO: 717122 - DNA, 1097 bp, Homo sapiens
aatctttaactgttctgttttgttttgttttgtttttgagacagagtctccctctgtcacccagtggcatgatctcagctcactgcaacctctgcctacctgttcaagcgactctcatgcctcagcctccctagtagctggaattacaggcatgcgccaccatgcccagctcatttttttgtatttttaatagatacagggtttcctcatgttggccaggctggtctgaaacttctggcctcaagtgatccacccaccttggcctcccaaagtgctgggattacaggcatgagctgccatacccagccccagtctttaacccttaaataaactcagaaccattagttctttaaaataggcattttttctaaatctttctatttctaattttattgattttttttttcaagaagaatggtaatgactttgctataactacctgcacatattgatgctgcatgtttttactggaaaatgagcttaatgtggacattgattaattttcatgttttgttctttgtaagtgaaatcataaacatacacccatgcaggtgacagtacaagtgatcatattctattgccaacaaaaataaaatttaacaaattagaattccacaatttattttcccccaaaggtggttctaagaatgattcccagctttccagtaagagtacttttgyaccataggtttgggaatgtgctgagcaattttgtcttgggcaaatgtggaacatactttaaaatgagtacctagttttcagagaccaagtaagcatccaagaccatttgcatttggtgattactaactaaaatcactctaagtaagtgaaagctgtaataggcagatttgaatagatctctttaatcaaaataatcctgaactcaatagcttaatttttaatttaaaaatttttcatctgccccatgcttcaagttcttcatttcagcctctccaatcctgttttctttaaatcatcaatttgagctaacctaatattctatgtcttctaagatttaatccctttatggtattttatttgtatacattttaggtgacgatagatgatgtcaaaaggaaaatattttctaattttat

SEQ ID NO: 717123 - DNA, 1097 bp, Homo sapiens
aatctttaactgttctgttttgttttgttttgtttttgagacagagtctccctctgtcacccagtggcatgatctcagctcactgcaacctctgcctacctgttcaagcgactctcatgcctcagcctccctagtagctggaattacaggcatgcgccaccatgcccagctcatttttttgtatttttaatagatacagggtttcctcatgttggccaggctggtctgaaacttctggcctcaagtgatccacccaccttggcctcccaaagtgctgggattacaggcatgagctgccatacccagccccagtctttaacccttaaataaactcagaaccattagttctttaaaataggcattttttctaaatctttctatttctaattttattgattttttttttcaagaagaatggtaatgactttgctataactacctgcacatattgatgctgcatgtttttactggaaaatgagcttaatgtggacattgattaattttcatgttttgttctttgtaagtgaaatcataaacatacacccatgcaggtgacagtacaagtgatcatattctattgccaacaaaaataaaatttaacaaattagaattccacaatttattttcccccaaaggtggttctaagaatgattcccagctttccagtaagagtacttttgcaccataggtttgggaatgtgctgagcaattttgtcttgggcaaatgtggaacatactttaaaatgagtacctagttttcagagaccaagtaagcatccaagaccatttgcatttggtgattactaactaaaaycactctaagtaagtgaaagctgtaataggcagatttgaatagatctctttaatcaaaataatcctgaactcaatagcttaatttttaatttaaaaatttttcatctgccccatgcttcaagttcttcatttcagcctctccaatcctgttttctttaaatcatcaatttgagctaacctaatattctatgtcttctaagatttaatccctttatggtattttatttgtatacattttaggtgacgatagatgatgtcaaaaggaaaatattttctaattttat

SEQ ID NO: 717124 - DNA, 1977 bp, Homo sapiens
gtgttgaacattaggaggtgacttcatacttctgtgtctaagaaagtcaattcttcttctacctccaaatattttagacatccaaatcaggggactgatgttttttaaaatttagaagtaaacatttttgactctctctaaatcttttctgatatcatatttagtgacctacatttctaaaataatgctaatatgtaaagcacatcctcgcttaacatactttttttttacctaaatatatgaggaagaaaaagaaagggtataatttgataggaacactaggtgacattttctgcctagaaaataatttcatacacctgagatcaattttagacttcaccctttcttagctttattgattttggataacttgtttttttcaagatggagtctcactctctcactgacgctggagtgcagtgtgatctcggctcgcttgcaacctccgcctcccaggttcaagtgattctcctgcctcagcctcccaagtagctgggactaccggcacatgccaccacgcctggttaattttttgtatttttagtagagatgaggtttcaccctgttagccaggatggtctcaatctcctgaccttatgatccacctgcctgggcctcccaaagtgctgggattacaggcgtgagccaccgtgcctggcgattttgggtaacttttcagaaacctctctgactctcagttttcctatcattaaaagggggtctataataactaacatgaatttcaaaaaagttatttcatgtaatgtagacaatgctcttggcacagtttctgttattagtcactaagtaattggaaaggatttttaatagaacaaagaaagtaataagagaaaacattgatttagatgtctaaaagatgagtgaagatccatgaagaaatttagaaattctctaaatatttttaataattttttgaattctaaaaatatacagatatttacttatatacctgatatctgaatagaaatgggtaactaccagcagtgtgaatacactgatggttctttttcttctttttttaggtttagagttatcaccacatgcacactcatttccttgccataaggaatttaaactcctgggagccaaacagttgagaaatgtgtgtggtccaatgtattggctgctctggagcttaacatagtgaattgaaaacatcaataattaatgggatacaaagatagcagcctggactgcctgtattacaaagcagggatactactaaagccatttacattttgaatttcagcagctcctaaaatcagcttatatgcaaagctccttacactaaaatgagcttaatttctgattgtaaacagttctgctgaacaccataaatttcaggcttcatgagaatccattgtttaattcagattggtttaagaaaagctatagtcacattaaaatcttacatggtagatttactacttttaacttacaccaacaattttctagcgcaatttttttagatattttttttttcaccagtgtgtagaatgttaaggtgaaggactagttatttcatgcataaaaccaattccttctgcttttcatatacatttttcctatttgaaagcaatacatrtgtaatatttctctatttcgtatttgaaagcaatacatgtgtaatatttctctactacttttaaagaacgtaagttttagaattccaactctcttaatactatccaaacctttcccttctaaaatgattggatatgccaatattttgaaaatatatgtaagacaaataattggccggtttgggcaatcatcattcatttttctttttcttttgggtaacagctctcagatttctttttgggtattcacgtctttgtcatgcggtccatgtaactctgtggaagctggagctatctacacttctatcctccaaagtagtcaccatatcccttcaagctattcatgttttttttttgttgtgttttgtttttg

SEQ ID NO: 717125 - DNA, 566 bp, Homo sapiens
ctttaatgtgatatatccataatctgattttggtcttaaatgcaaagtaaaactatgaaaaaagcattgatatcataatgtgttctctttgcagataygcgaattgattcttacataatatgagagatataggtgagtcaaaagactgcagaacttccaattttatctcctcagccagttattaaccactcattttttgaaagtccaacattaaatggataccaaaaacctagtttcatttattttgctctgaatgacattttataagtttaaagttctctagcttcaagtatttttcttatgctttagtctaaacattatttgattttactttatcttattaaattatcttagtacaccccttaatgtatgtatgttaaaatgtttagaagaatcacttaatttcttcgttaatctattttctgttttaaaaaagccttaatacattttatttattttcccactcagactttgtctcaaattattccttcattatcttttactctctgatatgtaagacactggctataatttttttaatcattttaagttagtcctgttctaca

SEQ ID NO: 717126 - DNA, 1355 bp, Homo sapiens
gctaactgaactctgattttacagcttgcttttttgatttctggagcaaaacatttccaaatactcattctttytctatgtaaatctaaatattatcatttaaaattacctatttacttactaggtaaaaaaagagcatattaaaaaaaagcatgaaaacagaagaaagtaaaaatggaataaaatgaaagaaaaaaacaaatccctcaagattattagtattaatcttcaggagaaatttatggtagacattaatttactctcaactatttacctggcaacgtgtaagcaataaatataagtaagacaattcctaccctcaagtaattaatatttcagttggtaaaagcaagaatgcagtattgtatgaaaagacaaagcattaaacatgtatataagactgaattgtcattaataaggaagagatttttttagagttatttgggagaatctaatgaaaagtgacttctaaactaattcaaatataaatatacattttaattggaaaaatgagaatgaggaaatatattacagcataaataaaatcagagaaaagaaagagcatgatttcaaaaattatgaatagttcagatataaagctgaagaattagcttcttttataccactgtatattttatcaagaccaaaattaaaaataaatttttgaagtgatttccttctccctattgcccatgaatacaattgtaacaattgatgaattggtgagtattttataaactaactacatttctctacttttgttaaaagccatatacatgtatatattacatacataggtatatatatataatgtaaatatatgtacattatatatgtatgtatacacatatattttatagttatagtgattacagttttaaattttgaattaaagtaattttaaagacttttgaactattcatgaaatttttaatatttctaatgatagaaattcattaaatttaattttatgttaaattcaattttatgtttttggacgtattccaactcattcttttggaagtaagggaaggatttgtctattcatactgttacaagcataatatgtaaactgtcaaaccatttcttttaatggtgatattgaggccaaaaaagaacaacctagaactaaaaaaaagttcttagtgacacaacatttagactaaaatggatgaagctgggaactatcattgtcagcaaactaacacaagaacagaaaaccaaacaccgcatgttcccactcataagtgggagttgaacaatgagaacacatggatgcaaggagaggaacatcacacactggggcttgttgtcggggtggggggctaggggagggatagcattaggagaaacac

SEQ ID NO: 717127 - DNA, 1309 bp, Homo sapiens
agagatatgcatcctctgagctaaatgtaatatattaaaaatgttaagtatgcttcactagatcttttgacggctctgcatatggaatagtatgtcaatgtcctgctatacatgtgtgccagacatagataggctcagaagttactatatccattcacatgctgagtgacttatgatattgtcacaatggcatttataaacaatctaacaccactaatgatttctgttggcatgyggtctctttagaaatctacgtatcctctctttggtttacctcagcaaatttatctagttttattaaagaatttttctaccccccggaactattttattataactagtcattctaggttgtatcaaagtactgataaatagtgttcaaaactctattggtagttgcctgtccattagccattactctaagtccatttgctatctagaaatgtcaagtggaccgtgggaaaatgtctacaccattacaattgcattaaaatgaaattgaaaactaccaaccgtacatcttctctggcagtcataatgctttaccacagcaaatcactgcatttacttctatcctttagaaaccattgaaagtaatggcaaaaatggcaattacttttgtaccaacttaataaatttaccttccaccctgctactttcctgcaacaagtttgccataaaatggcaatgttcaatcagtaccaggacagtattgagggagagtagaacatacaaaaagctcaataggacacttgacaatatgtcaagagagttacctattatatgctaatagaaattgagttctcagagataaaatgtgatttctaaatgccacctggctttccatctgacacattcatgccatctgcttctgatgaaaattgaaagattgcttgctagtgctggtcaaatattatcatgtcaatcaaattcgctttctcctatcttcaattgccttggaaatacaaattcttcccatcttccttgcctccatgctactcctaactcccctaggccctatgctgcattctattttcatgtgtcgagctatcatatggacacagcaatttaacccagaagtttagtcataaaaacctactgaggttgaaaccattttttaaggatgcccacacctgccctcataacaacttgttggccattttctatgtagttgagctagttttaaaatgtttggctctatcactctgttattaattccacacttagtcatttgaatttctttgcaccagtcctcactggtatccaagttttaatttggaataattgtttctgactttgcttatctgta

SEQ ID NO: 717128 - DNA, 1309 bp, Homo sapiens
agagatatgcatcctctgagctaaatgtaatatattaaaaatgttaagtatgcttcactagatcttttgacggctctgcatatggaatagtatgtcaatgtcctgctatacatgtgtgccagacatagataggctcagaagttactatatccattcacatgctgagtgacttatgatattgtcacaatggcatttataaacaatctaacaccactaatgatttctgttggcatgtggtctctttagaaatctacgtatcctctctttggtttacctcagcaaatttatctagttttattaaagaatttttctaccccccggaactattttattataactagtcattctaggttgtatcaaagtactgataaatagtgttcaaaactctattggtagttgcctgtccattagccattaytctaagtccatttgctatctagaaatgtcaagtggaccgtgggaaaatgtctacaccattacaattgcattaaaatgaaattgaaaactaccaaccgtacatcttctctggcagtcataatgctttaccacagcaaatcactgcatttacttctatcctttagaaaccattgaaagtaatggcaaaaatggcaattacttttgtaccaacttaataaatttaccttccaccctgctactttcctgcaacaagtttgccataaaatggcaatgttcaatcagtaccaggacagtattgagggagagtagaacatacaaaaagctcaataggacacttgacaatatgtcaagagagttacctattatatgctaatagaaattgagttctcagagataaaatgtgatttctaaatgccacctggctttccatctgacacattcatgccatctgcttctgatgaaaattgaaagattgcttgctagtgctggtcaaatattatcatgtcaatcaaattcgctttctcctatcttcaattgccttggaaatacaaattcttcccatcttccttgcctccatgctactcctaactcccctaggccctatgctgcattctattttcatgtgtcgagctatcatatggacacagcaatttaacccagaagtttagtcataaaaacctactgaggttgaaaccattttttaaggatgcccacacctgccctcataacaacttgttggccattttctatgtagttgagctagttttaaaatgtttggctctatcactctgttattaattccacacttagtcatttgaatttctttgcaccagtcctcactggtatccaagttttaatttggaataattgtttctgactttgcttatctgta

SEQ ID NO: 717129 - DNA, 1309 bp, Homo sapiens
agagatatgcatcctctgagctaaatgtaatatattaaaaatgttaagtatgcttcactagatcttttgacggctctgcatatggaatagtatgtcaatgtcctgctatacatgtgtgccagacatagataggctcagaagttactatatccattcacatgctgagtgacttatgatattgtcacaatggcatttataaacaatctaacaccactaatgatttctgttggcatgtggtctctttagaaatctacgtatcctctctttggtttacctcagcaaatttatctagttttattaaagaatttttctaccccccggaactattttattataactagtcattctaggttgtatcaaagtactgataaatagtgttcaaaactctattggtagttgcctgtccattagccattactctaagtccatttgctatctagaaatgtcaagtggaccgtgggaaaatgtctacaccattacaattgcattaaaatgaaattgaaaactaccaaccgtacatcttctctggcagtcataatgctttaccacagcaaatcactgcatttacttctatcctttagaaaccattgaaagtaatggcaaaaatggcaattacttttgtaccaacttaataaatttaccttccaccctgctactttcctgcaacaagtttgccataaaatggcaatgttcaatcagtaccaggacagtattgagggagagtagaacatacaaaaagctcaataggacacttgacaatatgtcaagagagttacctattatatgctaatagaaattgagttctcagagataaaatgtgatttctaaatgccacctggctttccatctgacacattcatgccatctgcttctgatgaaaattgaaagattgcttgctagtgctggtcaaatattatcatgtcaatcaaattcrctttctcctatcttcaattgccttggaaatacaaattcttcccatcttccttgcctccatgctactcctaactcccctaggccctatgctgcattctattttcatgtgtcgagctatcatatggacacagcaatttaacccagaagtttagtcataaaaacctactgaggttgaaaccattttttaaggatgcccacacctgccctcataacaacttgttggccattttctatgtagttgagctagttttaaaatgtttggctctatcactctgttattaattccacacttagtcatttgaatttctttgcaccagtcctcactggtatccaagttttaatttggaataattgtttctgactttgcttatctgta

SEQ ID NO: 717130 - DNA, 648 bp, Homo sapiens
ccccgctcccaccccctgcttgcaaagcaaactaagccacccgaataagtggaccatggggatatagaggcagaaaactccyggccccatccccaggcctccagagaatttgacactcaagccacggtggagaggttttctgttatgagtttagcatttctaagaaagaggagaccacaggctttccctgtagtccatttcaagagtctgatagctctcactggaaatcttcacttcctttgaacttgtaccttcctgctgtgcctcaggcctctccctcttctgagagttcttgtctccatgtctgatccctgtgaaagtgcaggcatttaaggaggaggtctgggcccccttcacggtggtgtccacacctctcccagggggatgtgctcggtaagtgtgcatgcagcaccatctcagccctgtgcatcctggaccgcaccaacaaacagcaccacacagcttggggaccatgtccagattcacacgcagacgataagcaccgtggccaatacccaagcgttagataattaaaggtccctccaaggataaacacaagtaagagtggaagcaaaggaagtgcacacgcttgtctcaagaaagacagggcatgtagccttttccctaggatctctcatcatcttcgct

SEQ ID NO: 717131 - DNA, 550 bp, Homo sapiens
tggtgaattaatctatccacacgtttttgctcatttccctggctgttaccagctgaagtgaagaaaagacattttacaaggggacatggtatatttgtgctaaaacaggcaccacacaaatccagagaaaggagccaaaaggaaataccaggcagagggaacagcgtggataaaggcaaagctgagaagagggtaagtgtttcgtgttgggggatggtgtatctgggggctggggggagtggggtacagtgtattgggttgaggatttatagccaggaaaactggaaataaaggggaaggagactttgtgaagggttttaactatcgggctaaggaaagctgcattgttcctaacaactgggcaccagtggaagtttagagccaggaatataattgtcacagaggtgctttggactgaataatactgtggctgtaggcagctctgggttgggggttgggaggtacaagcctccaggaatccactgcagcagtgtgggccctgccacgttgtccwgaacaaagtgctatggggatggacacaaacatgaag

SEQ ID NO: 717132 - DNA, 581 bp, Homo sapiens
tgagatgtttttcagactgagctcactgagacccatgactcatgactcaactggtcctgtggcctcatgcagaagtggactcagcacatgagggctgttttccacacccttatgattacatccccaaccaatcagcagcacccattccctagtcccctgcccaccaactatccttgaaaaacttttctctttgagccttcggggagactcatttgagtgataactccagttctgtcatgtagccagcctcatgtaaattaaactatttctttactgcaataccacagtctcagtgaattggtttcatctgtgcagcagccgggaagcaccatcacacgattacaaaaggggtagagaggcagatatatgttccctctagggaggattcagtctactgctagaagaatagggatgtggtcatcacagcaatgattatagcatttattgaatgctctgtgctcattgtgtatggccctttaataatgctcagcrtaattctaagaaataggaatgattgctctgctttccacatgaggaaattcaggagggctaagtaacttgtccaaaatcacacagcttag

SEQ ID NO: 717133 - DNA, 581 bp, Homo sapiens
tgagatgtttttcagactgagctcactgagacccatgactcatgactcaactggtcctgtggcctcatgcagaagtggactcagcacatgagggctgttttccacacccttatgattacatccccaaccaatcagcagcacccattccctagtcccctgcccaccaactatccttgaaaaacttttctctttgagccttcggggagactcatttgagtgataactccagttctgtcatgtagccagcctcatgtaaattaaactatttctttactgcaataccacagtctcagtgaattggtttcatctgtgcagcagccgggaagcaccatcacacgattacaaaaggggtagagaggcagatatatgttccctctagggaggattcagtctactgctagaagaatagggatgtggtcatcacagcaatgattatagcatttattgaatgctctgtgctcattgtgtatggccctttaataatgctcagcataattctaagaaataggaaygattgctctgctttccacatgaggaaattcaggagggctaagtaacttgtccaaaatcacacagcttag

SEQ ID NO: 717134 - DNA, 1061 bp, Homo sapiens
ctgagccacttacagcttccccgtgatgacagcttccaatctgaagccatccttttacatgttgcctaggctgcagtgcaatgcgcagtcttggctcattgcaacctccgcctcccagcctcaagcaattcttgtgtctcagcctcccaagtaactgggattacaggcacactccatcacacttagctaatttttatacttttaggagagacagggttttgccatgttggacaggctggtctcgaactcctggcctcaagtgatccacctgtatcagcctcccaaagtgttggaattataggcgggaaccactgcgcctggccgagccttcctttttctactagaaagcttttccacctctctgcctgcctttgaatctctgcctgcctttgaatctctgccaaagtgcaagtgatggtggccgactcccttgcgagctctgactaaagagcctttgctcattctcatttgggtggtcttcattcatctccacatgagacaggggtagactaaatgattgatctagtgtcctaatgcttttggattctacaagaatttacatttggtcaacaagtatttactgtgaatctagttcratgccagtcactgtgctagaggctagaggtatttggtgagtttccagcctagcgagggagacactggtacattaaataattacacaaacgaatgtaaaattgcagctgtgatgaggcgccgcgcaccgtgcatgagtgcctaaagcagttggcctagtcagggagcacagagaggatatcctgaggaagtggcacttaaactgagatttgaagagtgttgagagtttaccaggtgaagaagaggaaagagaaggaaaatccaggccaaggtcatggggtgtatgagggcgtggaagaagatgagcccagatggggcacacagagcatgggggacaatgacaggtgaagtctgagggagaggaagggaccaggccacacagggtctcataggcacccttaaggaattttgtctctatccagacactagcaacaactgcaacataatgacactgtcctcacaggttc

SEQ ID NO: 717135 - DNA, 1038 bp, Homo sapiens
tgatcggatgcccccatgcctatagatctaaccctcttcctcacataccatcctcatcagtaggaaaggtgctaggttggtctctgtctgccaactcctttgtcttttctcaatccgtttagaacttgggtggcaagagcaataccagcaggaggcttggagatctaagcatgatctactattgtgttcctgaaaccactaggggatgagttgctacattcctctgaggacattgtcatgctctgggtctcatctcagcccaaacagaggggaaggcagcctgggaagcagggtcctccgtctgaagcagagctcacccactgaggcacgcaagtcccgccagccagactccagagcagctgctggaaggacattctgcccygggaggatagaacatgacactggggggaccaggtcacatacaaacaagacagcctggccagaggaggcagcagaaagctcgaatatggtggctctttttctattgctggataacaaattatcagatatttaccagcttacaacaacctgtgtttattatctcacagtgtccaagggttgggagtctatggaaggtggggcttgcctgtcaccttcagatccagcctggcagagttcccacatcagtccttgctgagcagacagcatttcagcaacaatctcagcctctgacttgggggatttagaattaagtcagtgatctgggatataaaggcctggtcacagcagactgggtcctcagctcaggatcttgcaggctgcaatccagctgccagccaggcagagggggtaacagtcagcacatacctcttaccaccacagggcccccagggatctatgaatgcctggagatgggaggctgatgggaggcagcaggttacaagcccccatagggtaggattcagaagccttgggtagcataatcagacagaaggttagacggaaggcacaaagtcacatacaaggccaatttggcagcacagagcatacctattttggggctcgggccagcagagcaggacccaggactacagcaaa

SEQ ID NO: 717136 - DNA, 1038 bp, Homo sapiens
tgatcggatgcccccatgcctatagatctaaccctcttcctcacataccatcctcatcagtaggaaaggtgctaggttggtctctgtctgccaactcctttgtcttttctcaatccgtttagaacttgggtggcaagagcaataccagcaggaggcttggagatctaagcatgatctactattgtgttcctgaaaccactaggggatgagttgctacattcctctgaggacattgtcatgctctgggtctcatctcagcccaaacagaggggaaggcagcctgggaagcagggtcctccgtctgaagcagagctcacccactgaggcacgcaagtcccgccagccagactccagagcagctgctggaaggacattctgccctgggaggatagaacatgacactggggggaccaggtcacatacaaacaagacagcctggccagaggaggcagcagaaagctcgaatatggtggctctttttctattgctggataacaaattatcagatatttaccagcttacaacaacctgtgtttattatctcacagtgtccamgggttgggagtctatggaaggtggggcttgcctgtcaccttcagatccagcctggcagagttcccacatcagtccttgctgagcagacagcatttcagcaacaatctcagcctctgacttgggggatttagaattaagtcagtgatctgggatataaaggcctggtcacagcagactgggtcctcagctcaggatcttgcaggctgcaatccagctgccagccaggcagagggggtaacagtcagcacatacctcttaccaccacagggcccccagggatctatgaatgcctggagatgggaggctgatgggaggcagcaggttacaagcccccatagggtaggattcagaagccttgggtagcataatcagacagaaggttagacggaaggcacaaagtcacatacaaggccaatttggcagcacagagcatacctattttggggctcgggccagcagagcaggacccaggactacagcaaa

SEQ ID NO: 717137 - DNA, 1311 bp, Homo sapiens
aatggggaaccagaagctgccccacgattactgttttctgcacacaatgataacacctgtgctaacactgtattggccctgatttaattctacccttagtttgaacacctgcatttttctcccctaaggataaaatgaacaggttctattttttaaattttcttctgcattttacaacaaataattatataagagtgaaacacagatctgtccaagggccagccatatatgggggctacagtcactaaaaggtaggaatcgaccagtgagccatgcccagataccaggaacgccattaggaagaaccaaatagtccctgtgcttaaataacaggaacagcaatttgcctacttatcattctgtctactagtgattcccaaagatggctatggtgatgaagttactggcttattgtgaaatgaaaacacatggacagtaaagtgaggtgtattttctctttcaattcattggttttattgaaggaaatatcccctaatagcaaaacaatcagagtttgttaggctgcctctaccaactcaaaattaacactgatatgcaaaatactgaaatgtatcagtcatttaggaaaactgaaacatgatacataaagcagtttaaaagcctaatataagatatactgtggttcatcagtttatttgtaatgcatgtttatccataatatgacaaaaataaatcaattatttactgccattatggacttagactgcactaagtacccatttacaacactttaacaccacagatccccttacattcactgacttactcagaaaaattccaaatactatctcagctacctcataattccagttgcctacatatgtttaagatttagttttattacagtaggaatattcatgaaagtttaccttcttccttttaaacaaaattctagattagagacaatggcaatttgatttaaaaaagtcctacttaaaaatttctggagtgaagctgggcacsgtggttcacacctgtaatcccagcactttgggaggccgaggcaggcagattgctcgagtccaggagttcaagaccagcctgggcaacatggcgaaaccctgtctctataaaagatacaaaaaatcagccaggcatgatggtgcatgcctgtggtcccagatgggaggccaagagcagatcacttgaggtcaggagattgagaccagcctggccaacatggtgaaactccatctctactaaaaatacaaaaattagctgggtgtggtggcacatgcttgtaatcccagctacttgggaggctgaggcgggaggatcctttgaacccgg

SEQ ID NO: 717138 - DNA, 1477 bp, Homo sapiens
gagtcgagttcctgcctcaggaccctgcccctggaggcctcgcctgcccctgcagctccgcaggctcagacattggtctccagctcactgatctggatggtgcagtggttcagactcgcagcgggcagctcctcatcctgctccacttgaacggggacgtggtgggggcaggtggggcccagggtgagctgggggggctcggctacactcttcacacagccattctgctgggctgccacgatctcctggaggctcactggcttggtctcgcagggcagcagtttctggtgaagggaaacaggtctttgtagcagcaggagggaccaaggttagatacgagggaggactgagggccagtggggcagaatgagctcagggctaggaaccacaagatggattttcctgcagacacgctgtgtgacctcggcaggtcacggcctccctgggctcctgttcccaagcgtcctgcctcccactggagctggcttagtagaggaggggacttaatccacagggtccatctggggaattggtggatcccctgcctgacctcagcttcttccccatgatgtggggacagccttctccatttgcctgtagaaggagcctgaagcccacacagcctgcacagacctacaaatgctcacatgttggctaaactggacagaccatcccgacacgagggcggggaattttatcatatcttgttctactgttcctcctgtgtctatatcagcgccagccacagcgggtgctcaataaatagatgttagaggaatcagtcattctgtaacggatgaggagaccgaggcccagaggcatggagggagggattggctggaggctgccgagctggttggtggaagatctggtgccctgcccaccctgcgtggctccaccctcctggcagcctctggatctcactgctctcacctcggtgcctgtgtcccgggcaaaatccttccgacatatatgggccatgatccccgctgccagcgcatcacccagcacgttaatcatggtgcggaaacggtccctggtgagccaaggttgggggtgagtggtgggcacttgaaggggagctggaagagggcagtgctcaacccagcacagtacagcacggccggtgaccagctgtcatgcaaagcctgcagccagatggcttcctggctcctcccaagcccaccctttggcatcattgaagcagcttcttggcatgcagctgtgggttccacaggtccccatgcttagaagggttaggtttggtttaatcctctgctgtttctgtcttgaaattctttataggtttgttttttgtttgtttgtttgtttgttttttgagacagagtcttgctctgtcactcaggctggagtgcagtggcgccatctcggcttactgaaacctccatctcccaggttcaggtaattctcgtgcctcagccacctgaatagctgrgattacaggcacatgtcacca

SEQ ID NO: 717139 - DNA, 639 bp, Homo sapiens
tgggaaatgtaatcattttataagaaaatcctctaataaaaggtaaaataacaactttgggagacaaaagttttatcaggaaagaaatgtgatctaaggtcactacttggcactgaggaatcacgtatttcttcttaataatgcaaatagtgttcatttattcacctaaaattaaagcatatgattactttgtaaggattagcaagaagctggaaggtggtctaagagattaaatcctcaatatcctatcaggaagcagagaatgcaatatgtataggtacattatttagcaacatgaagggaacaaacagaaaatagtttaaaatagttgcttgttggcctggcacggtggctcacacctgtaatcccagcactttgggaggccgaggcgggcggatcacgaggtcaggagatcgagaccatcttggctaacacggtgaaaccccgtctctactaaaaatacaaaaaattagccaggtgcggyggagggcgcctgtagtcccagctactcgggaggctgaggcaggagaatggcgtgaaccctggaggcggagcttacagtgagcggagatagcgccactgcagtctggcctgggtgaaagagaaagactccgtctcaaaaaaaaaaaaaaaaaaaaa

SEQ ID NO: 717140 - DNA, 569 bp, Homo sapiens
gcatgtcatttctcctttctggtccttgttcacaacagaggtatgggcctcggctttcctgtcttcagaggtgagtaaatggtgaaatgattgccaattgccaaagagtctctaaaggggaagaaaagctaaagcraaatagtgtgagatcagtttctgggctcatgaccgttttaatttattggttcagagtgaacagagaactctactcagccatgacttaataacttcctccttccaagctgcctgagatggtcatgtctccaggtaatgagctatatctgctcctgtggacttcatgtctgggtgttgttttctattttttaattcttcagtttttagtttttttttctctagatataaaataaagctattctcattgaagaaaatttgcaaactactgtaaagtacaaatgaaaaaagtatcatcattatatctccaatcaaaagcaactacttaaaatattttggaatatatttcttaccagggtgtttttcaatgcaccgtttaatagaattaatgttagaaaaatataataatgttagtgactatataatagtttacttat

SEQ ID NO: 717141 - DNA, 842 bp, Homo sapiens
tgcattctgatactattcatagtcttaacattttgctcagcatatctctgtggcttttaccttgattttgttctcatgagagagtgaggcataaaaaagatggagatgtagttcccaggtaatgctggaacttgctctgggtacaaaattatttgtgactgactagcaaaatagaatgttagtaatttttaaaaagaaactgaacgtagattaaaatctccagaactaaaatgagaattattatagcattctctcacccataatccacctagattggaataygttctcaaacacttctgtacagtgttccagttacttgggttcaggagaaacattttgactaacaatcttctttttagtataccagaataaaacgttgaaagcacctcactgaggtgctttcattttaattaaagaaaaaaatctacactatatgctgcaaatgactttatataaaaactgctttgggatattaccttctatagttatagccttggtgtcattgcagatgggaacatctacataactgactctaagtgggctactgacaactataacattcttcttcattatctgaagccaataatcagagtacttccctagaatttcttcatattttttgaaaacatggaacagaaatgaattatattagcattctaaaagaatatgaggtctgcttagttttgaaagttttcatttcttctcctgaaatctatccagagcaaccaagaaaatgaaaataaattcatagaaactgaactttcagcaaatagctaagaaaactccaaaactccaaaattaaatgtgaatgctgcaataggcaactgaggacagcaagccca

SEQ ID NO: 717142 - DNA, 597 bp, Homo sapiens
tgggctggaccaaacaattttgaggtagtcacaattcagtgtcttaaagtgtatataaacacggctgggtgcggtggctcacgcctgtaatcccagcactttgggaggcggaggcgggcttatcacgaggtcaggagatcaagaccatcctggctaatacggtgaaacctcgtctctactaaaaatmcaaaaaaaaaaaaaaaaaaaattagctgggcgtggtggcaggcgcctctagtcccagctatttgggaggctgaggcaggagaatggcgtgaacccaggaggtggagcttgcagtgagctgagatcgtgccactgcactccagcctgggcgacagagtgagactccgtccccccaaaaaaaaagtgtatataaacacaagtcagaacatgttttcgaacagtgtaagctcctataaaatacatgaagtgaaattgtaaaataatatagataggtaggtagatggataatattagttgttttatcaagatagcatgtgatttgattggcctttctttcttcactgaattgactggtaatgaaatcagcctaactcaataatgaaagtttcatatccattctggaacaatgca

SEQ ID NO: 717143 - DNA, 649 bp, Homo sapiens
tcaagagtatttttcttgatgtgagattgctggttcaaaggagtatgtaacttcaaacatactatcaatagatattatccaacatttccaaaatggtgatatmaatttacatgaccacacctagcacttgatcaaattttgtgaatgttccataatggatacaaatatgcctaaaagtaatttgtgtttttcagttgtttggtatgtatggtattttattgttcaattcttctaactcattcctactctttgttttctcagtttctttaattttggtcaatatttgtttctttcttatcagtttttactttatatatcttaaaactgttaccaggtgaatataaatttaggattggaggactcaaaccttcatgattataaaatgaacctctttatcaccagtaatgctttgtggctaaaagacaatttttgttatatttatagctacacctttcttttgattattatttgtacttttgattactatttgtacgtattttcatttttattctttcattatctttatgctttaggtacatctaaataacacatatatcttataaacagaatatacatgttcaatctgataatctgtttttaactagagcatttaatcaatttgcatttaatttcattgtaaatacatttc

SEQ ID NO: 717144 - DNA, 1327 bp, Homo sapiens
taaactttatctaaaggaataagacacatgatcttggtatgttgggaattatatattgcatttcaaactagaggttgattcagagaagaaatttctaagaatgcagcatttagtcacaatctcttgaataactgcaaccaaaaaaagtagaaattagaggaacaaaataataaaacgttggaaaactattaaccaaagcatagaactggcaaataaaagtcactcattgctttgagatgaagagtccagaatcaattgaagatataggtgtcactagaaggaagctgatgatgagcaaattcctgagcagcagcttcagccttctgcaaaaataagccatcagcatgtgcctagagacatttgtttatttactaacaaacctattatgtctcaaacactgggctagggactggtgctgcaagagtttacaagataaaatcctcaggaaatttgtcccctttcctgggggttagaattttcagcaataacagtaaagaagtgaggacttcagatggtagattgaacacaaaaggcagttgtctagcacatcaagttcttcaaaacaatatcaaagaagtaactatgctgaatccaataaattaagttataagcatttcctttttctatatttccccaactatgaaccctcacatatttcaatgtgacagcctgcttttgtgttcctttcctcagggactttcactgggcagaaactaaacacaacctaattaaatggttctgcttgccttttggaaaagctcaggcccattggaaagattatattagatgtctaggaggggaggggagcaggaattatttttttttgagaccttaaggaaggaaagcacagtggaatataagggaaaagaagtacatgggggaaaagtatgtacagaaatgcccagtaagcaaaaagataaggtgtcccaggattgcatccttggaagtaagatatttaaaatgtaggaatataaaaacatccagcaaaagagaaggcaggaaagaagagactgccaaaattaaaaaaacaaaacaaaacagaggagaaaaagatgtctgaaaattgattcatagtttctcctctcccactatactttccccagactaacaatattaatacaaaaataatttccctgaagggatayaatataggttgttcacttaacttctaatctcatgtgtcactttgtagtcacttccaaagtagtggaagatgactctcagaacatttttttgatcctccttacttagtagaagaatacggagacccagaaatacattcatttattccccaaacacttatgaagcttcactcatgcatgagaaa

SEQ ID NO: 717145 - DNA, 1269 bp, Homo sapiens
tgcgagactgtctcaaaataaaaaaaagtccgtaatcaccccaactttcagcaaccaccaccctgatgaatcaccagccatcaacatcgaggcaagaccttccaccagcaaagagattaggactccctgaaagctcagatgattgttagtatttttagtaaataaaatgttttaattaaggtattttttgtacacataacgttattgcacatttaataaacgacagtatagtataaatataacttttatatgtgctgataaatcaaaagagtgtgactttctttaattgcagtatttgatttattatggtggtctggaactgaacttgcaatacttttgaggtgtacctgtattgagtatatcccatgctgcagccttatgcttaaaaattattttttatctgaaattaaattttaacagggagtcttgtattttaactggcaatcctgtagaaaatagataagaggggtttagacagagaattagaatgccctcataagcaagacaaacaatttcggagtttatacccgaacaccagtggattttcagaatccagaaaggacagggaaagaattaattaggggaaaaagaggctactgatatttcattgtaacccaaagtactttaaattttcccctagagtgggaatgaccaatatattttgagaagaataatgttcgacagtcagttgttctcttcctgcattgtcttcatcttcctttacccagtaaaactatgggacaatgtgctacagaatttgattttggagactggccaatccaataggcctgaggctgagctcagaaccacagtccaggggcaagttatacagacagacaagctgagatgagagaagctggttgagatgagagaaaagagctttaaaaatgtcatctttttaccctcctacgaaaataccaggtaaaaatgattactgagggttttgtgtgtatgtgtgtgagtagagcagctagaaccttctatttccagggatagtgactcccatcatcttactgggtaaaaagtgaagccccaggagactagaagatttggatccatttaaatttcaatgtggaaaaatcctttttaacaaccatatccatgtattaattttgactaaagctgcccttaatggatgtggacagaaaatcatcttattccatacactgaaataacatttayagggctcatactagatggaagccctaggacagcttctgggaaatttgtaagtgaattagacaatccatcttctcaagaatctaacac

SEQ ID NO: 717146 - DNA, 650 bp, Homo sapiens
cgaaatgaattgtgacttatgtcccagctggtgttcccaaattatggcaaggactggatgtcatttgttgctgtgaatgacttcttgccagaaacctgagatctaagcatccaaaatcacactccaagggattcctgaaatacactttttttttttttcttttgagacggagtcttgctctgtcaccaggctggagtgcagtggtgcgatctcagctaactgcagcttccacctcgcaggttcaagtgattctcctgccttagcctcccaagtagctgggactacaggcacgtgccaccatgcccagctaatttgtgtattttyagtagcgacagggtttcaccatgttggccaggatggtctcaatctcttgacctcgggatcctcccgcctcagcctcccaaagtgctgggattacaagtgtgagccactgtgcccggccacatatttttttttaatcttctatcatataatcattaggtcgttgagcctttcaaaatcttctgtttgaaaacatccccttcaactctgtcgttgccatgtgaaaagatcaaattgaataatctactacccagtgtctctttatgtatgaaggctttaagccaaacacaggataccattgtcttaatcttcctgctgtataacaaaat

SEQ ID NO: 717147 - DNA, 907 bp, Homo sapiens
gtgagaatatgtgacaagagattgtcttttccttttgatcttattgcacattgctgagtcttgagtgaaaagtcaaattgtgtgtgctacctaaatgtactgcattgcctttgttagagacccaaggttgacctctggagcaaagatgacaagttgctctttaaaccattctcttggaaaatctggtattctttcagtctaaatggagtcctgactcaattttgagattctgttggttttaatttttcaaagtttacttcagataagtttgtttatcaagataaataactttctcaaagcctttttcttatatcaaatttgcagaagagatatcttttggcacctgtgctgtaaatgtttcaaaacaatttacttataaaataccattttaaatattttcagaagatttcatttggaaccccttctccatttaaacctctccgcataatatgtgattcctttatattattgcatacatccatttccaaattgaagtgcttatgcaacacatgagtttcatcagttaccatttgctgtgtgctgtgtagtgcataggagatgtagagattagaagtatccacagataaagcaccyttaccttatggagttcaaaggctaaaatgaagatgtgcaacacaaatctgctggtctgcatggctgttgctgcatgggaagtttatgccagacaaaatggaagcacttttgagggtttgatgacccaaggcttcctgggagaagggactggagaaactgaaagagacctcaaaaaaggcttccttcagaagacaacatttatgaaatatgataggtttgtagacatttctaaatttggcgaaagaagaagtgcaggaatttcaattagtatagccattatagaaaacactatggaggttcctcaaatgttaaa

SEQ ID NO: 717148 - DNA, 1495 bp, Homo sapiens
tttttagggtatagctttgccagggtcctaactggaattctgctttttgtttgctttatgcctagtaattctcctccttcttgaccggctctgttttgtctcaagagccatatgaaattaccaaatgctctgctcatcttcctatcctcttggctgaaacatctcagcttcattacttctcggccctaagtcacaaccacctcaagaggaaaagtagaacaaaatattgggtttatctcaatgctgttttaatctctctgaatctcattctatcacatttacaaacgattgattctataaacatgtgagactgccaaagcttttagccactgcttagaaatcagcagatgactccaaaatcatttggctcttgatagttgcggggaaaaaattgaaaaatttcaatacatatttatgattaaaacaacaactggtttataaacttgttttataaaagaatttctttgatttggtgagggttatgtaccaaaatccacatcaaatactcttaatgaaaaacagtagttaaattcattatttttaagactggggctgggtgcggtggcttacgcctgtaatcccagcactttgggaggctgagacaagcagatcacctgaggtcaggagttcaagaccagcctggccagcatggcaaaactctgtttctactaaaattataaaaattagccaggtgtggggcacgcctgtaatccgagctactcaggaggctgagaaaggagaattgcctgaacctgagaggtggaggttgcagtgagccgagattgtgccactaactccagcctgggcaatacagcaagattccatctaaaaaaaaagactgggagcaagagtagaatgcccattatttttccttctgttatacatattgttagatatcttggacactgaaaattaaaaagaattatatttgaaatgaatatctagatagagaatacaaccaaatcaataagtaatagacctcataaatgaattaagcaaggttgccgtatttgaatcaataaaaattaatatttctctacaccagaaaaaacaactaaaaattgtaatgaagcatgtcacctttcttactagcaagaaacaataaaagtgcctaggtattaacttactctatagtgaataggacctcagtggacaaaatgttaatccctaaaagatacatggcaaataatttgaataagtgggccgggcacggtggctcacacctgtaatcccagcactttgggaggccaaggcaggtggatcacgaggtcaagagatcgagaccatcctgtccaacatggtgaaaccctgcctctactaaaaatacaaaaaattagccaggtgtggtggtgggcacctgtagtcccagctacttgggatgctgaggcaggagaatcacttgaaccyggcaggcggaggttgcagtgagctgagattgtgccactgcactccagcctggcgacagggtgagactccgtctcaaaaataataataa

SEQ ID NO: 717149 - DNA, 599 bp, Homo sapiens
tgttgcccagtctggtctcaaactcctgagctcaggcaatctgtccaccttggcctgccaaagtgctaggattacaggcatgagccactgcgcctggccacaacatctcttttaaaaaatttcttgctcatatatattatccttttttgggcagacggtggcttcttatttatttgtaggargtctttatatattgcagatatgaactttgtctattatttatgttaaaaaatatttcctcaaaaaatgccttttaattttgcttaggatgtctttcataatgctgaaagaagcttttacttttcattttgtcagatctttccatttctttctttatggattttggcttttatattctgtttaagaacactttcccacactcaagattattttaaagatagatattctttgccattcagaacatagacatgggcaaagatttcacgacaaaaacatcaaaagtaattgcaacaaaagcaaaaattgacaaatgggatataattaaactaaagagcttcttcacagcaaaagaaactatcatcagagtgagcagacaacctacagagtgggagaaaatttttgcagtctacccatcagac

SEQ ID NO: 717150 - DNA, 932 bp, Homo sapiens
cctgctcaatccaggatstcctctagtttaatcatgttaaagagtaaagtacatattgtacaggttttttgttttttgcttgttgttgttgttgtttttgcttttttgagacagactctagctctgtcgcccaggctggagtgcagttgcacaaccacggctcactgcaacctccacctcctgggttcaagccattctcctgcctcagcttcccgagtagctgggactacaggcgcccgccaccacgcccggctaatttttttttttttttgtatttttagtagacacagggtttcaccatgttagccaggatgttctcgatctcctgacctcgtgatccaccctccttggccccccaaagtgctgggattacaggcgtgagccaccacacccagccttctacaggccttattggtaaaatgatgaatttaccagtgaatacatatcactgtttgagttcatttgaccaaaagcatagaaaaaatatgactaaagcaggatttaaacattgaaagcaatagataatagcgataacaaatgaggcgttttttaagttacaaggttcatgtagcattatacaacattttcaaaattcttggagaaatgtaatgggaaggaggctcatggatactttaaataggaaaggaatttagaattcatatgattcatgcaccttgctctacagtggtggaaactgagacttagaaaggtatgttggtttcctatgttttacacaatctataccaactccacaaaatgtttcactggattgtgaaggcttcttgattctaactccaagttgtaggacaatttcagaacctcaggaatgatgggttcagaattttgaatcagaacaccgtctgacacttagtaagagctcaacacatgaagatcacaacaagcaggtagtttgtgtgacaagttcacagtta

SEQ ID NO: 717151 - DNA, 630 bp, Homo sapiens
ttgattttgaactatcaatgaaaattgaataaatatattttttaaaaacctggggccaccaatgaatgatgcttctcttcctcccaggtgttcgataaatatttatgggcttgaaaactagaaaacataaagttattttcccagaaggatttgcttcatttgaaccccaaataatgaaaggcagcaatatatattttctaagcgtttactttgatctgatgtctcattaaaactatcagtcmcaaagaattgcttaattgtgtagtagggctatattcaaaatatccaattacatttccttcaattaacttttgctagctgatgtttacaagtaatttagtgaaattaggtgaaggttaaattactgtagcaatcagaggtgtgcttaagtggtaaaatatagagcaagaactgcttgttcttataaatatgcatattaacacactgccctcaggatataacatcaaccctcctcatttaatgctagtaataaatctccatgtgccgttgcttcaggttgcggaactccatgatgtatactcagccatttaaacaaattagctttccataaacagatttttaaactatgccctttaaagccacactctattaatctgctgatattcccca

SEQ ID NO: 717152 - DNA, 630 bp, Homo sapiens
ttgattttgaactatcaatgaaaattgaataaatatattttttaaaaacctggggccaccaatgaatgatgcttctcttcctcccaggtgttcgataaatatttatgggcttgaaaactagaaaacataaagttattttcccagaaggatttgcttcatttgaaccccaaataatgaaaggcagcaatatatattttctaagcgtttactttgatctgatgtctcattaaaactatcagtcacaaagaattgcttaattgtgtagtagggctatattcaaaatatccaattacatttccttcaattaacttttgctagctgatgtttacaagtaatttagtgaaattaggtgaaggttaaattactgtagcaatcagaggtgtgcttaagtggtaaaatatagagcaagaactgcttgttcttataaatatgcatattaacacactgccctcaggatataacatcaaccctcctcatttaatgctagtaataaatctccatgtgccgttgcttcaggttgcggaactccatgatgtatactcagccatttaaacaaattagctttccataaacagatttttaaactatgccctttaaagccacactctattaatctgytgatattcccca

SEQ ID NO: 717153 - DNA, 627 bp, Homo sapiens
actaagcacatcataaccaaaacttactgtataggagggcttctattggagataaaagaaaagcagttaccaccaaatgtccaaaacacagataattccacagtcataaccccacaacatactaagcacaatatcctatatggcccaattacccttgaaaatctcttaacccataaagtacaatgcacacagcaaatttaaacatgataggactgctgcattaccatatttattcatataactttctccttcacaatctccttgactatcttttcaccattaaaacgagggaggagcaatttacaacttttattaatctctgaaattctcacgctggtttaccaaaaaatagttatttaaaaatcaatggtaggctgggtgcagtggctcacgcctataatcccagcactctgggaggccgaggcgagtggatcacgaggtaggagttcaagaccaccctggccagcatggtgaaaccccgtctctactaaaaatacaaaaaaattagcsgggtgtggtggtgggcgcccgtagtcccagctacctgggaggctgaggcaggagaatctcttgaacccaggaggcagaggttgcagtgagcagagactgcgccactgcactccagcc

SEQ ID NO: 717154 - DNA, 620 bp, Homo sapiens
cgacgacmccgacacatcaggagtccatgaacactggcacactcgcttccctgcgagggagggccaggagatccaaagggaagaacaaacacagcaagagggctctgcttgtgtgccagtgatctcagtggaagtaccgacccacacgtaggggtgcacacacacacgcacacacacagacacacacataactacacccagaagcgcgcacgcaaacacacacacacccacacaaacacgaacaccgtcaatcctacataaactaatgaggagcccaagtttctgtctctacaacagggacaactggatagtgatggctacatctcaggatgagcccgcatatgggaaacatcaagttttggggtcgtgagtcttccgaacctctggtgggactgtctgagtgtttgtgttcatgataggtgacattcagtgtgtatttctgaatatgacctaccgacgtgtaggtttgcgtgtgaggtaattgcaggggactcggtttcgtattttctcttggggtgtgtttcattcgtcagttgttggtcggcatgagaaggtgaaaggtggctcatgtgggacatccgtggatcattctcgccaccttgaatagtggaaactggaat

SEQ ID NO: 717155 - DNA, 620 bp, Homo sapiens
cgacgaccccgacacatcaggagtccatgaacactggcacactcgcttccctgcgagggagggccaggagatccaaagggaagaacaaacacagcaagagggctctgcttgtgtgccagtgatctcagtggaagtaccgacccacacgtaggggtgcacacacacacgcacacacacagacacacacataactacacccagaagcgcgcacgcaaacacacacacacccacacaaacacgaacaccgtcaatcctacataaactaatgaggagcccaagtttctrtctctacaacagggacaactggatagtgatggctacatctcaggatgagcccgcatatgggaaacatcaagttttggggtcgtgagtcttccgaacctctggtgggactgtctgagtgtttgtgttcatgataggtgacattcagtgtgtatttctgaatatgacctaccgacgtgtaggtttgcgtgtgaggtaattgcaggggactcggtttcgtattttctcttggggtgtgtttcattcgtcagttgttggtcggcatgagaaggtgaaaggtggctcatgtgggacatccgtggatcattctcgccaccttgaatagtggaaactggaat

SEQ ID NO: 717156 - DNA, 3482 bp, Homo sapiens
tttcccaacatgtcttagacggtaaggaacagggcggaattgaggcccggcgccaaggcctctaggtgtaaagaaacagccctggcttcagggcccatgaaattaggatgattttaaggaggatgatgggatgagaggactgtgacctttggccccgtttctttcccttgtcttttcatgggccaggtgtgctccatcagaaggcttcctgtgccggatgtaaagtgtcctgggggaagaaaagagcactgcttagaaagatgctccacagggagaaaggagccaccattttcaggagaatgatccccagaagcatgagcaatgcagatgccgaggcttcacacaagaccctggagggtcttattcctgcagacgggacctgggcatcggtgtgcttgaatgctcataaccgattttgaggggagcccaatcgataagctgtctgccagtcatgctcatcacactgtagttttcacacacgtcacacggagaccctgttcgtatgcacatttgggtgcttgagcagggttgcgcccaagattctgtggttctacggagccctgagttgtgccctgggcagctttcctctggggttggtcaactttgatcactgtacctgacgagaaagggaccgtgaagtctaatcagcaaatagagaaaaggaaggggccatttcccacaatcatttccacggaaacaccacgtcggatcaataagtctcactgcgggacagggactgtgcttcagagatgcagctttcgcagctggacaaatgacccagaaattccccaaatgccatttttaaacacacccagtgagattgatttcagggctttctgaatttatttcagttgaatacacacactcctgtgtttgctttcctttattatcaatacagcttacttccagatgacttacatgcccgtgggaaaattttccgtttcgactcatgggaagcgggcaccgtgaaacaggcaagtcggtctgtccgcttccggcgttatgtgggttccagcaagagcacaagtcccagggcgcctgaggtccattcaggaaccagtgtaaaaacggcgagcccggggaagaaagaagagcaccgttcttctcttccaaatgcattccagtttccactattcaaggtggcgagaatgatccacggatgtcccacatgagccacatttcaccttctcatgccgaccaacaactgacgaatgaaacacaccccaagagaaaatacgaaaccgagtcccctgcaattacctcacacgcaaacctacacgtcggaaggtcatattcagaaatacacactgaatgtcacctatcatgagcacaaacactcagacagtccctccagaggttcggaagactcacgaccccaaaacttgatgtttcccatatgcgggctcatcctgagatgtagccatcactatccagttgtccctgttgtagagacagaaacttgggctcctcattagtttatgtaggattgacggtgttcgtgtttgtgtgggtgtgtgtgtgtttgcgtgcgcgcttctgggtgtagttatgtgtgtgtctgtgtgtgtgcgtgtgtgtgtgcacccctacgtgtgggtcggtacttccactgagatcactggcacacaagcagagccctcttgctgtgtttgttcttccctttggatctcctggtcctccctcgcagggaagcgagtgtgccagtgttcatggcctcctgatgtgtcggggtcgacgaagagaggtttagcagggagctttgctgttcaggatgatggttcttcatcccacacttgtattttgattgatgaatcacaagtacgtcgggaggcagggtaccttcgacttttctgacgttgaactcaggcttcgttttgttttgctcttgaaggaatttccagtggtctaaggtgctttcctgagtggctctttccaccaagtgctcgtccaactcgggggcctggaggcaggggtggtctctcttgagctctccttgcgttgctcgcctgtctgtgtcttctgcgccaagggctcttggttccctgcctcttgacacactctcactgtgtctttcccattcactcttctggatgtaaaagaggacgtaggcctgttgactcaggacagaagtgatgctagcggcggtgacctcggcatcatccattttataccactggccttcttgagctttgacataagagaagtaatgtccgttgtgacaactccacccagcgtggaccagcacagcatagaggacatagacaagaggtcctgtgttctgctgagacatgtatggctgcatgtcaaggcactcaggatattgcacattcttggcaatcttgttgcctgtgacatcggagaatctcttcaatacaaggatgaggaccttggcagaggtgtgtaaagttaacgtcttggaggccggcgccctctggagacaaacaccacaatgataggcattctctccattgagttcttcgggcttcaccaactgttccaaagcttgctggacactctgagctgcctggatatccagggcgatgtccaggtaagggtcaaaagtgtctgaaatgccgtggcagtggagacagttgatttgagatctccagtagcctccaaatatttggtggatgagggtggtgtccttagagtgatgatctacctgcttgtgcccgggaaggcatgcctttttcatggcatccacagtgaacatgagaaattcatgggcatcttcctgcttgcctctatggaagccagcagccaatgcctgtgagggctggatgacgtggccaggattgtggagggcccgtgtgatgtgagcttgcatagtacagagcatgcagcccttgtgacgatgacacgtttgagagtgctcccgggacagcatgtagttggcaaggggcggtgtgtatgtcaggcactgcaaggaagcgttcacgtagcaggtatttcccatattctggagcccagcccccaccgcagcaggtctcctgctactcagaggaagcttctccctgggagcaagctgtcttgccacaggagccaaatcatcacagaggtcgacacgggtctcacatgagagtggtgacttctcagggagagaagtccgctggatttcagcaaaagctgcatckggccgagaagatgtgagttttgaaaagtggttgaactgccactcaccacccaagtagagtgagtcgtcctccatgtcgactggaacaaggatcacaaggtttgtctgctgggaccgcaggttgcagaaggacgctatcccttccgagagagtcttcaaatgacgagctctctggccgcatcagcccttctgtaagtcacccccaccaaccgcgaacaccccacccactcatcaggtgcgcgataagccaatcaaatatcagcactcaattcaggaaggagtcacagggtgtgtcccctggcatcgctgggaattcaacagacacagcccacaacatgacttccagaac

SEQ ID NO: 717157 - DNA, 3482 bp, Homo sapiens
tttcccaacatgtcttagacggtaaggaacagggcggaattgaggcccggcgccaaggcctctaggtgtaaagaaacagccctggcttcagggcccatgaaattaggatgattttaaggaggatgatgggatgagaggactgtgacctttggccccgtttctttcccttgtcttttcatgggccaggtgtgctccatcagaaggcttcctgtgccggatgtaaagtgtcctgggggaagaaaagagcactgcttagaaagatgctccacagggagaaaggagccaccattttcaggagaatgatccccagaagcatgagcaatgcagatgccgaggcttcacacaagaccctggagggtcttattcctgcagacgggacctgggcatcggtgtgcttgaatgctcataaccgattttgaggggagcccaatcgataagctgtctgccagtcatgctcatcacactgtagttttcacacacgtcacacggagaccctgttcgtatgcacatttgggtgcttgagcagggttgcgcccaagattctgtggttctacggagccctgagttgtgccctgggcagctttcctctggggttggtcaactttgatcactgtacctgacgagaaagggaccgtgaagtctaatcagcaaatagagaaaaggaaggggccatttcccacaatcatttccacggaaacaccacgtcggatcaataagtctcactgcgggacagggactgtgcttcagagatgcagctttcgcagctggacaaatgacccagaaattccccaaatgccatttttaaacacacccagtgagattgatttcagggctttctgaatttatttcagttgaatacacacactcctgtgtttgctttcctttattatcaatacagcttacttccagatgacttacatgcccgtgggaaaattttccgtttcgactcatgggaagcgggcaccgtgaaacaggcaagtcggtctgtccgcttccggcgttatgtgggttccagcaagagcacaagtcccagggcgcctgaggtccattcaggaaccagtgtaaaaacggcgagcccggggaagaaagaagagcaccgttcttctcttccaaatgcattccagtttccactattcaaggtggcgagaatgatccacggatgtcccacatgagccacatttcaccttctcatgccgaccaacaactgacgaatgaaacacaccccaagagaaaatacgaaaccgagtcccctgcaattacctcacacgcaaacctacacgtcggaaggtcatattcagaaatacacactgaatgtcacctatcatgagcacaaacactcagacagtccctccagaggttcggaagactcacgaccccaaaacttgatgtttcccatatgcgggctcatcctgagatgtagccatcactatccagttgtccctgttgtagagacagaaacttgggctcctcattagtttatgtaggattgacggtgttcgtgtttgtgtgggtgtgtgtgtgtttgcgtgcgcgcttctgggtgtagttatgtgtgtgtctgtgtgtgtgcgtgtgtgtgtgcacccctacgtgtgggtcggtacttccactgagatcactggcacacaagcagagccctcttgctgtgtttgttcttccctttggatctcctggtcctccctcgcagggaagcgagtgtgccagtgttcatggcctcctgatgtgtcggggtcgacgaagagaggtttagcagggagctttgctgttcaggatgatggttcttcatcccacacttgtattttgattgatgaatcacaagtacgtcgggaggcagggtaccttcgacttttctgacgttgaactcaggcttcgttttgttttgctcttgaaggaatttccagtggtctaaggtgctttcctgagtggctctttccaccaagtgctcgtccaactcgggggcctggaggcaggggtggtctctcttgagctctccttgcgttgctcgcctgtctgtgtcttctgcgccaagggctcttggttccctgcctcttgacacactctcactgtgtctttcccattcactcttctggatgtaaaagaggacgtaggcctgttgactcaggacagaagtgatgctagcggcggtgacctcggcatcatccattttataccactggccttcttgagctttgacataagagaagtaatgtccgttgtgacaactccacccagcgtggaccagcacagcatagaggacatagacaagaggtcctgtgttctgctgagacatgtatggctgcatgtcaaggcactcaggatattgcacattcttggcaatcttgttgcctgtgacatcggagaatctcttcaatacaaggatgaggaccttggcagaggtgtgtaaagttaacgtcttggaggccggcgccctctggagacaaacaccacaatgataggcattctctccattgagttcttcgggcttcaccaactgttccaaagcttgctggacactctgagctgcctggatatccagggcgatgtccaggtaagggtcaaaagtgtctgaaatgccgtggcagtggagacagttgatttgagatctccagtagcctccaaatatttggtggatgagggtggtgtccttagagtgatgatctacctgcttgtgcccgggaaggcatgcctttttcatggcatccacagtgaacatgagaaattcatgggcatcttcctgcttgcctctatggaagccagcagccaatgcctgtgagggctggatgacgtggccaggattgtggagggcccgtgtgatgtgagcttgcatagtacagagcatgcagcccttgtgacgatgacacgtttgagagtgctcccgggacagcatgtagttggcaaggggcggtgtgtatgtcaggcactgcaaggaagcgttcacgtagcaggtatttcccatattctggagcccagcccccaccgcagcaggtctcctgctactcagaggaagcttctccctgggagcaagctgtcttgccacaggagccaaatcatcacagaggtcgacacgggtctcacatgagagtggtgacttctcagggagagaagtccgctggatttcagcaaaagctgcatcgggccgagaagatgtgagttttgaaaagtggttgaactgccactcaccacccaagtagagtgagtcgtcctccatgtcgactggaacraggatcacaaggtttgtctgctgggaccgcaggttgcagaaggacgctatcccttccgagagagtcttcaaatgacgagctctctggccgcatcagcccttctgtaagtcacccccaccaaccgcgaacaccccacccactcatcaggtgcgcgataagccaatcaaatatcagcactcaattcaggaaggagtcacagggtgtgtcccctggcatcgctgggaattcaacagacacagcccacaacatgacttccagaac

SEQ ID NO: 717158 - DNA, 3482 bp, Homo sapiens
tttcccaacatgtcttagacggtaaggaacagggcggaattgaggcccggcgccaaggcctctaggtgtaaagaaacagccctggcttcagggcccatgaaattaggatgattttaaggaggatgatgggatgagaggactgtgacctttggccccgtttctttcccttgtcttttcatgggccaggtgtgctccatcagaaggcttcctgtgccggatgtaaagtgtcctgggggaagaaaagagcactgcttagaaagatgctccacagggagaaaggagccaccattttcaggagaatgatccccagaagcatgagcaatgcagatgccgaggcttcacacaagaccctggagggtcttattcctgcagacgggacctgggcatcggtgtgcttgaatgctcataaccgattttgaggggagcccaatcgataagctgtctgccagtcatgctcatcacactgtagttttcacacacgtcacacggagaccctgttcgtatgcacatttgggtgcttgagcagggttgcgcccaagattctgtggttctacggagccctgagttgtgccctgggcagctttcctctggggttggtcaactttgatcactgtacctgacgagaaagggaccgtgaagtctaatcagcaaatagagaaaaggaaggggccatttcccacaatcatttccacggaaacaccacgtcggatcaataagtctcactgcgggacagggactgtgcttcagagatgcagctttcgcagctggacaaatgacccagaaattccccaaatgccatttttaaacacacccagtgagattgatttcagggctttctgaatttatttcagttgaatacacacactcctgtgtttgctttcctttattatcaatacagcttacttccagatgacttacatgcccgtgggaaaattttccgtttcgactcatgggaagcgggcaccgtgaaacaggcaagtcggtctgtccgcttccggcgttatgtgggttccagcaagagcacaagtcccagggcgcctgaggtccattcaggaaccagtgtaaaaacggcgagcccggggaagaaagaagagcaccgttcttctcttccaaatgcattccagtttccactattcaaggtggcgagaatgatccacggatgtcccacatgagccacatttcaccttctcatgccgaccaacaactgacgaatgaaacacaccccaagagaaaatacgaaaccgagtcccctgcaattacctcacacgcaaacctacacgtcggaaggtcatattcagaaatacacactgaatgtcacctatcatgagcacaaacactcagacagtccctccagaggttcggaagactcacgaccccaaaacttgatgtttcccatatgcgggctcatcctgagatgtagccatcactatccagttgtccctgttgtagagacagaaacttgggctcctcattagtttatgtaggattgacggtgttcgtgtttgtgtgggtgtgtgtgtgtttgcgtgcgcgcttctgggtgtagttatgtgtgtgtctgtgtgtgtgcgtgtgtgtgtgcacccctacgtgtgggtcggtacttccactgagatcactggcacacaagcagagccctcttgctgtgtttgttcttccctttggatctcctggtcctccctcgcagggaagcgagtgtgccagtgttcatggcctcctgatgtgtcggggtcgacgaagagaggtttagcagggagctttgctgttcaggatgatggttcttcatcccacacttgtattttgattgatgaatcacaagtacgtcgggaggcagggtaccttcgacttttctgacgttgaactcaggcttcgttttgttttgctcttgaaggaatttccagtggtctaaggtgctttcctgagtggctctttccaccaagtgctcgtccaactcgggggcctggaggcaggggtggtctctcttgagctctccttgcgttgctcgcctgtctgtgtcttctgcgccaagggctcttggttccctgcctcttgacacactctcactgtgtctttcccattcactcttctggatgtaaaagaggacgtaggcctgttgactcaggacagaagtgatgctagcggcggtgacctcggcatcatccattttataccactggccttcttgagctttgacataagagaagtaatgtccgttgtgacaactccacccagcgtggaccagcacagcatagaggacatagacaagaggtcctgtgttctgctgagacatgtatggctgcatgtcaaggcactcaggatattgcacattcttggcaatcttgttgcctgtgacatcggagaatctcttcaatacaaggatgaggaccttggcagaggtgtgtaaagttaacgtcttggaggccggcgccctctggagacaaacaccacaatgataggcattctctccattgagttcttcgggcttcaccaactgttccaaagcttgctggacactctgagctgcctggatatccagggcgatgtccaggtaagggtcaaaagtgtctgaaatgccgtggcagtggagacagttgatttgagatctccagtagcctccaaatatttggtggatgagggtggtgtccttagagtgatgatctacctgcttgtgcccgggaaggcatgcctttttcatggcatccacagtgaacatgagaaattcatgggcatcttcctgcttgcctctatggaagccagcagccaatgcctgtgagggctggatgacgtggccaggattgtggagggcccgtgtgatgtgagcttgcatagtacagagcatgcagcccttgtgacgatgacacgtttgagagtgctcccgggacagcatgtagttggcaaggggcggtgtgtatgtcaggcactgcaaggaagcgttcacgtagcaggtatttcccatattctggagcccagcccccaccgcagcaggtctcctgctactcagaggaagcttctccctgggagcaagctgtcttgccacaggagccaaatcatcacagaggtcgacacgggtctcacatgagagtggtgacttctcagggagagaagtccgctggatttcagcaaaagctgcatcgggccgagaagatgtgagttttgaaaagtggttgaactgccactcaccacccaagtagagtgagtcgtcctccatgtcgactggaacaaggatcacaagstttgtctgctgggaccgcaggttgcagaaggacgctatcccttccgagagagtcttcaaatgacgagctctctggccgcatcagcccttctgtaagtcacccccaccaaccgcgaacaccccacccactcatcaggtgcgcgataagccaatcaaatatcagcactcaattcaggaaggagtcacagggtgtgtcccctggcatcgctgggaattcaacagacacagcccacaacatgacttccagaac

SEQ ID NO: 717159 - DNA, 3482 bp, Homo sapiens
tttcccaacatgtcttagacggtaaggaacagggcggaattgaggcccggcgccaaggcctctaggtgtaaagaaacagccctggcttcagggcccatgaaattaggatgattttaaggaggatgatgggatgagaggactgtgacctttggccccgtttctttcccttgtcttttcatgggccaggtgtgctccatcagaaggcttcctgtgccggatgtaaagtgtcctgggggaagaaaagagcactgcttagaaagatgctccacagggagaaaggagccaccattttcaggagaatgatccccagaagcatgagcaatgcagatgccgaggcttcacacaagaccctggagggtcttattcctgcagacgggacctgggcatcggtgtgcttgaatgctcataaccgattttgaggggagcccaatcgataagctgtctgccagtcatgctcatcacactgtagttttcacacacgtcacacggagaccctgttcgtatgcacatttgggtgcttgagcagggttgcgcccaagattctgtggttctacggagccctgagttgtgccctgggcagctttcctctggggttggtcaactttgatcactgtacctgacgagaaagggaccgtgaagtctaatcagcaaatagagaaaaggaaggggccatttcccacaatcatttccacggaaacaccacgtcggatcaataagtctcactgcgggacagggactgtgcttcagagatgcagctttcgcagctggacaaatgacccagaaattccccaaatgccatttttaaacacacccagtgagattgatttcagggctttctgaatttatttcagttgaatacacacactcctgtgtttgctttcctttattatcaatacagcttacttccagatgacttacatgcccgtgggaaaattttccgtttcgactcatgggaagcgggcaccgtgaaacaggcaagtcggtctgtccgcttccggcgttatgtgggttccagcaagagcacaagtcccagggcgcctgaggtccattcaggaaccagtgtaaaaacggcgagcccggggaagaaagaagagcaccgttcttctcttccaaatgcattccagtttccactattcaaggtggcgagaatgatccacggatgtcccacatgagccacatttcaccttctcatgccgaccaacaactgacgaatgaaacacaccccaagagaaaatacgaaaccgagtcccctgcaattacctcacacgcaaacctacacgtcggaaggtcatattcagaaatacacactgaatgtcacctatcatgagcacaaacactcagacagtccctccagaggttcggaagactcacgaccccaaaacttgatgtttcccatatgcgggctcatcctgagatgtagccatcactatccagttgtccctgttgtagagacagaaacttgggctcctcattagtttatgtaggattgacggtgttcgtgtttgtgtgggtgtgtgtgtgtttgcgtgcgcgcttctgggtgtagttatgtgtgtgtctgtgtgtgtgcgtgtgtgtgtgcacccctacgtgtgggtcggtacttccactgagatcactggcacacaagcagagccctcttgctgtgtttgttcttccctttggatctcctggtcctccctcgcagggaagcgagtgtgccagtgttcatggcctcctgatgtgtcggggtcgacgaagagaggtttagcagggagctttgctgttcaggatgatggttcttcatcccacacttgtattttgattgatgaatcacaagtacgtcgggaggcagggtaccttcgacttttctgacgttgaactcaggcttcgttttgttttgctcttgaaggaatttccagtggtctaaggtgctttcctgagtggctctttccaccaagtgctcgtccaactcgggggcctggaggcaggggtggtctctcttgagctctccttgcgttgctcgcctgtctgtgtcttctgcgccaagggctcttggttccctgcctcttgacacactctcactgtgtctttcccattcactcttctggatgtaaaagaggacgtaggcctgttgactcaggacagaagtgatgctagcggcggtgacctcggcatcatccattttataccactggccttcttgagctttgacataagagaagtaatgtccgttgtgacaactccacccagcgtggaccagcacagcatagaggacatagacaagaggtcctgtgttctgctgagacatgtatggctgcatgtcaaggcactcaggatattgcacattcttggcaatcttgttgcctgtgacatcggagaatctcttcaatacaaggatgaggaccttggcagaggtgtgtaaagttaacgtcttggaggccggcgccctctggagacaaacaccacaatgataggcattctctccattgagttcttcgggcttcaccaactgttccaaagcttgctggacactctgagctgcctggatatccagggcgatgtccaggtaagggtcaaaagtgtctgaaatgccgtggcagtggagacagttgatttgagatctccagtagcctccaaatatttggtggatgagggtggtgtccttagagtgatgatctacctgcttgtgcccgggaaggcatgcctttttcatggcatccacagtgaacatgagaaattcatgggcatcttcctgcttgcctctatggaagccagcagccaatgcctgtgagggctggatgacgtggccaggattgtggagggcccgtgtgatgtgagcttgcatagtacagagcatgcagcccttgtgacgatgacacgtttgagagtgctcccgggacagcatgtagttggcaaggggcggtgtgtatgtcaggcactgcaaggaagcgttcacgtagcaggtatttcccatattctggagcccagcccccaccgcagcaggtctcctgctactcagaggaagcttctccctgggagcaagctgtcttgccacaggagccaaatcatcacagaggtcgacacgggtctcacatgagagtggtgacttctcagggagagaagtccgctggatttcagcaaaagctgcatcgggccgagaagatgtgagttttgaaaagtggttgaactgccactcaccacccaagtagagtgagtcgtcctccatgtcgactggaacaaggatcacaaggtttgtctgctgggaccgcaggttgcagaaggacgctatcccttccgagagagtcttcaaatgacgagctctctggccgcatcagcccttctgtaagtcacccccaccaaccgcgaacaccccacccactcatcaggtgcgcgataagccaatcaaatatcagcactcaattcaggaaggagtcacagggtgtgtcccctggcatcgctgggaattcaacagacacagcccacarcatgacttccagaac

SEQ ID NO: 717160 - DNA, 1500 bp, Homo sapiens
  misc_feature 845, 846, 847, 848, 849, 850, 851, 852, 853, 854, 855, 856,857, 858, 859, 860, 861, 862, 863, 864, 865, 866, 867, 868,869, 870, 871, 872, 873, 874, 875, 876, 877, 878, 879, 880,881, 882, 883, 884, 885, 886, 887, 888, 889, 890, 891: n = A,T,C or G
  misc_feature 892, 893, 894, 895, 896, 897, 898, 899, 900, 901, 902, 903,904, 905, 906, 907, 908, 909, 910, 911, 912, 913, 914, 915,916, 917, 918, 919, 920, 921, 922, 923, 924, 925, 926, 927,928, 929, 930, 931, 932, 933, 934, 935, 936, 937, 938: n = A,T,C or G
  misc_feature 939, 940, 941, 942, 943, 944: n = A,T,C or G
caacgtcagaaaagtcgaaggtaccctgcctcccgacgtacttgtgattcatcaatcaaaatacaagtgtgggatgaagaaccatcatcctgaacagcaaagctccctgctaaacctctcttcgtcgaccccgacacatcaggagtccttgaacactggcacactcgcttccctgcgagggaggaccaggagatccaaagggaagaacaaacacagcaagagggctctgcttgtgtgccagtgatctcagtggaagtaccgacccacacgtaggggtgcacacacacacgcacacacacagacacacacataactacacccagaagcgcgcacgcaaacacacacacacccacacaaacacgaacaccgtcaatcctacataaactaatgaggagcccaagtttctgtctctacaacagggacaactggatagtgatggctacatctcaggatgagcccgcatatgggaaacatcaagttttggggtcgtgagtcttccgaacctctggagggactgtctgagtgtttgtgctcatgataggtgacattcagtgtgtatttctgaatatgaccttccgacgtgtaggtttgcgtgtgaggtaattgcaggggactcggtttcgtattttctcttggggtgtgtttcattcgtcagttgttggtcggcatgagaaggtgaaatgtggctcatgtgggacatccgtggatcattctcgccaccttgaatagtggaaactggaatgcatttggaagaaaagaacggtgctcttctttctttcccgggctcgccgttttacactggttcctgaatgacctcaggcgccctgggacttgtgctcttgctnnnnnnnnnnnnnnnnnnnnnnnnnnnnnnnnnnnnnnnnnnnnnnnnnnnnnnnnnnnnnnnnnnnnnnnnnnnnnnnnnnnnnnnnnnnnnnnnnnnngaattcaacagacacagcccacarcatgacttccagaacacctgaatcaaattactcctcaggatgataggcacatataataggagcgtaaccgggttgggacagtggcctcacagttgccttattttaggtaaagcaatggcagggaagaaatctttacctaggaaaccgtgtgcgtgtgtgtgtgtgagtgtgtttgtgtgtgtgtgtgtgggggggcgtgtgtgtgtgtgtgtttgtgctgggatgaacttccaagtatgtacttttggcagctgccatcatcctctcagcgacggaaggacaagaagtcgaaagtgcgctttctgacctgagaatagtcaatgaagtatagtatttagcacagcgtattttcttccctaatgagaaaggagagatccgtggaattaaacagaccttccagcgataacctttccacgttgagcctattgattctctatccgagtgaaattacctgccagtggagaacaagacaagtctttgcgtgaaatgctcttgtggaagctagattgccaaataagaaagcatcaaatgg

SEQ ID NO: 717161 - DNA, 1500 bp, Homo sapiens
  misc_feature 845, 846, 847, 848, 849, 850, 851, 852, 853, 854, 855, 856,857, 858, 859, 860, 861, 862, 863, 864, 865, 866, 867, 868,869, 870, 871, 872, 873, 874, 875, 876, 877, 878, 879, 880,881, 882, 883, 884, 885, 886, 887, 888, 889, 890, 891: n = A,T,C or G
  misc_feature 892, 893, 894, 895, 896, 897, 898, 899, 900, 901, 902, 903,904, 905, 906, 907, 908, 909, 910, 911, 912, 913, 914, 915,916, 917, 918, 919, 920, 921, 922, 923, 924, 925, 926, 927,928, 929, 930, 931, 932, 933, 934, 935, 936, 937, 938: n = A,T,C or G
  misc_feature 939, 940, 941, 942, 943, 944: n = A,T,C or G
caacgtcagaaaagtcgaaggtaccctgcctcccgacgtacttgtgattcatcaatcaaaatacaagtgtgggatgaagaaccatcatcctgaacagcaaagctccctgctaaacctctcttcgtcgaccccgacacatcaggagtccttgaacactggcacactcgcttccctgcgagggaggaccaggagatccaaagggaagaacaaacacagcaagagggctctgcttgtgtgccagtgatctcagtggaagtaccgacccacacgtaggggtgcacacacacacgcacacacacagacacacacataactacacccagaagcgcgcacgcaaacacacacacacccacacaaacacgaacaccgtcaatcctacataaactaatgaggagcccaagtttctgtctctacaacagggacaactggatagtgatggctacatctcaggatgagcccgcatatgggaaacatcaagttttggggtcgtgagtcttccgaacctctggagggactgtctgagtgtttgtgctcatgataggtgacattcagtgtgtatttctgaatatgaccttccgacgtgtaggtttgcgtgtgaggtaattgcaggggactcggtttcgtattttctcttggggtgtgtttcattcgtcagttgttggtcggcatgagaaggtgaaatgtggctcatgtgggacatccgtggatcattctcgccaccttgaatagtggaaactggaatgcatttggaagaaaagaacggtgctcttctttctttcccgggctcgccgttttacactggttcctgaatgacctcaggcgccctgggacttgtgctcttgctnnnnnnnnnnnnnnnnnnnnnnnnnnnnnnnnnnnnnnnnnnnnnnnnnnnnnnnnnnnnnnnnnnnnnnnnnnnnnnnnnnnnnnnnnnnnnnnnnnnngaattcaacagacacagcccacaacatgacttccagaacacctgaatcaaattactcctcaggatgataggcacatataataggagygtaaccgggttgggacagtggcctcacagttgccttattttaggtaaagcaatggcagggaagaaatctttacctaggaaaccgtgtgcgtgtgtgtgtgtgagtgtgtttgtgtgtgtgtgtgtgggggggcgtgtgtgtgtgtgtgtttgtgctgggatgaacttccaagtatgtacttttggcagctgccatcatcctctcagcgacggaaggacaagaagtcgaaagtgcgctttctgacctgagaatagtcaatgaagtatagtatttagcacagcgtattttcttccctaatgagaaaggagagatccgtggaattaaacagaccttccagcgataacctttccacgttgagcctattgattctctatccgagtgaaattacctgccagtggagaacaagacaagtctttgcgtgaaatgctcttgtggaagctagattgccaaataagaaagcatcaaatgg

SEQ ID NO: 717162 - DNA, 1500 bp, Homo sapiens
  misc_feature 845, 846, 847, 848, 849, 850, 851, 852, 853, 854, 855, 856,857, 858, 859, 860, 861, 862, 863, 864, 865, 866, 867, 868,869, 870, 871, 872, 873, 874, 875, 876, 877, 878, 879, 880,881, 882, 883, 884, 885, 886, 887, 888, 889, 890, 891: n = A,T,C or G
  misc_feature 892, 893, 894, 895, 896, 897, 898, 899, 900, 901, 902, 903,904, 905, 906, 907, 908, 909, 910, 911, 912, 913, 914, 915,916, 917, 918, 919, 920, 921, 922, 923, 924, 925, 926, 927,928, 929, 930, 931, 932, 933, 934, 935, 936, 937, 938: n = A,T,C or G
  misc_feature 939, 940, 941, 942, 943, 944: n = A,T,C or G
caacgtcagaaaagtcgaaggtaccctgcctcccgacgtacttgtgattcatcaatcaaaatacaagtgtgggatgaagaaccatcatcctgaacagcaaagctccctgctaaacctctcttcgtcgaccccgacacatcaggagtccttgaacactggcacactcgcttccctgcgagggaggaccaggagatccaaagggaagaacaaacacagcaagagggctctgcttgtgtgccagtgatctcagtggaagtaccgacccacacgtaggggtgcacacacacacgcacacacacagacacacacataactacacccagaagcgcgcacgcaaacacacacacacccacacaaacacgaacaccgtcaatcctacataaactaatgaggagcccaagtttctgtctctacaacagggacaactggatagtgatggctacatctcaggatgagcccgcatatgggaaacatcaagttttggggtcgtgagtcttccgaacctctggagggactgtctgagtgtttgtgctcatgataggtgacattcagtgtgtatttctgaatatgaccttccgacgtgtaggtttgcgtgtgaggtaattgcaggggactcggtttcgtattttctcttggggtgtgtttcattcgtcagttgttggtcggcatgagaaggtgaaatgtggctcatgtgggacatccgtggatcattctcgccaccttgaatagtggaaactggaatgcatttggaagaaaagaacggtgctcttctttctttcccgggctcgccgttttacactggttcctgaatgacctcaggcgccctgggacttgtgctcttgctnnnnnnnnnnnnnnnnnnnnnnnnnnnnnnnnnnnnnnnnnnnnnnnnnnnnnnnnnnnnnnnnnnnnnnnnnnnnnnnnnnnnnnnnnnnnnnnnnnnngaattcaacagacacagcccacaacatgacttccagaacacctgaatcaaattactcctcaggatgataggcacatataataggagcgtaaccgggttgggacagtggcctcacagttgccttattttaggtaaagcaatggcagggaagaaatctttacctaggaaaccgtgtgcgtgtgtgtgtgtgagtgtgtttgtgtgtgtgtgtgtgggggggcgtgtgtgtgtgtgtgtttgtgctgggatgaacttccaagtatgtacttttggcagctgccatcatcctctcagcgacggaaggacaagaagtcgaaagtgcgctttctgacctgagaatagtcaatgaagtatagtatttagcacagcgtattttcttccctaatgagaaaggagagatccgtggaatyaaacagaccttccagcgataacctttccacgttgagcctattgattctctatccgagtgaaattacctgccagtggagaacaagacaagtctttgcgtgaaatgctcttgtggaagctagattgccaaataagaaagcatcaaatgg

SEQ ID NO: 717163 - DNA, 1500 bp, Homo sapiens
  misc_feature 845, 846, 847, 848, 849, 850, 851, 852, 853, 854, 855, 856,857, 858, 859, 860, 861, 862, 863, 864, 865, 866, 867, 868,869, 870, 871, 872, 873, 874, 875, 876, 877, 878, 879, 880,881, 882, 883, 884, 885, 886, 887, 888, 889, 890, 891: n = A,T,C or G
  misc_feature 892, 893, 894, 895, 896, 897, 898, 899, 900, 901, 902, 903,904, 905, 906, 907, 908, 909, 910, 911, 912, 913, 914, 915,916, 917, 918, 919, 920, 921, 922, 923, 924, 925, 926, 927,928, 929, 930, 931, 932, 933, 934, 935, 936, 937, 938: n = A,T,C or G
  misc_feature 939, 940, 941, 942, 943, 944: n = A,T,C or G
caacgtcagaaaagtcgaaggtaccctgcctcccgacgtacttgtgattcatcaatcaaaatacaagtgtgggatgaagaaccatcatcctgaacagcaaagctccctgctaaacctctcttcgtcgaccccgacacatcaggagtccttgaacactggcacactcgcttccctgcgagggaggaccaggagatccaaagggaagaacaaacacagcaagagggctctgcttgtgtgccagtgatctcagtggaagtaccgacccacacgtaggggtgcacacacacacgcacacacacagacacacacataactacacccagaagcgcgcacgcaaacacacacacacccacacaaacacgaacaccgtcaatcctacataaactaatgaggagcccaagtttctgtctctacaacagggacaactggatagtgatggctacatctcaggatgagcccgcatatgggaaacatcaagttttggggtcgtgagtcttccgaacctctggagggactgtctgagtgtttgtgctcatgataggtgacattcagtgtgtatttctgaatatgaccttccgacgtgtaggtttgcgtgtgaggtaattgcaggggactcggtttcgtattttctcttggggtgtgtttcattcgtcagttgttggtcggcatgagaaggtgaaatgtggctcatgtgggacatccgtggatcattctcgccaccttgaatagtggaaactggaatgcatttggaagaaaagaacggtgctcttctttctttcccgggctcgccgttttacactggttcctgaatgacctcaggcgccctgggacttgtgctcttgctnnnnnnnnnnnnnnnnnnnnnnnnnnnnnnnnnnnnnnnnnnnnnnnnnnnnnnnnnnnnnnnnnnnnnnnnnnnnnnnnnnnnnnnnnnnnnnnnnnnngaattcaacagacacagcccacaacatgacttccagaacacctgaatcaaattactcctcaggatgataggcacatataataggagcgtaaccgggttgggacagtggcctcacagttgccttattttaggtaaagcaatggcagggaagaaatctttacctaggaaaccgtgtgcgtgtgtgtgtgtgagtgtgtttgtgtgtgtgtgtgtgggggggcgtgtgtgtgtgtgtgtttgtgctgggatgaacttccaagtatgtacttttggcagctgccatcatcctctcagcgacggaaggacaagaagtcgaaagtgcgctttctgacctgagaatagtcaatgaagtatagtatttagcacagcgtattttcttccctaatgagaaaggagagatccgtggaattaaacagaccttccagcgataacctttccacgttgagcctattgattctctatccgagtgaaattacctgccagtggagaacaagacaagtctttgcrtgaaatgctcttgtggaagctagattgccaaataagaaagcatcaaatgg

SEQ ID NO: 717164 - DNA, 663 bp, Homo sapiens
tttggggtcgtgagtcttccgaacctctggtgggactgtctgagtgtttgtgttcatgataggtgacattcagtgtgtatttctgaatatgacctaccgacgtgtaggtttgcgtgtgaggtaattgcaggggactcggtttcgtattttctcttggggtgtgtttcattcgtcagttgttggtcggcatgagaaggtgaaakgtggctcatgtgggacatccgtggatcattctcgccaccttgaatagtggaaactggaatgcatttggaagagaagaacggtgctcttctttcttccccgggctcgccgtttttacactggttcctgaatggacctcaggcgccctgggacttgtgctcttgctggaacccacataacgccggaagcggacagaccgacttgcctgtttcacggtgcccgcttcccatgagtccaaacggaaaattttcccacgggcatgtaagtcatctggaagtaagctgtattgataataaaggaaagcaaacacaggagtgtgtgtattcaactgaaataaattcagaaagccctgaaatcaatctcactgggtgtgtttaaaaatggcatttggggaatttctgggtcatttgtccagctgcgaaagctgcatctctgaagcacagtccctgtcccgcagtgaga

SEQ ID NO: 717165 - DNA, 663 bp, Homo sapiens
tttggggtcgtgagtcttccgaacctctggtgggactgtctgagtgtttgtgttcatgataggtgacattcagtgtgtatttctgaatatgacctaccgacgtgtaggtttgcgtgtgaggtaattgcaggggactcggtttcgtattttctcttggggtgtgtttcattcgtcagttgttggtcggcatgagaaggtgaaaggtggctcatgtgggacatccgtggatcattctcgccaccttgaatagtggaaactggaatgcatttggaagagaagaacggtgctcttctttcttccccgggctcgccgtttttacactggttcctgaatggacctcaggcgccctgggacttgtgctcttgctggaacccacataacgccggaagcggacagaccgacttgcctgtttcacggtgcccgcttcccatgagtcsaaacggaaaattttcccacgggcatgtaagtcatctggaagtaagctgtattgataataaaggaaagcaaacacaggagtgtgtgtattcaactgaaataaattcagaaagccctgaaatcaatctcactgggtgtgtttaaaaatggcatttggggaatttctgggtcatttgtccagctgcgaaagctgcatctctgaagcacagtccctgtcccgcagtgaga

SEQ ID NO: 717166 - DNA, 826 bp, Homo sapiens
gccgtcgcacgtccgaaaccgctcactatgcagtgtcatgaccgtctctcttttctggcaaacataaatttggggattgtcatcaattagtctctcggggattgcatgatttccccaaaggctttcacagtctactttgtgcactgagtatctcttcaaacttcagtgcatgtttctaccatttgattctttcttatttggcaatctagcttccacaagagcatttcatgcaaagacttgtcttgttctccactggcaggtaatttcactcggacagagaatcaataggctcaacgtggaaaggttatcgctggaaggtctgtttgattccacggatctctcctttctcactagggaagaaaatacgctgtgctaaatactatacttcattgactattctcaggtcagaaagcgcactttcgacttcttgtccttccgtcgctgagaggatgatggcagctgccaaaagtacctacttggaggttcatcccagcacaaacacacacacacacacgcccccccmcacacacacacaaacacactcacacacacacacgcacacggtttcctaggtaaagatttcttccctgccattgctttacctaaaataaggcaactgtgaggccactgtcccaacccggttacactcctattatatgtgcctatcatcctgaggagtaatttgattcaggtgttctggaagtcatgctgtgggctgtgtctgttgaattcccagcgatgccaggggacacaccctgtgactccttcctgaattgagtgctgatatttgattggcttatcgcgcacctgatgagtgggtggggtg

SEQ ID NO: 717167 - DNA, 596 bp, Homo sapiens
tagaggccaacattgagctcccaacaaggcaatgctccctgggagataagttggagctataatagctgcaattgttctcacaggggtagatacctattctagacatagatttgctattctaccaaaagttcttctggtagttaaaatgtagttgatacacagcacgaattatatrtcagaagagagagagctgatatacctatagcaatatgaatgtatctttaaatcccagtgctaagtgaaaaaaaaaagatgcatggtctaatatcatttccataattaaagatatgcataaaaacctgtagtatatttttgggacagcatacagataagaatatacattaaaacatataaaatagtggctattttagggggaggggaatgagagtggggataaaaagaagtcagcctaagagtaggtccatgcaaaaactgaaggatgacaatatgccataaattcattaatatgattatcccaacaactgtgtacctaaggtaaaagacagagggagtggaaaaccttaaagaaaaaaaaaaaagaagccaaagctgaaagacctttttttttgcctcctttggcatccaggactctggca

SEQ ID NO: 717168 - DNA, 802 bp, Homo sapiens
aaatgagaaactttgacaagatcatctagtaatttccttgtagctctcaattatatgatttaagaatttaaactgtacttctaaaagggacctgaatagattatttaataaatgtccctactttcaggaagggccttgatctccttttgaaaatgctacatatttacttaattcagtaaacatttattgagtatcatgtatcagggactctgtcatgcgcttggaaggcaaaggcaaagttcctccttacaaggcacttacagtgtggtaagaagaacatgaactgatagcctaaaatgtgcttttctggaagaatagagaagagcatacttgtgattcaaggaaaagatatttatttcccacggaactgtttgtttttccatgtgtgagatgttttaaatcataattgattcagcagtaatgggtctgccaggatagttaggaactttgctcttgcaaatcatgccattgttctgatgacattctaaaagtatttaaaraagaaaatgtggaaaaggtgacttggttcacaaataagaaaaggaatcatgttgtcattaccagacacatttctcagaaatcatcagaagttctcacaaacaggataatcccactaaaatgggatgttaaatcattcaattttgaagacaaattgtgctaaagattcagtttaataataacaacaaagaaacaacttcaaaagatgttacttttttgacaaccagcttaaacattttatgaagaaatagtatatgttgtcacagagaaaaagagcatcttctctaagagataaaaatccaac

SEQ ID NO: 717169 - DNA, 883 bp, Homo sapiens
ggaaagcatattacttcaaatcttcaagaagatcttctttaaactaagacaatttgcacacacattgtttcataagtgggagctgaacatttttacacatggacacgaacatgggaacaataaacactgggggctactggggttgggggaagaaaggggagggttgagggttgaaaaactacctattgcatatatactcactacctgagtgatggaatcattcatatcccaagcctcagtgtcacacaacatactcatgtaacaaacctgcacacgcaayccctgaacctaaaataaaagttaaaataaattggactataaacttctcattttaattataaaccaattccaatttatttatttcccaatttgctgttagtatttacttagtaactgtgatgaaccaaaatataaacattttacactaaaaattatacagcaaatatgagttgacttaaccactatgtccttaagttcccctttatccagtcttctattccactatctgtttcaataatgtcaagatcctccagctgtgtttcttcattcctgccaatatgagacgtgtaacttatgtttaagtaacaatttcaatgaatgaactatttcttacaatagcaaggaatgtactactcctggctttcaaattatgatgtaaagcaattctagtcattgatccgcagggacaaggatagagatggtgccttatcttatgaaccctgtttgtgagctccctaacttaggggaggttcttacagactctctgggccaggggaggctgatgtcaccctgacaaaaaggaggaaactgcactttctatcctgtaaagtcagagagaatccagtgtttagagatttttcaggtttttctgccaaaatggcta

SEQ ID NO: 717170 - DNA, 883 bp, Homo sapiens
ggaaagcatattacttcaaatcttcaagaagatcttctttaaactaagacaatttgcacacacattgtttcataagtgggagctgaacatttttacacatggacacgaacatgggaacaataaacactgggggctactggggttgggggaagaaaggggagggttgagggttgaaaaactacctattgcatatatactcactacctgagtgatggaatcattcatatcccaagcctcagtgtcacacaacatactcatgtaacaaacctgcacacgcaacccctgarcctaaaataaaagttaaaataaattggactataaacttctcattttaattataaaccaattccaatttatttatttcccaatttgctgttagtatttacttagtaactgtgatgaaccaaaatataaacattttacactaaaaattatacagcaaatatgagttgacttaaccactatgtccttaagttcccctttatccagtcttctattccactatctgtttcaataatgtcaagatcctccagctgtgtttcttcattcctgccaatatgagacgtgtaacttatgtttaagtaacaatttcaatgaatgaactatttcttacaatagcaaggaatgtactactcctggctttcaaattatgatgtaaagcaattctagtcattgatccgcagggacaaggatagagatggtgccttatcttatgaaccctgtttgtgagctccctaacttaggggaggttcttacagactctctgggccaggggaggctgatgtcaccctgacaaaaaggaggaaactgcactttctatcctgtaaagtcagagagaatccagtgtttagagatttttcaggtttttctgccaaaatggcta

SEQ ID NO: 717171 - DNA, 665 bp, Homo sapiens
ctccaggctacacaacttccaatattctcttattctcttccaactaaactttacggcctttatttacattgaaccaagtcattctcagagagaaaagggaaattactgcttgttaaatgaaatcacgtgcgatgcagcaagcattaggcttgctcatgtttgcagtgactgcatagctacatgggaggtggcactggagctagtggtagtgttcatcgcagatgaatagttttgtcactgaagtgaagttccctccaggaagtacaagcctaaagcatgctgaaaacggttgtgtagctgcactgtaaataattttaggagggcaaggttgggtggtaaatcacttagggcaaaacagtgacccacacayggaataatttaatgaaagataatagattcaatacaattgtgacaaataggatactgaaatttttagaaacctattctgaatccgtatttgtggaaattagtgtttggggcattgggcttcagtcttcattttagcagataattaaatttatgagacataaaaatagaacatgttgatatcaagtaagaggaaaatgtgaatttcagcagtaggagctcgaggttttgtttgatatacctggagggagggttgagggtatttgacatgtatataccctaaacctaatgagtcaaat

SEQ ID NO: 717172 - DNA, 649 bp, Homo sapiens
acctctaaaattcrggatttactgaagcccatcctagtagtttttggttgcctaatcaaagaatgaaaccttccaagatagattagaaaaagaatatttatgaagtaaaaacatctcatataaggcaatacttctagggacaatatacaatgtaattggaataagttatatattaaaataagttgtacactgaatatccttgttaactggatttttttcttgaagcagagcagcaatggtagaaatatgacacatatcagttgggaaaactggtatacacatacagaagaatgaaattggacccttatctcacactaaatacaaaaatcaactcaaaatggactaaagacttaaacataagacctgaaactgtaaaactaatagaagaaaacttagagtatagttccatgacattaatctaggcaatgattttttttggacatgatcccaaaagtacagacaacaaaagcagaaatatataaatggaattgttttaaactaaaaagctctatgtagcaaaggaaacaatcaaaagagtgaagagacaccttatggaatgggagaaaacatgtgaagactttgcatctgctaaagggttaatatccaaaacatataaagaactcaaacaaatgggcaaatgtcataagta

SEQ ID NO: 717173 - DNA, 2052 bp, Homo sapiens
gtgaagggtctcagaattttcctcacttttccatctgtttctctgaaattcattttgctataatctacctgcttaatattagaatttattttcactgttgaaataaaaattaaccaggctgaagaagttgatagcatttagagatgttgagttttggagcaggaaatccagaacaaacaaacagcaaaaaatccaaacaaagataattaaaagctgattttcctcagtagaaaatgccattgacttttattctgatgctggaaacacacaaggcaaatttttccacactgtataccactgtacttgcaatattgtctgaagaaaagagacactggagagttggcagaacaaagaaatgaaaatacaaataggaaccacctctggaatgtgactatcgtgaaaattagaggacattcattgctgtatattgtttatacttgttgctgtttattgtctcactggaatacaaggatgacaacccagttatcacagttttgtgcctagcagtgtgtacaactcttagcacagagcaagtgtattgcaggtaagatgtgcttgtcaaggagcaaagagacattggtgtttgtcctcagaatggctgaatatattttgaaacaggcaagacttttgatgaaactagagatttttttaaaaggggggataaatgaggttaccaaaagargtataaaaaagcaagaagttcaagcaaccaaaggagttctaagagcaagatgaatttaaaataggtcattccaacctgggacaagacccatcagagatggcagttagtaatttgggggaggggagagacatgggggtggagttggcgtggaggatgaaatttacccagggcatgccaagatgaggttgctaccagatatctgtccacagaagctcagtgccaggaaagagaatgcctgtcagagtctgggaaccaggagaaaggcacagagcctggaaagtaggtcataccatgactcaggctggaggggctgagtggaagatcagctatggaatgagcaaaggtggaggaccagagagtcaggaaggaaacatggtgttggtggacctgcatgagcaaaatcgggacctcactctccacctgccaccagtgctcagtgctgctgtttctctaccagccagagtctgagcagaccctcagttgaatgcattttgtatgatttcaccaaatagacatatgaccacaattatctgaaatgtttcatatgctgtgttcattattcattgaacaaatagacattgagttcccactatgtgctcagaactgtgctgggtgctgagaccacagaaaggagaaaatcctggctttgatccacctagtaatgcctgtacacgtaaatcagtctgtaaacagcaagctgtggagaaaactgtcttgtaaatatttttaaaggttgcttttattaattgctcaagaactagtcaaataatttaggagatgagttcagcagtgaatttagcagcttagaagtagcagaactcaataaaatgcaaaacatcacatgatctatagaaaccagggggtgaaaagccgtaggagcaaaatcattcctccattatttgggagggaaaaaagagaatgaaagaaacccgaccttagccggtggaagctggaaagtgacatcttctttactgagtcatttaaataagggatagatgaagctagaagctgttcaggttttgtaattattcatccataatgacagactttagtcaagtgaaaaattgttaagagcatcatttagagctaagcagaggattaagtaccatcattattggttcatctatgattttgaaggcaggacaaggtagtggtcaggaacacagacttgggagagaggctgcctggatgtacaccctcatttcatctgttcactagttttagaacctgggcaagtgcctttaattctttataactttctcatccattaaaggtaaatggtaatagactccacctctcataactgttggaaggattaaatagattaatgtatgtaaagtgcttaggatactctttgtcatgtgtttaat

SEQ ID NO: 717174 - DNA, 1577 bp, Homo sapiens
tgttttacctttaaagcaattctgaaatctttcataagtagaagataggattggtgattacaagctgatacttgaaaaattcactgacaagacaaagattatttacattgatatttcttatcctgggtggtcatataacttttctttcaaacatcactgtcaataccctgattaatgaaagactacaaacatgagatgaaagtatcaatcctctgtttcacgttaagactatatttattctaagtgattataactgtacatttatttatatgagtatgccaacacataattcttttaaatagaatctataagtggctatcataaccaccctagttagatatcacatggattccaatggaagaaaagacaaaactggtgggactttcataactttctattactgctcacttccttttttattttctaatatgactttgttttggctcccatattgttgacattgagtgtgactaagccttttcactgaggaccttctgttctcctagtcactgccttttgctttccacctgggagctggggtcatctttccacttccagggtgactctgggttcacagtgaagggtcctgggtgggaggttctgatcgtgagggcaggcctgcccaaaggtcactgctgctgttgtaggcaccargtcaatatccccagcatgtcaactgaggactttctcacatttgcttttattataaagccatcttgagtggaacaaactctataaaatcagctagctgaaaagtaaaaaattcaggcagtcagctgatccttctgcctgcagatcagcaaataaccattgcgagtgatggctttttcaagattactttggattgaagctatatattctgtaacaaaacccagcatgcttgctttgattagcttgattggctaacaaagtcatatggaaaacaaaatgcatttttttgtattgacttaaatgaaaataaccttcaccttttttgtgactgatttgaatccaatttaatcttgatgttgttcataacctaagtgagattcattgatgataagaattacgtaagtaggctgggcgcggtggctcacgcctgtaatcccagcactttgggaggccgaggcgggtggatcacgtggtcaggagatggagaccatcctggctaacagggtgaaaccccgtctctactagaaatacaaaaaaaattaggcgggagtggtggcaggcgcctgtagtcccagctactcgggaggctgaggcaggagaatggcgtgaacctgggaggcggagcttgcagtgagacgagattgagccactgcactccagcctgggcgacagagcgagactccgtcacaaaaacaaacaaacaaacaaacaaacaaacaaacaaacaaaagattacttaagcagtaagattctttaacaagagaaaaattttttatagcctcaattgaagactaactttcttaatcagctgtacattagactgtgactataaatataaattacattagttcctttggttaaaatgactttcatatatgtgagaaaaactcaaggactagctttagttaaacactatttattttccc

SEQ ID NO: 717175 - DNA, 1577 bp, Homo sapiens
tgttttacctttaaagcaattctgaaatctttcataagtagaagataggattggtgattacaagctgatacttgaaaaattcactgacaagacaaagattatttacattgatatttcttatcctgggtggtcatataacttttctttcaaacatcactgtcaataccctgattaatgaaagactacaaacatgagatgaaagtatcaatcctctgtttcacgttaagactatatttattctaagtgattataactgtacatttatttatatgagtatgccaacacataattcttttaaatagaatctataagtggctatcataaccaccctagttagatatcacatggattccaatggaagaaaagacaaaactggtgggactttcataactttctattactgctcacttccttttttattttctaatatgactttgttttggctcccatattgttgacattgagtgtgactaagccttttcactgaggaccttctgttctcctagtcactgccttttgctttccacctgggagctggggtcatctttccacttccagggtgactctgggttcacagtgaagggtcctgggtgggaggttctgatcgtgagggcaggcctgcccaaaggtcactgctgctgttgtaggcaccaagtcaatatccccagcatgtcaactgaggactttctcacatttgcttttattataaagccatcttgagtggaacaaactctataaaatcagctagctgaaaagtaaaaaattcaggcagtcagctgatccttctgcctgcagatcagcaaataaccattgcgagtgatggctttttcaagattactttggattgaagctatatattctgtaacaaaacccagcatgcttgctttgattagcttgattggctaacaaagtcatatggaaaacaaaatgcatttttttgtattgacttaaatgaaaataaccttcaccttttttgtgactgatttgaatccaatttaatcttgatgttgttcataacctaagtgagattcattgatgataagaattacgtaagtaggctgggcgcggtggctcacgcctgtaatcccagcactttgggaggccgaggcgggyggatcacgtggtcaggagatggagaccatcctggctaacagggtgaaaccccgtctctactagaaatacaaaaaaaattaggcgggagtggtggcaggcgcctgtagtcccagctactcgggaggctgaggcaggagaatggcgtgaacctgggaggcggagcttgcagtgagacgagattgagccactgcactccagcctgggcgacagagcgagactccgtcacaaaaacaaacaaacaaacaaacaaacaaacaaacaaacaaaagattacttaagcagtaagattctttaacaagagaaaaattttttatagcctcaattgaagactaactttcttaatcagctgtacattagactgtgactataaatataaattacattagttcctttggttaaaatgactttcatatatgtgagaaaaactcaaggactagctttagttaaacactatttattttccc

SEQ ID NO: 717176 - DNA, 1577 bp, Homo sapiens
tgttttacctttaaagcaattctgaaatctttcataagtagaagataggattggtgattacaagctgatacttgaaaaattcactgacaagacaaagattatttacattgatatttcttatcctgggtggtcatataacttttctttcaaacatcactgtcaataccctgattaatgaaagactacaaacatgagatgaaagtatcaatcctctgtttcacgttaagactatatttattctaagtgattataactgtacatttatttatatgagtatgccaacacataattcttttaaatagaatctataagtggctatcataaccaccctagttagatatcacatggattccaatggaagaaaagacaaaactggtgggactttcataactttctattactgctcacttccttttttattttctaatatgactttgttttggctcccatattgttgacattgagtgtgactaagccttttcactgaggaccttctgttctcctagtcactgccttttgctttccacctgggagctggggtcatctttccacttccagggtgactctgggttcacagtgaagggtcctgggtgggaggttctgatcgtgagggcaggcctgcccaaaggtcactgctgctgttgtaggcaccaagtcaatatccccagcatgtcaactgaggactttctcacatttgcttttattataaagccatcttgagtggaacaaactctataaaatcagctagctgaaaagtaaaaaattcaggcagtcagctgatccttctgcctgcagatcagcaaataaccattgcgagtgatggctttttcaagattactttggattgaagctatatattctgtaacaaaacccagcatgcttgctttgattagcttgattggctaacaaagtcatatggaaaacaaaatgcatttttttgtattgacttaaatgaaaataaccttcaccttttttgtgactgatttgaatccaatttaatcttgatgttgttcataacctaagtgagattcattgatgataagaattacgtaagtaggctgggcgcggtggctcacgcctgtaatcccagcactttgggaggccgaggcgggtggatcacgtggtcaggagatggagaccatcctggctaacagggtgaaaccccgtctctactagaaatacaaaaaaaattaggcgggagtggtggcaggcgcctgtagtcccagctactcgggaggctgaggcaggagaatggcgtgaacctgggaggcggagcttgcagtgagacgagatkgagccactgcactccagcctgggcgacagagcgagactccgtcacaaaaacaaacaaacaaacaaacaaacaaacaaacaaacaaaagattacttaagcagtaagattctttaacaagagaaaaattttttatagcctcaattgaagactaactttcttaatcagctgtacattagactgtgactataaatataaattacattagttcctttggttaaaatgactttcatatatgtgagaaaaactcaaggactagctttagttaaacactatttattttccc

SEQ ID NO: 717177 - DNA, 2030 bp, Homo sapiens
  misc_feature 810, 811, 812, 813, 814, 815, 816, 817, 818, 819, 820, 821,822, 823, 824, 825, 826, 827, 828, 829, 830, 831, 832, 833,834, 835, 836, 837, 838, 839, 840, 841, 842, 843, 844, 845,846, 847, 848, 849, 850, 851, 852, 853, 854, 855, 856: n = A,T,C or G
  misc_feature 857, 858, 859, 860, 861, 862, 863, 864, 865, 866, 867, 868,869, 870, 871, 872, 873, 874, 875, 876, 877, 878, 879, 880,881, 882, 883, 884, 885, 886, 887, 888, 889, 890, 891, 892,893, 894, 895, 896, 897, 898, 899, 900, 901, 902, 903: n = A,T,C or G
  misc_feature 904, 905, 906, 907, 908, 909: n = A,T,C or G
gcaaatgacttttcctctactttttaatcaccatattgcatttttctatttttttaattaccttttawcttccctgctgtattgacagcttgttgagggcaggaaaaactcattattcattgccttgcacagcatagattctcaataaataacggctttattgaagctaagtagatctatatgatattcacaatgtttatattctcagaaagtttctcaagcagatgatagttgctatagaaatccagaaaatgtagagagagaatattttgatgttcagtattatcataaccataccccttccacccagagtcagtgaaaaggaagcccagaatccaaagcttctattccccaatcttcacacagtattcacatcacccaaacaaagagcataatatctcaaagcatcagctttctcctctgaaaataaagataatattgtctactatgtgtactgtagtcaccatatttattcccaggatatttgtcaaaatttaaaccatatgggatagcatccagcagcaacttacatactttaaaacactgtacaaatggaaatctttaaggaaactggcagataacaaatactcatctcctctaacttataatttcatcattgccaaccaatgtcctataaataagtttttctcatgatgctaaccatagaggtcaatatcagtttcccatatctttttttcctcccattttattggtaccttccatgtcattggtagtgtttcatgtatcaaaaaacttgagaggtcattaaattagcattttaaaaatgagactaagtgggaaattattttnnnnnnnnnnnnnnnnnnnnnnnnnnnnnnnnnnnnnnnnnnnnnnnnnnnnnnnnnnnnnnnnnnnnnnnnnnnnnnnnnnnnnnnnnnnnnnnnnnnnacctctgatttggacagatggtttcctgcgatttggtacaaaatgaatttggttattggccaaagcatggaactaagtagaccaaggtgtgggttatgtctggaccagttggcttcatttagcaatagcaaatgcctacatgtcatgcttataaactttaccctgacatctagagaaacatctttcaaacacctgctgctattccaaaggaggcaagagattaaaaaaacggatattgatcaaagatgcaaatctcacttcactgttggaacgtcactttgaggatatatgccaccatccatcagcgggcaacatcaaatctggatctcagtcttcatgcattggctctgaaagagaatggaaataagcaagtcctattaattactgtggatagtaaatgattaaaaattcctacataaatagatggagttagcaacaaaagattgtgtcccctacatcttcactgccgaagtcatctcacctctctactttaaattccccagtgcctcttctttttctacaaggtaaataccaagaataatatataatgccctttacagcctattgatctgtctctcaggcttcatcttctaccattcacatttaattctaaactgattgtagttctttgcatacatggcactataacctatctttatgcctttgctcatgttttctcttattcagctccttttcaaaaatcagtttagttgtctctacctcccagaagtcacttggtcctcctcatacagtggattctgatggtgtcctacccagatccccttcactgccagtgtaccattacccatcatctgctgggaatgttggccaataatagctcaattacagtcttgtttagagatgttcttcagccaaatgagagccagctttacctacagcagattacagcaaagtacaactagcttgtagctcacattcagtccactactagtttttatgaataaagtttcatggaaacacagctatgcccatttgtttacatgttgtctttcacactgcaatggcagagcagttgcaacagacacggagtgaactgaaaagccaaaagcatttactaattagacttctactgaaagattgtgcagatccctagagggaac

SEQ ID NO: 717178 - DNA, 2030 bp, Homo sapiens
  misc_feature 810, 811, 812, 813, 814, 815, 816, 817, 818, 819, 820, 821,822, 823, 824, 825, 826, 827, 828, 829, 830, 831, 832, 833,834, 835, 836, 837, 838, 839, 840, 841, 842, 843, 844, 845,846, 847, 848, 849, 850, 851, 852, 853, 854, 855, 856: n = A,T,C or G
  misc_feature 857, 858, 859, 860, 861, 862, 863, 864, 865, 866, 867, 868,869, 870, 871, 872, 873, 874, 875, 876, 877, 878, 879, 880,881, 882, 883, 884, 885, 886, 887, 888, 889, 890, 891, 892,893, 894, 895, 896, 897, 898, 899, 900, 901, 902, 903: n = A,T,C or G
  misc_feature 904, 905, 906, 907, 908, 909: n = A,T,C or G
gcaaatgacttttcctctactttttaatcaccatattgcatttttctatttttttaattaccttttatcttccctgctgtattgacagcttgttgagggcaggaaaaactcattattcattgccttgcacagcatagattctcaataaataacggctttattgaagctaagtagatctatatgatattcacaatgtttatattctcagaaagtttctcaagcagatgatagttgctatagaaatccagaaaatgtagagagagaatattttgatgttcagtattatcataaccataccccttccacccagagtcagtgaaaaggaagcccagaatccaaagcttctattccccaatctkcacacagtattcacatcacccaaacaaagagcataatatctcaaagcatcagctttctcctctgaaaataaagataatattgtctactatgtgtactgtagtcaccatatttattcccaggatatttgtcaaaatttaaaccatatgggatagcatccagcagcaacttacatactttaaaacactgtacaaatggaaatctttaaggaaactggcagataacaaatactcatctcctctaacttataatttcatcattgccaaccaatgtcctataaataagtttttctcatgatgctaaccatagaggtcaatatcagtttcccatatctttttttcctcccattttattggtaccttccatgtcattggtagtgtttcatgtatcaaaaaacttgagaggtcattaaattagcattttaaaaatgagactaagtgggaaattattttnnnnnnnnnnnnnnnnnnnnnnnnnnnnnnnnnnnnnnnnnnnnnnnnnnnnnnnnnnnnnnnnnnnnnnnnnnnnnnnnnnnnnnnnnnnnnnnnnnnnacctctgatttggacagatggtttcctgcgatttggtacaaaatgaatttggttattggccaaagcatggaactaagtagaccaaggtgtgggttatgtctggaccagttggcttcatttagcaatagcaaatgcctacatgtcatgcttataaactttaccctgacatctagagaaacatctttcaaacacctgctgctattccaaaggaggcaagagattaaaaaaacggatattgatcaaagatgcaaatctcacttcactgttggaacgtcactttgaggatatatgccaccatccatcagcgggcaacatcaaatctggatctcagtcttcatgcattggctctgaaagagaatggaaataagcaagtcctattaattactgtggatagtaaatgattaaaaattcctacataaatagatggagttagcaacaaaagattgtgtcccctacatcttcactgccgaagtcatctcacctctctactttaaattccccagtgcctcttctttttctacaaggtaaataccaagaataatatataatgccctttacagcctattgatctgtctctcaggcttcatcttctaccattcacatttaattctaaactgattgtagttctttgcatacatggcactataacctatctttatgcctttgctcatgttttctcttattcagctccttttcaaaaatcagtttagttgtctctacctcccagaagtcacttggtcctcctcatacagtggattctgatggtgtcctacccagatccccttcactgccagtgtaccattacccatcatctgctgggaatgttggccaataatagctcaattacagtcttgtttagagatgttcttcagccaaatgagagccagctttacctacagcagattacagcaaagtacaactagcttgtagctcacattcagtccactactagtttttatgaataaagtttcatggaaacacagctatgcccatttgtttacatgttgtctttcacactgcaatggcagagcagttgcaacagacacggagtgaactgaaaagccaaaagcatttactaattagacttctactgaaagattgtgcagatccctagagggaac

SEQ ID NO: 717179 - DNA, 1193 bp, Homo sapiens
ttttcatctcccctttgactaaaacagggaaaagtttgagttaatacaagggtgaagctggacctgagcttggttctctgcactagcttttccttttttgttgttttgtctctctcttctcttctatttcctccctggcttcatctcttctcttggtctctcctcttcatagtagttattgtcactatcaaatgtatgctgtcactctaccgtataatctgtcacagcagggcaccaggtgccaggggcaaggcaacaaaagtgtagcgtgccttctctgccctccaggagctggatgctttttcaggagatcaaatacatacacataaccttcatgctctcattccttcacgctacaaatatttattgagcatttactatatgtcagactctgtgctttgtgataaataaaacagagctcccccttacaaccaccaccaaaataaagtagctaacacagcaaaatataacaactgccaaatgtctcatagatcagaagtgttatggaagtccaaaagaaaagatatttccamctgaagggatcacagaagctaaatagaaaatatacattagaaaatagagctctaagcccacgaatattaaaatatgctttatataagtttcaataactcctttctttaccatgcatcagatagcaaacatatttgcgtgcttgatttggagttgtggataaagaactggacgtttcagtcctaactctgcttacttcactagaattaaatataattagacattttaaattgcattacagatgtatttattatttgttcctaaagtgctaagtgattttgctaaatttcatttattttcactttaaaaataatacatattgctctttgaaaaaagaattattgagagaggaagtaaatgcatcattttcagggattcccctagtacaagaaagttaaaggtcctgtatttacaataactaaaagatatggaaaagaaactcaaactgtgagtatacttcatgacatttttctttctcacagataggtagaagactacattaaatgacaccttcataaatttcatgagacctgtacacatttgatctgtggatacatcgccagacaccattttcttgatgtaaagataagttagtttgttttttaaaatcctgactcagcttccttccagtattttttaagagtccttgtgtattcaatcta

SEQ ID NO: 717180 - DNA, 888 bp, Homo sapiens
tgtttctttacttattgaattctagtgtcctttgcatttagctattcatatctcttcactgcccttaactttttcaggaactattccactagagaacccttgaattcagcactctagcaaaaaaatcttgccatctattactcccaatctacttacccataacctcctgtagttacttgcatgtgccaaattgatgatctgtaattgggttaaagactagatataggagaagtgggatttttcacctgratcttaaaaagattgacagtttttcatgaagtcagggaagtgaaacttgttggtaggagtgggcattgagggggtggaaaaagggagtcgatttgcaccttgtttatcaaatgactttccagtaaaggtttagatagcaactctgaggcagaattcaacatctgacccacttgggttgtttttaaagtgcctaatgatgaaaatacattttcatctaactcattgtataagaaatttatttctggtaagttaaaatgtattgttggatttctccagactcactcctcatggtgtttcaattgtacacaggcgatacaactaaggaagaaaacacaacgtgcacactcttcttcctttcttctttccttcactcattaattcaacagatattttccaaaaacctacaatgcacctgattgcatacttggtttatctatgtccagatgcagatcacctgatacattcttgacttgttctgttaactatttcattcctcacaaactgaaggaagcaacaagggaaactgctactctgtttgtaattcttgctaataaggaaggttcatttagtcaaaagtactgtaggacaaaatgaccatctcatcttggagtctaaaatcacagcaagcataaccaaacc

SEQ ID NO: 717181 - DNA, 888 bp, Homo sapiens
tgtttctttacttattgaattctagtgtcctttgcatttagctattcatatctcttcactgcccttaactttttcaggaactattccactagagaacccttgaattcagcactctagcaaaaaaatcttgccatctattactcccaatctacttacccataacctcctgtagttacttgcatgtgccaaattgatgatctgtaattgggttaaagactagatataggagaagtgggatttttcacctggatcttaaaaagattgacagtttttcatgaagtcagggaagtgaaacttgttggtaggagtgggcattgagggggtggaaaaagggagtcgatttgcaccttgtttatcaaatgactttccagtaaaggtttagatagcaactctgaggcagaattcaacatctgacccacttgggttgtttttaaagtgcctaatgatgaaaatacattttcatctaactcattgtataagaaatttatttctggtaagttaaaatgtattgttggatttctccagactcactcctcatggtgtttcaattgtacacaggcgatacaactaaggaagaaaacacaacktgcacactcttcttcctttcttctttccttcactcattaattcaacagatattttccaaaaacctacaatgcacctgattgcatacttggtttatctatgtccagatgcagatcacctgatacattcttgacttgttctgttaactatttcattcctcacaaactgaaggaagcaacaagggaaactgctactctgtttgtaattcttgctaataaggaaggttcatttagtcaaaagtactgtaggacaaaatgaccatctcatcttggagtctaaaatcacagcaagcataaccaaacc

SEQ ID NO: 717182 - DNA, 1088 bp, Homo sapiens
ctatggaccaatcgtatctgacatacagcagcatgaggtttggtttagcctttggattcagaacaaatcactggctatcaatggctgatagtgacatgcagtttactgaagctctcctttctgacagctctacgtggggaagaaatggatcatttttaagttaggatgtttgtgtttcaaattatgctctgtatgaatcatttttaacatgaaaatgaaactattaaattacaaaattttaaaaagtgaagtattttgcttcaatgttctggtttcaacatgcaacatccaggctaaaaaagatcccacatctggaaacatatgaggctgttaaatgttctcagtgagattttgctatatcgatgtgtataaatttataacttttgctgctttcactaaattgtatctttaatcacagaatttaactaatagacaagtttaatgtcctttcagtgtcattccacctagcatcaaaacttgttaatagcagatgaaattagagttcatctatagtctgctttaatatttatggaagatttctgtaatttgactttaaaacatttgaacctgttactcctcatataaaaagatatccaatcagttgctatgagaaacacagaaaaataaataaatgacataatcaaggccctcaaaaaggttacaatctagcaagggagaaaaagcataaacataaagcaaagcatactaacataaatactatgaaaaatataaaaatttgtgagagcttagaagggagaatatttacacctagctggcctttgagtaaatggcaagattccaaaaatggaaatgaggatgagcaaggaaaggcattccagagagaacaaggtaaacaaacactcaggactagatgaggaggtcaagtattaggtggggtacagacactgtcctccagaaaagatcgtgtggccataatatgtagggtragttattggcaggagaaattggagcttaagagacttattgcaaataagccaaatataaggtaataagtatttgactagggtaactgaagccacagtaaagaagaaagaatgatttccaagaagcgtttgagaaataaagtg

SEQ ID NO: 717183 - DNA, 802 bp, Homo sapiens
aaaatatttccaaggtataatagcagttatttttttctgatactctacaaatatcatgtagttgttttgtttcttatattttgttttctattaaaagtatctattgcttccagttagagccaagaaggaaaaaaaaaacactgcagccatctttcccrccggttatacctcaatgcactagataaaatgcaaaaggcaactaactatctgagaacattgtacaataaataatagcaagaacttttttgaaagaagtaaaaattgaataatgattaatatggcaaacaggagtttacctgtttttattttgttttcctttctttttcttgcttcctttatctcccagcatggacttgaggtcaagacaaattaagtcatggacaacaaacaaaaactctgagagagcatgtcttgctgatcagagacctgggaagaggcctctgcgagccaacagctgtggaagacatctctgttactgttcctttgttttggttcctgagctgactccaaggcccccctggccatgcagctgctgccatggagcctggggcagccgggccagctggaaactcagagagaaaatccaccctctatctaaaggttctggaaaaattagtttttgtggcatgagggatccccactcttctctccttttctcatgctgttttctccagtcatgaggaaatgtgcatcagtacaggaaactaaactctgagaagagccttggatttctggagagaagaccaaagagagtgatgctgcgatccagtaagagtggggaactcccacttaggagtgaagg

SEQ ID NO: 717184 - DNA, 802 bp, Homo sapiens
aaaatatttccaaggtataatagcagttatttttttctgatactctacaaatatcatgtagttgttttgtttcttatattttgttttctattaaaagtatctattgcttccagttagagccaagaaggaaaaaaaaaacactgcagccatctttcccaccrgttatacctcaatgcactagataaaatgcaaaaggcaactaactatctgagaacattgtacaataaataatagcaagaacttttttgaaagaagtaaaaattgaataatgattaatatggcaaacaggagtttacctgtttttattttgttttcctttctttttcttgcttcctttatctcccagcatggacttgaggtcaagacaaattaagtcatggacaacaaacaaaaactctgagagagcatgtcttgctgatcagagacctgggaagaggcctctgcgagccaacagctgtggaagacatctctgttactgttcctttgttttggttcctgagctgactccaaggcccccctggccatgcagctgctgccatggagcctggggcagccgggccagctggaaactcagagagaaaatccaccctctatctaaaggttctggaaaaattagtttttgtggcatgagggatccccactcttctctccttttctcatgctgttttctccagtcatgaggaaatgtgcatcagtacaggaaactaaactctgagaagagccttggatttctggagagaagaccaaagagagtgatgctgcgatccagtaagagtggggaactcccacttaggagtgaagg

SEQ ID NO: 717185 - DNA, 802 bp, Homo sapiens
aaaatatttccaaggtataatagcagttatttttttctgatactctacaaatatcatgtagttgttttgtttcttatattttgttttctattaaaagtatctattgcttccagttagagccaagaaggaaaaaaaaaacactgcagccatctttcccaccggttatacctcaatgcactagataaaatgcaaaaggcaactaactatctgagaacattgtacaataaataatagcaagaacttttttgaaagaagtaaaaattgaataatgattaatatggcaaacaggagtttacctgtttttattttgttttcctttctttttcttgcttcctttatctcccagcatggacttgaggtcaagacaaattaagtcatggacaacaaacaaaaactctgagagagcatgtcttgctgatcagagacctgggaagaggcctctgcgagccaacagctgtggaagacatctctgttactgttcctttgttttggttcctgagctgactccaaggcccccctggccatgcagctgctgccatggagcctggggcagccgggccagctggaaactcagagagaaaatccaccctctatctaaaggttctggaaaaattagtttttgtggcatgagggatccccactcttctctccttttctcatgctgttttctccagtcatgaggaaatgtgcatcagtacaggaaactaaactctgagaagagccttggatttctggasagaagaccaaagagagtgatgctgcgatccagtaagagtggggaactcccacttaggagtgaagg

SEQ ID NO: 717186 - DNA, 596 bp, Homo sapiens
gacttaggcacagaacttacctccctagataattttacaaaaatctaattaaagagaataaattacaaaaaaaggccctttcctataaattcttttacagatcacatttacagcacttctgaggtttcttgcttcattccctttgattcattccccrggcaagctctcagggttttgggtttttctctcttgctacaggtgtagtggtgaaaaaggagattaacattccctaaagcccactgaaaattgtagtttgtagcaggtccttcatatgtgacttaaggtcattagataatgcagactatttaaaatttaaatattccttgttagctttgcaaagaattgaaaattgcacaattccacttttgtttctgcaaatatgcatctgtaatataaacagaaccacagtgatgttaagtaactttaccaaggtcagttagtggtgaattctctggattgaaatgcaggaactaggagccactgcccatatattcatcccctgttctattcttttattgtttttcttttcttttaagagacacagtcttactctgttgccgaggctggaatgcagtggcttcattataactcattgt

SEQ ID NO: 717187 - DNA, 553 bp, Homo sapiens
gtatctgtgggggattgactccatgatctccttggaataccaaaatcttcagatgctcaagtccctcatataagatggcatagtatttacatgtgatctacatacatctccaggtatactttaactcatctttacttaaaatacctaatacaatgtaagttctatataaatagttattaaaaagctgttayaccatattgctgtattatagcctatatagtaaatagttattatacgttattgctttttaaatttgtgttacttcttattgttgtatttttttcccaaatatttttcattttacaagaatggaagttgctctaggtgaggcagtgagtaagtggtgagtgattgtgaatgatagcacactactttataatactgtagaatttgtaaacactcgatgcttaggttatactaaatttattttaaaatacttttctttcttcagtaataaattaactttagcctattgtaacattttttacttataaagtaaaaagtttataaaactttttatttttttgacttttaataacacttagcttaaaac

SEQ ID NO: 717188 - DNA, 3010 bp, Homo sapiens
  misc_feature 1566, 1567, 1568, 1569, 1570, 1571, 1572, 1573, 1574, 1575,1576, 1577, 1578, 1579, 1580, 1581, 1582, 1583, 1584, 1585,1586, 1587, 1588, 1589, 1590, 1591, 1592, 1593, 1594, 1595,1596, 1597, 1598, 1599, 1600, 1601, 1602, 1603, 1604: n = A,T,C or G
  misc_feature 1605, 1606, 1607, 1608, 1609, 1610, 1611, 1612, 1613, 1614,1615, 1616, 1617, 1618, 1619, 1620, 1621, 1622, 1623, 1624,1625, 1626, 1627, 1628, 1629, 1630, 1631, 1632, 1633, 1634,1635, 1636, 1637, 1638, 1639, 1640, 1641, 1642, 1643: n = A,T,C or G
  misc_feature 1644, 1645, 1646, 1647, 1648, 1649, 1650, 1651, 1652, 1653,1654, 1655, 1656, 1657, 1658, 1659, 1660, 1661, 1662, 1663,1664, 1665: n = A,T,C or G
tgatattatgtgtactgtagccatttctgtgtaatctgaagcatttcctttctcttttcttggatagctcctcttccatatataaacctctctcctaaatttgaaaggcatatggaaatcactttttcaaattggtacttctggcttaaaatggcagactgaacacatccatttatctctcctccctccaaagtcttattataatgaagtgaagaatttaaaaggcatatgcccacaaagacaaatagaagaaacaaagtgcatggagaaataataactaacttaatgagtctaggaagcggaagcctcactaaccaatataaaatgagctgattttacaagaagaatctcggcaaagctcaggaacgaaggcaccagatagtgtttagaggagataaggcattaggyttatagcataactgagggaaaaatctgtataaggaaccattaaattagtttccacccccacagcaaacaacgactctcttgtctcagcctcccaagcagataggaggtttattttctggtgaaactgaccctggaaagaggcctagggctcacaaacaccaggcagagagccggcggcaaaggtaaaaggccgacgacaacggacttggtccaggtgaacccacctgacaggcgcacgaaaacttcccttgccctccccggctactcgttgtccaccgaaattcattctcctgacttccacgacaattgagttgtagctaggcaggtaggatgtcaggttgggagcacacagccagctcactgcaggtaagtgtgaccacacaaggaagctctaccggaggaatggacacaaacacattcttgctcctcaactgctccttactactcttttctcctgcttaagcatacgctagcctgaggccctgtttctaccacaaaaaggacaatgccctagggcagcgtttcttttcttttttcttttcttcctttttttttttttttttttttttgagacagggtctcactcattctccctggctgtagaggtgtgatatcagctctctgccttgatctcctgggctcatgtgattctcccacctcagtctcctgagtagctgggatcacaggcatgtgccaccatgcccagctaagtttttgtatttttagtagagacagggtttcatcatgttgcccaggctggcctcaaactcctgacctcaggtgatccacccacctcggcctcccaaagttctgggattacaggcgtgagccacagcgtccgcctaatttttggatttttagtagagacagagtttcaccatgttgcccaggctggcctcaaactcctgacctcaagcaatccacctgtctcagcctcccaaagttctggaattacagacgtgagccaccacgcctggcctttttctttttttaaaaaaactacttttgtaacaaatgaaggagcttctttctgaggtgatgaaatgatctggaattaggttgtggtgatggttgcacagcatactataatgcactgcactgtacacttcaaaagggtgaattgtatggtatatgaattactgtatcccaatttttaannnnnnnnnnnnnnnnnnnnnnnnnnnnnnnnnnnnnnnnnnnnnnnnnnnnnnnnnnnnnnnnnnnnnnnnnnnnnnnnnnnnnnnnnnnnnnnnnnnntgtttgccccattaaaaatctggtgtagtgctgggcgtggtggctcacgcctgtaatcccagaactttgggatgcccaggtgggcagatcacctgaggtcaggagttcaagaccagactcatcaacacacagaaaccccatctctactaaaaatacaaaattagctgggtgtggttgcacatgcctgtaatctcagctacttgggaagctgaggaaggacaatcgcttgaacccaagaggcagaggttgtggtgagccaagaataacaccattgcactccagcctgggcaacaagagcaaaactccatctcaaaaaaaaaaaaaaaaacaaaaaaaactagggtaattcatccattaaatatattagaatattttaaagaattttcttcatataacataaatataacaccaattatagcttctcttctttttcccaagtcttatagcaaatatatataatcttcatatcaaaatgctaaaaagttattacaaattcaaactgcttaccatgataccaccattttgttttctttggattcttgttacatgttcgcacataaaaagaattatccggtggtcgtctctgaaacaaaaaataatttaaataggttgaaaaacagaaaaactgagagggtgacagttttaataaaagcttaagaaaaattaacagaatgcataaaaaacaatataaacatgaatagtatatctaaaagaataaaaactataaatgtattccaggaaatgtgtatgcttaacacctaaatttaaaaaaggaataataagcgtgtttgagtgtggtctgtgttaggttctagcctggccaacatggtgaaacccagtctctactaaaaatacaaaaaaattagctgggcatggtggtgcgtgcctgtaatcccagctacttgggaggctgaggcaggagaattgattgaacccgggaggcagaggttgcagtgagccaagattgtgacattgcactccagcctgacaacagagcgagactctcgtctcaaaacaaacaaacaaaaaattaaataaattataaagggaatgaaaaaggactgatgagaaaagtcaaattcacataataatttaaacatagccgggcgcagtggtgggcatctgtaatctcaggtacttggaaggctgaagcaggagaattgcttgaacccagaaggtggaggttgcagtgagccgagatggtgccactgcactccagcttgggtgacagagtgagactccatctcaaaaaataaataaataataaaacaaagggccaggcgcggtggctcacgcctgtaatcccagcactttgggaggccgaggcgggtggatcacgaggcca

SEQ ID NO: 717189 - DNA, 918 bp, Homo sapiens
agtcccctaaagacaaaccacgagatgagagtgaaataccataaaaatgctaagtttcaggatatcgcttcagtgtacgtcaataatggtcttttaaaatcctaaacttcaaaattaggctgatgtrtttatttacttggtcccaggaagagaacaacttcaggccatactatgtgatggccatatctataaaaacttatgtcatgaacaggtccccagaaacaaagtaggagcaaaaagctgagccatgcatgccaattcctctcccgaactcatcaatttggtaatttatttcaactccttgaaaggaataggatgcagcctatgaccaggaactattaaggaatagcatttcttgtggatactataggagtatggaaaacagtgtaccacaaatatgtatgtagaaaatcctaaatgttagtgtaattacttttatctggaaaccccagtacatccacatcagcctttaaacatcaccagatataagcatggtgccactatagcttaattgattgatcttctagatttcagcacgaaagcagttctctttgctcagctactatcaaatctgcactatcaaatgtttcaaacactcttggtagccttccactgccatcatttataagtaaaaatgagaaaaaacatgttttctactccttgagtaaatgaaaattaaccagtcttttctcaaaagaggataatttgaaactcttcctgacagctgaaatgttttattcctgctgagaactgtttaaaactcttctccaacaaaaataaccatccataatttcgttatctgtgctactgtttataaaataataaagtggaaacttaaataaacaaagataaataaaaagcagatgtttgactaaagccttacataattctgcagaacagagatttttaggggcaaag

SEQ ID NO: 717190 - DNA, 918 bp, Homo sapiens
agtcccctaaagacaaaccacgagatgagagtgaaataccataaaaatgctaagtttcaggatatcgcttcagtgtacgtcaataatggtcttttaaaatcctaaacttcaaaattaggctgatgtatttatttacttggtcccaggaagagaacaacttcaggccatactatgtgatggccatatctataaaaacttatgtcatgaacaggtccccagaaacaaagtaggagcaaaaagctgagccatgcatgccaattcctctcccgaactcatcaatttggtaatttatttcaactccttgaaaggaataggatgcagcctatgaccaggaactattaaggaatagcatttcttgtggatactataggagtatggaaaacagtgtaccacaaatatgtatgtagaaaatcctaaatgtkagtgtaattacttttatctggaaaccccagtacatccacatcagcctttaaacatcaccagatataagcatggtgccactatagcttaattgattgatcttctagatttcagcacgaaagcagttctctttgctcagctactatcaaatctgcactatcaaatgtttcaaacactcttggtagccttccactgccatcatttataagtaaaaatgagaaaaaacatgttttctactccttgagtaaatgaaaattaaccagtcttttctcaaaagaggataatttgaaactcttcctgacagctgaaatgttttattcctgctgagaactgtttaaaactcttctccaacaaaaataaccatccataatttcgttatctgtgctactgtttataaaataataaagtggaaacttaaataaacaaagataaataaaaagcagatgtttgactaaagccttacataattctgcagaacagagatttttaggggcaaag

SEQ ID NO: 717191 - DNA, 1010 bp, Homo sapiens
cagctaaatctgtaccacacacttactccatgttagtcctcatgctaaatgctttattccatttaaccctacataatctagtgagagatatattattattatctttatttacagctgagaaaacatacakaatttaggaagcatacacaaggtcagatagatcagtataggattaggtcaggatttgatcccttaataggctttgaaatcccagtctgatttcagagcctaacttttagtcactatgctataattcctatagcagtagcaggcattgagcgaactacaaagaagttaaaggcatgatcgcaactccatagaatttccttttccaaataaagtgactacctagaaagaatggactgagaagagtgccggctcactttgggaaggacctgaattttctgtattccaaaggttggtttgctaataatagaaaatcccgagaaattccccccaaaataaactcctaaactaataagtgagttaggcaaggttataagctaaagggtaaaagtacataatcaagtatatttctatgttctatcaatgaacgctgaaattaaacaataccatttacattgcactccagtgaaaattatatacttaagtatacaattaacaagacatgcacaggatctattaggttggtgcaaaagtaattgtggtttttgccattgaaaggaatttttttatgctgaaaatttaaaaattcagatgaaataaatcaatgacttacacagaaagacatactttgttcgtgcattggaagattcatttctcccgcattgatgtgcagttttaaagaaaaaccattataataaaaaccctggctgggcactgtggctcatgcttgtaatctcggcacttggggaggtcgaggcgggcgaatcacttgaggtcaggagttcgggaccagcctggccaacatggtgaaaccccatctctactaaaaaataccaaaaaactacccgggcctgggggcgcaggcttgtagtcccagctgctgg

SEQ ID NO: 717192 - DNA, 1010 bp, Homo sapiens
cagctaaatctgtaccacacacttactccatgttagtcctcatgctaaatgctttattccatttaaccctacataatctagtgagagatatattattattatctttatttacagctgagaaaacatacataatttaggaagcatacacaaggtcagatagatcagtataggattaggtcaggatttgatcccttaataggctttgaaatcccagtctgatttcagagcctaacttttagtcactatgctataattcctatagcagtagcaggcattgagcgaactacaaagaagttaaaggcatgatcgcaactccatagaatttccttttccaaataaagtgactacctagaaagaatggactgagaagagtgccggctcactttgggaaggacctgaattttctgtattccaaagkttggtttgctaataatagaaaatcccgagaaattccccccaaaataaactcctaaactaataagtgagttaggcaaggttataagctaaagggtaaaagtacataatcaagtatatttctatgttctatcaatgaacgctgaaattaaacaataccatttacattgcactccagtgaaaattatatacttaagtatacaattaacaagacatgcacaggatctattaggttggtgcaaaagtaattgtggtttttgccattgaaaggaatttttttatgctgaaaatttaaaaattcagatgaaataaatcaatgacttacacagaaagacatactttgttcgtgcattggaagattcatttctcccgcattgatgtgcagttttaaagaaaaaccattataataaaaaccctggctgggcactgtggctcatgcttgtaatctcggcacttggggaggtcgaggcgggcgaatcacttgaggtcaggagttcgggaccagcctggccaacatggtgaaaccccatctctactaaaaaataccaaaaaactacccgggcctgggggcgcaggcttgtagtcccagctgctgg

SEQ ID NO: 717193 - DNA, 595 bp, Homo sapiens
cagtgttgggtgtatccttatagcagcctgagaacaaattaatacagtccacaaagttcagtacctgaggaaaaaaagcaatgttaagtataaacattgttgtgaggttctacaasaaagaagacaggttggactaaaactatcctcatgagggatgataccagcattttttaaaattttaaatcaccttgattgttataatgaagctaagttctaaatattggttatcttttaaaggagccttttattttctgtgtatcttttcattgaaattagtttttttaaaattattggttatctcagccttagctcactttgagtaagtcctaattttattttacataggttaagttgaaaccatgtctaaccaatttcatttgtctcaccaattccatttgtctcattctttagaaattaccattcatttgattttgatattcatattctcatgcatcttttatatatttactacaaatgcaatttccatagatactgtgaaatattattttatatgtttttacaccttacctaaaggtatattattttaagtacaattttgcagccacattttatattcaaaattatgtctgtgatt

SEQ ID NO: 717194 - DNA, 595 bp, Homo sapiens
cagtgttgggtgtatccttatagcagcctgagaacaaattaatacagtccacaaagttcagtacctgaggaaaaaaagcaatgttaagtataaacattgttgtgaggttctacaagaaagaagacaggttggactaaaactrtcctcatgagggatgataccagcattttttaaaattttaaatcaccttgattgttataatgaagctaagttctaaatattggttatcttttaaaggagccttttattttctgtgtatcttttcattgaaattagtttttttaaaattattggttatctcagccttagctcactttgagtaagtcctaattttattttacataggttaagttgaaaccatgtctaaccaatttcatttgtctcaccaattccatttgtctcattctttagaaattaccattcatttgattttgatattcatattctcatgcatcttttatatatttactacaaatgcaatttccatagatactgtgaaatattattttatatgtttttacaccttacctaaaggtatattattttaagtacaattttgcagccacattttatattcaaaattatgtctgtgatt

SEQ ID NO: 717195 - DNA, 595 bp, Homo sapiens
cagtgttgggtgtatccttatagcagcctgagaacaaattaatacagtccacaaagttcagtacctgaggaaaaaaagcaatgttaagtataaacattgttgtgaggttctacaagaaagaagacaggttggactaaaactatcctcatgagggatgataccagcattttttaaaattttaaatcaccttgattgttataatgaagctaagttytaaatattggttatcttttaaaggagccttttattttctgtgtatcttttcattgaaattagtttttttaaaattattggttatctcagccttagctcactttgagtaagtcctaattttattttacataggttaagttgaaaccatgtctaaccaatttcatttgtctcaccaattccatttgtctcattctttagaaattaccattcatttgattttgatattcatattctcatgcatcttttatatatttactacaaatgcaatttccatagatactgtgaaatattattttatatgtttttacaccttacctaaaggtatattattttaagtacaattttgcagccacattttatattcaaaattatgtctgtgatt

SEQ ID NO: 717196 - DNA, 1163 bp, Homo sapiens
aaccattacgtctaaaactggtgtttaattttcctctacttttggatatacttctctgttgtgttcataggtgctgaaagtaatatacacaccgttggaaggattataacaattatttagaaaaaataaaaccacaaataaaaattttaaaacattggctgaaatatttcgtacatagaaacatatctggggtcccaaattcacattttgaaaaggatcacttttacatcctagtgtgtcttgatacttagaacttgtacttagttcttgtaattctctgcyaagtcattaaaaattaattcaaaaagtgttattagcattttgctggctcttgaggttatgaggatgattattatatattccaggcttcaagagctctcaaacaagtgagcgaggcaaatataaccaccctaaaagacagataataggccaagctcagtggctcacacccgtagtcccaacactttgggcacctaaggagggaggatcacttgaggccaggagttggagaccagcttggccaacctggtctttactaaaaataccaaaaaattagccagtcgtcgtggcatgcctgtagtctcagatagtagagaggctgaggtgggaagattgcttgaacctaggaggtagaggatgcagtgagctgagatctcaccactgcactccagcctgggagaccaaaaaaaaaaaaaagatagataacattgtcttccttatacagataagaaactgagacacagagaagttaagtaattttccagagctcacacagctagtagtaaagccttttactatgagctacttactataattataagaaagagacttcacagtataaaatgtagacctgtaattattaggaaccaaaggccagaatatttgaaaccagctttattctggaaaacttggggtttattgatatagtaactatactagaagcaaattatcacaactactatacaaaatagacaaaatgttgtggggcatgaataaagcagttaataatactttaaaagcacatttattaacaatttttaaacataggcaaatgtaaaggtaaaacaaatggctctaaaatctcagtatacaaataatctcaactgacattcaaaaataaggtaaaacaaatacaagtaatatatgtgcatgattagaaactc

SEQ ID NO: 717197 - DNA, 1163 bp, Homo sapiens
aaccattacgtctaaaactggtgtttaattttcctctacttttggatatacttctctgttgtgttcataggtgctgaaagtaatatacacaccgttggaaggattataacaattatttagaaaaaataaaaccacaaataaaaattttaaaacattggctgaaatatttcgtacatagaaacatatctggggtcccaaattcacattttgaaaaggatcacttttacatcctagtgtgtcttgatacttagaacttgtacttagttcttgtaattctctgccaagtcattaaaaattaattcaaaaagtgttattagcattttgctggctcttgaggttatgaggatgattattatatattccaggcttcaagagctctcaaacaagtgagygaggcaaatataaccaccctaaaagacagataataggccaagctcagtggctcacacccgtagtcccaacactttgggcacctaaggagggaggatcacttgaggccaggagttggagaccagcttggccaacctggtctttactaaaaataccaaaaaattagccagtcgtcgtggcatgcctgtagtctcagatagtagagaggctgaggtgggaagattgcttgaacctaggaggtagaggatgcagtgagctgagatctcaccactgcactccagcctgggagaccaaaaaaaaaaaaaagatagataacattgtcttccttatacagataagaaactgagacacagagaagttaagtaattttccagagctcacacagctagtagtaaagccttttactatgagctacttactataattataagaaagagacttcacagtataaaatgtagacctgtaattattaggaaccaaaggccagaatatttgaaaccagctttattctggaaaacttggggtttattgatatagtaactatactagaagcaaattatcacaactactatacaaaatagacaaaatgttgtggggcatgaataaagcagttaataatactttaaaagcacatttattaacaatttttaaacataggcaaatgtaaaggtaaaacaaatggctctaaaatctcagtatacaaataatctcaactgacattcaaaaataaggtaaaacaaatacaagtaatatatgtgcatgattagaaactc

SEQ ID NO: 717198 - DNA, 1342 bp, Homo sapiens
cgcctgtataccacggaattaaaagctgtgcctgtgtgatctgactcgtgtattttctccagccttacactgtttcctgttcttccttcagcaacagcaacacgcttccaagtcttygtttttttattgttttgttttgttttgtgggtgtgttttttatttcacttcgctcttttcctcattaaacctcttcttatgtgattggatatttttttgttacacctcttcttcctgctaaactgtaaacaccaagaagttaggaatcattctcggttcacccccatccttgggtgcacagctcagagcacagacactaatatattgcagatatacaactaaactgtgtgatgtacattatgttaggcaaattagtatggctcatttagtcaagggaatagttatccaagagttgaattttgtgtgggaaataaggtgacagcttcaaagtgaaaatgctttctaatcccttttatcaccctctcttagaacagaaattttaggtgcagggtgtcatctgcccactttactctcagcttaaagcaggttaaaagatgacatccaatcacatactaatttgaggcactaaataggccggatttttctttagatacccaccaaacaaagcagaataatttgcagacaaagaagcttgaaaaaagagattcttcaactataccaatttcctcctcaacattatttcttcctggaaatgatgttcacacatcttgatgtgtcttacttaagcataattgacaagtgtcataattagatcattccaactcttccacaagaaaagataccttttaaagaatatcactgggtagatgtcaaagtatacatttctgtaagaggagattggactaggcatctctcataactaatttggttgaattttacaaaaatccttgagctttcttcaataaatgagaaagtcactttgtaattagattcttatttctattcaatatgagggtcatgccatgttccctgacctgggatggagaacaaatgaacaaaagagataaacctctgtcttaattgcaattatcttctgcatctcaatcctctccctaaatttattcattttgattccaatgttttcaaacaaaagagaaatcacagggcttctctgctttaccttcccataaattaaaccaaaaaattaatgaacacacactgaactacaggatggtagatttttttttctgctctaaaatatgaggaaattctggcgggacaaggtggctgatgcttgtaatcccagcactttgggaggccgaggcggccggatcacctgatgtcgggagtttcagaccagcctgaccaacatggagaaacctcg

SEQ ID NO: 717199 - DNA, 1342 bp, Homo sapiens
cgcctgtataccacggaattaaaagctgtgcctgtgtgatctgactcgtgtattttctccagccttacactgtttcctgttcttccttcagcaacagcaacacgcttccaagtcttcgtttttttattgttttgttttgttttgtgggtgtgttttttatttcacttcgctcttttcctcattaaacctcttcttatgtgattggatatttttttgttacacctcttcttcctgctaaactgtaaacaccaagaagttaggaatcattctcggttcacccccatccttgggtgcacagctcagagcacagacactaatatattgcagatatacaactaaactgtgtgatgtacattatgttaggcaaattagtatggctcatttagtcaagggaatagttatccaagagttgaattttgtgtgggaaataaggtgacagcttcaaagtgaaaatgctttctaatcccttttatcaccctctcttagaacagaaattttaggtgcagggtgtcatctgcccactttactctcagcttaaagcaggttaaaagatgacatccaatcacatactaatttgaggcactaaataggccggatttttctttagatacccaccaaacaaagcagaataatttgcagacaaagaagcttgaaaaaagagattcttcaactataccaatttcctcctcaacattatttcttcctggaaatgatgttcacacatcttgatgtgtcttacttaagcataattgacaagtgtcataattagatcattccaactcttccacaagaaaagataccttttaaagaatatcactgggtagatgtcaaagtatacatttctgtaagaggagattggactaggcatctctcataactaatttggttgaattttacaaaaatccttgagcttkcttcaataaatgagaaagtcactttgtaattagattcttatttctattcaatatgagggtcatgccatgttccctgacctgggatggagaacaaatgaacaaaagagataaacctctgtcttaattgcaattatcttctgcatctcaatcctctccctaaatttattcattttgattccaatgttttcaaacaaaagagaaatcacagggcttctctgctttaccttcccataaattaaaccaaaaaattaatgaacacacactgaactacaggatggtagatttttttttctgctctaaaatatgaggaaattctggcgggacaaggtggctgatgcttgtaatcccagcactttgggaggccgaggcggccggatcacctgatgtcgggagtttcagaccagcctgaccaacatggagaaacctcg

SEQ ID NO: 717200 - DNA, 1342 bp, Homo sapiens
cgcctgtataccacggaattaaaagctgtgcctgtgtgatctgactcgtgtattttctccagccttacactgtttcctgttcttccttcagcaacagcaacacgcttccaagtcttcgtttttttattgttttgttttgttttgtgggtgtgttttttatttcacttcgctcttttcctcattaaacctcttcttatgtgattggatatttttttgttacacctcttcttcctgctaaactgtaaacaccaagaagttaggaatcattctcggttcacccccatccttgggtgcacagctcagagcacagacactaatatattgcagatatacaactaaactgtgtgatgtacattatgttaggcaaattagtatggctcatttagtcaagggaatagttatccaagagttgaattttgtgtgggaaataaggtgacagcttcaaagtgaaaatgctttctaatcccttttatcaccctctcttagaacagaaattttaggtgcagggtgtcatctgcccactttactctcagcttaaagcaggttaaaagatgacatccaatcacatactaatttgaggcactaaataggccggatttttctttagatacccaccaaacaaagcagaataatttgcagacaaagaagcttgaaaaaagagattcttcaactataccaatttcctcctcaacattatttcttcctggaaatgatgttcacacatcttgatgtgtcttacttaagcataattgacaagtgtcataattagatcattccaactcttccacaagaaaagataccttttaaagaatatcactgggtagatgtcaaagtatacatttctgtaagaggagattggactaggcatctctcataactaatttggttgaattttacaaaaatccttgagctttcttcaataaatgagaaagtcactttgtaattagattcttatttctattcaatatgagggtcatgccatgttccctgacctgggatggagaacaaatgaacaaaagagataaacctctgtcttaattgcaattatcttctgcatctcaatcctctccctaaatttattcattttgattccaatgttttcaaacaaaagagaaatcacagggcttctctgytttaccttcccataaattaaaccaaaaaattaatgaacacacactgaactacaggatggtagatttttttttctgctctaaaatatgaggaaattctggcgggacaaggtggctgatgcttgtaatcccagcactttgggaggccgaggcggccggatcacctgatgtcgggagtttcagaccagcctgaccaacatggagaaacctcg

SEQ ID NO: 717201 - DNA, 1342 bp, Homo sapiens
cgcctgtataccacggaattaaaagctgtgcctgtgtgatctgactcgtgtattttctccagccttacactgtttcctgttcttccttcagcaacagcaacacgcttccaagtcttcgtttttttattgttttgttttgttttgtgggtgtgttttttatttcacttcgctcttttcctcattaaacctcttcttatgtgattggatatttttttgttacacctcttcttcctgctaaactgtaaacaccaagaagttaggaatcattctcggttcacccccatccttgggtgcacagctcagagcacagacactaatatattgcagatatacaactaaactgtgtgatgtacattatgttaggcaaattagtatggctcatttagtcaagggaatagttatccaagagttgaattttgtgtgggaaataaggtgacagcttcaaagtgaaaatgctttctaatcccttttatcaccctctcttagaacagaaattttaggtgcagggtgtcatctgcccactttactctcagcttaaagcaggttaaaagatgacatccaatcacatactaatttgaggcactaaataggccggatttttctttagatacccaccaaacaaagcagaataatttgcagacaaagaagcttgaaaaaagagattcttcaactataccaatttcctcctcaacattatttcttcctggaaatgatgttcacacatcttgatgtgtcttacttaagcataattgacaagtgtcataattagatcattccaactcttccacaagaaaagataccttttaaagaatatcactgggtagatgtcaaagtatacatttctgtaagaggagattggactaggcatctctcataactaatttggttgaattttacaaaaatccttgagctttcttcaataaatgagaaagtcactttgtaattagattcttatttctattcaatatgagggtcatgccatgttccctgacctgggatggagaacaaatgaacaaaagagataaacctctgtcttaattgcaattatcttctgcatctcaatcctctccctaaatttattcattttgattccaatgttttcaaacaaaagagaaatcacagggcttctctgctttaccttcccataaattaaaccaaaaaattaatgaacacacactgaastacaggatggtagatttttttttctgctctaaaatatgaggaaattctggcgggacaaggtggctgatgcttgtaatcccagcactttgggaggccgaggcggccggatcacctgatgtcgggagtttcagaccagcctgaccaacatggagaaacctcg

SEQ ID NO: 717202 - DNA, 1342 bp, Homo sapiens
cgcctgtataccacggaattaaaagctgtgcctgtgtgatctgactcgtgtattttctccagccttacactgtttcctgttcttccttcagcaacagcaacacgcttccaagtcttcgtttttttattgttttgttttgttttgtgggtgtgttttttatttcacttcgctcttttcctcattaaacctcttcttatgtgattggatatttttttgttacacctcttcttcctgctaaactgtaaacaccaagaagttaggaatcattctcggttcacccccatccttgggtgcacagctcagagcacagacactaatatattgcagatatacaactaaactgtgtgatgtacattatgttaggcaaattagtatggctcatttagtcaagggaatagttatccaagagttgaattttgtgtgggaaataaggtgacagcttcaaagtgaaaatgctttctaatcccttttatcaccctctcttagaacagaaattttaggtgcagggtgtcatctgcccactttactctcagcttaaagcaggttaaaagatgacatccaatcacatactaatttgaggcactaaataggccggatttttctttagatacccaccaaacaaagcagaataatttgcagacaaagaagcttgaaaaaagagattcttcaactataccaatttcctcctcaacattatttcttcctggaaatgatgttcacacatcttgatgtgtcttacttaagcataattgacaagtgtcataattagatcattccaactcttccacaagaaaagataccttttaaagaatatcactgggtagatgtcaaagtatacatttctgtaagaggagattggactaggcatctctcataactaatttggttgaattttacaaaaatccttgagctttcttcaataaatgagaaagtcactttgtaattagattcttatttctattcaatatgagggtcatgccatgttccctgacctgggatggagaacaaatgaacaaaagagataaacctctgtcttaattgcaattatcttctgcatctcaatcctctccctaaatttattcattttgattccaatgttttcaaacaaaagagaaatcacagggcttctctgctttaccttcccataaattaaaccaaaaaattaatgaacacacactgaactacaggatggtagatttttttttctgctctaaaatatgaggaaattctggcgggacaaggtggctgatgcytgtaatcccagcactttgggaggccgaggcggccggatcacctgatgtcgggagtttcagaccagcctgaccaacatggagaaacctcg

SEQ ID NO: 717203 - DNA, 1342 bp, Homo sapiens
cgcctgtataccacggaattaaaagctgtgcctgtgtgatctgactcgtgtattttctccagccttacactgtttcctgttcttccttcagcaacagcaacacgcttccaagtcttcgtttttttattgttttgttttgttttgtgggtgtgttttttatttcacttcgctcttttcctcattaaacctcttcttatgtgattggatatttttttgttacacctcttcttcctgctaaactgtaaacaccaagaagttaggaatcattctcggttcacccccatccttgggtgcacagctcagagcacagacactaatatattgcagatatacaactaaactgtgtgatgtacattatgttaggcaaattagtatggctcatttagtcaagggaatagttatccaagagttgaattttgtgtgggaaataaggtgacagcttcaaagtgaaaatgctttctaatcccttttatcaccctctcttagaacagaaattttaggtgcagggtgtcatctgcccactttactctcagcttaaagcaggttaaaagatgacatccaatcacatactaatttgaggcactaaataggccggatttttctttagatacccaccaaacaaagcagaataatttgcagacaaagaagcttgaaaaaagagattcttcaactataccaatttcctcctcaacattatttcttcctggaaatgatgttcacacatcttgatgtgtcttacttaagcataattgacaagtgtcataattagatcattccaactcttccacaagaaaagataccttttaaagaatatcactgggtagatgtcaaagtatacatttctgtaagaggagattggactaggcatctctcataactaatttggttgaattttacaaaaatccttgagctttcttcaataaatgagaaagtcactttgtaattagattcttatttctattcaatatgagggtcatgccatgttccctgacctgggatggagaacaaatgaacaaaagagataaacctctgtcttaattgcaattatcttctgcatctcaatcctctccctaaatttattcattttgattccaatgttttcaaacaaaagagaaatcacagggcttctctgctttaccttcccataaattaaaccaaaaaattaatgaacacacactgaactacaggatggtagatttttttttctgctctaaaatatgaggaaattctggcgggacaaggtggctgatgcttgtaatcccagcactttgggaggccgaggcgrccggatcacctgatgtcgggagtttcagaccagcctgaccaacatggagaaacctcg

SEQ ID NO: 717204 - DNA, 1342 bp, Homo sapiens
cgcctgtataccacggaattaaaagctgtgcctgtgtgatctgactcgtgtattttctccagccttacactgtttcctgttcttccttcagcaacagcaacacgcttccaagtcttcgtttttttattgttttgttttgttttgtgggtgtgttttttatttcacttcgctcttttcctcattaaacctcttcttatgtgattggatatttttttgttacacctcttcttcctgctaaactgtaaacaccaagaagttaggaatcattctcggttcacccccatccttgggtgcacagctcagagcacagacactaatatattgcagatatacaactaaactgtgtgatgtacattatgttaggcaaattagtatggctcatttagtcaagggaatagttatccaagagttgaattttgtgtgggaaataaggtgacagcttcaaagtgaaaatgctttctaatcccttttatcaccctctcttagaacagaaattttaggtgcagggtgtcatctgcccactttactctcagcttaaagcaggttaaaagatgacatccaatcacatactaatttgaggcactaaataggccggatttttctttagatacccaccaaacaaagcagaataatttgcagacaaagaagcttgaaaaaagagattcttcaactataccaatttcctcctcaacattatttcttcctggaaatgatgttcacacatcttgatgtgtcttacttaagcataattgacaagtgtcataattagatcattccaactcttccacaagaaaagataccttttaaagaatatcactgggtagatgtcaaagtatacatttctgtaagaggagattggactaggcatctctcataactaatttggttgaattttacaaaaatccttgagctttcttcaataaatgagaaagtcactttgtaattagattcttatttctattcaatatgagggtcatgccatgttccctgacctgggatggagaacaaatgaacaaaagagataaacctctgtcttaattgcaattatcttctgcatctcaatcctctccctaaatttattcattttgattccaatgttttcaaacaaaagagaaatcacagggcttctctgctttaccttcccataaattaaaccaaaaaattaatgaacacacactgaactacaggatggtagatttttttttctgctctaaaatatgaggaaattctggcgggacaaggtggctgatgcttgtaatcccagcactttgggaggccgaggcggccggatcacctgatgtcgggagtttsagaccagcctgaccaacatggagaaacctcg

SEQ ID NO: 717205 - DNA, 635 bp, Homo sapiens
tggggaggcctcaggaaacttataatcatggcagaaggtgaaggggtaacaggcaccttcttcacaaggtgacaggaggaagtaagtgcgagaacaaggaagtaccacactttaaaaccatcagctctcctgagaactcactatcataagaacagcaaggggaaaaccacccccatgatccaatcacgtccacctggaacctcccttgacacatggggattacaattcaagatgagatttgggtagggacaaagagccaaaccatatcacctgccttcgggctgacctcacaacctccagactcttctcacatcctttacttcctttcttccactcaacctgttttccaaataattacccagactgtaaccccaatgaagcacagctgagacactggccctcacgtgttccatgtctgttgctgcatctcaccatttggtcttgttagaaacaattaactagtgtgggttggctttttcagastacgaataaaaaaaaaagtgaaatgttcaggataacacagtttaaaggttttatgtaaaagcacttgaggaagaaggtgaaaggaaattgattaagccactgaaattccctagaaatagaataacattcagagttccccagcagctttcccc

SEQ ID NO: 717206 - DNA, 1533 bp, Homo sapiens
acagaactgccttttctcccacctccaagtcaatgtgaccactccctttttgccttcactttctctcctgacttgcatttgatcagctaaatttatgtaaaaaaatgaagcctacaaccctaagctgatctgaaacacacagcaaatggaggtagccacatatatatttgataatttcccagtttatagcataacagttaaatcattgtaatttcttatggaatgtatggatcaaacattacatttattctgtattgtgtgcatttggagtaatccatttgacatttttttttacattgtgctagaaaagttaatgaggccactgaagagaaccaaaagtaggaattagaactgaagatacagcaagaattgctaaaagaaaggaaatactgtataaaagagaaaaaagacttttatggagtgattttagagtaactatggctttgtaaaaatgcacatcagtttatcagttttataagccaatgcttggtgggtatggagtttttcagtgatccagtttcaagtaaataagcaacgaataagaagaaattgtgtttctttctagaatgtgttgtcaaccactgaatttaatgctaccaatagatgcagactcatgaagtgcagtatgatttcgataaggcctaagcaattatcaaatcagaaatggatctctcatgctataaaattgtacatttaagcaaataattttaagataattggctttcaaactatttttggatgtatcagaagggatggttgtggaaataacagcacagtaaatgaatagttactggaggacaggaaagcagaaaaaaaatctgaagtgtaaggagatacagtcaagctgtttataaaatacatttagatacaaaagaggtcactgtgtggaaaacctttagaatcactgttgaaagaaaaaaaaatgtccacttcccaatttcaagttctattgggattgtttgtattataaagagttgactaataaattcctgccaaggattatttccctatccaaacaaaatgtccacaattckttatgagagaagatgatacccatagcttctgcttcccgcagtggcactctcatcacatatattggtaagtatagaggtgccaaggagaagcaggcaacagttttctccatagcatccatagtcatgctgttcagcagataagcctagtacagttagtatgtcctgattttttgctaaatcctgggaaaaatgaaaagagtcttccttatgcagttgtgttttgctgctgagttgtgtttgcagtgtattagaagaaatacatgtaggaagcctgttttcagtacaccactgtattactccatggtcttgaatttctgaggtcttaaaatagggttattaatattacggagaaagtcacactgctgggtaatctggttgaaatggagacagagcataaaccaatagaggtgtacacatatactaagaattttgactggttaagggaaacaagaaacaaatgtatttgttttcattagtaaatatgattttttctcaggat

SEQ ID NO: 717207 - DNA, 1533 bp, Homo sapiens
acagaactgccttttctcccacctccaagtcaatgtgaccactccctttttgccttcactttctctcctgacttgcatttgatcagctaaatttatgtaaaaaaatgaagcctacaaccctaagctgatctgaaacacacagcaaatggaggtagccacatatatatttgataatttcccagtttatagcataacagttaaatcattgtaatttcttatggaatgtatggatcaaacattacatttattctgtattgtgtgcatttggagtaatccatttgacatttttttttacattgtgctagaaaagttaatgaggccactgaagagaaccaaaagtaggaattagaactgaagatacagcaagaattgctaaaagaaaggaaatactgtataaaagagaaaaaagacttttatggagtgattttagagtaactatggctttgtaaaaatgcacatcagtttatcagttttataagccaatgcttggtgggtatggagtttttcagtgatccagtttcaagtaaataagcaacgaataagaagaaattgtgtttctttctagaatgtgttgtcaaccactgaatttaatgctaccaatagatgcagactcatgaagtgcagtatgatttcgataaggcctaagcaattatcaaatcagaaatggatctctcatgctataaaattgtacatttaagcaaataattttaagataattggctttcaaactatttttggatgtatcagaagggatggttgtggaaataacagcacagtaaatgaatagttactggaggacaggaaagcagaaaaaaaatctgaagtgtaaggagatacagtcaagctgtttataaaatacatttagatacaaaagaggtcactgtgtggaaaacctttagaatcactgttgaaagaaaaaaaaatgtccacttcccaatttcaagttctattgggattgtttgtattataaagagttgactaataaattcctgccaaggattatttccctatccaaacaaaatgtccacaattctttatgagagaagatgatacccatagcttctgcttcccgcagtggcactctcatcrcatatattggtaagtatagaggtgccaaggagaagcaggcaacagttttctccatagcatccatagtcatgctgttcagcagataagcctagtacagttagtatgtcctgattttttgctaaatcctgggaaaaatgaaaagagtcttccttatgcagttgtgttttgctgctgagttgtgtttgcagtgtattagaagaaatacatgtaggaagcctgttttcagtacaccactgtattactccatggtcttgaatttctgaggtcttaaaatagggttattaatattacggagaaagtcacactgctgggtaatctggttgaaatggagacagagcataaaccaatagaggtgtacacatatactaagaattttgactggttaagggaaacaagaaacaaatgtatttgttttcattagtaaatatgattttttctcaggat

SEQ ID NO: 717208 - DNA, 1056 bp, Homo sapiens
ctaactttcattaagagtcttctaggttgggtgcggtaaatcacagcactttgggaggcygaggtgggcagatcacaaggtcaggagatcgagaccatcccggctaacatggtgaaaccccatctctactaaaaaaatacaaaaaaattagccaggcattgtggcgggtgcccccctgtagtcccagctactcgagaagctgaggcacgggaatggtgtgaacccaggaggcggagcttgcagtgagccgagatcgtgccactgcactccagtctgggcgataaagcgagactccgtctcaaaaaaaaaaagtattctgtgagccaagcgctctacttgattacttgatttaatcctcgcaaatatttttcatataacatgatgagaagatgggggttcttgtaagcagcagaactgggatttgaacccaaatctctatgacataggtccccatacattttctatgacattggttgtgtgccatctggctcatgactttccagcaatttcatggataaaagatgtataataatctgacattcaaaacccatatacttttgcctgtgttagctgctctgggtaaaactattggataaatgaggtttggagaatagatgtgaattttcattattcattcccttctgagaattgtccaaataatattatttctaccagggtgaaatagagggggaaaaaaaacccctaggtttctggaaatattgactatgggatataaggcaaatttagatgttaaaagtgatagttgccaaatttgtcaaatgccgtaatgttctcatgtacaaaaaaagttggggaatttttgtcagaaaattatgagttttgcactggccaattcaaatcaaagagtttttttttttttcttgtctttggcaggttttacaagggggtgtccctgaggggaggtgaaatgagacctagaagcaatttttactgtaacacacacatacccatgcactaacttgctttcatatagttacctgtacatgccacatttcatgattaaaatgcagtccagaaaaatatggtgcactgggc

SEQ ID NO: 717209 - DNA, 1056 bp, Homo sapiens
ctaactttcattaagagtcttctaggttgggtgcggtaaatcacagcactttgggaggctgaggtgggcagatcacaaggtcaggagatcgagaccatcccggctaacatggtgaaaccccatctctactaaaaaaatacaaaaaaattagccaggcattgtggcgggtgcccccctgtagtcccagctactcgagaagctgaggcasgggaatggtgtgaacccaggaggcggagcttgcagtgagccgagatcgtgccactgcactccagtctgggcgataaagcgagactccgtctcaaaaaaaaaaagtattctgtgagccaagcgctctacttgattacttgatttaatcctcgcaaatatttttcatataacatgatgagaagatgggggttcttgtaagcagcagaactgggatttgaacccaaatctctatgacataggtccccatacattttctatgacattggttgtgtgccatctggctcatgactttccagcaatttcatggataaaagatgtataataatctgacattcaaaacccatatacttttgcctgtgttagctgctctgggtaaaactattggataaatgaggtttggagaatagatgtgaattttcattattcattcccttctgagaattgtccaaataatattatttctaccagggtgaaatagagggggaaaaaaaacccctaggtttctggaaatattgactatgggatataaggcaaatttagatgttaaaagtgatagttgccaaatttgtcaaatgccgtaatgttctcatgtacaaaaaaagttggggaatttttgtcagaaaattatgagttttgcactggccaattcaaatcaaagagtttttttttttttcttgtctttggcaggttttacaagggggtgtccctgaggggaggtgaaatgagacctagaagcaatttttactgtaacacacacatacccatgcactaacttgctttcatatagttacctgtacatgccacatttcatgattaaaatgcagtccagaaaaatatggtgcactgggc

SEQ ID NO: 717210 - DNA, 1056 bp, Homo sapiens
ctaactttcattaagagtcttctaggttgggtgcggtaaatcacagcactttgggaggctgaggtgggcagatcacaaggtcaggagatcgagaccatcccggctaacatggtgaaaccccatctctactaaaaaaatacaaaaaaattagccaggcattgtggcgggtgcccccctgtagtcccagctactcgagaagctgaggcacgggaatggtgtgaacccaggaggcggagcttgcagtgagccgagatcgygccactgcactccagtctgggcgataaagcgagactccgtctcaaaaaaaaaaagtattctgtgagccaagcgctctacttgattacttgatttaatcctcgcaaatatttttcatataacatgatgagaagatgggggttcttgtaagcagcagaactgggatttgaacccaaatctctatgacataggtccccatacattttctatgacattggttgtgtgccatctggctcatgactttccagcaatttcatggataaaagatgtataataatctgacattcaaaacccatatacttttgcctgtgttagctgctctgggtaaaactattggataaatgaggtttggagaatagatgtgaattttcattattcattcccttctgagaattgtccaaataatattatttctaccagggtgaaatagagggggaaaaaaaacccctaggtttctggaaatattgactatgggatataaggcaaatttagatgttaaaagtgatagttgccaaatttgtcaaatgccgtaatgttctcatgtacaaaaaaagttggggaatttttgtcagaaaattatgagttttgcactggccaattcaaatcaaagagtttttttttttttcttgtctttggcaggttttacaagggggtgtccctgaggggaggtgaaatgagacctagaagcaatttttactgtaacacacacatacccatgcactaacttgctttcatatagttacctgtacatgccacatttcatgattaaaatgcagtccagaaaaatatggtgcactgggc

SEQ ID NO: 717211 - DNA, 1056 bp, Homo sapiens
ctaactttcattaagagtcttctaggttgggtgcggtaaatcacagcactttgggaggctgaggtgggcagatcacaaggtcaggagatcgagaccatcccggctaacatggtgaaaccccatctctactaaaaaaatacaaaaaaattagccaggcattgtggcgggtgcccccctgtagtcccagctactcgagaagctgaggcacgggaatggtgtgaacccaggaggcggagcttgcagtgagccgagatcgtgccactgcactccagtctgggcgataaagcgagactccgtctcaaaaaaaaaaagtattctgtgagccaagcgctstacttgattacttgatttaatcctcgcaaatatttttcatataacatgatgagaagatgggggttcttgtaagcagcagaactgggatttgaacccaaatctctatgacataggtccccatacattttctatgacattggttgtgtgccatctggctcatgactttccagcaatttcatggataaaagatgtataataatctgacattcaaaacccatatacttttgcctgtgttagctgctctgggtaaaactattggataaatgaggtttggagaatagatgtgaattttcattattcattcccttctgagaattgtccaaataatattatttctaccagggtgaaatagagggggaaaaaaaacccctaggtttctggaaatattgactatgggatataaggcaaatttagatgttaaaagtgatagttgccaaatttgtcaaatgccgtaatgttctcatgtacaaaaaaagttggggaatttttgtcagaaaattatgagttttgcactggccaattcaaatcaaagagtttttttttttttcttgtctttggcaggttttacaagggggtgtccctgaggggaggtgaaatgagacctagaagcaatttttactgtaacacacacatacccatgcactaacttgctttcatatagttacctgtacatgccacatttcatgattaaaatgcagtccagaaaaatatggtgcactgggc

SEQ ID NO: 717212 - DNA, 1056 bp, Homo sapiens
ctaactttcattaagagtcttctaggttgggtgcggtaaatcacagcactttgggaggctgaggtgggcagatcacaaggtcaggagatcgagaccatcccggctaacatggtgaaaccccatctctactaaaaaaatacaaaaaaattagccaggcattgtggcgggtgcccccctgtagtcccagctactcgagaagctgaggcacgggaatggtgtgaacccaggaggcggagcttgcagtgagccgagatcgtgccactgcactccagtctgggcgataaagcgagactccgtctcaaaaaaaaaaagtattctgtgagccaagcgctctacttgattacttgatttaatcctcgcaawtatttttcatataacatgatgagaagatgggggttcttgtaagcagcagaactgggatttgaacccaaatctctatgacataggtccccatacattttctatgacattggttgtgtgccatctggctcatgactttccagcaatttcatggataaaagatgtataataatctgacattcaaaacccatatacttttgcctgtgttagctgctctgggtaaaactattggataaatgaggtttggagaatagatgtgaattttcattattcattcccttctgagaattgtccaaataatattatttctaccagggtgaaatagagggggaaaaaaaacccctaggtttctggaaatattgactatgggatataaggcaaatttagatgttaaaagtgatagttgccaaatttgtcaaatgccgtaatgttctcatgtacaaaaaaagttggggaatttttgtcagaaaattatgagttttgcactggccaattcaaatcaaagagtttttttttttttcttgtctttggcaggttttacaagggggtgtccctgaggggaggtgaaatgagacctagaagcaatttttactgtaacacacacatacccatgcactaacttgctttcatatagttacctgtacatgccacatttcatgattaaaatgcagtccagaaaaatatggtgcactgggc

SEQ ID NO: 717213 - DNA, 1056 bp, Homo sapiens
ctaactttcattaagagtcttctaggttgggtgcggtaaatcacagcactttgggaggctgaggtgggcagatcacaaggtcaggagatcgagaccatcccggctaacatggtgaaaccccatctctactaaaaaaatacaaaaaaattagccaggcattgtggcgggtgcccccctgtagtcccagctactcgagaagctgaggcacgggaatggtgtgaacccaggaggcggagcttgcagtgagccgagatcgtgccactgcactccagtctgggcgataaagcgagactccgtctcaaaaaaaaaaagtattctgtgagccaagcgctctacttgattacttgatttaatcctcgcaaatatttttcatataacatgatgagaagatgggggtycttgtaagcagcagaactgggatttgaacccaaatctctatgacataggtccccatacattttctatgacattggttgtgtgccatctggctcatgactttccagcaatttcatggataaaagatgtataataatctgacattcaaaacccatatacttttgcctgtgttagctgctctgggtaaaactattggataaatgaggtttggagaatagatgtgaattttcattattcattcccttctgagaattgtccaaataatattatttctaccagggtgaaatagagggggaaaaaaaacccctaggtttctggaaatattgactatgggatataaggcaaatttagatgttaaaagtgatagttgccaaatttgtcaaatgccgtaatgttctcatgtacaaaaaaagttggggaatttttgtcagaaaattatgagttttgcactggccaattcaaatcaaagagtttttttttttttcttgtctttggcaggttttacaagggggtgtccctgaggggaggtgaaatgagacctagaagcaatttttactgtaacacacacatacccatgcactaacttgctttcatatagttacctgtacatgccacatttcatgattaaaatgcagtccagaaaaatatggtgcactgggc

SEQ ID NO: 717214 - DNA, 603 bp, Homo sapiens
gaaattctgatcatttagattaggtgatggagagaaaggatgaggaacccagaagatagtgggaattaccaaggcagagatgtggataatacagtccatgactatagaacaggaagtgctgaaagagcatgtttctgcacatttagaattaagagggatttggagcatctggagcagaatttgtttgttgggratgatgactcgggagaggcaggtaggggccaaattatgaaggtccatttttgtgatgtgatggcaaaaggaacaactgaataaattgagcagggaatcacagtcagatgtggagtccagagaagtctctgatggtgtggaggatgctccacatctctcatgaaattaattgagaaactgctatttttttcatctaagagttttaattatctttcatttagttcccagaggctattgggcataggcacctagtaagtaactgttaataacaacatgcttattttgggcatggcaatgtggaaatttattcctgccgagtaatcagtgccagttttatgctggcagggttttaaaagaatggagaagggattcttttgcctccattaggagaaagctgtgccttctcttcat

SEQ ID NO: 717215 - DNA, 648 bp, Homo sapiens
tgcccatttcatggcagacatgctgctgtgtgctttccatgcattatatcattcagccaacaggcatctaaagaatatagagtcaagaacagttaagccattgccacaagatcacctagctagtaaatggctcaaactcagtgactcaaacccaggatttccaaccttaaataaggctctcactcccacaccgcacagctgcatatctgagtgtttatcagtgaattacattgatgtaaattcatttatgaaaatgtcaagatatcgtgagcactagtgcttttaggagagaatatttaactcatttcagacaacatatattaacttcatcaaaagtttgcctgttataaacctgtgactcactcttggtcaccatgatggtgcaacagctgtccactggacaaatactaaataatattttatccttgccccctatttcttatgagaaagccacaatgaacttccttttgtctctcattkcacccttaaagggacaaatagcattgcattatccttgaaagggtcttctgctgacccatctttgacgcttccatcacagggtgacgatgggatgtttgctgtatcacacttccctgtgctttcatgaatgtgttactggtgatgaagaatgccaattctttgtttagt

SEQ ID NO: 717216 - DNA, 648 bp, Homo sapiens
tgcccatttcatggcagacatgctgctgtgtgctttccatgcattatatcattcagccaacaggcatctaaagaatatagagtcaagaacagttaagccattgccacaagatcacctagctagtaaatggctcaaactcagtgactcaaacccaggatttccaaccttaaataaggctctcactcccacaccgcacagctgcatatctgagtgtttatcagtgaattacattgatgtaaattcatttatgaaaatgtcaagatatcgtgagcactagtgcttttaggagagaatatttaactcatttcagacaacatatattaacttcatcaaaagtttgcctgttataaacctgtgactcactcttggtcaccatgatggtgcaacagctgtccactggacaaatactaaataatattttatccttgccccctatttcttatgagaaagccacaatgaacttccttttgtctctcatttcacccttaaagggacaaatagcatygcattatccttgaaagggtcttctgctgacccatctttgacgcttccatcacagggtgacgatgggatgtttgctgtatcacacttccctgtgctttcatgaatgtgttactggtgatgaagaatgccaattctttgtttagt

SEQ ID NO: 717217 - DNA, 1915 bp, Homo sapiens
ttttttgagacggagtctcgctctgtcacccaggctggagtgcagtggcgcggtctcggctcacttcaagctccgcctcccgggttcaccccattctcctgcctcagcctcccgactagctgggactacaggcgcctgccaccacgcctggctaattttttttattttttagtagagacggggtttcacagtgttagccaggatggtctcgatctcctgactcgtgattcacccgcctcggcctcccaaagtgctgcgattacaggcgtgagccaccgcgcccggccagggggtcttacatcccttctccctgattcttcttgtgactttctatggaaatcagctatggagatcgatttgaatataattatattctaccataattgcatatgaacttaaaagtttacttcctctgaactttaaatcaaagtcattattaaaatttctcagttctaacatttaatgacctaactagatcttggagttggactgaagaaaattgacctaatatcttttttgtccttgaatattaaatttagtatcttatattttctcatgtagtgaagaaatattaaaagaaaatactttcacttaagtgtttcatctcattgctaacaagaaatattatgaaatgaacatcactctttcctctgaggaattctctagccattactggaggcaggatgtggtgttagatggacaaacatgacctcatgatccctctgctaatgtgaatctttgtgaaaaattaagcgtattttttaaacaatcggtttaaggtttaagtgcattgaggtagataaaatgggatcaccaccctgcctcaacttggcaccaagttgtctttgaaaccatgagtcatccttcctcttacaaagtgaaaatgctcttcaacaactcattgcttagtggctcagaaataattttgaaaaactgatgacaatgccatcaattattttgtgaagacaacaaactcctctgatttttccaaatttgaggggtcttttctaagtctttgtgggtttttttagaccatgatctggcataggtttttttttttttggttggggtgttgtcttggttgtgaggttttaattgtcatgtacaagactcttgggtctccagatgccttaaaatggaatcattagtgaattaaaataatgtagctctccagagtatgatttgcttcagcttgttaggttgttcaactctttgagaaataagatgaagcaggagcttaagatgaaaactttcaatctgcagtaatgtgtttacagacctattgtttcaatagaaagaaaacagaggtcagagagagttgcttaacttaaacaaaaactaaatacacacacacatagacacacaaacacacacaaatatacacatcctattttgttaaggacaatgaggagtttcaaaatgacttaattattctctgtgggtcaataagtttatttattttacctatctcatctctcttttttttggcaattgacagattacttcatggaaccgtgatataatttggatagtaacagattttatagattaatgaagtaagtctgyggtaagatgtgaattactttttataaaaacaagtgatccatgtaccaccagaaaaatagactagcagaagtcatctagtagtatgtattatactcgccaatgtgatagcctaaacaaacacaacctacccagagtgaagcagtattacagcaagtcagtatgtcagggctgtggtgaagctggggagaaatgatatgtggagattcaaaaagcaaggtaaattctaccattgtcaaaaatttatcagtaggagctcagggaaaggaatcatatcctgtgaagtacatttccaggtgtaagacatggtcctacatcccagacgggctagactactaagaaggtaaccaaa

SEQ ID NO: 717218 - DNA, 1915 bp, Homo sapiens
ttttttgagacggagtctcgctctgtcacccaggctggagtgcagtggcgcggtctcggctcacttcaagctccgcctcccgggttcaccccattctcctgcctcagcctcccgactagctgggactacaggcgcctgccaccacgcctggctaattttttttattttttagtagagacggggtttcacagtgttagccaggatggtctcgatctcctgactcgtgattcacccgcctcggcctcccaaagtgctgcgattacaggcgtgagccaccgcgcccggccagggggtcttacatcccttctccctgattcttcttgtgactttctatggaaatcagctatggagatcgatttgaatataattatattctaccataattgcatatgaacttaaaagtttacttcctctgaactttaaatcaaagtcattattaaaatttctcagttctaacatttaatgacctaactagatcttggagttggactgaagaaaattgacctaatatcttttttgtccttgaatattaaatttagtatcttatattttctcatgtagtgaagaaatattaaaagaaaatactttcacttaagtgtttcatctcattgctaacaagaaatattatgaaatgaacatcactctttcctctgaggaattctctagccattactggaggcaggatgtggtgttagatggacaaacatgacctcatgatccctctgctaatgtgaatctttgtgaaaaattaagcgtattttttaaacaatcggtttaaggtttaagtgcattgaggtagataaaatgggatcaccaccctgcctcaacttggcaccaagttgtctttgaaaccatgagtcatccttcctcttacaaagtgaaaatgctcttcaacaactcattgcttagtggctcagaaataattttgaaaaactgatgacaatgccatcaattattttgtgaagacaacaaactcctctgatttttccaaatttgaggggtcttttctaagtctttgtgggtttttttagaccatgatctggcataggtttttttttttttggttggggtgttgtcttggttgtgaggttttaattgtcatgtacaagactcttgggtctccagatgccttaaaatggaatcattagtgaattaaaataatgtagctctccagagtatgatttgcttcagcttgttaggttgttcaactctttgagaaataagatgaagcaggagcttaagatgaaaactttcaatctgcagtaatgtgtttacagacctattgtttcaatagaaagaaaacagaggtcagagagagttgcttaacttaaacaaaaactaaatacacacacacatagacacacaaacacacacaaatatacacatcctattttgttaaggacaatgaggagtttcaaaatgacttaattattctctgtgggtcaataagtttatttattttacctatctcatctctcttttttttggcaattgacagattacttcatggaaccgtgatataatttggatagtaacagattttatagattaatgaagtaagtctgcggtaagatgtgaattactttttataaaaacaagtgatccrtgtaccaccagaaaaatagactagcagaagtcatctagtagtatgtattatactcgccaatgtgatagcctaaacaaacacaacctacccagagtgaagcagtattacagcaagtcagtatgtcagggctgtggtgaagctggggagaaatgatatgtggagattcaaaaagcaaggtaaattctaccattgtcaaaaatttatcagtaggagctcagggaaaggaatcatatcctgtgaagtacatttccaggtgtaagacatggtcctacatcccagacgggctagactactaagaaggtaaccaaa

SEQ ID NO: 717219 - DNA, 605 bp, Homo sapiens
tacacrgtacaagcattgataactcttcttattgtaccactcatcctttcctcccttagacatatctctgatctatcatcttaatctctttgctatttttatatttttagatatgcagcacatttttctaattagagcacttctacttcctcagaatttgtataaaaacagatagcaacatgaatatcactagaagattttatctggagactaacctagtatcttttaaaataccagatctctgtcaagaacaaagtttccacaggacagtagattataaacatctggcacccaatggccagtgattcagttactggctgacatttcaaccctgaactcatctagcaaatggtgtctaaattataatttctgctaagcctataaataaggagataggaggcagcacctggagactccgaaagcatgagctggggtcttttgtcatgcttggtatagcacagaagctttgtaaaaaacttagtcacctggaggtcagtgaaaaatgacagtggcagctgtaatcactcaagtacaaagaggaaaaaatgtttctttgctggactgcatggttggctgggcactagccacttgtgacgagaagagaa

SEQ ID NO: 717220 - DNA, 605 bp, Homo sapiens
tacacggtacaagcattgataactcttcttattgtaccactcatcctttcctcccttagacatatctctgatctatcatcttaatctctttgctatttttatatytttagatatgcagcacatttttctaattagagcacttctacttcctcagaatttgtataaaaacagatagcaacatgaatatcactagaagattttatctggagactaacctagtatcttttaaaataccagatctctgtcaagaacaaagtttccacaggacagtagattataaacatctggcacccaatggccagtgattcagttactggctgacatttcaaccctgaactcatctagcaaatggtgtctaaattataatttctgctaagcctataaataaggagataggaggcagcacctggagactccgaaagcatgagctggggtcttttgtcatgcttggtatagcacagaagctttgtaaaaaacttagtcacctggaggtcagtgaaaaatgacagtggcagctgtaatcactcaagtacaaagaggaaaaaatgtttctttgctggactgcatggttggctgggcactagccacttgtgacgagaagagaa

SEQ ID NO: 717221 - DNA, 605 bp, Homo sapiens
tacacggtacaagcattgataactcttcttattgtaccactcatcctttcctcccttagacatatctctgatctatcatcttaatctctttgctatttttatatttttagatatgcagcacatttttctaattagagcacttctacttcctcagaatttgtataaaaacagatagcaacatgaatatcactagaagattttatctggagactaacctmgtatcttttaaaataccagatctctgtcaagaacaaagtttccacaggacagtagattataaacatctggcacccaatggccagtgattcagttactggctgacatttcaaccctgaactcatctagcaaatggtgtctaaattataatttctgctaagcctataaataaggagataggaggcagcacctggagactccgaaagcatgagctggggtcttttgtcatgcttggtatagcacagaagctttgtaaaaaacttagtcacctggaggtcagtgaaaaatgacagtggcagctgtaatcactcaagtacaaagaggaaaaaatgtttctttgctggactgcatggttggctgggcactagccacttgtgacgagaagagaa

SEQ ID NO: 717222 - DNA, 1405 bp, Homo sapiens
ctttctcaccccattcccacttctgagaaattctgatgtcatgtgatagtttccttttgatgattactcacatacaaatgaggtaaattcttagtgggctatttaattcagatttatataggcatgtggctgtggctctattgcatacaaaaaaaattttttaatgacatgtgatgtgtgtatgagtgaatatttttagccattagttctctcagtgaactgagaactgccctgcagaattactcataatgcagtacattctccttctcttacggtctcacaaactgcttcctccaaaatggcttttctttataaatccctgttttgtcacactgtcatattttttagattgcctaccaaaaaaaataataatccagggaggcacagtgaaccaactcatacactgctttcccactgtgtcaagcaagttgttctcctcaggctgtgccactggaaggagaattgggctctgctttctctgagatctgcagctacacgcatgttccatatctttcccacttccctgttgcctattataactttgggcagcctttccttctattttgtggttctgagtttcaaaagtctgttagtttaatcaaaactggagtttgtgtgtctgggtcttgtacctctgttgcatttgggtgatttctgggagatgagaaaaatgtctaatgttatctggccattttaaacccagatcctaattgcttctcagcctttgggctaggatctgttcttgtcagtttaaaactagacttcagtggcttttcaaaaattctgtagccacttggatttcttttcttgttaattacttaattatccattcacatcctttttaaccttttggggtattcctttagtagtcagcaaaacaatttgaaaattaacaaaatattttctcaaaggagggtggtagtgaccatgatgtgagtagcattcagagctgataggaagaggcagccttcagtccaatgggactgtctctgactcttcctattggagtccattgcccaagaggtcttaattcctaagaactcmctgggctcattgctgggcctggcttatcatcttgttattttgggtgccactactagaaggatattgagagagttgaggaataggaaagataacctttcctgagtgatgtgaaaaattctttcatatctgttttcttctctttgctgtcttcccatcatcagcagaactgtctagggccatttgctttgtcataagacttttgagaaaataactgaataaaatttttctaatttggaatgagttgaagtttacatacacttagggccacagtttatctctttcttctttcatttatttagcatatagaaaggcaaagcaaatcaagtcaaaatacaaattgttcctaactcatatgtgcaca

SEQ ID NO: 717223 - DNA, 869 bp, Homo sapiens
ccggacagtggaactggggccagcagtactccatatgcaccctgtttcagctcagtgtgcagaagaaggttctcacagtcagagctgttgaacagaggaataggctgtgctgggcgatgagctcctcatccctggggtatgcgggaagggtctcaagcccccatctgatggggacgcagcatccargggttggactagaggactcctgtcttgcagccgatgtgcttcgctggtgtggattttcatatccaccatcctcacctaatgccctggatgttaggaagacagattaattttcaggaaaccatagagttttcatttgctcaaaatcctgctctggacctctaagaaaaaatcttcccgcatatatgtacatcatagatgggggttgtcttcctctgatcagttgctcacattgacggaaagacacccagggaactgtaagaagatgcctctcttcattaaagatgccctgagaagtaaggcgaaggagcagagttttctggagcttctgctaggcactatttcatgcagtctttgagaccttgcagggccagggatcggggtgaagagaagcaggaccccaggcccgtcagactctaaataccttgccctttgcactgtagaaaacagcttttcttggcccccagatcccttgtactgggagctggtcagaaggggagtgtggatgagggatgtggaacaggcgtggaacatcaggggctggtgaggagtgtggcatggccccttctagagagggcgagcagcttctggctctcagagggaatgaggcccaggtgggtggatcttcatcctttcaagaggaggtgagaactagacttgcatgtggcatctgtttcttgattgga

SEQ ID NO: 717224 - DNA, 633 bp, Homo sapiens
tcttgctttcaattccttccatctctctatttattgttttctgattctgtttcatcttttaattattcagaaaacaccagggctatagccagtactatagctgaagaaaaatgatgtttttttctaaaatgcgatatttcttaaacatcaagtccacattacagtcaagtagttgtggctcgtgtttctactttaaacatcatacaataatacgaaatattaatttaaatataagcacatttatttgaaaacaaaattcaaacaaataatgtcttagtgtggaaactgtacttattttggaaatatatatcagatttagagatgccatattttttctcaaacctttaacttattctgtattttcacacaagaggtcactggctctcatgtaacacagacaagggaggagtttcttactccttcgaactatgttgatgtctttgccattatgctatcaagcaacatagaaataaaagggaggtgtcctttaccaaagagcatatgttttcagcaaatataaatataaatatatatatwcatatatgtatataaataaataaatatatatatatttagcaaatatgcctatgactatagcttttctgtcacactcaaatctgtccttttcctttc

SEQ ID NO: 717225 - DNA, 614 bp, Homo sapiens
tccaagaccaaatcaagctaagaatagctggctcttcttttctgaggaaaactctctcacagaagttttgttagatttttatccagctaggcttctctgagctcactcagcccatctaccagctttgccacgtacctgcctattcttctgcctagactcatcctgtagttagtattcactactgactggatggtaaactttttgagagtaagccccatgtttaagtaatatatatcctcaccaaaacatttaacatagcttcttacacacagacaaacctcaagggtaaaactaaaataaaatttaaaaagtaatccaaattaatgattacttaacagcatttaaaaattaactccaatatttacaatcttttttccttttttttaattattattatactttaagttttagggtayatgtgcacaatgtgcaggttagttacatatgtatacatgtgccatgctggtgtgctgcacccattaactcgtcatgtagcattaggtatatctcctaatactatccctccccgctacccccaccccacaacagtccccagagtgtaatattccccttcctgtgtccatgtgttctcattgttcaatgcccatctatga

SEQ ID NO: 717226 - DNA, 614 bp, Homo sapiens
tccaagaccaaatcaagctaagaatagctggctcttcttttctgaggaaaactctctcacagaagttttgttagatttttatccagctaggcttctctgagctcactcagcccatctaccagctttgccacgtacctgcctattcttctgcctagactcatcctgtagttagtattcactactgactggatggtaaactttttgagagtaagccccatgtttaagtaatatatatcctcaccaaaacatttaacatagcttcttacacacagacaaacctcaagggtaaaactaaaataaaatttaaaaagtaatccaaattaatgattacttaacagcatttaaaaattaactccaatatttacaatcttttttccttttttttaattattattatactttaagttttagggtacatgtgcacaatgtgcaggttagttacatatgyatacatgtgccatgctggtgtgctgcacccattaactcgtcatgtagcattaggtatatctcctaatactatccctccccgctacccccaccccacaacagtccccagagtgtaatattccccttcctgtgtccatgtgttctcattgttcaatgcccatctatga

SEQ ID NO: 717227 - DNA, 607 bp, Homo sapiens
agctattgaaacaaaaaaatacaaaaatttwaaaaaataaaaatgaacaatttgattaaaaataagcttaaaatgataaaaataatggttttattattcattagttttatattagcattgcatcccatgtataatatatatagtaaacaatgcacataaaataatttttctctctctctcctctctttgtcattctctcttacacacacacaaacacacacacacacacacacacacacacaaataggaagtaacttactagattggtcacttaactgacaaacccaataatttgcaacccagagaccagaaggtcttggagcagccaaaataaacatttttatcagtgattgttctcatatcttattacctgtggtcttattactctaatttaaataatacatacatagtgtaattgtttggatcaatttggttatgaggttaatctgtacatagaagattaaacacagtactttggtctgagaaaatgaactttagtgagaggtgcagagatgggaggatctgagagcctacagcgtgaggggagagattacaaagaacagacaaaagaactgaaaagtgtagcagctggggctgctccattaca

SEQ ID NO: 717228 - DNA, 607 bp, Homo sapiens
agctattgaaacaaaaaaatacaaaaatttaaaaaaataaaaatgaacaatttgattaaaaataagcttaaaatgataaaaataatggttttattattcattagttttatattagcattgcatcccatgtataatatatatagtaaacaatgcacataaaataatttttctctctctctcctctctttgtcattctctcttacacacacacaaacacacacacacacacacacacacacacaaataggaagtaacttactagattggtcacttaactgacaaacccaataatttgcaacccagagaccagaaggtcttggagcagccaaaataaacatttttatcagtgattgttctcatatcttattacctgtggtcttattactctaatttaaataatacatacatagtgtaattgtttggatcaatttggttatgaggttaatctgtacatagaagattaaacacagtactttggyctgagaaaatgaactttagtgagaggtgcagagatgggaggatctgagagcctacagcgtgaggggagagattacaaagaacagacaaaagaactgaaaagtgtagcagctggggctgctccattaca

SEQ ID NO: 717229 - DNA, 646 bp, Homo sapiens
gcaatgtcaaatatttatgaatcgcaatcttgaaaaactattttaatatgatgaaatattttagaaccctttaaaaagccataacaggattggattgcatcctttatattgaacttaacaaaggaaatttttctttaaaaaagcacatttatctacaaattttacaagatcatattttaggtgcaacttgaagtcaccttccagatgtcttatttacagaatatgactggtttatccatgaatcaccaacatgtcattctgcttcgcattgaagttttatgtaaatgaaggaaaaaccagggccctctgctctcttggaccttttattccagaattcactcagtccatagagagtgatggtgaaaaccagcgttagaggacaggccatgcttgcaacaagctcartgtcttagtaaatggctctaagcattctggaatattatatcccagatttagacttctttctattttctgtatttcactcatcaatcacggtttctgtcataacttggcaagagtctctagaatgctgtatattgttaaaacaatcctacatttcctgaagtagacattttatgtatcctagagtgaagaagtctttggagaagttctttcttcttgaattaagttgtatatataaaaaaca

SEQ ID NO: 717230 - DNA, 648 bp, Homo sapiens
ttctagaccaaataatgatgctatttcaatattttcaaaaatctctgggttaatttttaatgtgcataaaaagctgcaaacccttttgaagtttcattggctcaaaaaatagaagtgaaaaaattgaagaggttcgttaatcactagttttattcctatgtcaatacagaactagaactaagaaaaaagtttatttytcccagttacttatatttcctttgaaattggtgaggttatctttaaaatagcactataattttctttacggttagaaaattatctgtagaatagagatcttgttggcagcaagggataagtatattatttgtaagaacatgagccagaaaaacagatcctgttggcaccactgtgtctggtacccagataagaggcaggactctgttacataggttatgtgatttatcccaacttgtgtggatattggcatttcttcgagggaggcagcccaaaacctatggttgtttgttggtattaaaagattaataaattggtcatggtttatagtaacagaaatccatgaggaacaagctaaatcagtttcactattacgatggcctccaatgcacaattggctctgaagtaaccattcattatttaaaataacatcataaaagtgtattaattctt

SEQ ID NO: 717231 - DNA, 599 bp, Homo sapiens
aaaactcactaagaatatgttggataagaactgtcacaggaacttgttatgaatttacacaccaactaaccacttggaaataagtttcattgccagctccagtctttagcctagggaaacaagtgtcaaaacaaggggatttgggaagcacaatcttctcaacaggcctgtgtcattaaaaccagtgcaagcttagtgtaaaataatactgttattatgaatttatctgcagagctatatatacctaccctgctttacattccttccctccttgtcggctgatactaagcttattcacaagctaattccttcattgtccttgctttcattccacatatcttgctacattagtctggaggcttggcttaactatcttttaggttttcatttcttgttttaatttatctttttaattaaaaatttttcagttgrtacataaacattgtttataatcttatggggcacatagatgatgttttgatacatacaatgtttagtgatcagatctgggtaattagaagagccatcgttccaaacattgatcatgtctgagaacatatgtgctgagaacgttcaatatccttcttctagctatttga

SEQ ID NO: 717232 - DNA, 2098 bp, Homo sapiens
taattttacgattacataagtaaggacacaaacagtttccatatgactggagtgatttctggctgccttaaaagagttataatgagtgtcagtgtcattgagattgacttcagttattcaaaatattacacaaaatgtgaccggagcaagcagtgaatccaggaaaattaatataaactaaattcgattccgacatttaaatttccaaaactcagattaaatactatttaggacagaaataattcctgaaatttcacgtgtttactttttttttttaaatgaaccttttaagctgtacaggagaagcttgacatatgattgaaactggcttgggtaaaataataagaaattcaatcttcgtagttttaaatgagacacaaaatactctttggagactgattattaagcacaagtcactcgggtgctttctactctccctgttggcaaaggaaggtaggggaggaattcatttacacctcacactgatgtgtgagaaaatgtatttgtttcacgttatgccaagaaataggaaaactgatccgacagctcaattaataaataagttaaacgtaaaaagggataaaaataaaatcttactttatggaggaaaagagttaaatctatatggagcctgttttagaactgacagtttgctaaaacgaattgactcagaattttctacttatcaaacattttccacttctgattttatggctttgctctaaaacctaggaagtcaccaactccgtgcaagatgctaacatttatctcaatctttctgcctcttcaaagaccgcctcaaagcataaagatagtccatagcgtcttacctagacaacgaggagctgaaacgccaaggcatgacactgctcaacactcaggctaggaaagaagtccgtccccgttagtttctccaaaatctaagttcccatttcgtggttgagatcatggctctattctgagcagtttcacgcagtgtgtgagtctaacaaaaacaccctctgcagctggagggagccttagctaaggcaggatcctgtcaaggcattcctagtgacttctgtctactaaattcagactgaggttttgcaaaaggggcctccacaaccaggcccagattgcctggaaagtatttcctgcctctgaggagtgtgcatgctagaaaggctgtacgaagagaggggaggaggggagagcccagccgcctgggcgttttaggagttctgattttacacagaactcaagtgagttttgtcaaagctcttgaggtgattagctgtagagtcataaagtcctagagctttttctatcccacactgcttatgaaaaaagaaagaaagaaagaaagaaaacgtagttttctctctatccacaacctttccactatattaaatgtatatgcacagcttaatcaaaatgcctgtgcttgctctcatttcaaaagatcttttaagagagcaagatgaatttagccttaataccataattcttctaaatggcaaaaccttttttgaacatgacttaaaattggaaatgctgcagcttttcattctgtccctgagaccatctgtaagtaaaatcccaagcatccagttaatagaacgatttcttccagatctctctgatcacaagaatccttcacagaattaaaatagttygtgttatggcaaatgcagcagcgcattacctctagtcagaatcctccagttacaaaaatccagtgctggagcagaagacaggctccatcttgatcgtattagagtcttgctgacattaaacacttacaactgcttccatctagcatggcagcgttcctgaatcacatctctaaagccgctcatggtatctgcatccttcgtccgtcacaaattttgtgaactatcatctgtttatcttttctgctttcttgtgcctcccttgaatgacttcctcctagctgctccaggttgggaatttggactaccatttggttttgattaaaaccagacaggcaactctggagaatttagggaataagctaatggaaactgcaagtatggctttaattagtgcatcaattaataatagatgttagctcgtcttataataagatatcaca

SEQ ID NO: 717233 - DNA, 591 bp, Homo sapiens
tgacccatttcgtaggaaatcgtctgtgtagaaatcaggtcctcagctttaccaagcagctgcggcgctcacaggcaggcccacacgcagcaccacagttcaagttcctgctaaaagcaatttgcttaaacccttacagattatctacactaataagcatcattttgaaaatagattttgttaccaagatgcaaaataattattcagtgcacaaccacttgtagagcacatggagaatgtgcttcaggtacatttacatgtgcatctctrtcatctttcgacccttgatacaggtattttcgtgtccagtttatacaatgggtaacagaggttcataaacatgatccacctatgttgcttcacctagcacaaagtcgagccagcacgcaatcctgtatcagaagcatcctaatccagtgatgcttatgccactgaaaaactaaatgtgtcccttgcgcctctaacgggcaggagctttaatatcttggaatgcttttattccttagtaagcacataaggttttcaatagtgagaaataaaacacatgattgtttctgacaactaaactgcacgttgtaaagtgaaatggat

SEQ ID NO: 717234 - DNA, 1354 bp, Homo sapiens
tcatgcctcagtttcccagatttctattctggggcaaaccaaacacttcttgtagtggacatgctcaccagaaagcactgacacacctgctcttgaaaggctccttcttcttccgtcttcagattctaggcaagacttttgctcaggcaaactgggggagacctggagcagcttcattgcacattaacttcttcaacggattttaatttataattggacaaaaattgttggtttagtggtctccaatatgccttttagttgtagtatttatgaaagcatcaaaacagcacagttctgcctgacacaacccatcatataagataccttgggtcgtccattcaaacgcagagtgctttggatttttcttcctctcagattatggagtacatgcaggttgttttcacagtaggatggaaggcctagttttcattctgtctatcataatgatggccttaattctttgggtaattaatagattctttacaaccaagtatatagaaatgaaaataataaccaatatgcccctgaagcctgtgggacacaaaagcgtgtgtgaagccctcaagcatcctgatacggccatggcctgaataatgaaggcaatttgaagctatcagcttctataactgagtctccaaaagaaccaacacagagccacggtgctctgtgctttgaggcatattcactcactacctacacgcacacttatcatagaaatgtaaactcctgcagagcttcttcccagagtagtaggaacaacatcaataatcaatgtaagtcagcttcatatgtgcattagacaatgcgttgagcacttgaataatcttatcaaatcttcaaaacaatctaatgagaggtaatatttccattttaggtatggaaaaacaaatttaacaatgaagacaagtaatgcaaaatgttagttgttttagctactaaatactaggtgcagcatagttcagaactaccttttctaaccatttggtctagctagtagacacaatgtaatctagtaaccaattaacagtagttagagacttaatataatttaatccagtagtagtgaggtacttattctaattgtcagataggatttaatccaactgcttaatctgatgatttattctagctactaggtgccagataaaactggctagagggctagaaatattgtaacccaggcagtctgactcacaagtctggtagcttaattattactatccatggcttcccccacgcactgggggaaggttaaattgactttaatagggsacatttcctaaagaaaagtttaaccttgatccacagcctttaattttctcttgtgaccttctaaaatggaaattttcatgaa

SEQ ID NO: 717235 - DNA, 1458 bp, Homo sapiens
aaaccttatcatttgaaactgaatacatcaacttttsattggtacagtaaagaaagaccccatttggcttgtacttgtagcattgcagaaaacaagttatgtatttgaggcaaattttgcttccttatctgacagttaagtctgccagctgaacgtttgacattctgtgcattgttttataataagctgtacaaaactttactcactgctaaatccaattttcatatctatgaaattctatagtgaatattacaaatctctaatctaaatggacatgaggctaggttttggaagatcacagtcctgaatttaagctacattgctgacttgctatataattgaaaaattaatgcaactttcctgtttctcaaatatccttatcaataatggaataatgaaaatgtctggggtataagcatttcactctgaagtccactatttgtgtaaccttgtaaaatcacttgacttttgaacctcaattcttttgtcactaaaatatggagaaaaacatttgcagttgatgctacaggctttgtgctaagatccactgaaatatatggcgctatttatattgtgtatgagttgtttccatgtggaaaaagaacaaaaatcagtggctagacatgaaaattcagcagagagcagaactttcaacaaacttattgatgatgatacagtcatcctttattggaataacattatatattgggaatacaagaagtttaatgccatgagaagttatactgggcaaatcacataccttaattttataatatgtcaaaatattattgttccggaagtgttttgagaaacaaatgagcttacacaatgaatttaatgcaattattgacacctgtgaagtgcttgagaaatagtataaattctacaaaaagtgctgggacaactggatatccacatgcaaaaatgcatttggatccctacctcacaccatacagaaaaattatctcaaaggagatcatagagttatgcaatggcttggatatggttgtctccaccaaaaccaatgttgaaacttgatctccaatgtgtcagtgttgggcctagaagaggtatttgggttatgcagacagaaccctcatgaatggcttggtgatattctcgtgggagtgagtgagttcttgttctgacaaggtaagaacagttcttgaaggaaaagattagttttgttgaggtagtttgtttttaagcaaattccctcctcatgtttggctgtattttgtacgtgcccacttcccctttgaccttcttcaccatgttttgacacagcacaaaagccctcaccagagactggtgccatgcttctgctatggcccccaacaaccatgagtgaaataaacctctttctttataatttatccagccccaaatattccttttatcacaacacaaaacagactaagacaatttaaatttcatagctaaaatcataaaaatatt

SEQ ID NO: 717236 - DNA, 1458 bp, Homo sapiens
aaaccttatcatttgaaactgaatacatcaacttttgattggtacagtaaagaaagaccccatttggcttgtacttgtagcattgcagaaaacaagttatgtatttgaggcaaattttgcttccttatctgacagttaagtctgccagctgaacgtttgacattctgtgcattgttttataataagctgtacaaaactttactcactgctaaatccaattttcatatctatgaaattctatagtgaatattacaaatctctaatctaaatggacatgaggctaggttttggaagatcacagtcctgaatttaagctacattgctgacttgctatataattgaaaaattaatgcaactttcctgtttctcaaatatccttatcaataatggaataatgaaaatgtctggggtataagcatttcactctgaagtccactatttgtgtaaccttgtraaatcacttgacttttgaacctcaattcttttgtcactaaaatatggagaaaaacatttgcagttgatgctacaggctttgtgctaagatccactgaaatatatggcgctatttatattgtgtatgagttgtttccatgtggaaaaagaacaaaaatcagtggctagacatgaaaattcagcagagagcagaactttcaacaaacttattgatgatgatacagtcatcctttattggaataacattatatattgggaatacaagaagtttaatgccatgagaagttatactgggcaaatcacataccttaattttataatatgtcaaaatattattgttccggaagtgttttgagaaacaaatgagcttacacaatgaatttaatgcaattattgacacctgtgaagtgcttgagaaatagtataaattctacaaaaagtgctgggacaactggatatccacatgcaaaaatgcatttggatccctacctcacaccatacagaaaaattatctcaaaggagatcatagagttatgcaatggcttggatatggttgtctccaccaaaaccaatgttgaaacttgatctccaatgtgtcagtgttgggcctagaagaggtatttgggttatgcagacagaaccctcatgaatggcttggtgatattctcgtgggagtgagtgagttcttgttctgacaaggtaagaacagttcttgaaggaaaagattagttttgttgaggtagtttgtttttaagcaaattccctcctcatgtttggctgtattttgtacgtgcccacttcccctttgaccttcttcaccatgttttgacacagcacaaaagccctcaccagagactggtgccatgcttctgctatggcccccaacaaccatgagtgaaataaacctctttctttataatttatccagccccaaatattccttttatcacaacacaaaacagactaagacaatttaaatttcatagctaaaatcataaaaatatt

SEQ ID NO: 717237 - DNA, 1458 bp, Homo sapiens
aaaccttatcatttgaaactgaatacatcaacttttgattggtacagtaaagaaagaccccatttggcttgtacttgtagcattgcagaaaacaagttatgtatttgaggcaaattttgcttccttatctgacagttaagtctgccagctgaacgtttgacattctgtgcattgttttataataagctgtacaaaactttactcactgctaaatccaattttcatatctatgaaattctatagtgaatattacaaatctctaatctaaatggacatgaggctaggttttggaagatcacagtcctgaatttaagctacattgctgacttgctatataattgaaaaattaatgcaactttcctgtttctcaaatatccttatcaataatggaataatgaaaatgtctggggtataagcatttcactctgaagtccactatttgtgtaaccttgtaaaatcacttgacttttgaacctcaattcttttgtcactaaaatatggagaaaaacatttgcagttgatgctacaggctttgtgctaagatccactgaaatatatggcgctatttatattgtgtatgagttgtttccatgtggaaaaagaacaaaaatcagtggctagacatgaaaattcagcagagagcagaactttcaacaaacttattgatgatgatacagtcatcctttattggaataacattatatattgggaatacaagaagtttaatgccatgagaagttatactgggcaaatcacataccttaattttataatatgtcaaaatattattgttccggaagtgttttgagaaacaaatgagcttacacaatgaatttaatgcaattattgacacctgtgaastgcttgagaaatagtataaattctacaaaaagtgctgggacaactggatatccacatgcaaaaatgcatttggatccctacctcacaccatacagaaaaattatctcaaaggagatcatagagttatgcaatggcttggatatggttgtctccaccaaaaccaatgttgaaacttgatctccaatgtgtcagtgttgggcctagaagaggtatttgggttatgcagacagaaccctcatgaatggcttggtgatattctcgtgggagtgagtgagttcttgttctgacaaggtaagaacagttcttgaaggaaaagattagttttgttgaggtagtttgtttttaagcaaattccctcctcatgtttggctgtattttgtacgtgcccacttcccctttgaccttcttcaccatgttttgacacagcacaaaagccctcaccagagactggtgccatgcttctgctatggcccccaacaaccatgagtgaaataaacctctttctttataatttatccagccccaaatattccttttatcacaacacaaaacagactaagacaatttaaatttcatagctaaaatcataaaaatatt

SEQ ID NO: 717238 - DNA, 1458 bp, Homo sapiens
aaaccttatcatttgaaactgaatacatcaacttttgattggtacagtaaagaaagaccccatttggcttgtacttgtagcattgcagaaaacaagttatgtatttgaggcaaattttgcttccttatctgacagttaagtctgccagctgaacgtttgacattctgtgcattgttttataataagctgtacaaaactttactcactgctaaatccaattttcatatctatgaaattctatagtgaatattacaaatctctaatctaaatggacatgaggctaggttttggaagatcacagtcctgaatttaagctacattgctgacttgctatataattgaaaaattaatgcaactttcctgtttctcaaatatccttatcaataatggaataatgaaaatgtctggggtataagcatttcactctgaagtccactatttgtgtaaccttgtaaaatcacttgacttttgaacctcaattcttttgtcactaaaatatggagaaaaacatttgcagttgatgctacaggctttgtgctaagatccactgaaatatatggcgctatttatattgtgtatgagttgtttccatgtggaaaaagaacaaaaatcagtggctagacatgaaaattcagcagagagcagaactttcaacaaacttattgatgatgatacagtcatcctttattggaataacattatatattgggaatacaagaagtttaatgccatgagaagttatactgggcaaatcacataccttaattttataatatgtcaaaatattattgttccggaagtgttttgagaaacaaatgagcttacacaatgaatttaatgcaattattgacacctgtgaagtgcttgagaaatagtataaattctacaaaaagtgctgggacaactggatatccacatgcaaaaatgcatttggatccctacctcacaccatacagaaaaattatctcaaaggagatcatagagttatgcaatggcttggatatggttgtctccaccaaaaccaatgttgaaacttgatctccaatgtgtcagtgttgggcctagaagaggtatttgggttatgcagacagaaccctcatgaayggcttggtgatattctcgtgggagtgagtgagttcttgttctgacaaggtaagaacagttcttgaaggaaaagattagttttgttgaggtagtttgtttttaagcaaattccctcctcatgtttggctgtattttgtacgtgcccacttcccctttgaccttcttcaccatgttttgacacagcacaaaagccctcaccagagactggtgccatgcttctgctatggcccccaacaaccatgagtgaaataaacctctttctttataatttatccagccccaaatattccttttatcacaacacaaaacagactaagacaatttaaatttcatagctaaaatcataaaaatatt

SEQ ID NO: 717239 - DNA, 1480 bp, Homo sapiens
tttggaaaacatatattagctaatgtctgtaactttattaacttaaaaacaaaagtccagataaaagaattttacactctgccaagcagtggtgcccagcttataggtggttggttctgcatcttacattttgttacttgtaaggtctatgaagaaaggactcccttttctgccctgctcactgtcaaaatttcagtctctacagcatgaagactctacatatagaagacactaaaattttttttaaatatatgaatgaagcagttaatttaaggcagcaaagtcamgcctatacattatttctgtaatgtttaattttaagtataattgcttattaagtagataggatgcttagaaactatatttacctggaagtggcttaaaaatttccctatagacaaaaaatataatttgaagtagttcgtcttcaaaataaaggcctccagatggccagatacctttcatgtacatgcatcaattagactgtaccagaagataataaaaagaatcctattgttttaattatctcttttattctccaaggaacccctattcctgccaattcttacagacgttattaaggcattcagttagtttttcattcatttatttaaaaaatatttatcatgccaagtactatttaaatggtggagataccaaagtgaatgagatacatacaaggggccctagttctcaaggagctcacattcatgagaaattaagttcacacatgcaagatataccagatattaataagtattactcagatcattaaactagaatgaggccaggcacagtggctcatggctgtaatcctagtgccttttagaggctaaggtgggaggatagcttgagcccaggagttccaggatacagtgagctatgatcactccactgcactccagcctgggtgatagagtgagaccctgtctctaaagaaacaaacaaacaaaaagtagaaagatttgacctgagaataactagatagctattttagatcaggtattcatgaataaaataacacttaaagtgagatctgaatgacagaaagaaaagccatgcaaaaatcaaggagtagggtgtgcagatttcacagatggcaaatacctaacatggtgatgctaaagtcagcatgaacctccttctgtttcttgaacagaccacaggctggagaagaaaaggtaggaagaaggctggtataagatgagggtgaagagagaaccaaggccagatcatgggagctttatagccaggctaaggtgtttatgtttaattctaaatatagcagaatacattggagaagactatgctgaggaataatgtgacttgacttaaatttttaaaagactacctaactgtgtatggaaaatgaattgcatgggacaaggatggaaactagttgggagatgagttagaagattattataggagtccttgtgggaagtgttggtgactgttggagggtagtggtggtagtgaa

SEQ ID NO: 717240 - DNA, 1089 bp, Homo sapiens
  misc_feature 713, 736, 737: n = A,T,C or G
tatgctatatgtaagactctgggttaacatatgttgaagtgagaaagacattgtttggcatttaccattcattcattcatttattcaataaatattaaaggtacaattttccaggtgctctgttaggcattgggatatagacatcaataaaatagacacattccttgtcctcatagtattgcattctagtggggctcatgacatatgagaaagagagaaaaactcatgtagctctcctggggcagtagaagggccaaaggactccagtaggtgaaataaggattttgacagctacacaggaaactcagagctgccaaattctgcctttctggatgcttttctatgaatcccatccatgacaggtgaattcttatgtaacagacttgtttataagctacactaacccaaggtgtccagttgggctaccagaaataaaactgtaactccttcactcacccacattgattattcattaaagcttcacctctttcaaaatctctccctctcattcaaggagggctctgaaatttttcacacttgcttgcaaattgctattccccgagcacmgtagggcttctagtgaggagtcattgaacactcatcaacagtgggaagaaataatcaaatgtatctttaagattaatttgcaaacagggaatagagtgacttaaactggaatgaaattggaattaagaaataccacaaaggaacanactggagggatattttatatgcnnttaaattgtttggccaactagctgtcctttctcagtttagggtagtagctcttcaattctgcttttggggaccgtcttttccactctaagtcattgtgatttgggtggggctaatctaacccccactctgagggtggggttagtgaactaggtctggccaaggagaaaacatacagcgcattgttctgaaaccacaacgatcattcatagagtgtttgctggaaccatgagtgaggtatcctcttaccaatggggttgccagttggtaggatgtaaacccaaagttctgtttgctattacataagaaaaagtgactgagagtgctgtcaagtcagagagaactagagcagta

SEQ ID NO: 717241 - DNA, 592 bp, Homo sapiens
aagtaatagaatggaatggagtgtaatggaataatatggaatggagtggaatggaatgcagtggacacaaatggaatggactggaatggaatggacacgaatkgaatggactggagtggaatggacacgaatggaatggaagcgaatggaatggaatggaatggaatggaaaggaatagaatggaatggaatcagttggagtagaatggaatggaatggagattaatggaattgaatggagtctaatggaatagaatcaaatggaatggcatcgaatggaatggactcgaatggaatgtgctcgaatggaatggaatcgtatggattgatatcaaatggaatggaatggaagggaatggaatggaatggaattgaaccaaatgtaatggacttgaatggaatggaatcatatagaatggactcaaaagcaatggtctcaagttgcatttatagatatagaatggaatccaatggaacgcaactgtacggaatggaatagaatggaatggaatcaaatggaatggagcagaatggagtggactggaataaaacggactcaatagtaatggatttcaatgtaattgattcgaat

SEQ ID NO: 717242 - DNA, 592 bp, Homo sapiens
aagtaatagaatggaatggagtgtaatggaataatatggaatggagtggaatggaatgcagtggacacaaatggaatggactggaatggaatggacacgaatggaatggactggagtggaatrgacacgaatggaatggaagcgaatggaatggaatggaatggaatggaaaggaatagaatggaatggaatcagttggagtagaatggaatggaatggagattaatggaattgaatggagtctaatggaatagaatcaaatggaatggcatcgaatggaatggactcgaatggaatgtgctcgaatggaatggaatcgtatggattgatatcaaatggaatggaatggaagggaatggaatggaatggaattgaaccaaatgtaatggacttgaatggaatggaatcatatagaatggactcaaaagcaatggtctcaagttgcatttatagatatagaatggaatccaatggaacgcaactgtacggaatggaatagaatggaatggaatcaaatggaatggagcagaatggagtggactggaataaaacggactcaatagtaatggatttcaatgtaattgattcgaat

SEQ ID NO: 717243 - DNA, 592 bp, Homo sapiens
aagtaatagaatggaatggagtgtaatggaataatatggaatggagtggaatggaatgcagtggacacaaatggaatggactggaatggaatggacacgaatggaatggactggagtggaatggacacgaatggaatggaagcgaatggaatggaatggaatggaatggaaaggaatagaatggaatggaatcagttggagtagaatggaatggaawggagattaatggaattgaatggagtctaatggaatagaatcaaatggaatggcatcgaatggaatggactcgaatggaatgtgctcgaatggaatggaatcgtatggattgatatcaaatggaatggaatggaagggaatggaatggaatggaattgaaccaaatgtaatggacttgaatggaatggaatcatatagaatggactcaaaagcaatggtctcaagttgcatttatagatatagaatggaatccaatggaacgcaactgtacggaatggaatagaatggaatggaatcaaatggaatggagcagaatggagtggactggaataaaacggactcaatagtaatggatttcaatgtaattgattcgaat

SEQ ID NO: 717244 - DNA, 592 bp, Homo sapiens
aagtaatagaatggaatggagtgtaatggaataatatggaatggagtggaatggaatgcagtggacacaaatggaatggactggaatggaatggacacgaatggaatggactggagtggaatggacacgaatggaatggaagcgaatggaatggaatggaatggaatggaaaggaatagaatggaatggaatcagttggagtagaatggaatggaatggagattaatggaattgaatggagtctaatggaatagaatcaaatggaatggcatcgaatggaatggactcgaatggaatgtgctcgaatggaatggaatcgtatggattgatatcaaatggaatggaatggaagggaatggaatggaatggaattgaaccaaatgtaatggacttgaatggaatggaatcatatagaatggactcaaaagcaatggtctcaagttgcatttatagatatagaatggaatccaatggaaygcaactgtacggaatggaatagaatggaatggaatcaaatggaatggagcagaatggagtggactggaataaaacggactcaatagtaatggatttcaatgtaattgattcgaat

SEQ ID NO: 717245 - DNA, 657 bp, Homo sapiens
ggaatagaatggaattgaatggaatggaccataatggattggactttaatagaaagggcatgaatgtaatgcattgcaatgcaattgattcgaatggaatggaatcgaatggaatgtaatccaatggaatggaatggaatgcaatggaatgcaacggastggaaatgagtggaatggaatcgaatggaatggaatcgaatggaatggactggaatggaatggactcgaatggaatggagtcgaatggaatggaatcgaatgaaatgtaatccaatggaatttaattgaatgggaaccaaaggaatagaatggaatggactgtaatgggaagatatcgaatggaatggaaagcaatggactctgttggaatggactggaatggaatggactcgaatggaatggacttgagtggaatgcattcgaatggaatggaaacgattggaatggaacggaatgcaatggaatggaattgaatggaatacaatggaatggaatcggatggaacggaatggaaaggaatggtgtcgaatggaatagaatcgaatggaatggcattgaatagaatggaatggaatgtactcgaatttaatggactggagtgaaatggattcgaatggaatggactggagtgaaatggattcgaatggaatggactgg

SEQ ID NO: 717246 - DNA, 657 bp, Homo sapiens
ggaatagaatggaattgaatggaatggaccataatggattggactttaatagaaagggcatgaatgtaatgcattgcaatgcaattgattcgaatggaatggaatcgaatggaatgtaatccaatggaatggaatggaatgcaatggaatgcaacggactggaaatgagtggaatggaatcgaatggaatggaatcgaatggaatggactggaatggaatggactcgaatggaatggagtcgaatggaatggaatcgaatgaaatgtaatccaatgraatttaattgaatgggaaccaaaggaatagaatggaatggactgtaatgggaagatatcgaatggaatggaaagcaatggactctgttggaatggactggaatggaatggactcgaatggaatggacttgagtggaatgcattcgaatggaatggaaacgattggaatggaacggaatgcaatggaatggaattgaatggaatacaatggaatggaatcggatggaacggaatggaaaggaatggtgtcgaatggaatagaatcgaatggaatggcattgaatagaatggaatggaatgtactcgaatttaatggactggagtgaaatggattcgaatggaatggactggagtgaaatggattcgaatggaatggactgg

SEQ ID NO: 717247 - DNA, 657 bp, Homo sapiens
ggaatagaatggaattgaatggaatggaccataatggattggactttaatagaaagggcatgaatgtaatgcattgcaatgcaattgattcgaatggaatggaatcgaatggaatgtaatccaatggaatggaatggaatgcaatggaatgcaacggactggaaatgagtggaatggaatcgaatggaatggaatcgaatggaatggactggaatggaatggactcgaatggaatggagtcgaatggaatggaatcgaatgaaatgtaatccaatggaatttaattgaatgggaaccaaaggaatagaatggaatggactgtaatgggaagatatcgaatggaatggaaagcaatggactctgttggaatggactggaatggaatggactcgaatggaatggacttgagtggaawgcattcgaatggaatggaaacgattggaatggaacggaatgcaatggaatggaattgaatggaatacaatggaatggaatcggatggaacggaatggaaaggaatggtgtcgaatggaatagaatcgaatggaatggcattgaatagaatggaatggaatgtactcgaatttaatggactggagtgaaatggattcgaatggaatggactggagtgaaatggattcgaatggaatggactgg

SEQ ID NO: 717248 - DNA, 657 bp, Homo sapiens
ggaatagaatggaattgaatggaatggaccataatggattggactttaatagaaagggcatgaatgtaatgcattgcaatgcaattgattcgaatggaatggaatcgaatggaatgtaatccaatggaatggaatggaatgcaatggaatgcaacggactggaaatgagtggaatggaatcgaatggaatggaatcgaatggaatggactggaatggaatggactcgaatggaatggagtcgaatggaatggaatcgaatgaaatgtaatccaatggaatttaattgaatgggaaccaaaggaatagaatggaatggactgtaatgggaagatatcgaatggaatggaaagcaatggactctgttggaatggactggaatggaatggactcgaatggaatggacttgagtggaatgmattcgaatggaatggaaacgattggaatggaacggaatgcaatggaatggaattgaatggaatacaatggaatggaatcggatggaacggaatggaaaggaatggtgtcgaatggaatagaatcgaatggaatggcattgaatagaatggaatggaatgtactcgaatttaatggactggagtgaaatggattcgaatggaatggactggagtgaaatggattcgaatggaatggactgg

SEQ ID NO: 717249 - DNA, 686 bp, Homo sapiens
attttttggtttcttggctccttccacatttggggttcattttgcatatatgatcttttcacaaaacatactagtatttttcttgccagtaaaacccgtaaatggcaacttggtaaatgcacaagaaattacagtaccagaagcaagagttggcagaaattttttttaaatctaaccattcaaacacagaaattatcagatatagagtaaaaactaatgtatttcataaaaatgaaagagcttaaatatgaaaggaaaaactacattgaaaaatgagaatcaagaaaaacttctagatataaaaatacggcagtggaaatttaagctttctgtatgctttctaacaaagtattattaatatttactattgaagagaaaattaagaagaagatagactgaaaaaaccgttatctaaaagttaccccagatagataaacacatgtgcatacaataagaaggtaaaagatacagagggcaaagtgagaaaatctaattgaagtttcaaaaaaagaggtaaggcaaacttgtaagagataataagtaaggctttcccagtamagattaagacactatccaaattttatagaaacctacaaacagcaaagcaaggctgggcatagtgaaagtgcagaacaccatcctggctgagctgccttctatactgattgttcagtccttttgtgatt

SEQ ID NO: 717250 - DNA, 1273 bp, Homo sapiens
tttttcaaagctcttaacaaactatgtgtttgttaagtaaagttcaaacagattaatattgcgtgtctgtcttttgcatatacatgaatcctagattattataattggacatgtactatctccacgtcatgtcctctgcataggcagtaacaaagaactacttgtttctgttgattataattatgataatatttcattgatgcttgtctattcaatactatcaaagatagaggtcagtgttggtgtctcagacaaatacataatatcatcttgactactcttgagctgatcatatttcattgatgcttgtctattcaatactatcaaagatagaggtcagtattgggatctgagacaaatacgtaatatcatcttgactactcctgagctgatcatgttcagtggtagcaaaattcttctcatgtatatccagtagtagtcactgtggtacatcagagtacaaatattttgaaggtatgtgcacatatagtaaaaactaatttttttgttgtcatcaaggattctattgaacttgaatttcttcccagaaagagtctatgactattctaggctcaccagtcataaatcaaattatagcttttgacaagtacattgtgataatgttgtggcatgctactcctaagtctgattaaataaagcacctgttctttataaatcaattttgctaaattttggactatgaaaatactggcttagcttggtctgacattctgattttcagtgtaagattattgctgattaagaataaaatattgctgaaacctgtcggagaacctactgaagttcaactggccagaaattctttgcatcagccttcctttggcttttcaacaccatttagacattctgaattaaggtttctcaatctcagcattgctgatatttttggcagataattctttgttgttggaaccaaactgttgggtattgtaggatgtcaagcatcatccttagcctctattcactagatgccagtagaaactcccttcccaatgtgacaaccaaaagtatctccagatattgccaaatgtcctctgtggagtgggagatgtgacaaaatcactcctaattgaaccattattctaaatgatgattagcagacaataaaaatatgtcattctyctgagttgtgtatcccatttgaatggtcagcaaaacctgatgtgacatctggttgactatgagggttattcctttatttctgtattcaaccatgcaaatattgtactattttaaaaaaaactcttttcat

SEQ ID NO: 717251 - DNA, 1023 bp, Homo sapiens
gacacaggagaattgaaaattacacacaaagaaaatatttcttcctagatgtcccattttttaaagtaggataaaaattatggttaacaatcaggtaatggagtactagtgctcccaggggccaaaaaggacactgaaacaggaatccccatgtggacaaacatggcagcaaaagcgaaaggatttctgtctcctccagtgcctgaaatggggctcaggaattctggattctgtttcttccccaccccaggtgtccactgaaggtttggccaccactgctttggtgactgtaccaaacaaacttctttcccaactctcttttggaattagatggtaaattccctatggagttgcctcctgatggagatgtttctgtggataattggaggtccagcagctattattgctctccttgtgtgtgtttagccaaagaaatgacagttgtgccacagagggagcacctaygattcacaaggcagaaaagaatgccaattaatctaagggagaggacataactcccatggccaagcacatttgtcaaaacagaccacacacccactctggagaacacattcaaatccttttggtgttctctgtcctctggggtgtgaatatattggtgggagtactgagtttaatttgccttgaattcacttgaacttctttttaacaataggaaataatttaacctttctctgcctccatttctcatatatcaaagaatggcttgtcattatcagataatatcaaatatcctgaatttgcatttgttacatgtaaattaactgagcttaaaaaacatttttgtgacaagttatggagaaatttgaccaggattctggctctataaatatcacttccactcattatccatgactcacagctctgagttattctagggagcccctaaatttccaaacaatcccaaaagacctggtcgattcagtatttcttggcatacagctgataaacttttaataaaatatagtaatctcaaccatagttgagtactctctgagacca

SEQ ID NO: 717252 - DNA, 2266 bp, Homo sapiens
gtctctactaaaaatacaaaaaaattagccaggcatagtggcgcatgcctgtaatcccagctactcgggaggctgaggcaggaaaattgtttgaacccgtgaggaagaggttgcagtgagtcgagatcacaccattgcactccagctgggcaacaagaacaaaattccatctcaataaaataaaataataaaataaaataataaaataaaataaaataaagacagtgaatttcttttgtttaaaaccacccagtttgtggtacttcgttatagcaaccctagaaaactaatacagtgcctaactccaaagccttcggagggcacatcagttgaaagtctttcctagatcgttaaagaaacatttaattacacatagaagagatataatttttcaattttattagattccaagttacataaagatctccagaagacagattttwaaaaaatcagaattcttattttctgcctcagttgtggtaagcacaatttttgtaattattttaaaatgttttctaaaatagcttaattctatccttttgaattactggaataaccaatatttattctgaagcaattttcattttcaaaaaggattctttgtattttatgggtggccgttagatggctttatttgaattaccatactataagaactcctctagaagaaacagactaatactagggtgggtaaacaagacaagtttacataatataccgttactatgcagccagcattttaccagagcagaggcatgggttctcctttccaaagaaagtaatggcgatgagaatagagactcagaggaagagagagagagcgagagagaaggaggaggaggaggaggaggaaggggaggggctagaggagggggaggaggaggaggaggaatgtattaaagacttattgccatgaaggtgacaaggaaataaatgaccataagaggaaaagcagggtacatagagcagtggaaaaaaaatgagcctggagaggggagaggaggctcctggagaacctgggaaggacaggggagggaggggaagacggggaagacaagggggagagaggggagggaagaaggagaaggaaagagataaaaaggaaggcaagagagggaaaggggttgggagagtgagggggagaggggagggaagaaaaggaaaaagaagggaagaaggcaaacgggtagagagagggagaaaaagaaagggagagagagggaaagagaaggagtgaaagaaaggggagtggtacattaggagggaaaatatgctgaatatgtgtgaaggtgcgaaatttggtctttctgttcattggcatgcatagcaaatattttcctcagggtcttagtgccagctgacacagaatgaaataagacacattccatggcactttcacaatgataagtatctggtcaaaaacccaatggaggaaaatactcttataaaactctcattttttatttttctcatcttggcaaagtcttttctctgaaacaaaagagcagtgtatattcctgtcactttattttgaagagtcccttttaagagccgccacatcacatgcaatacttgatcactctcaaagtccaagttctttagtgccaagagccaagtgtgctttggcttgatctttgagaactatttctgaatagtaaagatcaaggggcatccatatggaggcgcatcttgccaccactctatctttgtgctgttcaaatattgtatttattaggaccaggacttcctagtaataaacagaatcacagcatccgataatacaaaaggggcattttaaatgtaatatattccatttataagtatatattacatattataaatataaatgtgaacataattaaacatcacatgaaaagcttccaggttcaaacaaagtgaaatcattcttcaatataatcaaaccaggaaaagcatcataattaagtaaaatgaaagtcaggagcattaaaagaacagatcccagaccagatctttattgtgctttaacaataaacatgctaccaggttatagcagatgagcatttcaaaacacaaagataaagaaagagttcttagagacaaatggttcattaggtatcatttcaactttctgtgctagaaaaatatttatatatttaatatactaagaattttgtttttgtaacacattacatatattttcaaatatgtgtaacttttttttataatctagccatcgcttttccttatattttagaatttttaaattcacttaagacatttccag

SEQ ID NO: 717253 - DNA, 2266 bp, Homo sapiens
gtctctactaaaaatacaaaaaaattagccaggcatagtggcgcatgcctgtaatcccagctactcgggaggctgaggcaggaaaattgtttgaacccgtgaggaagaggttgcagtgagtcgagatcacaccattgcactccagctgggcaacaagaacaaaattccatctcaataaaataaaataataaaataaaataataaaataaaataaaataaagacagtgaatttcttttgtttaaaaccacccagtttgtggtacttcgttatagcaaccctagaaaactaatacagtgcctaactccaaagccttcggagggcacatcagttgaaagtctttcctagatcgttaaagaaacatttaattacacatagaagagatataatttttcaattttattagattccaagttacataaagatctccagaagacagattttaaaaaaatcagaattcttattttctgcctcagttgtggtaagcacaatttttgtaattattttaaaatgttttctaaaatagcttaattctatccttttgaattactggaataaccaatatttattctgaagcaattttcattttcaaaaaggattctttgtattttatgggtggccgttagatggctttatttgaattaccatactataagaactcctctagaagaaacagactaatactagggtgggtaaacaagacaagtttacataatataccgttactatgcagccagcattttaccagagcagaggcatgggttctcctttccaaagaaagtaatggcgatgagaatagagactcagaggaagagagagagagcgagagagaaggaggaggaggaggaggaggaaggggaggggctagaggagggggaggaggaggaggaggaatgtattaaagacttattgccatgaaggtgacaaggaaataaatgaccataagaggaaaagcagggtacatagagcagtggaaaaaaaatgagcctggagaggggagaggaggctcctggagaacctgggaaggacaggggagggaggggaagacggggaagacaagggggagagaggggagggaagaaggagaaggaaagagataaaaaggaaggcaagagagggaaaggggttgggagagtgagggggagaggggagggaagaaaaggaaaaagaagggaagaaggcaaacgggtagagagagggagaaaaagaaagggagagagagggaaagagaaggagtgaaagaaaggggagtggtacattaggagggaaaatatgctgaatatgtgtgaaggtgcgaaatttggtctttctgttcattggcatgcatwgcaaatattttcctcagggtcttagtgccagctgacacagaatgaaataagacacattccatggcactttcacaatgataagtatctggtcaaaaacccaatggaggaaaatactcttataaaactctcattttttatttttctcatcttggcaaagtcttttctctgaaacaaaagagcagtgtatattcctgtcactttattttgaagagtcccttttaagagccgccacatcacatgcaatacttgatcactctcaaagtccaagttctttagtgccaagagccaagtgtgctttggcttgatctttgagaactatttctgaatagtaaagatcaaggggcatccatatggaggcgcatcttgccaccactctatctttgtgctgttcaaatattgtatttattaggaccaggacttcctagtaataaacagaatcacagcatccgataatacaaaaggggcattttaaatgtaatatattccatttataagtatatattacatattataaatataaatgtgaacataattaaacatcacatgaaaagcttccaggttcaaacaaagtgaaatcattcttcaatataatcaaaccaggaaaagcatcataattaagtaaaatgaaagtcaggagcattaaaagaacagatcccagaccagatctttattgtgctttaacaataaacatgctaccaggttatagcagatgagcatttcaaaacacaaagataaagaaagagttcttagagacaaatggttcattaggtatcatttcaactttctgtgctagaaaaatatttatatatttaatatactaagaattttgtttttgtaacacattacatatattttcaaatatgtgtaacttttttttataatctagccatcgcttttccttatattttagaatttttaaattcacttaagacatttccag

SEQ ID NO: 717254 - DNA, 610 bp, Homo sapiens
tgcctgaccagacaagcctaccacccaaacaataaaacctttaatatatttaaacaacrtaaattaaatgtataaatatagaaacccaatagttcttttaagcattccaactttcaacttaaaaatcatatgtttaggctgggcgtggtggctcacgcctgtaatcccagcactttaggaggtcgaagtaggcggatcacctgaggtcaggagttcaacaccagcctggccaacatggccaaaccccatctctactaaaaatacaaaaaaattagccaggtgtggtggtgggtgcctgtaatcccagctgcttgggaggctgaggcaagagaatcacttgaatccaggagttggaggttgcagtgagccgagattgtgccactgcactccagcctgggtgacagagtgggactctgtccccaccacaaaaaagaaaaaacctaagtttataatcacatattttaaagtgaaatcccccgactaatccatcagattatcatgtcaaattctcttaaatattataagcataataaataccaaacacatagattgttccagtgattataaaacctacacttaaacttaatcccgcaaatacaaataatatggg

SEQ ID NO: 717255 - DNA, 610 bp, Homo sapiens
tgcctgaccagacaagcctaccacccaaacaataaaacctttaatatatttaaacaacgtaaattaaatgtataaatatagaaacccaatagttcttttaagcattccaactttcaacttaaaaatcatatgtttaggctgggygtggtggctcacgcctgtaatcccagcactttaggaggtcgaagtaggcggatcacctgaggtcaggagttcaacaccagcctggccaacatggccaaaccccatctctactaaaaatacaaaaaaattagccaggtgtggtggtgggtgcctgtaatcccagctgcttgggaggctgaggcaagagaatcacttgaatccaggagttggaggttgcagtgagccgagattgtgccactgcactccagcctgggtgacagagtgggactctgtccccaccacaaaaaagaaaaaacctaagtttataatcacatattttaaagtgaaatcccccgactaatccatcagattatcatgtcaaattctcttaaatattataagcataataaataccaaacacatagattgttccagtgattataaaacctacacttaaacttaatcccgcaaatacaaataatatggg

SEQ ID NO: 717256 - DNA, 610 bp, Homo sapiens
tgcctgaccagacaagcctaccacccaaacaataaaacctttaatatatttaaacaacgtaaattaaatgtataaatatagaaacccaatagttcttttaagcattccaactttcaacttaaaaatcatatgtttaggctgggcgtggtggctcacgcctgtaatcccagcactttaggaggtcgaagtaggcggatcacctgaggtcaggagttcaacaccagcctggccaacatggccaaaccccatctctactaaaaatacaaaaaaattagccaggtgtggtggtgggtgcctgtaatcccagctgcttgggaggctgaggcaagagaatcacttgaatccaggagttggaggttgcagtgagccgagattgtgccactgcactccagcctgggtgacagagtgggactctgtccccaccacaaaaaagaaaaaacctaagtttataatcacatattttaaagtgaaatcccccractaatccatcagattatcatgtcaaattctcttaaatattataagcataataaataccaaacacatagattgttccagtgattataaaacctacacttaaacttaatcccgcaaatacaaataatatggg

SEQ ID NO: 717257 - DNA, 610 bp, Homo sapiens
tgcctgaccagacaagcctaccacccaaacaataaaacctttaatatatttaaacaacgtaaattaaatgtataaatatagaaacccaatagttcttttaagcattccaactttcaacttaaaaatcatatgtttaggctgggcgtggtggctcacgcctgtaatcccagcactttaggaggtcgaagtaggcggatcacctgaggtcaggagttcaacaccagcctggccaacatggccaaaccccatctctactaaaaatacaaaaaaattagccaggtgtggtggtgggtgcctgtaatcccagctgcttgggaggctgaggcaagagaatcacttgaatccaggagttggaggttgcagtgagccgagattgtgccactgcactccagcctgggtgacagagtgggactctgtccccaccacaaaaaagaaaaaacctaagtttataatcacatattttaaagtgaaatcccccgactaatccatcagattwtcatgtcaaattctcttaaatattataagcataataaataccaaacacatagattgttccagtgattataaaacctacacttaaacttaatcccgcaaatacaaataatatggg

SEQ ID NO: 717258 - DNA, 1252 bp, Homo sapiens
cacagaatgacaagaaaaaggcagaattgaaaaggcaaagacaaatacaaaaaaatacgttcaaggagaagaaaatatcagcattcacatacttcttcccatcagccctttgcgcagctttcgattttggcaagctcacacatgtatacatcaaaataaaaattttaaagggaaggagytgaaatttaactccctgtgttaaatattcctaaccaataattatttgggggttttattcgttatgctgagaccttctgctataatttctgaaaaagatatgaagactaaagaaaataaaattcactccagttacttgggggcatcttcttccatgttatttctatgtatttacttccattgtgtcaaagtctggatgagttatcatttcccacctatcttaggaagctgtgagcacaaaagagctctgtcaggaaggcggctacagagcacgcaaagtgcgagactgcatttgacctttgggagacacacaaaaagaaaacagtactataatacgaagaatatttaattcaagaaaaatcagtcatttcacctcaattttgaccctcttacacactaagcatcttaagagcaggaagtatacatttcatgtttttgtttatggcacttgcttttactggagctcaacacacatttattgagtcagtgactaaaaattgtttccagacaacttaatcatcagatttgtctcccaatgattttagattgctcccagaatcaaacccatccttaaagaatgagtacatttccatcattgaggatagttggagaaggctttcttcaaaggttctcatggaaacttgtaaaagaaatttcaaacatctcagcaaggttgacatcattggactgcgcctccatgtgatcactttgaagaaaacaaatcctttggttgtatagtccttcaatcaaaaaatctttgggggccgggcacggtggctcacacctgtaatcccagcactttgggaggccgagacgggtggatcacgaggtcaggagatcgagaccgtactagctaacacggtgaaacccagtctctactaaaaatacaaaaacattagccgggtgtggtggctggcgcctatagtcccagctactcgggaggctgaggcaggagaattgcttgaacccaggaggcagaggttgcagtgagccaagatcatgccactgcactccaacctgggcgacagggcgagactctgtctcaaaaaaaaaaaaaaaaaaaaaaaaaaaaaaa

SEQ ID NO: 717259 - DNA, 863 bp, Homo sapiens
gcttcttattgtagcactgccttcttagaattgaaactctaaaaatcatggaattaatgtgaagtttttaatgcagaggacagattatagaaattttctttgtacactatcactcaaacgtttgctgtagttttgagaataatattgttactgaagtggtgacccagtaatttttagttcaccagaaaacatttatagagtaagtgtagggtacagaggtgtagaattagccatgtgtggatgggacagaggagagagattctgcccctakacagcttctcctatttgtgtgtggaaattcatggatatttgtaaagcagttcattagtagttgaacactcagtaattggatattttaaagtgttggagtactggcaagataagaacaaatagacagtgaaggagtgaatccctgtctctgaatgagttgaattctgggcagtccttttagacaacttagaaaaaggaagggtagagtaatggaattgatatgttgacattggaaagcattttttttaaaaaaattaaactttaagttctgggatacatgtgcagaatgtgcaggtttgttacataggtatacatgtgccatggtggtttgctgcaaccatcaacccgtcttatacattaagtatttatcctgatgctatccctcctgtagccatcccctacccctcgacaggccccagtgtgtgatgttcccctccctgtgtcaatgtgttctcattgttcaactcccacttatgagtgggaacatgcagtgtttggttttctgttcctgtgttactttgctgagaatgatgggttccaacttcatccatgtccctgcaaaggacatgaactcatccatttttatggctgca

SEQ ID NO: 717260 - DNA, 651 bp, Homo sapiens
ttcttcttcttcttcttctccytctcccgctccttctccttctccttcttcttcttctttttttttttagacaagagtttcactctttgttgcccaggctggagggcagtggcacgatctcggctcactgtaacctctgcctctgggttcaagggattctcctgtctcagcctcctgagtagctaggattacaagcacccaccaccacacccagcgaatttttgtatttttagtagagacggcatttcaccatgttggccaggctggtcttgaactcctgactttgggtgatccaccccgctcagcctctcaaagttctggggttacaggcacaagccactgtgcctggcagcttcttcttgattgagcaactgaataaatgagaattgaaaagggaaaatttataataaggaagttatagttaacaatcatttattgtatatttcaaagtagctagaagaaaagaattgaaatgttcccaacacaaagaaaagagaattttttttttttttttgagatgtagtctttctgtgtcacccaggctggagtgcagtggcacagtctcagctcactgcaacctccacctccaggattcaagctattctcttgcctcagcttccggagtagctgggactacaggcgcacaccacc

SEQ ID NO: 717261 - DNA, 651 bp, Homo sapiens
ttcttcttcttcttcttctcctkctcccgctccttctccttctccttcttcttcttctttttttttttagacaagagtttcactctttgttgcccaggctggagggcagtggcacgatctcggctcactgtaacctctgcctctgggttcaagggattctcctgtctcagcctcctgagtagctaggattacaagcacccaccaccacacccagcgaatttttgtatttttagtagagacggcatttcaccatgttggccaggctggtcttgaactcctgactttgggtgatccaccccgctcagcctctcaaagttctggggttacaggcacaagccactgtgcctggcagcttcttcttgattgagcaactgaataaatgagaattgaaaagggaaaatttataataaggaagttatagttaacaatcatttattgtatatttcaaagtagctagaagaaaagaattgaaatgttcccaacacaaagaaaagagaattttttttttttttttgagatgtagtctttctgtgtcacccaggctggagtgcagtggcacagtctcagctcactgcaacctccacctccaggattcaagctattctcttgcctcagcttccggagtagctgggactacaggcgcacaccacc

SEQ ID NO: 717262 - DNA, 651 bp, Homo sapiens
ttcttcttcttcttcttctccttctccygctccttctccttctccttcttcttcttctttttttttttagacaagagtttcactctttgttgcccaggctggagggcagtggcacgatctcggctcactgtaacctctgcctctgggttcaagggattctcctgtctcagcctcctgagtagctaggattacaagcacccaccaccacacccagcgaatttttgtatttttagtagagacggcatttcaccatgttggccaggctggtcttgaactcctgactttgggtgatccaccccgctcagcctctcaaagttctggggttacaggcacaagccactgtgcctggcagcttcttcttgattgagcaactgaataaatgagaattgaaaagggaaaatttataataaggaagttatagttaacaatcatttattgtatatttcaaagtagctagaagaaaagaattgaaatgttcccaacacaaagaaaagagaattttttttttttttttgagatgtagtctttctgtgtcacccaggctggagtgcagtggcacagtctcagctcactgcaacctccacctccaggattcaagctattctcttgcctcagcttccggagtagctgggactacaggcgcacaccacc

SEQ ID NO: 717263 - DNA, 651 bp, Homo sapiens
ttcttcttcttcttcttctccttctccckctccttctccttctccttcttcttcttctttttttttttagacaagagtttcactctttgttgcccaggctggagggcagtggcacgatctcggctcactgtaacctctgcctctgggttcaagggattctcctgtctcagcctcctgagtagctaggattacaagcacccaccaccacacccagcgaatttttgtatttttagtagagacggcatttcaccatgttggccaggctggtcttgaactcctgactttgggtgatccaccccgctcagcctctcaaagttctggggttacaggcacaagccactgtgcctggcagcttcttcttgattgagcaactgaataaatgagaattgaaaagggaaaatttataataaggaagttatagttaacaatcatttattgtatatttcaaagtagctagaagaaaagaattgaaatgttcccaacacaaagaaaagagaattttttttttttttttgagatgtagtctttctgtgtcacccaggctggagtgcagtggcacagtctcagctcactgcaacctccacctccaggattcaagctattctcttgcctcagcttccggagtagctgggactacaggcgcacaccacc

SEQ ID NO: 717264 - DNA, 655 bp, Homo sapiens
gtattattatctcaaaataagaaagttttttaaagtaatgcaaccgaaaaaaaatagaattggaggaatgaaattgaaaatgaagaaacaggagtctgcttgaatgctacttctagcataggatcagcttttgacacacttagccatagttaggcttcaacatcttagagcacacattctttttctggaatatgccttgcttccccgcacattagcctaagaatgctggcagtttcaaagaagaccaaagagtagacagatggtgctatggaaaaaaattcatagacctaaatatgaaaaacctggcagagaaagaatgtcaccaaccaaaatcagaattatgttttagtgaaattgaagatttattttgcctagcacacttgaaggcttacctaggaattatggaactatactatgaaaagtaaacagtttaaagaagatttaaaaaaatagctacatttggcaaaaaaaaaaaaagcacaaagaagtgctgacctagtacataattcagtaaatctttaaactcaatgcctgtgaagaatcaaaaaaatgcaaamttataaatgaaattaaaatttttttaagttcatgtagttctaaaacaggtagaacagataattatgtattttagactaatggaaaacagcattctaca

SEQ ID NO: 717265 - DNA, 1203 bp, Homo sapiens
ttcattccaggctttcactttggcacttttgatacagagaaaaatgccatagtttccccctggccccacccttgtatttaatgggagagacagagggcacagatgggttggtgatgacagcatggtgtggtgttgtgttaaaggaaagcacagtgctgcatggggacacagaaggggggcattccacacaaccttggaagtgaggccttacctgagtcttagaggatgaggaaggatagcctggtaaagaaggaagaaaagggtcttctgggcagtggggctgtatcctatggtgaggtcaaagatgctttttcaaaactttttttttctccatcttcagactgacaggaggaggcctggtgttggctgggatagtgtttcttgcatgttcactgaactcatctgacaacttagaatcttttttgctctgggtgattatttaattctctggaaaatacctgcagcccactgctcaattgatttcagggaagatggagatgtgtgtgctatatggatagagccttctctaggaatcctggttttctctttaaagaactcataacaaactttataatgaaattgttctggttaaaaagaatccctactagctgataaaagcttgaatagtctttgggatttccctctaagatttattttcgactgagagaactgaggtcggaagatgacagtttacaatggtggttgaaagggaattgttaaagaaatgttctagcaaaatggagtcaaactcactagcctggtgctattctttgaagtgaagacccagctttgatcctttcagactgcaagrctgtaccaacagagattcacaacatccagtgtcttatcatttatcttgctcccaaagtagaccattcttccttctgcttagccacatcttgtattttcacttctggctttctcaacatgccagagagagtaagaggtattactaacaccacaaacaacagatgctctttctgacaattggaaaaattgccaaaggtaaaagaagccttttccaatatcacactaaggtattggaatgcttttttcttccttttaatgaaacaaaaaagagaaaaagaggccctagggttacacactgccaactctcagcaagcccaggattttagccatgagaaagctatatttcttctaaacttgaaacttgtgttttcacgagggttagtattaaacact

SEQ ID NO: 717266 - DNA, 1795 bp, Homo sapiens
acttcacctgtaatgtgcctgttaggactcaggcacccatgttgtcacaaagccatctcttgataaaaggaggagccctgggctgaggatgcccacatttagcgttttttttctcagaaatactctgccactcccagagccaacacgtacaaatagcatttgctgcacaccctccacttcccatgtgtcatttggcaaggctgccccgcttgtcaagagggctatgcaaagtcaccaaggtctgtaactccagttagaactcaaacactaatttttcagcagcagagtctgttgtgagaaaccttgctcccaggtgcacagtgaacacagagggtccttctctaatgggactcccttgacttcttccactcaaagacgcctggttccagcctgtgaggctgtgcatggggtcagctccaatgctcggaacgtcccgcctccacccagatacacactgaccacatgtgtctggggctcctgagtttttctctgcccatagctcacccagggcatgagtgccttctgcagtttagtttatagttgatccatgctggtgaggcctgcctctgagtcagggccaccattagcctggccttgaggggacatgcaccttcatgcctgagctgaccgtagggtgtgtgtggagggggcgcttttggtgtccagaggcacttggcatcacattatatccatttaaatatgttttcccttgattctgaatgaactgagagaaacaaaaaatactaatcaaaatggaatgcaaatatccaaggctcctttctctcagaaaatgccctattttcccccctccatggtactaatgttttagaaatagaaggcacctctggagagacaggataataccaaattttcaaatctgtagaaaatgagtacaggggtaggcggcactattagtgctactaaaaataagctttgggaagctacagtaaatggaaaaaccagaagagtcattccttttttaaactgtactgaaaatcctgtatgttcaggagccattttctccagagattccaacaataatacttggaattcaatatccatttctacagtggtctctctcccattttgtccccctcccttcaccactgccccagtaatgcaggctaaatattaagcttattacccccacagaaagcgtggttctgccaactgaacattgtgccagataccaagaattgaggcgattatgccctgcatgctgcttggtatactgaagatgggcgttcttttactttatttttatttcatttcattttttttttttattaaagagagttctactgtagacaaacaacccagggattgtttgaagaaaagggatatcccctcagacctggggatgcatttctccctcagtggctaaacctctttgtcattattacctccagagagagacacccagggatctgctcacaccacccatctccaggcaagttgaagcatgtcctggaaagccacctgaaccctggacagctccgcctgactagagaaatggtggcaaaggaattcttgctgtggwcccagcggtgagcataacagagttacctctctccaccccaaatattcagactgcaaggacactggctcccaagcttcgacctgcttggagttccattccaggtactctgctgatgtctcggccagcctcagccacagactcccagctgagctgagctgttctgaggagtcaggaaatttgggggattttaacagagaaacaaagcctggcaccccatgtgtcaaagctctggatactagctctttagaacctagg

SEQ ID NO: 717267 - DNA, 1795 bp, Homo sapiens
acttcacctgtaatgtgcctgttaggactcaggcacccatgttgtcacaaagccatctcttgataaaaggaggagccctgggctgaggatgcccacatttagcgttttttttctcagaaatactctgccactcccagagccaacacgtacaaatagcatttgctgcacaccctccacttcccatgtgtcatttggcaaggctgccccgcttgtcaagagggctatgcaaagtcaccaaggtctgtaactccagttagaactcaaacactaatttttcagcagcagagtctgttgtgagaaaccttgctcccaggtgcacagtgaacacagagggtccttctctaatgggactcccttgacttcttccactcaaagacgcctggttccagcctgtgaggctgtgcatggggtcagctccaatgctcggaacgtcccgcctccacccagatacacactgaccacatgtgtctggggctcctgagtttttctctgcccatagctcacccagggcatgagtgccttctgcagtttagtttatagttgatccatgctggtgaggcctgcctctgagtcagggccaccattagcctggccttgaggggacatgcaccttcatgcctgagctgaccgtagggtgtgtgtggagggggcgcttttggtgtccagaggcacttggcatcacattatatccatttaaatatgttttcccttgattctgaatgaactgagagaaacaaaaaatactaatcaaaatggaatgcaaatatccaaggctcctttctctcagaaaatgccctattttcccccctccatggtactaatgttttagaaatagaaggcacctctggagagacaggataataccaaattttcaaatctgtagaaaatgagtacaggggtaggcggcactattagtgctactaaaaataagctttgggaagctacagtaaatggaaaaaccagaagagtcattccttttttaaactgtactgaaaatcctgtatgttcaggagccattttctccagagattccaacaataatacttggaattcaatatccatttctacagtggtctctctcccattttgtccccctcccttcaccactgccccagtaatgcaggctaaatattaagcttattacccccacagaaagcgtggttctgccaactgaacattgtgccagataccaagaattgaggcgattatgccctgcatgctgcttggtatactgaagatgggcgttcttttactttatttttatttcatttcattttttttttttattaaagagagttctactgtagacaaacaacccagggattgtttgaagaaaagggatatcccctcagacctggggatgcatttctccctcagtggctaaacctctttgtcattattacctccagagagagacacccagggatctgctcacaccacccatctccaggcaagttgaagcatgtcctggaaagccacctgaaccctggacagctccgcctgactagagaaatggtggcaaaggaattcttgctgtggtcccagcggtgagcataacagagttacctctctccaccccaaatattcagactgcaaggacactggctcccaagcttcgacytgcttggagttccattccaggtactctgctgatgtctcggccagcctcagccacagactcccagctgagctgagctgttctgaggagtcaggaaatttgggggattttaacagagaaacaaagcctggcaccccatgtgtcaaagctctggatactagctctttagaacctagg

SEQ ID NO: 717268 - DNA, 1438 bp, Homo sapiens
tttggggtttttatgaatagtggctctgtgaatattcttatacatgtcctcaggtggatataagtatggatttctgttggatatatcctggcagtggaattgcaggggcatggggtaggcatatgtgaaccaggagctccagttttctttctatcacccatttgtctctacaaataggttaagaaattaaccactttatgtgattagttctataagactggagaataacacagggtcttagraggctatgaggtagaaccaagactgcaatttaggccttgatattctggtcctgggttgatcatgagccccaaggcccaatccagaccttcaaggcttcataaatcttccttgaagtgagtttaatgcaagaaaagaactccactgaggtgtcctgcatctgtagttttacacaatagcatgtcatttcaggacaccaaaagtcatctcacagagagaaacatgaacataattgtttaaactatcagcaaatggaaaaatgttatgaagatttcaataaaattcatcttcacatttggtgtacctgaagatttgtcaatattatagcaatggtctcatcacagtttcatctttgaggatgaacaatatctattgtaatagctcgctgttaactatgaacccatggtatgtaggcttctccctggggtatgtggtaatccacatctgtcatatcttagtgcccagcctgttgttcctagcacccagtttgggtactggtaaagcttggtgactttaggcctaagagagacctaaaatgggtggcctactgacagttccaggtgacagccatggtctgaggatgtgggtgatatgataggaaaaaatgtgggcttcacatacaaatgggcataggttcaaatcccagatctacttattctttgacgttgaaaacattacttaattctgagtctgcttctttaagacaaagatgatgagattagccttagagaaatattagagaaaggttaacttagatgatagaggtggaagataaaatggctgattcgtagatagaaacatagatacttagatatatagatagatacatagatagatgcatacataattccaaggtctccggaagctttcttttctgcctccaagtcctttggatgtttggttagtggggtgagatagtgctgctgaagctgtgagggagctgataaaggaagaggcctcttctctttcctattcctttccactaaaactgagccttcttccccttctccttcgtatgcagttagcacagtggagtgtgtgatccttcctggctcttctgtacgttctataagattttatttcctgcatggttgaacaccaagcatgaagattattatttgtttatttgttattgattagttgacagccctacctgcatccagaaattttatactaaaaacataggtacaaaaagatc

SEQ ID NO: 717269 - DNA, 1438 bp, Homo sapiens
tttggggtttttatgaatagtggctctgtgaatattcttatacatgtcctcaggtggatataagtatggatttctgttggatatatcctggcagtggaattgcaggggcatggggtaggcatatgtgaaccaggagctccagttttctttctatcacccatttgtctctacaaataggttaagaaattaaccactttatgtgattagttctataagactggagaataacacagggtcttaggaggctatgaggtagaaccaagactgcaatttaggccttgatattctggtcctgggttgatsatgagccccaaggcccaatccagaccttcaaggcttcataaatcttccttgaagtgagtttaatgcaagaaaagaactccactgaggtgtcctgcatctgtagttttacacaatagcatgtcatttcaggacaccaaaagtcatctcacagagagaaacatgaacataattgtttaaactatcagcaaatggaaaaatgttatgaagatttcaataaaattcatcttcacatttggtgtacctgaagatttgtcaatattatagcaatggtctcatcacagtttcatctttgaggatgaacaatatctattgtaatagctcgctgttaactatgaacccatggtatgtaggcttctccctggggtatgtggtaatccacatctgtcatatcttagtgcccagcctgttgttcctagcacccagtttgggtactggtaaagcttggtgactttaggcctaagagagacctaaaatgggtggcctactgacagttccaggtgacagccatggtctgaggatgtgggtgatatgataggaaaaaatgtgggcttcacatacaaatgggcataggttcaaatcccagatctacttattctttgacgttgaaaacattacttaattctgagtctgcttctttaagacaaagatgatgagattagccttagagaaatattagagaaaggttaacttagatgatagaggtggaagataaaatggctgattcgtagatagaaacatagatacttagatatatagatagatacatagatagatgcatacataattccaaggtctccggaagctttcttttctgcctccaagtcctttggatgtttggttagtggggtgagatagtgctgctgaagctgtgagggagctgataaaggaagaggcctcttctctttcctattcctttccactaaaactgagccttcttccccttctccttcgtatgcagttagcacagtggagtgtgtgatccttcctggctcttctgtacgttctataagattttatttcctgcatggttgaacaccaagcatgaagattattatttgtttatttgttattgattagttgacagccctacctgcatccagaaattttatactaaaaacataggtacaaaaagatc

SEQ ID NO: 717270 - DNA, 1438 bp, Homo sapiens
tttggggtttttatgaatagtggctctgtgaatattcttatacatgtcctcaggtggatataagtatggatttctgttggatatatcctggcagtggaattgcaggggcatggggtaggcatatgtgaaccaggagctccagttttctttctatcacccatttgtctctacaaataggttaagaaattaaccactttatgtgattagttctataagactggagaataacacagggtcttaggaggctatgaggtagaaccaagactgcaatttaggccttgatattctggtcctgggttgatcatgagccccaaggcccaatccagaccttcaaggcttcataaatcttccttgaagtgrgtttaatgcaagaaaagaactccactgaggtgtcctgcatctgtagttttacacaatagcatgtcatttcaggacaccaaaagtcatctcacagagagaaacatgaacataattgtttaaactatcagcaaatggaaaaatgttatgaagatttcaataaaattcatcttcacatttggtgtacctgaagatttgtcaatattatagcaatggtctcatcacagtttcatctttgaggatgaacaatatctattgtaatagctcgctgttaactatgaacccatggtatgtaggcttctccctggggtatgtggtaatccacatctgtcatatcttagtgcccagcctgttgttcctagcacccagtttgggtactggtaaagcttggtgactttaggcctaagagagacctaaaatgggtggcctactgacagttccaggtgacagccatggtctgaggatgtgggtgatatgataggaaaaaatgtgggcttcacatacaaatgggcataggttcaaatcccagatctacttattctttgacgttgaaaacattacttaattctgagtctgcttctttaagacaaagatgatgagattagccttagagaaatattagagaaaggttaacttagatgatagaggtggaagataaaatggctgattcgtagatagaaacatagatacttagatatatagatagatacatagatagatgcatacataattccaaggtctccggaagctttcttttctgcctccaagtcctttggatgtttggttagtggggtgagatagtgctgctgaagctgtgagggagctgataaaggaagaggcctcttctctttcctattcctttccactaaaactgagccttcttccccttctccttcgtatgcagttagcacagtggagtgtgtgatccttcctggctcttctgtacgttctataagattttatttcctgcatggttgaacaccaagcatgaagattattatttgtttatttgttattgattagttgacagccctacctgcatccagaaattttatactaaaaacataggtacaaaaagatc

SEQ ID NO: 717271 - DNA, 1438 bp, Homo sapiens
tttggggtttttatgaatagtggctctgtgaatattcttatacatgtcctcaggtggatataagtatggatttctgttggatatatcctggcagtggaattgcaggggcatggggtaggcatatgtgaaccaggagctccagttttctttctatcacccatttgtctctacaaataggttaagaaattaaccactttatgtgattagttctataagactggagaataacacagggtcttaggaggctatgaggtagaaccaagactgcaatttaggccttgatattctggtcctgggttgatcatgagccccaaggcccaatccagaccttcaaggcttcataaatcttccttgaagtgagtttaatgcaagaaaagaactccaytgaggtgtcctgcatctgtagttttacacaatagcatgtcatttcaggacaccaaaagtcatctcacagagagaaacatgaacataattgtttaaactatcagcaaatggaaaaatgttatgaagatttcaataaaattcatcttcacatttggtgtacctgaagatttgtcaatattatagcaatggtctcatcacagtttcatctttgaggatgaacaatatctattgtaatagctcgctgttaactatgaacccatggtatgtaggcttctccctggggtatgtggtaatccacatctgtcatatcttagtgcccagcctgttgttcctagcacccagtttgggtactggtaaagcttggtgactttaggcctaagagagacctaaaatgggtggcctactgacagttccaggtgacagccatggtctgaggatgtgggtgatatgataggaaaaaatgtgggcttcacatacaaatgggcataggttcaaatcccagatctacttattctttgacgttgaaaacattacttaattctgagtctgcttctttaagacaaagatgatgagattagccttagagaaatattagagaaaggttaacttagatgatagaggtggaagataaaatggctgattcgtagatagaaacatagatacttagatatatagatagatacatagatagatgcatacataattccaaggtctccggaagctttcttttctgcctccaagtcctttggatgtttggttagtggggtgagatagtgctgctgaagctgtgagggagctgataaaggaagaggcctcttctctttcctattcctttccactaaaactgagccttcttccccttctccttcgtatgcagttagcacagtggagtgtgtgatccttcctggctcttctgtacgttctataagattttatttcctgcatggttgaacaccaagcatgaagattattatttgtttatttgttattgattagttgacagccctacctgcatccagaaattttatactaaaaacataggtacaaaaagatc

SEQ ID NO: 717272 - DNA, 627 bp, Homo sapiens
agccacacaggatttaatgcaaatagaaaagaaaaaaaaaaaagaaacagctctcagtgcatcagcttcttctcatctataaatagccaagcaaatcaggatgagctaatgttgtaattatcttgattttcagaatttttgccactcagaagagatttttagagtctcctccctgctctttataattatagctgctgttccaacctctgccaagggttggtggttgcaatgtgatatttgccaggtggctgctctgcagcacagaaaattaccaagtttccttggtttgtccggttttgtcttgtaagatccaattcaaaacttcagagggcaacaattcatcatcttgtgacagccacttcttcacttttccttgtaacttctagactctggcgctgtggggtcttcctgtacttgagtaaatgacatgactgagataccagagtagctatgcttcactttgcacagaatcacagacaccgatgttgggaaaggattagaaaccaagcgttgtgacagcccagaagctgtattccttccaaacgtggaatgccatgtttgctgatttgtattttctttgtgtgttcaagaactayactgcagagtaggaaaggagggtagagaatg

SEQ ID NO: 717273 - DNA, 591 bp, Homo sapiens
acacacacacacacacagtttttgatgctagtttgactagatataacaaaataattttctcagtattttaaaggatatttcatattatcttccatctgtaggtattgatgactggaattcatagtaaaaatttatactaatttgtatgtaaagcaatttcatcttccttgaaatatcagtggagttctaacttgtctagaatattattttttatttattcttagaattttgaaagaaaattttaagatatttcagataagggaaatacacttctatcacattgttaattgtcttattctctctttttagarctcttattaaatagaacaattctccatatatcttaatattttccataattttcttttgctttggactctagggattattttcccaagttaatttgtgattattaattaggtatgtagttccattgattctattttttagtcatttttaatttttatgatatttttaactcaaaataaatatttcgcatgcttctttacttcttgttttatagacttagtaactatatcttcctgagaatcctgagtaaactttttaaagttttatattatgtgtgtaagt

SEQ ID NO: 717274 - DNA, 625 bp, Homo sapiens
ctctgctaggcagtagggatagaaggtgtctcttctcaagagcttccaatctaatagggaaggaagagaacacagacaatgcaaggactgtgagtatggaggagaaaggaatgaaatgcagagtatactgactcttaaacctataaccccatttcttcttgtcatccttgtttctcttaagtctcagatatttggcctcagtgtagtgtagataataaacctatccatattcttattggtataagaaggttgtagcatgtggtggttttgtgggygcagatgggtgtgaatcctggctttaccacttattaaaaatgtgaatttgtaccaccgttttgcatacatacacatatacatatatgtatatatacacacacacacatgcccagtctctctctctgtgtgtgtgtgtgtgtgtgtgtgtgtgtgtgtgtgtgtgcagttatattaaatgagtcattgtatataatgcctgacatatatcagtacagggcctgacacatatttcagtaaatattaaatattaatattatgggaacatttctcatactgatggtaaaagaaaactggtgggtttggggcagggagatgttaataaatgggtggtaagggaaacaaactaccc

SEQ ID NO: 717275 - DNA, 625 bp, Homo sapiens
ctctgctaggcagtagggatagaaggtgtctcttctcaagagcttccaatctaatagggaaggaagagaacacagacaatgcaaggactgtgagtatggaggagaaaggaatgaaatgcagagtatactgactcttaaacctataaccccatttcttcttgtcatccttgtttctcttaagtctcagatatttggcctcagtgtagtgtagataataaacctatccatattcttattggtataagaaggttgtagcatgtggtggttttgtgggcgcagatgggtgtgaatcctggctttaccacttattaaaaatgtgaatttgtaccaccrttttgcatacatacacatatacatatatgtatatatacacacacacacatgcccagtctctctctctgtgtgtgtgtgtgtgtgtgtgtgtgtgtgtgtgtgtgtgcagttatattaaatgagtcattgtatataatgcctgacatatatcagtacagggcctgacacatatttcagtaaatattaaatattaatattatgggaacatttctcatactgatggtaaaagaaaactggtgggtttggggcagggagatgttaataaatgggtggtaagggaaacaaactaccc

SEQ ID NO: 717276 - DNA, 665 bp, Homo sapiens
aaattggaaatcatcattctcagtaaactatcacaaggacaaaaaaccaaacaccgcatgctctcactcataggtgggaattcaacaatgagaacacatggacacaggaaggggaacatcacactctggggactgttgtggggtgggggaaggggggagggatagcattaggagatatacctaatgctaaatgaccagttaatgggtgcagcacaccagcatggcacatgtatacatatgtaactaacctgcacaatgtgcacatgtaccctaaaacttaaagtataattaaaaaaaaaagttaggcagaagctatacatttgttaacttaaataaaactttcacataccttattgtttttgaaaatttgcaagcctagaataacaaaataatggaggaccatatgaagacttgacaataaacaaactgtaatagatttgagcctacgasgtattttgttttcaccactcagagaaaaagataaaccagaataatgctggaaattgggttgtcctgctccttctatggtttcttagattcattctccaattaatgtaatttcagttaactaagctactttttttatcggctgattgttaaccagtcacaatctgtattttgtgtttctgacagtaaccactcactgcattcaactgcagaagcaa

SEQ ID NO: 717277 - DNA, 2850 bp, Homo sapiens
ttctcttcagatgttttcttacagtaaattaataatataagcttcactcacaagataatatctgcagtctcaaccttatgggtgttctagttgcagagtcccctgacacttgagtgttctgctgttggtttgaattcaaagtacctaacctcaagtcatcatgtatcttcttgctttccagacattagttatttaaactttctgtgtttcagcttcctaatctgtaaaatggagacattaatagtacctatctcatagacttgttgggaatattacacacacacacacagacacacacacactcagtgctagccatcactattacgccttgacactacattgctaattaaattaggctgtacttatcctcaccctctgaaaatgcggtggaaataacacaatttggaattattatcagtccaaatccatcagccttgtgacccattgcaagtctgaatttctccatgaaatctctcctgacaaattcaaggccaawtaatttctcttttttaatgccagtttttgcactagtcatatacagtaatttgatatgtatttttctccaaaccaaactgtaggctcttagtggtatgaatttgcactcctgctgtcttaccctcagtgctttgctatctatagacatgacaagcacttagtagataatttttcaaaggaaggaatgaacatatattcttagaatgtcccccaaagtgtcgcattcatggatatataatcattttcctgcatagttagatgtgtaagcaatattaaatctagagccaagtgcaactgaaaaaattaattaaatacatgtgtggcacagatagccagtgttacctagaagtgcatgcatttttcatttactctcatgggtgtaattgtgaactgatgcatactcataaggtgtctgaaactgggataggttgccctggatcatctccctgggtagcgtagctataactaaaatcatagttcagatcctctaacaaaaaagctgacatgagccaaggttgttaatagtccaaagatcttttgcatcaaatttttggtctctataatcccaaattttgacaacaaataaagggtgtagtggagatcatgaagaataggtgttttaggttaattgatatatctttaggtattcattcaactacactgattttcgaacatatatttaccttctaagtattcttcaataatagattacaacatctaaatgtatgttgccaatagccatacattgtaaccactagccgcatggggctaactgagcacttgaaatgtgtctacatagtccaaatttagacatgttgtatattggtaaaagatacttgatttcaaaaactttctacaaaataagaatgtaaaatttctcattaatattttcaatacataatgatgttgaaataaaaatattttgaatctattagattaaataaaatgtattattaaaattaatttcacttttttttactcttattgatgcagctactagataattttaaattacatatttggctcacatcagtattcctgttgtacaggctaaattaaatcaaagacatatttgaggtttttctttttaaaaggaacatgtattaacacaggagataattgctcagaactaagcctgtggtttgcattcctgttcctaggctttattcagaatctacattctctttgccttgtctcctgagcagaagcttctgctgtgccacaaaccatctcagtcataccacattctcgtcccagtctgtatccttagtaatcagcaccagggcaggccaggaatatggcaaagccttgtaataacttgtctcatctccacctccatcttacctatcatggtggtcttgtatgttcatgactgtacgtcagccctgatttaagaactgctgtgatgatttagctagagaaatcattttgtgctagtcttctaatactttatttagatccaaataccacatttaatgatacttattagacttgtacatgttatatgatacaactttctctgagtaagattctacctgacttactggttttagttcagctgttccaatgaatttagagacaagccttttgcaatttaatattcttcttgcttaacacctttggcatcacttgaaaaactaaagggatgcattcttccactgacatgtgacttctccaaaaatgtccaatggttatgggaagagagattctaggactgatagaaacttattttaaacctaaaggaaaccctattcctgtccattgtaataacacaggactgtatattcttgccttttttcctttcctctctaatagtaacatcaactttccttttgtgtgtgtggatgtgtgtggatgcccacaatatgttgggcaccttatcaggctggatcagtgagaatgaagagtctccagaagcttgtttcagtttacacttaactagcagagtatactatcatgggtagatacgggatatcctctgcccatttactctttactactgaacaccctgttcttcaaataaaacttccaagataaataattctcttaaggagatgctagtgagcaaaacatactggagaattaaagacaagaacctaatactcttggtttacttctttaagcattaacttagtcactgacataatctcatggtgctaactttcagaatcttattaccactgtttacagaggccttctgttattttacatgggcatggagctgacgaatggaggtagaatacattttacatagttgctgctaatatttatctaaagaaatgaacatctcttttatgatacagtagtgtgcatttctattcttgtttcttattccccaaattgtcctaagattgc

SEQ ID NO: 717278 - DNA, 1399 bp, Homo sapiens
tacatctgactactattgtgtagcctgagccattctgaatttctacacaataaatgcagtttatgtcttttgggtcttaatagtctcaaaaatatttcatcaaggtataaagaacacaataaatacttttacagtaaaggaataatatttaaatatttcccyaagagtcctaactccccactctttgttatatgctattgcagtttttatagcataggatctttatgatacttagaccttttgacaagttttaattaacaaaatagaggttttagtacacccaagtaaatttccaatttatcagagggtataaatatagtaggacagaatgtttcattttctctcaaaattctttcagtgactttttgctgccactctttcctcttataaatatggcgtgtagctttgggttgcattgtttataatatctgactcaatttattttgtatatcatttattatattttatctggctgtttttgtatgtatgatcaacaatttatgccactgtgctagctctggtagctctctgtctagatggtgagatagaacaggtctcatctggaaagagaattattgacaccaatggtgggaaataattatttttggcttataatacaactgttcagtatagatattatagcaatatctttcttgtttgaaactctagaattaatctattatgctttttatttttattagagttcttgtggttaacttctttccgtggatggtagttgataagagactaaaatatggcaggtgcattaatggaactttggcctgtttgtgcatataggagaaggttcctttaaccctataattttatagcctgttttttccacttaatatgctgtcagcatctttctaaggcagtatccagacttcttcttcttctttttttttttttttttttttttgagatggagtctcactcttcacccaggctggagtgcagtcatgatctcggctcattgcaacctttgcctcccaggctcaagtgactctcctgccttatcctccttagtagctgagattacaggtgcacaccaccacgcctgactaatttttgtatttttagttgagaaggggtttcactatgttgactaggcagatctcaatctcctgactttcggtgatctgcctgccttggcctcccaaagtactcaggttacaggcatgagccagcacacctggcctagtattcagacttctgaaccatcacttatttatggttacatagcattgcattgtatggttataccacaatttattttactaattctgttttcaattttttttttgctgttataaagaaagatctcctttttaaacttgtctttattctataggataggccttttaaaatgggcttaccatgcatatggccagatcttttc

SEQ ID NO: 717279 - DNA, 950 bp, Homo sapiens
tttttttttttccttcatagagccaggatctctctatgttgcctaggctagccttgamctcctaggctcaagcaatcttcctgcttcggcctctctaagtgctgggattataggcatgagcctctgcacccagctttactctttaatttttattttttgagagtttgagaaggattagtgttaattcttcttaaatatttggtagaattctctagtgaggccatctgatcctgagcttttctctattgggaggtttttgatcactgattcaatcgtattagttataggtctgttcagatttttaattccttcatgattcacatatgaaacattaataaatactcatatatagtatttggaacatgaatatatataacattatatatgcattacattaataaatatagcaaggtgtagacaactttattcatcagaattcccttcagagaatactatgtgtgtttggaagaaatgttttcatgagaaaattggtgtagagatgagacatcataatcatgctcaaacagaaaaagatggtcactgactgcaatatcctaacctcctaagacaaccattgacaaatggcagacacacaggaaatatttgttaaatatgtgaactatggagtattggttctattaactggagaatctgttactttgctgaatctttgcaatgagttttcataggcaaatttgagggcaggaacagagaaagctagtttgatctgcctaataataaagggtagaaacatttgaagttcctgaggaaatctgagagtgagagagtaaaaagataggttaggtaggcatttgcataggcagtcagtccatggaagagaagcagagagagagagaaaaggtcattcagagtggagagtaacgttgaaacaggacttcagagagcatacacagcataaagaaattttaaagttgcttgctgtaggatag

SEQ ID NO: 717280 - DNA, 950 bp, Homo sapiens
tttttttttttccttcatagagccaggatctctctatgttgcctaggctagccttgaactcctaggctcaagcaatcttcctgcttcggcctctctaagtgctgggattataggcatgagcctctgcacccagytttactctttaatttttattttttgagagtttgagaaggattagtgttaattcttcttaaatatttggtagaattctctagtgaggccatctgatcctgagcttttctctattgggaggtttttgatcactgattcaatcgtattagttataggtctgttcagatttttaattccttcatgattcacatatgaaacattaataaatactcatatatagtatttggaacatgaatatatataacattatatatgcattacattaataaatatagcaaggtgtagacaactttattcatcagaattcccttcagagaatactatgtgtgtttggaagaaatgttttcatgagaaaattggtgtagagatgagacatcataatcatgctcaaacagaaaaagatggtcactgactgcaatatcctaacctcctaagacaaccattgacaaatggcagacacacaggaaatatttgttaaatatgtgaactatggagtattggttctattaactggagaatctgttactttgctgaatctttgcaatgagttttcataggcaaatttgagggcaggaacagagaaagctagtttgatctgcctaataataaagggtagaaacatttgaagttcctgaggaaatctgagagtgagagagtaaaaagataggttaggtaggcatttgcataggcagtcagtccatggaagagaagcagagagagagagaaaaggtcattcagagtggagagtaacgttgaaacaggacttcagagagcatacacagcataaagaaattttaaagttgcttgctgtaggatag

SEQ ID NO: 717281 - DNA, 670 bp, Homo sapiens
agatctttagtaatttgccactccttgccataatagcttaaatgagcattaacatcttctttaggagcacattaatatttgctggatattttaacccaaatagaattactaggcgtggttttagtaaacaattactgggtaaagtgccaaaagcagacaataatataaaatattccaaaagctttgctacataactattaagctggagaaaataaatgaaagagtctccaaaaatgtgttgttcagtcactacctggaatggcttaatatagtaaaatacaaaaacaatacygcataatatattttattgtatttcttaaaagtaactcaattatagaatcatacagtcaaagcacattgtgattatttggttagggtgaacataagcgtttaaattattcttttcattttgggcccaaaagggggtgacagagagtagttggacattaacttttaaaaaaattttcccttgagataatataacaacttttattccatcataactcaaacttaatatcaatatggctttcccaattagatcaaccgatgtgtaacagattcattggcagcagatgagttggtgacatgagactaaagcatgaagggtaaagaagttacttaaaatcaatttatcttggccaaaatttttacgaggtttaaatatttttta

SEQ ID NO: 717282 - DNA, 670 bp, Homo sapiens
agatctttagtaatttgccactccttgccataatagcttaaatgagcattaacatcttctttaggagcacattaatatttgctggatattttaacccaaatagaattactaggcgtggttttagtaaacaattactgggtaaagtgccaaaagcagacaataatataaaatattccaaaagctttgctacataactattaagctggagaaaataaatgaaagagtctccaaaaatgtgttgttcagtcactacctggaatggcttaatatagtaaaatacaaaaacaatactgcataatatattttattgtatttcttaaaagtaactcaattatagaatcatacagtcaragcacattgtgattatttggttagggtgaacataagcgtttaaattattcttttcattttgggcccaaaagggggtgacagagagtagttggacattaacttttaaaaaaattttcccttgagataatataacaacttttattccatcataactcaaacttaatatcaatatggctttcccaattagatcaaccgatgtgtaacagattcattggcagcagatgagttggtgacatgagactaaagcatgaagggtaaagaagttacttaaaatcaatttatcttggccaaaatttttacgaggtttaaatatttttta

SEQ ID NO: 717283 - DNA, 670 bp, Homo sapiens
agatctttagtaatttgccactccttgccataatagcttaaatgagcattaacatcttctttaggagcacattaatatttgctggatattttaacccaaatagaattactaggcgtggttttagtaaacaattactgggtaaagtgccaaaagcagacaataatataaaatattccaaaagctttgctacataactattaagctggagaaaataaatgaaagagtctccaaaaatgtgttgttcagtcactacctggaatggcttaatatagtaaaatacaaaaacaatactgcataatatattttattgtatttcttaaaagtaactcaattatagaatcatacagtcaaagcacattgtgattatttggttagggtgaacataagcgtttaaattattcttttcattttgggcccaaaagggggtgacagagagtagttggacattaacttttaaaaaawttttcccttgagataatataacaacttttattccatcataactcaaacttaatatcaatatggctttcccaattagatcaaccgatgtgtaacagattcattggcagcagatgagttggtgacatgagactaaagcatgaagggtaaagaagttacttaaaatcaatttatcttggccaaaatttttacgaggtttaaatatttttta

SEQ ID NO: 717284 - DNA, 1036 bp, Homo sapiens
aacttcagcaagctccctgttgctgtcaggtgctgggcagacagttctctagacagccatcacaaaggcattttggaatgtactcagtgactggtggcatggccattctttttcagttacaacaaacttgctttctattgtcatttgtgggtttctcatgtttatcagaataaatcggtacttgacaagttaggaactcaactctggggagtactgcttgaacaagtttagcagcagtaaaagtttatgatatattgaatgcaaaaatggcccttgttctccacccatctctgtgttcgcctctttgtaatgtgactttgtagctcctccctcacttcttgaatctggctggccttgggacttgccttggccaattgactgagatggccaagtgacaatgtattactgccttacatgcctctactctctcagcccattctgccaaagagcctacctagcctgatggagtttgagagaccacatagagaaaaattaagttgtcccaagagaagccatcctagaccagcatacagccagatgactctcatatatgagacagctcagtgaagatcagccagagactcccaacgcgatcacrgctgcatgaaaatttcagctcagaccagaaaagggactcggctgaaccacagacttgtgaaggatagtaaatgtttattatatagaattttagggttttaaaaattaccaatagttgaataatacaatactgtttatgggggcactgctttttgttttcttaaattaacctagctgctgttgtaatctataaaaatgccctttctttagtcctcagcagcagattaactccaagccagttctcctacttgaacttaaaacagatcttttacagctccatcatcagagctgctgaagcatacaatctggaagggcagaggccagatctttctatgcactgtttagtcagcacattgcaaattatctgcttcacaagatcattcaataaatatgccaaatgaatgaaggctgaaagtgcttcttgacaaggagcaataca

SEQ ID NO: 717285 - DNA, 607 bp, Homo sapiens
  misc_feature 129, 131: n = A,T,C or G
tcctactaatcttactgtcagtatctctttctgcatgaccattgtcccctaagtatactacttattctgataatagtctgctattgcaccttgaaagtctcttttgcattctactgggaaagtatactntntttatttatctgattaatgtatgtytttcctatagaattgcaagctctatgaagccagagagctcatattaccagtatctacatagaagataatcaataaatgcttattgtctgcctgtctggcttggacaaataacatactgaacttcagtttcttcagatccagtctgtcaacttcatggaaccatggagtccaatatacataagggcacttcaaaacctttaaagtatttatcaaataggaaggatttcttaatgcatcaaacagtttcctgatacaatagtattatcagcatatattattggcagagaatacgttccaagacatctagtagctaataccaaaatgtatatatattatgtttcttcctattcattacatatctataataatctaatttataaactgggcacagtaagagattaacaacaataaataataaaataaaacaattataacaatacgacagcaccac

SEQ ID NO: 717286 - DNA, 607 bp, Homo sapiens
  misc_feature 129, 131: n = A,T,C or G
tcctactaatcttactgtcagtatctctttctgcatgaccattgtcccctaagtatactacttattctgataatagtctgctattgcaccttgaaagtctcttttgcattctactgggaaagtatactntntttatttatctgattaatgtatgtctttcctatagaattgcaagctctatgaagccagagagctcatattaccagtatctacatagaagataatcaataaatgcttattgtctgcctgtctggcttggacaaataacatactgaacttcagtttcttcagatccagtctgtcaacttcatggaaccatggagtccaayatacataagggcacttcaaaacctttaaagtatttatcaaataggaaggatttcttaatgcatcaaacagtttcctgatacaatagtattatcagcatatattattggcagagaatacgttccaagacatctagtagctaataccaaaatgtatatatattatgtttcttcctattcattacatatctataataatctaatttataaactgggcacagtaagagattaacaacaataaataataaaataaaacaattataacaatacgacagcaccac

SEQ ID NO: 717287 - DNA, 607 bp, Homo sapiens
  misc_feature 129, 131: n = A,T,C or G
tcctactaatcttactgtcagtatctctttctgcatgaccattgtcccctaagtatactacttattctgataatagtctgctattgcaccttgaaagtctcttttgcattctactgggaaagtatactntntttatttatctgattaatgtatgtctttcctatagaattgcaagctctatgaagccagagagctcatattaccagtatctacatagaagataatcaataaatgcttattgtctgcctgtctggcttggacaaataacatactgaacttcagtttcttcagatccagtctgtcaacttcatggaaccatggagtccaatatacataagggcacttcaaaacctttaaagtatttatcaaataggaaggatttcttaatgcatcaaacagtttcytgatacaatagtattatcagcatatattattggcagagaatacgttccaagacatctagtagctaataccaaaatgtatatatattatgtttcttcctattcattacatatctataataatctaatttataaactgggcacagtaagagattaacaacaataaataataaaataaaacaattataacaatacgacagcaccac

SEQ ID NO: 717288 - DNA, 875 bp, Homo sapiens
ttttattaagaggccagattatttaatttctctaaatatttcctcttttyttttttttttttttttttttttttttgagacggaaactcgctctgtcacccaggctggagtgcagtggcgcgatctggctcactgcaagctccgcctctcgggttcatgccactctcctgcctcagcctcccgagtagctggaactacaggcacccgccaccacgcccagctaattttttgtatttttagtagagacagggtttcaccatgttagccacgatggtctcaatctactgaccttgtgatccatccaccttagcctcctaatgtgctgggattacaggcgtgagccaccgtgcccggcctaaatattcctttttaaaaactaagtaaataagcaaaaacaatacactcttttaatcaataaattttaccaaagtagcctgtgatttgtagagtagtattgctcatgcgcttctactgttaaagaggaaacatttttgaagagtctatataaacagcccctaattattggctagacacccacagaagccacctgtgtccctttaagctgagcctaagcaatatttggagacaggactgttttcttgtgggaatactggcccagtaatggtgcatctgacattttaatagaacctgaaaatatatgttttatattaaattctacattttaaaatgctggcaggctattatcaaaaagacaaaaggtaacaagtgttggagagaatgtggacaaaagagaactcttgtacactggtggtgggaatgtaaatttgtacactcattatggaaaataatatggaggtttctcaaaaaaattaaaaatagagttaccatataattcagcaatccttttgctgggt

SEQ ID NO: 717289 - DNA, 875 bp, Homo sapiens
ttttattaagaggccagattatttaatttctctaaatatttcctcttttcttttttttttttttttttttttttttgagacggaaactcgctctgtcacccaggctggagtgcagtggcgcgatctggctcactgcaagctccgcctctcgggttcatgccactctcctgcctcagcctcccgagtagctggaactacaggcacccgccaccacgcccagctaattttttgtatttttagtagagacagggtttcaccatgttagccacgatggtctcaatctactgaccttgtgatccatccaccttagcctcctaatgtgctgggattacaggcgtgagccaccgtgcccggcctaaatattcctttttaaaaactaagtaaataagcaaaaacaatacactcttttaatcaataaattttaccaaagtagcctgtgatttgtagagtagtattgctcatgcgcttctactgttaaagaggaaacatttttgaagagtctatataaacagcccctaattattggctagacacccacagaagccacctgtgtccctttaagctgagcctaagcaatatttggagacaggactgttttcttgtgggaatactggcccagtaatggtgcatctgacattttaatagaacctgaaaatatatgttttatattaaattctacattttaaaatgctggcaggctattatcaaaaagacaaaaggtaacaagtgttggagagaatgtggacaaaagagaactcttgtacactggtggtgggaatgtaaatttrtacactcattatggaaaataatatggaggtttctcaaaaaaattaaaaatagagttaccatataattcagcaatccttttgctgggt

SEQ ID NO: 717290 - DNA, 856 bp, Homo sapiens
ttactgcatccctaggaagctgttacattggtcagtctcagaataaagcctgacttaatttaagacacacaaaaaatctcagagtcagagatgttatactttattaacctaattaatgtgtctcatctacttgtcttgcatccccagtgctaaatgaaagttcagtgaaggtaatggccaagttatgtaatcaaccaagtgtccgtcacccaatgagtgcataaagaaaatgtgatatatctgtctagatacagatacacgctcacacaatggaatactattcagtctttacaaagaggaccttggctcactgcaacctccatctcccaggttcaagcaattctcctgtctcagcttcccaagtagctggrattacaggcatgtaccaccatgcccgtctaattttgtatttttagtagagacggggtttcaccatgttagtcaggctggtctcaaactcctgatctcaggtgatccgcctgccttggcctcccaaagtgctgagattacaggtgtgagccactgtgcacagcctagtaatttacatttctaacaagctcttaggtaggtgatgctgtggggaactgcacatagtcttttggatatttgctgatagttaagatcaaacctagtcttcactctgtgtgatattcattaagacacataacctctctgagccttggttttctaaaatgtaggctcctcagctcataggattattgtgaaggaaatgagataaagcatgaaatacactgtagttcattcttattatttttgttattagcttgtttggaaagtcactttagcacatatgagatctgttagtgtgtctcgcataataaaaaatattagcaca

SEQ ID NO: 717291 - DNA, 1498 bp, Homo sapiens
  misc_feature 807, 838, 839, 840, 841, 842, 843, 844, 845, 846, 847, 848,849, 850, 851, 852, 853, 854, 855, 856, 857, 858, 859, 860,861, 862, 863, 864, 865, 866, 867, 868, 869, 870, 871, 872,873, 874, 875, 876, 877, 878, 879, 880, 881, 882, 883: n = A,T,C or G
  misc_feature 884, 885, 886, 887, 888, 889, 890, 891, 892, 893, 894, 895,896, 897, 898, 899, 900, 901, 902, 903, 904, 905, 906, 907,908, 909, 910, 911, 912, 913, 914, 915, 916, 917, 918, 919,920, 921, 922, 923, 924, 925, 926, 927, 928, 929, 930: n = A,T,C or G
  misc_feature 931, 932, 933, 934, 935, 936, 937: n = A,T,C or G
atttcttacaggataggaaatatataacacatcataattctcattgggtgcttatattttagtttgaatgagttatctgattctatctgttctacgaaaatatatggtatatattagtctgttctcacactgctactaaagacaacctgagacgaggtaatttataaaggaaagaggtttaattgactcacagttccacatggctgaggaagcctcacaatcatggagaaaggcaaagaaggagcaaagtcatgtctgacatggcagcaggcaagaacatgtgcagaggaactcccctttgtaaaaccatcagatctcataagacttattcactgtcacaagaacagcatgggatagacctgccctcatgattcaattacctcccacctggtccctcccacaacctgtgggaattatgggagctacaatttgagatgagatttgggtggagacacagccaaatcgtatcatggtataagtggtagactcatttgctagctccaatattttctcccccagtagcatgatccttgccaaatgaccttgcaagtctcgtatctttttttttttttttcttaagagacaaggtcttgctctgtcacccaggctggagtgcagtggaacaatcacaactcactgcagcctcgacctcctgggctcaagcaatcctcacacctcagcctcctgagtagatggaactacaggtttctgccaccacgccctgataattttttttattttgtagagacagggcttgctatgtttcccaggctggtctgaaactcctaggctcaagcaatgggggtnctttaagagtcgcaccagaagggctgtcaannnnnnnnnnnnnnnnnnnnnnnnnnnnnnnnnnnnnnnnnnnnnnnnnnnnnnnnnnnnnnnnnnnnnnnnnnnnnnnnnnnnnnnnnnnnnnnnnnnntacttgtcaaaattcttccatattcttcattttactagcatatcctttacccaatacctcaatttaaaatgatttatttaccttcactcttagtgttctatttttatctctgtcatgcagtccagactttcttctgtcttgttttatgaatattagtgcacatgataacaacctggtggacgaaaaggtttctgaggctaagtctatgtctttatcatttttgaatcctccatggtaactagcatagtcaggtgttcaataaaattaggttaataggccaggcggtggttcacgcctgtaatcccagcactttgggaggctgaggcgggcagatcacttgaggtcaggagttcaagaccagcctggccaatctggtgaaaccccatctctactaaaaawacaaaaaaaataaattagctgggtgtggtggcgggctcctgtaatcccagttacttgagaggctgaggcaggaaaatggcttgaacccaggaggcggaggttgcagtgagccaagatcgtgccactgtactccagcttgggtgacagtctcaaaaaaaaaaa

SEQ ID NO: 717292 - DNA, 1486 bp, Homo sapiens
gagaaaatacatgtttgatctttaagccactcagtgtgttatttttctatggtagccttaaaaaacgaatacatactgaattaaataacctctaagacatctctggttttttgaaaactatactgctgcaaagggaagacactgaagagaacagtgacactgaagtcaaataagttttaaagaactggatgaattttgaatatgtttctcaacccacggatagatcaatcagcattagttagaagcctctcaggtttgatgagcttgaacaaaacttccgctcaaagcattagctgacaactaagtaatatgacacattgggtgctgcttcaaaagttggcctaagagataaaaataaaaaacaataacaataatagtaaatagcaggggctatcgttttttgagaggaggaagattttgcagtttaagtccaggcaaattacttaaaaaaaaaaaaaaaaaaaaaaacccgaaaaaacaatttacagtatggagttgctttaatgaattatctaaaatgtccagtttatgggaaacgggcagtaaggttgaataggaggttttagcctcatacactaaaggaaacatcaattttgacaaccagccattgagaagaataactttgtggattccggggtctagcttagaggttttaagcaccacagtggcaccaaaaatctgattaaatacataaaaaaggtattagttaacagagcagtttcattttactcacattactcctcccccaaagtggtacagtttgatgctgagagaggcccctttggcctgcaatttctcccacagggaaaggtgagtgcaaaatgagcgcccagctcacccagtcttttgggaaaccatccaggaggcccacttctgtctcttccctcacatggaacactgagagaatcagcaaagctgaatgtctcaggtatggcaatttcctgatgataggaagagagagaatgggtgggwgtacacagcaggcagtgtgcagttgtaaacagcaggccacagattctgctaactgggtcacagacaccaagaggtgtcacctacagtggacagttttccacatattcctatatataacttatatgaagttccacagatagcatataaatatcaggagcagagaggagaagattcacaaccttaaacatttcagggcactgattcaggaaaaataaatggaagactgacagcactgggcctaattttgtgtgttctagagagccgcacaatcctaaaactttcccctagaagaaaacaagaagagtagaatgggtgtaaccatagaaaagatctaagagatgtcaagaatctcttgctggtctcactagtgaagacctttctctctcaaagccagtcagtaaaaactggaggatgtgactgctttttcaaatacaaagacagcaatgaaaggaacatgaagtatcaagaatatattacaccaacaaatgaacaagataaagctccagtggttggt

SEQ ID NO: 717293 - DNA, 581 bp, Homo sapiens
tgagcacggagaacattacactaagtaaaataaatgaatcacaaaataaggtacttacagtttaatcgcagagaaataaaacagaatggtggtttccagaggatggtgggagttgaaaatgggcagttgttatttaattggtacagagttttagtcttgcaagttgaaaggactctggagaggaatggtgatgatgttggcatgaaaatatgaatgtacttaataccactgtacacttactaaaggttcaaaatagcaaatgttattttatgtgtttttactacaataaaaatggaaaaaatataggaaaacaaatgtgagaatttttaactattttagaaagcaggaatatttgctaagactcaaaaaccataaggcataacaaggttaacaaattcaaatagaaactaaaatggaggcattttcttmaagaaaaatattattacacagtcaaagaatggttaataattgaaattgaaaaaatatttacaactattacaacaaaaataactcaattaaacaatgggcaaatatttacaacaatttataaaagagtaaatacccaaatggccaataagtaa

SEQ ID NO: 717294 - DNA, 581 bp, Homo sapiens
tgagcacggagaacattacactaagtaaaataaatgaatcacaaaataaggtacttacagtttaatcgcagagaaataaaacagaatggtggtttccagaggatggtgggagttgaaaatgggcagttgttatttaattggtacagagttttagtcttgcaagttgaaaggactctggagaggaatggtgatgatgttggcatgaaaatatgaatgtacttaataccactgtacacttactaaaggttcaaaatagcaaatgttattttatgtgtttttactacaataaaaatggaaaaaatataggaaaacaaatgtgagaatttttaactattttagaaagcaggaatatttgctaagactcaaaaaccataaggcataacaaggttaacaaattcaaatagaaactaaaatggaggcattttcttcaagaaaaatattattacacagtcaaagaatggttaataattgaaattgaaaaaatatttacaactattacaacaaaaataaytcaattaaacaatgggcaaatatttacaacaatttataaaagagtaaatacccaaatggccaataagtaa

SEQ ID NO: 717295 - DNA, 953 bp, Homo sapiens
gttttgattatctagagatgagttattgtgcctttatcagaaacagaaactgtattcccccaaaggtagagctaggattcaaacctaaatgagaggagtaagtcacagccttttgctttcaacagcaaagttgtcattggttgtctgtacagatcaaggattcacaagtcatcctttgcaaacagaagcctggagcctccarttcacagaaaacctctgacctccttaccccctgcttctacagggccaccctggttcaaagcgccaagctgctgacagcaacataagttgccactgggagtcctgtgtccccagaggaaccagaggagttgagtagcatctaattattcagtatagatatggacgctaacttggacttagtacatgtattacatggactccctccaaatcaccatgccaagcctctggaggacagaagaatataaattgtttaactcctcttaatctcagtttccatctatgtatacaggaaataaaaataatttgtactctggttcaaatcctgatgctcccacataccagctgtgtgtccttgggcaagtcacttccctctctcagctgcatctctttctctcaagattctgagcagcaagtgagaagatattagctacaaaaacacttgcaaaatgagacaccaagagttatgtgaaggttagtgattataattcatcaaaactatttttattttatttggaccatttatctaagcccattatgatatcttgacagtacaacttagttaaagaacattgctctggagtcagatgcctgagtccaaacagcagctctgctatttactagcagtatgatttttcacaagttacttaacttgtatatgcctcagttttctaatttgtaaaactgggataacaacagtatctatgtcatagggttactgtgaggatgaaatgagttaatgcacactttaaata

SEQ ID NO: 717296 - DNA, 1148 bp, Homo sapiens
tagcctgtcaccttcttctctccacctttgagtcttcctttgtttgtttgatgtataatgtccattgcatctagttgctcttggtgagaggaatagggaaagcacatctaattcaccttccaggaagcacaagtgccactctaatatctcaacctctctgcagccacatcaggtctgaacaaagaagatggcctctttccagacacctcaagctaaagaagggttctgaagccacctgcacagctcactgctgtggcctctctcaaccctgtcctcagttctctaactgtcttgatgggacaccatttctggtttgattttagattgattatttggtttgttttgttgtttttttcagagaggatcatgtcatttctcagaagtaaggacttaatatttcccaagtcttagaatgaattcccagtatttttagtaacwcagaggcattaaataaataagttaattcaactaagctatcctaaataaataataacaattcagtctagttaccctaaacaaataagttacctaattcataaataaaaggaatgaataataagcacacaaataaatactcagctaagctaccctagatctcaggccacccatgatattgatcaatgcatattagtgaacattaaagtgttaatgtggcagcaccaggctacctctttttacttctgtgtaagcattccaggtgcttgtataaaggtattttagtttccactaaaatatcaccagtgaacagcttatatgattgtcccaatggaaacgacctctcaatagcataaagctcacctcctgagatggagggttatccctgatgtgcaggagagagaaatgttccagcataattccaagtatttcctcagagagtcagtggccccatcctaaagtgtatgtgaacaagcttagaaaaagaatgcaatttgacaaagaggtttttgattctcaaggtgttagtttctacagaagagaattttaaaaatataacaattggtgcatacctgaggttaccaagataaaatctcctagggactaaccatttgctgagtgcatttgaatgtgcccggccccgctgtgctgagggaaatacaagtgcattgcagagaaaagccttcctgcccatccttgctcctgggcccctg

SEQ ID NO: 717297 - DNA, 1117 bp, Homo sapiens
tgagtggttattttcttttccccacattttaactcgttttgcagcatgattatattactttgatcattaaaaaaatctaaatgattttattggctggcaatatcttgcatatattcttaaacaaatcacacacaaatcatatcttcatgtgcagggaattgttggagagggttccaggggatctgtgacttctgggctaatgctgaccatgcctctcctctcatgattcctacttagcacccatgtcacaaaatccagaaatctgagaaaatcaaattgttatctgttggagacatgaaataaaactgtcttttatccataaaatcaacaacacaaattgcaaagtgtccatcatggctctgtttgttttctcagactataaattgttggatttttttcaaaatagaaaataaaaacaaagaaaaagcatgagcaccatctggkgggaaagtttaccattaacatattcaatgtatgtgtatcttacccccaaccacccaaacacacaccgtgccactcctgacaccactccttttgccgttccgcctcctttggaggcctagtggcacagaccagacccctcccgggtcgcgcctgaccctaccttggggtgttcctcgggcacatgctgcttggagaacttggcgagctggacaagctctgggatgacctccttgacatcgtagctgttggtgcagttcaccagggtggtggccaccgagtacaggatggtcttgtcactggtctggaaggcacagggttggggagagggaaagcagaaaggaaactttaggacaaacctctgcttccaggatgctccctcacgtggccggcaggttggtgtcggaggagtgcagctggtagggcccattctgaggaaagacagcagcgcaggagaggaacggttctccccataaaggcaggcagcagtgtctcctgcaccctccacagtagctctgacagtatgaataggagctgtcccacaaagatcctcgctttgcgcctcttccacaagcccagtctaacactttcccatccaactggagatggggtgggagctggacattttccggtcctggtgaaaatctctcccatgcttcctccatttactggtaga

SEQ ID NO: 717298 - DNA, 1547 bp, Homo sapiens
tgctgggattacagtgtgagccactgtacccccagccattatttgtacttaaatgtcacactgggaatttgataatgaaagggaatttgtattgttgcaattttaggtttttaaatattgttgactttttcttatttggaatcatgctgctaggctcattgtatacccattgttgttgagctctagttaaggactatatgtcctaatatttttctcaggacagtcctagtttatggtttatgtgtcagagtaattattgatagctctcccttccactctcaaaagtgtgccagtttgttttataaatgccaaagtccaaactctaggtgaggtggtaggaaaaagatcagggagcaatattttgcytaagacatagtatggccatgacccatttcagaggttttttcaaagcataagatgaatagcccaccagaggtcccacgagaaaattcaaaggacaagatgtcattgtatctgattataactgtaggtcctttacctacagggtcctttacctacagggtcctttacctactggcaccaagataccaggttgcagcagagaaagaggtgtaatcatagggcctttgaagaggaaatgggagaaacctcaaatctgtctccctgaggagtttggggatagagtttttaagggttttggagtgggccaaagcatggagattgttgatcagttgaaaagtgcagagtgaagtcaagggacagggagataaggaaactgttttctcatgctgatttggttcctctgtgggggtctttaaactggttggcatcagctgtttccctgggatttgggatctaaaaaacaccttaagcaattcataagcaaaagccatatgattctaacatcagagatcctaactgtaggaacagtgggaatgcaaatggtcagtatctaatgttactttcagttacaaggaagagggcaaagcgcagcctgattaactatagctgcttaattataactatatttctgtccagaattcttgttaaccctgtgaggacagcttgataattacagagatttgtagtacacatacacatagggtgactctgagggtagtggctgatgtagggacaatggtttcttttttaacagctttattgagatataattcacataccaaacaatttacacatttaaaatgtacagtttggccaggcactgtggctcacacctgtaatcccaacactttgcgaggctgaggtgggcaggtgtcttgagctcaagagttcgagaccagcctgggcaatatggcaaaacccagtctctagagaaaatttataaattatctaggcatggtggcacacacttatagtcctaggaacttgggaggctgaggcaggaggataacttgagcccaggcggttgaggctgcagtgagccatgttcatgccactgcactccagcctgggcaacaaagtgaaacctatctcaaaaaaacaaaaacaaaaacaaaaacaaacaaacaaacaaaagccagtacaattcaatggtttttagtatattttaaaagctatgcaaaata

SEQ ID NO: 717299 - DNA, 638 bp, Homo sapiens
cctggccaacattttgatttcagccttgtaaaattttgagaaagaagaccctgctaaactataaccaggttcctgacctagaaaagctgggaaataataaatatttgttgtttacaccttctaaattttgacataacttgttatgcagtaataaacaactaacagtttaagcactagcatyggttcatggagtgctcttcccctactctagatggcaagtgctcccaggaaaggaattccatctaccctgatcaataatgtatcccccacattgtgtatataataggttattaccgaattatttttgaaaagattaataagctactagccaaatccaattatgaccagaatacctgataatgagctataaattgagaattaagaaatatgagggttggtaagtggtatgtagaaaagctaatgtattattaggagaatgatagatgacatataaatagatggaggaggagtttgaaagtaatagtttaaataataataatgtatgggatttattcttgatggacacatagacataaatgaacccaaacatgtatacagtaagtcctgagttaatatcgtcaataggtgcttggcaactgcaagtttaagtgaaatgacctatgatgaaaccaatgtta

SEQ ID NO: 717300 - DNA, 484 bp, Homo sapiens
ttccttcagaggctggaaaaggctcttgtctccaccactgcctgccagccgaggtggtcagcatgcacttaggggcctctggtgtaaaagttgttgtctctacccagtcctcacatggggccgagatgtgcccaccctgaggggcctgtgcctctctcccatgcttcctccttccccarccaagggtcctctggatgatgtcatgggttgaagtgtgatctccaaattcttacgctgaagtcttaacccctggttcctctgaatggcctgattgggaaagagggctactgcaggtgtaattaagttaggatgaggacacattggaatgtgcatgtgtggggccccggtccgatatgactgatgtccttgtaaaaacaaggccgcgtgaggactggggggacactgcaagaagctgaggggctactagaagctggaagggagcgatggtccttccctagcatcttagggcgggtgtggccctgcc

SEQ ID NO: 717301 - DNA, 2440 bp, Homo sapiens
tcattcctaaatgttctttaagagctttagtttttcctttgcattccttttaatgtagcagtatttcattggatttggttcagtgattgtgtttcagacatagtgatatatcataggtttgccttcaaatcaaatacagttatgatcctgaaggaaattacccttataggccaaactctgaaaattgtactctatcctaaaaggtcactgaaatttctgaactaatctttataatacatgaataaacctaaacattgttttttacaaagcaaggcccctcactagtgtatgtcactggatatataagtagacatctgtgaaatttatttttgaagtattattttggtttcttggtacgtaaattggattactttattctaagccaggtttgtaagtagtttttaaaagtcatttgaacccattcagattactcaggctctttcactgtgttatctcattttgtactcttcagttttgctaaatgtaacaagaggagactttaacagaaaaccttaaaatgttttctgcaataaaaagatcagttcttcatagaaatccaatagcattgtaaaattaaaactaatgttccagcataataatgtccataaacttgcttttcaatatctcataagggagtgtttagttaccaactgctttaggccatgaaatgttttggggcaaagaaaattgaagggattgttttggtattatgttgctcttaacagatttttcaggaatacatagaactgtgttagttagctgacatcttttctgttatttaagttgtatttaattgggaaatattatatcttgtcatttgtatctgattgttttattggagaggtttttttcctgaaaatttgtaaaataagacaagaagactaaatggcttatctaataatttttttccctatagaaatctagattttgattcatacttaatgtgtagatcagcctttccactaaggttctcaaaggtggctggccttctttactaactgaaagcaggttcagcagcctcttatagctttcatggaaagagtttaattgaccaagatagactgtgtgttcgtcagccttaagaagagagatttgttttatttatatgctatgacataggatatgatgggattgtctttatgagaaaaatagatcytaagatccagcattcaccttgtgacctccaggaccctgtgcaccaaccctcttgcatatggtgaccaaattcatgtatgcatcttccttgtaggctctgtcagttatgttcccgacatggtaaagatagttttaaatctcaagtgtcctagcatagctaaacaaatggaagatatggttatatgtcctcctccttttcccatagcatttacattcttccataaccatttatgcttcttatctattttaggaatggcacctttataagtaagtgaaagatgagagactggaaagtccatactttgaattaactcttctcttccatgaacgtaatgctttacttcctaccacattttggagaacttagcactacccttttttatagaacatctttactctctctttatttaatgactaccactggtattttttaatatgtaaattcaatagtttttctttttccttttttagtggtacaggtaatagaagaatagaaaaagagagttgagggagggacaagaactactttgaaattagagaatacatttacagcctcatatgttcagttcatttttatatatatagttctgggatatttttggaataattatgattttctgagaatcatgctgacagaaaacatcgtctctttcttttaagatgttacatttcaaggtacccccttatgtttgcagtagtcatacttccggaatctgggggacaatttcaatttttttaaaagatactctgccccaacataagatcatgggccattgaattcaggctgagttttattttttgatagctttattcatgattactgttatatataaagccaaatatagcatgaatcatacatggttagcttttcaccctaattctcattagtacttatttgttgaatgtctgaatctaaaaagggaatgtgctaatagaatattactcaatatccatataaaacttaaatatctatacaaatacagtttctttaaccaagcaaatgattaatgtttaggagcatagttcatctcaaaatgctctgctctgatagagattcaagaatacttgatttcttgggagcctacatgtgatctaaaatgaaggcaggggaatggaataattctgatttaaatgtagttgtaagaatagtttggcagtacatatcttgattgaacttgatagaactgtcatttattatgggagcctgttgtctaggtcttactcatttatgcctagtgtattgttagtaatctgtgtaggagtgttaaatataaaggaaagaaat

SEQ ID NO: 717302 - DNA, 1133 bp, Homo sapiens
tgggcactgtaataaatactgtggagattccaaggaggaaaaagacctgatccctattgtagcactaagaaaggaccttgtaatgccaacctcatatggaatctgttcctaagaattgctacaaaacgttgtacagggtaggggaagacttagaggaaggtatctgattcatttcatgcatccaaattctgccttacataacagggtgctttacgtgttaactggggttcagactatcctttacgccaggagtcagcaagttttttctttaaagggccagatagtaaatatttccatctttgctggccacacagtttctgttgcaaccattcagatctgccattgtggcaagaaataagtcatagacaatatgtaaacaaatggctctggttgtgttccaataaaactttatttataaaatatgcaactgaatggatttggcctgggagccatagtttgacaacctccgctttaggcactgggaagtcattggtggtttttgrgcaggaggctcttgattaggttgtttttcagaggaggctttgtttgctgacacattgccgtgtcccttctctgaacttagtaataataacctttactgtttacaccacactttacaacttataaagcatttcaaatcccatgtaatccccactagggaggctgggaaacattatccctgttttaaagaagacgaattcaatccagaaggactcgatgacttgtcctaagtcacagaggtagactggaaccctgtcttcctgctgccagcctcggggctctggtggagaccccgactcttcctccatttagctggccagacatctaattactttatgtgttagtcctgtttcctcagttacaggatgcatttctaaagtgtagggatatgtcttccactctttttctatcctccaaagtcctaagcacagtgctgagtctttaaggagccatttactgttgatcattcacctctgggccttgtggttcaaagtttgttttccttccatttgtcttcagttaattgcttggtcaaatctgttggtaagggttattccatactcatctgaaatcaaagggttaatgcttgtggtccaagtatccacttatctttccaatttgaaatttggaaa

SEQ ID NO: 717303 - DNA, 1133 bp, Homo sapiens
tgggcactgtaataaatactgtggagattccaaggaggaaaaagacctgatccctattgtagcactaagaaaggaccttgtaatgccaacctcatatggaatctgttcctaagaattgctacaaaacgttgtacagggtaggggaagacttagaggaaggtatctgattcatttcatgcatccaaattctgccttacataacagggtgctttacgtgttaactggggttcagactatcctttacgccaggagtcagcaagttttttctttaaagggccagatagtaaatatttccatctttgctggccacacagtttctgttgcaaccattcagatctgccattgtggcaagaaataagtcatagacaatatgtaaacaaatggctctggttgtgttccaataaaactttatttataaaatatgcaactgaatggatttggcctgggagccatagtttgacaacctccgctttaggcactgggaagtcattggtggtttttgagcaggaggctcttgattaggttgtttttcagaggaggctttgtttgctgacacattgccgtgtcccttctctgaacttagtaataataacctttactgtttacaccacactttacaacttataaagcatttcaaatcccatgtaatccccactagggaggctgggaarcattatccctgttttaaagaagacgaattcaatccagaaggactcgatgacttgtcctaagtcacagaggtagactggaaccctgtcttcctgctgccagcctcggggctctggtggagaccccgactcttcctccatttagctggccagacatctaattactttatgtgttagtcctgtttcctcagttacaggatgcatttctaaagtgtagggatatgtcttccactctttttctatcctccaaagtcctaagcacagtgctgagtctttaaggagccatttactgttgatcattcacctctgggccttgtggttcaaagtttgttttccttccatttgtcttcagttaattgcttggtcaaatctgttggtaagggttattccatactcatctgaaatcaaagggttaatgcttgtggtccaagtatccacttatctttccaatttgaaatttggaaa

SEQ ID NO: 717304 - DNA, 1041 bp, Homo sapiens
ttgctttacattaggttgtacttttcagtttctggctgttcttacatatttttttttatagatctgaaccaacttgtcatatcagaaataatcccattgtattgggattgaatttatacaattatttgggggaatattaacatcttcataccactcagtgtttctcactaggaaaatattatgttcctcttccattcaggtttttttcctatggcctcagcaaagatttatagttttcttcctaaaggtctaccatgcttgcttrtaagtttattcccagatacttgatggttctgatggataacgtatatcagcttcttcttattgcacttttaattgattattgctgggtttatcagagttctttgttgtaacccacagatactaactctgaccaacataagctagaaggaaactgaatggaaacaaacgggggcattggttcaattaaaaggaattgaagaatcagactcagaatatggactacttttataataataggaaaagccaatctaataaatgaaagtaaagtacattagttaggaaatttaaaatgggaacacagtaatatccttattatataaataactcctacaattggtaaaattgaaaaacactatgatcccaaaagatagggacaaagataaacattttacaaagtagaaaaaataattaacaaatatatgcaaacttattcagaatcactagtaaggaaagaaatgtcacataatgagatacttgtttttcatctgtcaaattaacaaagtttttcctttgtttctttgtttgtttgtaaatgatccattctgtcaaaggcataggaaaatgttattcttattcactgcaggtaaaaaatgaaaataatatatgaagtgtcaaaagccttggaggtattcagcaattatactcagtaattgacttggtagttatatatttgagggctctagtttttgaaggtgatcccaaatatagaataggttttatgtgcaaatatattcagtgctattttattcataaaatatattaaaaaaaattggggcc

SEQ ID NO: 717305 - DNA, 1041 bp, Homo sapiens
ttgctttacattaggttgtacttttcagtttctggctgttcttacatatttttttttatagatctgaaccaacttgtcatatcagaaataatcccattgtattgggattgaatttatacaattatttgggggaatattaacatcttcataccactcagtgtttctcactaggaaaatattatgttcctcttccattcaggtttttttcctatggcctcagcaaagatttatagttttcttcctaaaggtctaccatgcttgcttgtaagtttattcccagatacttgatggttctgatggataacgtatatcagcttcttcttattgcacttttaattgattattgctgggtttatcagagttctttgttgtaacccacagatactaactctgaccaacataagctagaaggaaactgaatggaaacaaacgggggcattrgttcaattaaaaggaattgaagaatcagactcagaatatggactacttttataataataggaaaagccaatctaataaatgaaagtaaagtacattagttaggaaatttaaaatgggaacacagtaatatccttattatataaataactcctacaattggtaaaattgaaaaacactatgatcccaaaagatagggacaaagataaacattttacaaagtagaaaaaataattaacaaatatatgcaaacttattcagaatcactagtaaggaaagaaatgtcacataatgagatacttgtttttcatctgtcaaattaacaaagtttttcctttgtttctttgtttgtttgtaaatgatccattctgtcaaaggcataggaaaatgttattcttattcactgcaggtaaaaaatgaaaataatatatgaagtgtcaaaagccttggaggtattcagcaattatactcagtaattgacttggtagttatatatttgagggctctagtttttgaaggtgatcccaaatatagaataggttttatgtgcaaatatattcagtgctattttattcataaaatatattaaaaaaaattggggcc

SEQ ID NO: 717306 - DNA, 1041 bp, Homo sapiens
ttgctttacattaggttgtacttttcagtttctggctgttcttacatatttttttttatagatctgaaccaacttgtcatatcagaaataatcccattgtattgggattgaatttatacaattatttgggggaatattaacatcttcataccactcagtgtttctcactaggaaaatattatgttcctcttccattcaggtttttttcctatggcctcagcaaagatttatagttttcttcctaaaggtctaccatgcttgcttgtaagtttattcccagatacttgatggttctgatggataacgtatatcagcttcttcttattgcacttttaattgattattgctgggtttatcagagttctttgttgtaacccacagatactaactctgaccaacataagctagaaggaaactgaatggaaacaaacgggggcattggttcaattaaaaggaattgaagaaycagactcagaatatggactacttttataataataggaaaagccaatctaataaatgaaagtaaagtacattagttaggaaatttaaaatgggaacacagtaatatccttattatataaataactcctacaattggtaaaattgaaaaacactatgatcccaaaagatagggacaaagataaacattttacaaagtagaaaaaataattaacaaatatatgcaaacttattcagaatcactagtaaggaaagaaatgtcacataatgagatacttgtttttcatctgtcaaattaacaaagtttttcctttgtttctttgtttgtttgtaaatgatccattctgtcaaaggcataggaaaatgttattcttattcactgcaggtaaaaaatgaaaataatatatgaagtgtcaaaagccttggaggtattcagcaattatactcagtaattgacttggtagttatatatttgagggctctagtttttgaaggtgatcccaaatatagaataggttttatgtgcaaatatattcagtgctattttattcataaaatatattaaaaaaaattggggcc

SEQ ID NO: 717307 - DNA, 1041 bp, Homo sapiens
ttgctttacattaggttgtacttttcagtttctggctgttcttacatatttttttttatagatctgaaccaacttgtcatatcagaaataatcccattgtattgggattgaatttatacaattatttgggggaatattaacatcttcataccactcagtgtttctcactaggaaaatattatgttcctcttccattcaggtttttttcctatggcctcagcaaagatttatagttttcttcctaaaggtctaccatgcttgcttgtaagtttattcccagatacttgatggttctgatggataacgtatatcagcttcttcttattgcacttttaattgattattgctgggtttatcagagttctttgttgtaacccacagatactaactctgaccaacataagctagaaggaaactgaatggaaacaaacgggggcattggttcaattaaaaggaattgaagaatcagactcagaatatggactacttttataataataggaaaagccaatctaataaatgaaagtaaagtacattagttaggaaatttaaaatgggaacacagtaatatccttattatataaataactcctacaattggtaaaattgaaaaacactatgatcccraaagatagggacaaagataaacattttacaaagtagaaaaaataattaacaaatatatgcaaacttattcagaatcactagtaaggaaagaaatgtcacataatgagatacttgtttttcatctgtcaaattaacaaagtttttcctttgtttctttgtttgtttgtaaatgatccattctgtcaaaggcataggaaaatgttattcttattcactgcaggtaaaaaatgaaaataatatatgaagtgtcaaaagccttggaggtattcagcaattatactcagtaattgacttggtagttatatatttgagggctctagtttttgaaggtgatcccaaatatagaataggttttatgtgcaaatatattcagtgctattttattcataaaatatattaaaaaaaattggggcc

SEQ ID NO: 717308 - DNA, 1256 bp, Homo sapiens
caaatatatatatttgacagaagtcaacatatttgacttctgtcaaattacgtataattcagaagggattaagattcagaaagtgaatggttcaaattcattcttaaacatatggcaacatttgacaacctctatgaaaaagctttttttctccaaaaagaacaaatgaaaatagattgttataggaagaatttcttactctccttaatccaatcacttcaaaaagtcataaaaacaaaaacacacttttaaaaatacatgcttgagggtaaaaattctctaccatctgttttagtaaaccgcatatgttcatctaaatatcatgtcaagtttttcttttaatgaatacagagtacaatctaattcacaattagtgtttttgttgttggttttttttttttttttttacaaactagaataatttcaaagttaagaaaatggcaagccaggatcatgactaatattctcactgaatcctctcttcgggagtttagacgctttttttttttccttttttgagacagaatcttgctctgttgtccgagctggagtgcagtggtgtgatctcagctcattgcaatctccacctcctggattcaagcaattctcctgcctcagcctcctgagttgggattacaggcatgcgccaccatgcctggctaatctttgtatttttagtagagacaaggtttcactatgatgtccagctagtctcaaagtcctgacctcaagtgaggccatctctgcctcccaaagtgctgggattacaggtgtgaaccaccgcggccggccccagactcttcttttttcaatgaaaggctacagactcctctgttagaagaacaaatctcacgtaattttaaaacttcagaatctaattccactctaaaaagtagaattaaattagcaaatctattctgatgataattggaactgtccaaaagtccatttgccagcgtaccccaaagtgagtcatactttatgtcatacataaaccacatgcactatagaacaacaagcatcttctgcatttcaggcggtatcaacaatgcccttatttattggtaggtagaataatggccctcaatgatgtttatggcctaactcccagaacctgtgaatgtattaccttgcatggcaaaagagacttcrggagattatcctggattatctaggtgggcccgatgtaatcacagagaggcagaacagaaagtcagggactgagctgtgatgatgggagcagggtcagtaagatg

SEQ ID NO: 717309 - DNA, 1001 bp, Homo sapiens
tgatcaaatacygaaggtgagtggaaagccgtgggtctggtgtagtcgtctggccctggctgagacactaacttctctgtatctcagttttctctactctaatcatggatttgaaaacatgaacgtgacactgaggggacatcatccccaaatgctcccagcctctgaacatccacttccattatgtttttaaaatgagatgaggaagcagccgtcctggccgtggccctgagattcggtgcttttctccagcggcaaggctgctgctgacggcacatcagcagtggcctcagctctgggcgatcttccagctttgggaacaacacctctgactgatcctcaacacttcctactttcctgcttgtgcccgacaacagcccaggatgggtccgggtgaaccccaagggctctctcagacacagagaccaggatttcagcctcctgggcaccaggctgtcagctcctcagtacatgtttctcaacacagggatgggaaatgtacctttcgttctagtgctgaaagaaagacgcgcaactccgccctccgtttttgttaccaacctctgtgctgcggaaataattactgggctcgagactaacatcccttatggagctgagggtcccaaaacaagtccagagaaagcaaacaattactggtgcaatgacagggttctatcgcgctgtggtggaaagaacccagactgtgaaggcaggaaacccgaaacagtcggtcgcagttgcgcccttacctgagaggtgactgtggcaaatcccacaacctttagaatctcagggtcctcatctgaaaacacctccccctcccagagtggtcatgggaactgaatgggctgagggatgagaaggggctctgccgccctctaacagacacccccccaacacctttgttcttcttaagcactacagtgctagtcaggactccttaggaaagactgttaacgctctgggtcccaaaacctagcactaaagacaactgagcaaag

SEQ ID NO: 717310 - DNA, 1001 bp, Homo sapiens
tgatcaaataccgaaggtgagtggaaagccgtgggtctggtgtagtcgtctggccctggctgagacactaacttctctgtatctcagttttctctactctaatcatggatttgaaaacatgaacgtgacactgaggggacatcatccccaaatgctcccagcctctgaacatccacttccattatgtttttaaaatgagatgaggaagcagccgtcctggccgtggccctgagattcggtgcttttctccagcggcaaggctgctgctgacggcacatcagcagtggcctcagctctgggcgatcttccagctttgggaacaacacctctgactgatcctcaacacttcctactttcctgcttgtgcccgacaacagcccaggatgggtccgggtgaaccccaagggctctctcagacacagagaccaggatttcagcctcctgggcaccaggctgtcagctcctcagtacatgtttctcaacacagggatgggaaatgtacctttcgttctagtgctgaaagaaagacgcgcaactccgccctccgtttttgttaccaacctctgtgctgcggaaataattactgggctcgagactaacatcccttatggagctgagggtcccaaaacaagtccagagaaagcaaacaattactggtgcaatgacagggttctatcgcgctgtggtggaaagaacccagactgtgaaggcaggaaacccgwaacagtcggtcgcagttgcgcccttacctgagaggtgactgtggcaaatcccacaacctttagaatctcagggtcctcatctgaaaacacctccccctcccagagtggtcatgggaactgaatgggctgagggatgagaaggggctctgccgccctctaacagacacccccccaacacctttgttcttcttaagcactacagtgctagtcaggactccttaggaaagactgttaacgctctgggtcccaaaacctagcactaaagacaactgagcaaag

SEQ ID NO: 717311 - DNA, 956 bp, Homo sapiens
accgcccccatgattcagttatctcccactgggtccctcccacaatmcaatggaattatgggagctacattattatatttttgcttatagtccattgttcaaacaaagcaagccacaaaaccgaggcacaagtcaaaggaaatgaggaggaaagggattatattcaactctttactgagaagcactgcaaagtcacatggctacaggcttttatatattaaacatttattgctattacaaagagagagtaaaaatttgagaataacttaacaggcaacaatttccccccaaatagaataatttagaggcaaagatacaaattaagtaattatcgtgatatgattaaatactatagaattataaatgatgttttaattgagataatgatcacaatgttataaagtgaaaaagattacaatttattatgtaattaatttctcaattttttaaagaaaattatgtatgtatgtgaatatacctacatacatgtacatatagttatttaaaatactgacattttaataaattttgacaacatgacattatatggaatgtttattttcttctttgtgcccttttacactatagttcaaacttctataaatttcaaatttcaaaaataaaaatttctttgcaaataaaaacaatgccattacattgaaattatattttattcacctgctttaatttccaactttccagtatcttgagttcataactaataataatttaaattaatacattaaattaaattattaaattaaaaagtaggaagtaatagtagtttacagggtcattttgcagagaaacattaattcatcaagtgaacatcactagtgccaactcagctcaacactgtgccagatgctataataagaaagaaaggatgagtaagatagcatctcctgccaaggattcagactaatcaaaataacgaatgttaagtaggtaattag

SEQ ID NO: 717312 - DNA, 956 bp, Homo sapiens
accgcccccatgattcagttatctcccactgggtccctcccacaatccaatggaattatgggagctacattattatatttttgcttatagtccattgttcaaacaaagcaagccacaaaaccgaggcacaagtcaaaggaaatgaggaggaaagggattatattcaactctttactgagaagcactgcaaagtcacatggctacagrcttttatatattaaacatttattgctattacaaagagagagtaaaaatttgagaataacttaacaggcaacaatttccccccaaatagaataatttagaggcaaagatacaaattaagtaattatcgtgatatgattaaatactatagaattataaatgatgttttaattgagataatgatcacaatgttataaagtgaaaaagattacaatttattatgtaattaatttctcaattttttaaagaaaattatgtatgtatgtgaatatacctacatacatgtacatatagttatttaaaatactgacattttaataaattttgacaacatgacattatatggaatgtttattttcttctttgtgcccttttacactatagttcaaacttctataaatttcaaatttcaaaaataaaaatttctttgcaaataaaaacaatgccattacattgaaattatattttattcacctgctttaatttccaactttccagtatcttgagttcataactaataataatttaaattaatacattaaattaaattattaaattaaaaagtaggaagtaatagtagtttacagggtcattttgcagagaaacattaattcatcaagtgaacatcactagtgccaactcagctcaacactgtgccagatgctataataagaaagaaaggatgagtaagatagcatctcctgccaaggattcagactaatcaaaataacgaatgttaagtaggtaattag

SEQ ID NO: 717313 - DNA, 2495 bp, Homo sapiens
  misc_feature 1107: n = A,T,C or G
gctgcttcatctctcggcctcgtgtttaaaatgaccatgagcccgggcatggtagctcactcctataatcccagcactttgggaggccgaggcgggcagatcacttgaggtcaggagttcaagtcaagcctggccagtatggcaaaagcccatcttttctaaaaatacaaaaattagctgtgtgtggtggtgcacgcctgtaatcccagctacttgggaggctgaggcaggagaatcacttgaacctggaagatggaggttgcagtgagccaagatcgccactgcactccagcctgggcgacagagtaagattctgtcttcaaaaaaaaaaaaaaaatgactatggtccttcactgggtgcagtggcacacacctgtaatcctagcactttgggaggctgagacaggataagcccttgagcacagaagtttgagaccagcctgggcagtgttgtgggaccctgaatctacaaaatatttaaaaatcagctaggcatagtagcacatgcttatagtcccagctgctcagaaggatgaggtgggaggatggcttgagcctgggaggtggaggctgcagtgagctgtcatcatgccattgcacctcagcctgggtgccagagcaagatgctgtctcaaaaaaaagataaaatgagcatggttcctcacattctttaagtgccttaggaactggagacagctatttgttggctttgttatctgagagccatagagacactacattctgtcctttttttggacttctataaatgcaatactctagaaccatagctttcaaacttttaagaacatggctcattgtaaaacacacacagacacacacacacacaatcacaagccagcacacaaaggtgctgaaaaaaacaataagtatggtatattttttattctgttctattttggtttttaaaaatttgatgtttgtgacctgcttaactgatttcatgatgcactaatgggtcttggttttgaaaactcctgccccagagcctaattcgttcacacttttgtgatgagacctacctcagatcactggaaacagtatgtaatcaatggactataatgtgttatataagaaacacatgcagtntttctacgtgttgatcttttcaccttgtgaaagtctaacacataaccataattcttaccctagtacatacaaatggagtattcagccttcccactgcagaagaggaaaggcactcccatttctgaagcaccttttgtgtctgggcactgcactaggagacttctcttgggtgtcttgcctaacttctttttttcttttcatttattttatttttgctgttttttatttttatatgccaatcttctctgtatcattccgattttagtatatgtcctgccagagtgagcccttgcctgatctcttcagcagttgtgtggtggagattttatttttcctgtgaggcagcttaaaagcagctcattaatccacctagaaaagtggtctcaggtatgaaaaaattcgtatgtgaaatgttaagttccaccacccaaattcaacactattaatatttttatatattttttccagagatttttaatgcttaataattttatttttattttctacatataaaagtaatatattaccactaagttcagaaaagtacaaagaagcagaacaacactcagtcacaatcccattacataagtgcagccacttgaatatgctctttatcttttttctcctcccgttgtttttgtatgaatgtcataattgaaaccatactcactgtatgtacaattttggttctggattttgttgttcttgtcaaaatggtagctttcattatataaacagtacatatttttgtgcagagaaaaaatataaatataaaaattataagatataaaaaatacatattagtatatacattatagaaattcattaatattctatgtgctttattctctaaactgtacaaggaatacagtttcgtgtcaataaataatcatatgatagatatgtatattgttttattttattctagtttagttttttttttttttttgagacagagtctcgcttcatcacccaggctggagtgcagtggtgcgatcttggctcactgcaacctctgcctcctgggttcaagcaattcttgtgccccagcctccagagcagctgagattataggtgtgygccaccacacctggctaatttttatattttagtagagttggggtttgaccatgttggccaggctggtctcgaactcctgacctctggtgatctgtccgccttggtctcccaaactgctggaattacagatgtgagccactgcacccagcctcttagtttttgtgacaagattttactctgtcaccccaggctggagtgcagtggcacgatcatggctcactgcagccttgactccaggtgcaagtaatccttttacctcagcctcctgagcagctgagatgacaggtgtgtgccaccatgctcagcta

SEQ ID NO: 717314 - DNA, 650 bp, Homo sapiens
cacaggcccacccaggctggtctgctggttacacatggaacccctcaaggggtggggtcctcgtgtaattatatttggatttggcttggccagtaacaggcccataaatgttacctcatgtggtggagaaaagtttatgattttaacatctggcaccaggattcctcagagggggagagttgccttgtttgaaggatttggtgatcagggcttggggtaggagggggaccccagggtttggaggtgcagatgttagccctgtaggagcttgttttccatgagaaatagagagatttgtcttgtttgtggagaagagtagagaggagaaaaaggagagagaagacggaggagaggatggggccaggtgcgccctggcagcctcacagccaaggtggagtggtcagaggccgtgatggaaaagggcccgccaagccatttctgtygtggggatggaaacccctcctctcctccctccaggggcctttgggacaccctgctctgctcactaccgtgctggaagagcgagatttctggggaatgtggtgagggctggccccggtgcaaagctggcctggcctgtccagggtggcccacaccagaagcagacggctgaggccatgagacccagagtcccaggtcctggcttgaga

SEQ ID NO: 717315 - DNA, 2389 bp, Homo sapiens
ccatttcatatcttccttagcattgatcaggatctgaaatgatcttatttttacatttttatgtgtttattaaatgtctcctcccattgatgtgaaactcaagagggcagagactctgtcccattaactcttccctccccagcacctctgcctggcccatgggcattatctaatacatacttgtcagccttgctggctgtctcttctctagtgctggccttatctgtgtcttgccaggactgctgtctccttgatgctggcctctgcctctactatacaggtttaatctcactacactcctgctccatgtctttcatggctccctgctgtcttcaggacaccctctgccaccctgtccagcctcacctctcatctcttcctgatctgaagcttcgtggtaggctagccatgtccctcactccccacccacatgccaacttctgtctgtgcttttgcctctgcactgccctctttctggagccctgtggaattttgcctggcatgctgcatcctttaagattcaccgggggcataacttcttacgggaagccctcctcgacgcactcacccagccgtttgcttatctgtttgcaaatgggcccagcagctccttggagaacctcagcacccactagggaagtgttcgcagatcttgtgactaaaagttggttgagcctctcaggcaatttcaggtgatacatgcctatgacacaaataacgagaaacatgagggagacagccactcctttcttgtcccctgagctgaaggaaacagcctctgtttggtaatcgtattatgaggcaaactgcttaggtaaacttactttggaggctgggatctttcaatatcccccaagacaatttttccttctcatgggaagcagaggggattaagaggcagtgattattaggtagcatttttagcctgtgtgcaaccaacaggaaatgggtaaccctgtctgccactgttggacccccttggaacagagcctctgcttgctggatctttgcagatgcaggtctccgtcaccccggctgttctgagccagcctgtggagcagcctgccttgctctgaaacctggttttgctacttacttgctctgtgaccttgggcaatagtcttagcctatctctgcctcagtttcctcatctgcagaatggggaaaatcaaagaccccacctcccagactgctgtgaggaaagagtgagataagcctgacaggtgctttgctgggggtctggccacagcaggcactgtggaagtcatcatgggcaggggccactggcacactgtcagggaagaaaggggggcctgacagccaggcgtgatggctcacgcctgtaatcccagcactttgggaggccgaggtgggcggatcacttgaggccaggagttcaagaccagcctggccaacatgatgaaactgtctctctactaaaaatacaaaatttagctgggcgtggtgtcacgcgcctgtaatcccagctactcgggagactgaggcaggagaatcgcttgaacctgggaggcgcaggttgcagtgagccgagattgtaccattgcactccagcctgggcaacagagcaagactctgtcttaaaaaaaaaaaaaaraaagaaagaaagaaaagaaagggggccctcacaccctttgacgtaccttctcgtgtctgaggatttttgtctcttgtgattaaaaggattaaacacagtctagcttggcacaaagatacccctccccagctgacagccctaaccatgggacttcgacctgcctctcagccttgctgtctggcccttcagctcagtggctgtatctggtcagaaatgaatgatgatgctttatttgctatgaacttattgtgatgttagtttgtgtgtatgacaggtgagactggtttctcaattaaattcgagcatacaaactttctttcttaaaatacatttatatacatttaaaaagagaactgattctaagaaaaatattaagtgtaaactaaaaataaaattataagcccctgccaaactgaatggacccctttatggccaaggggaccccagaaaaactttaaaactgagcttccagccacgacaggacaggaggtcagaagcctcgttatacctcctcctttttgtgcttcagacacaacaactgaccagcattactgttaaaatagagatagacaaaatagagatagtaagactgacatgacggactctttgtggcaaataagacgctaaattataaacagaacctaaggccatgccaggcaagggttaagtcagtcaccccacacttaaagaatgaacctgttctcactgccacaaggcttttctttttctctagcagctaaacaaacactggccttgagataagcaatactgaaa

SEQ ID NO: 717316 - DNA, 2389 bp, Homo sapiens
ccatttcatatcttccttagcattgatcaggatctgaaatgatcttatttttacatttttatgtgtttattaaatgtctcctcccattgatgtgaaactcaagagggcagagactctgtcccattaactcttccctccccagcacctctgcctggcccatgggcattatctaatacatacttgtcagccttgctggctgtctcttctctagtgctggccttatctgtgtcttgccaggactgctgtctccttgatgctggcctctgcctctactatacaggtttaatctcactacactcctgctccatgtctttcatggctccctgctgtcttcaggacaccctctgccaccctgtccagcctcacctctcatctcttcctgatctgaagcttcgtggtaggctagccatgtccctcactccccacccacatgccaacttctgtctgtgcttttgcctctgcactgccctctttctggagccctgtggaattttgcctggcatgctgcatcctttaagattcaccgggggcataacttcttacgggaagccctcctcgacgcactcacccagccgtttgcttatctgtttgcaaatgggcccagcagctccttggagaacctcagcacccactagggaagtgttcgcagatcttgtgactaaaagttggttgagcctctcaggcaatttcaggtgatacatgcctatgacacaaataacgagaaacatgagggagacagccactcctttcttgtcccctgagctgaaggaaacagcctctgtttggtaatcgtattatgaggcaaactgcttaggtaaacttactttggaggctgggatctttcaatatcccccaagacaatttttccttctcatgggaagcagaggggattaagaggcagtgattattaggtagcatttttagcctgtgtgcaaccaacaggaaatgggtaaccctgtctgccactgttggacccccttggaacagagcctctgcttgctggatctttgcagatgcaggtctccgtcaccccggctgttctgagccagcctgtggagcagcctgccttgctctgaaacctggttttgctacttacttgctctgtgaccttgggcaatagtcttagcctatctctgcctcagtttcctcatctgcagaatggggaaaatcaaagaccccacctcccagactgctgtgaggaaagagtgagataagcctgacaggtgctttgctgggggtctggccacagcaggcactgtggaagtcatcatgggcaggggccactggcacactgtcagggaagaaaggggggcctgacagccaggcgtgatggctcacgcctgtaatcccagcactttgggaggccgaggtgggcggatcacttgaggccaggagttcaagaccagcctggccaacatgatgaaactgtctctctactaaaaatacaaaatttagctgggcgtggtgtcacgcgcctgtaatcccagctactcgggagactgaggcaggagaatcgcttgaacctgggaggcgcaggttgcagtgagccgagattgtaccattgcactccagcctgggcaacagagcaagactctgtcttaaaaaaaaaaaaaaaaaagaaagaaagaaaagaaagggggccctcacaccctttgacgtaccttctcgtgtctgaggatttttgtctcttgtgattaaaaggattaaacacagtctagcttggcacaaagatacccctccccagctgamagccctaaccatgggacttcgacctgcctctcagccttgctgtctggcccttcagctcagtggctgtatctggtcagaaatgaatgatgatgctttatttgctatgaacttattgtgatgttagtttgtgtgtatgacaggtgagactggtttctcaattaaattcgagcatacaaactttctttcttaaaatacatttatatacatttaaaaagagaactgattctaagaaaaatattaagtgtaaactaaaaataaaattataagcccctgccaaactgaatggacccctttatggccaaggggaccccagaaaaactttaaaactgagcttccagccacgacaggacaggaggtcagaagcctcgttatacctcctcctttttgtgcttcagacacaacaactgaccagcattactgttaaaatagagatagacaaaatagagatagtaagactgacatgacggactctttgtggcaaataagacgctaaattataaacagaacctaaggccatgccaggcaagggttaagtcagtcaccccacacttaaagaatgaacctgttctcactgccacaaggcttttctttttctctagcagctaaacaaacactggccttgagataagcaatactgaaa

SEQ ID NO: 717317 - DNA, 2389 bp, Homo sapiens
ccatttcatatcttccttagcattgatcaggatctgaaatgatcttatttttacatttttatgtgtttattaaatgtctcctcccattgatgtgaaactcaagagggcagagactctgtcccattaactcttccctccccagcacctctgcctggcccatgggcattatctaatacatacttgtcagccttgctggctgtctcttctctagtgctggccttatctgtgtcttgccaggactgctgtctccttgatgctggcctctgcctctactatacaggtttaatctcactacactcctgctccatgtctttcatggctccctgctgtcttcaggacaccctctgccaccctgtccagcctcacctctcatctcttcctgatctgaagcttcgtggtaggctagccatgtccctcactccccacccacatgccaacttctgtctgtgcttttgcctctgcactgccctctttctggagccctgtggaattttgcctggcatgctgcatcctttaagattcaccgggggcataacttcttacgggaagccctcctcgacgcactcacccagccgtttgcttatctgtttgcaaatgggcccagcagctccttggagaacctcagcacccactagggaagtgttcgcagatcttgtgactaaaagttggttgagcctctcaggcaatttcaggtgatacatgcctatgacacaaataacgagaaacatgagggagacagccactcctttcttgtcccctgagctgaaggaaacagcctctgtttggtaatcgtattatgaggcaaactgcttaggtaaacttactttggaggctgggatctttcaatatcccccaagacaatttttccttctcatgggaagcagaggggattaagaggcagtgattattaggtagcatttttagcctgtgtgcaaccaacaggaaatgggtaaccctgtctgccactgttggacccccttggaacagagcctctgcttgctggatctttgcagatgcaggtctccgtcaccccggctgttctgagccagcctgtggagcagcctgccttgctctgaaacctggttttgctacttacttgctctgtgaccttgggcaatagtcttagcctatctctgcctcagtttcctcatctgcagaatggggaaaatcaaagaccccacctcccagactgctgtgaggaaagagtgagataagcctgacaggtgctttgctgggggtctggccacagcaggcactgtggaagtcatcatgggcaggggccactggcacactgtcagggaagaaaggggggcctgacagccaggcgtgatggctcacgcctgtaatcccagcactttgggaggccgaggtgggcggatcacttgaggccaggagttcaagaccagcctggccaacatgatgaaactgtctctctactaaaaatacaaaatttagctgggcgtggtgtcacgcgcctgtaatcccagctactcgggagactgaggcaggagaatcgcttgaacctgggaggcgcaggttgcagtgagccgagattgtaccattgcactccagcctgggcaacagagcaagactctgtcttaaaaaaaaaaaaaaaaaagaaagaaagaaaagaaagggggccctcacaccctttgacgtaccttctcgtgtctgaggatttttgtctcttgtgattaaaaggattaaacacagtctagcttggcacaaagatacccctccccagctgacagccctaaccatgggacttcgacctgcctctcagccttgctgtctggcccttcagctcagtggctgtatctggtcagaaatgaatgatgatgctttatttgctatgaacttattgtgatgttagtttgtgtgtatgacaggtgagactggtttctcaattaaattcgagcatacaaactttctttcttaaaatacatttatatacatttaaaaagagaactgattctaagaaaaatattaagtgtaaactaaaaataaaattataagcccctgccaaactgaatggacccctttatggccaaggggaccccagaaaaactttaaaactgagcttccagccacgacaggacaggaggtcagaagcctcgttatacctcctcctttttgtgcttcagacacaacaactgaccagcattactgttaaaatagagatagacaaaatagagatagtaagactgacatgacsgactctttgtggcaaataagacgctaaattataaacagaacctaaggccatgccaggcaagggttaagtcagtcaccccacacttaaagaatgaacctgttctcactgccacaaggcttttctttttctctagcagctaaacaaacactggccttgagataagcaatactgaaa

SEQ ID NO: 717318 - DNA, 1058 bp, Homo sapiens
gaggggcgcgtgcatggtgcccaggggctgaaagcctgcaatgcagccgagagggggccagcggagtcagcaggagaaatcaaaatcacaactctaatagagaaattcaaatgggaggccttctctctatttgcctctccttccagttgtcactctgctgccaggactgaggcattccatcagactctgaatccctttcgcttgctgtatataaggctccaatccatcctcctccccttgctgtcacctcagcagtgctgcccacaagacaccgcccacacagctctgccaagactaattcatgttcttcagatactcctactgcaagttttctttttcacagaatgagtggctgaaatcacttttaatgtttcacaaagcaaacaatcctaggaggactgggttgggggtaagaggagaaaaatcaaatatatcacagaacagcctgaataaagcatctttatcttgctgggttctctgtaattttcacatcaggcactgtctttaaaattaggaagttaagtgaatgaaaggagggctccttcacagccatgcgcccaagaagaccacagtcatacatcacagaggcagcccacagagctgcaaaacgagatgcaaatacaaagctctaaagataactgtgcgggcacagcttactgcctatcccagcacctactgcccatcctcttcccccctccagctcaactacagaagctaaaaagcccaagcctgctttcctagtctcccttgaagctggaggtggccaaaacacacttggggctaacaggacatcagtggaattctactggggatttttgaggaagtttttgttttctagacaaaaggaacagtttttggcactgccccttctgcttctttctttctttctttctttytttttttttggtagaaattggggtctcgatattgcctaagctggtcttgaactcctaggctcaagtgatcctcccacttcatcctcccaaagtgctgagattacaggcatgagccacggtacccagcccttttcttcctgttctgaatggagacacgatgtc

SEQ ID NO: 717319 - DNA, 1058 bp, Homo sapiens
gaggggcgcgtgcatggtgcccaggggctgaaagcctgcaatgcagccgagagggggccagcggagtcagcaggagaaatcaaaatcacaactctaatagagaaattcaaatgggaggccttctctctatttgcctctccttccagttgtcactctgctgccaggactgaggcattccatcagactctgaatccctttcgcttgctgtatataaggctccaatccatcctcctccccttgctgtcacctcagcagtgctgcccacaagacaccgcccacacagctctgccaagactaattcatgttcttcagatactcctactgcaagttttctttttcacagaatgagtggctgaaatcacttttaatgtttcacaaagcaaacaatcctaggaggactgggttgggggtaagaggagaaaaatcaaatatatcacagaacagcctgaataaagcatctttatcttgctgggttctctgtaattttcacatcaggcactgtctttaaaattaggaagttaagtgaatgaaaggagggctccttcacagccatgcgcccaagaagaccacagtcatacatcacagaggcagcccacagagctgcaaaacgagatgcaaatacaaagctctaaagataactgtgcgggcacagcttactgcctatcccagcacctactgcccatcctcttcccccctccagctcaactacagaagctaaaaagcccaagcctgctttcctagtctcccttgaagctggaggtggccaaaacacacttggggctaacaggacatcagtggaattctactggggatttttgaggaagtttttgttttctagacaaaaggaacagtttttggcactgccccttctgcttctttctttctttctttctttttttttttttggtagaaattggggtctcratattgcctaagctggtcttgaactcctaggctcaagtgatcctcccacttcatcctcccaaagtgctgagattacaggcatgagccacggtacccagcccttttcttcctgttctgaatggagacacgatgtc

SEQ ID NO: 717320 - DNA, 599 bp, Homo sapiens
ccacacctaaaggacacaaaccacgcagccccacagtcccactcctgggagctcatcttgcagctacgcctgccccttgtaggtgggtacattccaaaggcccatcagtgagggctgcttaggtgaccttaggtgacctaggcacattgcacagcagccacgtatagccagctgaacacatgctgatgtagagccactgccaagacgctgtgcagtggaacagcatgccaccactggggctggcagaaacacacacatgcttattacacccagaacacttgactagacagaccagggaaagaggctcgattttcactgtgcgtgcttgcttatctgtgaagtttatacaaaaaatgaataaratacacgattccgtttctaaatgaaattccagaataggtaaatgccatagggacagaatgcacattggttgttgccaggagctgggaggggatgggggaaacagggagcaattgctttatgggtatggggtttccttttgggttgacgaaaacattttggaactggacggaggtgttcattgtacaacgttgtgaatgtattaatattaaacaccactgaattgttcacttcaaaat

SEQ ID NO: 717321 - DNA, 730 bp, Homo sapiens
ggacacatgctttttcctcaccctgaagtcacacctgtattttggaacaccaccttaaagacagacactaaagcatatgggaacctgaaaaagtgataatttaggcaagtccttcaaacaagagtgatatatacctttagagaccattgaaaatattggacctgatcaaaattaactgattaggataaatacatatattttagttgttgctttctttcttcactaattaataggattgggacgaaaaagaacctcagatttctaagaagtaaaacacagaaaaaacgagcaaacaaaaagatgaaaagcacaggaaatacaggatctataaagtatttacataattgaaaatactagcctgaacaatatagggagatcctgtttctagatttttttttttttaattagccagacatggtggcacaacccatagtcataactactagggaggctgaggaaggaggatcacttgagcccgggactttgaggcagcagtgagccatgatagtaccactgcacccaagcctgggtggcagagcacgaccctgtctcaaaaaaataaataaataaaaataaaaataaaaaaatactgtgaaaatattttgacatattataaaataagcaaattacatcaaccatgctgcatttttctccctttagaagtaatcagarggtgcttttcttaccaaagcttgaaacttgcatcaaccaatggaatatttactaaata

SEQ ID NO: 717322 - DNA, 631 bp, Homo sapiens
tcccttaatttaatgatataaatataatttatgagacttttgcttatgatttagacccattgtttaacttgcattatgtttttcttatgtgctgtacttcagaagtttaatggaaatatgataaaatataaaatttttgcagtagagagcatttaaaaatatttctctatgagttcaatcgttttatttttttgtttccaccaatgagtgggaatctgttattaagaagattctcactgtaacaccacmgtccatctaaaattgtgacatagcgtaaagtctcagagctccatagtactctaaaaaatgtttacttcaatgtttatattttaacaattgatacaatttagcaaattggtaaagtaataaatgataaaatattaaatgtgcaaagatgatagagttctaaacttttatatacttaatagcatagcctcaaaataagtaaagcaaacattgacaagatgacagggttaatttaaaaattcctgtgtggcctagcatattggctggtcatgaaatatttatttcatttattctaaatcatagaattgtagccagtcacaaatattcctttaaattttgcatatttataactgattttattgtgccctttattattgaaggatag

SEQ ID NO: 717323 - DNA, 631 bp, Homo sapiens
tcccttaatttaatgatataaatataatttatgagacttttgcttatgatttagacccattgtttaacttgcattatgtttttcttatgtgctgtacttcagaagtttaatggaaatatgataaaatataaaatttttgcagtagagagcatttaaaaatatttctctatgagttcaatcgttttatttttttgtttccaccaatgagtgggaatctgttattaagaagattctcactgtaacaccacagtccatctaaaattgtgacatagcgtaaagtctcagagctccatagtactctaaaaaatgtttacttcaatgtttatattttaacaattgatacaatttagcaaattggtaaagtaataaatgataaaatattaaatgtrcaaagatgatagagttctaaacttttatatacttaatagcatagcctcaaaataagtaaagcaaacattgacaagatgacagggttaatttaaaaattcctgtgtggcctagcatattggctggtcatgaaatatttatttcatttattctaaatcatagaattgtagccagtcacaaatattcctttaaattttgcatatttataactgattttattgtgccctttattattgaaggatag

SEQ ID NO: 717324 - DNA, 1489 bp, Homo sapiens
gtggagtcaaaatttctcaaaagaaggggaaaagttaaaaagtgatgtaatttaaatttcactcaaaatttatttcttttagcctattacattatttacttacctagagtataataatgcatgcatattataataattatagctaatgtaaaactgagattattaaaatattagataaatatggatcacttttaagacagaacattaatttaaggaaataaaatatatttgttccttctcaagttgactatgctcaatttattgtttttagcagctgcattctagctattagcaagcacaattgagtttagtgacagcacaaatccagaaggtcatttacataaaatagaagtgagatattctgaaacataaatcccagagtatgcagaaatgaaaaagaaagcttgatgaataattctttctatttaattaagaatgattcaacatctacaaacagaaaaaaaaatcgatctgtcttcaaattatgtcacttgtgaggaataaaccaattttcaaagcataatatagagaagaaacattgcattgtttagagagcatattagctactttgaattccagagaattaaaacaaagaccatgcactgacatgcagctctcacgtaatttcaaatcataatttatctctacacagtcaaactcagaaatgtccccgtccccacagctgataactgacttcatcttcataagcactgtatgtatgtagtttatatactgtgtatataaacacagacacaaaatatctgctcttatttgtatatatcatttattttggagcccacaaataaatgatagacattttgtggatatatacactgggcatatatccacaaacaattttgtaagtcatactataaagccttcagaatgccagtatgcagacattttcctaatgtattctacaattattaaactttaatttgatgaaaagtgatatacaagggaaagaatagaattgtgacatggaaatcagttccttgcaaaaattgaatctggtcactgttgttaaattttgaagtatgatctaaagattaaactcaaaaaatattgtaacatttgttatcttaacatttaatagattcctttttccctactatatttggtttctactcctgccgtaacaacctaagattatgkgacttaaacagtccgaatagtcagaaacactattcgggtctcaccagtttattataatcaaggtgttgccatggctgcattctttttcaaaaaaaattaatttttgtggatacatagtaggtgtatatatttacagggtacatgagatgttttgaaacaggcatgcattgtaaaataatcacatcatggaaaatggggtatccaccccctcaagcatttatcctttgttttacaaacaatcccattacactcttttagttattttaaaatgtacaactaaattagtattgactgcagctaccctgttgtgctatcaaatagtaggtcttattca

SEQ ID NO: 717325 - DNA, 1874 bp, Homo sapiens
ttatctcagagtttttttgggtcaggtatgcaggagcagtgtacaggggcctctgtctcagtatctctcaagctgccatcaaggtgtctctctggggctggggtctcatctgaaagctcaactggggaaggatccacttctaagctcactgacatgattgttggcaggtttcatatccccataggctatagaatgagagtctcagtttctcactgggtgttggcaaaaggactccctccacttcttgctacatggacttctctgaagggcagttaagaacatggcagctggctaccatcaggacaagcaaatgagaaagagtgagggattgagagcaaaacagaaatcacagactttgaaaacccaatcccagaagcgatatcccatcactttgccctattctatcccttagaagcaagttactaggtccatccttcctaagagaagaggattacacaagaccatgaaggcaagatgcagggaccattaaaagccaagcatccttcaaggagtatcctcacttcacaggggcttctatgtgttcagagaccaaacttaaagccagactgtcttatgacagagttataagtacagaaactgatgatgcagttaaatccctttagggagggaagggttttccaaaacctagttagctccagaattttcatatattaggggattgtggtcaacagtctttagagggtgaaaacttgatttgtcttaaagttgcatttacctaggaagcacattctttttacttagcttgttgatgagctattgaggggtaggtatagtaaaaggacattatgatgtcattagatcttttccaagccgcatgtgtgccagcatcagaactttttgaatcgtaacacaaaagccacacctttctttgtctaaaggaagattgatcttagacccaggtcttcctatccaagccaatgagggcactcttacctggcaccactgcttaggaacataagtgcctttgaacctgtaggaattatagctagtgttcagagtagacaactgttgtggaatgggaaaaacattgcaagctatctgcttatcagaagcacttgggtcccctctgttttgaaaaatgtttatgtttgcttctttctaaccactaattactccataaaatcctgtttggctattgtaaacatgtgcctctagctaaatgaatccataaaaccaaaacaacaccattagaacagctctttgttaagctttaggaacggactrtcattatttgtatttggcacaaggaataaaaataaaatcatttgcatagatattattgaaattagaatcttaaaaggtttataccccaaggtgctttattctaaaaaatagtttcacttttttttgagaagtatctatagaaggaactattatttattatgttttagggccttttttccactacatagaggggtacaatctagattttgcatgtttgctatttactctcaaataagtacctctattttcctttccatataaaagacaatgtcagattgtccctggagaacaataggcactggcaagtagcctgaagatctccttcacgtgcatgtttcccaggtggaggaccaacgcagaagtggagagtaaatcaccaataggggattggttttggcaacatgagaatttgctcagcttgattcaagttgtgtatgtgccaagttcactcaaacacaacacataacctgccatctagatattaagccaggatatgtgatgtacagagaaatattatatgtcagcagagagctctgctacaaaacttctttccatcaccaaaataacaatagaaaaattcatgctttttcaattgcacatcagtggtcctgatcttcaaaattgtaata

SEQ ID NO: 717326 - DNA, 606 bp, Homo sapiens
tgggctcttgttctgttttgttttaatgatttttccaaattaaatacagagcaaggaagctggtttagattacagggtcactgcaaaataactgagacagtagatatgacctattttcaagctgccacagtataattgggaatattttctttgtcttgggaaggagccagagctgtaagcctcctttcctctgctttgtggatcatatcaaccaagggagacactttgacagctctgcagccctggcccatgcttgagagtttcccttcctctgaccttcctagggtctcttcccagaagsattgctttgcactcgcctcagcatcattgaaattccctctacttacagttatggctgcaaggaaggtcatcataagtgtactgatgatgctattgatggaacctctaatgccatctgttggtggtgggtacagttgatatgcttctagtccagtgtgtggctttattgaattctgaaactatttgacatagattttccccaaagattgtcacaaattccccttacaggaaatactaatggaagttctttaggctgaaacgaagtaatcccagatgctaattcaaatccacatgaaaaacaaaata

SEQ ID NO: 717327 - DNA, 606 bp, Homo sapiens
tgggctcttgttctgttttgttttaatgatttttccaaattaaatacagagcaaggaagctggtttagattacagggtcactgcaaaataactgagacagtagatatgacctattttcaagctgccacagtataattgggaatattttctttgtcttgggaaggagccagagctgtaagcctcctttcctctgctttgtggatcatatcaaccaagggagacactttgacagctctgcagccctggcccatgcttgagagtttcccttcctctgaccttcctagggtctcttcccagaaggattgctttgcactcgcctcagcatcattgaaattccctctacttacagttatggctgcaagsaaggtcatcataagtgtactgatgatgctattgatggaacctctaatgccatctgttggtggtgggtacagttgatatgcttctagtccagtgtgtggctttattgaattctgaaactatttgacatagattttccccaaagattgtcacaaattccccttacaggaaatactaatggaagttctttaggctgaaacgaagtaatcccagatgctaattcaaatccacatgaaaaacaaaata

SEQ ID NO: 717328 - DNA, 867 bp, Homo sapiens
tctgtggtcatggctagtgctgtgatactggtttaagtgaaattatctttcagagtccattccttacatcctgaatacatgtactgcatgtatctgataggtggtctgaaaggttcttctttttcttaagataagattttaaaaagactttatagaagattgcctcagaaaaatctcatcgaatagcatcattcttcctttttccctattatctcttgacccataaatagtcttatagtagctgtaaaagcctttccccttatggttaaaattaaatacagtaaaacattttcccccacttcttccaattctgatattttaacagcaacacagcaagttctaattagcctaagttaaataaccattactaattttacaccaagatcaatatgggggatttctttttttttatctgtgtaattttttttatatactttaagttctagggtacatgtgcacaacgtgtaggtttgttacataggtatacaagtgccatgttggtktgctgcacccattaactcatcatttacattaggtatttctcctaatgttatccctcccccagtctccaccccacgacaggccccagtgtgtgatgttcctcaccctgtattcaagtgttctcattgttcaattcccaccgaagaataagaatatgcggtgtttggtttttctgtccttgcgatagtttgctcagaatgatggtttccagcttcatccatgtcgctacaaaggacatgaactcatccttttttatggccgcatagtattccatggtgtatatgtgccacattttcttaatccagtctgtcattgatggacatttgggttggttccaagtctttgctattgtgaatagtgccacaa

SEQ ID NO: 717329 - DNA, 3037 bp, Homo sapiens
gacagaaggaagcaatgaaattttctaggagctatagcagctgctataggaataaaacattttcttttttgttttgttttgtttttatttttgktttttgagacctagtcttgctctgttgcccaggctggagtgcagtggcgcaatctcagctcactgcaagctccgcctcccgggttcacgctattctcctgcctcagcctcccgagtagcttatgggaatagaagctactatgacatagcatttgtattaatgagtaagcactttctccatttttatagtaattttggggtatactgtagtcagtgtttctatagtgaagaatcagcctctggaacaattcaatgaagtgattttcctaggttactgagtagggtaacaactcagttggacagcttagccctttcacacctctgatgactctgatccaagcatttatggagaaacacttgtctttcaatggtgtctcgggaaagaaacaactactcatcttagccggtaactatgtcatatcaggatttaactgtaatatttattaaaatttcaaggacctgaaatacgtacatacatataaatctagataatgacatgccaaattatagcacagtcatgatatataattttagcatgaaagtacatatttcatttatgtacaaatatctcaaagatttggtacaataagcattaattaagagttgactataaagatgtcttctatattactgatatactaaatatgaaccactaaattttacaaataatttgtgaggcttttattatattcagaataccttttgacttaaaactgaaataatataaatgttataaggacaacaaaatacagtcattgctctaatgcaatcatgttcctgaacacatctggacaatttcatagaaatatatatatatatatatacacacacacacgcacatatatatatttcatacatacatgtatatatatacacatacatatatatttcatttgtcttgattgacataaaaatcatatattttcacaagatgtaactattttgatgttgtaattttgtgaaccacctagttactaacttttacaggcaaaatatttttccaatgctttaaaaatcattgtctaatgagactcttcctttacagaggcatatttaaacctgcaaagtaatttgtccacattattggtaatatgaacattttcaaatagtaaaataaattcatataatttgcttgggtttcatgcatatgaaatctaataaaaatacttttatgaattaaaaaatttgtttttcatattaaggtacaatatatacagattgacatagtcaaatgacatttataattctatgaaaaattaatagttataggtaataagatatagacattgtagaaatcaaagataatagaatgatggtcaaatccatccaatttagatttcagacagaaattgggtggctattctgttgtatttatgtgcttaaagacttgcaaaattttttcttcattttttatacataaaaatattattttcctgcattcattaaaaatacagaagtaatgattgtttatatacttaatgatatccttttaagtatgtaagcacaaaaagataggcttatttatttattttaaaataaaaaggatgacagtaggattgagactgccatttttaagtgaggggtttttagtacatatgtgccagttaataatcctcctcacctaagaaaaatttgagttacagatatctctaagagtttaaaaaaatacatctcaggtactctttttatattatccattgcatctctgagttgtgtatattctcttctataatattaattatttttatatatataatttttggagatggtggtcttgctctgtcgcccaggctggagtgcagtagtgcgatctcagctcactgcaacctccgcctcctggattcaagcgattctcctgccttagcttcctgggtagctgggactacaggtacacaccaccacacccagctaatttttgtatttttagtagagacagggtttcaccatgttggccaggatggtctccatctaccgacctcaagatctgcccatctcggcctcctgaagtgctgggattacaggcaattttttttttttaataaaatggaatttaagcctgtaatgtctttttaaggaatcaaaagtggtcatgtgataaatatgatacatagatacataatatatattttttccagttttaagaagttttgttaagaaggttttaaaaatattttaaatgcaacaagtttaaagataataaaagccacaagtattctagttatatgagattattctttagtcaaacaaaaccatctatattataaatcttgtgaaacaacttgagtatcaaagtacttccagtatgcattaatttaataagtttcaaagtcagaattctagtccaactgaaatatctgtagtcacattatcaggcttttcatagcttcacacttttaaacaacattttaaaagttaaatcaacataatatatccaaaaattcaaccaatatctatttacaaacatttacttaaaactaattttcatcaaatcaattgtggtttttgttggtttgttttttgagacagagtttcgctctttgttgcccaggctggagtgcagtggtgcgatcttggctcactggaacctctgcctcccaggttcaagggattctcctgcctcagcttcccaagtaactgggattacaggtgcccgccaccatgcctggctaatttttgtatttttagtggagacagggttttaccatgctggccaggctggtcatgaactcctgacctcaggtgatccacctgccttggcctgccaaagtgctgagattacaggtgtgagccaccgtgcccggccaaataaattgtgttttaaataaagttaacataaattgactagagtatactgtgtaaattattgtacacattaatcaaaactaatatccatgcatgctgaatctcttaaaatagtcactttatcacctaatgcaagttttca

SEQ ID NO: 717330 - DNA, 3037 bp, Homo sapiens
gacagaaggaagcaatgaaattttctaggagctatagcagctgctataggaataaaacattttcttttttgttttgttttgtttttatttttgttttttgagacctagtcttgctctgttgcccaggctggagtgcagtggcgcaatctcagctcackgcaagctccgcctcccgggttcacgctattctcctgcctcagcctcccgagtagcttatgggaatagaagctactatgacatagcatttgtattaatgagtaagcactttctccatttttatagtaattttggggtatactgtagtcagtgtttctatagtgaagaatcagcctctggaacaattcaatgaagtgattttcctaggttactgagtagggtaacaactcagttggacagcttagccctttcacacctctgatgactctgatccaagcatttatggagaaacacttgtctttcaatggtgtctcgggaaagaaacaactactcatcttagccggtaactatgtcatatcaggatttaactgtaatatttattaaaatttcaaggacctgaaatacgtacatacatataaatctagataatgacatgccaaattatagcacagtcatgatatataattttagcatgaaagtacatatttcatttatgtacaaatatctcaaagatttggtacaataagcattaattaagagttgactataaagatgtcttctatattactgatatactaaatatgaaccactaaattttacaaataatttgtgaggcttttattatattcagaataccttttgacttaaaactgaaataatataaatgttataaggacaacaaaatacagtcattgctctaatgcaatcatgttcctgaacacatctggacaatttcatagaaatatatatatatatatatacacacacacacgcacatatatatatttcatacatacatgtatatatatacacatacatatatatttcatttgtcttgattgacataaaaatcatatattttcacaagatgtaactattttgatgttgtaattttgtgaaccacctagttactaacttttacaggcaaaatatttttccaatgctttaaaaatcattgtctaatgagactcttcctttacagaggcatatttaaacctgcaaagtaatttgtccacattattggtaatatgaacattttcaaatagtaaaataaattcatataatttgcttgggtttcatgcatatgaaatctaataaaaatacttttatgaattaaaaaatttgtttttcatattaaggtacaatatatacagattgacatagtcaaatgacatttataattctatgaaaaattaatagttataggtaataagatatagacattgtagaaatcaaagataatagaatgatggtcaaatccatccaatttagatttcagacagaaattgggtggctattctgttgtatttatgtgcttaaagacttgcaaaattttttcttcattttttatacataaaaatattattttcctgcattcattaaaaatacagaagtaatgattgtttatatacttaatgatatccttttaagtatgtaagcacaaaaagataggcttatttatttattttaaaataaaaaggatgacagtaggattgagactgccatttttaagtgaggggtttttagtacatatgtgccagttaataatcctcctcacctaagaaaaatttgagttacagatatctctaagagtttaaaaaaatacatctcaggtactctttttatattatccattgcatctctgagttgtgtatattctcttctataatattaattatttttatatatataatttttggagatggtggtcttgctctgtcgcccaggctggagtgcagtagtgcgatctcagctcactgcaacctccgcctcctggattcaagcgattctcctgccttagcttcctgggtagctgggactacaggtacacaccaccacacccagctaatttttgtatttttagtagagacagggtttcaccatgttggccaggatggtctccatctaccgacctcaagatctgcccatctcggcctcctgaagtgctgggattacaggcaattttttttttttaataaaatggaatttaagcctgtaatgtctttttaaggaatcaaaagtggtcatgtgataaatatgatacatagatacataatatatattttttccagttttaagaagttttgttaagaaggttttaaaaatattttaaatgcaacaagtttaaagataataaaagccacaagtattctagttatatgagattattctttagtcaaacaaaaccatctatattataaatcttgtgaaacaacttgagtatcaaagtacttccagtatgcattaatttaataagtttcaaagtcagaattctagtccaactgaaatatctgtagtcacattatcaggcttttcatagcttcacacttttaaacaacattttaaaagttaaatcaacataatatatccaaaaattcaaccaatatctatttacaaacatttacttaaaactaattttcatcaaatcaattgtggtttttgttggtttgttttttgagacagagtttcgctctttgttgcccaggctggagtgcagtggtgcgatcttggctcactggaacctctgcctcccaggttcaagggattctcctgcctcagcttcccaagtaactgggattacaggtgcccgccaccatgcctggctaatttttgtatttttagtggagacagggttttaccatgctggccaggctggtcatgaactcctgacctcaggtgatccacctgccttggcctgccaaagtgctgagattacaggtgtgagccaccgtgcccggccaaataaattgtgttttaaataaagttaacataaattgactagagtatactgtgtaaattattgtacacattaatcaaaactaatatccatgcatgctgaatctcttaaaatagtcactttatcacctaatgcaagttttca

SEQ ID NO: 717331 - DNA, 2114 bp, Homo sapiens
atttagcacccaaatgatgaaattaattatgttagaaaaaatatactgaccataacggcgcaaaaacgacattaaatgcaccaaacataaagggtgtgcattattccatgtcctctacgctgtaatttaacgtcacttggcttttgaaacaaagcaaccttatttcagagacacaaaaaatgtaraagctctaaaagtttttagctttgacattttgaaatgccatgaaatggagattttttcatccatgaaatttcattactataaaataaaaagccacattcctcattaaaaaaaaaatctttttctgttaaaactgagagtctgatcctctctcaagtaagttggtctgcttccttataatgtattaagcattaagttaccttttatatcaaattctgatgtgtttataattgttgaagcttaaacgttcaagtttgttgctaaacaatgtggataaaatagtttcatggtttgtttcaatttatttattaatacattcatttaatcatttcaaatttcttatttaaaaattaggtaaaatgaacattttacatctcaatctctctctcaaacaaattacaacaaactgaattaacggggctctcatatatataacgtttgatattgtttccccatccttattcatgaaatgccagttatttacaaagcaactactatagggtaggtactgtgcttggctagatagagacataggttcttcaccttgatatatgctcatggcatagaggaaataagaaatcactcccatttaaatatcatttttaaatagactataagaagaagaaaaagatgatcatccttgtaatttttatcctattttaaaattccaaaagttatataagtacctcatatgtgaatatatagtttttagtgttacagacagtccccaacttatgttttgactttatggtagtgtaaaagcaacatgcattcagtagaaactgtactgtgagtacccacaccaccattctgtttttcactttttgtacagtattcattaaattacatgagatattattatgaaataggctttgtgttagatgactttgtccaactgtagcctaatgtaagtgttctgagcacgtttaaggaaggctaggttaagctatgatgtttggtaggtcaggtgtgttaaacgtatttttgacgtagaatatttttgacttatgatagatttacccattgtaaccccatggtaagtcgaggagcatctgtacttgtgaaattgttcagttattaacacttttacacatactcactagtctttctaaaaagatattaatgaagtctgaacagaaagtctaattatatccttttagaatgtgtgatgaaaagacgaggtgaataatattctagccctatcattaaaagtggtcttagctaactgcctatattcttctactgtgtgtagcttgcactagaaaataattgatttggccaggcgtggtggctcatgcctgtaatgccaacactttgggaggctgaggcgggtggatcacctgaggtcaggagtttgagactaggctgaccaacatggtgaaaccctgtctctactaagaatacaaaattagctgggtgtgatggtgcatgcctgtaatcccagctacttgggagggtggggcaggagaatcgcttgaacccagcaggcagaggttgcactgatctgagctcgtgccattgcactccagcctgggcaacaagagtgaaattccatgtcaaaaaaaaaaaaaaaagaaaaaagaaaaaataattgatttgacaacaatgttagtaaagtttataggaataaaaaaatagtacatatactaaatttttcctattactagtgtggttttcttattaaagttgtcctaaatgatataaataaaattatttgaattaagagcatatatttatggaaatatctttaaaatctgaaaataataagtgaggtcattagtttaagtcttaaagcttagacaagccatttagcctctctgagtcttgatattaacatctgcaccttctgcctcagaggatagctgttagtgtacattcaaacactaccagttaatgtataattaaaaaactcctactttctttcatatgca

SEQ ID NO: 717332 - DNA, 1838 bp, Homo sapiens
attgacttttcttgaaccaaggttcatattaacaaaatataaattagataacggttattagtgctgcaacaacacttagatgagtctagccataatatgtcagtaacatgaaaaatgctaggttttttggtttggaatttatctgggttttcaattaggcttagccaacttgagcaagtagttcttgtggcaacaattatgggttttacttgtgtgtttgatttgtatttgggtctttttttttccttatttgatcaccaaggcacacacaaatattcgtctcaagctaaagccccgaaagtaagccattctttagctggtgaaattctaatctcgttttatatgtagtcaatgagctgctgagagatgccttagcttgttaacatgatagcagacagatgagaagaaataaaaagtactggcctgtgaaagccaaatcaaagagccagattgaggagattctcgagttacccaggtgaggccctcagtgcctagctagtgacccagctaatggtcagaatgctgtaggttcygtttggatgatccaaacgttaaaacatgggacttcgatgtctgcataaatggctgataatttgccttttctttgtaagcttactatacaataaacaaaagacatatttgatactaaccaaacatggagaaggaacagacaataacactggacgaatatattcaagatgcaaatctttatgtggcattgaaagaagttcaggatcctacatttctgtatcacagatttttaattctccttgagtgtaaactactacctattgccatttaccaaaaaaaatactcatttccatagacatgtagcaatataaattgcctgaaaatgggataatgctttcatgcagtgaaatcttgataaaataagagaaagttacagctttttttttaataatgattataggatttaagagaacgggtatgtgacaatactctgaagaagtattttaggtggtgtaaaaacacttgtatctgggagcattgaaatctacagactgatatttcctttttgttttctttttcagagcaactgcttactggacattgaagctttatggccagctgccaaaaaaataaatgcaccttaatttttaaattgaattataaagccaaaaatatcctattgctctattcctcttattttggtgtttacatgtgactttataatttccttcacttgaaagattttaactttaaaggaaactttactctgaacgtttaggacaattcatagataatcaaattgattatcatgttttcaatgttaaatattacttcatatgtctttttacaaccttcagaataagaaagccagctatgaaataccaagtcttgactagtagtgccacctagcatcacaaagaaaaagttgttcaactactttgcaaagcattggaaatttatcaaatcatctaatatactatctccttgatccttaatccagaggaaaataagcagacatgatcaattagaagaaatgtacacaaaacctatgtaattttagagatagtatactacatattatgaatgtttgtgttttagtaagatgtagttatgagatgtagcagtaagatataatttctggtttgctgactgatatgctaccggtttttcctacaatttaagaaaacatattgggattcaaatgaataaaaataatgtttgtgtactgaaatattggctatgacctaatttatagaataaaaagtaagtcattcacaactatcagtattttgaataatgtggcaaccaacaactgattgagatttgttagtgttttgagtaatgaatttagaaactttggaatataa

SEQ ID NO: 717333 - DNA, 1838 bp, Homo sapiens
attgacttttcttgaaccaaggttcatattaacaaaatataaattagataacggttattagtgctgcaacaacacttagatgagtctagccataatatgtcagtaacatgaaaaatgctaggttttttggtttggaatttatctgggttttcaattaggcttagccaacttgagcaagtagttcttgtggcaacaattatgggttttacttgtgtgtttgatttgtatttgggtctttttttttccttatttgatcaccaaggcacacacaaatattcgtctcaagctaaagccccgaaagtaagccattctttagctggtgaaattctaatctcgttttatatgtagtcaatgagctgctgagagatgccttagcttgttaacatgatagcagacagatgagaagaaataaaaagtactggcctgtgaaagccaaatcaaagagccagattgaggagattctcgagttacccaggtgaggccctcagtgcctagctagtgacccagctaatggtcagaatgctgtaggttccgtttggatgatccaaacgttaaaacatgggacttcgatgtctgcataaatggctgataatttgccttttctttgtaagcttactatacaataaacaaaagacatatttgatactaaccaaacatggagaaggaacagacaataacactggacgaatatattcaagatgcaaatctttatgtggcattgaaagaagttcaggatcctacatttctgtatcacagatttttaattctccttgagtgtaaactactacctattgccatttaccaaaaaaaatactcatttccatagacatgtarcaatataaattgcctgaaaatgggataatgctttcatgcagtgaaatcttgataaaataagagaaagttacagctttttttttaataatgattataggatttaagagaacgggtatgtgacaatactctgaagaagtattttaggtggtgtaaaaacacttgtatctgggagcattgaaatctacagactgatatttcctttttgttttctttttcagagcaactgcttactggacattgaagctttatggccagctgccaaaaaaataaatgcaccttaatttttaaattgaattataaagccaaaaatatcctattgctctattcctcttattttggtgtttacatgtgactttataatttccttcacttgaaagattttaactttaaaggaaactttactctgaacgtttaggacaattcatagataatcaaattgattatcatgttttcaatgttaaatattacttcatatgtctttttacaaccttcagaataagaaagccagctatgaaataccaagtcttgactagtagtgccacctagcatcacaaagaaaaagttgttcaactactttgcaaagcattggaaatttatcaaatcatctaatatactatctccttgatccttaatccagaggaaaataagcagacatgatcaattagaagaaatgtacacaaaacctatgtaattttagagatagtatactacatattatgaatgtttgtgttttagtaagatgtagttatgagatgtagcagtaagatataatttctggtttgctgactgatatgctaccggtttttcctacaatttaagaaaacatattgggattcaaatgaataaaaataatgtttgtgtactgaaatattggctatgacctaatttatagaataaaaagtaagtcattcacaactatcagtattttgaataatgtggcaaccaacaactgattgagatttgttagtgttttgagtaatgaatttagaaactttggaatataa

SEQ ID NO: 717334 - DNA, 1838 bp, Homo sapiens
attgacttttcttgaaccaaggttcatattaacaaaatataaattagataacggttattagtgctgcaacaacacttagatgagtctagccataatatgtcagtaacatgaaaaatgctaggttttttggtttggaatttatctgggttttcaattaggcttagccaacttgagcaagtagttcttgtggcaacaattatgggttttacttgtgtgtttgatttgtatttgggtctttttttttccttatttgatcaccaaggcacacacaaatattcgtctcaagctaaagccccgaaagtaagccattctttagctggtgaaattctaatctcgttttatatgtagtcaatgagctgctgagagatgccttagcttgttaacatgatagcagacagatgagaagaaataaaaagtactggcctgtgaaagccaaatcaaagagccagattgaggagattctcgagttacccaggtgaggccctcagtgcctagctagtgacccagctaatggtcagaatgctgtaggttccgtttggatgatccaaacgttaaaacatgggacttcgatgtctgcataaatggctgataatttgccttttctttgtaagcttactatacaataaacaaaagacatatttgatactaaccaaacatggagaaggaacagacaataacactggacgaatatattcaagatgcaaatctttatgtggcattgaaagaagttcaggatcctacatttctgtatcacagatttttaattctccttgagtgtaaactactacctattgccatttaccaaaaaaaatactcatttccatagacatgtagcratataaattgcctgaaaatgggataatgctttcatgcagtgaaatcttgataaaataagagaaagttacagctttttttttaataatgattataggatttaagagaacgggtatgtgacaatactctgaagaagtattttaggtggtgtaaaaacacttgtatctgggagcattgaaatctacagactgatatttcctttttgttttctttttcagagcaactgcttactggacattgaagctttatggccagctgccaaaaaaataaatgcaccttaatttttaaattgaattataaagccaaaaatatcctattgctctattcctcttattttggtgtttacatgtgactttataatttccttcacttgaaagattttaactttaaaggaaactttactctgaacgtttaggacaattcatagataatcaaattgattatcatgttttcaatgttaaatattacttcatatgtctttttacaaccttcagaataagaaagccagctatgaaataccaagtcttgactagtagtgccacctagcatcacaaagaaaaagttgttcaactactttgcaaagcattggaaatttatcaaatcatctaatatactatctccttgatccttaatccagaggaaaataagcagacatgatcaattagaagaaatgtacacaaaacctatgtaattttagagatagtatactacatattatgaatgtttgtgttttagtaagatgtagttatgagatgtagcagtaagatataatttctggtttgctgactgatatgctaccggtttttcctacaatttaagaaaacatattgggattcaaatgaataaaaataatgtttgtgtactgaaatattggctatgacctaatttatagaataaaaagtaagtcattcacaactatcagtattttgaataatgtggcaaccaacaactgattgagatttgttagtgttttgagtaatgaatttagaaactttggaatataa

SEQ ID NO: 717335 - DNA, 635 bp, Homo sapiens
  misc_feature 3: n = A,T,C or G
aanttaagtgcacaatcccctattgtttcctgtacgcactatgttgtccaccaggtctctagaatttattcatcttgcagaaccacaacttaatacctattgatcaacgactcctcattttcccctctaaggcacgtggccaactaccattgtactctctgcttctgtaagtttgcctatttcagattcctcatgtgagtggaatcatgcagtatttattcttctgtgaagggcttatttcacttagcacaatatcctccagattcattcatttagtcatatatggcaggagtgccttattttttaaggtgaaataataktccattgtatttatatttgtcattctttaggtactaagtctttatgcatgtatttcctcaagccactttaattcttccatgagagctttatgccaaagcacatggttaagctgacttaagtgtcttgattctgcttacacaagtcttagctcattttttccctcacagacaggcccagtaaacagagcccaagtttccaacttactttgcttcagattactttctctcttccaaagctgctgaattggaaaaaatcaaacataatctgacatctgtttcacctctctgtttttaaaactccagataggttgtcaa

SEQ ID NO: 717336 - DNA, 628 bp, Homo sapiens
aaaaaaaaaaaaaaagacatttgtaaaaaaaaagctgtgaacagttatttggtgaataaaaaaaaatttggttcatttactaaaagaacagtcacctcyaaattatctgattttctgaattatataattaagtatacaggaaatagtttaaaaaaactgagatgccttgattctttgttctttaaaatatatgtttttaaagtatatgtgttgtgtgtgtgtgtctttacttcaaaacaattaatatagtcattaaaatattgatactttgaaggttgaacagcttttgaaattaaaaaaaggaagtatttataagataatagtaagcaagaagtgacaaatgataaaatataatagttattatatataaaagtattaaaataatacttaagatataataaatacttaaattagaaattcaaaaaatgttatttaggaaaaaataggattgactgaagaatcaaaattgctcctgttccctttgggacagaaagcttaaactgagtggaaagagcgagttgtagttttgttgttacatataaagacattacatcttaccttgggagggaacagaaatctggccagataaccacttggttcctttcttccagtcatcagcaaattgcta

SEQ ID NO: 717337 - DNA, 628 bp, Homo sapiens
aaaaaaaaaaaaaaagacatttgtaaaaaaaaagctgtgaacagttatttggtgaataaaaaaaaatttggttcatttactaaaagaacagtcacctccaaattatctgattttctgaattatataattaagtatacaggaaatagtttaaaaaaactgagatgccttgattctttgttctttaaaatatatgtttttaaagtatatgtgttgtgtgtgtgtgtctttacttcaaaacaattaatrtagtcattaaaatattgatactttgaaggttgaacagcttttgaaattaaaaaaaggaagtatttataagataatagtaagcaagaagtgacaaatgataaaatataatagttattatatataaaagtattaaaataatacttaagatataataaatacttaaattagaaattcaaaaaatgttatttaggaaaaaataggattgactgaagaatcaaaattgctcctgttccctttgggacagaaagcttaaactgagtggaaagagcgagttgtagttttgttgttacatataaagacattacatcttaccttgggagggaacagaaatctggccagataaccacttggttcctttcttccagtcatcagcaaattgcta

SEQ ID NO: 717338 - DNA, 628 bp, Homo sapiens
aaaaaaaaaaaaaaagacatttgtaaaaaaaaagctgtgaacagttatttggtgaataaaaaaaaatttggttcatttactaaaagaacagtcacctccaaattatctgattttctgaattatataattaagtatacaggaaatagtttaaaaaaactgagatgccttgattctttgttctttaaaatatatgtttttaaagtatatgtgttgtgtgtgtgtgtctttacttcaaaacaattaatatagtcattaaaatattgatactttgaaggttgaacagcttttgaaattaaaaaaaggaagtatttataagataatagtaagcaagaagtgacaaatgataaaatataatagttattatatataaaagtattaaaataatacttaagatataataaatacttaaattagaaattcaaaaaatgttatttaggaaaaaataggattgactgaagaatcaaaattgctcctgttccctttgggacagaaagcttaaactgagtggaaagagcgagttgtagttttgttgttacatataaagacattacatcttaccttgggarggaacagaaatctggccagataaccacttggttcctttcttccagtcatcagcaaattgcta

SEQ ID NO: 717339 - DNA, 1425 bp, Homo sapiens
gccttgtgtgaattaaactctttctttactgcaagaaaaaatttaaataaataaacaaaagaaataagcatatgtttcaaatattaatggtgctttctgatgtctgaagagcttaaacacattgtgttgattagtcagtggataaaattgttttcaatgaaatggctgtggtaggaaaatgattttggcaggtatgacacagaagattttatttctaatgtatgtattgagttattgtttgtttggttggttggttggttttaaaggtagatataatcttaatatgtatgcactgtggcctacatttcttaaaaacataaggaagttgaagattgctttcataatctaatcaatcttacatcactttcctgtcagtaacaggaggaaaacttttatggaaagtaaatgactttacaacataataaaatcaatttattcagtcaaaaactttaaattacttattattaagcaggtatgcatggtaaaaaataatttaacaatataaacgatcattttttgcaactcttatccaaaccccaagccctacatggaatattaatccttttcggttttaagttttccttataactaacttcattaccctaagtaatattattatgtttccacttcttggtttatcagattcaaactgtattgacatactttctcactttttatctcaagtcctaaaagatagtttttttttctattagttatatttaaaacttaaaaaaattaaaaccatagtttttttctttatcaaatataatggcatatttttattataaccaatacaaaatgaagaaatttgtatttacaatttactgtatctcttacccaccttatttccaaacttctgtcagttataatattgctttaatattattgacacataattcatattgctttgtaacaataattacatttttccttattttgttatgcaatgattctaaaaattgaaaaagcaaaaagtagcacttactgtcctgttattacaactacggttcatctaagactaagaacaattactgtaaattttaaacattattattttaaattataacatgttttagttttttaatatttgattttctacatagatttttttttatttctcctggagtttcttatctttctgtttgtccttctttttaaaatgcaaatgactttgtcataaatctaagatttatttstcgtatatgtagtattattatactagaattcctttatttcaaaattatttttcctaggactctctgacttcaagctcaactagcccaattgatctttaggccatttccatgactaaaattatgagatgttttttcatacatttataaattaaaaacattatttctggaaaataatgtatttttttttgcctttgcgtttgtgtgtttggttggttgcttggttggttgg

SEQ ID NO: 717340 - DNA, 1142 bp, Homo sapiens
tatatatgtatatataaaaatcttttatctatattccatccttaaagattcattgtctgtttactgaccctttttaatcacaatgtaagttgccattaaaaagtttctcgtttgtacgaagtcaaatatatttacattttcttttacatcttctgagtttctttattttgactgacatctttttttaatttctagatgatatttatattcaccttcaattcttacatgatttttcaacttttatttttatttgtgggatttatttttgtgtggttaaaakaaaaagtaggatccaaagttgtttttatatggttaaatttgtcatggagtgtcttgtgtcaaaccctgacaaaatggaaccaggaagtctatgaagtttccacacacaaacttcctgttaacaagacctatcacaaatagctctgctgaaaccaaaaccttgtgcaaaaaatactcctacgaggacatctgcccggcaactgcttgcctaaccttggcctgacaaccacccttgttattgatccctgtagccaaggataattgtttctaaacagcttatatacacctatttatttttcttttaaaaaccttcgtctttctttacctcccaaaatacacccacacatcttcccactgcattgtttattcctgaaaaacttagtatctttgaagaatctctctgtttttttaaggtgatgataaagattaatagtaagttatttctactgttatattttccaccctgaataagaatactatctttattatattaaattatcgtatatactgtgatttaattttaactttctattttctttgattgattcatgtatctatttttattcaaaggatacattgatttgacctcagtatttttataaattattatacatctaaataaagcaagttcttcctttaatgttctcttgcactaatctcttgtttcttttgaggaagtttttcttccttataataattcaaattattatttccaatggcaaaacactatgtcacgttactaattagaattgacataaatttatatactaatcttgtaaaaattgacatttcatttagtcttaaaatgaagactatgatatgtgtcttcttttgtgcagaacttattttgtatctataaatac

SEQ ID NO: 717341 - DNA, 1589 bp, Homo sapiens
ggtttaatttctttttgtaatttccacaggactctgctggagcaggacttcagagtgtttgttttcagcctgcttttaaagtgatttgaagagagtggctttgaaggtttccatccttactttttcatgtatagtatcttgttctttaaaattagtgagctgggcacatccacataaacacatacagttataattgccccaattttaagctcacttttgccacagtgaaaactcaacaccattagcacagtgagccagctctgattctctgaagtgctgggcatctttttaatggacaaattgcaaatttactaatgtaaaaactgaagttaatcacactggcatctattcttccaatttgtcatttggctgaaagtgatctgatgtcattcagaaagaaagtgagttggaatggcatcaagtcctgatggtgtagctttgggctgaagctgagttttcctccatgaagcaactgctgctgtttcctggagggcagactttgttaacgtgtctgtgtctgaattgctcagaatcttaggattcacttgaggaatgtgacagtcaacactgttaattcacctggtaggctgaggatgtcaggtcacagtgccacactgtcaggccaggggtcacagtgccacattgtcagcccaggggagggttcctgaatgactgagggaatcccatttgtagcagcagaagaaacgccgccatcaccttgcacccttgcctcccttgagaaggcaccatgacctctgcacagaggcctgaacatttcctgctataatggggtctttatttgtgtttgcttttgcttcccttcccattcatgaaatgttctgtacatataacatctgagtattttggagagcataatctcttcctgtaaaccagtggcttaaaacctggggttgccagccagtataatgaatacagtctctgaagttacctggtcctttgggggttaaatcagtgaccttggttttctcaagctataactttgtctccttccatggttgccacataacacaaggggaaacactcttccaatacagtgtacctaagaggaactcatttcaaagatagctatggaggtctgtctcgttttaaaatttgaaagaacaaatagaaatttctaagattattgtcactgaattttcacttttatgagactgactttctccctactgtgcttatgaggcacctaatttctaccttaaaagaccaacctatacagccagcatggtggctcatgcctgtagtcccagcagcttcagaagctgagatgggaggattgctcaagccctggagttcgagagcagcctgagcaacatagcaagacccccatctctaaaacatttataaaaattagcagggtgtggtagcttgtgtctgtagtcccatctactcrggaggctgaggcagaggatcacttgagcccaggggtttgaggatgcagtgagctatgatcatgccactgcactccagcctggggcaacagagtgagatcctgtcttttttttttttttaaatgcttatttaaaatgccattacttacttagtaaaatgccatttctattcaaattaaa

SEQ ID NO: 717342 - DNA, 626 bp, Homo sapiens
tgaatcgagggtataggactgggagccccacccaacctgaaaatcagactgcttctttaagggagaccctgatccactcctcatctttggacaggaccttccaaccagggcctccaaccaccaccacccatattctctggctaacagttttgatttctccctggaattgagtgcctgtagggaggggcgggccaccatttttactgtttgggcaactcagccattccatcctgctggctttggagagttcaaacagattgggtgaagataggattccccaacacagcacatctgctctaccaaaacatagccagactgcttctttaagtgggaccccaatctcttcctcatctctgggcaggacctcccaaccagggcttccaaccacccctgcctgtattctccagccaacagtgatttgatttctccctgggactgagctcccagcaggaggggcaggccaccatctttgctgtttgggcaactcagttgttccagtctgtgggctttggagagcccaaactgaccagggttgaagcggtaccccagcatggcacagctgctcyacaaaagtgtggtcagactgcctccctaagcatgtccctgatctattccttcttgctggg

SEQ ID NO: 717343 - DNA, 1121 bp, Homo sapiens
tggcgaaaccctgtctctactaaaaatacaaaaattagctgggcgtggtggcrccgcctatagtcccagctactccagaggctgaggcaggagaatcgcttgaacccaggaggcggaggttgcagtgagccgagagcatgccactgcactccagcctggcgacagagcgagactccatctcaaaataataataataataataataataatggtaatagctaaaatttaaaatgcttactcatcacctcttctacacgcttcacatatattctgttatttagttcacatagccccctccccccacagaggtaggcatgactacactatccccgttttgtagatgagcaagccgaggcatgcatggcgtccaggctcacacagatatgtggcagagcctggattcaaacccagtctggctccagcatccacgcacttaatgccttgccacccctccaatgagggtattagcttgtgacagagctcggccaaccagacttggaatctggagcaattgatctgaagaagcagagacagggagaagctattccggtgtcagcaacaatgtcgaatatccagggacagcagggcggcggtgatgatcagctctgatgttctctggctctgtcgcccattgcccggcagcagtggtagcgacggcctcatcaggcgaattccgtggcatgcttccctttgtctgcacgtcttctttggagtctatttttgcagtttctcaacaactctgcgagctctccaggtgttgtttcaatcaattccttttccacttgagtcagctggagtccgcctttgttgctcacacccaggtatcccaactgatgggtcccatttgatgcacacctgtgtctgtgaacccagatctgtggctgtggcacttacaataagctcccttgtgactcgagcttctgtgggagggattctggtctttgcagctctccagccctggattcgaataaccctgactttccaaactctgaagccacaccaggaggggaacaaggctgcaggtctacccagccctagtacaatcacatctgttcaggtgacagtggccaggactgctgcagatagtgccattatggccaggtattgagctgacccagatg

SEQ ID NO: 717344 - DNA, 1121 bp, Homo sapiens
tggcgaaaccctgtctctactaaaaatacaaaaattagctgggcgtggtggcaccgcctatagtcccagctactccagaggctgaggcaggagaatcgcttgaacccaggaggcggaggttgcagtgagccgagagcatgccactgcactccagcctggcracagagcgagactccatctcaaaataataataataataataataataatggtaatagctaaaatttaaaatgcttactcatcacctcttctacacgcttcacatatattctgttatttagttcacatagccccctccccccacagaggtaggcatgactacactatccccgttttgtagatgagcaagccgaggcatgcatggcgtccaggctcacacagatatgtggcagagcctggattcaaacccagtctggctccagcatccacgcacttaatgccttgccacccctccaatgagggtattagcttgtgacagagctcggccaaccagacttggaatctggagcaattgatctgaagaagcagagacagggagaagctattccggtgtcagcaacaatgtcgaatatccagggacagcagggcggcggtgatgatcagctctgatgttctctggctctgtcgcccattgcccggcagcagtggtagcgacggcctcatcaggcgaattccgtggcatgcttccctttgtctgcacgtcttctttggagtctatttttgcagtttctcaacaactctgcgagctctccaggtgttgtttcaatcaattccttttccacttgagtcagctggagtccgcctttgttgctcacacccaggtatcccaactgatgggtcccatttgatgcacacctgtgtctgtgaacccagatctgtggctgtggcacttacaataagctcccttgtgactcgagcttctgtgggagggattctggtctttgcagctctccagccctggattcgaataaccctgactttccaaactctgaagccacaccaggaggggaacaaggctgcaggtctacccagccctagtacaatcacatctgttcaggtgacagtggccaggactgctgcagatagtgccattatggccaggtattgagctgacccagatg

SEQ ID NO: 717345 - DNA, 1121 bp, Homo sapiens
tggcgaaaccctgtctctactaaaaatacaaaaattagctgggcgtggtggcaccgcctatagtcccagctactccagaggctgaggcaggagaatcgcttgaacccaggaggcggaggttgcagtgagccgagagcatgccactgcactccagcctggcgacagagcgagactccatctcaaaataataataataataataataataatggtaatagctaaaayttaaaatgcttactcatcacctcttctacacgcttcacatatattctgttatttagttcacatagccccctccccccacagaggtaggcatgactacactatccccgttttgtagatgagcaagccgaggcatgcatggcgtccaggctcacacagatatgtggcagagcctggattcaaacccagtctggctccagcatccacgcacttaatgccttgccacccctccaatgagggtattagcttgtgacagagctcggccaaccagacttggaatctggagcaattgatctgaagaagcagagacagggagaagctattccggtgtcagcaacaatgtcgaatatccagggacagcagggcggcggtgatgatcagctctgatgttctctggctctgtcgcccattgcccggcagcagtggtagcgacggcctcatcaggcgaattccgtggcatgcttccctttgtctgcacgtcttctttggagtctatttttgcagtttctcaacaactctgcgagctctccaggtgttgtttcaatcaattccttttccacttgagtcagctggagtccgcctttgttgctcacacccaggtatcccaactgatgggtcccatttgatgcacacctgtgtctgtgaacccagatctgtggctgtggcacttacaataagctcccttgtgactcgagcttctgtgggagggattctggtctttgcagctctccagccctggattcgaataaccctgactttccaaactctgaagccacaccaggaggggaacaaggctgcaggtctacccagccctagtacaatcacatctgttcaggtgacagtggccaggactgctgcagatagtgccattatggccaggtattgagctgacccagatg

SEQ ID NO: 717346 - DNA, 631 bp, Homo sapiens
tggagccaggctgtcacctgaccaggaaggaaacttccagcctgtccccagggaggaaccagcaaaaaccaggcttggggcagcatcctaagggccctccaactttgcccctctgtttggggaaagcccaggaccaccctgatgttgccctcacacacaccaatccccctttccacttgggagacctgccttccacaggagccagctttgtcctctgctgggcctggcctccttccacaaagactcctcactccagacagggcagccaggccaaaggtgtggctgagcctcttacattttacagggaagaccaggaagggacagaccagccttgggatgggagcacctgtggcttccctcagttcttagaccaattgcaggggccrgaattgtaccagagggcagagcaatcctgcatagttgaaagttgggaggggggagatgtaggtcccagccagcattcttatgtcccctaatccctggctcttggcatctgtggcagccgtcttaacatttcaaacaacctccctgctgaggtcttctttgatcctctaggcatctcttagaatcaagccccaagcctaattccacccatttttcctcccgctgagttgagaggagaaatggctcg

SEQ ID NO: 717347 - DNA, 464 bp, Homo sapiens
tactaaaaatacaaaaattagccrggcgtggtggcgggcgcctgcagtcccagctactcgggaggctgagtgaagcaggagaatggtgtgaacccgggaggcagacagagcttgcagtgagccgagatcgcgccactgcactccagtctgggctacagagctagactccgtttcaaaaaaaaaaaaaaaaaaagaggaagtaacatcagacatcagaaagagaatggtttgtacaaattaaaattatctcctcctctctatatataccatatatatggtattgttttgtatacttttgttcccagatctattggaacataagaagctcagaaaagcccatttttttgcatctgaatgtcatgttgtgtaggaattgattattgcaatggttacgaaggatattggtcctattaaggtggcttaaaatattttttccaagagaccaaaagccctctttggtcttt

SEQ ID NO: 717348 - DNA, 598 bp, Homo sapiens
gaactaaacagaagcacagaaggaagggtgaagatattctggatgcgctcacccatgttcatgggcctcaccactgcctgaccacagccactgcctgctgttcataaatatatggtcaggagggggatgttcactactgacaggggcccgggagaacctttgatttgaggtttcgtcaagaagacaaggactgttgaagagttcrgagcccctgggttgctgactaaatccagtagtcgctttgggccctttctcagtaaacaagcacggagacacctggacaggaatcctgccaaatgggagcagtgcaggcgagggtgtggtcctgccacggaggcaggactggggcagggaagggtggagaggagatttcactgttatttcatatccttctgcatttttgtttgcttgcataacaaaacatctattgcctttctacttttttaaaaaagcaacttttttttttggaaaggaagaactagtgaggctccttaacaatactatgagtcaggatttttctgctccttcttcctctgtccctggtctgtggctcctgtcatggcctctcctcctgtggcgggaggttgggcagtcccca

SEQ ID NO: 717349 - DNA, 2773 bp, Homo sapiens
tgaggtcaggagctcgagaccagcctggccaacatgttgaaaccctgtctctactaaaaataaaaaattagccgggcatggtggcacacgcctgtagtcccagctacttgggaggctaaggcaggagaatcacttgaacctgggaggcgaagttgcagtgagccgagaatcgcgccactgcactccagcctgggtgacagagtaagactctgtctcaaaaaaaaaaaagaaaagaaaaaacaaaaacaaaaacagagtcctccctttccccaaccctacacccaatccaccagcatttcctgttaaagggacctcttccaaaatgcacctcagtcctgcggccactctaccaccgccctctctcctggggcctcccgacaggtctcaaaagttctgcttcctggctgggtgtggtggctcatgcctgtaatcccagcattttgggagtccaaggcaggcggatcacaaggtcaggagctcgagaccatcctggctaacatggtgaaaccccgtctctgctaaaaaaatacaaaaaaattagccaggcgtggtggcgggttcctgtagtcccagctactcaggaggctgaggcaggagaatggcgtgaacccgggaggcagagcttgcagtgagccgagatcgtgccactgcactccagcctgggcgacagcgagactcatctcaaaaaaaaaaaawttttctgcttcctcccctgccagctcagcttagggtccttcacattcctcccctgcttccagggccctcttgctgtgccccaccctagcttctactccatctcccccatcttcatctgtgctccctaaagtgtagccatgtatgtgagttttctgcctctctaaatgtgctgtggccccagggcctttgcacttaccccctacaaggaccctctttccctgaacctccccatgcctctcagcctccagggttcagtggggacttccgtggccactcaggtcattcttccctctctcgaccctgaatgttttaccttaatagcacttaacttatcttgtaattttctgtttgttgatttatttccaagagtcctctgagggcaggcaaagcagactgttctcaacgactgaaacatttttcaaatgaatgctgtattgagttgattggaaataactatacactgtagatgaatcaatgaaagcagcccttgaggccatgcagcctggtgaggccccctcaacaggtgcccacagggagtcctgcctgcctgtcccaccttcccttcctaaacgagagggctcacatctgttttctcggctgcacgctggccacactcatgcccctcacagtcaccatgggaggggagaatcattatcccaaaagtgctgataaacatacctggccatctcattgaggtcacgtatgagtgggcttcacgaccatgacactgaaagccaagggtgaagacaacagctctgagagctggcactatcatcagcccccttcacaaatgagaacactgaggctaggcgggtcaggtgacttgctccagcattaggcagcagagccaggctccggggctctgggaccttccaccttctcccagcctggagcctccacagtccttacagagggcaacctcagtcctgtccacgttcagacgtggggagcaggggcacaatgaggcaggggtccttgcccttgccgcagcacgggccctgggggtggtcctggtcataggaggaccctcctgcctcttcccctgcctcccctgtgttcaggttgagtgatgtaggacaggcttctcagaccaggcagaagtaggtcagctagtgtgctgggggggccccttccaggtcaccctgccaggaatacactccagtcagggaatgagggcagtgcatgggctctgggcttgaatcctgcctctgtcttcaccctgtctgtgacttggggaagaagcagggggtacttgaatctcagtggcaccaatagcttctgaggccagctctgccaatccctgggctgccctgcccttctctggctctcactccttgtgcccccaagccccttccagtcaatgtgtccccagcagctccaggccccagaggtgtgattgagggtgagaggtaacaggtatacagcagagctccctaaaggcatccacacgggatccccattagacgttcctcgctctgctgcctccagggtggagcctggccacggtcctgcgggcgagggtggggcgggggggtcagtgaacatcccctccccacaccccaggtctgcataagagccctcctcccccacctcctcccttctcctcctcaaatcctggctcctttcaatgcccctctgtgcagcatctcagagaccttgggcctctggctcacctcacactgcttggccatcccaggtcctgaccgcaccccacattcttggctcccctgtccttgacccaactgtgccagtcctcctagaggcctggcccctcctgcttcacccctggggccaacacacaaggtgctttacccctttgaaccccaatttcctcaggtggtgagagaaatacaggtaactctgctcacctccggctccctgtctgttccgtgtgagtttccgtgtgctgccaaaaaatgcctgtgtgctgccagttgttgtttttaatggctctccaggtctcccacggccctagacagcctggatgctgggccacgcaggaagtaagatggaaagatggaaagaggggcagcagatggtaacagcatggtgcccgcacctcgtctggagtgggcta

SEQ ID NO: 717350 - DNA, 2773 bp, Homo sapiens
tgaggtcaggagctcgagaccagcctggccaacatgttgaaaccctgtctctactaaaaataaaaaattagccgggcatggtggcacacgcctgtagtcccagctacttgggaggctaaggcaggagaatcacttgaacctgggaggcgaagttgcagtgagccgagaatcgcgccactgcactccagcctgggtgacagagtaagactctgtctcaaaaaaaaaaaagaaaagaaaaaacaaaaacaaaaacagagtcctccctttccccaaccctacacccaatccaccagcatttcctgttaaagggacctcttccaaaatgcacctcagtcctgcggccactctaccaccgccctctctcctggggcctcccgacaggtctcaaaagttctgcttcctggctgggtgtggtggctcatgcctgtaatcccagcattttgggagtccaaggcaggcggatcacaaggtcaggagctcgagaccatcctggctaacatggtgaaaccccgtctctgctaaaaaaatacaaaaaaattagccaggcgtggtggcgggttcctgtagtcccagctactcaggaggctgaggcaggagaatggcgtgaacccgggaggcagagcttgcagtgagccgagatcgtgccactgcactccagcctgggcgacagcgagactcatctcaaaaaaaaaaaatttttctgcttcctcccctgccagctcagcttagggtccttcacattcctcccctgcttccagggccctcttgctgtgccccaccctagcttctactccatctcccccatcttcatctgtgctccctaaagtgtagccatgtatgtgagttttctgcctctctaaatgtgctgtggccccagggcctttgcacttaccccctacaaggaccctctttccctgaacctccccatgcctctcagcctccagggttcagtggggacttccgtggccactcaggtcattcttccctctctcgaccctgaatgttttaccttaatagcacttaacttatcttgtaattttctgtttgttgatttatttccaagagtcctctgagggcaggcaaagcagactgttctcaaygactgaaacatttttcaaatgaatgctgtattgagttgattggaaataactatacactgtagatgaatcaatgaaagcagcccttgaggccatgcagcctggtgaggccccctcaacaggtgcccacagggagtcctgcctgcctgtcccaccttcccttcctaaacgagagggctcacatctgttttctcggctgcacgctggccacactcatgcccctcacagtcaccatgggaggggagaatcattatcccaaaagtgctgataaacatacctggccatctcattgaggtcacgtatgagtgggcttcacgaccatgacactgaaagccaagggtgaagacaacagctctgagagctggcactatcatcagcccccttcacaaatgagaacactgaggctaggcgggtcaggtgacttgctccagcattaggcagcagagccaggctccggggctctgggaccttccaccttctcccagcctggagcctccacagtccttacagagggcaacctcagtcctgtccacgttcagacgtggggagcaggggcacaatgaggcaggggtccttgcccttgccgcagcacgggccctgggggtggtcctggtcataggaggaccctcctgcctcttcccctgcctcccctgtgttcaggttgagtgatgtaggacaggcttctcagaccaggcagaagtaggtcagctagtgtgctgggggggccccttccaggtcaccctgccaggaatacactccagtcagggaatgagggcagtgcatgggctctgggcttgaatcctgcctctgtcttcaccctgtctgtgacttggggaagaagcagggggtacttgaatctcagtggcaccaatagcttctgaggccagctctgccaatccctgggctgccctgcccttctctggctctcactccttgtgcccccaagccccttccagtcaatgtgtccccagcagctccaggccccagaggtgtgattgagggtgagaggtaacaggtatacagcagagctccctaaaggcatccacacgggatccccattagacgttcctcgctctgctgcctccagggtggagcctggccacggtcctgcgggcgagggtggggcgggggggtcagtgaacatcccctccccacaccccaggtctgcataagagccctcctcccccacctcctcccttctcctcctcaaatcctggctcctttcaatgcccctctgtgcagcatctcagagaccttgggcctctggctcacctcacactgcttggccatcccaggtcctgaccgcaccccacattcttggctcccctgtccttgacccaactgtgccagtcctcctagaggcctggcccctcctgcttcacccctggggccaacacacaaggtgctttacccctttgaaccccaatttcctcaggtggtgagagaaatacaggtaactctgctcacctccggctccctgtctgttccgtgtgagtttccgtgtgctgccaaaaaatgcctgtgtgctgccagttgttgtttttaatggctctccaggtctcccacggccctagacagcctggatgctgggccacgcaggaagtaagatggaaagatggaaagaggggcagcagatggtaacagcatggtgcccgcacctcgtctggagtgggcta

SEQ ID NO: 717351 - DNA, 596 bp, Homo sapiens
ccccgccccgtggctgggtttcagggccacaggcagcaagagacccacttctatccaccctgcccggcttatgtagcacgaagagggctctgaagaagcagcctcttactgacattctacacacccttatgaaaagcccccaaagaggccccgcgcggtggctcaagcccgtaatccaagcactttgggaggctgaggcaggcagatcacctgaggtcaggagttcgagaccagcctggccaacatggtgaaaccccgtctctactaaaaatacgaaaatttgctgggtgtggtggcgtgcgcctgtaatcccagctactccggaggctgagacaggagaatcgcgtgaactcgggaggcggaggttgcagtgagccgagatcgagccactgcactccagcctgggcgacaagagcaaaactctgtctggaaaaaggaaaaagaaagaaaaagcccccagagtcgggtctagccagggtccccagcagacagttaatcaatgaaaatgggccaagtgcrgtggctcacgcctgtaatcccagcactttgggaggccgagacgggagggtcacgaggtcaggaaatcgagaccatcc

SEQ ID NO: 717352 - DNA, 689 bp, Homo sapiens
aaataaataaaaactaaatagacaagtcattatcctgttacagtgagttattacatatgtcttatattacaaaaaatcattcattatttcccattacctccaatatggacaccaactttcatagcatggtattgctttactctgtatgatttatctttttccagattttccagctttattccctgttgcttctcaacttgcactaaattgcttattatactaaactaytttcaattcaataaacaagactagctatttgaataagccattttggggggataggcttataccgatgttcaaacatcctttcttttttctttccttaatatggagattctgttcaagatttccttcaagattcagtttaacctcacctagaagacttccttcgattgtgacagactgcatgcatgtcttctctttgccacagggcaccgtgcaccatagtatagcccactatatggtatttgtattcaatctccacttcattggaaacttcttgaggacaaatgtgttgttttattctcagaattccagccttagaactaaatccagctcaaatgatactcaataaaagtttgccatgtgaaagaataaacgtgattggagaacatagagccaaccagaaagagaattctgctctaactgaaatttcagaagtgaggtctgtgactgagacctatgtgaga

SEQ ID NO: 717353 - DNA, 1434 bp, Homo sapiens
  misc_feature 631, 636, 637: n = A,T,C or G
cgggagagtgtttgtgaccctgccctgtagctttcggtgacttaaaaacccaggtcgctgtggaacccagtctccacggcattgcctttgcaggcagcagccttgggcttacacctgaggtcgttttctccacagacacttctgggtgatgcgagtgctgcgcagctcagaacccttggaagcatgagaggaggacgagcccggcggcctgccggtgcggtgatggagggctcttcggtagccacactgcgcgcctcccacacacaccttaacagtcttggggccccgggccagcgctgcagcccaaagagaccctgcagccgcattttctcccaggccgtggcaaaccctggcttcgcctcccttcaccatggcttgtgagggcaggaggctcccgggggccgacttccctgacctgaatgagtcaggcacccttctttattttaagtgggggtgtgacctgaggagataaaggaaggacgacagacctggggagtggggccctgcagcctcttgggcccggagcgcactccttctcgctccctcccctcaccggcaggatcgggggtcttgaaactggagccgctcaccggccggcggatgagagataaaggagcccggcgacgcgaangcgtnngaccagcagacccggatccggactttcccgcgctccagagcagcacccgaaaccctacttcccaggtggcacgacggctgagcagctcctccggtgccatacggtgtctccaggcacagacagtcgtgctcgcgtgtgtactgtgcacgcacaagactgcaggatgatgtcctgtatgagccctgtattagcccctttgctctcagccagaggtacacgcatacgtgtgtgcatttgtcaagtgtctagggacaggtgtgcaccttcacacatacgtgatgtgtatgtgcacacatttgtagaacgttctagcatctatcctacaggcacgtacagggctggctgcttctaataagtcatcattacacctcgcatttacacaggccttttcagttctggcatgattttcagaatcaccccgggaaatactctcctttcaaagtttacagatgaggaaacaagcaaaaagaatctaatgggtacccgtttgcacacactgtgagagagatcgaggccagccaaagatcccgcccactgttgaacttgggtgtgttggccgaatgtgctcatagatgggtctgtttagcgccccaggcgacctcaggtccggcgggccttggctcttcgccaggcttcctgggagacccactgcgccgggtgtggggtctcaattcctgtgctgataagcactatcttctggagctgggtgaccctagtgcccagggcgggaagtcgggagctggccggagtgccgctgaggcgatcccggcggttccamggccatggctgaccacgcg

SEQ ID NO: 717354 - DNA, 560 bp, Homo sapiens
atacaaaaattarccgggcatagtggcaggcacctgtaatcccagctactcaggaggctgaggtaggagaatcacttgaacccaggaggccagaggttgcagtgagccaagatcatgccattgtactctagcctggggacaagagtgagagtttgtctcaaaataaataaataaataaataaataaataaatataaattaaaaaataaaaaatagaaaccacaaggtgacagtttcactggagattgtcagttaattgctagtaacaatgagcctaccctcactgtgagtcaccaaatggtatcaagaattctgagggtttattcacctcatttgggtgagcagatgatgtaccatattaggaccaatccatggctaatattacagagaattaagtacacaaaaaatcattctgaaaaagatctaaaccttagaggtcctatgtatttccttattttcagcacaacttaaaagtatagtaattggccgggcgccgtggctcacgcctgtaatcccagcactttgggaggccaaggcaggtggatcgctggaggtcgggag

SEQ ID NO: 717355 - DNA, 560 bp, Homo sapiens
atacaaaaattagccgggcatrgtggcaggcacctgtaatcccagctactcaggaggctgaggtaggagaatcacttgaacccaggaggccagaggttgcagtgagccaagatcatgccattgtactctagcctggggacaagagtgagagtttgtctcaaaataaataaataaataaataaataaataaatataaattaaaaaataaaaaatagaaaccacaaggtgacagtttcactggagattgtcagttaattgctagtaacaatgagcctaccctcactgtgagtcaccaaatggtatcaagaattctgagggtttattcacctcatttgggtgagcagatgatgtaccatattaggaccaatccatggctaatattacagagaattaagtacacaaaaaatcattctgaaaaagatctaaaccttagaggtcctatgtatttccttattttcagcacaacttaaaagtatagtaattggccgggcgccgtggctcacgcctgtaatcccagcactttgggaggccaaggcaggtggatcgctggaggtcgggag

SEQ ID NO: 717356 - DNA, 560 bp, Homo sapiens
atacaaaaattagccgggcatagtggcargcacctgtaatcccagctactcaggaggctgaggtaggagaatcacttgaacccaggaggccagaggttgcagtgagccaagatcatgccattgtactctagcctggggacaagagtgagagtttgtctcaaaataaataaataaataaataaataaataaatataaattaaaaaataaaaaatagaaaccacaaggtgacagtttcactggagattgtcagttaattgctagtaacaatgagcctaccctcactgtgagtcaccaaatggtatcaagaattctgagggtttattcacctcatttgggtgagcagatgatgtaccatattaggaccaatccatggctaatattacagagaattaagtacacaaaaaatcattctgaaaaagatctaaaccttagaggtcctatgtatttccttattttcagcacaacttaaaagtatagtaattggccgggcgccgtggctcacgcctgtaatcccagcactttgggaggccaaggcaggtggatcgctggaggtcgggag

SEQ ID NO: 717357 - DNA, 560 bp, Homo sapiens
atacaaaaattagccgggcatagtggcaggcacctgtaatcccagctactcaggaggctgaggtaggagaatcacttgaacccaggaggccagaggttgcagtgagccaagatcatgccattgtactctagcctggggacaagagtgagagtttgtctcaaaataaataaataaataaataaataaataaatataaattaaaaaataaaaaatagaaaccacaaggtgacagtttcactggagattgtcagttaattgctagtaacaatgagcctaccctcactgtgagtcaccaaatggtatcaagaattctgagggtttattcacctcatttgggtgagcagatgatgtaccatawtaggaccaatccatggctaatattacagagaattaagtacacaaaaaatcattctgaaaaagatctaaaccttagaggtcctatgtatttccttattttcagcacaacttaaaagtatagtaattggccgggcgccgtggctcacgcctgtaatcccagcactttgggaggccaaggcaggtggatcgctggaggtcgggag

SEQ ID NO: 717358 - DNA, 644 bp, Homo sapiens
gtggcgattttgtccagcagtgggtattttgcaatgtctgaagacatttttggttgtcacaactgtgaaagtcttactacagttatctagtgggtagaggccggggatgttgctaaaacatcctacgtgcatagtacagtccctatagccaagaattatctgattcaaaatgtctatagcattgctattggcaaacactgaattagataataggaaccaatgtacattagtcaggaaagtctgggttatggttacaaaaaggatttctcccacctttttttttttttttcttcaggcagagactcttctgtcacccaggctggagtgcagtggtgcaatcttggctcactgcaacctctgcctcccggattcaaatgattattgtgcctcagcctcctgagtagctaggattacaggcttgtgcygccatgcccggctaatttctttgtgtttttagtagagagagggttttaccatgttggccaggctggtctcgaactcctgggctcaagtgatcagcctgccttggcctcctaaagtgctgggattacaggcgtgagccaccgtgcctggcctccccaaatcttactaacttaaagcaacatatctagtcacatggccctatccaattcaaggaatcaatc

SEQ ID NO: 717359 - DNA, 644 bp, Homo sapiens
gtggcgattttgtccagcagtgggtattttgcaatgtctgaagacatttttggttgtcacaactgtgaaagtcttactacagttatctagtgggtagaggccggggatgttgctaaaacatcctacgtgcatagtacagtccctatagccaagaattatctgattcaaaatgtctatagcattgctattggcaaacactgaattagataataggaaccaatgtacattagtcaggaaagtctgggttatggttacaaaaaggatttctcccacctttttttttttttttcttcaggcagagactcttctgtcacccaggctggagtgcagtggtgcaatcttggctcactgcaacctctgcctcccggattcaaatgattattgtgcctcagcctcctgagtagctaggattacaggcttgtgctgccatgcccggctaatttctttgtgtttttagtagagagagggttttaccatgttggccaggctggtctcgaactcctgggctcaagtgatcagcctgccttggcctcctaaagtgctrggattacaggcgtgagccaccgtgcctggcctccccaaatcttactaacttaaagcaacatatctagtcacatggccctatccaattcaaggaatcaatc

SEQ ID NO: 717360 - DNA, 2608 bp, Homo sapiens
agtagactgcatcatctgagttagaagcctattccttcagggctcggggtagcttgaatttgtagcaggcacatgacagaaattgtatgtattgtggatctgcatgtgtgctgagtattccctatttctttgatcccttttcccccattttctgctctgctcccccctgaggctgtcttctagagactggggtttcttcataggtttgaacagtgggagataccagaggtgggaggagaaaaagttatttattaccgttcccttcctcctgcctggaccatggtagcttctgtgttcccgtaaggatacagcttcctttgggaagccccatctatggctgtagatctctcggtttcagttgacaccattccctctccatgatcttcagacttaactactactgggtgcttccccaacccactggttgggtgtctttaattgtgaacacatatttgtaaatagtgcctttattaattgttcttgagttaatattctgagtgtgccatttattttctgtgccatctgttaaatgatgagcatttaataaaattgtgataatcagttatcagtacaagtgccgcatagtgcataggctgaaatgtctcaagattccccacactacatatcagtattttctatctgtatctggacaatgcagtagaaattataacaaatacaaagttctttgtgcttttctgctgcatatgtcagtggctctggagattgttaccatctgctacatatataaatagacttgcagttattactaagctcctcttcagtaatagaaagacttatgaagtcttttactacctctgggttagccaaacaaccttcaaaaagcattgttatttaggttaaatatctgtggacaagaaacaagataatcagttactgagtgaagaaagacgggaatgatgtcccatacttcccagctctctaaagtgttatgctgtacaattaaaatacccctgacccatcatctgctaccattcgttgtggataattcatgtaatctctaacctgtgggcaagtctttacccttcagtagtcaagattacgttagagacttcgtccacgaatccacaccacctttcccatcagttctcaccggaaatatgctgccaaaaagaaaatcagcttttctaagatcaagccagagttgcttctcttacaaccttacggcgctaatgcattaagttgaagtcgactgccaaagaggcccagcagagggcagcacccccatcatttttttgaatttctcccttaggaattttgccttcctttgtcttctgtccaccaggccttctctccagctggacacaaacctcctttgamgggaaataattgccgttaggcttcacagtagtgctttttcctttcacttggatttgcattttaacctgcatttcgaagatttttatacatgttttctatttccgacaatgccaggaggcttcattgacgttgtagtctgtgttaataaacttgtgtatcactctgctctgatcttttaggaattaacttgcaaatgaaatgaatatgttgggactttggcataatttgaatatagcattgtgtgagttgtgattgtctcttcctaattgtgctgtaataacctgtgtatgagaataaaatgatttccaccatcaggattctcccatgcccccctttattttgccatagactaaaggggaaaggccattctcactctccttaccttagaaaattttatttgcctcatgatgactgtctgccgcttagaagtagacaatataaaatctcatcactatttcacaagaataaaattcaaatcagttatatccaaagtaacttttcaactgggggtggtgtctcacacctgtaatcccagtgcttggggaggccaaattgggaggaccgcttgagcccaggcgtttgagaccagctggacaacatagcaagactcatctctacaaaaaaaaaatttaattagccatgagaggctgggtgcagtgacgcaagcctgtaatcccagcactttgggaggccgaggtgggtggatcacctgagttcaggagttcgcgaccagcctgaataacatggtgaaaccccgtctctactaaatacaaaaaaattagccgggcatggtggcacatgcctgtaatccgagctacttgggaggctgagacaagagaatcacttgtacctgggaggaggaggttgcagtgagccgagatcacggcattgcactccagtctgggcaacaagaacaaaactccatctcaaaaaaaaagttagccatgatggtgcatgtctgtaatcccagctacttgggaagctgaggcagaagggtcacttgagcccaggagttcaaggctgcagtgagccatgatggggccactgcattccagcctgagtgacagagtgaaaccttgcctcttaaatgaataaaaataaagtaagctttcttcaacaagttttcttccaacgccacacactccatcaccatattaatttaaattatttagtatgtagcagatttactttgagaccaaatctgtgaagttggtgatgatatttaataattctttatttcccttatgggatctttgcaacttagaacaca

SEQ ID NO: 717361 - DNA, 657 bp, Homo sapiens
taaagcaaccacagtgctggcaggggatagacacagatccaagccgagcccccggtggatggagatgtagcctgtgaaggggcaatgttactagatggtrggaaaagatagattattcaatatggtgacgtggggaaaactgatcacactgatggaaaaaaagaaacggcatccttacttcacaggttaccctaaggccaacaccgctttgaaacctgacccctgaaggacagataggaacccgcctgcgtgcggtggcgcgggcactcacactgctgaggggcgacacgcgggtcctgctcgcgctccgctctccggtcgggcatgggctggaagcagcaggtgcacagggcgtggcttccttgcagagggcacacgtaatcctggactgctgaagcacacgcacattcagccggagcacgtgggacccagggcagaaagacagcaggttagagaggccgccgggaagcacagcgaggagaggtgcacctgagacagccggggaagaagcagacctgccctgctaaaccaccggggaccttctgccacccaaactcggggagtcaaaacagattaacaataaccaaaaatgatctttgatttagcagctggagcaagatttcaaagatctgttgcaagttctctttttttttttga

SEQ ID NO: 717362 - DNA, 1704 bp, Homo sapiens
taggactttatagtcgctagatcaactacaaagaatacatgtgctcatgtgggaaaaaataacatggaatgatgtccctctgtcacagccagagatgccacacccatgaygagtcgaagcaaagggaagggtgtcagccgagggtgcaaatgtctacagcagtcgcctgcggctgacgctctgctggctaccccctggctaccccgctaagtgttcacccagtccctgccacgcctctcaggggaggtgctaatactatccaatatcagaaaacaagctcaagccatttaagagcttggctgctcagggcagaactagatctcaggacccatgctgtccacccagtagtgagctctcggtcacggttgtgatgctcctctggctcacacactctgctctgagccaggggcatgatttacctaatgtctgaggactcactgtcaacgtctgacagctccagcaggtcctctgaactcccttcttcatcagaaaaagaccgcctgactttgggctgcagcatgtcttgagtgattttatttctggcatccatactttgcacatcttcttcactgcgactcttgtctagaattgaaaggacacagcgccattcaccggcagtgagacatggcaggcagacacagctcacactgctgggagctcgcgtgcgcagtgctgcggaaggaggggtctgggcggaccgccctcacgtgcccgggtgctggtggagggactgccctcacgtgcccaggtgctggtgtggatgccctcacgtgcccgggtgctggtggagggaccgccctcacatgcctgggtgctggtgtgtggatgccctcacttgcctgggtgctggtggagggaccgccctcacttgtctgggtgctggtggagggaccaccctcgcttgcccaggtgctggtggagggaccaccctcacgtgcccgggtgctggtgtggatgccctcacgtgcctgggtgctggtggagggaccaccctcacgtgcccgggtgctggtggagggaccaccctcacgtgcccgggtgctggtggagggacagccctcacgtgcccgggtgctggtggagggacagccctcacgtgcccgggtgctgctgggtggatgccctcacgtgcccaggtggtggtggagggaccgccctcacgtgcctgggtgctggtgtggatgccctcacgtgcccgggtgctggtggagggaccaccctcacgtgcccgggtgctggtggagggacagccctcacgtgcccgggtgctgctgggtggatgccctcacgtgcctgggtggtggtggagggaccgccctcacgtgcccgggtgctggtgtggatgccctcacttgcctggatgctggatgaggtatgcttccacgaggttgttgaggatgtggtttttacagatccgctccacgggacagcggcaggtaggacacagggacgagcgctccatccagcccgagtagcaagccgcgcagaacgtgtgcatgcagggctgcaaactgaaagtgcaagaggaacagtgtccagacagtcccacagatgcaaccgcgaccctcgaccaaggtccgcagcagccccaccacggaagggcctacaggggcccagccatcgttcaacctaaaaaccctttaagtcagtcttggttaatgaaaagaaatcagaggccacacggcctctgtgttttcaggaaag

SEQ ID NO: 717363 - DNA, 1704 bp, Homo sapiens
taggactttatagtcgctagatcaactacaaagaatacatgtgctcatgtgggaaaaaataacatggaatgatgtccctctgtcacagccagagatgccacacccatgacgagtcgaagcaaagggaagggtgtcagccgagggtgcaaatgtctacagcagtcgcctgcggctgacgctctgctggctaccccctggctaccccgctaagtgttcacccagtccctgccacgcctctcaggggaggtgctaatactatccaatatcagaaaacaagctcaagccatttaagagcttggctgctcagggcagaactagatctcaggacccatgctgtccacccagtagtgagctctcggtcacggttgtgatgctcctctggctcacacactctgctctgagccaggggcatgatttacctaatgtctgaggactcactgtcaacgtctgacagctccagcaggtcctctgaactcccttcttcatcagaaaaagaccgcctgactttgggctgcagcatgtcttgagtgattttattyctggcatccatactttgcacatcttcttcactgcgactcttgtctagaattgaaaggacacagcgccattcaccggcagtgagacatggcaggcagacacagctcacactgctgggagctcgcgtgcgcagtgctgcggaaggaggggtctgggcggaccgccctcacgtgcccgggtgctggtggagggactgccctcacgtgcccaggtgctggtgtggatgccctcacgtgcccgggtgctggtggagggaccgccctcacatgcctgggtgctggtgtgtggatgccctcacttgcctgggtgctggtggagggaccgccctcacttgtctgggtgctggtggagggaccaccctcgcttgcccaggtgctggtggagggaccaccctcacgtgcccgggtgctggtgtggatgccctcacgtgcctgggtgctggtggagggaccaccctcacgtgcccgggtgctggtggagggaccaccctcacgtgcccgggtgctggtggagggacagccctcacgtgcccgggtgctggtggagggacagccctcacgtgcccgggtgctgctgggtggatgccctcacgtgcccaggtggtggtggagggaccgccctcacgtgcctgggtgctggtgtggatgccctcacgtgcccgggtgctggtggagggaccaccctcacgtgcccgggtgctggtggagggacagccctcacgtgcccgggtgctgctgggtggatgccctcacgtgcctgggtggtggtggagggaccgccctcacgtgcccgggtgctggtgtggatgccctcacttgcctggatgctggatgaggtatgcttccacgaggttgttgaggatgtggtttttacagatccgctccacgggacagcggcaggtaggacacagggacgagcgctccatccagcccgagtagcaagccgcgcagaacgtgtgcatgcagggctgcaaactgaaagtgcaagaggaacagtgtccagacagtcccacagatgcaaccgcgaccctcgaccaaggtccgcagcagccccaccacggaagggcctacaggggcccagccatcgttcaacctaaaaaccctttaagtcagtcttggttaatgaaaagaaatcagaggccacacggcctctgtgttttcaggaaag

SEQ ID NO: 717364 - DNA, 606 bp, Homo sapiens
tgcaccaccacgcccagctaatgtttgtatttttagtagacatggggctttgctatgttggccaggttggtcttgaactgctgacctcaggtgatctgcckgcctcagcctcccaaagtgctgggattacaggcgtgagccacggtgcccagccaccatctgctctttacagaaaaagtttgctcacctctactctagactagagtataatctctattaggacaaagatgatctcttcctacacactactaaaatttaaagaatttccgtaaaaactagtgaaataaaataaatggtaatcgctctgctaagtactttatatgtattacccacatcaattttatgagaaaaatattattatctacaatctacacatgaggaaactgaggctcagagccatctggtgagttgccctaaggtcacacagctgataagtagcaaactgatgtttgaatctaagtttaaaacaatgtttcttctttaaattttttttttttttttgagacagagtcttgctcttgtcgcccaggatggagtgcaggcgtgagccaccacacccggcccttctttaaatttttaaatgtaattaattgatactacaactag

SEQ ID NO: 717365 - DNA, 606 bp, Homo sapiens
tgcaccaccacgcccagctaatgtttgtatttttagtagacatggggctttgctatgttggccaggttggtcttgaactgctgacctcaggtgatctgccggcctcagcctcccaaagtgctgggattacaggcgtgagccacggtgcccagccaccatctgctctttacagaaaaagtttgctcacctctactctagactagagtataatctctattaggacaaagatgatctcttcctacacactactaaaatttaaagaatttccgtaaaaactagtgaaataaaataaatggtaatcgctctgctaagtactttayatgtattacccacatcaattttatgagaaaaatattattatctacaatctacacatgaggaaactgaggctcagagccatctggtgagttgccctaaggtcacacagctgataagtagcaaactgatgtttgaatctaagtttaaaacaatgtttcttctttaaattttttttttttttttgagacagagtcttgctcttgtcgcccaggatggagtgcaggcgtgagccaccacacccggcccttctttaaatttttaaatgtaattaattgatactacaactag

SEQ ID NO: 717366 - DNA, 606 bp, Homo sapiens
tgcaccaccacgcccagctaatgtttgtatttttagtagacatggggctttgctatgttggccaggttggtcttgaactgctgacctcaggtgatctgccggcctcagcctcccaaagtgctgggattacaggcgtgagccacggtgcccagccaccatctgctctttacagaaaaagtttgctcacctctactctagactagagtataatctctattaggacaaagatgatctcttcctacacactactaaaatttaaagaatttccgtaaaaactagtgaaataaaataaatggtaatcgctctgctaagtactttatatgtattacccacatcaattttatgakaaaaatattattatctacaatctacacatgaggaaactgaggctcagagccatctggtgagttgccctaaggtcacacagctgataagtagcaaactgatgtttgaatctaagtttaaaacaatgtttcttctttaaattttttttttttttttgagacagagtcttgctcttgtcgcccaggatggagtgcaggcgtgagccaccacacccggcccttctttaaatttttaaatgtaattaattgatactacaactag

SEQ ID NO: 717367 - DNA, 606 bp, Homo sapiens
tgcaccaccacgcccagctaatgtttgtatttttagtagacatggggctttgctatgttggccaggttggtcttgaactgctgacctcaggtgatctgccggcctcagcctcccaaagtgctgggattacaggcgtgagccacggtgcccagccaccatctgctctttacagaaaaagtttgctcacctctactctagactagagtataatctctattaggacaaagatgatctcttcctacacactactaaaatttaaagaatttccgtaaaaactagtgaaataaaataaatggtaatcgctctgctaagtactttatatgtattacccacatcaattttatgagaaaaatattattatctacaatctacacrtgaggaaactgaggctcagagccatctggtgagttgccctaaggtcacacagctgataagtagcaaactgatgtttgaatctaagtttaaaacaatgtttcttctttaaattttttttttttttttgagacagagtcttgctcttgtcgcccaggatggagtgcaggcgtgagccaccacacccggcccttctttaaatttttaaatgtaattaattgatactacaactag

SEQ ID NO: 717368 - DNA, 606 bp, Homo sapiens
tgcaccaccacgcccagctaatgtttgtatttttagtagacatggggctttgctatgttggccaggttggtcttgaactgctgacctcaggtgatctgccggcctcagcctcccaaagtgctgggattacaggcgtgagccacggtgcccagccaccatctgctctttacagaaaaagtttgctcacctctactctagactagagtataatctctattaggacaaagatgatctcttcctacacactactaaaatttaaagaatttccgtaaaaactagtgaaataaaataaatggtaatcgctctgctaagtactttatatgtattacccacatcaattttatgagaaaaatattattatctacaatctacacatgaggaaactgaggctcagagccatctggtgagttgccctaaggtcacacagctgataagtagcaaactgatgtttgaatytaagtttaaaacaatgtttcttctttaaattttttttttttttttgagacagagtcttgctcttgtcgcccaggatggagtgcaggcgtgagccaccacacccggcccttctttaaatttttaaatgtaattaattgatactacaactag

SEQ ID NO: 717369 - DNA, 583 bp, Homo sapiens
atgacaactcaattaaggctcagatgatygttagcattttttcagcaataaagtattttataattagtgtatttatgttgcacatttatgacataatgttattgcatacctagtaggttacagtatagtgtaagcataacttttacatgcactgggaaaccaaaaaatttgtgtgacttgctttatcacaatattcactttatggcagtggtctagaacaaaacctgatatcacaaaacctgatattcctgatatatgggcttatctctgaagtatacctgtatctcagtgaagatgttattatttatttatttatttgagacagagtctcactgtgtcacccaggttggaatgcagtggcacgatctccacttactgcaacctccacctcccgggttcaagagattctcctgcctcagcatccgaagtagctgggactacaggcatgtgccaccacaccaggctaattttttttgtatttttagtagagacagggtttcaccatgttggtcaggctggtctcaaacttctgacctcaaatgatctgcccacctcggcctcccaaagtgctggggttacaggc

SEQ ID NO: 717370 - DNA, 583 bp, Homo sapiens
atgacaactcaattaaggctcagatgattgttagcattttttcagcaataaagtattttataattagtgtatttatgttgcacatttatgacataatgttattgcatayctagtaggttacagtatagtgtaagcataacttttacatgcactgggaaaccaaaaaatttgtgtgacttgctttatcacaatattcactttatggcagtggtctagaacaaaacctgatatcacaaaacctgatattcctgatatatgggcttatctctgaagtatacctgtatctcagtgaagatgttattatttatttatttatttgagacagagtctcactgtgtcacccaggttggaatgcagtggcacgatctccacttactgcaacctccacctcccgggttcaagagattctcctgcctcagcatccgaagtagctgggactacaggcatgtgccaccacaccaggctaattttttttgtatttttagtagagacagggtttcaccatgttggtcaggctggtctcaaacttctgacctcaaatgatctgcccacctcggcctcccaaagtgctggggttacaggc

SEQ ID NO: 717371 - DNA, 583 bp, Homo sapiens
atgacaactcaattaaggctcagatgattgttagcattttttcagcaataaagtattttataattagtgtatttatgttgcacatttatgacataatgttattgcatacctagtaggttacagtatagtgtaagcataacttttacatgcactgggaaaccaaaaaatttgtgtgacttgctttatcacaatattcactttatkgcagtggtctagaacaaaacctgatatcacaaaacctgatattcctgatatatgggcttatctctgaagtatacctgtatctcagtgaagatgttattatttatttatttatttgagacagagtctcactgtgtcacccaggttggaatgcagtggcacgatctccacttactgcaacctccacctcccgggttcaagagattctcctgcctcagcatccgaagtagctgggactacaggcatgtgccaccacaccaggctaattttttttgtatttttagtagagacagggtttcaccatgttggtcaggctggtctcaaacttctgacctcaaatgatctgcccacctcggcctcccaaagtgctggggttacaggc

SEQ ID NO: 717372 - DNA, 583 bp, Homo sapiens
atgacaactcaattaaggctcagatgattgttagcattttttcagcaataaagtattttataattagtgtatttatgttgcacatttatgacataatgttattgcatacctagtaggttacagtatagtgtaagcataacttttacatgcactgggaaaccaaaaaatttgtgtgacttgctttatcacaatattcactttatggcagtggtctagaacaaaacctgatatcacaaaacctgatattcctgatatatgggcttatctctgaagtatacctgtatctcagtgaagatgttattatttatttatttatttgagacagagtctcactgtgtcacccaggttggratgcagtggcacgatctccacttactgcaacctccacctcccgggttcaagagattctcctgcctcagcatccgaagtagctgggactacaggcatgtgccaccacaccaggctaattttttttgtatttttagtagagacagggtttcaccatgttggtcaggctggtctcaaacttctgacctcaaatgatctgcccacctcggcctcccaaagtgctggggttacaggc

SEQ ID NO: 717373 - DNA, 583 bp, Homo sapiens
atgacaactcaattaaggctcagatgattgttagcattttttcagcaataaagtattttataattagtgtatttatgttgcacatttatgacataatgttattgcatacctagtaggttacagtatagtgtaagcataacttttacatgcactgggaaaccaaaaaatttgtgtgacttgctttatcacaatattcactttatggcagtggtctagaacaaaacctgatatcacaaaacctgatattcctgatatatgggcttatctctgaagtatacctgtatctcagtgaagatgttattatttatttatttatttgagacagagtctcactgtgtcacccaggttggaatgcagtggcacgatctccacttactgcaacctccacctcccgggttcaagagattctcctgcctcagcatccgaagtagctgggactacaggcatgtgccaccacaccaggctaattttttttgtatttttagtagagacagggtttcaccatgttggtcaggctggtctcraacttctgacctcaaatgatctgcccacctcggcctcccaaagtgctggggttacaggc

SEQ ID NO: 717374 - DNA, 530 bp, Homo sapiens
aatgtagttttcttatgaatgtattcatgattagcatcattgtattcacatgctaataacagtgaataaagatgctaacactatatggatgaagctaatttaactgtttattggtcagcttttgtctataccaaaaaaagtatgtgtttattgagtaattaagttgtactttaccattaatacaatttaaaaaatgccttgacccttccaatacagattcctcatctgtttacccatttttgcaatagcttgaacccctgccccctccctcaatcgactaacacaaatggaaaatgataaagagcaggcagaggaaggaggaggagaaaagtgaagagaggaaggctttcaagacayttcctgtactacatgccactgaagttcaagtaatagttgtaataataaccaaaatatagatttaaaagtgaacattggtgtatggttttagaatttcacgattttgataggtcatttaatacttccagtattttgagtgtcagattgcttactctgtctctattcataggtca

SEQ ID NO: 717375 - DNA, 1400 bp, Homo sapiens
gttaaaaaatagaggttcgaaagtttgaagttcattattcatagaatatttaaaatgtgcattctgttcagggggctttaattctattaatgaattttgaaacaaggaaattgaagtgggtggggtgatcgtttttgatttttagaggatagttgtggttagactgaagtatgtacaaaaagattctgggtctctgtatttcagggartgttgtttatgtgattgggtaggagagaaatttctcagtgaagagtggaaatttcccatgcatcccagaattcgatgtttatttattgcgcttgagtttagttgcctaagggaattgtaatagaatggaaggaaacttcccgtctggggttccctttctgccatgatgtgcactgcattgactgtgcttcagaatggtaatggggaggaagtcattacactggggttgatggagagtactactttcttgatggcattggatttcaagtaaaacattaaactttagccttttgtgcctaaattataagacaaggttagggaaggatggcaaggaaatgggaagcgtttagaaatttctttaaacgtcagaatagccagggctagtttagattccttgactatttaaaaggagatccccttcttcatgtttggcctgaagttctccaaaaatatacctgtttctagtttgattcccaacccccaaccagctaaagcggttacatatcgtaggacttcgttatagtcagcagggggcacccattgcttgtcttcagtccagggatttccaataaaagggtggaagagagtaagttcttattccagaattgcttcctctgaaaatgtcattaaaccattactacctttcagggcatcaaatgggaaaagtgttcaggatattggaacaaaagctgcccatgtctctaaatgagggaccttaatgagactggttatgacccacagttttatgggagttgtttggtggagggttaatgcccttccatttatcgtgggtacttccgaactttgtctcccgcccctgtggtcccccctcttttgtttcctcttaaacctttgaccactagcttaccatgttttcctaattcaaactccccttagacttttttcttcctaccttctttggcatttttatttgtttcactttgactgttccagctagagctacattccccatgggagaaataagggatttttaaaagaaggaaaccagaccttgtagagtacttattaattgttgtgatgaacatggggaggtggtactaaagggagattggagggttactcattagttcaaagtaaattaaaggctggcctcgtggctgatgcctggtatccccagacttgggaaggccgagtgggtggatcacttgaagccaggagtcctgactaacctg

SEQ ID NO: 717376 - DNA, 444 bp, Homo sapiens
tgattagcacctttgaattctaattttaaatctttggagaggaaatccaattggttttccttaggtcaygtatctcttgacctctaatttaatcagctgcagttagaagggcagggttcctgtttgtggcttcccagattcaccttgtgggtgggaaaaggggactgggtctccatgtaggcaggtggctagacatgtgtagctggctagacattctgaagctctctcctctattaatcacttgtgtcattttattatctcctgtgagacactgtaagctccttgggaaaagggactgttgcttgctcatctttgtaaagccccagagccctgtactgtttattgcataaagaaaatgctaaacctgcaattgtattgatactatttcacaatgccttttggcatcaagaatttcccccaaaatttctaaaactgtaatttgaa

SEQ ID NO: 717377 - DNA, 636 bp, Homo sapiens
agtgtgtgacttcaggactctgttgcatggcagtttttctacaaaatcagtttccgaatcaaaagagtcctaagtggacaattttctcgaagagtgtcctctcatttgcactaaaaccttattgattacttctcccacagtacagagtagatgacatgtcctattttatcggcttccatagcctcttcaatttcatttaacaatagtgtgctcatgggatatggaagaacttcctccactgttgaaaagaaatgtttcaacattaggattgtttcagttcttttaggactgtgttctccacttttccaaagcttactcaatctttattctcagaaaaacggaatagcatttatccctayatgagatcaagacccaatttttccaagatatcataaaggtttaactttaaacaatgtcccacaaatagcaaaagtaggttccatctatagtgttataaaaaggtccaaaatcctctatcctatcttcaactttctcaaaaatctgtggtgtaattatttcgtatctgagtggccccctcaagtataggtagaaccaatgaaataggattgatggagaggaaaatagtaaaactatatctagaaactggcctgcttcctctgggcaaatgccagcaga

SEQ ID NO: 717378 - DNA, 591 bp, Homo sapiens
tattattctagcaataaagtattgctagttgtctttgtgttatgtgcagtaggtaaatatagtgattacccaaggctttaataagggtagagttggatttagttaatggttctgctcttttttataaggctgaaatccagagggcagcccagaaaatgtttgctcaaaactgcataaacaaaatagccatgttttcaaagtgaataaatgaggcattaaaaacagtgcttgggaagttgaaaacctttaaagcagcactaacaataccttcctggtcctaaatataactatatccatacacatatgtacgtgtataagagttttgttgtgcacaaaaggggattyttagtagcactattggggatgctgataaatgttcaactagatgataaccacataaagagaacaaattgtatcctctatatatgaactaccttgcaattagaggaagccttttcttatttatggttcaaaaggaatattccccctacccaaaacaaagcctgtaaaactcattatataatcacagctatttttacagaacttgaaaaaatttgaattggaatatcatatatgagaaattaactcagc

SEQ ID NO: 717379 - DNA, 591 bp, Homo sapiens
tattattctagcaataaagtattgctagttgtctttgtgttatgtgcagtaggtaaatatagtgattacccaaggctttaataagggtagagttggatttagttaatggttctgctcttttttataaggctgaaatccagagggcagcccagaaaatgtttgctcaaaactgcataaacaaaatagccatgttttcaaagtgaataaatgaggcattaaaaacagtgcttgggaagttgaaaacctttaaagcagcactaacaataccttcctggtcctaaatataactatatccatacacatatgtacgtgtataagagttttgttgtgcacaaaaggggattcttagtagcactattggggatgctgataaatgttcaactagatgataaccacataaagagaacaaattgtatcctctatatatgaactaccttgcaattagaggaagccttttyttatttatggttcaaaaggaatattccccctacccaaaacaaagcctgtaaaactcattatataatcacagctatttttacagaacttgaaaaaatttgaattggaatatcatatatgagaaattaactcagc

SEQ ID NO: 717380 - DNA, 2076 bp, Homo sapiens
ttaaactaatgagaatacatagcaatattgaagaacaaagtgtgaataaaacaaaaaaagaaataaggagaaaatctgtgcaagagaaaaggaaatgtcaataggcaaataaaatttactctagaatcttacttacaatttcttacccactgttattgttaattctatagaccaaacctcttccacagtgtcaaaatttgacactttgtaaagattataactcaataacctatttatgaactcctgaatctgtatagtgtttcttctgacaaccacctattccatttgatttctggccttttgacttaattcaaacctattcctggttttattgagatttctgtcctatttwcatgctcatatgtgcaccaggcttttaacttattacagcttcccccaaatcccaccttcatctgtttgctgactgttcacgattctgagtctttttgcctcatggacaaaacccaatggaaatatcattttaatatatgataactatttaaaggtttgctttctcataactatctttagctaatatgaataaaatttcatatataaatgatcatatctttaagaatgtacatgtcattatttgacattatgagtccaaattcctaaattatgcacaaggtatccattcacttaaatatatatagtcactattactatgtggatttactgaaatatagtttgtagtctaaaatttggatgaaatttagcctttagaaaaatgtgtagattcttgcaaacttttaaaaccttacagtgggtattactgtttatctcatctgcctcaataaagaatagtgacaaataaaaataagatcctcagccccccaacagactgaacagatcctcctcttcatcaaggggtatcagaatgcaaaacaaagcattctgagattcaccaagacaatgaaaagttataggctgtcttgaataaaagttataagatgttagagctaaaccaataatggccctcaggaaatacaaatttttctggttagattggaaggcaaaagcaagctggtagggcctttaaagctgggctttatcctattataatggagatcttacttaaatgtaaaaactaggtagtggtatgaaaacagaactggatttaagtggaaagcagaattgaacagagagaatttaaaaggaaattttaacagattactgaaaatgaaagaatgaattttacacaagccgattttagggaatacaaagttcatatttcagaatgtggcaaagcacatagataccctatgacttcatttatttgacccagcaacaaaaaatgaaaagaaaaaaaatgaagagtgattgctagagctaagaatggggaaaataactaaatacaaagagatagcaggggaacttttgggggtaatgggaaaatcctacaacttgagtttgacagaaatgtcaaacttcatagaactatacatcttaaaagagtaagtcttactgtatctaaattatgcatgaataaatcttacttttaaaattataaaagaaaggatagtgactagatattgaaccctgagtaatgatttgcatgccgaaatgtttaaggacaaggtatactgatatctgcatcatagcttaaaatgcattgaaagggtaaaatgatttgacagagggctggaggataaagacatgacagatagacatgtaataaagcaaacatagcataatgtcagttgtttagaactttttccaaattttctttttattttttttctgagacagtctcactctgtcacccaggctggtatcaaactcctgacctcaagtgatccacctgcctcagcctcccaaaatgttggaattacaggcatgaaccatcgcgcctggtccctaaaattttctttacatctgaaaattctcataacaaaataacaagaaaaattatagagacacactcatgactgcacacatacataatttatgcatgcatgcaagaacaggtttcaaagtacaacatcatcacacaccaaaatattgacagcgttcactcctatgtaatctgtacactggattgataatagatgggaaatgcgtggtactttgact

SEQ ID NO: 717381 - DNA, 2076 bp, Homo sapiens
ttaaactaatgagaatacatagcaatattgaagaacaaagtgtgaataaaacaaaaaaagaaataaggagaaaatctgtgcaagagaaaaggaaatgtcaataggcaaataaaatttactctagaatcttacttacaatttcttacccactgttattgttaattctatagaccaaacctcttccacagtgtcaaaatttgacactttgtaaagattataactcaataacctatttatgaactcctgaatctgtatagtgtttcttctgacaaccacctattccatttgatttctggccttttgacttaattcaaacctattcctggttttattgagatttctgtcctattttcatgctcatatgtgcaccaggcttttaacttattacagcttcccccaaatcccaccttcatctgtttgctgactgttcacrattctgagtctttttgcctcatggacaaaacccaatggaaatatcattttaatatatgataactatttaaaggtttgctttctcataactatctttagctaatatgaataaaatttcatatataaatgatcatatctttaagaatgtacatgtcattatttgacattatgagtccaaattcctaaattatgcacaaggtatccattcacttaaatatatatagtcactattactatgtggatttactgaaatatagtttgtagtctaaaatttggatgaaatttagcctttagaaaaatgtgtagattcttgcaaacttttaaaaccttacagtgggtattactgtttatctcatctgcctcaataaagaatagtgacaaataaaaataagatcctcagccccccaacagactgaacagatcctcctcttcatcaaggggtatcagaatgcaaaacaaagcattctgagattcaccaagacaatgaaaagttataggctgtcttgaataaaagttataagatgttagagctaaaccaataatggccctcaggaaatacaaatttttctggttagattggaaggcaaaagcaagctggtagggcctttaaagctgggctttatcctattataatggagatcttacttaaatgtaaaaactaggtagtggtatgaaaacagaactggatttaagtggaaagcagaattgaacagagagaatttaaaaggaaattttaacagattactgaaaatgaaagaatgaattttacacaagccgattttagggaatacaaagttcatatttcagaatgtggcaaagcacatagataccctatgacttcatttatttgacccagcaacaaaaaatgaaaagaaaaaaaatgaagagtgattgctagagctaagaatggggaaaataactaaatacaaagagatagcaggggaacttttgggggtaatgggaaaatcctacaacttgagtttgacagaaatgtcaaacttcatagaactatacatcttaaaagagtaagtcttactgtatctaaattatgcatgaataaatcttacttttaaaattataaaagaaaggatagtgactagatattgaaccctgagtaatgatttgcatgccgaaatgtttaaggacaaggtatactgatatctgcatcatagcttaaaatgcattgaaagggtaaaatgatttgacagagggctggaggataaagacatgacagatagacatgtaataaagcaaacatagcataatgtcagttgtttagaactttttccaaattttctttttattttttttctgagacagtctcactctgtcacccaggctggtatcaaactcctgacctcaagtgatccacctgcctcagcctcccaaaatgttggaattacaggcatgaaccatcgcgcctggtccctaaaattttctttacatctgaaaattctcataacaaaataacaagaaaaattatagagacacactcatgactgcacacatacataatttatgcatgcatgcaagaacaggtttcaaagtacaacatcatcacacaccaaaatattgacagcgttcactcctatgtaatctgtacactggattgataatagatgggaaatgcgtggtactttgact

SEQ ID NO: 717382 - DNA, 1226 bp, Homo sapiens
atactggtggaatacggaagggcttgagtgcttcttgctcttcattttaagtaattatgaccctaaggcatttttcaggaacgtcttcaaaatccttactactccaatgtggttggtccagcaacataatatcaccaaggagcttgtgaaaaattcagcccgctctccagccccaccccaacctgcctgtcagaatctgcattttaacaagatccacaggtgattcgtatgcaccactctaaatcaaaggaaaattacactaatagttttgtaaactctttgtggattctaagaggtcacctttgggtaaaataaaaatttcgcagcaggcacggtgactcacacctgtaatcccagcactttgggtggccaaggcgggtgaatcatctgaggttgggagttggagaccagcccgaccaacatagagaaagcccatctctactaaaaatacaaaattagccgggcatggtggcatgcgcctgtaatcccagctactcaggaggctgaggcaggagaatcacttgaacccaggaggcggaggctgcagtaagccgagatcgcgccattgcactccagcctggacaacaagagcaaaactcagtcacacacacacacaaaaaattctctgaaattgtttttaaagatatagacaaattgtcatttgacaatttctaccatttacccaccatctgacctcaaacatggtatttcctctgttgtgtgtgtgtttacatatatgctaacataaaatgtttcagcttaagcatgttttagtgcacagtctagtggcatgaagtacaattacagtgttgtgcaaccatcaccatcatccatcttccaaacgtttcatcttccaaaactgaaacamtatccccattaaacagtaatgtccaaatctcccctcctctcagaaataccaatatcttaacataccaagctgggtcaaaattaaccaatttcctttaaagtaaccaaggacaggcttgatcaaggacaagaccatgctctaaacttttgactctgactccttcaagaatctatgcctggcccagcacagtggctcatgcctgtaatcccagcactttgggaggccaaggcaggcagatcgcttgagctcaggagctggagaccagtctgaacaacatggcaaaaccccatctctacaaaaaatgagtcaggagtggtggcatgtgcccgtggtcccagctactagggaagctgaggtg

SEQ ID NO: 717383 - DNA, 1882 bp, Homo sapiens
aaatccctattccacagggcatgatgaccaaggtggcamgtaagttatgcctttaaggtcatttccatatttcgtcatgctggaagtttttgggttctgtggtgtatggtagaactgtacaccacatgattatttaaatattgtctcacttcctttgctataaagtggaaatgaaacatgacaataattcagatattttttgagaactcaggccagagtaactttggcaatctccatgcattcggtctcatagatacatgtttccaatgaggaaaatcactggaaagaattataccttccaaagtggaaatggtaaaaataatcaacttgccagtggtggatctcttagagaacagtacagcatccagagatgaacatcagtttatgctgctaacactttgaacattcactagctacttctgtgctggttaaagggagcctgtgatattgaatcatgcatagcctccactttctcaccatggctactgttttaacaagcccaatagtgaaagcccttgcgtgatcagagccagagagtggctaaaatccactggcccagcaattttgttcaaatagtcattcaatgccttctctgtactgggtattttttggtgggcattgccatgagaagtaaagatttacacactgtttgtccattcctataggtccaatcacatgcttctttcctggacctctttgtctgtcattttctattcatattacttctaagacaataaataattagcaaagacagtggacggaagtttgtctctctcttgacctgggccatttctaccactccatcacgatgatgaataggtgtactgctcaagcctctgccactgagatacttctcactgcccgtcattggacgagaactggtcccgggaccccagctgcctggggcttctggcttgtcctgtttgcagtgtttccattggttagaataaaatcattcagctgtagaatcacaagtgtactcagtaagcagtctaggcatgtagacataatttctaggggattattggcagggcactaatagtctctgcttaagcaggcaaaatctttaaatctgcttcctacatgtctccaatttatctcctgtgtaagttaattttatgtgtcaaatggactgggtgacagagtgcccagatactaggttaacattattctgggttgtctgtgagggtgtttctggatgagaataacatttgaatcattagactgagtaaagcagattgtcctccacagtgtggatgggcttcatccaatccactggaggcctgaatagaagaaaaagtaaaagaagagggacttcactctctctgcttattttcaagttcggacatcagtcttctgcacccgaagtggcatttgcatcattggttcttctgattctcaggcctttgaactggtattagaacaacacccctggctcttctagttctccagcttgcagacaacagattgtgggattttgcctctataattacatgagaaaactccctaaaatcagtctctttctctctctctctctctctgcatgtgtgcgtgtgtgtgtgtgtgtgtgtgtgtgtgtgtgtgtgtgtgtgtgtgtttgcaatttctttctcctattggtctgtttctctatataaccctaactaatacatttgctaaatgtcccttactttcagaaaagctgtgcatttgatgggaaacacctgtctctcactctcatcccccccccacttacccctaattcctatcttcataatctatttgatttgatgattgcctcactgaagttaattgtccttctttacaaaccattaatgcttggtttcccttctctaatggcacttaacagatctgatatggtgataagtatttttcaactatg

SEQ ID NO: 717384 - DNA, 1238 bp, Homo sapiens
gtgaaacattaacctctgcttcgtatacatgtgaagaagcaatgcatgaactagttttactagaacagagtattttcttggaagagtgatgggaaataaatttcaaggagtaggtagaggtcatggtcaagacctatttatgtcatttaagttatgtttaagctgatcttgtataccaagaggagccattaaataaagtatagagtggtaagtgcaatttggtggaatgggaggataaatgtttgttgtgtggattagagaggaaaaaattaagttgagaaggacaagtttggaggttgtcaatgtaagtcagggataagtgataaaagtctgctttactgctgttaaatgttgctagaaaagaaaaagagatgacagttggatgagctttaatgaaggaaatattatttttcacaagtcaatgacccacacaagttatgcctgatttccatgccagttaaagttcatgtgattaatggtgtcattccacaacttctggaatacagttgtgaaaatgcagaagagttcccagtctcctctccctttgatcaaactcctactttggagtctgctctataccctagctgtgataatctttccaagaatccttttcatagatctgtggttgaatcattctagaagggttgagccaagtataatgaaagagggcatgttgcgtaagtcactaaaaaatcatctttattcctttctccagatgtctaattttttttttatttaccagggaaaaaacaatatgaaggataccttcgtttatgctaatagtatattaaatcactatttgagtgggcatcacgctttgagtgggcatctttcccaaatgatcagtcagagctagttcatgtctgtgttcagtaaacctgtataaatactgatctcatttaacacccatccattcctttccagcatgggagctactstctctatgctgctatttccttcctaccagcccaggtgtgggatgtctgtcaaaagtcatcttctgcaccctctttcagctgctgttgctgctatttttgtgttacatagcatccagaaaagtcaactcttcagtgtgaaccaacgctgattactgtagtcactgacctaaaagtcatctggcctctgccaggatcactaacataaacatgtccactactagctctgcttcttcctctttctgggactttcgtaaagttaagcacttttatagggcttctagctcttttccatcttttggc

SEQ ID NO: 717385 - DNA, 1599 bp, Homo sapiens
tttgaagttatttgtttctgcagagctgtctagtagataattcatcttgcccaggtatttgccttgaccgccaattccttattttgatgtttacaatcaactggggtctgctcttttcctatacttccaaggtttttttttaattgtcttgtcacacattcacttcatcatataaatatacttttgctctccctgggccatagtatgtatcttcagatatgacaagtaactgtgacaaactgattcattataaaacaaaagagctaaaggagacctgatgatagaagatgtcctgtttgctaagtaacagtgatttctctagacaatgattgttgcctaattgttagaaatttcttgcaatcactctaggtaaaaaggaaggccaacttgaatcctgaaactggaatgtagagaatctgatttggatttaggaacacatgcatgaaggcctgtataaatcctaatgccccaggatataagtgatgatatctttagcttctgtgatagctctacctccttgtaagatgtctttctatgtgataaaggagtacaratttgcaggtcaaatcttaaaactattactttaagaaactggtagataggtgttattcaggacagcaatggcaaaatccaagcgtagtattcattctatgcccatattaatgtaaagtcttgattaactttgtgtaaaaatacactaaaatttaatctaagccttacctttgaaaaatttgccaattcttggataaagaaaatgtggcacatatacaccatggaacgttatatatctataaaaaaaagaaatcatgtcttctgcataaatatggatgcagctggaaggcattatcccaagtgaattaatgcagaaacagaaaaccaaatactctacatttcacttgtaagtgagagctaaaccttgggtactcatagacataaagatggcaacaatagaaaatgggaactactagaaaggagagggggcaaatggggacaagggttgaaaaactaacctataggtaccatgctcactacctgggagatgggattatttgtaacccaaacatcagcgtgatgcaatatacccaggtaatgaatttgcacatgtaccccctatatctaaaacaaaaattgggaaaaaagaaaagatcatttaacaatataaaataaaaataaaaaccatgtcctctctcgaaagaaaataaccttgccaaccttcttaactcaataaaaaattaattgtgaggatcttatgatgcctactacactgcacagggacttctgcaaatttcttttccctataaataaaattttctgttgataagaaggtcatgcttctctggaaagagctaaaaattatgccgcaggtttacatctcatagatggttactccatttccctttacaacttgggaactgtgggagggcaggggtgtaggaaatggtgttgcataaaggccacagataagatgacatatcatttttgtactaaactgggataaatttgagagttaaaatgcaagcttatgcagcagaatactagggcaacagctacatcagtacacatgcttattatattcatatagaatgtagaaatgggatc

SEQ ID NO: 717386 - DNA, 576 bp, Homo sapiens
ggggtttcaccatgtttgaccaggctggtctcgaactcctgacctcaggtgatctgcccaccttggcctcccaaagtgctgggattacaagtgtgagccacggtgcccggcctgattttcttcttatatttaaggatggattcttggcttaaaaagaggaaactagaacactttttcaatccacggctgcactatctaggactgccattgtgagcttatagctatccaatacttaaaacttcctgatgagatcagtggtgatagtcatgaaggctaacttttgacactgtataatgaagtgtgtcaccatttggaaaatgtataaatttcaatggaccaatattttccaaatgactgtgatcctacatataagctgatgaacaaaatcatgtatgagtaaaggatccattcccaagcattcttcaggatctttctcttataatcacattacctaatcttcccttagaatctttcatcaactaatctgattatttattcactcaytcattcattcacatatgccaaaaatatttattaggtacctattactacattctaaaggacgaaatttcaggg

SEQ ID NO: 717387 - DNA, 967 bp, Homo sapiens
gaccacagtttgtttatccattaacttctaaaagaacattttggttgcttccagtttttggtgattatgaataaagtatctacaaatgttcacatgcagtttttatgtgaacctaaattttcaattcagttggttgagtacataggaatgcaattacaggatggcatagaaagattatgtttatttttgtaagaaactgccaactgttttccaaagtggatgtaacattttgaattgyaatcagcaataaaaaagagtttctgttgctctgcatcctcaccagcaagtagtactgtcagatatatcatctgtaagtattttctcccagtctgagactcatcttttcattttgttcattcatttttttccagtgtcaagattatttttaaaaatactttatcttaaaaaacagttatatatttacagaaaaaatcagaaattagtataaagagttcccatataccgtacacacagctttccctattattaacattttacatatagtatatttggtacaaatcaatgaattgctattgataaattattttaactaaattccatagtttattcatattctttgttttaatgtaatatttgtttcttttctaaaatcctatacagaatatcctgtttgtatcctatacactttggtctatagttttcccttcttgaagtgtcttatttttttgagactgagtttcactcttgttgccctggctggagtgtaatggcgtgacctcagctcactgcaacctccgccttctgggttcaaatgattctcctgcctcagcctcctgagtagctgggataacaggttccaccatacccagctaattttttgtatttttagtacagatggggtttcatcatgttggccaggctggtctcgaactcctgacctcaggtgatctacccgctttggcctcccaaaatgcccggattacaggcatgagccaccacgcctgcc

SEQ ID NO: 717388 - DNA, 967 bp, Homo sapiens
gaccacagtttgtttatccattaacttctaaaagaacattttggttgcttccagtttttggtgattatgaataaagtatctacaaatgttcacatgcagtttttatgtgaacctaaattttcaattcagttggttgagtacataggaatgcaattacaggatggcatagaaagattatgtttatttttgtaagaaactgccaactgttttccaaagtggatgtaacattttgaattgcaatcagcaataaaaaagagtttctgttgctctgcatcctcaccagcaagtagtactgtcagatatatcatctgtaagtattttctcccagtctgagactcatcttttcattttgttcattcatttttttccagtgtcaagattatttttaaaaatactttatcttaaaaaacagttatatatttacagaaaaaatcagaaattagtataaagagttcccatataccgtacacacagctttccctattattaacattttacatatagtatatttggtacaaatcaatgaattgctattgataaattattttaactaaattccatagtttattcatattctttgttttaatgtaatatttgtttcttttctaaaatcctatacagaatatcctgtttgtatcctatacactttggtctatagttttcccttcttgaagtgtcttatttttttgagactgagtttcactcttgttgccctggctggagtgtaatggcgtgacctcagctcactgcaacctccgcctyctgggttcaaatgattctcctgcctcagcctcctgagtagctgggataacaggttccaccatacccagctaattttttgtatttttagtacagatggggtttcatcatgttggccaggctggtctcgaactcctgacctcaggtgatctacccgctttggcctcccaaaatgcccggattacaggcatgagccaccacgcctgcc

SEQ ID NO: 717389 - DNA, 967 bp, Homo sapiens
gaccacagtttgtttatccattaacttctaaaagaacattttggttgcttccagtttttggtgattatgaataaagtatctacaaatgttcacatgcagtttttatgtgaacctaaattttcaattcagttggttgagtacataggaatgcaattacaggatggcatagaaagattatgtttatttttgtaagaaactgccaactgttttccaaagtggatgtaacattttgaattgcaatcagcaataaaaaagagtttctgttgctctgcatcctcaccagcaagtagtactgtcagatatatcatctgtaagtattttctcccagtctgagactcatcttttcattttgttcattcatttttttccagtgtcaagattatttttaaaaatactttatcttaaaaaacagttatatatttacagaaaaaatcagaaattagtataaagagttcccatataccgtacacacagctttccctattattaacattttacatatagtatatttggtacaaatcaatgaattgctattgataaattattttaactaaattccatagtttattcatattctttgttttaatgtaatatttgtttcttttctaaaatcctatacagaatatcctgtttgtatcctatacactttggtctatagttttcccttcttgaagtgtcttatttttttgagactgagtttcactcttgttgccctggctggagtgtaatggcgtgacctcagctcactgcaacctccgccttctgggttcaaatgattctcctgcctcagcctcctgagtagctgggataacaggttccrccatacccagctaattttttgtatttttagtacagatggggtttcatcatgttggccaggctggtctcgaactcctgacctcaggtgatctacccgctttggcctcccaaaatgcccggattacaggcatgagccaccacgcctgcc

SEQ ID NO: 717390 - DNA, 712 bp, Homo sapiens
tttcaacttcaaaactgcataagcaagagccataattggaaattttctttactgtggtaacagatggaacactgaaaggaaaacttatcattgacatttaacacataccagtgccactttctgttatcacacatttacaaactacagagctctgtgaaaagttttaattataaattgtagtctagattacatttttgttctatgagtcccttgaaagtgttcaatttcattgtggtagtcatgtcccgtaacagctccactagcgataaaggacaatttatctcaagatcacaaatgtgagacagtaatggggctattcaatttcaggcaaaacctatagaattttttttctcaaggaagctttgtgggtaaaaatcttccttaatctggattatttatattctctcttctttattatgtgtgtttttatcaaagaygtcaggcagtgtgattttaatctagaattgtggcaattttcgttttacatgaaatcacaggacagttttagtttgttgtgttatatgttactgacttcctagaataagtgtcatctatgcaataggtttgcaataaatttttatttccaatctacaccttcctcttactactgcttatattttttccttcactatcaagtctctttgaaacattaaaataatattttatatattttcacctacattttctaacatctcttactttttacttttaa

SEQ ID NO: 717391 - DNA, 523 bp, Homo sapiens
taagaatagtgaacagctggctgaacagatgtttttgaagaatcgaatttagatttctaacccaaccataaactggggattgcaatgatgggctcttggcaaggcatgaagtaaatctcaggagaatgtggttgagcatatttgtccagaaacaaactgccatgctcaccaggctttgcactgagtatagatgggaggattcttccgttagatgagtaaaaacagtcaccataaawcattggcattctcatatatcgtatctgtgtttcaactataataaagtaatgcaaaagtctaatttatggagattttacatatttgaggtacaaatatgaagtaatagccttttgaattgctgagtggctctaagtcacttaccttatgaatgaggcaagctcccttgagagccaacatctcaagagttcattttcctacttccatgaggcagaaaacagcattctcttcaattgtaggccatggagctacagcctatgaaatagagcaaaaatagcagaaaaatccc

SEQ ID NO: 717392 - DNA, 2617 bp, Homo sapiens
tctgttctagtcatcaataagataactttgttatttggttttgaggttattcttcatgcagaactccaaatcacttgttcatatagattgcaaggtggagacaagattctgagttctccattctgcttgttcttcctaagtgcacagctgggttaattcagcagctttccatgcagtgaggctgcttgactaaattcagacaaataacatgtggctaaaacgatacagacagattttaggcctgccttgctttttaraaacatcttcaatgatcatctagaattctctccgaaaaatccagaagccacctgtctcagaaatggcagctgaagctggagaagagctgtctaagatgtggcaagtaaatcaatcaataaatcaatcacataacttttgtttttataagccattgagattttgaagtataattattacagaggcctatcttgggctattccaatataggcagaaaggcaaataatatttaacagccttctctgacacgattagtgtgtggcaattaattcacagccaaaatgacataattgaatgttgttcaacaaatgttgcttcaagaaagcaaatgtgattgccagaacatattcttctggatgccaaactatttattaatgctactatataatggaaaaggatttcttacttgctaaagaacttctataagttttagaaaattcatatggagatcattacttatgttttcaagtgcatatttataatatcatgaaaatattctggtgtgtcaataatgagacaacagggttttcattttgataatttttgttaattgaatacatgactgaaattggaggacctacccacaagactctggcttcattatatctaaaataataacaaaataatagtcacaactccaacttattaagctgcacacatgtaaaatgctttacttatgttcacttatttggttatcactgtaactttacaaggtacttactatgattaaccccattatacagcctaggaacgtggcttttattatataaatagtaagtaaaagagcccaattagagagctgcactttttttttttttctgtttttgagatggagtcttcctctgtcgcccaggctgcagtgcagtggcacgatctcggctcactgcaacctccgcctcccaggttcaagcgattctcctgactcagcctcccaagtagctaggaccaccggcatgcactaccacatccaactaatttttgtatttttagtagagacagtgtttcaccatattgtccaggctggtctcaaactcctgacctcaggtgattcacccaccttgcctcccaaagtgctgggattgcaggcgtgagccaccatgaccggccagagctgcactcttgacacagctgttcttcagaccgagagtgtgttgaatctaattctaagcctatagctcagcagaagttttgggtatctctgcacaaaccttcactataaaaatgccccatttgtcatgtttatgatttcatgtgctcagttatgagatacagcctccaattactcatcttcagtaaattaactagaattaatcttttgccaaataaacttatcattcctctatggattctggattatttttcatttataatatagggcagtttttcaaccagttccgattatgtgatctatccaaagtgatctcagagagattagatctggagctggctcgctagcttggctgtttaaagcagaattccaaagagccaaacaataagagatcaatgtcttcagtctgtgcagagtccaagaatgcacccctaaactcagagaaatttcctagtttacaaaaatgtgagacaggcaatagcaattaagaaaaattgtggggagcataggtatagaggtaaaatatatgaataagaaatttcatgtctcttctacagtgaaaaactggccataattctatgttattttctattgttttattttcacatttaaataaattaataatataattaattcatgtttttgtaaaaatcaaatatataaaagtagagaacttacataatgaaaaattctgattataatcccactaccagaaataggtagccattgctaacattgttgatatgcaacacatatattacattattgatataattttatactgtttatgtattattgcatattgctcttagtggttttaacttaaaaagtttttttcctagtaaaaggtttattatgagcacctaccaaagcagtatatatacatttattttatcctttctaaaaacagtttgtaattcattatattgacacatcataatttattaaacatatttactatttgctcctatgttttttctatcacaaaaaaaatgtttcagtgaatagatttttatatttatctttgggatcttataatatctgaggaatgactccttggaagtggaacttcttggcaaaagagaatataccttttacatcttgacatatactgccaaagcagaccacaattttagattcagccaaattaattttagtggtgtctcatgccagtgattctgccttcactgtgctagtgtaggcagccagctgtggattgaagagtttgctgagtcaattggtataaatttggat

SEQ ID NO: 717393 - DNA, 1444 bp, Homo sapiens
atctttattgcaccctagaaacttagaatatctgtaagaaagaaatagagacagctcttatttcctaaacactgactcttttttgagtaactgttaaaacagctatattcctactgtcagggaaccttaaatttattttatatatagacgttcatctttttatatttgtacaagtccacaaattatcaaattgaagtaaatcgtgcttttatcagctttgggatattgacatcataaggctgtgagcttgatctgacagaaatgggaatgctttatatctttttattgaagttataaaatcctaaaaatgccaaaccaacatagtatgtactataattattaacattggttttattcaaccaaatattctagaactagttttaaatatcttaaatgtagcttaaaggggctagctttagtatagcaggaagcaaaaattcttatacattcaatgtttatctttttcaagaagcacttacagccaaactctaccacagaagtagaaattctctagtctaaaagatattgttttaatactcaattattttcatttaaactctaaaagtattaaaaacatgaagagtgagatacccaatcccctcaaaagtcatttatagacacagggtatcataacaccttaggcaacattaagaacaaatagagttgcagcaactacactactgtagccacaaagactttttttttttttcctgaatgggtgggcacctatttttacttgattggtttgtataaattaactgtgtgtttgaggttttttcctgagctgattactcagactaaaaaaagtcccccaaccttaatttaaaagttacattctagattttctcaaaaatcttttaaaacgagcgttggctaaacctcctgctgcaatctttgtaatgacctctcttagggaccttgggaaaaatcacataactactgtgtctctgtttccttatttctaaatgaagagactggactgtgtcatctgaaatgttccatttggtagaagagttcattaagaaactgtggtatggcccggggtggtggctcatgcctgtaatcccagcactttgggaggctgaggcgggcggatcatgaggtcaggagatcgagaccatcctggctaacatggtgaagcctcgtctctaccaaaaatacaagaaaaaattagctgggtgtggtggygggcacctgtagtcccagctactcgggaggctgaggcaggagaatggtgtgaacccgggaggcagagcttgcagtgagccaagatcttgccattgcactccagcctgggcaacagagcaagactccatctcaaaaaaaaaaaaagaaactgtggtatatacatacaatggaatactactcagccataaaaagtaatgaattaacagcaattgcagtgacctgcatgaatgagattggagactgttattctaagtga

SEQ ID NO: 717394 - DNA, 1444 bp, Homo sapiens
atctttattgcaccctagaaacttagaatatctgtaagaaagaaatagagacagctcttatttcctaaacactgactcttttttgagtaactgttaaaacagctatattcctactgtcagggaaccttaaatttattttatatatagacgttcatctttttatatttgtacaagtccacaaattatcaaattgaagtaaatcgtgcttttatcagctttgggatattgacatcataaggctgtgagcttgatctgacagaaatgggaatgctttatatctttttattgaagttataaaatcctaaaaatgccaaaccaacatagtatgtactataattattaacattggttttattcaaccaaatattctagaactagttttaaatatcttaaatgtagcttaaaggggctagctttagtatagcaggaagcaaaaattcttatacattcaatgtttatctttttcaagaagcacttacagccaaactctaccacagaagtagaaattctctagtctaaaagatattgttttaatactcaattattttcatttaaactctaaaagtattaaaaacatgaagagtgagatacccaatcccctcaaaagtcatttatagacacagggtatcataacaccttaggcaacattaagaacaaatagagttgcagcaactacactactgtagccacaaagactttttttttttttcctgaatgggtgggcacctatttttacttgattggtttgtataaattaactgtgtgtttgaggttttttcctgagctgattactcagactaaaaaaagtcccccaaccttaatttaaaagttacattctagattttctcaaaaatcttttaaaacgagcgttggctaaacctcctgctgcaatctttgtaatgacctctcttagggaccttgggaaaaatcacataactactgtgtctctgtttccttatttctaaatgaagagactggactgtgtcatctgaaatgttccatttggtagaagagttcattaagaaactgtggtatggcccggggtggtggctcatgcctgtaatcccagcactttgggaggctgaggcgggcggatcatgaggtcaggagatcgagaccatcctggctaacatggtgaagcctcgtctctaccaaaaatacaagaaaaaattagctgggtgtggtggtgggcaccygtagtcccagctactcgggaggctgaggcaggagaatggtgtgaacccgggaggcagagcttgcagtgagccaagatcttgccattgcactccagcctgggcaacagagcaagactccatctcaaaaaaaaaaaaagaaactgtggtatatacatacaatggaatactactcagccataaaaagtaatgaattaacagcaattgcagtgacctgcatgaatgagattggagactgttattctaagtga

SEQ ID NO: 717395 - DNA, 1444 bp, Homo sapiens
atctttattgcaccctagaaacttagaatatctgtaagaaagaaatagagacagctcttatttcctaaacactgactcttttttgagtaactgttaaaacagctatattcctactgtcagggaaccttaaatttattttatatatagacgttcatctttttatatttgtacaagtccacaaattatcaaattgaagtaaatcgtgcttttatcagctttgggatattgacatcataaggctgtgagcttgatctgacagaaatgggaatgctttatatctttttattgaagttataaaatcctaaaaatgccaaaccaacatagtatgtactataattattaacattggttttattcaaccaaatattctagaactagttttaaatatcttaaatgtagcttaaaggggctagctttagtatagcaggaagcaaaaattcttatacattcaatgtttatctttttcaagaagcacttacagccaaactctaccacagaagtagaaattctctagtctaaaagatattgttttaatactcaattattttcatttaaactctaaaagtattaaaaacatgaagagtgagatacccaatcccctcaaaagtcatttatagacacagggtatcataacaccttaggcaacattaagaacaaatagagttgcagcaactacactactgtagccacaaagactttttttttttttcctgaatgggtgggcacctatttttacttgattggtttgtataaattaactgtgtgtttgaggttttttcctgagctgattactcagactaaaaaaagtcccccaaccttaatttaaaagttacattctagattttctcaaaaatcttttaaaacgagcgttggctaaacctcctgctgcaatctttgtaatgacctctcttagggaccttgggaaaaatcacataactactgtgtctctgtttccttatttctaaatgaagagactggactgtgtcatctgaaatgttccatttggtagaagagttcattaagaaactgtggtatggcccggggtggtggctcatgcctgtaatcccagcactttgggaggctgaggcgggcggatcatgaggtcaggagatcgagaccatcctggctaacatggtgaagcctcgtctctaccaaaaatacaagaaaaaattagctgggtgtggtggtgggcacctgtagtcccagctactcgggaggctgaggcaggagaatggtgtgaacccgggaggcagagcttgcagtgagccaagatcktgccattgcactccagcctgggcaacagagcaagactccatctcaaaaaaaaaaaaagaaactgtggtatatacatacaatggaatactactcagccataaaaagtaatgaattaacagcaattgcagtgacctgcatgaatgagattggagactgttattctaagtga

SEQ ID NO: 717396 - DNA, 648 bp, Homo sapiens
gtgaacctgggggataatggaatagcaagaaagaaggagccttcacccttcacaatgtcatagaactgcaataccaactatgcagaaaagaattggacttctatcttattttggctactttatttttgggtctttggctttggctgcctacttgatctacatattcatttccttggtaggcaagtcctatggataccatctctgaaatatattttgcatttgactgctgtgcccctaccatttggtccaatccaccatcatctttccctggatgctgaaccacttactggccttgttactttcattcttgacctatagaatttgttttctaattgaaataattttttaaaaagattatattacctcctgcttaaaatcctctagtgacattgtcaatgccttccacctaaagaccaccagcaatgcacctgcagtaaaaaaaagttgggtttattgcttgtggctgcataccayggggagtcctggggtgttccagtaagagtatgttagaagggactttactatggataggtcttggacttgtgttatgtgatttggggtagtgtttaagaaggcagtgttaattctgtgattaggtaacttaatacatctcatctagaagaatggaagactagaatgaggctaagc

SEQ ID NO: 717397 - DNA, 613 bp, Homo sapiens
acaaggtcacgctacacacatccaaccacaattaaatggtgtgtcggcaacacagacttcaacgaggtcacgctacacacatccaaccacaattaaacagtatgtgaacttgctaaggtggaacaagcgagagcacagtgatgtgtagatacagcagctgagatatggaggcatgtgagtaacacctgggcccggcactcagaggctaagtctaataaggatagctgtgagtgtcaaaggtgcctaccacaaaggattccacacaaagcaagcacacaggactgccaaggcggcacacagtcagggtttgccaggctgggaggctcatgaagaccttcactgcagtttgctagttttttagttggaaayggaggttcaatgggtaaatggcccatagtcaaaccaaaagttgtttatgtcaaataaaacatgtcaaatagtagcacttttacatttaaaaattgcatacccatgcacatcttatgtgtatatatattcctagacgatagagtaaaatatcaggatatttaatacatgacaggatatttgatatatataacagcaaagaacttccagtaatattctcattagctgaatttctcagatttcttat

SEQ ID NO: 717398 - DNA, 658 bp, Homo sapiens
atccagtcatggtaaatttcaacatgacagtactcaacatctgattaggatctgtacttaaaatgcagagtatatgaactcaacatttttattgtaggcaatcaatttggaaataaaatgctttcctacttttaaaaataaaaatacatcaccaaaawtttttttttatttttaaatagcagcaaacagaatataaaattttctaaaagataataattgaaatagcatcaaaaaatgtcaaagccaggcacagtggctcacatctgtaattccaatactttgagaagccatggctggaggatcacttgaggccaggactctgagaccagcctagggaatacaggaggcccagtctctacaaaaaaataaaaaattagccaggcatgatggcatgtgcctgtagtccctcccagttactcaggaagcggaggtgtgaggatggctttggcccaggaggttgaggctgcagtgagcagtgatcatgccactgaaatccagcccaggtgacacagtaagaccttgtcttcccccacccccccccaaaaaaaaaaaagtcaaatacttagaaataaatccaacaaaaggtataccaacctctacagagaacaatcataagacattattgaaaaataaaggaatacacaatattcgttgacta

SEQ ID NO: 717399 - DNA, 436 bp, Homo sapiens
tcaagctgtttcctgcctgtaagattctgggagtccaacaggcttctctcatctcatcctgtctctgttcctttaggtcaagctggtagtttctgctgataaaacatgatgggtctcctgtgcatatcctgagagtccacactatcagaaaacagactccaacacagatccttcttggataacccatctctaytcctggtttctgcagagttgctgagtagatcctttagtcagcccctgaaatggtctggctctgtgtccccacccgaatctcatctcgaattgtactccccgtgtgtagagggagatgggtgactggatcatgggggcggtttcctccatgctgttctcgtgataatgagtgagttctcatgcgttctgatggtttgatgagtgtgggatggttcctccttcacatgctcacactttctcctgc

SEQ ID NO: 717400 - DNA, 560 bp, Homo sapiens
aacagtccacaaaaggactctcacttctgacacscccagcaagttcagggggtctccaagaccacctttatgtttgataatttgctagaaggactcacagaactcagaagggcatcctactcacacttacagcttattacagcaaaaggacacagattaaaatcagctcagggaagaggcacgtgcggcagagtccaggggggctccacacatggatctcccagttgtcccctcccagtggagttgcgggcagcgctgacatctcccagcaatgaggtctgacaatgcacacagatacgtttctcacttgacatttggacaacaaggatgtgtggcgttggcaagaagggctgctcacaagatgagttctgtttcctaccttcactctcacttcctctgatggatttctcctgcggaacatgccaaagacagcgcgctctcatgccatgtccaagaggtatcctgagctggcttctcctgggcttctctcttcctccctgggccaccttgcctcccttgtggccatctgcacaccaccccaggaaaggctcttccgctta

SEQ ID NO: 717401 - DNA, 459 bp, Homo sapiens
caaggcaggctgatcaccggaagccaggaattcaagatcagcctggccaatgtggtgaaactccatctctattaaaaatacaaaaattagccaggcatcatggtgggtgcctgtaatcccagctactcgggaggctgaggcaggagaattgcttgaacccgggaagcggaggttgcagtgagccaagattgtaccactgcactccagcctggatgacaagagcaagactctatctccaaaaamaaaaaaaagagccaggtacagtgtctcacacctgtaatcccaactatttgggaggctgattcaagagggtctcttgaggctaggaattcaagatcagcttggataactcagttagaccccatcactacaaaattagttaaataaaagacaaaaggaaattacttttggcctggtgcactggctcattcctgtaatcctaacactttgggaggcgga

SEQ ID NO: 717402 - DNA, 1249 bp, Homo sapiens
agaccaaggaaattgtatgtatcagtgagataggcttcccatattatgctcatgcgttatacctgcctagctacattgcctttttttaaattaaacattatattgatgtaatcatactattacataggcgatatatgtattttatgattgtatgttgatatagttatggggaatctaatcctatacgatgtaatcatagattcacatatagttgtatattttgcccaatttctttcagtggtaatgtttcacacatatcacaatcaggatgttgacatcaatacagcccactgattttattcacctttcctcagctttactttccccaagtatactcctccaggtatgcatgggtgtgtagaaatatggaacgcagctgggcacagtgactcacgcctgtaatcccagcactttgggatgctaaggcaggaggatcmcttgagcccaggaatttgagaccaacttgggcaacatggcaaaacctcatctctacaaaaaataaaaaattcacctggtgtggtggtgcatacctgtagttccagctgcttgggaggctgaggtaggaggatcacttgagttcgggaggttgaggctgcagtgagccatgatagcaccactgcactccggcctgggtgacagggcaagaccctgtttcaaaaaaaaaaaaacttatatatatatatgtatgtatgtagaacacttcatgaatttgtgtcatctgtgcatggggcccatggtgacctctgtgttgtaccagttatagtatgtgcgctgctgataggagtaccacattgcctttacaacatcataggggccaaagagggtcggcaggattatgagcagttggccctagtctgagaggctctctaaaaacctaaagttgtcagcagacaggtgctcagctttgtatctccataagaagggaagaggatgtgaagatcctgtcagggctgggtccacttgggaagtgacaattggaacatgcccagacctctctgagcaactctgggtgtacattttcctctattcctcaagagctattgtgaatttgatcatccagtatgctgataggcctggggactgacacatagtaagcccataacaattataatttaaaactaatttgttatatagcataattgatatattttaaaatgcaaaactataattcaactaaaatatacaaggcactctaagtcataccatgttttaagtagcttacaaggtgatcagcaagtgtcttatacaa

SEQ ID NO: 717403 - DNA, 1249 bp, Homo sapiens
agaccaaggaaattgtatgtatcagtgagataggcttcccatattatgctcatgcgttatacctgcctagctacattgcctttttttaaattaaacattatattgatgtaatcatactattacataggcgatatatgtattttatgattgtatgttgatatagttatggggaatctaatcctatacgatgtaatcatagattcacatatagttgtatattttgcccaatttctttcagtggtaatgtttcacacatatcacaatcaggatgttgacatcaatacagcccactgattttattcacctttcctcagctttactttccccaagtatactcctccaggtatgcatgggtgtgtagaaatatggaacgcagctgggcacagtgactcacgcctgtaatcccagcactttgggatgctaaggcaggaggatcccttgagcccaggaatttgagaccaacttgggcaacatggcaaaacctcatctctacaaaaaataaaaaattcacctggtgtggtggtgcatacctgtagttccagctgcttgggaggctgaggtaggaggatcacttgagttcgggaggttgaggctgcagtgagccatgatagcaccactgcactccggcctgggygacagggcaagaccctgtttcaaaaaaaaaaaaacttatatatatatatgtatgtatgtagaacacttcatgaatttgtgtcatctgtgcatggggcccatggtgacctctgtgttgtaccagttatagtatgtgcgctgctgataggagtaccacattgcctttacaacatcataggggccaaagagggtcggcaggattatgagcagttggccctagtctgagaggctctctaaaaacctaaagttgtcagcagacaggtgctcagctttgtatctccataagaagggaagaggatgtgaagatcctgtcagggctgggtccacttgggaagtgacaattggaacatgcccagacctctctgagcaactctgggtgtacattttcctctattcctcaagagctattgtgaatttgatcatccagtatgctgataggcctggggactgacacatagtaagcccataacaattataatttaaaactaatttgttatatagcataattgatatattttaaaatgcaaaactataattcaactaaaatatacaaggcactctaagtcataccatgttttaagtagcttacaaggtgatcagcaagtgtcttatacaa

SEQ ID NO: 717404 - DNA, 1249 bp, Homo sapiens
agaccaaggaaattgtatgtatcagtgagataggcttcccatattatgctcatgcgttatacctgcctagctacattgcctttttttaaattaaacattatattgatgtaatcatactattacataggcgatatatgtattttatgattgtatgttgatatagttatggggaatctaatcctatacgatgtaatcatagattcacatatagttgtatattttgcccaatttctttcagtggtaatgtttcacacatatcacaatcaggatgttgacatcaatacagcccactgattttattcacctttcctcagctttactttccccaagtatactcctccaggtatgcatgggtgtgtagaaatatggaacgcagctgggcacagtgactcacgcctgtaatcccagcactttgggatgctaaggcaggaggatcccttgagcccaggaatttgagaccaacttgggcaacatggcaaaacctcatctctacaaaaaataaaaaattcacctggtgtggtggtgcatacctgtagttccagctgcttgggaggctgaggtaggaggatcacttgagttcgggaggttgaggctgcagtgagccatgatagcaccactgcactccggcctgggtgacagggcaagaccctgtttcaaaaaaaaaaaaamttatatatatatatgtatgtatgtagaacacttcatgaatttgtgtcatctgtgcatggggcccatggtgacctctgtgttgtaccagttatagtatgtgcgctgctgataggagtaccacattgcctttacaacatcataggggccaaagagggtcggcaggattatgagcagttggccctagtctgagaggctctctaaaaacctaaagttgtcagcagacaggtgctcagctttgtatctccataagaagggaagaggatgtgaagatcctgtcagggctgggtccacttgggaagtgacaattggaacatgcccagacctctctgagcaactctgggtgtacattttcctctattcctcaagagctattgtgaatttgatcatccagtatgctgataggcctggggactgacacatagtaagcccataacaattataatttaaaactaatttgttatatagcataattgatatattttaaaatgcaaaactataattcaactaaaatatacaaggcactctaagtcataccatgttttaagtagcttacaaggtgatcagcaagtgtcttatacaa

SEQ ID NO: 717405 - DNA, 1249 bp, Homo sapiens
agaccaaggaaattgtatgtatcagtgagataggcttcccatattatgctcatgcgttatacctgcctagctacattgcctttttttaaattaaacattatattgatgtaatcatactattacataggcgatatatgtattttatgattgtatgttgatatagttatggggaatctaatcctatacgatgtaatcatagattcacatatagttgtatattttgcccaatttctttcagtggtaatgtttcacacatatcacaatcaggatgttgacatcaatacagcccactgattttattcacctttcctcagctttactttccccaagtatactcctccaggtatgcatgggtgtgtagaaatatggaacgcagctgggcacagtgactcacgcctgtaatcccagcactttgggatgctaaggcaggaggatcccttgagcccaggaatttgagaccaacttgggcaacatggcaaaacctcatctctacaaaaaataaaaaattcacctggtgtggtggtgcatacctgtagttccagctgcttgggaggctgaggtaggaggatcacttgagttcgggaggttgaggctgcagtgagccatgatagcaccactgcactccggcctgggtgacagggcaagaccctgtttcaaaaaaaaaaaaacttatatatatatatgtatgtatgtagaacacttcatgaatttgtgtcatctgtgcatggggcccatggtgacctctgtgttgtaccagttatagtatgtgcgctgctgataggagtaccacattgcctttacaacatcataggggccaaagagggtcggcaggattatgagcagttggccctagtctgagaggctctctaaaaacctaaagttgtcagcagacaggtgctcagctttgtatctccataagaagggaagaggatgtgaaratcctgtcagggctgggtccacttgggaagtgacaattggaacatgcccagacctctctgagcaactctgggtgtacattttcctctattcctcaagagctattgtgaatttgatcatccagtatgctgataggcctggggactgacacatagtaagcccataacaattataatttaaaactaatttgttatatagcataattgatatattttaaaatgcaaaactataattcaactaaaatatacaaggcactctaagtcataccatgttttaagtagcttacaaggtgatcagcaagtgtcttatacaa

SEQ ID NO: 717406 - DNA, 1249 bp, Homo sapiens
agaccaaggaaattgtatgtatcagtgagataggcttcccatattatgctcatgcgttatacctgcctagctacattgcctttttttaaattaaacattatattgatgtaatcatactattacataggcgatatatgtattttatgattgtatgttgatatagttatggggaatctaatcctatacgatgtaatcatagattcacatatagttgtatattttgcccaatttctttcagtggtaatgtttcacacatatcacaatcaggatgttgacatcaatacagcccactgattttattcacctttcctcagctttactttccccaagtatactcctccaggtatgcatgggtgtgtagaaatatggaacgcagctgggcacagtgactcacgcctgtaatcccagcactttgggatgctaaggcaggaggatcccttgagcccaggaatttgagaccaacttgggcaacatggcaaaacctcatctctacaaaaaataaaaaattcacctggtgtggtggtgcatacctgtagttccagctgcttgggaggctgaggtaggaggatcacttgagttcgggaggttgaggctgcagtgagccatgatagcaccactgcactccggcctgggtgacagggcaagaccctgtttcaaaaaaaaaaaaacttatatatatatatgtatgtatgtagaacacttcatgaatttgtgtcatctgtgcatggggcccatggtgacctctgtgttgtaccagttatagtatgtgcgctgctgataggagtaccacattgcctttacaacatcataggggccaaagagggtcggcaggattatgagcagttggccctagtctgagaggctctctaaaaacctaaagttgtcagcagacaggtgctcagctttgtatctccataagaagggaagaggatgtgaagatcctgtcakggctgggtccacttgggaagtgacaattggaacatgcccagacctctctgagcaactctgggtgtacattttcctctattcctcaagagctattgtgaatttgatcatccagtatgctgataggcctggggactgacacatagtaagcccataacaattataatttaaaactaatttgttatatagcataattgatatattttaaaatgcaaaactataattcaactaaaatatacaaggcactctaagtcataccatgttttaagtagcttacaaggtgatcagcaagtgtcttatacaa

SEQ ID NO: 717407 - DNA, 1126 bp, Homo sapiens
ctgcacctgtagaagcatcccccacagctctcatcctcaaggtctgtatcacagccagagactccgacaggccctgctttggtgacacctcctccctgctgcaggggaggggcggctgtgaagcagattccctgtgcactggttaccgacgtgtctgagcctggtgagatagaacactcacacaggttacatgaagcagctcaacacctcctagatgggcatcgagaggcagcagagctgaaagttcatggccagctggttccccaaggctcacgaaagctgcccagcctggctcgggccccacctgcaccgcagctgaaggaccctagaaagtagcccgccctgggtttcataccttagggccacaggccccactgagctaaaggacatctctttctgggggacggtgggcctggaatagagcctgggctattccagccagttcatccctatctcagggtgttactttctggcacattctacaagagagaactacaagtgagaaattggggaggcttccctgtgagccagcctgcagctgccagggtgaaatggggcagctaatggacactcttgcaagaacccacagagaggaaggccatggctctcgcagggagggacgctgtacaaacaccatgcttaccagggcaggtaacatccccccactcctacccctgactcccacgccgtttcttgcaaattgaaacccagaggccctcactaactcagcccaggccacgcagctactatgtgcagagtggaggctggaacctggatgtgtctgactccagaatccacgtccaggtgaccactgggtgccacctgcatttgccttcatgtggctcactctgaggtggctccaggcctgggctgggcagcagagactggggcctggggtatctttaaagctttgctgcagcccgtggtcctccacagtgagtggcatctccaccrcctgtctcatgcctcccgaggagtgacagacaagtctgggctgcagctccatccaagctctttcctgcactcacagagtgcccgagtctccctggagatgaaggctctgggtgtgaaatatctctgctgcctccaggagaaggccatgtccccacatctacagggagcagcc

SEQ ID NO: 717408 - DNA, 656 bp, Homo sapiens
cttacaaccttgttacattaaagttgaagcagatgggtctggtgcagctgcagttgggttagacggaggcgtctttgcttcaccacaaatccataaactcattctgagctggacctgtgttctaatcactccgatatcccccacaggccttgctcacggtggaggaaattttctgtctccacttcaatgcccaaaattacccctcatgtcaacttctggaaggcttttccttggcgaagtcttcccagagccccatgcatgtccttgttcctcaggctgtagatgaaagggttaatcatggcgtcaccaccgcatacatcactgtggctactgagtccttcatggagtaggtttggaggggctgcaggtacaccatacccagagtcccatagaagagggagaccacagccaaatgggaagcacaggtggagaaggctttgtacttcccagtggctgagggtatttggaggatggctctgacaatgcgggcgtaggatgtgatcatgaaacctaaggggatgaggaagatgaagcagcccgtggcaaccagtactgtgtggttgacgtggatgttggaacatgccagcctyagcaggaagtacatctcacagaagaggtagtggatcttttgagacccacagaaggtcacctggtca

SEQ ID NO: 717409 - DNA, 604 bp, Homo sapiens
aaagcttgccttctttgtaytggaatggagtactagaaactgccatctttttcgtttcaaccagcaagatttcaaagcaagctataaaatatgtgtaacatgcgtttgtcaatgaaatggttcagaaaataacctgcttgcctacttgtctctcacctccagtgtgccagcttactatgcactggtcctacttaaccttcaaaagtcctgagaacatttcatcaagtaactgattcagctttgtggtagaattgagaaaaaaacttagtttggcaagcttgaaaagagcctggtagtcactccccctttatacttaacccataaaatacttgaccagggaaaacttaaaaccccggggaagagctttcttcctcttctttttttcttcttactctctccctctatccttccctctctcccttttcttccatctctattgaataagaagcattccatctctattgaataagaagcactctattgaataagaagcactctattgaataagtagcattgagccataatatgaggaaatcaccgaaaaaataagacatagttcctccttgattgtgttgaacagagaacatatatccatgggagagag

SEQ ID NO: 717410 - DNA, 604 bp, Homo sapiens
aaagcttgccttctttgtactggaatggagtactagaaactgccatctttttsgtttcaaccagcaagatttcaaagcaagctataaaatatgtgtaacatgcgtttgtcaatgaaatggttcagaaaataacctgcttgcctacttgtctctcacctccagtgtgccagcttactatgcactggtcctacttaaccttcaaaagtcctgagaacatttcatcaagtaactgattcagctttgtggtagaattgagaaaaaaacttagtttggcaagcttgaaaagagcctggtagtcactccccctttatacttaacccataaaatacttgaccagggaaaacttaaaaccccggggaagagctttcttcctcttctttttttcttcttactctctccctctatccttccctctctcccttttcttccatctctattgaataagaagcattccatctctattgaataagaagcactctattgaataagaagcactctattgaataagtagcattgagccataatatgaggaaatcaccgaaaaaataagacatagttcctccttgattgtgttgaacagagaacatatatccatgggagagag

SEQ ID NO: 717411 - DNA, 2254 bp, Homo sapiens
taacttaaccatctgtaaaatgaaggggttgggtttcatccactcaaaagtcccttgcatttataccaatattctaccaggtatttgaaagaattagatcatctaatgaggaagaatataaggaaaataatgttactactcttgattagtagtcagaacaagctagactatcttaacttttaattgtgtgtctcttgagaagatatttttagcaccatgccaaatcccagagtccaagggctgccagggatataggcatagaagaccctctgggcaaagacagactcctcatcaaatagttggggtttggccctaattccttatctgactgtctaggttggtgagggggttacaccatatagaagcctctgggtctgtttttgcctaaagtctattttctctgaggtgaaggaacctgttttccccaggcctaagccctgaggttggcctttttgatgctttaccattccccaggccagcaataaaatgaaaaagcaatcttagaaagcctttctctgaacactagaccacacctaatggccttatccactccagagctcccatcccctgggttctactccaaagtgggccccccacaagtaggaggcttgtctttctgcacgtgctcctgggaaggatgagaagacacwctacaataggctttttcgcctttctattcctgccacggaaagttccagttgcccctaacaccagggccctcctgtgttttcctgagagctctttgatcccttgatccaagtgcagagggcctttcttttggggcttgagtgggaggagggaaacctcaagctcccttcaaaagctacacatggagccaacaataacaactcattggacatagcaggagcctaagggaaaagttctgaagtgggcgcagaggggttcagtcctaaagatttccaggactgtggcatggagaggtaccctcagtctgggggaataaggtcatggttacctgagccaaacctagtcaatagctggcctggagtcatgcatgcccctgaagcaagataagggttaaacgtttggaatgtgcctgatggcactgctgttctgagtattctattttgttttttattctgagtattttagatgcacacatgcaaccaagtgctcattctgagttttgaaagaagacttgattttgcttccagtgagtggtgtttccaatagaagcactggaatgcagccttatcttttccttctcttgggttgatcctttgtcctggctgctgaccttgctccttcctcacacaaggagattttcttggttgggaaaagtaacagatgcagacagcctaatttgttcttggcaagagccacaatctgcattgctgtgagggtcaggagaatcataaatcattcacagagttctggttttctgagatgagatgggccagattagttagaatttcattttgttctccctcttctcaccccaagccgcatatactcctatagctgcttatccacaacaccagcatcttcctttttatttctcagaaggggaagggagggaatgttctctccaaatgaacatgaaacacattgagttggtatgtgatgatgccatgacgcagtgactgggacaacttgaaagctgaaacataaaacagcttttaaaaagggaaaataacaccaatgtgtttccaatgtgccctgcacaggaaacagggctggaggctccagtgacggtcaggcgactccactccagctggaggatttttatcattgctctgttatcgtctgcacattacagtcgccaagacctccttgctcaagctctgggaggcagtggggtccttatggctagagagacttggaaaggcatgaccttgtgcatccccctgtctctttcagcatgtaggatttcaagtaagtctggtccctgactgactcaggggggtgtaaatgtgtgaggaaaaaacttccataatcgaggtgactttttgtttaggctttattctctttgaactagagattgaggaagaaagtgactcaaaaggcagtaccaagatttcagtcatttgtttaatgttgaataggcagagagtgacactctggatagatctggcattgactgagagccctgttttactgccatcagcaggaccagtcttcctctttgccaccactgaggatccacaagctaatatgggactcttgttctttactggattttagaccaggaggtaatagggcaccctcagacctcatatgtgggacataacac

SEQ ID NO: 717412 - DNA, 1240 bp, Homo sapiens
ttgttgatgtcttgagcacgacttttcagactttgaagcagatggcccaggtaggctatgtccaaattcctagcccacagaaatgataaagtaaatttgtgttgttttaaaagtcactacgttttgaaataatttgttatatagcaattgttaatttttacagtacagttgacagttccatgcaccaccaacttcctcaagctataggaaacctctaagctgcatgcaaatatatcccagaagtatttccctcagccaaatgtgtttasttgtgaatgggcaaatgcctcagtcttctcatcctcctatggggcaattttgatgtattgttctttgtgacctatcagaaagtctacaatatgattgagtgttcttttctcatatgccacagataaagaagataacaggacctggaggaaatatggtgtattatgttgcatggagtaaacagggtaacaaatagcaatataatcaatatttttggatgggatcttaacagtcgctggtatcctgttgcaaaaaaaaaaaagataaatatattatcaactgtggttatttaacaccataggtttactgagggctatgctctgtgtagccaggtaggttctgccattgaatatgttaggagattagggtggttgtgaccgatgagaatggatataaagtaagagaataataagcttaacttttcatacttttatcttaagatataggccataactctgaatttctatgtcattgtttaagttatctctgggcttacgtaaccagagtcttacaattcattaaaaacaagcttggggcttgattctcagggttactacactgtaacaccagtaaacgtcataactttctaggtgtcatatgagaaaatgaggatattgaaaaggaaaaaaaatgcctctttgaaaaaaatccctaataatttctttagccactattcttcatgtctctaagcctaggaatgccacattatgtcaaggaatccagctagaaacttgctagcaggaatctagatttgcttttattcagacatcttgcctttgcaagtactgccattcatgtatttagtgactgttttatataactttatgatattgtacccccaaaaagcattgcaacatgaatctcattcacagtgaaggatgtaaggcaatggattaatgtttaggatgcaatagttttattatctatctcatcagtcagaagcagaagattttcttaagcactggatgaccca

SEQ ID NO: 717413 - DNA, 650 bp, Homo sapiens
tgttcattttagcactattcacagtaccaaagacatagaatcaacctaaatgcccatcaatgatagactgtataaagaaaatatggtatatatacaccatggaatgctatgcagccataaaaaggtgaaatcatgtcttttgtagggacatggatggagtaggragcctttatcctcagcaaactaacactagaacaggtaacaaaacactgcatgttctcacttgtaagttggagctgaataataagaacacatggccacatggtggggaacaacacacattggggcctgtaggaggggaggggtgggggtaggaagatcttcagcaagaatagttaatggtcactgggcttaatacctagatgatgacacgatctgttcagcaaaccactatgaaacacatttacctgtataacaaaactgcacatccttcacaggtacccctgaaggtaaaagttggaaattaaaataataaataaataaataaataaatgctcacctggattttaacagatggttttcaactgtttctagctaagcaaccaaaaaaacctaaaaattataatatagaataaattatattatgtatgtataagaaactaaaaggcacttttgataaaacaaacacatacacatgctcaaaataggtt

SEQ ID NO: 717414 - DNA, 650 bp, Homo sapiens
tgttcattttagcactattcacagtaccaaagacatagaatcaacctaaatgcccatcaatgatagactgtataaagaaaatatggtatatatacaccatggaatgctatgcagccataaaaaggtgaaatcatgtcttttgtagggacatggatggagtagggagcctttatcctcagcaaactaacactagaacaggtaacaaaacactgcatgttctcacttgtaagttggagctgaataataagaacacatggccacatggtggggaacaacacacattggggcctgtaggaggggaggggtgggggtaggaagatcttcagcaagaatagytaatggtcactgggcttaatacctagatgatgacacgatctgttcagcaaaccactatgaaacacatttacctgtataacaaaactgcacatccttcacaggtacccctgaaggtaaaagttggaaattaaaataataaataaataaataaataaatgctcacctggattttaacagatggttttcaactgtttctagctaagcaaccaaaaaaacctaaaaattataatatagaataaattatattatgtatgtataagaaactaaaaggcacttttgataaaacaaacacatacacatgctcaaaataggtt

SEQ ID NO: 717415 - DNA, 1280 bp, Homo sapiens
tggcttaaaattgctaacgaaatattctcctttgagattgttctaaaaatagtaatatataaattgaaagagtcaatgaatgattaacagctgaagcataatttgtacactgactctgtgtcataaacatttctgaacaaaaaaagcaaaatcattttgcccatgactttcgtgttatctattagttgaaaacaccatacaaagttttagtgatgtttattatctatcagactacttgtctaagcagttcccagaaagaaccatggggaacaaagcaaggtaagaaacaatgaaattagcaggacaattgtagtttcagccacaagaaagggtatataatttattgtgacagttggaatgcatataaatctttgccaaaatgctgggggatacaaataatgctaaactttgaaaggttcaaggatagtaactaactcaggacaaagatagcagagcaggaggatttatcacatatagtagaaaataatgagtgttctctgagcaatttggaagcagtcccctggacaaggctgtggaattccctgaactcttaacaaaaaaagccagaaaaatgataaatgcacccaatgaaaaaagtggcagaatactttaaaaaaataaaatttcctctactgctacctcaaaaagtacctaagattctccctctagtttgttgggttaaaaaacaattatgagggctgggcacagtggctcatgcctgtaatcccagcactttcggaggccaaggcgggcggatcatgaggtcaggagtttgagaccagcctggtcaacagggcgaaaccccgtctctactaaaaatacaaaaattagctgggtgtggtggcgtgcscctgtaatcccagctactcaggaggctgaggcaggagaatcgcttgaatctggtaggcagaggttgcagtgagccaagatcatgccattgcactccagcctgggcgacaacagcaagactctgtctcaaacaaacaaacaaacaaacaaaaaaagaaaacaaacaaacaaacagttatgagccttgtcaacattttagatggagaaatagggtaatttgccaaattattcatgaattcattttttggtaacatggtaacattttttggtaacagacatggttacattttatgaaagctatatacacaagtggacattctaagaaccttctaggaactttagtcaggaaggtccaataagcccttttattattgggcagcaatatcaccagctttttcatagtatatgtggctttcaagattgagattaac

SEQ ID NO: 717416 - DNA, 1280 bp, Homo sapiens
tggcttaaaattgctaacgaaatattctcctttgagattgttctaaaaatagtaatatataaattgaaagagtcaatgaatgattaacagctgaagcataatttgtacactgactctgtgtcataaacatttctgaacaaaaaaagcaaaatcattttgcccatgactttcgtgttatctattagttgaaaacaccatacaaagttttagtgatgtttattatctatcagactacttgtctaagcagttcccagaaagaaccatggggaacaaagcaaggtaagaaacaatgaaattagcaggacaattgtagtttcagccacaagaaagggtatataatttattgtgacagttggaatgcatataaatctttgccaaaatgctgggggatacaaataatgctaaactttgaaaggttcaaggatagtaactaactcaggacaaagatagcagagcaggaggatttatcacatatagtagaaaataatgagtgttctctgagcaatttggaagcagtcccctggacaaggctgtggaattccctgaactcttaacaaaaaaagccagaaaaatgataaatgcacccaatgaaaaaagtggcagaatactttaaaaaaataaaatttcctctactgctacctcaaaaagtacctaagattctccctctagtttgttgggttaaaaaacaattatgagggctgggcacagtggctcatgcctgtaatcccagcactttcggaggccaaggcgggcggatcatgaggtcaggagtttgagaccagcctggtcaacagggcgaaaccccgtctctactaaaaatacaaaaattagctgggtgtggtggcgtgcgcctgtaatccmagctactcaggaggctgaggcaggagaatcgcttgaatctggtaggcagaggttgcagtgagccaagatcatgccattgcactccagcctgggcgacaacagcaagactctgtctcaaacaaacaaacaaacaaacaaaaaaagaaaacaaacaaacaaacagttatgagccttgtcaacattttagatggagaaatagggtaatttgccaaattattcatgaattcattttttggtaacatggtaacattttttggtaacagacatggttacattttatgaaagctatatacacaagtggacattctaagaaccttctaggaactttagtcaggaaggtccaataagcccttttattattgggcagcaatatcaccagctttttcatagtatatgtggctttcaagattgagattaac

SEQ ID NO: 717417 - DNA, 1280 bp, Homo sapiens
tggcttaaaattgctaacgaaatattctcctttgagattgttctaaaaatagtaatatataaattgaaagagtcaatgaatgattaacagctgaagcataatttgtacactgactctgtgtcataaacatttctgaacaaaaaaagcaaaatcattttgcccatgactttcgtgttatctattagttgaaaacaccatacaaagttttagtgatgtttattatctatcagactacttgtctaagcagttcccagaaagaaccatggggaacaaagcaaggtaagaaacaatgaaattagcaggacaattgtagtttcagccacaagaaagggtatataatttattgtgacagttggaatgcatataaatctttgccaaaatgctgggggatacaaataatgctaaactttgaaaggttcaaggatagtaactaactcaggacaaagatagcagagcaggaggatttatcacatatagtagaaaataatgagtgttctctgagcaatttggaagcagtcccctggacaaggctgtggaattccctgaactcttaacaaaaaaagccagaaaaatgataaatgcacccaatgaaaaaagtggcagaatactttaaaaaaataaaatttcctctactgctacctcaaaaagtacctaagattctccctctagtttgttgggttaaaaaacaattatgagggctgggcacagtggctcatgcctgtaatcccagcactttcggaggccaaggcgggcggatcatgaggtcaggagtttgagaccagcctggtcaacagggcgaaaccccgtctctactaaaaatacaaaaattagctgggtgtggtggcgtgcgcctgtaatcccagctactmaggaggctgaggcaggagaatcgcttgaatctggtaggcagaggttgcagtgagccaagatcatgccattgcactccagcctgggcgacaacagcaagactctgtctcaaacaaacaaacaaacaaacaaaaaaagaaaacaaacaaacaaacagttatgagccttgtcaacattttagatggagaaatagggtaatttgccaaattattcatgaattcattttttggtaacatggtaacattttttggtaacagacatggttacattttatgaaagctatatacacaagtggacattctaagaaccttctaggaactttagtcaggaaggtccaataagcccttttattattgggcagcaatatcaccagctttttcatagtatatgtggctttcaagattgagattaac

SEQ ID NO: 717418 - DNA, 1280 bp, Homo sapiens
tggcttaaaattgctaacgaaatattctcctttgagattgttctaaaaatagtaatatataaattgaaagagtcaatgaatgattaacagctgaagcataatttgtacactgactctgtgtcataaacatttctgaacaaaaaaagcaaaatcattttgcccatgactttcgtgttatctattagttgaaaacaccatacaaagttttagtgatgtttattatctatcagactacttgtctaagcagttcccagaaagaaccatggggaacaaagcaaggtaagaaacaatgaaattagcaggacaattgtagtttcagccacaagaaagggtatataatttattgtgacagttggaatgcatataaatctttgccaaaatgctgggggatacaaataatgctaaactttgaaaggttcaaggatagtaactaactcaggacaaagatagcagagcaggaggatttatcacatatagtagaaaataatgagtgttctctgagcaatttggaagcagtcccctggacaaggctgtggaattccctgaactcttaacaaaaaaagccagaaaaatgataaatgcacccaatgaaaaaagtggcagaatactttaaaaaaataaaatttcctctactgctacctcaaaaagtacctaagattctccctctagtttgttgggttaaaaaacaattatgagggctgggcacagtggctcatgcctgtaatcccagcactttcggaggccaaggcgggcggatcatgaggtcaggagtttgagaccagcctggtcaacagggcgaaaccccgtctctactaaaaatacaaaaattagctgggtgtggtggcgtgcgcctgtaatcccagctactcaggaggctgaggcaggagaatcrcttgaatctggtaggcagaggttgcagtgagccaagatcatgccattgcactccagcctgggcgacaacagcaagactctgtctcaaacaaacaaacaaacaaacaaaaaaagaaaacaaacaaacaaacagttatgagccttgtcaacattttagatggagaaatagggtaatttgccaaattattcatgaattcattttttggtaacatggtaacattttttggtaacagacatggttacattttatgaaagctatatacacaagtggacattctaagaaccttctaggaactttagtcaggaaggtccaataagcccttttattattgggcagcaatatcaccagctttttcatagtatatgtggctttcaagattgagattaac

SEQ ID NO: 717419 - DNA, 1280 bp, Homo sapiens
tggcttaaaattgctaacgaaatattctcctttgagattgttctaaaaatagtaatatataaattgaaagagtcaatgaatgattaacagctgaagcataatttgtacactgactctgtgtcataaacatttctgaacaaaaaaagcaaaatcattttgcccatgactttcgtgttatctattagttgaaaacaccatacaaagttttagtgatgtttattatctatcagactacttgtctaagcagttcccagaaagaaccatggggaacaaagcaaggtaagaaacaatgaaattagcaggacaattgtagtttcagccacaagaaagggtatataatttattgtgacagttggaatgcatataaatctttgccaaaatgctgggggatacaaataatgctaaactttgaaaggttcaaggatagtaactaactcaggacaaagatagcagagcaggaggatttatcacatatagtagaaaataatgagtgttctctgagcaatttggaagcagtcccctggacaaggctgtggaattccctgaactcttaacaaaaaaagccagaaaaatgataaatgcacccaatgaaaaaagtggcagaatactttaaaaaaataaaatttcctctactgctacctcaaaaagtacctaagattctccctctagtttgttgggttaaaaaacaattatgagggctgggcacagtggctcatgcctgtaatcccagcactttcggaggccaaggcgggcggatcatgaggtcaggagtttgagaccagcctggtcaacagggcgaaaccccgtctctactaaaaatacaaaaattagctgggtgtggtggcgtgcgcctgtaatcccagctactcaggaggctgaggcaggagaatcgcttgaatctggtaggcagaggttgcagtgagccaagatcrtgccattgcactccagcctgggcgacaacagcaagactctgtctcaaacaaacaaacaaacaaacaaaaaaagaaaacaaacaaacaaacagttatgagccttgtcaacattttagatggagaaatagggtaatttgccaaattattcatgaattcattttttggtaacatggtaacattttttggtaacagacatggttacattttatgaaagctatatacacaagtggacattctaagaaccttctaggaactttagtcaggaaggtccaataagcccttttattattgggcagcaatatcaccagctttttcatagtatatgtggctttcaagattgagattaac

SEQ ID NO: 717420 - DNA, 658 bp, Homo sapiens
gatttattttccaaagtatattgagcttttgagtactaacttgtaccactaaagattgagtttagaaccttatgaattcttgtgaagcacattttaatgtttagaaaacaacctatagacgatgcatgcatttgcaaataaagttttaatactgtacttaaatgtgatgtctacagacctttgcttaaagagattttagaaaagagtgtttggtcttcaaaggttaaaatattcacagggtctttgtccacatttacaacgaaaagggaactctgtttacagaaattgygtcagggtgagcagcattaaaccattaaatcattagaaatttcagcttcatcacttggataagcactgagaagaaaacacactatagtggaattatttgacaattgtactagaaaattatagcttgtttgagaggaaaatcatctatgtgacaaagagaactctgcaaataggctggatatttctacatcaaccccatggatcacacatctttttgctccaaatgagtcagttctattaaatgctaaaaatatacacattacattgcaattacacccatttcagatcaactaaattatgcaacaaaagtaatgttttaccacatatgacattcttgttcattgaaaaatatgaaaatttgttcctataa

SEQ ID NO: 717421 - DNA, 877 bp, Homo sapiens
gttttagttttctatgtcaacttggctaggctagaatacccagtgatttaatcaaacatggatctaagtgttgccccaaaggtattttgcagctgtggttaacatctataatcagttgactctaagtcaaggagattacccttcataatgcgggtgggcctcgcccaattagttgagggcattaagagcaaagaccaaggtttcctggaaacaaagaaattccacctcaagactgcggcatctacttactgctgcctgagtttccagccttcgagcctaccgcaccagtttcagactcaccaaccccccaaaccacacagccaattccttaaaataaatctcttgatatccacatcctattggttgactgataggtccccttacacagtctccctgacactagtcactcccttaataaatctccccagtccacccactgcccccaaatattgcaaagttaaacttcaactcaacttgatgaaatctgcataaatttcaatgttgtagtatagaaattaatacggaattgctgttcaattaatcttggtccaatctcagtcccacatactgttaaaaatcattgaggggccaggcatagtggctcacacctgtaatcctagcactttggaggccgaggagggcagatctcctgacgtcaggggtttgggaccarcctggccaatacatggtgaaaccccacctctactaaaaacacacaaaaaattagctgggcgtggtggcaggcacctgtaatcccaactactcaggaggctgaggcaggagaatcgcttcaacccgggaggcagaggttgcagtgagccgagatcgcaccaccgcactccagcctgattaacagagaaagactccatttcaaaaa

SEQ ID NO: 717422 - DNA, 782 bp, Homo sapiens
atcataataataacaataatcacaaccaacatgtccgaaggcttctccaagcccagcatgcacccgagggctgttctgttgtgaacstgcccaatccgcatcccaccttcctgcggtgggtgctatcattagcctcattttatagaagaggaaactggggcccagagaggtgagtgacaggctgcaggtgtagagatgggaagtggagaagatgaatttgaaactgggtcctggttcctggactgtttctgttcagctcctgctctgtacctcgtataggacagggagagactcactagaggatcccacagacaataatccgtggattgttctagactgtgatgggggatgggcttgcaaagtggagaataggggagggagagtctcaaatctaatgtcaaatttgtatccaaataactgatgggggaagagcaatgtcagcagtaaacccactgcccgcagactcatcgttccaagagatgtgcaaggtgtttctggaatcctctaaatgctgtcacacatgcctgaaacccccaggagacccagggaagaaagcacggcagtcaaacggagcgattagagggcaactgacctaaaaaaggtttgcagttcaaattaattcaatgggaaagtgcagtgatgtgactgacatcataaatgttcagttgaaaaagtcaattaccaaacatctacgcccaattataactagatccagaaatagtaaaagtgtctgaagctcccgccaaacacaaaagcatcacataattaccatttaattagta

SEQ ID NO: 717423 - DNA, 782 bp, Homo sapiens
atcataataataacaataatcacaaccaacatgtccgaaggcttctccaagcccagcatgcacccgagggctgttctgttgtgaacgtgcccaatccgcatcccrccttcctgcggtgggtgctatcattagcctcattttatagaagaggaaactggggcccagagaggtgagtgacaggctgcaggtgtagagatgggaagtggagaagatgaatttgaaactgggtcctggttcctggactgtttctgttcagctcctgctctgtacctcgtataggacagggagagactcactagaggatcccacagacaataatccgtggattgttctagactgtgatgggggatgggcttgcaaagtggagaataggggagggagagtctcaaatctaatgtcaaatttgtatccaaataactgatgggggaagagcaatgtcagcagtaaacccactgcccgcagactcatcgttccaagagatgtgcaaggtgtttctggaatcctctaaatgctgtcacacatgcctgaaacccccaggagacccagggaagaaagcacggcagtcaaacggagcgattagagggcaactgacctaaaaaaggtttgcagttcaaattaattcaatgggaaagtgcagtgatgtgactgacatcataaatgttcagttgaaaaagtcaattaccaaacatctacgcccaattataactagatccagaaatagtaaaagtgtctgaagctcccgccaaacacaaaagcatcacataattaccatttaattagta

SEQ ID NO: 717424 - DNA, 782 bp, Homo sapiens
atcataataataacaataatcacaaccaacatgtccgaaggcttctccaagcccagcatgcacccgagggctgttctgttgtgaacgtgcccaatccgcatcccaccttcctgcggtgggtgctatcattagcctcattttatagaagaggaaactggggcccagagaggtgagtgacaggctgcaggtgtagagatgggaagtggagaagatgaatttgaaactgggtcctggytcctggactgtttctgttcagctcctgctctgtacctcgtataggacagggagagactcactagaggatcccacagacaataatccgtggattgttctagactgtgatgggggatgggcttgcaaagtggagaataggggagggagagtctcaaatctaatgtcaaatttgtatccaaataactgatgggggaagagcaatgtcagcagtaaacccactgcccgcagactcatcgttccaagagatgtgcaaggtgtttctggaatcctctaaatgctgtcacacatgcctgaaacccccaggagacccagggaagaaagcacggcagtcaaacggagcgattagagggcaactgacctaaaaaaggtttgcagttcaaattaattcaatgggaaagtgcagtgatgtgactgacatcataaatgttcagttgaaaaagtcaattaccaaacatctacgcccaattataactagatccagaaatagtaaaagtgtctgaagctcccgccaaacacaaaagcatcacataattaccatttaattagta

SEQ ID NO: 717425 - DNA, 782 bp, Homo sapiens
atcataataataacaataatcacaaccaacatgtccgaaggcttctccaagcccagcatgcacccgagggctgttctgttgtgaacgtgcccaatccgcatcccaccttcctgcggtgggtgctatcattagcctcattttatagaagaggaaactggggcccagagaggtgagtgacaggctgcaggtgtagagatgggaagtggagaagatgaatttgaaactgggtcctggttcctggactgtttctgttcagctcctgctctgtacctcgtataggacagggagagactcactagaggatcccacagacaataatccgtggattgttctagactgtgatgggggatgggcttgcaaagtggagaataggggagggagagtctcaaatctaatgycaaatttgtatccaaataactgatgggggaagagcaatgtcagcagtaaacccactgcccgcagactcatcgttccaagagatgtgcaaggtgtttctggaatcctctaaatgctgtcacacatgcctgaaacccccaggagacccagggaagaaagcacggcagtcaaacggagcgattagagggcaactgacctaaaaaaggtttgcagttcaaattaattcaatgggaaagtgcagtgatgtgactgacatcataaatgttcagttgaaaaagtcaattaccaaacatctacgcccaattataactagatccagaaatagtaaaagtgtctgaagctcccgccaaacacaaaagcatcacataattaccatttaattagta

SEQ ID NO: 717426 - DNA, 782 bp, Homo sapiens
atcataataataacaataatcacaaccaacatgtccgaaggcttctccaagcccagcatgcacccgagggctgttctgttgtgaacgtgcccaatccgcatcccaccttcctgcggtgggtgctatcattagcctcattttatagaagaggaaactggggcccagagaggtgagtgacaggctgcaggtgtagagatgggaagtggagaagatgaatttgaaactgggtcctggttcctggactgtttctgttcagctcctgctctgtacctcgtataggacagggagagactcactagaggatcccacagacaataatccgtggattgttctagactgtgatgggggatgggcttgcaaagtggagaataggggagggagagtctcaaatctaatgtcaaatttgtatccaaataactgatgggggaagagcaatgtcagcagtaaacccactgcccgcagactcatcgttccaagagatgtgcaaggtgtttctggaatcctctaaatgctgtcacacatgcctgaaacccccaggagacccagggaagaaagcacggcagtcaaacggagygattagagggcaactgacctaaaaaaggtttgcagttcaaattaattcaatgggaaagtgcagtgatgtgactgacatcataaatgttcagttgaaaaagtcaattaccaaacatctacgcccaattataactagatccagaaatagtaaaagtgtctgaagctcccgccaaacacaaaagcatcacataattaccatttaattagta

SEQ ID NO: 717427 - DNA, 678 bp, Homo sapiens
cgcataatgctagactcccatttgccttaggctaactggagaacgttatttttccatgcccttggctcctggtggcatggtgctgtcctcccgagacaagtgcagtgtggcccagtgagtcctgtcaccatcgccgtcatcgtgggcctgcaagagcggagaagccagccagccctccccatggcagctgtgcagcttggcttcaggcctggtgcttgatggcctgcgatccttcagttactcacctctccaggccatgaacacagccatttctcaggggtcagggtggctaggtcaggaaatctccccagccatagccatttgaagtccttggggaattcagagtgaaaacattgttgtcctttccctcactttgaaactttcatgcgcgtcggagtgaagagaccaccaaacaggctttgtgtgagcaataaagcttttaatcacctggctgcaggcgggctgagtccaaaaacagagtcagcgaagggagataagggtggggcggttttataggatttggggagataaaggaaaattacagtcaaaggggatttgttctcaggtgggcaggagtgggggtctcaaggtgctcagtgggggagctttttgagccmggatgagccaggaaaaggactttcacaaggtaatgtcatcagttaaggcaaggaccggcca

SEQ ID NO: 717428 - DNA, 2950 bp, Homo sapiens
aagctctttgcgtgaaatgcagcccaaagactaaattagagccaaagccccagtcagttaactgtgctataacatgtgaagaattgattttcttattttcagctgtcagacctgctacaaagaatgagttttaattctggggatgttattaaactccttgcttaactggcagaaaaatggaactgctagctgggtgacagtagagctgctgtcggattgaatgacacctgtcagagtatgatgaatgaccctgtcttccccacaatcccctgttctgtcactcaggtgaggcccattaatcttcatcctgggcctgtcaggctaggcacccatgacgacaaaatgtcttgaagcatttacccccaagatgcacggaacaatacgatcttctcattgtcagagccacgtggaattagcataatttattatgacttccatccccctcactctctacctctatcaccacccccaaaaaagcaagtgggggctagatgggattagacagatggagtgtaggaccagactgccaactaccaaaccccctgcagtgcctgatgattggggggagcatctctacaaaccaatcaaaaagctggcagttcaattacagagtaataaagggacattcatcattcaattaggcacctgtcatggtttcacaaaagggaaaacttctaacctgagactcctgggagaagatgatacaaccaggagacagggaaataaatgaaaaaagggacaaagtcaattactggccaaccagacaaaaggatatatgtttaaaaaataaagttgggcgggggctggttctccccaggcaaaaatcagaaaagttagatgaccttatctagattaagaagggctaatattaaaagtagcatggtgccctcttctatggtacatctcatgattgaattttccctttaggagctgccaaggaaactgaattttctaagaaaaaaaatatcaggaggaaacagtaactctgttactcaaaagcattgttctttaaataactaagacatgagggtgaagaggagatagcctaagtggacattcaactttgatgctttactgtattgaggaggaatgagcccaaatgacattttgaaaatattatgccctgctagtgactggaaataacagttgacaaatttaatttcttagcaagtgtacgtgatggtaattgaagccagaatatagtttccaatgggaaaaatttccattttgagcaggggagggatgtagaattttttcttatgatctaacggttattttctatcttcatttatattaaaggttccagatagatttcatcactcaagataagcaaatgaaccacagaattttgaagttagaggtaattacagcaatgatcttagccagcccccatacattttgggacacacaggttcaggactgcctgccctggagctgattccataagatacccagtaagtaagtccctgtcaggaactggacataacacccctcacctcaactgctgtgctcactccacagctcagcacaactttgaattattatctcaaagacttttaaaacaacaacaaaacacttccgagaaaaaaatctagcaaagtttctcatgttgtaaaacagttataggttaagtaaattaaaatatttctattttgaaaggcagttttcatgctatcacttttctaaaattgattgttcattctaataacctttctctatagattgtcaagaggcagatttataatacatgtattaattattttcatagtgactcaagccatgagtttcagtgtacttgaccatcatgtgtcatctttccaggcaccaggcttttaggcgtggctttgaaaggccctctgatgttatcatgcgccttctattttatttcagggaagagagagtacctttttccttctccttttctttctttgttttctttattcttaaattcttttttattttcttattttttatttgaaaagatacttgatatttaatctagataaactacacaaccaaggtgaggttaattttgagaataaatactcaagaaaatgtaagtttctgtatagagaagggtgatgcttcactcaggcttttgtggacatactggacaatgrtattcttaacctttaagatccgtagtggggaagaaaaatatatgtcatatatgaagcccataggtatgtgtgtctatatgtgtacacatacacgttatatcttagatacccacacacatactacacactgtaaatatattcctttctattttagttttgaagcttcatctgctgcaaaacataaaaaagcaaggcagagtcaacctcaatttgttgtatactaagatatattggcaagccctctctgctcttttttcagaagcccttaaatgtcatatcctaaaatcagtaagatgggtcattccatccagaatgtatttatcagtttaataggcctctaaaatatattgtcaattccattggaggaagtggaatagagaggagagaaaatgacttttgctccctcctttccccatctctatcctcctgattagagtcaagctgatgcatttttaagtccaaaagagagtgtagcatttttttccaagtttacattttttctattgggaaaatagaaagattaaaggatgaacagtaaaaattaccaaggtcgtaataactcagaagtaaaaacttctaagactgaggagtgtatttttaagccgaggattaaatctctaactagtgacgaaatctcaataaattttcatcggtgcaaatagcatgaagatttagaagaagaattgaatctaataaggttttatacataattaaaatacacaaaaagttatacattttgtttatgtggaaatttgcctcacaagacccatgtgtgtgatggtggcaggacactccgccaggcacagaaggcctaattattgccacaaaca

SEQ ID NO: 717429 - DNA, 2950 bp, Homo sapiens
aagctctttgcgtgaaatgcagcccaaagactaaattagagccaaagccccagtcagttaactgtgctataacatgtgaagaattgattttcttattttcagctgtcagacctgctacaaagaatgagttttaattctggggatgttattaaactccttgcttaactggcagaaaaatggaactgctagctgggtgacagtagagctgctgtcggattgaatgacacctgtcagagtatgatgaatgaccctgtcttccccacaatcccctgttctgtcactcaggtgaggcccattaatcttcatcctgggcctgtcaggctaggcacccatgacgacaaaatgtcttgaagcatttacccccaagatgcacggaacaatacgatcttctcattgtcagagccacgtggaattagcataatttattatgacttccatccccctcactctctacctctatcaccacccccaaaaaagcaagtgggggctagatgggattagacagatggagtgtaggaccagactgccaactaccaaaccccctgcagtgcctgatgattggggggagcatctctacaaaccaatcaaaaagctggcagttcaattacagagtaataaagggacattcatcattcaattaggcacctgtcatggtttcacaaaagggaaaacttctaacctgagactcctgggagaagatgatacaaccaggagacagggaaataaatgaaaaaagggacaaagtcaattactggccaaccagacaaaaggatatatgtttaaaaaataaagttgggcgggggctggttctccccaggcaaaaatcagaaaagttagatgaccttatctagattaagaagggctaatattaaaagtagcatggtgccctcttctatggtacatctcatgattgaattttccctttaggagctgccaaggaaactgaattttctaagaaaaaaaatatcaggaggaaacagtaactctgttactcaaaagcattgttctttaaataactaagacatgagggtgaagaggagatagcctaagtggacattcaactttgatgctttactgtattgaggaggaatgagcccaaatgacattttgaaaatattatgccctgctagtgactggaaataacagttgacaaatttaatttcttagcaagtgtacgtgatggtaattgaagccagaatatagtttccaatgggaaaaatttccattttgagcaggggagggatgtagaattttttcttatgatctaacggttattttctatcttcatttatattaaaggttccagatagatttcatcactcaagataagcaaatgaaccacagaattttgaagttagaggtaattacagcaatgatcttagccagcccccatacattttgggacacacaggttcaggactgcctgccctggagctgattccataagatacccagtaagtaagtccctgtcaggaactggacataacacccctcacctcaactgctgtgctcactccacagctcagcacaactttgaattattatctcaaagacttttaaaacaacaacaaaacacttccgagaaaaaaatctagcaaagtttctcatgttgtaaaacagttataggttaagtaaattaaaatatttctattttgaaaggcagttttcatgctatcacttttctaaaattgattgttcattctaataacctttctctatagattgtcaagaggcagatttataatacatgtattaattattttcatagtgactcaagccatgagtttcagtgtacttgaccatcatgtgtcatctttccaggcaccaggcttttaggcgtggctttgaaaggccctctgatgttatcatgcgccttctattttatttcagggaagagagagtacctttttccttctccttttctttctttgttttctttattcttaaattcttttttattttcttattttttatttgaaaagatacttgatatttaatctagataaactacacaaccaaggtgaggttaattttgagaataaatactcaagaaaatgtaagtttctgtatagagaagggtgatgcttcactcaggcttttgtggacatactggacaatggtattcttaacctttaagatccgtagtggggaagaaaaatatatgtcatatatgaagcccataggtatgtgtgtctatatgtgtacacatacacgttatatcttagatacccacacacatactacacactgtaaatatattcctttctattttagttttgaagcttcatctgctgcaaaacataaaaaagcaaggcagagtcaacctcaatttgttgtatactaagatatattggcaagccctctctgctcttttttcagaagcccttaaatgtcatatcctaaaatcagtaagatgggtcattccatccagaatgtatttatcagtttaataggcctctaaaatatattgtcaattccattggaggaagtggaatagagaggagagaaaatgacttttgctccctcctttccccatctctatcctcctgattagagtcaagctgatgcatttttaagtccaaaagagagtgtagcatttttttccaagtttacattttttctattgggaaaatagaaagattaaaggatgaacagtaaaaattaccaaggtcgtaataactcagaagtaaaaacttctaagactgaggagtgtatttttaagccsaggattaaatctctaactagtgacgaaatctcaataaattttcatcggtgcaaatagcatgaagatttagaagaagaattgaatctaataaggttttatacataattaaaatacacaaaaagttatacattttgtttatgtggaaatttgcctcacaagacccatgtgtgtgatggtggcaggacactccgccaggcacagaaggcctaattattgccacaaaca

SEQ ID NO: 717430 - DNA, 989 bp, Homo sapiens
caattataatttctgccacattctattggtcaaatcaaatcaccaggccagcccagatttaaagggtacagaaataaatttcccttcttgataggaagaatttgtgaccatttttgtaatctactacaccatcctagggttccttcagtttcttcagtctcatcttttcctcacattttccccaaataagtcttttttctgttcatttgggatgcaactttaagactccatgtatatcttaatcatttattccataaaaacttattaggcatctgctgtatataaagatccatggtaggctcaaagtctaccaaagcatggttcttaacacttaaggggcttaaggatagaggatcaagcaaataattaagaactagaaagtgaagaaaaattaaagaatcttagtaacaatgagaacatgattcagggtcattaaactcaagtcagaaagagagagccagaaaagattmctggaaaagatggtgcttaaatgagtaggagccatatagatcagtactactcaaagtgtggtctgtggactagtggcagtatgcgaactgttcgttactggtttgatgcaagagaagagtaagagtttggaaattataatagtaacttggtattgctgcaaagtgcaagcatgtgattttgaaaaattgtctgtgacaaatttaaatttaatttcttaaatgatccatcatcatagatagtctgagatgtactgactaggtaaaaaaagtggacagaatgccccaagctaaggaaatagcatgtggatgttaggctgaataatgaacccccaaaagatatccaagtcctaatctctagaacccataaatgttctctcatatggaaaaagggttttgcagatgtgattaagttaagaatttttagacaaggagatgaccctggattatctgggtgggccctaaatgtaatcacatttgttcttgtaagaggggagcagagggatatttgacactgacaga

SEQ ID NO: 717431 - DNA, 1147 bp, Homo sapiens
atcccttggtctaaaataggtgacttattttgataatagatagatgctaagtgacttagtttggtgggtaatggagagcttttagagtaaagagtcatttggaaggtagtctgaaagcattcctgcaatccctctcatatgtcccccaaccccaaatctctaataaacattttgtcaaagagtagaagagttatttaaacttgaacatatataaaattaaagaacaatgagatcttaatatctgtgatcatgtgaatagaatgtacgtcttgactgttttaaaccagcagaacttgcagtaatcaaccaagcattatccaaaaaaagcagctgaagcactgaaagaaaaaagcatgcaaattcttattccagctctggaatcaatatgttccatggattcaataatattagactttcttcatagtttcttgggaacattaaaaagaattgtatacaacagtgccttaaaatctacaaaagaatcattcaaaaattttaaactgttattaagaaagccaatgtatttctctagtagtgcgaaatattctcttgtgttgttcttttctgtgccatcagattgtaatttgcttgtgaccaaggacatttccttttttatttactcaccatgactcaaatagagcttttcactcaagaggccttcagtatgtgttggacagtaaatataaaaactggaatttggtcctggttgctcaacatgcatgaggtgcttactgaggaataagagctgtgctaagcatagagacacacaataacttagatgtgggccttttccttgaggggcttagtcttgtgagttcccagtaraatactgacctgtcaggatcattggtgtggagtctgccagtcatctcatagatatcctctccagtgtcatattcttgttagaatcacagttgtgtgtctcaccctcagccactaaatactgtgaattggtgaaaacatctgtcacacttcatttagagacctgctaagtgccattaaaaaaattaaaaacaacctccttaaaaatacaaaacaaagcagtaaaacatcaaatctcacaataatttgatatcaacttataaaaattgatgtaaaaatgcattctgagtattaatctttctttccagagaaaggggaaagaccc

SEQ ID NO: 717432 - DNA, 1147 bp, Homo sapiens
atcccttggtctaaaataggtgacttattttgataatagatagatgctaagtgacttagtttggtgggtaatggagagcttttagagtaaagagtcatttggaaggtagtctgaaagcattcctgcaatccctctcatatgtcccccaaccccaaatctctaataaacattttgtcaaagagtagaagagttatttaaacttgaacatatataaaattaaagaacaatgagatcttaatatctgtgatcatgtgaatagaatgtacgtcttgactgttttaaaccagcagaacttgcagtaatcaaccaagcattatccaaaaaaagcagctgaagcactgaaagaaaaaagcatgcaaattcttattccagctctggaatcaatatgttccatggattcaataatattagactttcttcatagtttcttgggaacattaaaaagaattgtatacaacagtgccttaaaatctacaaaagaatcattcaaaaattttaaactgttattaagaaagccaatgtatttctctagtagtgcgaaatattctcttgtgttgttcttttctgtgccatcagattgtaatttgcttgtgaccaaggacatttccttttttatttactcaccatgactcaaatagagcttttcactcaagaggccttcagtatgtgttggacagtaaatataaaaactggaatttggtcctggttgctcaacatgcatgaggtgcttactgaggaataagagctgtgctaagcatagagacacacaataacttagatgtgggccttttccttgaggggcttagtcttgtgagttcccagtaaaatactgacctgtcaggatcatkggtgtggagtctgccagtcatctcatagatatcctctccagtgtcatattcttgttagaatcacagttgtgtgtctcaccctcagccactaaatactgtgaattggtgaaaacatctgtcacacttcatttagagacctgctaagtgccattaaaaaaattaaaaacaacctccttaaaaatacaaaacaaagcagtaaaacatcaaatctcacaataatttgatatcaacttataaaaattgatgtaaaaatgcattctgagtattaatctttctttccagagaaaggggaaagaccc

SEQ ID NO: 717433 - DNA, 1822 bp, Homo sapiens
ctcggggccactacctgtctgtctccgcgctttggtggcagtggtcccccgggcccagctgtctttcttcctatctctttgtcttctgtctttatctcttcgatctctcgtctccgcacacacgcgaagagaaaacccacagacccggtaggggtggaccctacattatctcagctacaacataatcaggatattcacgtggactactgagtctttcggtgcccccttgctgttttagttttgtcctgcggccgagtgtttccctcgcttcacgccaacacaatctccgccgccctgtcttgtcatccccattctacagcccagcacggtgtagtatggcagccgctagccacaggtatctagggagccctggaaatgtggtcagttctaatggagctgtgctgtaagtgtgaaatacacgtgggattttgacggcagtgggagcaaaattctcccaatttttttttttttttttttttttcagacggaggttccgctcttgttacccagcctggagtccaatggcgcgatctaggctctctgcaacctccgcctcccgggttcaagcgattcccctgcctcagcctcccgagcagctgggactacaggcatgtgccaccacgcccggctaactttgtatttttagtacagatggggtttctccacgttgctcaggctggtctccaactcccgacctccggtgatctgcccagctgccgcctcccaaagtgttgcttgcgattacaggcttgagcaccgctcaccctggctgttttttttttttttccagacaaactctcgctctgtcgcccaggctggagtgcagtggcgcgatctcggctcactgcagcctctacctcccgggttccagcgattctcctgcctcagcctcctgggtagctgggattacaggcgcaggccaccacgcccggctaatttttgtatttttagggggtttcgccatgtcggccaggctggtctcgagctcctgacctcaggcgatccgcccgcctcggcctcccaaagcgctgggattacaggcgtaagccaccgcgccgggctctttcattctgtctttattttctgagatagagtctcgctcggacgctcaggttggactgcaacggcgtgatctcggctcgctgaaacttccgcctcccgggttcaagcgattctcctgtctcagcctcccgagtagctgggattattgacgggcagcaccacgcccggctactttttgtggtttttgtatcttctgtcttctgctctttagtacckcatagagccgcagaagactagcgagtcgaacaaacggcccctcttgcagcagttgttgatcacggggctgccccccggtactcatcctgtgtctctcgtccaaatccccgctcctcctcagctatcacctctgccgatgctggtggtttccctgggtaccgggaaccaaactctcattccccaggggcctaagccccccgtggccaggcccttctcaagtcagggttcctgcacattcacagttacgggtggccctgggagtaacacctggcacccaaacaggtcaccagagtccacacatagtccacctgccctccctgcgtaagatcagctcttcctcctcccgacgatagatcagggtcaatgatccctgccaagatggcgactgctccagcctgctggtccaacctgtccagccacagctgttgctcgaaggcttgaagttcaatgggaccctctcccgctttctacaaactggttcctttatttttatgtttatttatttgggacggggtctggctctgtcacccaggctggagtgcag

SEQ ID NO: 717434 - DNA, 1822 bp, Homo sapiens
ctcggggccactacctgtctgtctccgcgctttggtggcagtggtcccccgggcccagctgtctttcttcctatctctttgtcttctgtctttatctcttcgatctctcgtctccgcacacacgcgaagagaaaacccacagacccggtaggggtggaccctacattatctcagctacaacataatcaggatattcacgtggactactgagtctttcggtgcccccttgctgttttagttttgtcctgcggccgagtgtttccctcgcttcacgccaacacaatctccgccgccctgtcttgtcatccccattctacagcccagcacggtgtagtatggcagccgctagccacaggtatctagggagccctggaaatgtggtcagttctaatggagctgtgctgtaagtgtgaaatacacgtgggattttgacggcagtgggagcaaaattctcccaatttttttttttttttttttttttcagacggaggttccgctcttgttacccagcctggagtccaatggcgcgatctaggctctctgcaacctccgcctcccgggttcaagcgattcccctgcctcagcctcccgagcagctgggactacaggcatgtgccaccacgcccggctaactttgtatttttagtacagatggggtttctccacgttgctcaggctggtctccaactcccgacctccggtgatctgcccagctgccgcctcccaaagtgttgcttgcgattacaggcttgagcaccgctcaccctggctgttttttttttttttccagacaaactctcgctctgtcgcccaggctggagtgcagtggcgcgatctcggctcactgcagcctctacctcccgggttccagcgattctcctgcctcagcctcctgggtagctgggattacaggcgcaggccaccacgcccggctaatttttgtatttttagggggtttcgccatgtcggccaggctggtctcgagctcctgacctcaggcgatccgcccgcctcggcctcccaaagcgctgggattacaggcgtaagccaccgcgccgggctctttcattctgtctttattttctgagatagagtctcgctcggacgctcaggttggactgcaacggcgtgatctcggctcgctgaaacttccgcctcccgggttcaagcgattctcctgtctcagcctcccgagtagctgggattattgacgggcagcaccacgcccggctactttttgtggtttttgtatcttctgtcttctgctctttagtaccgcatagagccgcagaagactagcgagtcgaacaaacggcccctcttgcagcagttgttgatcacggggctgccccccggtactcatcctgtgtctctcgtccaaatccccgctcctcctcagctatcacctctgccgatgctggtggtttccctgggtaccgggaaccaaactctcattccccaggggcctaagccccccgtggccaggcccttctcaagtcagggttcctgcacattcacagttacgggtggccctgggagtaacacctggcacccaaacaggtcaccagagtccacacatagtccacctgccctccctgcgtaagatcrgctcttcctcctcccgacgatagatcagggtcaatgatccctgccaagatggcgactgctccagcctgctggtccaacctgtccagccacagctgttgctcgaaggcttgaagttcaatgggaccctctcccgctttctacaaactggttcctttatttttatgtttatttatttgggacggggtctggctctgtcacccaggctggagtgcag

SEQ ID NO: 717435 - DNA, 675 bp, Homo sapiens
tgttatttattttatcttattgatagtgtaatggtttccatttgtttatttatacttctttaattttattttaaaaaagcttttggtttattccattttaaattttaatcattatattaattaactttaatatttctattaaaatttttttatgctttcttatcttaatgaccagcaagaggctastgcaagtaggtggtattgttgagtatttgatagaaatttacattaaaaataagacctgattgtaagacctcctttcagctgctgcaaccattgttctgactcctccagggaaatgtcatttttttctaaacataggactactaaagcgcaaagcccattgtaattcacagacacctaattaataatcctcagtacaaaatgactctctccatatagacaatatattgaattactttgaaggtgctgtttctaaatttatgaggaaaacagtgtcctaaattttaagctatacgataggccatgcaaataaaatgtcacagtacagagggagaaagtacatgaaagttgtatcgggacaggattattctcatatgtattcctgccctgaccctgtgtaggaatcaggtaatgccagccttcaaacatgcgttagccctgggaaaagggcactgcagagggccatgtgctgctatctctgttccttctcac

SEQ ID NO: 717436 - DNA, 675 bp, Homo sapiens
tgttatttattttatcttattgatagtgtaatggtttccatttgtttatttatacttctttaattttattttaaaaaagcttttggtttattccattttaaattttaatcattatattaattaactttaatatttctattaaaatttttttatgctttcttatcttaatgaccagcaagaggctagtgcaagtaggtggtattgttgagtatttgatagaaatttacattaaaaataagacytgattgtaagacctcctttcagctgctgcaaccattgttctgactcctccagggaaatgtcatttttttctaaacataggactactaaagcgcaaagcccattgtaattcacagacacctaattaataatcctcagtacaaaatgactctctccatatagacaatatattgaattactttgaaggtgctgtttctaaatttatgaggaaaacagtgtcctaaattttaagctatacgataggccatgcaaataaaatgtcacagtacagagggagaaagtacatgaaagttgtatcgggacaggattattctcatatgtattcctgccctgaccctgtgtaggaatcaggtaatgccagccttcaaacatgcgttagccctgggaaaagggcactgcagagggccatgtgctgctatctctgttccttctcac

SEQ ID NO: 717437 - DNA, 1292 bp, Homo sapiens
gcgttgtattacctgctgctatcgagcacggccaaagtaaatgtaaagaattttttttccatttttaatttttagttgttatggatacataataaatgtaaatagggtgcacatgataatttgatacaagtatacaatgtgtaatgatcaaatcaggataattgggatatccattaccttaaacatttatcatttcttagtgttaggaacattttaattctactcttagttatttcgaaatacacaatacattattaactatagccaccctattgcactactgaacactagaaagatctatttcttttatctaactgtattttttatccattgaccagaaacactgtaataataatgacccaaaagtgagttcatatgagtgagtgtagttgaaacatgtctgaagcaatgttctaaacccagataatgcaagcaatttttggatagctattctatgaagamaaatgtgggctaggaccactgagcaataagaccaaacacaaattacctgggtttttcttgcatagactctgttaaagcaggggcaggctctctaccttataagacctagactggctaaggcatgccatgactaatgcccctgtcccccatccctgttattaatctcacatgtcttcccttcattagctaatttttccctccttcattccactcaaaacacacttgcatccttgacgtttctttttttatttttatttttttgcctttaacttttaagttctggggtacatatgcaatatgtccaggtttgtcacattggtaaatgtgtgccctggtagcttgctgcaaagatcaacccatcaatgtgatattaagcccagaatccattagctattcttcctgatgctcttcttccctgcttccctccccttgacaagccctagtgtgtgttgttttcctccatgtgtccatgtgttctcatcattcagctcccacttacaagtgacaacatgtggtgtttggttttctgttcctgtgttactttgctgagaatgatggcttccagctccatccatgtccctgtagaggacatgatctcattcctttttatggctacatagtattccatggtgtatatgaaccacattttctacatccagtctatcattgattggcatttaggttgattccatgtctttgctattgggaatagtgttgcaatgaaaatacatgtgtatttatctttataatagaatgatatatattcctttggatatatacccagtgatgggattgctaggttgaatttttttcctctaggtctttgagga

SEQ ID NO: 717438 - DNA, 2564 bp, Homo sapiens
agagtaactaatcagtaataggaaagacacactttttccttttatcgatacataccacaacatgctttcatctaaaaaaacaagcaaaaagcccgcaacgttcttcttaatgaaataaatcagatgcaaacggcctcaagttgcttgattctaattacataagatgtctagaaaagaaaaatttatagacagacagcagataagtggctctctaaggatgtagttagaggaggaattaactgcacacaggtatgaggcgactatttgggttagtagaaatgttctaacagtgaattttgagtgaaagttgcacaaggtgaatagatatactaaaaattgtggaattgtatacttccagacagaatttatgacctataagttatcactcaataaaactgtgaaaaaataatggtgagtgaaaagctctgtttgccatttaaaacctacaaatttcaggattgaatttaatctcatcaacttttattacatgtccactcatgaaataattactgtacctatggggaaggggtttacaatagtcaggtataaattgtgggccaaatggatctggagcctatggacagtctctcctggttaatagggagaggatgcaggagttagtttaccagtaaaaatactaaaaaggaagaaaaagaacaagaatgccactacttttaaacgaatgtgaaattctattttaattgaagcaaagtagaatgagccctctgtatccatgagttccacatctgtggattcaagaaactacagattgaaaatattcagacaagaaaaatgaattgtttgtctgcactgaacaagtacaggccttttttcttgccatcattccctaaacaacatagtattagtacaacaacaatttacacagtatttacattgcattaggtactttaagaactctagagatgatttaaagtacgtgagaggatgtaggtaggttatatgcaaatactacaccatcttatataatagacttgaatatctctggattttggtatggggaagggctagaaacaatcctcggtgaatacctagagaactgcatttacttttattaggctgaaatggaaggcaaaataccagtagctattagatcaatatcagaagtaaagagaagtagagatgttatctgagaatcagaaatctttatattgggagcatggagaagattagggcatttggactttttgtcattggatgttagtcttgtagacaggtcggtttagttcctgacatggagatccaaagatgtactgatccacagtcctgatgcgaaaaatttgtggatcttcttcctgacatggaaaagttgctttattttgtattaaaataaaaattagcctctgacactaagggaaagtagaaagtgtacaaacatatttaagcttccttgtcgttgaacattatttaacactgtactctttaaaggcagctgaagtaaattccagcactccaacatgcccttacctttcaaaagactgaagaacctcattagatgtttttttcaaaggaaagttgaaaaatacattactgaactggaagagataatttttgcgtttgactttcccatgtgctcttttacggcactaaacatgttgtttaacttctgagccttagtttttcattataaagttataaatagcagcatattttctaacccatttgtaagaaatgagaaaccttatatgaaatcactcagtaagtggcaaagcattttaaaacttgaaggcacatttctatttttatttaacttgaaaataaattactttttctctgtcgaaagcacacaataacttctaaatgtatgtgacaatgcccctaaaacaatctctaaatatatattatatatatcttgcttttagaaagccaagtattttttctacagagagaaaatcaatttattgttcaactcagtgtggagatttatttgtaacctgcctgtcaactcagcgcaatgtcaatgtagattcctcaaatagtttttattttagaaaactaagtttttattttagcaatattgcaaaaatagtacagcaatttcccttgtaccacacagttttccccattattgacatcttacattaagtatggtacttttgccacgaagagccaatattggtacattattgttaagtaatgtccatagtttctttagacttccttattttctacctaatgccccttttttgttttaacatcctatccacattaccacattacatttagtcatcctatcttcttggttttgattaacttggtaggtttgaggaatattaaataggtattttatagaatgtctctcatttgggatttgcccattgattttctcatgactacactgaagttataatctgggggaaagaagaacacaaagtaacaatctgtttttcattagaccatgtcaagtgtacatacagttaacatggttcatcactattgrtgctaattttgatatcctggttgagatagtgttttccaggttctccattctagagttacccttgtataaccctttccatactgtgttctttgtaaataagtccaca

SEQ ID NO: 717439 - DNA, 1000 bp, Homo sapiens
tgaagaaaatgttctctggcccaggccacttacttggacaaagcagcttaaaygttacttcactttacactttctaaatagtttgtttttctttctaaaggatgacattgaggattcagttatatttactttctgtttccagacacattagcagtatgttcatcactcaaagacattttacagaaaacagtcatcagagtggcactcattttttttttcactttattttgtttcatatccaccagatctacaggcttttgtttcagacatttctagctctagttctctaaagataagtttatgttaagccatggaaatgaagaaattcaaactttgttttggaaattagataaagaaagaagaaacaactagaactgaatttactatctgttgtaataactagcatataacatgagtatatattcctttgaagcagactgtatagagtgacattaaatattttatcatgaaaacactgtaaccacatattgacctcatttttggctgtgcttatagctatgtctacataactcaaaaatgcttcgtttgatttgtttcactgattaatggtcttaaacaactccattgtttcagagcagtatacctaacctatattgcagtaactataaacattctttgtcaaagactaaattgttgcatatggttgtaggtggtaatgtctaatgtaagaattgatctttctagcaaaactttcaatcaaattttttattcggaatgatctattacattctactaaaagaaaggttttgttcaaataccctttttttccaatgtatatagaaggctaagaaggtcattgtagtacctggcatttaaatctagagttttctatatagggtttatcaaattcttcacatatgtatgcatgtccctaattttaacacaaaatattcatggattacataaaataataagtgtaagtacacattgttaaacagaagatttctattggtagtaatatgccattattttaaatcat

SEQ ID NO: 717440 - DNA, 1000 bp, Homo sapiens
tgaagaaaatgttctctggcccaggccacttacttggacaaagcagcttaaatgttacttcactttacactttctaaatagtttgtttttctttctaaaggatgacattgaggattcagttatatttactttctgtttccagacacattagcagtatgttcatcactcaaagacattttacagaaaacagtcatcagagtggcactcattttttttttcactttattttgtttcatatccaccagatctacaggcttttgtttcagacatttctagctctagttctctaaagataagtttatgttaagccatggaaatgaagaaattcaaactttgttttggaaattagataaagaaagaagaaacaactagaactgaatttactatctgttgtaataactagcmtataacatgagtatatattcctttgaagcagactgtatagagtgacattaaatattttatcatgaaaacactgtaaccacatattgacctcatttttggctgtgcttatagctatgtctacataactcaaaaatgcttcgtttgatttgtttcactgattaatggtcttaaacaactccattgtttcagagcagtatacctaacctatattgcagtaactataaacattctttgtcaaagactaaattgttgcatatggttgtaggtggtaatgtctaatgtaagaattgatctttctagcaaaactttcaatcaaattttttattcggaatgatctattacattctactaaaagaaaggttttgttcaaataccctttttttccaatgtatatagaaggctaagaaggtcattgtagtacctggcatttaaatctagagttttctatatagggtttatcaaattcttcacatatgtatgcatgtccctaattttaacacaaaatattcatggattacataaaataataagtgtaagtacacattgttaaacagaagatttctattggtagtaatatgccattattttaaatcat

SEQ ID NO: 717441 - DNA, 1000 bp, Homo sapiens
tgaagaaaatgttctctggcccaggccacttacttggacaaagcagcttaaatgttacttcactttacactttctaaatagtttgtttttctttctaaaggatgacattgaggattcagttatatttactttctgtttccagacacattagcagtatgttcatcactcaaagacattttacagaaaacagtcatcagagtggcactcattttttttttcactttattttgtttcatatccaccagatctacaggcttttgtttcagacatttctagctctagttctctaaagataagtttatgttaagccatggaaatgaagaaattcaaactttgttttggaaattagataaagaaagaagaaacaactagaactgaatttactatctgttgtaataactagcatataacatgagtatatattcctttgaagcagactgtatagagtgacattaaatattttatcatgaaaacactgtaaccacatattgacctcatttttggctgtgcttatagctatgtctacataactcaaaaatgcttcgtttgatttgtttcactgattaatggtcttaaacaactccattgtttcagagcagtatacctaacctatattgcagtaactataaacattctttgtcaaagactaaattgttgcatatggttgtaggtggtaatgtctaatgtaagaattgatctttctagcaaaactttcaatcaaattttttattcggaatgatctattacattctactaaaagaaaggttttgttcaaataccctttttttccaatgtatatagaaggctaagaaggtcattgtagtacctggcatttaaatctagagttttctatatagggttyatcaaattcttcacatatgtatgcatgtccctaattttaacacaaaatattcatggattacataaaataataagtgtaagtacacattgttaaacagaagatttctattggtagtaatatgccattattttaaatcat

SEQ ID NO: 717442 - DNA, 1220 bp, Homo sapiens
tcttcatcttgtatcagtaataactgtattgatgcaagcaagtattagggtcaatagacaagtatgagacagccagcagttaggcaattaaggcataaagaaataatacaagaaaagaaaagttaaggtcaattcagaagagacttttagctctgctaggccattggtttcagtacctagtagagaagaagaactagaatttcatatatcaaaatatgctatataatggttaaagtttattgcctcaattacagctatctccttagccttttaaatttctgtatgttcgatatacttcataatattacataacaatatttaatgaaatagaagacacacaaattattttaatttaaaagagcattttcttgcctataaaagtaagcaattttttgcagaaaattatttgaaagaaaaataaatcacatagaatcttataaaaatggaaaaatatggttttaaatttcatattattttattatctattgactttttaaaatatttttcttcttccacatgttaatttgataaaatataattttctaaaattaaattgttatactcctgggatacatgattcttgtttgtagtgttgagttaatacccttttaggttttaagtaaaaaatttaacatatttcaattttcattaataagtaaagaaaaactttatctttcttatactaccgcttcaaagttttgtatcagaagtatagtaacagtaaaagaattaacaagattaaaactgtgttatagaactttccagtagcaaaataattctgttctaatcctttgaaagaacttccttagcatactgtttagaaagaaaaatttttaataaaattattttatatcacttgttcttttaaaattttgtctaaattgatatatccttttattcaagaaatgtctgagtgcagttcggtaagtcttaacttttaaatartgaagcttccatctggtatttttccatttattatcacattgcctctttaatttatttaccttaaaaattcttatactaattatgtcttgaaaatagtacatcctgttacggtgcaacacatctcttaaacataacacacatgatttttagcagtgttccaagtcaccctgtgccatattcttgtgcttcttcccatggttaagaggtgagtaagtaaagataatttatcttctatttatcagcaccatacttttctattcatccttaccccattt

SEQ ID NO: 717443 - DNA, 864 bp, Homo sapiens
gactcaggcaatagcagtatttgataaagsctgtagtctcaaaaaaacaaagcagcaggtcccaacctcccctgcagggtacaaggaggaggtgggagtggcagagaggctgaagagaaagggaaacaacatgtccctctcctaggtatgtgtggagtccctgccagggcacaccacggctgaccaggagctccactcctcccctacgcccctcccctccccaacacccctcctttcccccacttttctcccctacacccctcccctcccctacacctctcccctcccactgtcaccaggccaggtgaccacacattgcctctacttcagcacttacaaggctaagcagccaatggccaccaatgctggccactcatagccaacgccacacacacaaacacccatacacacgcaaagcagccccagggccaggactgtgcaactaactccctcagcaagtgtcggagccacagctagccctagctttgtcagggctagtcttcactcagctttctgctgcagagcccagaacggaaggagggggtggggagcagtgagtgtagcggaagggtacacctgggttctggctccagtttgactcccaatcacttgagtgacaataggctagtgacttcccctctctgggcctcagcttcctaaaccacaaaatgaaggagttgaagttgattatttgcaaagtgtcttctagctcaagaagtgtataatgaggccgggtgcggtggctcacgcctgtaatcccagcactttgggaggctgaggcagacggattgcttgagctcaggaattggagaccctgggcaatgtggagaaaccccatctccaccaaaaaatacaaaaattagc

SEQ ID NO: 717444 - DNA, 609 bp, Homo sapiens
gtcataattgctattcccataccacttctccttcagtacagttttgttgttcatttgtaacatgagttaatttctgttttcattcagtttagggtctcctccaatcttggggatttcatttattgaatttatcattttatttccaaatattctattttcaggccaggsatggtggctcacacctgtaatcccagcgatttgggaggctgggtcaggaagatcacttgagctcaagattttgagaccagcctgggacacatagttcctgtttctgcaaaagaaaaaaaaagaaaaggaaaaaaaagtatatatatgttctattttgaaaactgctgaatcttttgttgtaatagctttattgagatataattcatataccatacgactcacccatttaaagcgtacaagtcaacaatttttaatactcacagaattgtgcaaccatagccacaattaattttagaactttccactcgggcgcagtggctcctgcctgtaatcccagaactttgggaggccaacttgggcagatcacctgaggtcaggagttcaagaccagcctggcaaacatggtgaaactccatctctacaaaaatacaaaaattagcc

SEQ ID NO: 717445 - DNA, 1339 bp, Homo sapiens
tcacaacgataactaaggaaccactcttgttcagtaggttaagtaaattaactgaaggttatagactrtttctagctctagatggaaacattacttgaggtcgagccctgccttaggcaaaatcatgacatagttctcataatcattgtccttctcgcaagctcctataagtctactgacctacctcactgacccttgtgttcattcccccaggtggcttgctcttcctcactatattttggatgcacgatgcctaaccagagtggccctctttgcaatgtttcatgcttcaagcttactctcccttgtataaaaatttactatactttaggaattagttgtcacctggaatgcaagttgatagctaaataatattaataaatttatcaaatggttctaaaattatgggattatgtcttatgagggtatttatagtctaactgcaaacaattcaatgtctcctaagcagtaaaatattaaagaatggtataaaaatatcttcagaatgttgagccttttctgtatctatagataatcgttccatttaaaattatcccaattcatattctccaaaatgtagtgtaatatttagtttcttggtatcttaacactgaaatgggacaatataatgagattcagcaatttgtaataccaaatatatatttatgtaatctcatatatttttctaaaggttggcttctaaattaggaataaaatagaaatttcaagtcttgattaatttttaatcattttttacattgtgatcattaaaccaatgatttcatggcaggggatccagttagctcaatacgtttataggtggttttataaatatgagtaaattataatataattgggcctgaattttatatttcatggaaactatatagctaagataatatttcatattaggaaacatgctccttttattagtaattttcagaaagttacaaggattgagaaatatgtttcatagagatcaatatcatgataaattatttactattttcctacatctggtgttggaaaaatacgcggttaagtttctaataataattataacttagtttcatcccatgtttatcacccaccttcccttatattcttggtaaataaataaaatagagaccaaaacaaatttttaaaatcaataatgtgggaccattttgttgcctttaagaaaacaaatcagtggaagtataataattcactatacagatcttaatattatttttaaaattagaaatggtgcattaacaacacctcatttctataatcctaggctttaaaacctagtaactaaagtgttaaacatctccctgttgctgttgaggttgca

SEQ ID NO: 717446 - DNA, 1339 bp, Homo sapiens
tcacaacgataactaaggaaccactcttgttcagtaggttaagtaaattaactgaaggttatagactgtttctagctctagatggaaacattacttgaggtcgagccctgccttaggcaaaatcatgacatagttctcataatcattgtccttctcgcaagctcctataagtctactgacctacctcactgacccttgtgttcattcccccaggtggcttgctcttcctcactatattttggatgcacratgcctaaccagagtggccctctttgcaatgtttcatgcttcaagcttactctcccttgtataaaaatttactatactttaggaattagttgtcacctggaatgcaagttgatagctaaataatattaataaatttatcaaatggttctaaaattatgggattatgtcttatgagggtatttatagtctaactgcaaacaattcaatgtctcctaagcagtaaaatattaaagaatggtataaaaatatcttcagaatgttgagccttttctgtatctatagataatcgttccatttaaaattatcccaattcatattctccaaaatgtagtgtaatatttagtttcttggtatcttaacactgaaatgggacaatataatgagattcagcaatttgtaataccaaatatatatttatgtaatctcatatatttttctaaaggttggcttctaaattaggaataaaatagaaatttcaagtcttgattaatttttaatcattttttacattgtgatcattaaaccaatgatttcatggcaggggatccagttagctcaatacgtttataggtggttttataaatatgagtaaattataatataattgggcctgaattttatatttcatggaaactatatagctaagataatatttcatattaggaaacatgctccttttattagtaattttcagaaagttacaaggattgagaaatatgtttcatagagatcaatatcatgataaattatttactattttcctacatctggtgttggaaaaatacgcggttaagtttctaataataattataacttagtttcatcccatgtttatcacccaccttcccttatattcttggtaaataaataaaatagagaccaaaacaaatttttaaaatcaataatgtgggaccattttgttgcctttaagaaaacaaatcagtggaagtataataattcactatacagatcttaatattatttttaaaattagaaatggtgcattaacaacacctcatttctataatcctaggctttaaaacctagtaactaaagtgttaaacatctccctgttgctgttgaggttgca

SEQ ID NO: 717447 - DNA, 1339 bp, Homo sapiens
tcacaacgataactaaggaaccactcttgttcagtaggttaagtaaattaactgaaggttatagactgtttctagctctagatggaaacattacttgaggtcgagccctgccttaggcaaaatcatgacatagttctcataatcattgtccttctcgcaagctcctataagtctactgacctacctcactgacccttgtgttcattcccccaggtggcttgctcttcctcactatattttggatgcacgatgcctaaccagagtggccctctttgcaatgtttcatgcttcaagcttactctcccttgtataaaaatttactatactttaggaattagttgtcacctggaatgcaagttgatagctaaataatattaataaatttatcaaatggttctaaaattatgggattatgtcttatgagggtatttatagtctaactgcaaacaattcaatgtctcctaagcagtaaaatattaaagaatggtataaaaatatcttcagaatgttgagccttttctgtatctatagataatcgttccatttaaaattatcccaattcatattctccaaaatgtagtgtaatatttagtttcttggtatcttaacactgaaatgggacaatataatgagattcagcaatttgtaataccaaatatatatttatgtaatctcatatatttttctaaaggttggcttctaaattaggaataaaatagaaatttcaagtcttgattaatttttaatcattttttacattgtgatcattaaaccaatgatttcatggcaggggatccagttagctcaatacgtttataggtggttttataaatatgagtaaattataatataattgggcctgaattttatatttcatggaaactatatagctaagataatatttcatattaggaaacatgctccttttattagtaattttcagaaagttacaaggattgagaaatatgtttcatagagatcaatatcatgataaattatttactattttcctacatctggtgttggaaaaatacgcggttaagtttctaataataattataacttagtttcatcccatgtttatcacccaccttcccttatattcttggtaaataaataaaatagagaccaaaacaaatttttaaaatcaataatgtgggaccattttgttgcctttaagaaaacaaatcagtggaagtataataattcactatacagatcttaatattatttttaaaattagaaatggtgcattaacaacacctcatttctataatcctwggctttaaaacctagtaactaaagtgttaaacatctccctgttgctgttgaggttgca

SEQ ID NO: 717448 - DNA, 652 bp, Homo sapiens
ttgacttagagcagtcagaagaaagcctaaccctggcatggttagatacttcagtgaaacccgaagacacagctggtggaggctgtcagccgactatacctactgcagcagatctgacaccttgacacctccatggctgtcacaattagtgttattttcatctttacaattttatgtgttctactaattggatataacacatattaaagagttractttcaggaaaaataatgaaagtacttgaaacaacattttttccttgttaaattcaaagtagatgattccttgagaaagattgtaccccgggcagtttcctatttagtagatatattcctactaatatttgataagactcagtgaccagatattctctttatgagttaagaaattgatttgaagatagaagcatttactgagtataaactatcccaatttcttttaaattttatgtaaattatttcatttaatccttacaatagctttgtgacatttcatctcaacaaaggaaaaactagaatattttggtaggaacatcacagactaattgaactagcagcccattaatgcacacctgtgggcatcttaaagaaaactgtgcttgattgtatgtcttgaattaactaaacattatctgtcatcaggataaaatgac

SEQ ID NO: 717449 - DNA, 697 bp, Homo sapiens
taagaaagccagtaagtagctggggcaaagtttcatttgaagtttttttcattttagaattaattctctcacccacttactagagtagagcagttcttcaggttttcaaaaataaccacatacgtctgtcacttagtaagcacatagtagtttctcattttctttctctctctttgtttctctttatgtattttacttctctcccttcccctcctttccctcctctgtgtgtgtgtgtgtgtgtgtgtgtgtgtgtgtgtgwgagagagagagagtgagagagagagatttttaattcaactttttcttgtaatttcctaccaaggggacgaatctggaaaacttaaagtagaaccaacaaagaatgctcaaatattaaaaaatcagaggaaaacaaactttaaagatgaaatattagtattaaaaatacaggtcgattgactagaaaaatatataggtacttaaaattattaagccaattatctgaggaaaaaagccatttttttctggcaagctttccacttcatgaaagagaaacctaggaaatcactgacatgcattggtttttacttttaagatcagtttagattggaaattggttttaaattaaatacttgttggagtttaaggcttctgatagtgtgttgctgtttgcaacactcttagtatgtttctgatttttatttcacttatccta

SEQ ID NO: 717450 - DNA, 3308 bp, Homo sapiens
gaaagaagactcctcagctcgtttttgtacctagttcagtgccttgaaatgttatgttgtcacaagaagcctctacgggaagtcacaatatctgacttctatttttaatacagcaatgtgctccatagtgttatgtttacaaaacctacctacatttttgtatgtctatagtgacaatagttggatacaagcttaaaatcccattcacaaaagtgaatttggaagcaaaacatcactttcccccttgtgaaacacaactctgaaaggtacaaaccaaaaatagcaaatccatttaaaagtaggacactatgataatccattgatttcattttcataattcttctcagtgttggtattcaaagtttttttattttcaaaaattagagattctaagattgaaaagtaatttcaaactataaataatatttctgttccttgtaggaggggattcattatacatttgggcacctagaaggagaagaaatgcctggaaacgtgagaagaaataaattaacaaatacaaaatattgttggtgcctaactctttaaggaataaaagttgattttgaaccaccacataccctttcttgttcacagaagagtttgagatgttcattacagattgcattactcagcaccatcctagtgtttctgagtcaaaaatctcgagaataggacttgtaaagctgtatttgtcacaaacatctcaagctgtacctttgcacctggctcagggaccatatttagaaaatactgtatctggttagtatgagtaaggaagggacattggttttttgcagctataacagaaagcatacacacacacacacacacacacacacacacacacacacacacatacacacatgcatatataatgcaataaatacttttaaggagccccatyaccccaatatccctcacaagtataaggggcaagcccattacacttgccctcctgtgatacttcatccctggcatttctatttgctaactatgcttcctgatatttaaactttggttatatctataaagctgctacttaagctcattttcattctcttcaaaacatggaatattatctttttttcaagctttattgaggtataattggcaaataaataattgtatacattcaaagtatacaatgtgacattttgatttatgtatatattgcaaaaagatttccaacaagctgattgacatatttaacacctcacccagtgacctttttcttcaagacttatctcttgagtatattcatcttgcttaattaaaactttaggcccatgaattagtaactctcctgtttcccgtttccctattccctataatcaagagagatacattgtacacttaaaaaaattgttgacagggtagatctcatgttaagtattcttagcacaataagataaaactataaaagaaacaataaatggcttagaaaggtagctccttcagtaggatgtaaacctttagtactcttgtgtaatactacggaaaagaccacagattattctgcccccctgagtccttgcccattatacacccctcacactctgagtcccgtcttggtgatgcgccttgctttagtcagtggtttatagcaaatgcgatacaataaggtgcttgaaagtgtttatacccttactgctattggaatcctatgactaccatgtggaatgcctgagagagtcaactatggaataagtcacctgcattctagtcattcctctgaccccataccaacagcttccaaatgctacacatgtgaatgaggccttcttaggccacccagctgttaggacatccttgagtaaagtggctttgtacatttagggtgaaatttcaatgctgtgtcattagattcgttaatttatagatttaaataattaagatgttcaaataatgaaagtttcatgagactaattattgaggtatttttaaaaaacagacataatgggtttttttggtttctgtttgtgaagtattttgacaacctgctgtggttttatttgtaattaaataatttatatatttaaattaaataattgatcatcctgtagtaaaattcctaaaatctccaaccagggaatataaatgcttgtaaaacaaatgatatgtatgacaaagatgcctacttatgcctatttccttaaatacctacataaaaagtttatgcatatgctacatgagatgaacatagaaaatgagtatattcataaataataaaggttttaaaatgtgttcaagaatataattactaagataattcaagagaggatattttctatattgtgtgaatattatgtagctatgcatattatatattaatatatttcaaaactcttaaaattgactttacagttaataccacatcatcaccaaaacctaaatttagtagtaaaaacaaggtaatcccactgaatggatctctaaatgcctaagttattgtgctgttgtaaattaggcactctgggcatttagtttgctgaagtagttgtaaatgcaggtacctaacatgcttaatgttcaaacacgtaattcttaggtgcttggggaaataagttaattagaagaaaatatgattttgcataaaggtgcatgtgtatttgtgcattactatatcagacacattaataataaatgggggaatattattttgtttacttacatacatatttttgtgtttgtatcttgtacataaaagcataaacacatcatatgacctctctctggcacttactgaaaaacttaccagtccataaacatttatttacattgacctgagcttgtctagttcatctgtcaaatccatttccttttatgtaacacacctactataaatcccatgaaaacattacgagtatgggtgttaatatatgtacagaacaaattatagagtaactattacttccacataccaaagaaaagtattacaataacttttcgttttttaaataaatcaactctccctctggctccatgaaactttaattcacattgggataagtggacacctgtttatttacaaagctttcagtcatggagacacagattcagagacttgagacaagaataaaataagttagacggcctccttttaaatccaactgtgattttcatctttgtcacaaaataagcacaacatttggcaagactggaagcttcgactgcacacaggtccaagttggcatagaatcaccttgacaggctctcagatcagcaagaactctcaactgtgaaagggtccgtttgctaaatttaacttttccttggtaaaataaatgagatgctcctaaggagaa

SEQ ID NO: 717451 - DNA, 930 bp, Homo sapiens
tggtgggattaagctgtgcaataaaggaaatttattctgttttgaaaggtaggaagaaagagaagacctttgtagggggaggtaagtttatgaaataattgtttgagtatatgttctattttatcaatgaagtatgaaatgtgggggctttaaagaaaatggaaacacatatagcagaaagtgggaaggtaattttagtacagaaatgatattcttgaaagatttttattttgaagatatgaatcatgaattcatgatgatgctaatttatttggatatatgatttttcttcagaaatcagttgcattcccaaaaggctatttcacaagttggaaaaacagaaggaaaggagtcagtttaaagtactgtatgggaataattacactggttaattatagaatctaacctgcatacagagggaagtgttgaaagaaagtgacacattgattgaaagaatttaaaaagaccaatgaataaagtcttaataagtttaaagaaccatttgattcaagtactggaacaaacataagagagttttcagcagagaatggaatgttttaattaattattttagagatggtagagtttctggtaataaaaaagcatgattgtagaagtgggtgaattagatgtagtaaagtgagacatcatcggaataaggaaatcaagaggcaaagatgatggataggttttcatgatggttgccgattttaccaatagcagatgtgaacagggggtctaataaaaaagtgaaagttttcactgattgatgtggaataaacaagatttggtatatgagattaatgaggagagggacagtgatgtagcaccatgatgtgagygcaatggaacagagagttttaaaattaagtttatactaacttaaactaatttctattcttgaatattagggtcccttatccctattca

SEQ ID NO: 717452 - DNA, 594 bp, Homo sapiens
tggtggcaggtgcctgtagtcccagctactcaggaggctgaggcaggagaatggcatgaacccgggaggcagagcttgcagtgagccgagatcgccactgcaccccagcctgggtgacagagtgagactccgtctcaaaaaaaaaaaagaaaaaacacaaaaaacttctctccttttgatataaaatgtcagggagggaagaaaaggaatgaagagtgacaaagaaaggaagggcttttcaagagaacaaaccaactcatgatrcacacaaactcaccccatcctccaacataacaaccctctttactcccacgaatgaacagacaagttctgtttttctctttccaaatccattgacccatacgcaaagctggcactaattttttcgaaaccagatgttgcagcatctaaatatttacattgttcctcatcaggactccacgtgtgagattctggagaaagggagccttctggatcaggggcctttgcttgtcttttcttctctgctccccagaatttgattttaatgtagtttttcaaattggggactatgagttcttgacaaaatgtattaattttgtgtcttaattttga

SEQ ID NO: 717453 - DNA, 594 bp, Homo sapiens
tggtggcaggtgcctgtagtcccagctactcaggaggctgaggcaggagaatggcatgaacccgggaggcagagcttgcagtgagccgagatcgccactgcaccccagcctgggtgacagagtgagactccgtctcaaaaaaaaaaaagaaaaaacacaaaaaacttctctccttttgatataaaatgtcagggagggaagaaaaggaatgaagagtgacaaagaaaggaagggcttttcaagagaacaaaccaactcatgatgcacacaaactcaccccatcctccaacataacaaccctcttkactcccacgaatgaacagacaagttctgtttttctctttccaaatccattgacccatacgcaaagctggcactaattttttcgaaaccagatgttgcagcatctaaatatttacattgttcctcatcaggactccacgtgtgagattctggagaaagggagccttctggatcaggggcctttgcttgtcttttcttctctgctccccagaatttgattttaatgtagtttttcaaattggggactatgagttcttgacaaaatgtattaattttgtgtcttaattttga

SEQ ID NO: 717454 - DNA, 596 bp, Homo sapiens
tacattatgctgtaaaatttacaaatattcagcaaagttgaaataattttacaggaagcatttatgtacaaaccatggagattctatcaacctattactgtacctgcyatatcactatcatatctatggatctgtgtatggaactcacccatccattcaccttctctttttgatccatttcaaaataaactgtagacatcagcacatttctaaataatttagcatgagcgtcattaactacagttacatatttagttatagttcttcttatgttgaatttacgtacaataaaatgcacaaatcttaagtgtacattcactgagttttgacacatgcataaacctatgtaaccaaactcatattaagatacagatcatcactccagaaagttctttcatgccccttcttggacaatctcactacgcagatacagccactcttctgatattttcccaccacagattagtttttctatactagaacttcacataaacagaaccaggcagtatgtactcttttgtagctgcctcgtgaaattggcataatactttttgacattcacccatgttgttgtgtgtattagtttgtttcttttc

SEQ ID NO: 717455 - DNA, 596 bp, Homo sapiens
tacattatgctgtaaaatttacaaatattcagcaaagttgaaataattttacaggaagcatttatgtacaaaccatggagattctatcaacctattactgtacctgctatatcactatcatatctatggatctgtgtatggaactcacccatccattcaccttctctttttgatccatttcaaaataaactgtagacatcagcacatttctaaataatttagcatgagcgtcattaactacagttacatatttagttatagttcttcttatgttgaatttacgtacaataaaatgcacaaatcttaagtgtacattcactgagttttgacacatgcataaacctatgtaaccaaactcatattaagatacagatcatcactccagaaagttctttcatgcsccttcttggacaatctcactacgcagatacagccactcttctgatattttcccaccacagattagtttttctatactagaacttcacataaacagaaccaggcagtatgtactcttttgtagctgcctcgtgaaattggcataatactttttgacattcacccatgttgttgtgtgtattagtttgtttcttttc

SEQ ID NO: 717456 - DNA, 596 bp, Homo sapiens
tacattatgctgtaaaatttacaaatattcagcaaagttgaaataattttacaggaagcatttatgtacaaaccatggagattctatcaacctattactgtacctgctatatcactatcatatctatggatctgtgtatggaactcacccatccattcaccttctctttttgatccatttcaaaataaactgtagacatcagcacatttctaaataatttagcatgagcgtcattaactacagttacatatttagttatagttcttcttatgttgaatttacgtacaataaaatgcacaaatcttaagtgtacattcactgagttttgacacatgcataaacctatgtaaccaaactcatattaagatacagatcatcactccagaaagttctttcatgccccttcttggwcaatctcactacgcagatacagccactcttctgatattttcccaccacagattagtttttctatactagaacttcacataaacagaaccaggcagtatgtactcttttgtagctgcctcgtgaaattggcataatactttttgacattcacccatgttgttgtgtgtattagtttgtttcttttc

SEQ ID NO: 717457 - DNA, 3218 bp, Homo sapiens
attctcctgcctcagcttcctaagtaggtgggattacagacaccagccaccaagcccagctaatttttgtgtttttagtagagacagggtttcaccaaagtgctgggattacaggtgtaacccaccgtgcctggcctgcaataatgttttgagaagtgattgtgacttgatccaggaaagttttaaatgggttggaactaaatgaacagatcaagggataattctgagtagtgtggtcaaaatttgaggattgactggaggttcaaatgaggacaaaagcaaggtcaagaattatacctccaagtttctaggttgaaagggaaccatttgctggatagaaaactcaggaaaagaagagtctggggaaaggggaaaacatattgctaatctttttttttttttttttttttttttttttgtgagatggagtctcactctgtcacccaggctggaatacagtggcacgatcttggctcactgcaacctctgccacccggcttcaagcaattctcctgtctcagcctcctgagtagctggggttacaggctcctgccgccacacctggctaatttttgtagttttagtagagacacagtttctccatcttggccaggctggtcttgaactcctgagctcgtgaaccacctacctcagcctcccaaagtgctgggattacaggtgtgagtcaccgcacctggcctatattgctaattttgaagtgctgctagacatttatatctcgacacttagcatatatttgcagcttctgtgtggacctcaggagacaaagctgagtggaatcatcagtccacaggctgtctcaaagccaccgacacagccaagcttagccagggagaatgagtcaagtgaaatgagaaaaagaccaaggaggaaagcctagaaaattcctggtatttcaaagtcaacaaaggaaggggaaatttcaaatgaggctgatgaagtgcagctcaagaagttgaagaaaaacaagataaaagggacaccatctataatgttcctaatactgttccaaagatgcattatttattccatacgataatgatgcatgcaggcattagtctcatatgcactttacagaagactgtaaagacttcagaaactcataaaggtgaaaaaacttgcccaatgaatcgtatctagaaaatagcagagcaggtttgaagaattataaacaaactctagtctagctggtgtctaactctttgttccttgtaaagggaatgagatgtgtgtgtgtgtgtgtgtgtacacacatatctgtgtatacatagactatctctgtaaggatgcatagagcttaggagctgaaaaaagtgaagagtggtttggtgccttgggtgagagaatggtggttggaaaaggtgggatggagactgactatactgtatatattttattctttatattgttgtaataaagagtctgtgacacagaatccattttttttaaatgtttggccattggcagcttctagttaccatcactcctactcccccatctgcccaacatctgggtaagctgacacaaaagcacaggtgctccctccttgggcagcacctgcaggaagttcaaaccacacaagtcctggccattgcaaaggagaaccctccactcagtcccactatgaaccccaagccacgctcctttctctgctctcttggccaattttgggcctgcttgtggtcctgccctgttctgctcagagggcctcaatatgtgatcaataaacctttccatgttctcttggtgtgtgtagcctaccggtcctgacaactgtaaagctgtgctattttaattttgtgttgttttggttttttgtttgtttgttttgagactgagtctctcttgtgctatcacctaggctggagtgtagtggcgtgatcttggctcgccgcaacctccaaatcccaggttcaagcgattctcctgcctcagcctcccgagtagctgggactacaggcacctgccagcatgcccggctaatttttgtgtttttagtagagacagggtttcaccatgttggccaggctggtctcgaactcctgacctcaagtgatctgctcacctcagcctatcaaaatgctgggattacagaygtaagccatcgcacccagcccctattttaattttgaatgttctaataaataaatgtgaattaactaaacaacattttaaatgacaggaatataaagagtccatgtgccaaagtcctaagattccaagatctacctgtgctttctccccactttttatatttgctagctaactaaaaagaaaaacaaacatgaaataaactaaagctcctgcttcttttcttgtagcattctatatccccaaagagtaggacaggaattgttacatttgatatcagaaaattgaaaagaaacatttaaaactcacttttgaagttttagaatgtttttctgggatccccagctctataaaaattgtatttgtttccaggcgcggtggctcatgcctataatctcagcactttgggaggctgaggtgggcagatcacctgaggtcaggagttcaagaccagcctggccaacatggtgaaaccccttctctactaaaaatacagaaattagccaggcgtggtggtgcgtacctgtaatcccagctacttgggagactgaggcagaataattgcttgaacctgggaggtggaagttgcagtgagttgagatcgccccactgcacttcaacatgggtaacagagggagactctgtctcaaaaaaaaaaatgcatttgtccaaactgctatattttcttatcatggaggtttacaattttaaaaattcagtgagtatatctatatctaatatagacatacatatatatatatatatttaccagtgaagctattcctagagaatagtagaaccctataaaaacacattttgtatacttatctttattataagaatattgacttttttttaccctgaggtatacacatttataaaatgttcctataaacgttatatcaataactactccctcctgcccccagctattcgatgagtaaactgcagaccagtgaggccggatgatttctgttagcgtgagtaagtagtagaactggctccccagacccacctcctggctgtcacgctccttgacaccatatccaggagacatagtcattgttaactgatgctgatgactgtaatctatgagagtgatattc

SEQ ID NO: 717458 - DNA, 1161 bp, Homo sapiens
ggaagcttttgcagggttttaaagagggaactgtgttatttgatttacatcgtgagaagatcactttttctactctaaggtagattgattaaaagtggccaagagtagaactttagaggaccagttaggaggctgttgtaatccagatgagagatgaaagggatactgtgttaatagactgaaaatagagtttgatgctttccagtgggagataagagggaagcagcaaataagcatgaccttgatctccttttcttcctcgtctctcctttccaaatagcacaaccagagatatttaacaccactgctttatgccaaagtattaagtatgtaagttacatatctctcttgagtttgactttatttgatgtaatgtttggaagacttccaaaatgatcaacagagacaatgtgtaaaatctcttgaagtcacattttccctttggcctgttttattcatcctattctgacactttaatttatttcaacacactctttcactttgaataaacctcatttgctttcaccttaattatgacagtcttgcataggacatacaaatgaacaatacattgattctataagaaataagaatttctttgacaaggatatgccaccatggcattctctgccatagctgttcttattagtatcatttacactagccagatgttatttcccctaaatttaaatcatgcttaataccatttatggactttaactcaatgataaaaaaatttatttattttattttttgtggtacatgaattatattttattagatggaaggaggttgtgaaagtgagagcagaaattaaagtaaaaaacaattaaagaagagcaataaattaaaaatttggccctctggaaagattaaaaacattgttttggtgagattttgaaaggaaacaaatttgaaatatgggaaaagtaagtaatattagtaagaaaaaagtaacagagattaaaattataaatagagattactatgaccattatataccaatatatttgagtctaaacagaatagacaaattactagaaaaaaataagtgaagaagcagtttaaaatattcccattaaataraaacaattcggtgcaatcttacagacaattgccaacagacttgcaaagaatggatcattcagattgtacaaaaac

SEQ ID NO: 717459 - DNA, 580 bp, Homo sapiens
gtggcacatgcctgtagtcccagctactagggaggctgaggcaggagaatcgcttgaacctgggaggcggaggttgtggtgagctgagatcacgccatcgcactccatcctgggcaacaagagcgaaacgccatctcaaaaaaaaaaacacacacacattaaaatagtgtaattagattgtttgtaatacaaaggacaaatgcttgaggagatgcaaaaaaatgggcaaaataagagagagtttgtcagggaaaactttatcaacaaagccaattttgtgaaagtaggatctatttcatgcccctccacccttaaaaatataccactggtggaagaataatttacattccatgaaaaactctacccccraatttagagtatttacattcacatctttattagtatgtttctaaacatgagaataattgaattatgcttatagtaaatggctctttctgtagcatagagagagagataaatcatagccctcctgaaatgattaaaagttgcatattggtcagaaagtgcatgatctgaattttggtccttccttacagtctaactcctaccgtgtgtaagt

SEQ ID NO: 717460 - DNA, 569 bp, Homo sapiens
gccaggcgcagaacctgtggccatagtcgcagctactcaggaggctgaggcatgaggatcacttgagcccaggagctcagggctctaggagactataatcatgcctatgaacagccactgtactccagcctgggcaatgtaacaagaccccatcatctcctaggaaaaaaaaaaagacacacacaaagtcactgtaagcatccttatacagtgaatactggttgaagctgttgttcactggcktttagacaaatataactgtttaatttcaggaaaattttttctctacaaattgctgagcactttgcatttgttcttcccagtgagatggctgttatcatcagcatccttacttcattacaaaggctcaagagcttacccacacaattttagtcagttggcaaggctaatactgaaacttgatgcggattacagtctagagatttctaacttgaatgtttcctgttccacattctagaaacaggcaaaaaaaaattctttttagtatgtttggctttattactaaatgccagccattacttgaaacccttctagaggcatgtgttctg

SEQ ID NO: 717461 - DNA, 520 bp, Homo sapiens
gatggactttaacaaagacagggtcgtgactcagcaggcaagggcttaggcaatgttttatttccataatgaattaatctccataaatgacatttttcacactggtaaatacagtttaaatgtctcaagaactttgtctcatcacccaaacaagactaccagttccttaaagcagggaatacgatccttattttacattcattttagtatatacctcacagaggtagcacagacctctgagcatttaccaacaagattaaaaaatagctagacatctaaattccaggctaggtccatagcctcacggccactcaacacatacagttataggaataacccaaacttccaacagggtttgtggaagccatcacaggacaggactagatctctcaggggcaaagtgaacaaaagccagtgttcattttgtcccccaccrtagtgaaattaagagcctgacccagcctggttcctactggtctgaacctgatgggttgagactccagaaggataagaatgtctg

SEQ ID NO: 717462 - DNA, 1284 bp, Homo sapiens
ggccaggctggtcttgaactccagagttcaagtgattctcctgcctcagcctctcaaagtgctaggattatagatgtgagctaccatgcctggccttttagttcttttttttttttttgagacaaggtctcactctgttgcccaggctggattacactggcacgttcatagcacactgaagcctcgaactcatgggctcaagctatcctcccacctcagcctcccaaagtgttgggattagaagcatgagcttctgtgcccagtttaccttttccttactcctttatcataggagttcttatgtacttgttcagaaaataatgctcataaaaattcttttggaacacaagtttaataacttcagtattaatcactgtcttttcaggaagcacagttttgtcagttctaattagttaactctaagatctatattatgacagtctcatataataatgagtatattttgaggaatctttttctttctttttttttgcgaggtctcactttgtcacccacgctggagtgcagtggtgctatctcagctcactgcaaccttgacttcttgggcttgattgatcccctcaccgcagccccccaagtagctgggactacaggcatgtgttaccacacccagctaataattttgtgttttttgtagagatggggttttgccatgttgcccaagctggtttygaactcctgagctcaagtgatctgcctgcctcagccttattttggggaatctttaaaacatcaagactttaatttttttaatttttttatttttattttttatttatctccaggagattagctttatttctgatgaatcacattctgttaatataattgtcaatgtcaatatgtgattacttcaaaagattttacttctttaaagcagagagttgtaaacctagatacatcaggagctaagactaaacaggcaggtattaagacagtagggagtggtagagactttgccatttgaaaagtcttatttcatctaaagacactcaaattataattactttaaaagactgtatcacacacctcaatttgtgaactttttataaaatggagttttgaaggagcagtggaaagaatggatatatttttttcccctttgagaaagtgctctcattttctttcgagcttttgtttatttttattttagtcttttaaatttagattttagtttttaactacttaatactaacaatttgagagttgagatgaaggagaaataaggcttctacttccagatttacaggttgggatgaagag

SEQ ID NO: 717463 - DNA, 615 bp, Homo sapiens
gctgcccacaccacattccctgggaaactccatttttttaacaagtttcacaagagagtccagtgcataccaacatggaaaaacgattaatttacgacactcattctatgaaaagaattctgaatggtaaacagcgtatacaataactttgaaggacacccactttatgaagtcagaattatttgaccaagaccaactaaatgtattaaatagactttatttgacgtttccaaccaaaactgcttaagtaaaagttttgagttatttctattctaactttaaaaagtacagtgaagagtatcatttaaagatttcctctttcttcataaaaacagactgcctctgtaaatggaacatgttttagtgtgcctgaagaaaaccattcatttaccagataagcatttagtgcagaaaaaatctgagaycaaaaagttaattgctcctttaagcgtatttataagcattgtccacaaacaaaagcattctgaaatcatcaccatttcactgttctgcactaaaatataatggtgatgaccagttaaaataggtgatattctgcttttaatcctaagtgcctaagaggcatgaatgaatagtggtttctcattatgaatc

SEQ ID NO: 717464 - DNA, 1431 bp, Homo sapiens
catttcttaccaacataagaaaattactttcatttctccatgaatcattgaaacatactacttgcccaaccttatttagtaacttaaccattccaactctgcactactgcaacaacactatttgctgttttgcagtcttatcatgcactcttttgaatctataactttgtctatgctatgtcctctagacagaatgtgcttttacactttgctatggagataaactcctttttttttttttttttttttttaccatctcatctttctctataaattcttcagttcccaccttctcacagctcaccttcagctgcccaagttaaraaagcctgcattcctctctggactgtactatctagatttgatacataattccactattgaatatcacattttatggcatatatctgtgtgtgtctctgcctatccctccacctgactattgaattctggagttcaaagactctgttggaaaagtgtccactcttgcaggggctaagacattaaggatatgtcagttgagactgcagaatagttttcttcatggaagatacaatccagtgggaggaacagacaatggacaagcatatattattcttagaagtagtgacttttgtgaaaaatgaaaaaaaaagataaataataatgggggtgctgatttagatagaatgttcagcgaaggccttgttgaggaggtaagactggatcagggatatgactcaaattctaagaaaaagaattttaaataaaaggtgataagattttgattaaacaaagtagaactgaaaatttagctttatagtttactgataatatatgtatgactccaagtttgagtacacttgatatagtggattctgagtgaccatatctctatttttcaggcatttttttctatgcccactgtctcccctctatttttgaggcatttttataatttaattgccaccgccaaaatagttgtttttgataaagtgtgtgcacgtgtgtgtgaacctatatgtgtgtgtatgtatgtggctttggggagggaagctcacatgttcatgagtattcatgtgtcagaataacacagaataaatttgttgtgggattattggagactggatctactgagacattctcctattctcaagttccatgaatttccaatccatattacttagtgggtctaacaatatcttttaaaacacctcagtattttatacttctcccttatagcacatgagaacaaatttgtgatgaatgtgagtattctgctgcaaattatcacttttaaaaccatttttaattggtagcatttgtctgggaagtaataattacaatcagagagaagggaagagttctgagaatgaaattcaactagtcagcctgctaaaattagtaaggtttacctctatgtatatttcccacaaaaatttatatttttat

SEQ ID NO: 717465 - DNA, 1001 bp, Homo sapiens
gtggcatgtgcctataatcccatttactcaggaggctgaggcaggagaatcgcttgaaccctggggccagaggttgcagtgagccgagattgtgccactgcactctagcctgggctacaaagcaaaactctgtctcaaaaaataaataataaaatagaggaatatgtatatggattaaatgcattttgaaagagagattttgtaattagttcaaatatatgcacattattatttaaatattagtttctagaataggataactgaayggagagtggaggccaattttttcaccttgtgaattaacagctttctgaaaagcaggaggcaggaggtgttagagtcagagaagctaggaaagcgggtggcacagatcaccatgtttgacgttgatggctctaatccttgctattaggaattcctgctcagataactgctgaagacaaggattaggtttaattagcacttgaggtttagggaaaactaccgcagattgatcacaaaccttgaaaactaaatcctaaaagtatggtattcaaaactagaagttgtgaaattgaccactgtggaaggagaggcctattggtcatattcatacttttctcactgtactctgaaccaaagccatactttcccctaaatctatagtagctccaagacagtcacgcattccctgcatttccccttcctgtcccaatctaaccctttctcgacatctagttttgtcttatcaaacctaatccacttactttcatggggaggatatcagattttaaaagaatcctgctccctttctttttttgttatttaagatgactttctttcttatggcttatagagttttgttctgttggtggctgtttttatttgtttgttttcagcacaaacactcctataactcaaacaaatgtatctcttttagtgggctttcaaaaatagttaataaagaagtgagggaagatattttagaatggcggggaaggagaaaaaactcttcaactaca

SEQ ID NO: 717466 - DNA, 1001 bp, Homo sapiens
gtggcatgtgcctataatcccatttactcaggaggctgaggcaggagaatcgcttgaaccctggggccagaggttgcagtgagccgagattgtgccactgcactctagcctgggctacaaagcaaaactctgtctcaaaaaataaataataaaatagaggaatatgtatatggattaaatgcattttgaaagagagattttgtaattagttcaaatatatgcacattattatttaaatattagtttctagaataggataactgaatggagagtggaggccaattttttcaccttgtgaattaacagctttctgaaaagcaggaggcaggaggtgttagagtcagagaagctaggaaagcgggtggcacagatcaccatgtttgacgttgatggctctaatccttgctattaggaattcctgctcagataactgctgaagacaaggattaggttyaattagcacttgaggtttagggaaaactaccgcagattgatcacaaaccttgaaaactaaatcctaaaagtatggtattcaaaactagaagttgtgaaattgaccactgtggaaggagaggcctattggtcatattcatacttttctcactgtactctgaaccaaagccatactttcccctaaatctatagtagctccaagacagtcacgcattccctgcatttccccttcctgtcccaatctaaccctttctcgacatctagttttgtcttatcaaacctaatccacttactttcatggggaggatatcagattttaaaagaatcctgctccctttctttttttgttatttaagatgactttctttcttatggcttatagagttttgttctgttggtggctgtttttatttgtttgttttcagcacaaacactcctataactcaaacaaatgtatctcttttagtgggctttcaaaaatagttaataaagaagtgagggaagatattttagaatggcggggaaggagaaaaaactcttcaactaca

SEQ ID NO: 717467 - DNA, 1114 bp, Homo sapiens
tcaatttggccaatatgtcctttgacatctctctgtcattctttgatatgtttcttgcttcttggaacaatatgttctagggtcatcttatgctttctctgatctgaatcagccatttctccagaaagctctggttccttcactaggagaattgtatctagacaccaagatctggacactaggtttgctcactgttattggggaatagctgtcccaggcctttgcaatagactgagctacgggatttatgtgtatgtagacatacatacatacatacatgtgaaaacacgttcatctacagttatatagtcacacacatatataccttacatctatgtttaattctatatttgctaaatatattgaaaaccagcactttcattcccccattttcatccagcaccagagttcattctagcttttgcctatatcatacttcaacttcctcctcagacagtgacaaacactgattaccttcatctttaatattcrcacttattagatcaatctccctgtattttaacaaattattgttgctaccacttttctaccccattataacattctccccacctagcacagactataactatctgtattgagtggttgctgtggccacttccccatgtagatgtccttctccttccaataactttcaacagctcacactatgctcctcggtgcagacaccctccttctacttcttgggctttaatagcaaatgcccaacctctgcaataccctgtatacccaccctgcccatggtgacaaaggcttactaggcctcatcgaatggcttttgtactaaattgtttaagaagggaaaggacaaggaagaggatgaggaaaggaaagtggtaaagaatggagagaaacaatattttttcctagagaatattagaagtggttctttaggaagttataaagacaatatgcagtatcagctaaataattaagcctagattacatattctttacatatctgtatctatatgctctgtatctttatacctatgacatatgtatgcatcattttatagcaatatgtgacaaaatttataatatttatctaaatattttaatacttcgcaacttaaaaaattatatagcacaa

SEQ ID NO: 717468 - DNA, 1518 bp, Homo sapiens
tgcgctgtacatgtttctcttcaccacctgaggcttatggaaagcaaaaactgtctttttgaaacttcacacaaggcccatctagcattaggaagttgttccataactgagtaaataaagatggcagagatgagcttatgccgaatattaatggcaagccaaaagattcatacttgaacctgtgtaggcgacgaagaaaaaaaaaaagacagtcttatgtggtatatactgaaagaaaaatggggggtgagggggtgttaaaggcagcaaatattccagaaagatttctctcacagtcacgtcctaagaaggaaaaagaatagagacaaagaaaccatttggagaaaataatacaaaaacacaatgtgagaaagttaaaagtgcttaactgccatggtagcaagatctaccaatctaaaaaactaataaatgtgagaaaaaaattctgttaaaaataatttgggccaggcgcagtggctcatgcctgtactcccagcccctggggaggccaaggtgggaggatctcttgagccaggagatgcagactaagtgagctatgatcacaccactgcactccagcctgggacagggcaagaccttgtctctcaaattaacaataataataatttgatgaaatatgacaagtgactggatgggactggaagatagtaagcctcaagcagaattaagagaaaaaggggtatctctaaggaaaactagtggcttgtgggaataatttgtgataagatgatgaggctttgaatcttaagtttcatgtatcagcagggtagacaggatagatatttgtacttattctatatccaacaggtaggtaacagggcaagctgtcaaaaaagggctagcctggccagtcagatctgaaagtcaacctgcactaagttaagaactaaaaccttgactgtagatgagtttgtggtaatagagagccaatgactagacgttggtgttccagcaagggaaggcagtaagaagaratggatccagagaaacaggccaaacaaggaagggccagtccgagaagaggagaaatcagagaagagaggatcagcaaagccaaaagaggcaaggatataaaagtcttgcagcattaaaaggaatgactttttaaaaagaaatcctcagaacaaacaatggaagagagacgtctgaagaaaagcaacaaactcagaaattttttttttctctagccttaaatggattttttcataacatatctttcatctatctattcctgtgccttgaacccagaaatggccctatggacccaagaggaacccaaactcaagcgccacctaaaaacatgggatttgccatatctctctctattaatggcagtcacaagtgagcactctgcagccaaaacttaaaatacttgtttcccatttcaaatgtttcagaaagctcatttgctaaaccgaaaataatgatcccttcccagattcatgatacactcaattccacaccatttaaaatatttcagagttctctttattttaa

SEQ ID NO: 717469 - DNA, 628 bp, Homo sapiens
attactgaggacactagaactgagtgcctaaaatctctttaacctatcttccccgggaagtagttcatgatctaactaaactcccggctaaacatcatttatttcagtcccygccagaatttataatttaagctttataaatttataattttataatttataatttaagctttctggtttatatctctagtccttatagtctgccttcaaacttattcaaatctctcttatcttaaaaaatgcctaaaatccttgacccaagtacattcttaagacactgtcccatctctcttcttgcctttgccatcatactttttagcctactgattccacctcctcatcacttgccctcttttcttaaaatcaatcttattaaggtaaaatatacagtcaacaatattccaattttaagtgtacaattcaatgagtgtgacaaatgtgtaagcactccaataactaagaaatagaacatttctgaggtctccgcaagtttttatatggccctgcccacaattcccacccctacctccgtgaccctaggctatgctaattttctttttctttctttccttctttctttctctctctctctatgtagagatatctatctatctatcatctatctatc

SEQ ID NO: 717470 - DNA, 588 bp, Homo sapiens
gctcaagtgatctctacctcagcctcttgagtagctgggatgacaggcatgcgccaccatggccagctagttttttttttttttttaattttttatagagacagggtctacctatgttgcccaggctggccttgaactcctgggctcaagtgatcctcccgcctcggcctccaaagtgctgtaattacaggcatgagccatcatgcccggtctgatttgctttctatcattatagataaaatttgtctcagagtttgtttaaatggaattgtagagtatgtgcctttggaaagtatattatttatagctgtataagacattaccctcctaatttagtttaaaactgcaaacatttattatcttgcaaagtttctgagagttaggactctgtaagctacttacattggtggttctggctcaaggtatctccatgaaattgcagtgaagctgtyagtaaatctgcattctctggactgaaactggaggattcacttccaagcttactcacctggctgttgtcaggaagtttccatttcttgctatttgggcctttccttaggactgctcacaacgtggctgctcacagac

SEQ ID NO: 717471 - DNA, 588 bp, Homo sapiens
gctcaagtgatctctacctcagcctcttgagtagctgggatgacaggcatgcgccaccatggccagctagttttttttttttttttaattttttatagagacagggtctacctatgttgcccaggctggccttgaactcctgggctcaagtgatcctcccgcctcggcctccaaagtgctgtaattacaggcatgagccatcatgcccggtctgatttgctttctatcattatagataaaatttgtctcagagtttgtttaaatggaattgtagagtatgtgcctttggaaagtatattatttatagctgtataagacattaccctcctaatttagtttaaaactgcaaacatttattatcttgcaaagtttctgagagttaggactctgtaagctacttacattggtggttctggctcaaggtatctccatgaaattgcagtgaagctgtcagtaaatctgcattctctggactgaaactggaggattcmcttccaagcttactcacctggctgttgtcaggaagtttccatttcttgctatttgggcctttccttaggactgctcacaacgtggctgctcacagac

SEQ ID NO: 717472 - DNA, 836 bp, Homo sapiens
cactagttgaactgctgaatccggcaatgtagacttttcaatcctgtaggccaataaagcctggcacagtggaggtttctgtcacttgcatccagaagagttctaattgccacaccacccatgagctgatgatccctggccaattccctgacaaatgtctattgagagtttactgtgttccaggcattagtcatggtcctggggttataggtgaagaagaggttactgtctttaagaaactcacagtcaattgaaggcaggcaaaccaggaagaaatcaaatgtgtaggtgcctttaaagaggccaatggagggtgttatggggaacagagaggagtatttctcctagttaaaggatgaaagtttaggaaagacatccaagaggatgagacagataagctgggtcttggaagacaatcaggcagataaagaacagtggggtagtgcaggagactagggtgtgtgtgcacagataatagaatgacctttctagaaaagggaagagcaaattcaaagacacggmggtatcagaaatacaacacacataagaaactgggtgggagatgaagctgagggcagggagtggcagccaggtcacgaatggcctggtacgcagccctggtaaggagtgtgtcccttattctgaaaggcaaagaggaaacctcaaaatgtgtgaagaaatagaacaacagtgagagcagattttcatcttgtaatagaaagatcaccttaccaccatatgtcgaggctggatttaagttggggatgaggatggaagagaacaagggaatctttaagagaaaccttcctccaggcagaaggttttgcagtctagag

SEQ ID NO: 717473 - DNA, 623 bp, Homo sapiens
gcaagctaatttcagtacgttctccagtttaggatgacaggaaaggcttaaccacaggtattctataagaratatatgcactctaatggcatattgtatggtgatttcctcaacaaattatagcaaacaaactaatttctctttaagcaagcactggatcttaataagtcctgagatggaagtcgtgccattaaggtttgttcaagcagctactttaatatgtgaccactgccaatttacgttgtataggttcataacaaagcagttccaaaattgtatgcctgtcatgtagtatatctttagctgaagattttaagatttcaccaaggttaattaacccttgaaagtaaatactcagatattaaaaataaatctaaagaatcatgaggtcattgataccatataagcttagagatgccagaaatgtggatggattacatcagttttctaatctgaactcccaaaatatgaggcaaaactaaaggtgaatggagaattgggctaatccagagggtaaacatgcacgcatgtgagtgcaagtgtgtgcttgcatgtgatatgtaccctctgtggccctgagtagtggcagatatagacttctcagggacacctgggcactgccc

SEQ ID NO: 717474 - DNA, 2976 bp, Homo sapiens
attttttcttttatctattactgaaagatgtgtgtttgaaatgtctgtaatgatttgggggcttatccatttctactttctgatatttttgctttatataatttgactctcgaaatacgtgtgtgtgtgtgagagagagagtgtgtggtgtgtgtgtatatatgtatatatgtatcaggctaatgcacatttaagtcatcacatcttaataacttaaaacttttatcacactggttagactaacttattttaataaatgtttctaacttacattctattttgtctacatagcaactttttaaaaaattatattcatgtagtatgtatgtatatcatatatacacagtatctgtattgtttgaatttcaaagtttctgtaaatttatatattagttgcctctcttgtaactatgatagagacggatttttttaattttgccaatctttgtattttaacagaaacattgtctacttaggtttaagttaatctttgatcatttatacttaatttgttttattaatttgttgtatatatatataaaatgcctcattttctcctatcagtttctgtcttcttgtttttaaattatgacttttatttttattgttttcatagatacaacagagaaatgcataatgtccagtgaatttattaaagttccaaagtcggtcgcgcgcagtggctcacgcctgtaatctcaacacttcgggaggccgaggcgtgtggatcacgaggtcaggagctggagactagcctgaccaacatggtgaaaccccgtctctactaaaaatacaaaaattagccaggcatggtggcacgtggctgtaatcctcgctactcaggaggctgaggcaggagaattgcttgaacctgggaggcagaggttgcagtgagccgagatggcgccacggcactccagcctgggcgaaagagtgagactccttctcaaaaaaagaaaaaaaaaaaagagttgctaagtcatactcaactttctgctcttgtcagacaattaaggggtctttgaatacttcagccctaataattttcttcctaaggtacacattgcagtgcttatctaattttaaatatctttttgtttcaacacctgattttttatttagatctatctgtatgtttacagtatattttgttctgtgttcattctttgatttcagaacttcaacctttctgaagcatgttttcagtttctctttagtttctttagtggaattctgctggtggcattttgttttttgtctctaaatatgttatttagccataggttgatgaatatttttcttggttgagaatttcagaatgacattattattcttaacaaataatattgtttattttacctttcattctttcctatttcaatatgattaaagataatttgatttttctagtgctaattgaaatatttttcccttactgattctttactatttctctaggagatacatagttgtaggtttatctccattgtagcttgcttagcatgcatggaatttttgaatatgcagattagtgtcttacaaaagtctagagaactttcagccaaattaccatcacatattgtcccttcccagttcccttcttctataagaacactcactaaacacatgctacactttctcactgtatcttccatgtctcttcatgattcagtctacattttgcatttttcaaaattttctgtaatgcattctgaaatatttattaactcccaccatggccacgtctaatctgatgagttcatttttgagtttttaatttaaaatactatttttttatacaaactacttttcaaatttgctacatcaattttttagtctcctaaaaatrtattcttttttaaaattttttttaaagcaaatgtgctttataatttaacggtgatatttctactaatgaatctttgtgtatctgtttgtactctttttctgtttcctttcaaatggtggaatatcatttccttgcgtacttagatgtctttgaatgacaaatatttatttttctctgaaaattatttttgtgcacttctgatgattagtaagaagaaaatttgccaaagagaatttgaatttttttgtaagtctactaagggcaccaccattctgggaccacattatgttaattcttgacctaaaggtgtttggatgtatgtttggactgcacatttaaacaatttttaaattaattgctgtaaatcattaacgattgagtttctttaaatctgtccaatctcaagtcatttttatttgccatttccagggaatgtgaaatgggactaatttacctctgattcttctttatactgaggatagaaattttggtcctagctttagggaggagctcctgtgtgatgccgtatattgggaaaaactatgtatttctttactgtcctatgtgatgtatgacagtaggaatctgcactcattcattttggtacatgtccgtagggcaaaatcagtttcggtgtttaggaatattttgtctgatgcctgcattcccatggttttgaccttttttgtgtgaacatatcacttttttcacaaatatcactatttgtgaacattttacttttttttgtgaacataccaatgcttcagttttttttagtaatcaactatattatgagaaagagaaaaattttgataaaacacaaatttcatgttttcctactctaattggcctttacataaaaatacaggtaaaatttatttgtgcttttttgctatttctgttttgctattctctgtttgtctatgtcttctccacatagacacaattggggaattttgtacactcttgtgccaactgctttgatagtaacaaaatgtatttctcgaactgctaggtataaaactcaagtatccacaatttaaattctttttccctcacttctactatgtttccagtctcaatagaaatcgagccaatccagaaatacaagcattattctaatactt

SEQ ID NO: 717475 - DNA, 648 bp, Homo sapiens
ttagttcatatcccaacctcctaccttattcattccatggtttttaacccatccaagcttcagttttattctggtaaagcacggttaaaaatttttttacaggatcttggtaaactcaaatgaagtactatgcataaagcaattaatgtagtgacaataaaatcagtataatattccaaattaaattttattcgttttttttttttttttttttttgagacaaggtctcactctgtcacccaggttaraatgtagtggtaagattgcagctcactacatttaccttaacctcccaggctctggtgatcctcccgcctcatcctcctgagtagctgggaccacagccacacaccaccacaccaggccaatttttgtattttcttgtagagaaggggttttgccatgttgcccaggctggtctcaaactcctgggctcaagtgatcctcccgctttggcctatcaaagtgctgggattacagatgtgaacccccgtgtctggcccttatttgggtcatttgattttacttgggataatatttgacacaccttggttactgagttaataacaacacacaacaatatcctatgagtgtcactctatgctgggcccatggctcagtgattaacatggacatttttcattatgc

SEQ ID NO: 717476 - DNA, 648 bp, Homo sapiens
ttagttcatatcccaacctcctaccttattcattccatggtttttaacccatccaagcttcagttttattctggtaaagcacggttaaaaatttttttacaggatcttggtaaactcaaatgaagtactatgcataaagcaattaatgtagtgacaataaaatcagtataatattccaaattaaattttattcgttttttttttttttttttttttgagacaaggtctcactctgtcacccaggttagaatgtagtggtaagattgcagctcactacatttaccttaacctcccaggctctggtgatcctcccgcctcatcctcctgaktagctgggaccacagccacacaccaccacaccaggccaatttttgtattttcttgtagagaaggggttttgccatgttgcccaggctggtctcaaactcctgggctcaagtgatcctcccgctttggcctatcaaagtgctgggattacagatgtgaacccccgtgtctggcccttatttgggtcatttgattttacttgggataatatttgacacaccttggttactgagttaataacaacacacaacaatatcctatgagtgtcactctatgctgggcccatggctcagtgattaacatggacatttttcattatgc

SEQ ID NO: 717477 - DNA, 648 bp, Homo sapiens
ttagttcatatcccaacctcctaccttattcattccatggtttttaacccatccaagcttcagttttattctggtaaagcacggttaaaaatttttttacaggatcttggtaaactcaaatgaagtactatgcataaagcaattaatgtagtgacaataaaatcagtataatattccaaattaaattttattcgttttttttttttttttttttttgagacaaggtctcactctgtcacccaggttagaatgtagtggtaagattgcagctcactacatttaccttaacctcccaggctctggtgatcctcccgcctcatcctcctgagtagctgggaccacagccacacaccaccacaccargccaatttttgtattttcttgtagagaaggggttttgccatgttgcccaggctggtctcaaactcctgggctcaagtgatcctcccgctttggcctatcaaagtgctgggattacagatgtgaacccccgtgtctggcccttatttgggtcatttgattttacttgggataatatttgacacaccttggttactgagttaataacaacacacaacaatatcctatgagtgtcactctatgctgggcccatggctcagtgattaacatggacatttttcattatgc

SEQ ID NO: 717478 - DNA, 648 bp, Homo sapiens
ttagttcatatcccaacctcctaccttattcattccatggtttttaacccatccaagcttcagttttattctggtaaagcacggttaaaaatttttttacaggatcttggtaaactcaaatgaagtactatgcataaagcaattaatgtagtgacaataaaatcagtataatattccaaattaaattttattcgttttttttttttttttttttttgagacaaggtctcactctgtcacccaggttagaatgtagtggtaagattgcagctcactacatttaccttaacctcccaggctctggtgatcctcccgcctcatcctcctgagtagctgggaccacagccacacaccaccacaccaggccaatttttgtattttcttgtaragaaggggttttgccatgttgcccaggctggtctcaaactcctgggctcaagtgatcctcccgctttggcctatcaaagtgctgggattacagatgtgaacccccgtgtctggcccttatttgggtcatttgattttacttgggataatatttgacacaccttggttactgagttaataacaacacacaacaatatcctatgagtgtcactctatgctgggcccatggctcagtgattaacatggacatttttcattatgc

SEQ ID NO: 717479 - DNA, 648 bp, Homo sapiens
ttagttcatatcccaacctcctaccttattcattccatggtttttaacccatccaagcttcagttttattctggtaaagcacggttaaaaatttttttacaggatcttggtaaactcaaatgaagtactatgcataaagcaattaatgtagtgacaataaaatcagtataatattccaaattaaattttattcgttttttttttttttttttttttgagacaaggtctcactctgtcacccaggttagaatgtagtggtaagattgcagctcactacatttaccttaacctcccaggctctggtgatcctcccgcctcatcctcctgagtagctgggaccacagccacacaccaccacaccaggccaatttttgtattttcttgtagagaaggggttttgccatgttgcccaggctggtctcaaactcctgggctcaagtgatcctcccgctttggcctatcaaagtgctgggattacagatgtgaacccccgtgtctggcccttatttgggtcatttgattttacttgggataatatttgacacaccttggttactgagttaataacaacacacaacaatatcctatgagtgtcactctatgctgggcccatggctcastgattaacatggacatttttcattatgc

SEQ ID NO: 717480 - DNA, 925 bp, Homo sapiens
gtcttatttttcttagtaaatttttaagtttgtaattcttgaaatggtcaccaaattagcttatcatctatttcttcttgaataagttatttagtaaattagtggataaatggaaatattggcttttttttacaataaaatataacatttagaatatgaatctattatggatatgaatcacttcctcagaaacatggatgctacccagctttcctgccaatcctgggcttatgcacacacagtcaattcaaccctgccttctctagatttctcaagtggtgagaaagagtgaggcagaactacctctatgactcagcccactgcctacatgtcctaatacaatcctaaccagtcaggtttgagagcactcacatatattcagccaccatcattcctacgtgttttcctctccatcatatggatggctagagtatttcctagggtaagagtaggaatatagaaacactcagtattctgtatagaaagaaagatttcttggcctcctttaaagtgtaaatgtattcattctgattctcaattttgattatcatagcttccattatcagaataatttaggaatttgatgtttcagtaagaattgagaaagagtctttgcagatagatgtgttgactaatgtaatgrcagaaatgtttacaggtctggttggatcggggcgttgtcaagacctgcttgccacagctgcggcttcctgacaagatttttcttcccagcaggctgcctgaaagaccaggctaaactcatagctacttggtacttctgcagctatagcaagagatttgggccaatgacacgctatgttgcaaggctttctagattgtttgaagtataattttttctcccaccttctttgccttactctgacctgtgaatgtctttgttcttactgacctgtaaatgtctttg

SEQ ID NO: 717481 - DNA, 2100 bp, Homo sapiens
caattccgatgttctcatatttaaatgttaacagtcttccttcctttttcccatctacggcagtagagagtttagagaagagagaaacaaccactgacaactttttagtctttttggtgttttctttatgtgacatagttattatctaaatgtagagagatttttaatccttaaaatgctttgctctttctaccatattacatattactgtctttgtatgaaaagtatagatataataaaattgtaggatttaattaataccaaatcatatcttcttacctccataaaagaagaaaatagaaacttcagatatattggatattaagctattataagaggagcaaaaactgagagtaaaatgcagaaactaataaaagaaaataaaatacaaatgtagggatcccacccctcccccagtgtgttttgatagtaataaagtaatggaggagagataggagatttgttaacgtaaagattgtccacacaagaaagcttttttcatttacatgtatttatttaattactaaggagagaaaggaagagaactaacatttatttggcatctggcattttctgggcactggctcaatgatttcacatttttcttactctatacaacatcatgatgtggtaattattatccccattttatatacaaggaaacaggttcagaaacactaaagggtttgctcaagtttgcatatctaataaagattatgagcaggatttccactcccactttggatctgaagcttataatattcgttccctataggtaaaagagattcatggcaagaaggtggctactgatgcatagaagccagagaaaacattaacccataaattggttcatttaaataactatgtattaaaaattgtgaaaagaaatactagttgataaaatgagactgaatcacaaagaagatatgaaatatccaaacaaacagaagacacataatatgtaggatggaaatgtacataaaatatatcagggtagttatgtcaaaaaataagcagcaggagctttataytattatacagcttaattcttagtattgggggattacatttatttttgtttgcttgttttttcattcacatgccttgaacgttaaattggatagtagttgaaacatggaaatatgtaaagtggtcacatatagactaattatttcagttattctaatgattagacatggatcttttagcacaatctattttgagacggtcctataattggtttatggagtcacatggatattcaagagtactactttaaaaacattatagaaaatgttcacttcccagaagatggagttctgaatgcatttttaaaaaatatctcttactatgtacagttaaaaaccctacacattatatgtaaacaaacgtaagaagatcctcaaaggtagagagaagaaggcgaccaattaaggaccctgggacccaagaaacaacacagtagtaagtccctaagttttgtttttggctcgtatatcattgacttagagctgaaaaaaaaaaaaaaactggtaagccaaaaatgccaatgggcatagacaaaaaatacatatatatatatatatatatttttccaatatatatatggagattggatatattatatatatccaatcaaaatccttctttgtctagcccaaggactgtgaaagaaatagtctagaaagatataaaactttaaacaataatggttttactccagacaaacacatagaaaaaaaaaaaaaactgtggcccgaccctactcacagtagcaaaggttgagtggggagcctagacttccattttcaactggcttgatgaggcagcccaaagccttcctccctgaaggtggtatcagaaagactaagtagaaagctagcactttcatccctacccagcagtaatgaggagaccctactcctcactgctggagtggtgccagaggaagcctcacacagtcaggacttccatcaacacccataaataacaagcactttttctctccaccctacccacctagagtcagatgttagtggaggctgtgcagtgagcagtaatgaggagtattcccacacatgtcagctgtcactgaagatt

SEQ ID NO: 717482 - DNA, 2291 bp, Homo sapiens
cccctagacttgcagacggccaccttctcactgtgtcttcacattgtctttcctctgtgcatgtacactctgagtgtctctctctttctcttcttttaaggacaaaagttatactgaattagagccctacccttataaccttatttaaccttaataacctccttaaagatcctgtctccagatatggtcacattgagagttgggcttcaatatataaatttggagtggacacaacacagtctataacagcatttaataacacggaagccacaagcatacagacacacatacaaagttattgctttcttattgttcaaaaagtaaaacacaatattttcattttaagagtgctaaagcagtcatagtacagttaggaaaacagaaacgactctaggtatttcaagcaaggagaatttaatatatggatctgcaccatatgtgaaagaagagctgagaagttaaaaagaacacagggagatattctggggattagaaacaacacaaaacagccacaaccatctggaatgggaaggatgcaagaggaggtagttactataactgtatagcaggattcagaatcacacctctgtagagaccacctgacagaagctaggatatcaaagaatgggactctctggtaggggaatatattggtttatgttactgaagaggctaaagataaacccgttttcattgtggctttatttttgttaaagcaatgtgatcacaccctggtttatccttctcaacttttctttcttggttttgcttatgattcttaggtcagctgtaaactcttggccctaaaaggcagccagaggctcctgcatgctctcttgttcttatactacatgggaaaagaaatagctttcatcatccattcatttaaagaaaaataggacctcatccagataaaaacagctgaagacaggtgcccaatcttgagctcatcactgtaataaaagtgttgagatcacaatgagaggctcaggacaatctggcctaatcctgaggcttgaagtaagtcaatttcactcaaaatgcatgtctgccattcaatagacgatgagtgaaatggaaactaggcagtaataaatgatgcatacattataatttctttgtgaattcaaccctaaaactctggacaaaattaattttcctccgtaatatcttatttgttcctgaatgagaataaacggatgaaagttttattaagagaataaatgaatgaactawtaaatcagttaatcattaaattaatatgagtatgtttaatggtgtagaaaaatagatttggggaagctttcaggattaatagaactttggtaaggtaacaacccataaagtattactatgaggatctttgtgccattatcaatcacattaataattattataataacattaactacaagttattggtaattattagctaccaggtggttattagctacctactatgtgtttatatatatagattatctacatttcttcatatatatataacatctacattttatcatctaaattatctacattcattatccacaagcacagagatgttcagtaaccagcccacgaatacccagccagaaggtgaaagagctggaaattgagcccacacatttcaacaccacaggactattgttgacatctatgacaagttatctgttgtgaaactagtaaaataattgaataaaagttattcttgattttaaaaaagagtctggccttgtatttcatttatcatatcctatggccaaattgtcacttcctaatatcagccaaatatttgaaataaactttttgcatgattgaaaatgttctctatgctaataatgttgtgtagtttctcttcttgaaatctcacattagaattcagttttgctgctttacccacagaatgaagtgtaaatgcactactctggtatttaaaatctccacaatttgcccccaatctacacttttaacgttagctctcatcattctcaatcgcacaccttagatttcagtctcaccttccagtaaatagacccttttccatgatgttttatacctcttccagacaaattccaactcctagaattttcttaattctatgagctgaatataatatggggatttttttcagaagttctaaagatctttactttcttaaatactttttaacaggaaactttttgaccattattgaatgtatggcattccttgatgaaatgtaggtttctaggctgccaagaccatagcttacttaattgtatataaccttccataccaactcagagctcaaa

SEQ ID NO: 717483 - DNA, 2291 bp, Homo sapiens
cccctagacttgcagacggccaccttctcactgtgtcttcacattgtctttcctctgtgcatgtacactctgagtgtctctctctttctcttcttttaaggacaaaagttatactgaattagagccctacccttataaccttatttaaccttaataacctccttaaagatcctgtctccagatatggtcacattgagagttgggcttcaatatataaatttggagtggacacaacacagtctataacagcatttaataacacggaagccacaagcatacagacacacatacaaagttattgctttcttattgttcaaaaagtaaaacacaatattttcattttaagagtgctaaagcagtcatagtacagttaggaaaacagaaacgactctaggtatttcaagcaaggagaatttaatatatggatctgcaccatatgtgaaagaagagctgagaagttaaaaagaacacagggagatattctggggattagaaacaacacaaaacagccacaaccatctggaatgggaaggatgcaagaggaggtagttactataactgtatagcaggattcagaatcacacctctgtagagaccacctgacagaagctaggatatcaaagaatgggactctctggtaggggaatatattggtttatgttactgaagaggctaaagataaacccgttttcattgtggctttatttttgttaaagcaatgtgatcacaccctggtttatccttctcaacttttctttcttggttttgcttatgattcttaggtcagctgtaaactcttggccctaaaaggcagccagaggctcctgcatgctctcttgttcttatactacatgggaaaagaaatagctttcatcatccattcatttaaagaaaaataggacctcatccagataaaaacagctgaagacaggtgcccaatcttgagctcatcactgtaataaaagtgttgagatcacaatgagaggctcaggacaatctggcctaatcctgaggcttgaagtaagtcaatttcactcaaaatgcatgtctgccattcaatagacgatgagtgaaatggaaactaggcagtaataaatgatgcatacattataatttctttgtgaattcaaccctaaaactctggacaaaattaattttcctccgtaatatcttatttgttcctgaatgagaataaacggatgaaagttttattaagagaataaatgaatgaactattaaatcagttaatcattaaattaatatgagtatgtttaatggtgtagaaaaatagatttggggaagctttcaggattaatagaactttggtaaggtaacaacccataaagtattactatgaggatctttgtgccattatcaatcacattaataattattataataacattaactacaagttattggtaattattagctaccaggtggttattagctacctactatgtgtttatatatatagattatctacatttcttcatatatatataacatctacattttatcatctaaattatctacattcattatccacaagcacagagatgttcagtaaccagcccacgaatacccagccagaaggtgaaagagctggaaattgagcccacacatttcaacaccacaggactattgttgacatctatgacaagttatctgttgtgaaactagtaaaataattgaataaaagttattcttgattttaaaaaaragtctggccttgtatttcatttatcatatcctatggccaaattgtcacttcctaatatcagccaaatatttgaaataaactttttgcatgattgaaaatgttctctatgctaataatgttgtgtagtttctcttcttgaaatctcacattagaattcagttttgctgctttacccacagaatgaagtgtaaatgcactactctggtatttaaaatctccacaatttgcccccaatctacacttttaacgttagctctcatcattctcaatcgcacaccttagatttcagtctcaccttccagtaaatagacccttttccatgatgttttatacctcttccagacaaattccaactcctagaattttcttaattctatgagctgaatataatatggggatttttttcagaagttctaaagatctttactttcttaaatactttttaacaggaaactttttgaccattattgaatgtatggcattccttgatgaaatgtaggtttctaggctgccaagaccatagcttacttaattgtatataaccttccataccaactcagagctcaaa

SEQ ID NO: 717484 - DNA, 2291 bp, Homo sapiens
cccctagacttgcagacggccaccttctcactgtgtcttcacattgtctttcctctgtgcatgtacactctgagtgtctctctctttctcttcttttaaggacaaaagttatactgaattagagccctacccttataaccttatttaaccttaataacctccttaaagatcctgtctccagatatggtcacattgagagttgggcttcaatatataaatttggagtggacacaacacagtctataacagcatttaataacacggaagccacaagcatacagacacacatacaaagttattgctttcttattgttcaaaaagtaaaacacaatattttcattttaagagtgctaaagcagtcatagtacagttaggaaaacagaaacgactctaggtatttcaagcaaggagaatttaatatatggatctgcaccatatgtgaaagaagagctgagaagttaaaaagaacacagggagatattctggggattagaaacaacacaaaacagccacaaccatctggaatgggaaggatgcaagaggaggtagttactataactgtatagcaggattcagaatcacacctctgtagagaccacctgacagaagctaggatatcaaagaatgggactctctggtaggggaatatattggtttatgttactgaagaggctaaagataaacccgttttcattgtggctttatttttgttaaagcaatgtgatcacaccctggtttatccttctcaacttttctttcttggttttgcttatgattcttaggtcagctgtaaactcttggccctaaaaggcagccagaggctcctgcatgctctcttgttcttatactacatgggaaaagaaatagctttcatcatccattcatttaaagaaaaataggacctcatccagataaaaacagctgaagacaggtgcccaatcttgagctcatcactgtaataaaagtgttgagatcacaatgagaggctcaggacaatctggcctaatcctgaggcttgaagtaagtcaatttcactcaaaatgcatgtctgccattcaatagacgatgagtgaaatggaaactaggcagtaataaatgatgcatacattataatttctttgtgaattcaaccctaaaactctggacaaaattaattttcctccgtaatatcttatttgttcctgaatgagaataaacggatgaaagttttattaagagaataaatgaatgaactattaaatcagttaatcattaaattaatatgagtatgtttaatggtgtagaaaaatagatttggggaagctttcaggattaatagaactttggtaaggtaacaacccataaagtattactatgaggatctttgtgccattatcaatcacattaataattattataataacattaactacaagttattggtaattattagctaccaggtggttattagctacctactatgtgtttatatatatagattatctacatttcttcatatatatataacatctacattttatcatctaaattatctacattcattatccacaagcacagagatgttcagtaaccagcccacgaatacccagccagaaggtgaaagagctggaaattgagcccacacatttcaacaccacaggactattgttgacatctatgacaagttatctgttgtgaaactagtaaaataattgaataaaagttattcttgattttaaaaaagagtctggccttgtatttcatttatcatatcctatggccaaattgtcacttcctaatatcagccaaatatttgaaataaactttttgcatgattgaaaatgttctctatgctaataatgttgtgtagtttctcttcttgaaatctcacattagaattcagttttgctgctttacccacagaatgaagtgtaaatgcactactctggtatttaaaatctccacaatttgcccccartctacacttttaacgttagctctcatcattctcaatcgcacaccttagatttcagtctcaccttccagtaaatagacccttttccatgatgttttatacctcttccagacaaattccaactcctagaattttcttaattctatgagctgaatataatatggggatttttttcagaagttctaaagatctttactttcttaaatactttttaacaggaaactttttgaccattattgaatgtatggcattccttgatgaaatgtaggtttctaggctgccaagaccatagcttacttaattgtatataaccttccataccaactcagagctcaaa

SEQ ID NO: 717485 - DNA, 2291 bp, Homo sapiens
cccctagacttgcagacggccaccttctcactgtgtcttcacattgtctttcctctgtgcatgtacactctgagtgtctctctctttctcttcttttaaggacaaaagttatactgaattagagccctacccttataaccttatttaaccttaataacctccttaaagatcctgtctccagatatggtcacattgagagttgggcttcaatatataaatttggagtggacacaacacagtctataacagcatttaataacacggaagccacaagcatacagacacacatacaaagttattgctttcttattgttcaaaaagtaaaacacaatattttcattttaagagtgctaaagcagtcatagtacagttaggaaaacagaaacgactctaggtatttcaagcaaggagaatttaatatatggatctgcaccatatgtgaaagaagagctgagaagttaaaaagaacacagggagatattctggggattagaaacaacacaaaacagccacaaccatctggaatgggaaggatgcaagaggaggtagttactataactgtatagcaggattcagaatcacacctctgtagagaccacctgacagaagctaggatatcaaagaatgggactctctggtaggggaatatattggtttatgttactgaagaggctaaagataaacccgttttcattgtggctttatttttgttaaagcaatgtgatcacaccctggtttatccttctcaacttttctttcttggttttgcttatgattcttaggtcagctgtaaactcttggccctaaaaggcagccagaggctcctgcatgctctcttgttcttatactacatgggaaaagaaatagctttcatcatccattcatttaaagaaaaataggacctcatccagataaaaacagctgaagacaggtgcccaatcttgagctcatcactgtaataaaagtgttgagatcacaatgagaggctcaggacaatctggcctaatcctgaggcttgaagtaagtcaatttcactcaaaatgcatgtctgccattcaatagacgatgagtgaaatggaaactaggcagtaataaatgatgcatacattataatttctttgtgaattcaaccctaaaactctggacaaaattaattttcctccgtaatatcttatttgttcctgaatgagaataaacggatgaaagttttattaagagaataaatgaatgaactattaaatcagttaatcattaaattaatatgagtatgtttaatggtgtagaaaaatagatttggggaagctttcaggattaatagaactttggtaaggtaacaacccataaagtattactatgaggatctttgtgccattatcaatcacattaataattattataataacattaactacaagttattggtaattattagctaccaggtggttattagctacctactatgtgtttatatatatagattatctacatttcttcatatatatataacatctacattttatcatctaaattatctacattcattatccacaagcacagagatgttcagtaaccagcccacgaatacccagccagaaggtgaaagagctggaaattgagcccacacatttcaacaccacaggactattgttgacatctatgacaagttatctgttgtgaaactagtaaaataattgaataaaagttattcttgattttaaaaaagagtctggccttgtatttcatttatcatatcctatggccaaattgtcacttcctaatatcagccaaatatttgaaataaactttttgcatgattgaaaatgttctctatgctaataatgttgtgtagtttctcttcttgaaatctcacattagaattcagttttgctgctttacccacagaatgaagtgtaaatgcactactctggtatttaaaatctccacaatttgcccccaatctacacttttaacrttagctctcatcattctcaatcgcacaccttagatttcagtctcaccttccagtaaatagacccttttccatgatgttttatacctcttccagacaaattccaactcctagaattttcttaattctatgagctgaatataatatggggatttttttcagaagttctaaagatctttactttcttaaatactttttaacaggaaactttttgaccattattgaatgtatggcattccttgatgaaatgtaggtttctaggctgccaagaccatagcttacttaattgtatataaccttccataccaactcagagctcaaa

SEQ ID NO: 717486 - DNA, 1379 bp, Homo sapiens
aaaaaaaaaagttcatgtactttaagcaacacttctgcttctaggtatctattatttttaaatacaacttacttctacatttatgaaaatatttataattacaagatattctctggaacattgcttgtaatagcaaaccccctccccraatgtactgtttagtggaggaaagattaaataatttgccatatatccatataatggcagaccagaaattcagatacacccatatgcaataacatggaaagatttccgaaacatatgtatcataaataaaactaaccaaaagcaatgtatttacgttgttaatttatattttatatcatttatattaatattttacatttatatttttaaacatatgctgcttatctatatacatacagatgtttgtataacatatacatacagatctgtatgtataacatatacgtacacgtatatacatataaatacagagaaaggaggttccaaggaacatacactgtccacagaggctgcctgggaagagaagtcagagttggactagcagcaatgggggacttttatgccttgtcttatgcgcatctacactgtttacgtcttaaacgacatattcaggtgttaaaacggcaaaaccacgattgcttttgaaccaacataatatttatggaaattttttttgttcaattcagaagtcttcacttgatcagtgtttctcccagcatgttccataaaacactggtcctggtcctctgagctgcttcatgcaaaatgggttctgagatcaaacacattttttcttcatattgtcatgtttctctaaagggaatgcacttcccaatcaatatcaaaataaatttttcagctgccaagtaagagtaggttgtgaaataacagtcattgacttgtcaaaggtaaccaaacatttctgagctgatcatagacatttcaaagctaggaagaactggtgtgactgatttcatgagttctgaaggttatctgtcaggttagatatcaaaaggttctagctgcctttgaagggaagctatttaacttccagcaatatgtaattaaattaaagaggaaaatgaaactaaacatgtacctaaatatcaaatgtagagcaaaatccaagaattcctcaatgtgaatctaattgccacttctaaggagggctcaagcactagcaaaaatactaaaaaaaacagcatgttgtcatgatgtcttacattacaactaccagctgtaagtgattcagaactttaggtgctgtgtgtggaacaaaaaaagaaacgtagcctcaaaccaaccaacaacaacaacaaaaaaatgtggcatccaatgatacatgtacactattgtcagtttaaaaacgtgtgtatacattgaatatagca

SEQ ID NO: 717487 - DNA, 620 bp, Homo sapiens
ccaaggaaagactcttccttttgaaatgcaggtaatttgtgatgtttgagaagcaaagtgtattaataaacatgtgcgacctaaaacctgcagagatcacatggtggaatgaaaagctagcactttgctgctgatgcctgggtttcggcccacattctgccactaactggctttactgagcttcagcagctcaatgctttaagcyagtgcagttggttgaaaagctttttatggatctactgtttaatgcatttaattgggctttttgattttataaaggtggaatttgacagtaaaacccatagtgaaggttgattgtgtagcgccttctattcatcaggaaaactttttttgcattctgggtttgtcagccattagccaaatgaaaatcatggaagagacagaagattttaaatgagagaaaaggaagggtgagtcaaaaagtaacactagactgggctcttgcttttagcaggtaatccccaataatccacataaagtaagaataaaacaccacagttattaaatgccctgaggttcttgcttttaatcccccttttcttaaagagttatctgttccatatgtacaaggcacttcccatcctcccctgactctctct

SEQ ID NO: 717488 - DNA, 1427 bp, Homo sapiens
gctaatgttttgtattttttagtagagatggggtttcaccatgttagccaggatggtcttgatctcctgacctcatgatctgcccaccttggcctcccaaagtgctgagattacaggcataagccaccacgcccagccaatatttacatttttttagtaggggtggggttttgccatgttggccaggctggtcttgaactcatgacctcaagtgatctgcctgcctcggcctcccaaagcactgggattacagatgtgacccactgtgcctggcctattcactcattctataagcatstattttttagaaaaattattaagactacataacattgaacagcaaaataaataatagtattacattataatctaaataaaattaatatccatgtgaccatacttgtataaataactgaataagttaataaaatggagaaaggacaacttcttataaaagaattccagttaataaagtacaagaaatgaaaatactagaaaatcacaattagaacactacagtagtaactgccacaagcacgatccaccaatggatactgaaattattggttgaaagtttaagaacaagagatttacaatgtcatgaaagacaagaaaagattgaagaaacgtcacagatcagagtagattaaggatatatatgacgactaattgcagtatagatccagtattagatcctagaatagaaaaatgacattaatgggaaaaaaatgttaaaatccaaatagtctgtctatagtattataccaatattaatttcttagttttgataattgtactatggttttgtaagataagatggtaacattaaaggaagctatgtgaaggttatataggaactctacttattttctaattattttgcatgccttttatgcttgaaacacacctgacaaaaatggttaaggacattttttttttttttgagacggagtttcactctttttgcccaggctggagtgcaatggtgtgatctcggctcaccgcagccttcgcctcccaggttcaagcgattcttctgcctcagcctccccagtaggtgggattacaggcatgcgtcaccaccctgactaattttgtatttttagtagagacagggtttctccatgttggtcaggctggtcttgagctcccgacctcaggtgttccacccacctcagcctcccaaagtgctgggattaaggtgtgagccaccgcgcccggccaacatttttttttttttttctgagacggagttttgctcttgttgcccaggctggagtgcaatggcgcgatctcagctcactgcaacctccgccacttgggttcaagtgattctcctgcttcagcctctcaagtagctgggattacaagcgcatgccaccttgtccagctaatttttttgtatttttagtagagatggggttctc

SEQ ID NO: 717489 - DNA, 587 bp, Homo sapiens
attcagtcctgaccctttagagattcatttggtgaaagtgatccacatagaaaacccttactaaatcctgtgtatagctaggccaaaaagcagaggcagattatctgaggtaaacaattaaaaaaaaactactagctgggggctgggcacggtggctcatgcctgtaatcccagcactttgggaggccaaggtggatggatcacctgaggtcgggagttcgagaccagcctgaccaacatggagaaaccctgtctctactaaaaatacaaaaactagccaggtgtggtgacacatgcctgtaatcccagctactagggaggctgaggcaggagaatcacttgaacccgsgaggtggaggttgcagtgagccgagaccgtgccattgcactccagcctgggcaacgggagcaaaactccgtctcgaaaaaaaaaaaaaaaaacaactactggccgggtgcagtggcttatgcctttgtactcccagtactttgggagactgaggcgggaggattactcgagcccaggagtttgagaccagcctgggcaacataatgggaccctgtctctacaaaaataaaaataaaaa

SEQ ID NO: 717490 - DNA, 645 bp, Homo sapiens
tctttttttgagacagagtcttgcactgttgcccaggctgcagtgcaacggtgtgatcttggttcactgcaacctccgcctctcgggttcacacgattctcctgcctctgcctcctgagtagctgggattacaggtgcacgccaccacacccagctaatttttttgtatttttagtagagatggggtttcactatgttggccagactgatctcaaactcctgacctcatgatctgcctgcctcagcttcccaaagtgatgggaacacagacrtgatccaccacgcccagctattatttttcttaataataacagaggctatttaaatattgttagaggctatttaaaagcccccttagtagattaagggtttgaacaatcgttaacagtgctgagtgctcattgcaatgtctactaaactttaataaaaatgtttttgtttttgtttgcttgtttttcctttcttccttactcttttttgtttgtttgtttgtttgagtatgatgtctgtgggttttctccaactttgcagctcctaatactgtctttgggagagtaggagtgaaacccggcaaaggaaatagcttcacgctgctccttctgtgcgtggagtagatgagaaaatgccctgccatctggtgcctca

SEQ ID NO: 717491 - DNA, 645 bp, Homo sapiens
tctttttttgagacagagtcttgcactgttgcccaggctgcagtgcaacggtgtgatcttggttcactgcaacctccgcctctcgggttcacacgattctcctgcctctgcctcctgagtagctgggattacaggtgcacgccaccacacccagctaatttttttgtatttttagtagagatggggtttcactatgttggccagactgatctcaaactcctgacctcatgatctgcctgcctcagcttcccaaagtgatgggaacacagacgtgatccaccacgcccagctattatttttcttaataataacagaggctatttaaatattgttagaggctatttaaaagcccccttagtagattaagggtttgaacaatcgttaacagtgctgagtgctcattgcaatgtctactaaactttaataaaaatktttttgtttttgtttgcttgtttttcctttcttccttactcttttttgtttgtttgtttgtttgagtatgatgtctgtgggttttctccaactttgcagctcctaatactgtctttgggagagtaggagtgaaacccggcaaaggaaatagcttcacgctgctccttctgtgcgtggagtagatgagaaaatgccctgccatctggtgcctca

SEQ ID NO: 717492 - DNA, 645 bp, Homo sapiens
tctttttttgagacagagtcttgcactgttgcccaggctgcagtgcaacggtgtgatcttggttcactgcaacctccgcctctcgggttcacacgattctcctgcctctgcctcctgagtagctgggattacaggtgcacgccaccacacccagctaatttttttgtatttttagtagagatggggtttcactatgttggccagactgatctcaaactcctgacctcatgatctgcctgcctcagcttcccaaagtgatgggaacacagacgtgatccaccacgcccagctattatttttcttaataataacagaggctatttaaatattgttagaggctatttaaaagcccccttagtagattaagggtttgaacaatcgttaacagtgctgagtgctcattgcaatgtctactaaactttaataaaaatgtttttgtttttgtttgcttgtttttcctttcttccttactcttttttgtttgtttgtttgtttgagtatgatgtctgtgggttttctccaactttgcagctcctaatactgtctttgggagagtaggagtgaaacccggcaaaggaaatagcttcaygctgctccttctgtgcgtggagtagatgagaaaatgccctgccatctggtgcctca

SEQ ID NO: 717493 - DNA, 1363 bp, Homo sapiens
acaggcacacaccaccatgcccagctaatttttttgtatttttagtagagacggggtttcaccatgatggccaagctggttttgaactcctgacctcaagtgatccgcccgcctcggcctcccaaagtgctaggattacaggcgtgagccaccgtgcccggcctaattttttgtattttttagtggcgacggggtttcaccatgttagccaggatggtctcgatcttctgacctcgtgatccacctgccttggcctcccaaagtgctgggattacaggcgtgagcgaccgcacctggccaatgaactttttaaattgagacagggtttcactctgtcatccaggctggagtatagtggcaagatcatcactccctgcagcctcaacctcttggtctcaagtgatcttccaacctcagcctcccaaagttctggggttacaggtgtgaggcattgtgcccagccataacttttaaaagattttcttcccttttatttagacatcaaggtaaaagtaacttttttttttttttttttttgagtcagaggcaggctggaggagtgcagtggcaccatctcggctcactgcaacctccacctcctgggctcaagccattctcctgtctcagcctcctgagtagctgggattacaggtgcccaccaccacacctggctagtttttgtatttttagtagagacagggtttcgccatgttggccaggctgaccttgcactcatgacctcaggtgattcacctgtctcagcctcccaaagtgctggaattacaggcataagccactgtgcccagccaaaggtaacatttttaatgtaacaatatatggtcattctttgctcttatgacacaatcctacaaaaggcgatcactaagcttaagcactaagcctaaaactgaataatataaacactgatgtagggaaagttgttcctcagacgactccattattgatacagacatggaaacagtaaacagaaatgtaacatcaaagttcttatttacttgaacttttttttttttttgagacggagtctccctctgtcgcccaggctagagtgcagtggcgtgatcttggctcactgcaagctccgcctcctgggttcarggccattctcctgcctcagcctcccaaggagctgggactacaggctcccgccaccacgcccggctaattttttgtattttttgtagagacggggtttcaccgtgttaaccaggatggtctcgatctcctgacttcgtgatctgcctgcctcagcctcccaaagtgctgggattacaggcgtgagccaccactcctggcctgaaattttctataataaaaacaaacaagatcatttattatctca

SEQ ID NO: 717494 - DNA, 1363 bp, Homo sapiens
acaggcacacaccaccatgcccagctaatttttttgtatttttagtagagacggggtttcaccatgatggccaagctggttttgaactcctgacctcaagtgatccgcccgcctcggcctcccaaagtgctaggattacaggcgtgagccaccgtgcccggcctaattttttgtattttttagtggcgacggggtttcaccatgttagccaggatggtctcgatcttctgacctcgtgatccacctgccttggcctcccaaagtgctgggattacaggcgtgagcgaccgcacctggccaatgaactttttaaattgagacagggtttcactctgtcatccaggctggagtatagtggcaagatcatcactccctgcagcctcaacctcttggtctcaagtgatcttccaacctcagcctcccaaagttctggggttacaggtgtgaggcattgtgcccagccataacttttaaaagattttcttcccttttatttagacatcaaggtaaaagtaacttttttttttttttttttttgagtcagaggcaggctggaggagtgcagtggcaccatctcggctcactgcaacctccacctcctgggctcaagccattctcctgtctcagcctcctgagtagctgggattacaggtgcccaccaccacacctggctagtttttgtatttttagtagagacagggtttcgccatgttggccaggctgaccttgcactcatgacctcaggtgattcacctgtctcagcctcccaaagtgctggaattacaggcataagccactgtgcccagccaaaggtaacatttttaatgtaacaatatatggtcattctttgctcttatgacacaatcctacaaaaggcgatcactaagcttaagcactaagcctaaaactgaataatataaacactgatgtagggaaagttgttcctcagacgactccattattgatacagacatggaaacagtaaacagaaatgtaacatcaaagttcttatttacttgaacttttttttttttttgagacggagtctccctctgtcgcccaggctagagtgcagtggcgtgatcttggctcactgcaagctccgcctcctgggttcaaggccattctcctgcctcagcctcccaaggagctgggactacaggctcccgccaccacgcccggctaattttttgtattttttgtagagacggggtttcaccrtgttaaccaggatggtctcgatctcctgacttcgtgatctgcctgcctcagcctcccaaagtgctgggattacaggcgtgagccaccactcctggcctgaaattttctataataaaaacaaacaagatcatttattatctca

SEQ ID NO: 717495 - DNA, 1389 bp, Homo sapiens
aaaaagctcgagcggaagcatctttcagagcccggaagccgcctgcacagacccctcctcggccctggtctctcacgcacccgccgagtccgtcatcgcgcactcaggaatgcgaggccacaaccataagctaaccctttcgcccagaatagcaccgtccacacaagacccagtctctcagccgacgaaatgggtcgacgcctacaacgcctctaggccacgcctcgaaccctgccccccctggacccggaaaagcgcccagaactacgacamccgcggggcctacagctcccagcagcctccgagacacgggcttccggtaccgttctccctagtccccgctgacagggacacgtcctgggcctacatggggcaacggggcagtgcggcaggagtttccacgcctgccccacctgaaggtatttctccggacctcgcgggctggggtagacgttccgctgaggccacagcagacggctcccaacccctcccctctcccgttcctcgagtacaaaccctggtctgtctgggcttcccgtttgcgcgctgcacaggtttggctggaggtgcccaccgctggcacgggcccagggagtcagctccgcgctgggatctgcccagagccagtgcccgcgctgccttctcgcagcccaggccgtccttccagcgaggtggcgcaattgtagatcacgacctgagccacgctttaaattttcgaccattaccagtctacgcttgaagtgatttttcttcttgataagattaatcagacacacttgtgcacctaattccaacctcttcccccaaataagcttttgaggtattttcattttgggggcttggcctctccaactcatttataaatgctctgatctgtatttaattccctttctgtttcttaggacttctggggacttacttcgccccaagtaacttttcttaatttgaaagcatacttcatttattttctttcaattacagcgtttttttctttttcttttttttttttgagacggagtttcgctcttagtcgcccacgctagagtgcagtggagggatctcggctcactgcaacctccgcctcccgggttcaagcaattctcctgcctcagccgcagctgggattacaggcgcccaccgccaggcccagctaatttttgtatttttagtagagacagggtttcgccatcttggccaggctggtctcgaactcctcacctcaggtgatccgtccatctcggcctcccaaagtgctgggattacaggtgtgagccaccgtgcccagcccaattacagctcttaaggcttgaatttttcctgagaagcagctggggataagatttactggaggcccagcagcaccggactaagtgcctaggacatgggaca

SEQ ID NO: 717496 - DNA, 406 bp, Homo sapiens
tttcatatttctaattatgaaaattttctgacatttgtttgtacatatgtatctatatattagccaggaatcttcagagaaacagaaccagtagaatatgaaaaaatttatgaaaagagattaattataagagatttacccacacgattatagaggccaagaaatcctgtaattttctatctgcaagctggaaacccagaaaagtcagtgatgtagtttcagtccaagcccagaggcctgagaaccaaggragccaatgatttaagtcccggttcaagtccaaaagcctaaagactcacagtgctgatgtccaagagcaggagaagatagatgtgccggctcaagaagggagaacaaactcacctacatccaccttttggttctatccacaccttcaacggattgg

SEQ ID NO: 717497 - DNA, 956 bp, Homo sapiens
gtgagataagccaggcacagaaagacaaatcctgcatgctctcccttatatatggagtctacaaatactaaactcgtagaagcagagggttgaatggtggttaccaagggctgcaggaaggagaaagatgggaagatgttggctcaaagggtgcaaagtttcagttgtaagattagtaagttctggagaatatacagaatggtcactatagctaataatgttgtattgtacagttgaaatgtgctaatgaaactgcttttgcaaatgttttatcagggaaaaaatttaacagtaagctaagctaacccaatctccatattgcctttctcttaattattcctgggctattgaggggtgggagagtccaagagaatcttaaattggaaacacgtattgtttctatttgctgggaagggtgggctcataagggtgacaggacaakggtttgataagaaatatctcttcaaatcagagatgcacccaggaacccaaagtctcttgtctgtgacaggtaatgaggtagggtagaggcatgaatgacgtcagcctggatctgagccatcaggctggagttgtcaaaccagaatgaagaaaacaataaaagcttaaccttagtaattaggagggatgggggaatataattttaaaaagcatttggaattggcaacaaattctttttaaactgacaatattgaaggtacagagaatgaattggagtctgaggtcagacactgactggatggggtaattttacagagaaatgctgaaatgaatctgaatctctctagaaggcttatggcctctgcattttcctcccatcttagaagcacctgagggcaggtttctagggggagaaagttgaaaaggacaacacctatgtgtaagccctgaaggggcttgaacaaaaaggcaaaagtcatgtctaccagagatcaagaagccaggaacttggaaga

SEQ ID NO: 717498 - DNA, 643 bp, Homo sapiens
gatgctgggggccaggggcctcactttgagaaccactgttcaggcttgtcagtgccacatgggttgggtcaactggaaggagaagagctggggtggagggatgactctctgggacccctcttgctggtctctgcagaagtatcaacaggtcatgataccagggaaggaacataaataaaagggaccaagttggataaatgccagggtattagagtaaaatgtgtttcagctgcttagctttgatgtgaaaatttgaacaaataaccagagaataagggactgtttccattcctrgtttgaaaaaaattatatttaataaaagatggaattgtcactagcataattttaacgattttgaaatagaaaatatccttggaggggagggaagggttaggaaagaatgtgtgtagtttgaggaaggaacaatgcttggctgctgtcctggtgggagtcagtgaagctgcctgatgagcagtagcaggaccatgggctcgattatcagggaatgactttttagatggcggagatgcctctggggcttcaggggctgtggagataaggtgaccagtgtcttcaagctgggataaagcattgttcacatctcagcacatttcgagaaatggcgcaatgctaacacagcgca

SEQ ID NO: 717499 - DNA, 983 bp, Homo sapiens
tggccttgcagtatctacaccggagctcaagtgcattgtgcaggccaaaaagcagcaccttcacccrgtgctacgtgatcactcacaacttgtcaatcaccatattttagctgattgttatggaaacgttgattccaaacttgaaaaagggaaaaatgatgatttctggaatctgtgatattctactagaatgcaaataagtctgactgatcccatttggaagctcttgagcagtgtgacaaatatttatctaatcattcacaattggttaaataaagaggtttatagccctgtgagattagcctgcagaattgatagcttatgacttttactgcctagtaaacaagttaactccaaatttggcatttttttcattgctttgtagaggtttgccttaacttagcatcttatttccacatttgtttcccaacagaacttaaaaatcccagttactggctgggtgcggtggctcacgcctgtcatcccagcactttgggagaccaaggcgggtggatcatgaggtcaggagatcaagactatcctggctaacatggtgaaaccctgtctctactgaaaaaaacaaaaaacaaaaaacaaaaaaattagccgggcgtggtggtgggcgcctgtagtcccagctactcgggaggctgaggcaggagaatggtgtgaacccgggagtggagcttgcagtgagccgagatcgcaccactgcactccagcctgggtgacagagcgagactccatctcaaaaaaagatctcagttaccaaatgcttgtggagccagatcatttgtcttttcgctggttcccttactgatgagttaaataaagctttggaacatggcaacagatgactttgcctgagaattgagctttcgcatgctctaggagtaaaccagaaccaagatgtacatagggaattcagcaaagtgctgaatagacactgggttcctggccttctcttgactggctgacccacc

SEQ ID NO: 717500 - DNA, 983 bp, Homo sapiens
tggccttgcagtatctacaccggagctcaagtgcattgtgcaggccaaaaagcagcaccttcacccggtgctacgtgatcactcacaacttgtcaatcaccatattttagctgattgttatggaaacgttgattccaaacttgaaaaagggaaaaatgatgatttctggaatctgtgatattctactagaatgcaaataagtctgactgatcccattyggaagctcttgagcagtgtgacaaatatttatctaatcattcacaattggttaaataaagaggtttatagccctgtgagattagcctgcagaattgatagcttatgacttttactgcctagtaaacaagttaactccaaatttggcatttttttcattgctttgtagaggtttgccttaacttagcatcttatttccacatttgtttcccaacagaacttaaaaatcccagttactggctgggtgcggtggctcacgcctgtcatcccagcactttgggagaccaaggcgggtggatcatgaggtcaggagatcaagactatcctggctaacatggtgaaaccctgtctctactgaaaaaaacaaaaaacaaaaaacaaaaaaattagccgggcgtggtggtgggcgcctgtagtcccagctactcgggaggctgaggcaggagaatggtgtgaacccgggagtggagcttgcagtgagccgagatcgcaccactgcactccagcctgggtgacagagcgagactccatctcaaaaaaagatctcagttaccaaatgcttgtggagccagatcatttgtcttttcgctggttcccttactgatgagttaaataaagctttggaacatggcaacagatgactttgcctgagaattgagctttcgcatgctctaggagtaaaccagaaccaagatgtacatagggaattcagcaaagtgctgaatagacactgggttcctggccttctcttgactggctgacccacc

SEQ ID NO: 717501 - DNA, 1329 bp, Homo sapiens
gtttccctgcccacccccaacacacacacccttctcagagatgaggttaggctgaaagcatagaaagttaccttgcatattaggaaggtttgaggcatcactggaaacgctgtcagctgtgaggatctgtaccctgtgggaacactgattggaaatcctggcaccaccccacagtagcccctcaactgctattcactgtggctccatcgccccacgcatgccagagtgtcttagctatgacatgctctaaaagactaagaacagtaaatatagtcaggtggcattggttcagctcctttgtgtgaatttgaagacatcactcaaaacttagagcctgtcttcctcatctgtaaaatggtgtcaataccccacagtattctcctgggttctcctgggccttaaatgagatcaggtatgtgaaagcactactcaaagaaatgtcagctgtgattatttccccctgtagatggtggctcacttagcttgcaggaaagagcttctaggcccaagtggcatagatgagagagctggcagctttagcgagacacgtgtggcaaaggtccatgggactggctcctgatttcacagccccagatcaatgactgcaagcttctacagtgagaataaagtgaatctcctgaaagcagcatacccaaagaagaggtctgccaacaaagcatgtgtaaagaagcagtcatctcagtgtccaagaaagaatacgctcgaggctgtgctgactatgtggagccagacatctgtcttaggtatacctggaagaccacaaagttagtgaatagaagatcagctactcttgaatataaagcagcaaattgcagtttacaatgctacaggctgtggcctttgacaagttactgatcttgttctataagcctgtttcctcatctgtattatggggataatactagaatgcacctccttggattgctgtgatccttgagagataacccctgaaaggcacaatgccagattcaatgtgcccaataatcacaggatactaggtcatastttgtctaaacggcagaaagttaacgtttcaatagagacgaagttagacatctgctctttttcaaatgcgatttattgtacataaaataaattaattacagtttaagccaaagcatgagtggctttttaaagtgcatctgtggaggggatgtggcaggtagcccctgttcacttgctgtaagataagtgttttagtatttcagccacccttaggcacaactcagccaggcctaggaagcaacccaacgtcattgccatgaaccatttacacaagtcacaccaaaatcaactgacacatttttt

SEQ ID NO: 717502 - DNA, 1329 bp, Homo sapiens
gtttccctgcccacccccaacacacacacccttctcagagatgaggttaggctgaaagcatagaaagttaccttgcatattaggaaggtttgaggcatcactggaaacgctgtcagctgtgaggatctgtaccctgtgggaacactgattggaaatcctggcaccaccccacagtagcccctcaactgctattcactgtggctccatcgccccacgcatgccagagtgtcttagctatgacatgctctaaaagactaagaacagtaaatatagtcaggtggcattggttcagctcctttgtgtgaatttgaagacatcactcaaaacttagagcctgtcttcctcatctgtaaaatggtgtcaataccccacagtattctcctgggttctcctgggccttaaatgagatcaggtatgtgaaagcactactcaaagaaatgtcagctgtgattatttccccctgtagatggtggctcacttagcttgcaggaaagagcttctaggcccaagtggcatagatgagagagctggcagctttagcgagacacgtgtggcaaaggtccatgggactggctcctgatttcacagccccagatcaatgactgcaagcttctacagtgagaataaagtgaatctcctgaaagcagcatacccaaagaagaggtctgccaacaaagcatgtgtaaagaagcagtcatctcagtgtccaagaaagaatacgctcgaggctgtgctgactatgtggagccagacatctgtcttaggtatacctggaagaccacaaagttagtgaatagaagatcagctactcttgaatataaagcagcaaattgcagtttacaatgctacaggctgtggcctttgacaagttactgatcttgttctataagcctgtttcctcatctgtattatggggataatactagaatgcacctccttggattgctgtgatccttgagagataacccctgaaaggcacaatgccagattcaatgtgcccaataatcacaggatactaggtcatactttgtctaaacggcagaaagttaacgtttcaatagagacgaagttagacatctgctctttttcaaatgcgatttattgtacataaaataaattaattacagtttaagccaaagcwtgagtggctttttaaagtgcatctgtggaggggatgtggcaggtagcccctgttcacttgctgtaagataagtgttttagtatttcagccacccttaggcacaactcagccaggcctaggaagcaacccaacgtcattgccatgaaccatttacacaagtcacaccaaaatcaactgacacatttttt

SEQ ID NO: 717503 - DNA, 2219 bp, Homo sapiens
attaaaaggcagaatttggtctggaggaatcagaatttatataacttatcaaaaaatggcaatatattaatttaaatttgctttttttctagtttagcagttgttagttttgccccagcattaaaacataaggatgattccaaaagtcttgtttttcctgccacagtcttatgtggtctggtcttccatcactaattgacactgaacacctaatatggcaatttagtacatgcctcaagaagttgtgaattttattgtaattttagattgagttttacaataaaatataaatttttttaacaggagacaagtcattcaaaaatagttttatttattcccatgtgatctaccttacaaatcttgtctggagttttgctgctgagtcctaagtgacagaaaatagtaattgcaaaaaaaaaaaaaaaaaaagaagataaacaaaacagagatattttaaaagaagatttgtaactgcatatcagaattaaacttgtcactactttggattggattgtttattatcttttaaaatcaaattaattttgttttcttaaatcctctaaaaatgttcactgagttttctggtctttttgaagctatggaacattctttaatgtaaaatataagatttaaatattttgacttgtacttgttttaacagcayttcctccatgtttagagagctctttttagagtccaattttttcctattttataacgttaagtgaacacagaattttacaactgtagttttgataaagacagtttcactttcctctgcttaaaaaaatcacagacatgtattcatctcatcaggagaaaaacatcaataatgctattttttttaacttgagctctctggtattagtaggtgttgcatttaagaaaaataatgcgttttcaaataacacataagtttcactgctattatttttctatttctttaaacattttaaaacttgtttcaaataccaatatttaaatgtcattttataaaattaagcaatagccttaattatcacttaactttactggccaattattgaaatgccttgctttttaagaataattcaacataagattttctatgttcccaatctgaaaacccctgaaatttctggtcatacatgtagcagacctttcaaacagagtaaaagaatatatcttgctcttcaatcttgatgacattttattattgtctgtggcttctggagtggagacataatagaggaaaatgggaactatctgtcaaaaggtatgaagaattgctagaagtcattttgtttgttaaaggccaatacaaagttgtagggcttggtaaataaaataggcccagatattgtatcaaatcacacattactttatgcttgtaaaaaaataaatcaatatttgtgagaaagtcttatattactaccatcttaaatgaatacttatgtataagggatataaacaagaggcttcactttttctctacattgaagttggtcttttctccaattttgagagatatttatgtttaaaatgtgaatgtctttttttttcttcttttatttatgttgtaggagaaaacttagtaaatatctttagatgattcttcagagtaattcattagcatctatttcctaggtagaaaaagaggggctggaggattaggaccaaactcagtcatctccacaattgctgttaccacgttcaaatcacttgtgcacagatccacattatcaggcttagaagggtcagaggaatggacagagttttggtcattttgttaccttgtatagatgtatccacaggctccagagctctgtgctatttgtgtgagcttctcattttgtatggaggcatatttcctggccagaggtgactaaatcacatattgtcatcttcagtgaacttgtgttagtcattcaccaccccttttctcacttgccatttatgttaccagaacaagcatgctttgtaagcctcatccaaattctgttttatttttggatgtgctttaaaaagaaaaatgcttggctaaagagtcattggagtgaggatatattttaatctttatatgtggagaacttctccattgaactctctaagctgttcagatgagatcactaacgtttccatattaagaaattttccaaataatctagcattctgaatccaaaaatggcttaaaataaatgtttgcaaggaaaatagaggtgagatatataaacgctggc

SEQ ID NO: 717504 - DNA, 2219 bp, Homo sapiens
attaaaaggcagaatttggtctggaggaatcagaatttatataacttatcaaaaaatggcaatatattaatttaaatttgctttttttctagtttagcagttgttagttttgccccagcattaaaacataaggatgattccaaaagtcttgtttttcctgccacagtcttatgtggtctggtcttccatcactaattgacactgaacacctaatatggcaatttagtacatgcctcaagaagttgtgaattttattgtaattttagattgagttttacaataaaatataaatttttttaacaggagacaagtcattcaaaaatagttttatttattcccatgtgatctaccttacaaatcttgtctggagttttgctgctgagtcctaagtgacagaaaatagtaattgcaaaaaaaaaaaaaaaaaaagaagataaacaaaacagagatattttaaaagaagatttgtaactgcatatcagaattaaacttgtcactactttggattggattgtttattatcttttaaaatcaaattaattttgttttcttaaatcctctaaaaatgttcactgagttttctggtctttttgaagctatggaacattctttaatgtaaaatataagatttaaatattttgacttgtacttgttttaacagcacttcctccatgtttagagagctctttttagagtccarttttttcctattttataacgttaagtgaacacagaattttacaactgtagttttgataaagacagtttcactttcctctgcttaaaaaaatcacagacatgtattcatctcatcaggagaaaaacatcaataatgctattttttttaacttgagctctctggtattagtaggtgttgcatttaagaaaaataatgcgttttcaaataacacataagtttcactgctattatttttctatttctttaaacattttaaaacttgtttcaaataccaatatttaaatgtcattttataaaattaagcaatagccttaattatcacttaactttactggccaattattgaaatgccttgctttttaagaataattcaacataagattttctatgttcccaatctgaaaacccctgaaatttctggtcatacatgtagcagacctttcaaacagagtaaaagaatatatcttgctcttcaatcttgatgacattttattattgtctgtggcttctggagtggagacataatagaggaaaatgggaactatctgtcaaaaggtatgaagaattgctagaagtcattttgtttgttaaaggccaatacaaagttgtagggcttggtaaataaaataggcccagatattgtatcaaatcacacattactttatgcttgtaaaaaaataaatcaatatttgtgagaaagtcttatattactaccatcttaaatgaatacttatgtataagggatataaacaagaggcttcactttttctctacattgaagttggtcttttctccaattttgagagatatttatgtttaaaatgtgaatgtctttttttttcttcttttatttatgttgtaggagaaaacttagtaaatatctttagatgattcttcagagtaattcattagcatctatttcctaggtagaaaaagaggggctggaggattaggaccaaactcagtcatctccacaattgctgttaccacgttcaaatcacttgtgcacagatccacattatcaggcttagaagggtcagaggaatggacagagttttggtcattttgttaccttgtatagatgtatccacaggctccagagctctgtgctatttgtgtgagcttctcattttgtatggaggcatatttcctggccagaggtgactaaatcacatattgtcatcttcagtgaacttgtgttagtcattcaccaccccttttctcacttgccatttatgttaccagaacaagcatgctttgtaagcctcatccaaattctgttttatttttggatgtgctttaaaaagaaaaatgcttggctaaagagtcattggagtgaggatatattttaatctttatatgtggagaacttctccattgaactctctaagctgttcagatgagatcactaacgtttccatattaagaaattttccaaataatctagcattctgaatccaaaaatggcttaaaataaatgtttgcaaggaaaatagaggtgagatatataaacgctggc

SEQ ID NO: 717505 - DNA, 1498 bp, Homo sapiens
tacaaattgtcactccataacaattattttcttctaggaattttcacttacatctgattttttattagattaatcaaattaaatctagaaaggaatttatatatcatatagttctcaacatcctcattttctttattatacacataaggaaactgtggccaaattaaaatgattcgctcaaggcatcagaaaaaaattaagaagtgagctagattttgtgatttctagatcaaatttctgtgcacaaatctatatttcctcatataattaacaatgatttatattttaaatgaacattacacattcttactactgaattataaaattactttgaagtttttttacgtgcctacaattctgtattatatacaaaatcatgcacttttaatattggaaagaaccttactatcatataaattctagttcaaccctcaggtccatttaaaatctgtctctaaagtgagtaaatcagtgctttgaaataacgtttaatgtaattcagttatttggattttatgtatttggagggaaacttcgagtttgtaatcctgttttttgctctccttttgtctccttgtgcccattttggggacacatcttcatgtcacaaactccatcagggaaattttcaggtgaagaaacaggaagtggaactcagagaagtccaattttatttgttaataagtaggaggttgaaagcaatggttaaaattggatttttaaactatcagtagatgtaatttattccatcatgctggttccctatttgccttctctttattgcaggtaattgagaattagtcacatttgttatttttagcactgcctgattttgtctggaaatggaagtgaaactataaaaacaggtaaagaaaaacaatttaaagtctttaaaaatattttaaaaatcagaattcttggttcagttaactacaaaatactcggagacttggaaaaagattgttttaagatacaaattaagtgacatttttggagttgattattctggttcatttagataactaaaattgggctgactcactgaaaagagctacttgccacacatcctcaattaagtgcattgttattaagaagagagttggggacactcatttcattcattttactaccaatgcttgattttgaggatgaaacttttgaagctttgggatacttatttttcccctttaaccctgaaattttacccattaacacaaactgtgtttttcaggataagcacatttaaaaatgtattyagtaggcttttaaagtttagggtttttttttttttttttaaagagggagctttatattcacagatatcctcaaaatgaaaagtagagcttctaaagctatttctttgtaaggatttaaattcattcacaggctgttaatttgaagggtatttgaagtttaaattataatgcatcagtcatccttgaaaacccaggcaattaatatacacaaatacagaattctgtaaacattatttttgtcc

SEQ ID NO: 717506 - DNA, 621 bp, Homo sapiens
tatatatttatataatatacataatgatataaaatgaagtaaatcatataactttctataatcaagtctttagctctctaaattttataatcaaaatgttgtagtcatctctaaaggttgattagaattatttgaaatacaataaatatttgaaaaatttatactcactgatgctactgtgtgcacatttaccaacytataaagagcaaaaattttttgcaaatcttacagacaaacaccccaaaaacactttggcataattgttaatttaactaattcaagatgaactcagagttagcctttttaatgaaacctggctctttctaaactgttctcattcaatttctttagattgttatatgtaaataaacatatatgtagataaaattgtgtggaaatcaatctgggtacacaagactcttgattatttctaaaatgcattaattatttcatttgacactttttttaagtgcttataagctctttaactccttgctttcatctgtgttcatgttctcctttcatccctgtcattgataaattagttaactcctatgattcatctacaagttcatatttcttgcaaagtttgtgttcaacaacttatttctaaccatttta

SEQ ID NO: 717507 - DNA, 570 bp, Homo sapiens
catggggaatagtttttgaatctctaaaaatatactcacatgcagcaacagatcaactaggatggcaaagcaacatgcgtgcagatgcacacacagacacattccagaaactgtctaacaaagtatccctataatctccaaatatatcttgttgggggcaaacctcccactaaagcatgactcctaatacaccatcatgggattagcaactgcagtaatagcagagagagccctaaaacctgaatctcaaaaatctcaaaacaaccactcacttgcarcaggagaggcctctattctcattgaaatcttaagtaaacaggtcagagggaaaaagaaaaattaactctcccaagttaaatggaattcaattgaatacttaacacccacagtgcatcatggacagaatattttcaaagaaatttcacacaataagatgcaaattttttcagtagaatattatatagcaataaaaatgaccaaactcctgcaacagtaaacagtatgcttacagccctcagaaaaatgtctgagcaaatgaaatcagacacaaaattatattcaatatgatcc

SEQ ID NO: 717508 - DNA, 1143 bp, Homo sapiens
gtattagtccgttttcacactgctgatacagacatacccaagactgggtaacttataaagaaaaagaggtttaatggactcacagttccacgtggctggggaagccctcacaatcattgcttgaagcgaaaggcacgtcttacagggtggcaggccaagagagaatgtgagccaagagaaggggtttccccttttaaaaccatcagatctcatgagacttatttactatcataagaacagcacaggaaagacttgcccccatgattcaattacctcccaccgggtccctctcacgacacatgggaattgtgggagctacaattcaagatgagatttgggtggcgacacagtcaaaccatatcaatcattcttttaaaaagtaaaaatggtgttccatgagaaaagtaactagttcagttcacaaccctgaaagggtctcagactacagaatatgcagactacactttgggaaccactgctttatggtaaagaaaaattatcagtcaacttcaacatttgcagcaagaatagcatatcattttctggccaggtgyggtagctcacgcctgtagtcctgcactttgggaggccaaggcaggcagatcacttgagattaggagtttgagaccagcctggccaatatggtgaaaccccctctctactaaaaatacaaaaattagctgggcatggtggcgcacgcctgtaatcccagctactctgatggctgacgcatgaggatcacttgagcctggggggcagaggttgcaattagccaagattgtgccactgcactccagcctgagtgacaaggtgagacactgtctcaaaaaaaaaaaaaaaaagaatagcatacccctttcaaatcacttcttatatttttgtgtggctgccagaagtagtggaagtagacattgaaatggcaggagttcaaaatatttggaataaaaatatttttgatctggaagatcacagttggtaaatgctggactaggtgttaccgttacatgatctaaaaatgacctttggggccctgtgttgtttacttcttcacagcaaccaggactgttagctcaaaagcccatcatcaccaaatcaaatgtttacacatccaattgtttaagtatagcctaaataaccaaatta

SEQ ID NO: 717509 - DNA, 2382 bp, Homo sapiens
  misc_feature 2137, 2165, 2166, 2204, 2230, 2231, 2257, 2258, 2279, 2289: n = A,T,C or G
gctcagcttccagggaggcctcaggaagcttatgaccatggcaaaaggtgaagggggatcaggcatgtcacatggtgaaagcaggagcaagaagggggcagggggaggtgccacacaattttaaatgaccgtatcttgcaataattcaccatcaagaaaacagcaccaagccatgaaatacccgtccccatgatccaaacacctcgtascaggccccacctccagcactggggattacagttcaacatgagatttggctggggacaaatattcaaactatatcgcctccttatgcagctgagggaaacagacttggggtcactaaggggaggagctgggattcagggtggagccagtgctcatggcataggctatgggtgctaaggtcgtttgtctgagcctcatctctaaggcagggaggacaagttgccagcacgatgacatgaaaccatccacatgaacgtcctgagcatggcatctgccacggcgagctcagtaaagatcagctccaagtcacagacccctcttccagaaaccaggtaccagtcttccatagaaaataggatttattttcacatttaaggtgaacacaaatccatgttccagaaatgttttatgcataacacatcatgagtagattgaatttctttaacacacagaaaaatcaaagcctaccaggaaatgcttccctccggagcacaggagcttacaggccacttctgttagcaacacaggaattcacattgtctaggcacagctcaagtgaggtttgttcccaggttcaactgctcctacccccatgggccctcctcaaaaacgacagcagcaaaccaacaggcttcacagtaaccaggaggaaagatctcagcgggggaaccttcacaaaagccctgagttgtgtttcaaaagccaagctctggggtctgtggcctgtgtcaccaactcaggtcacaccacagcacggggaagttagtgttgcagtttcacttctagtcaatcttgttaattaaattatcccaattaggaagacaatattaaacaggtattagagtccttttgcaaaactgactgtcccccttggtcaaggaaaagactttcacttggatggcaacccatcaccatcaccatgtccaaggcacagatgaatctgggctgggcaatcacaggcaatgcttgacaaggggtgggtgacatcatgtccacaaagatgcccagaaatgaggtcgtgaggaagggtgggtattaggaagcaatgtggtgggtcctggccgaggtctaacatccctagcagccttcctcaggcacactgtgacagtggagtgggcacacgtatcgtttcagggcaccttggctgacagcccaacgcggcccacctgggtgcatggacatttgcagctgccaccatgccagcaccctgggccacagattagctcaactggccacagtctgtgatgacaatcttcttggatgtcctcccactcttagagccgaaagattctatttttcttcacgacgtccatgccctctttgacgtgaccgaacacaacatgcttgccatccaacctgtgaggacgggtgacccgggtgagcaacagtgtagcgcaatgtcatccaatgccatggacctggtcatggaattagttaccgaaaacagcaattctgaaaagaatccccatggaatagctagatctacccccaaagctcgatcaagccttgttgagcgccccaaatacaccccagaggatgcctggcttccaggacacattctgtcactcatgttgtgaccttgcctcaggccatgtagcctgaatcctggtaaccccatctatcaaaagtggagtattctttgttctgcatggggaggtaacaggatactgaaatgctctgaagaaagaagaagtccatacaaatggaaccacgttaacggtcatgaatgatgagtcaagagtcaaaggaacaagggtggtgaaactgcaggagtctgggcagctctcaccccgagagagtcccataatgtaaagcggctcagtccagctcagcgaaagctggcgtggttccagccaagagcagactgcaaggatccactggggtcccatgaaagagcaaagagcaggctgagccagcaaaggaccctgcnccagacccctagccgggccaccatctcnnttgggctttggaaggctgggacacttctaagtggtctngcccccacctagggtctccctaaaanntcctcggaaaaatgggctttaccaanngtcaagctcccagcccagttncatccccagngtgccccagggctaggacatttgggactctggccagagaaatttatcccttagaggaaaatgtaccaggaaagagacatccataaaatccatg

SEQ ID NO: 717510 - DNA, 2382 bp, Homo sapiens
  misc_feature 2137, 2165, 2166, 2204, 2230, 2231, 2257, 2258, 2279, 2289: n = A,T,C or G
gctcagcttccagggaggcctcaggaagcttatgaccatggcaaaaggtgaagggggatcaggcatgtcacatggtgaaagcaggagcaagaagggggcagggggaggtgccacacaattttaaatgaccgtatcttgcaataattcaccatcaagaaaacagcaccaagccatgaaatacccgtccccatgatccaaacacctcgtagcaggccccacctccagcactggggattacagttcaacatgagatttggctggggacaaatattcaaactatatcgcctccttatgcagctgagggaaacagacttggggtcactaaggggaggagctgggattcagggtggagccagtgctcatggcataggctatgggtgctaaggtcgtttgtctgagcctcatctctaaggcagggaggacaagttgccagcacgatgacatgaaaccatccacatgaacgtcctgagcatggcatctgccacggcgagctcagtaaagatcagctccaagtcacagacccctcttccagaaaccaggtaccagtcttccatagaaaataggatttattttcacatttaaggtgaacacaaatccatgttccagaaatgttttatgcataacacatcatgagtagattgaatttctttaacacacagaaaaatcaaagcctaccaggaaatgcttccctccggagcacaggagcttacaggccacttctgttagcaacacaggaattcacattgtctaggcacagctcaagtgaggtttgttcccaggttcaactgctcctacccccatgggccctcctcaaaaacgacagcagcaaaccaacaggcttcacagtaaccaggaggaaagatctcagcgggggaaccttcacaaaagccctgagttgtgtttcaaaagccaagctctggggtctgtggcctgtgtcaccaactcaggtcacaccacagcayggggaagttagtgttgcagtttcacttctagtcaatcttgttaattaaattatcccaattaggaagacaatattaaacaggtattagagtccttttgcaaaactgactgtcccccttggtcaaggaaaagactttcacttggatggcaacccatcaccatcaccatgtccaaggcacagatgaatctgggctgggcaatcacaggcaatgcttgacaaggggtgggtgacatcatgtccacaaagatgcccagaaatgaggtcgtgaggaagggtgggtattaggaagcaatgtggtgggtcctggccgaggtctaacatccctagcagccttcctcaggcacactgtgacagtggagtgggcacacgtatcgtttcagggcaccttggctgacagcccaacgcggcccacctgggtgcatggacatttgcagctgccaccatgccagcaccctgggccacagattagctcaactggccacagtctgtgatgacaatcttcttggatgtcctcccactcttagagccgaaagattctatttttcttcacgacgtccatgccctctttgacgtgaccgaacacaacatgcttgccatccaacctgtgaggacgggtgacccgggtgagcaacagtgtagcgcaatgtcatccaatgccatggacctggtcatggaattagttaccgaaaacagcaattctgaaaagaatccccatggaatagctagatctacccccaaagctcgatcaagccttgttgagcgccccaaatacaccccagaggatgcctggcttccaggacacattctgtcactcatgttgtgaccttgcctcaggccatgtagcctgaatcctggtaaccccatctatcaaaagtggagtattctttgttctgcatggggaggtaacaggatactgaaatgctctgaagaaagaagaagtccatacaaatggaaccacgttaacggtcatgaatgatgagtcaagagtcaaaggaacaagggtggtgaaactgcaggagtctgggcagctctcaccccgagagagtcccataatgtaaagcggctcagtccagctcagcgaaagctggcgtggttccagccaagagcagactgcaaggatccactggggtcccatgaaagagcaaagagcaggctgagccagcaaaggaccctgcnccagacccctagccgggccaccatctcnnttgggctttggaaggctgggacacttctaagtggtctngcccccacctagggtctccctaaaanntcctcggaaaaatgggctttaccaanngtcaagctcccagcccagttncatccccagngtgccccagggctaggacatttgggactctggccagagaaatttatcccttagaggaaaatgtaccaggaaagagacatccataaaatccatg

SEQ ID NO: 717511 - DNA, 1262 bp, Homo sapiens
  misc_feature 411, 412, 414, 416, 417, 418, 419, 426, 431, 442, 443, 444,445, 454, 455, 462, 463, 464, 465, 466, 467, 468, 469, 470,471, 472, 473, 474, 475, 476, 477, 478, 479, 480, 481, 482,483, 484, 485, 486, 487, 488, 489, 490, 491, 492, 493: n = A,T,C or G
  misc_feature 494, 495, 496, 497, 498, 499, 500, 501, 502, 503, 504, 505,506, 507, 508, 509, 510, 511, 512, 513, 514, 515, 516, 517,518, 519, 520, 521, 522, 523, 524, 525, 526, 527, 528, 529,530, 531, 532, 533, 534, 535, 536, 537, 538, 539, 540: n = A,T,C or G
  misc_feature 541, 542, 543, 544, 545, 546, 547, 548, 549, 550, 551, 552,553, 554, 555, 556, 557, 558, 559, 560, 561: n = A,T,C or G
tttggtcagggccaggcactctttgtgtcccgacaaccatccatgagctaagtacggttagtcccaggtttcagatgggaacgctgacgcatgtagaggttacatggcttgcccaagctacgctgccaggaaatggggtagtccagatccgagcccaagccacctaacgtgggctcactttctaaattgctacacaacatgccaggattgcacaaagaagagacccaccaagccgggatggtgagaaacgggaaggggccgctgttctcatgggtcctggcatgctgggggcatccctccccatctctgggcctcagttttccaatctccagaatgagaggttggactgactgctgggcagggtcactggcctcccaggaggcccagactcagttagccatactgcttaanngngnnnncttgcantggancactcagtttnnnnaaataatcnncctctcnnnnnnnnnnnnnnnnnnnnnnnnnnnnnnnnnnnnnnnnnnnnnnnnnnnnnnnnnnnnnnnnnnnnnnnnnnnnnnnnnnnnnnnnnnnnnnnnnnnntagtacacattcaaggggctcagggactcacctaaggtcacatagcaaggagccctgggttctgattccctgtgcctggggcccctcttcattgcaggccttcctggaggctggggagtgaccttgatgaccttagcaacctcccttgaagcagcctggaggttttgagcatgtcaatgggaggacgggaggggctggctttgtgagcctagcaactcagtgtgtctcactgtgtcttagccttcatggtacccaagatcattaggaataccccaggggcagaagtcctctgagacagatgcggtgagtcagggacaggaamcctggacccaaggggtccaggtagaggaagcaagtagaggcttgggaggcctgacattgatgaagagcctggggaccagtgctgtgtatccttaggccagttacttgcagtctctgtttccctatgtgtaatatggaggagaggttagacaagatcagtgattccatctcgggcttcacattagaaccacctgggtttttaatggttttggtttggtttttggtgctagaaatttgaattcagtagatccagggtgggcctggccaagggcatattcctagctccccaggtaattctgacgtgcagctgggcaaaagcaccattgccaggtctgagatggtggggtgctctggcagctgtggtggctgcaggtgatcat

SEQ ID NO: 717512 - DNA, 1262 bp, Homo sapiens
  misc_feature 411, 412, 414, 416, 417, 418, 419, 426, 431, 442, 443, 444,445, 454, 455, 462, 463, 464, 465, 466, 467, 468, 469, 470,471, 472, 473, 474, 475, 476, 477, 478, 479, 480, 481, 482,483, 484, 485, 486, 487, 488, 489, 490, 491, 492, 493: n = A,T,C or G
  misc_feature 494, 495, 496, 497, 498, 499, 500, 501, 502, 503, 504, 505,506, 507, 508, 509, 510, 511, 512, 513, 514, 515, 516, 517,518, 519, 520, 521, 522, 523, 524, 525, 526, 527, 528, 529,530, 531, 532, 533, 534, 535, 536, 537, 538, 539, 540: n = A,T,C or G
  misc_feature 541, 542, 543, 544, 545, 546, 547, 548, 549, 550, 551, 552,553, 554, 555, 556, 557, 558, 559, 560, 561: n = A,T,C or G
tttggtcagggccaggcactctttgtgtcccgacaaccatccatgagctaagtacggttagtcccaggtttcagatgggaacgctgacgcatgtagaggttacatggcttgcccaagctacgctgccaggaaatggggtagtccagatccgagcccaagccacctaacgtgggctcactttctaaattgctacacaacatgccaggattgcacaaagaagagacccaccaagccgggatggtgagaaacgggaaggggccgctgttctcatgggtcctggcatgctgggggcatccctccccatctctgggcctcagttttccaatctccagaatgagaggttggactgactgctgggcagggtcactggcctcccaggaggcccagactcagttagccatactgcttaanngngnnnncttgcantggancactcagtttnnnnaaataatcnncctctcnnnnnnnnnnnnnnnnnnnnnnnnnnnnnnnnnnnnnnnnnnnnnnnnnnnnnnnnnnnnnnnnnnnnnnnnnnnnnnnnnnnnnnnnnnnnnnnnnnnntagtacacattcaaggggctcagggactcacctaaggtcacatagcaaggagccctgggttctgattccctgtgcctggggcccctcttcattgcaggccttcctggaggctggggagtgaccttgatgaccttagcaacctcccttgaagcagcctggaggttttgagcatgtcaatgggaggacgggaggggctggctttgtgagcctagcaactcagtgtgtctcactgtgtcttagccttcatggtacccaagatcattaggaataccccaggggcagaagtcctctgagacagatgcggtgagtcagggacaggaaacctggacccaaggggtccaggtagaggaagcaagtagaggcttgggaggcctgacattgatgaagagcctggggaccagtgctgtgtatccttaggccagttacttgcagtctctgtttccctatgtgtaatatggaggagaggttagacaagatcagtgattccatctcsggcttcacattagaaccacctgggtttttaatggttttggtttggtttttggtgctagaaatttgaattcagtagatccagggtgggcctggccaagggcatattcctagctccccaggtaattctgacgtgcagctgggcaaaagcaccattgccaggtctgagatggtggggtgctctggcagctgtggtggctgcaggtgatcat

SEQ ID NO: 717513 - DNA, 1262 bp, Homo sapiens
  misc_feature 411, 412, 414, 416, 417, 418, 419, 426, 431, 442, 443, 444,445, 454, 455, 462, 463, 464, 465, 466, 467, 468, 469, 470,471, 472, 473, 474, 475, 476, 477, 478, 479, 480, 481, 482,483, 484, 485, 486, 487, 488, 489, 490, 491, 492, 493: n = A,T,C or G
  misc_feature 494, 495, 496, 497, 498, 499, 500, 501, 502, 503, 504, 505,506, 507, 508, 509, 510, 511, 512, 513, 514, 515, 516, 517,518, 519, 520, 521, 522, 523, 524, 525, 526, 527, 528, 529,530, 531, 532, 533, 534, 535, 536, 537, 538, 539, 540: n = A,T,C or G
  misc_feature 541, 542, 543, 544, 545, 546, 547, 548, 549, 550, 551, 552,553, 554, 555, 556, 557, 558, 559, 560, 561: n = A,T,C or G
tttggtcagggccaggcactctttgtgtcccgacaaccatccatgagctaagtacggttagtcccaggtttcagatgggaacgctgacgcatgtagaggttacatggcttgcccaagctacgctgccaggaaatggggtagtccagatccgagcccaagccacctaacgtgggctcactttctaaattgctacacaacatgccaggattgcacaaagaagagacccaccaagccgggatggtgagaaacgggaaggggccgctgttctcatgggtcctggcatgctgggggcatccctccccatctctgggcctcagttttccaatctccagaatgagaggttggactgactgctgggcagggtcactggcctcccaggaggcccagactcagttagccatactgcttaanngngnnnncttgcantggancactcagtttnnnnaaataatcnncctctcnnnnnnnnnnnnnnnnnnnnnnnnnnnnnnnnnnnnnnnnnnnnnnnnnnnnnnnnnnnnnnnnnnnnnnnnnnnnnnnnnnnnnnnnnnnnnnnnnnnntagtacacattcaaggggctcagggactcacctaaggtcacatagcaaggagccctgggttctgattccctgtgcctggggcccctcttcattgcaggccttcctggaggctggggagtgaccttgatgaccttagcaacctcccttgaagcagcctggaggttttgagcatgtcaatgggaggacgggaggggctggctttgtgagcctagcaactcagtgtgtctcactgtgtcttagccttcatggtacccaagatcattaggaataccccaggggcagaagtcctctgagacagatgcggtgagtcagggacaggaaacctggacccaaggggtccaggtagaggaagcaagtagaggcttgggaggcctgacattgatgaagagcctggggaccagtgctgtgtatccttaggccagttacttgcagtctctgtttccctatgtgtaatatggaggagaggttagacaagatcagtgattccatctcgggcttcacattagaaccacctgggtttttaatggttttggtttggtttttggtgctagaaatttgaattcagtagatccagggtgggcctggccaagggcatattcctagctccccaggtrattctgacgtgcagctgggcaaaagcaccattgccaggtctgagatggtggggtgctctggcagctgtggtggctgcaggtgatcat

SEQ ID NO: 717514 - DNA, 631 bp, Homo sapiens
gaatcttatttgatattaaacatggctcatacataccagtagaacagattaaaaaatagcagccacagcaacagtttaatcagtgcctactatgcaaattcatttcaacaaccccaagagggtagaaggtattatctgcattttatagatgaggaaacagaagctcagagaagttctaaagtgaattgcccaagggcacaaaaatattaagtagggcagcaaggatttgaatccagttttgactttaaaatccaagttcttaaactttamaatgtgatgccattttgaaactctacaaacccagatcaactaactctcctcataagtaagaaatcagagtcagagtgctagcgatccaaatcacttagcaaaagtgagctggaaagagctacactgatgtgatggtttggagtctgatgtcaaagtggagttgatgggagaaggaggagtataataaaaaattatgaacctacaattaaaaagataagagttggtgagggcatggagaaatctaaaccctcatatactgctgttgggaatggaaaatggtacaattgctctgcaaaacagtttggcacctcctcaaaaagttaacagttaccttatgactcagcaattctaccccagatat

SEQ ID NO: 717515 - DNA, 1975 bp, Homo sapiens
  misc_feature 296, 332, 362, 373, 374, 527, 528, 529, 530, 531, 532, 533,534, 535, 536, 537, 538, 539, 540, 541, 542, 543, 544, 545,546, 547, 548, 549, 550, 551, 552, 553, 554, 555, 556, 557,558, 559, 560, 561, 562, 563, 564, 565, 566, 567, 568: n = A,T,C or G
  misc_feature 569, 570, 571, 572, 573, 574, 575, 576, 577, 578, 579, 580,581, 582, 583, 584, 585, 586, 587, 588, 589, 590, 591, 592,593, 594, 595, 596, 597, 598, 599, 600, 601, 602, 603, 604,605, 606, 607, 608, 609, 610, 611, 612, 613, 614, 615: n = A,T,C or G
  misc_feature 616, 617, 618, 619, 620, 621, 622, 623, 624, 625, 626, 1505: n = A,T,C or G
gatccagcttaaaagccccctgttctgaagccttcccagatgctgccctcaaatcaaaggggtgtgcctcacttgatcctcattcattccctcagcagcaactattcaggtgtctgctggggcactacgaagctcctagagctgcccccatccctgtgtgccaggcatcacccttagcctcttgcctggctgcttacctgtcccctcgccaaccggggacggtcagggctcggccgctctgacaccacccccaagggcagcagaaagcagctggaagagccctggcctgggttcanaccccacctctgcatgtcccagctatgtgacctcantgcagttgaccccttctctgaggcttggtnttcctacctgnnacatgggaataggggtgctgggaaaactggagaatgtgtacctcaaggggccgcacacggtagggggctaatatgtgcttgctatcattagtatgcaggaggtatcccaatatgtttgtgtcatgaggctcagttcccccagctcatctggcnnnnnnnnnnnnnnnnnnnnnnnnnnnnnnnnnnnnnnnnnnnnnnnnnnnnnnnnnnnnnnnnnnnnnnnnnnnnnnnnnnnnnnnnnnnnnnnnnnnnattgtacagtcagttttcaattcggtccttcacagctccagtctgaatgtcgagagctttagtcccacttctggcttgctagctgtgtgcctcttaccccatgtataaactagtgataccacaccacccaacttgatcctacaggtggatgttgtgagagcaagggatacatcttgtgaaatctttgaaaattccccttaaaatatgggccaggctgccatgtacagatatgcaggttgtatattgcccaaccctgcgggggcttcataagtctgataaactgtgaacaacatccaggagttgtgtagtgcatacgggacacatagagctgccatgataatgggcgatacataatttcaaaacctgctttatttttatcctttaaaaaccttggagacttactgaatgccagtaaaaactgggtgtggtggctctcacacctgtaatcccaaaactttgggaggacaaggttggaggattacttgaggccaggagtttgataccaacctgggcaacatagtgagacccctatctctacaaaaaataaatttagctaggtgtggtggcaggcacctgtagtcccagctactcaggaggctgaggtgatagcatcactcgagcccaggagtttgagattacagtgagctatgattacaccactgcactctaggctaggtggcagagcgagaccctgtctcaaaaaaagaaaacttcagagagtggaaggcagatgacataaatttgagaagctgtggtgtagaaaacagattggggaggcagaggaaggtatggtcaactagaaatgcatgcttcacctgaagggttcaaatatacttaaatcctatggtccaaactaaacatttagctgacttgtagccncaagtctatagtgaagaatagctaacgtttattgagtatttactgagtgccagacatcattcagttttatcagtcaattctcccccacagtcttatgcaggagatatcctcattgtttaggtaagaactctgaagcttgggttaaatggcttgcccaaaattaatgttaggaaatggtaaattaatgcaatggaaaataggtctatgcgacatatataacaaaaaatgagcgtccacaatatttaagactacaaatcaataatcatctttcctattggtaacagctcaatagaaaagacaggcaatagttataracagagagcttatagaaaaatgaccaataagcggctgggcgcggtggctcacgcctgtaatcccagcactttgggaggctgaggcgggtggatcacgaggtcaggagatcgagaccatcctggctaacatggtgaaaccccgtctctactaaaaag

SEQ ID NO: 717516 - DNA, 1975 bp, Homo sapiens
  misc_feature 296, 332, 362, 373, 374, 527, 528, 529, 530, 531, 532, 533,534, 535, 536, 537, 538, 539, 540, 541, 542, 543, 544, 545,546, 547, 548, 549, 550, 551, 552, 553, 554, 555, 556, 557,558, 559, 560, 561, 562, 563, 564, 565, 566, 567, 568: n = A,T,C or G
  misc_feature 569, 570, 571, 572, 573, 574, 575, 576, 577, 578, 579, 580,581, 582, 583, 584, 585, 586, 587, 588, 589, 590, 591, 592,593, 594, 595, 596, 597, 598, 599, 600, 601, 602, 603, 604,605, 606, 607, 608, 609, 610, 611, 612, 613, 614, 615: n = A,T,C or G
  misc_feature 616, 617, 618, 619, 620, 621, 622, 623, 624, 625, 626, 1505: n = A,T,C or G
gatccagcttaaaagccccctgttctgaagccttcccagatgctgccctcaaatcaaaggggtgtgcctcacttgatcctcattcattccctcagcagcaactattcaggtgtctgctggggcactacgaagctcctagagctgcccccatccctgtgtgccaggcatcacccttagcctcttgcctggctgcttacctgtcccctcgccaaccggggacggtcagggctcggccgctctgacaccacccccaagggcagcagaaagcagctggaagagccctggcctgggttcanaccccacctctgcatgtcccagctatgtgacctcantgcagttgaccccttctctgaggcttggtnttcctacctgnnacatgggaataggggtgctgggaaaactggagaatgtgtacctcaaggggccgcacacggtagggggctaatatgtgcttgctatcattagtatgcaggaggtatcccaatatgtttgtgtcatgaggctcagttcccccagctcatctggcnnnnnnnnnnnnnnnnnnnnnnnnnnnnnnnnnnnnnnnnnnnnnnnnnnnnnnnnnnnnnnnnnnnnnnnnnnnnnnnnnnnnnnnnnnnnnnnnnnnnattgtacagtcagttttcaattcggtccttcacagctccagtctgaatgtcgagagctttagtcccacttctggcttgctagctgtgtgcctcttaccccatgtataaactagtgataccacaccacccaacttgatcctacaggtggatgttgtgagagcaagggatacatcttgtgaaatctttgaaaattccccttaaaatatgggccaggctgccatgtacagatatgcaggttgtatattgcccaaccctgcgggggcttcataagtctgataaactgtgaacaacatccaggagttgtgtagtgcatacgggacacatagagctgccatgataatgggcgatacataatttcaaaacctgctttatttttatcctttaaaaaccttggagacttactgaatgccagtaaaaactgggtgtggtggctctcacacctgtaatcccaaaactttgggaggacaaggttggaggattacttgaggccaggagtttgataccaacctgggcaacatagtgagacccctatctctacaaaaaataaatttagctaggtgtggtggcaggcacctgtagtcccagctactcaggaggctgaggtgatagcatcactcgagcccaggagtttgagattacagtgagctatgattacaccactgcactctaggctaggtggcagagcgagaccctgtctcaaaaaaagaaaacttcagagagtggaaggcagatgacataaatttgagaagctgtggtgtagaaaacagattggggaggcagaggaaggtatggtcaactagaaatgcatgcttcacctgaagggttcaaatatacttaaatcctatggtccaaactaaacatttagctgacttgtagccncaagtctatagtgaagaatagctaacgtttattgagtatttactgagtgccagacatcattcagttttatcagtcaattctcccccacagtcttatgcaggagatatcctcattgtttaggtaagaactctgaagcttgggttaaatggcttgcccaaaattaatgttaggaaatggtaaattaatgcaatggaaaataggtctatgcgacatatataacaaaaaatgagcgtccacaatatttaagactacaaatcaataatcatctttcctattggtaacagctcaatagaaaagacaggcaatagttataawcagagagcttatagaaaaatgaccaataagcggctgggcgcggtggctcacgcctgtaatcccagcactttgggaggctgaggcgggtggatcacgaggtcaggagatcgagaccatcctggctaacatggtgaaaccccgtctctactaaaaag

SEQ ID NO: 717517 - DNA, 1975 bp, Homo sapiens
  misc_feature 296, 332, 362, 373, 374, 527, 528, 529, 530, 531, 532, 533,534, 535, 536, 537, 538, 539, 540, 541, 542, 543, 544, 545,546, 547, 548, 549, 550, 551, 552, 553, 554, 555, 556, 557,558, 559, 560, 561, 562, 563, 564, 565, 566, 567, 568: n = A,T,C or G
  misc_feature 569, 570, 571, 572, 573, 574, 575, 576, 577, 578, 579, 580,581, 582, 583, 584, 585, 586, 587, 588, 589, 590, 591, 592,593, 594, 595, 596, 597, 598, 599, 600, 601, 602, 603, 604,605, 606, 607, 608, 609, 610, 611, 612, 613, 614, 615: n = A,T,C or G
  misc_feature 616, 617, 618, 619, 620, 621, 622, 623, 624, 625, 626, 1505: n = A,T,C or G
gatccagcttaaaagccccctgttctgaagccttcccagatgctgccctcaaatcaaaggggtgtgcctcacttgatcctcattcattccctcagcagcaactattcaggtgtctgctggggcactacgaagctcctagagctgcccccatccctgtgtgccaggcatcacccttagcctcttgcctggctgcttacctgtcccctcgccaaccggggacggtcagggctcggccgctctgacaccacccccaagggcagcagaaagcagctggaagagccctggcctgggttcanaccccacctctgcatgtcccagctatgtgacctcantgcagttgaccccttctctgaggcttggtnttcctacctgnnacatgggaataggggtgctgggaaaactggagaatgtgtacctcaaggggccgcacacggtagggggctaatatgtgcttgctatcattagtatgcaggaggtatcccaatatgtttgtgtcatgaggctcagttcccccagctcatctggcnnnnnnnnnnnnnnnnnnnnnnnnnnnnnnnnnnnnnnnnnnnnnnnnnnnnnnnnnnnnnnnnnnnnnnnnnnnnnnnnnnnnnnnnnnnnnnnnnnnnattgtacagtcagttttcaattcggtccttcacagctccagtctgaatgtcgagagctttagtcccacttctggcttgctagctgtgtgcctcttaccccatgtataaactagtgataccacaccacccaacttgatcctacaggtggatgttgtgagagcaagggatacatcttgtgaaatctttgaaaattccccttaaaatatgggccaggctgccatgtacagatatgcaggttgtatattgcccaaccctgcgggggcttcataagtctgataaactgtgaacaacatccaggagttgtgtagtgcatacgggacacatagagctgccatgataatgggcgatacataatttcaaaacctgctttatttttatcctttaaaaaccttggagacttactgaatgccagtaaaaactgggtgtggtggctctcacacctgtaatcccaaaactttgggaggacaaggttggaggattacttgaggccaggagtttgataccaacctgggcaacatagtgagacccctatctctacaaaaaataaatttagctaggtgtggtggcaggcacctgtagtcccagctactcaggaggctgaggtgatagcatcactcgagcccaggagtttgagattacagtgagctatgattacaccactgcactctaggctaggtggcagagcgagaccctgtctcaaaaaaagaaaacttcagagagtggaaggcagatgacataaatttgagaagctgtggtgtagaaaacagattggggaggcagaggaaggtatggtcaactagaaatgcatgcttcacctgaagggttcaaatatacttaaatcctatggtccaaactaaacatttagctgacttgtagccncaagtctatagtgaagaatagctaacgtttattgagtatttactgagtgccagacatcattcagttttatcagtcaattctcccccacagtcttatgcaggagatatcctcattgtttaggtaagaactctgaagcttgggttaaatggcttgcccaaaattaatgttaggaaatggtaaattaatgcaatggaaaataggtctatgcgacatatataacaaaaaatgagcgtccacaatatttaagactacaaatcaataatcatctttcctattggtaacagctcaatagaaaagacaggcaatagttataaayagagagcttatagaaaaatgaccaataagcggctgggcgcggtggctcacgcctgtaatcccagcactttgggaggctgaggcgggtggatcacgaggtcaggagatcgagaccatcctggctaacatggtgaaaccccgtctctactaaaaag

SEQ ID NO: 717518 - DNA, 831 bp, Homo sapiens
tgagacccaagactggacaaatggtcacattttggacattctaggaacattatactcccctctccaaattagaagaattattgacatgctaggatsaattaaaattgaagtaaaatggaaataaataaccatcccagggtgatcaatgtctctgagcactcctattatccattaataacacactagtttgccacagcataccagttgggcaactttacttaaaaattcaggagagggaacttcctttgtgttagtctgttcaagctgtcataacaaaattccagactgggtgacttaaggaacagaaatttgttttcttacaattctggagtctgagtctgagatcaggatgccaacatggtaagtttctagtgagggctctctgccttttagaaaaccaccatcttgctgtgtccatatggcctttctttgatatgtgtgcatagtgagaagggaaagtgagctatctgatatttcttctcatgagaacactaacctgattcaatcagggtttcactttatgaccaaatttaaccttaatcagtttctgaggggtcccactaccaaataaagccacactgggggttggggctctatttgggctgttataacaaaataccataaactgggtagcttataaacaacagattttttaaaatcattctggaggctaggaagtccaagaacaagacaccaacaaatttggtgtctgttgaaaacccactttctggtttatacatggtgccttctggctgtgtgctcacagatggtagagggtgaaggacctctatcaggcctcttttttatatatatatactttaatttctttaa

SEQ ID NO: 717519 - DNA, 586 bp, Homo sapiens
aatataatccaatgagtcatactaaatttctcaaagacatcctggaagaaatagacttagaataaaaattacatttttctgtctatgtgttgctacaattttaaaaatgtgctattgttattgtccagtgtcacatattttaatctcaaacatgtcacagaatgtgacctacttcaatatttccttatatatcaattatataagctacattagcaacaaacctaagaacatatgccatcacaaaacagttggtatatgcaattcaggtacaatttacattgctgtacaaagttgctttgcaaatttcctttagctatacaaaacaagaaataaaaactttaaygtattgcttaaattgtgaaagtatggggtaatttccttctactcttggcctatgccacttgtctatgacaatagcttgctatcaaatttaagacccttattcaggaggttaatgcgaggtaggaactccattcaatgttattttggcttaagggcataatgtcacaatttggtgcatcctctaatgactttttttttctaaaggcagcttatagcttagacctagttcagcgaatttccttgt

SEQ ID NO: 717520 - DNA, 586 bp, Homo sapiens
aatataatccaatgagtcatactaaatttctcaaagacatcctggaagaaatagacttagaataaaaattacatttttctgtctatgtgttgctacaattttaaaaatgtgctattgttattgtccagtgtcacatattttaatctcaaacatgtcacagaatgtgacctacttcaatatttccttatatatcaattatataagctacattagcaacaaacctaagaacatatgccatcacaaaacagttggtatatgcaattcaggtacaatttacattgctgtacaaagttgctttgcaaatttcctttagctatacaaaacaagaaataaaaactttaacgtattgcttaaattgtgaaagtatggggtaatttccttctactcttggcctatgccacttgtctatgacaatagcttgctatcaaatttaagacccttattcaggaggttaatgcgaggtaggaactccattcaatgttattttggcttaagggcataatgtcacaatttggtgcatcctctaatgactttttttytctaaaggcagcttatagcttagacctagttcagcgaatttccttgt

SEQ ID NO: 717521 - DNA, 594 bp, Homo sapiens
tttatcacgattccatttataaaccttcttttcaaattggggttattcattttttctcaaacgccttgtatttttaaaactatgttttaaaaagagtttgaatttttgctattttccaggctcaggacaggaacattcacgtttatacaatatctccactaatttcccaacttgttatagtcctcttgctaagaatatccttgtcctcttcaattttaagtatgatttattgggtatagtacacttgaaatgttatctagttcatcataaagcacaatattgacccagaattttgcaaaatttttaaaattataatagcattaatgggagacatcggctgcttaccaaatatccataggctcacacacatttctcagccccactgcaattaggaagggccctgagaatagttctgcacaaatgggtcatgaacagaatacacataaaaaaatttgaggccaagacactaaatggatggtgtgtgacccttcagctttctcttctactgtcaaggagaccatgaagggcatcagttgtgatggtggaaccagaagatgaaaatgaaccrgtgccctttgttactttgtgaaagtg

SEQ ID NO: 717522 - DNA, 3728 bp, Homo sapiens
tgatatttgtgctgagcatttaraagcaggtggaagttttccagctggatcaagtagagggactcctcagaacaaagacagcagagtagaaaggagcagcaaatgctgagagtattgaataattaagtatccctagatcacagcaaggaagcagtaggctggcaaaataagcaggcaccctctgagtgctttataatattccaaagtgaggaatttgaacttatgtaaacctggaacaattaagaaggtttaacgtattccaatttctttttcataaagatgactacaaattgcaaaggataaagaagatggaagatgaagactaatctgtagggagattttaagattgctttgaaagagtagttgttagagtggggggccgggggtagtgataccatttatcagagtaaagaacataggagtaagagtagatttgtggtaacattcccaggttttaaggataagactataattttggatttgtagggtttaaagatactgttcaggatatccagatggaactatccactagatagtagatataatagagttatatttcataacaaagagttttgatccctttcttaaaaactcagtacttgcctatggtgccactggtgctgggaagacccacactatgctaggatcagctgatgaacctggagtgatgtatctaacaatgttacacctttacaaatgcatggatgagattaaagaagagaaaatatgtagtactgcagtttcatatctggaggtaagttgggaatttagattaatcaatagttttgggaaatcattgacatgattcatacaaatgattttattatataagagttttccggtgaatatataaaatcattaaaattccttgtcttgaatatttgttatgcatctttttctgttaattttttttttttttactttggcaaaatttcagacttatagagaagttgcaacaatagtacaaagaacttccagatacccttcatacagatcccccatatgttagcattttactgcatttgctttctatgtgtgtgtatacatttctttctttctgagctaggttgcagacttgtaaaaacaggactttttaaaaataactgctaaataggtaccaaaatcaggaaattagcaatgatacaatataattatctgtagatcttagtgagattttgctagttatttcattaataccctttattgtaaaagaaaattgtattcagttgttatatcttagtctccttaatctgtaattttttgtcttttataacactgccataaaaatccttagtttggatttatcatgattagattcagattatgcactgacagtaacacaagcaaagtgatgttcacttcttactgcatcaaaaaaggcttaagccgttgattagtccccatactgggaatgttaactttgatcagttttattatgctgtggtctgtagagtttctccactttgaagatacgttttaccatttataattagtaagtactatgtatgtagacaatgtaaatattccttactcctcaaacttttatctattgttattagtatccactgatgattggtgactgaatcaattactattatgatggtagatgatggtgatttttaaattccatcatttattgtacatttctttattgactttctactataaggaagagttttccccttattatatcagcctcctgcatttttactttattgaatagattataatccctttctgtaatcattttttgtatgttcaaattgtgtaagatttggctagttgagacttcttcatgttgtctcttgtgtccttttgaaataccccatcattctttgaggccttctaccctcttaatagtcaacaaatggtaactaagtggcagacactctaactttgcattcaaatagtgtttcagataccagtgcagaaacataaaaaccctgatttcattgcctatttatttctggtgccataaaatttctctcttattaacatcttgtagtttggtccctactgagaatttcttccaaagattgattaaaatcatatatgttgctaaaaatttcttcattagaacttatagataaaaaagaagtaaaactcattttctttggttggttaactatgaaaagaattgttctgaactcaattgggaaaagagggtgccagcattcattattttttccttagatcctttttataactgggagaattttgaagtttggttattttcacaatttttattttttcttttaatctactttcatattattaatgataaggcagtgtataatatggttttctactcaagctgtgcaccagaattgcctatagaactttttaaaaataggcctaggcctcacacttgggatattttaatttagtaggtctggggtgtggctgaggcatctgtgttttttaaatgctccttggtgagtgtcatacatagaccagcttgagaacaattattctaatttttgatttgttatgattgaagtgggtaaggggaagcaatagtaaagtgactgctgctcatcaaaaagatatgatttaaaaatatttcttcatattatcattttactacttttaagggtttattacattctaatgcctatcattcattgtagagaattgtaccagcaatgaattatcactatgagctacttattagaacacagaaggaaataacacaaaataattttttagagactaaattttgttattttttttcttaaatcttgtcagtaatagttgtaattgtcatttggttagcaagtaataaactttatacctttaataaattcataaaatcgggtcactagtactacatagaaatgtgtgttacttataaaaattactttttaaaaaatggccagagatataaactacagatatgtattcagtatgatgcagtagagtgaagctgtctaggctccagttcctactctgctaatacctttatgaccatggacaaatcatttaacctctcagagtcttagttccctcatcattcaaatgggtctccttttgaaatttattattagtaattatatgtcaaaattaatgtaattgaaggataaccgaaacaaataccacctgtccttggtatgggttttctgtaacatttaagctctaaaatttcaaaagtttggactacttggacattgtgaaataatagatatcttccacagtaagaaccatgccatctccatacaacctgcatttcccagagtttcccagtaccgtgtgttccatacatttcctgaaaataagaaaatgggccgggcgcggtggctcacgcctgtaatcccagcactttgggaggccgaggtgggcggatcacgaggtcagaagatcaagaccatcctggctaacatggtgaaaccctgtctccactaaaaatacaaaaaattagccaggcgtggtggcaggcgccagtagtcccagctactggggaggctgaggcagcagaatggtgagaacccgggaggcggagcttgcagtgagccgagattgcgccactgtactccagcctgggagacagcgagactccgtctcaaaaaaaaagaaaagaagaaaatgcacttcagctatcttacttatctctgtttcaccatagtcatcaaggcaggaattatgagtgaggggatgactccaactttaagtttcaatttcaaacctaggtaatcaaactcttcaattttctggaatgatagaaaattaat

SEQ ID NO: 717523 - DNA, 3728 bp, Homo sapiens
tgatatttgtgctgagcatttagaagcaggtggaagttttccagctggatcaagtagagggactcctcagaacaaagacagcagagtagaaaggagcagcaaatgctgagagtattgaataattaagtatccctagatcacagcaaggaagcagtaggctggcaaaataagcaggcaccctctgagtgctttataatattccaaagtgaggaatttgaacttatgtaaacctggaacaattaagaaggtttaacgtattccaatttctttttcataaagatgactacaaattgcaaaggataaagaagatggaagatgaagactaatctgtagggagattttaagattgctttgaaagagtagttgttagagtggggggccgggggtagtgataccatttatcagartaaagaacataggagtaagagtagatttgtggtaacattcccaggttttaaggataagactataattttggatttgtagggtttaaagatactgttcaggatatccagatggaactatccactagatagtagatataatagagttatatttcataacaaagagttttgatccctttcttaaaaactcagtacttgcctatggtgccactggtgctgggaagacccacactatgctaggatcagctgatgaacctggagtgatgtatctaacaatgttacacctttacaaatgcatggatgagattaaagaagagaaaatatgtagtactgcagtttcatatctggaggtaagttgggaatttagattaatcaatagttttgggaaatcattgacatgattcatacaaatgattttattatataagagttttccggtgaatatataaaatcattaaaattccttgtcttgaatatttgttatgcatctttttctgttaattttttttttttttactttggcaaaatttcagacttatagagaagttgcaacaatagtacaaagaacttccagatacccttcatacagatcccccatatgttagcattttactgcatttgctttctatgtgtgtgtatacatttctttctttctgagctaggttgcagacttgtaaaaacaggactttttaaaaataactgctaaataggtaccaaaatcaggaaattagcaatgatacaatataattatctgtagatcttagtgagattttgctagttatttcattaataccctttattgtaaaagaaaattgtattcagttgttatatcttagtctccttaatctgtaattttttgtcttttataacactgccataaaaatccttagtttggatttatcatgattagattcagattatgcactgacagtaacacaagcaaagtgatgttcacttcttactgcatcaaaaaaggcttaagccgttgattagtccccatactgggaatgttaactttgatcagttttattatgctgtggtctgtagagtttctccactttgaagatacgttttaccatttataattagtaagtactatgtatgtagacaatgtaaatattccttactcctcaaacttttatctattgttattagtatccactgatgattggtgactgaatcaattactattatgatggtagatgatggtgatttttaaattccatcatttattgtacatttctttattgactttctactataaggaagagttttccccttattatatcagcctcctgcatttttactttattgaatagattataatccctttctgtaatcattttttgtatgttcaaattgtgtaagatttggctagttgagacttcttcatgttgtctcttgtgtccttttgaaataccccatcattctttgaggccttctaccctcttaatagtcaacaaatggtaactaagtggcagacactctaactttgcattcaaatagtgtttcagataccagtgcagaaacataaaaaccctgatttcattgcctatttatttctggtgccataaaatttctctcttattaacatcttgtagtttggtccctactgagaatttcttccaaagattgattaaaatcatatatgttgctaaaaatttcttcattagaacttatagataaaaaagaagtaaaactcattttctttggttggttaactatgaaaagaattgttctgaactcaattgggaaaagagggtgccagcattcattattttttccttagatcctttttataactgggagaattttgaagtttggttattttcacaatttttattttttcttttaatctactttcatattattaatgataaggcagtgtataatatggttttctactcaagctgtgcaccagaattgcctatagaactttttaaaaataggcctaggcctcacacttgggatattttaatttagtaggtctggggtgtggctgaggcatctgtgttttttaaatgctccttggtgagtgtcatacatagaccagcttgagaacaattattctaatttttgatttgttatgattgaagtgggtaaggggaagcaatagtaaagtgactgctgctcatcaaaaagatatgatttaaaaatatttcttcatattatcattttactacttttaagggtttattacattctaatgcctatcattcattgtagagaattgtaccagcaatgaattatcactatgagctacttattagaacacagaaggaaataacacaaaataattttttagagactaaattttgttattttttttcttaaatcttgtcagtaatagttgtaattgtcatttggttagcaagtaataaactttatacctttaataaattcataaaatcgggtcactagtactacatagaaatgtgtgttacttataaaaattactttttaaaaaatggccagagatataaactacagatatgtattcagtatgatgcagtagagtgaagctgtctaggctccagttcctactctgctaatacctttatgaccatggacaaatcatttaacctctcagagtcttagttccctcatcattcaaatgggtctccttttgaaatttattattagtaattatatgtcaaaattaatgtaattgaaggataaccgaaacaaataccacctgtccttggtatgggttttctgtaacatttaagctctaaaatttcaaaagtttggactacttggacattgtgaaataatagatatcttccacagtaagaaccatgccatctccatacaacctgcatttcccagagtttcccagtaccgtgtgttccatacatttcctgaaaataagaaaatgggccgggcgcggtggctcacgcctgtaatcccagcactttgggaggccgaggtgggcggatcacgaggtcagaagatcaagaccatcctggctaacatggtgaaaccctgtctccactaaaaatacaaaaaattagccaggcgtggtggcaggcgccagtagtcccagctactggggaggctgaggcagcagaatggtgagaacccgggaggcggagcttgcagtgagccgagattgcgccactgtactccagcctgggagacagcgagactccgtctcaaaaaaaaagaaaagaagaaaatgcacttcagctatcttacttatctctgtttcaccatagtcatcaaggcaggaattatgagtgaggggatgactccaactttaagtttcaatttcaaacctaggtaatcaaactcttcaattttctggaatgatagaaaattaat

SEQ ID NO: 717524 - DNA, 579 bp, Homo sapiens
cagccactcgggaggctgaggcaggggaattgcttggatcagggaggtggaggttgcagtgagccgtgagccgagattgtgccaccactgcttacgtcttggggatytaggggactcagcatgagctttctctctagaacaatgcctttgtgttgtttccaaggaactccacatgttagtcttcaggcccaccagggtctagggctcttccatggatagcattataggaatctgtgacgggaatgtggatcactggagaggtctctcacttttcctttccttgcaattgggagactttccacaccccccaccaatccctgaggaacaggctgcctcactttcctctccttccttgctttatgtgcttcctgtcacttctctgttgaattccagtgtttgatcttaaataatctattcaagttgtgattatttatttactattttggttcctctccatggcaaagggtagcaccagatgcatctagtcagctattttgaagctcctccctcctccatactttaaaaatataaatacttttcagtgtatgctattgatgaactcaaaaatattgctcagaa

SEQ ID NO: 717525 - DNA, 579 bp, Homo sapiens
cagccactcgggaggctgaggcaggggaattgcttggatcagggaggtggaggttgcagtgagccgtgagccgagattgtgccaccactgcttacgtcttggggatttaggggactcagcatgagctttctctctagaacaatgcctttgtgttgtttccaaggaactccacatgttagtcttcaggcccaccagggtctagggctcttccatggatagcattataggaatctgtgacgggaatgtggatcactggagaggtctctcacttttcctttccttgcaattgggagactttccacaccccccaccaatccctgaggaacaggctgcctcactttcctctccttccttgctttatgtgcttcctgtcacttctctgttgaattccagtgtttgatcttaaataatctattcaagttgtgattatttatttactattttggttcctctccatggcaaagggyagcaccagatgcatctagtcagctattttgaagctcctccctcctccatactttaaaaatataaatacttttcagtgtatgctattgatgaactcaaaaatattgctcagaa

SEQ ID NO: 717526 - DNA, 579 bp, Homo sapiens
cagccactcgggaggctgaggcaggggaattgcttggatcagggaggtggaggttgcagtgagccgtgagccgagattgtgccaccactgcttacgtcttggggatttaggggactcagcatgagctttctctctagaacaatgcctttgtgttgtttccaaggaactccacatgttagtcttcaggcccaccagggtctagggctcttccatggatagcattataggaatctgtgacgggaatgtggatcactggagaggtctctcacttttcctttccttgcaattgggagactttccacaccccccaccaatccctgaggaacaggctgcctcactttcctctccttccttgctttatgtgcttcctgtcacttctctgttgaattccagtgtttgatcttaaataatctattcaagttgtgattatttatttactattttggttcctctccatggcaaagggtagcaccagatgyatctagtcagctattttgaagctcctccctcctccatactttaaaaatataaatacttttcagtgtatgctattgatgaactcaaaaatattgctcagaa

SEQ ID NO: 717527 - DNA, 622 bp, Homo sapiens
tctggtcttatttctgaccaaattagagacggcaatgtacatagagaagttcagagggaaaatatattagtgttcagaaacaaaaattggaataaggcagttagagttaatattaatattcccaagctcaggacccaaaaatgcatgaataaaagaaggcaaagatgaagattcagataactagagggaaatgacttatctgataaaaacaggcatctatttttactgacattaaaaaccttgcttcaagttgatagcccctccaggatttatccagtratgtataaggtgactctagcctgtttccttgctaattacaaacaagtgactcataatttctgaatgagtttattacagacattaacggtttagttttatacggaaaaggcaacaataataatccctccccccagtcattttgtaattagccccgcaaatacatgaatgccatctctatagcaaaatcacctcaactaataaataatttattgaagacctaccatgtacaagttactatgttgtgcaagttgctatattgttaggagcagaaaggttaaaaagttgtattaacactcctcaaataatctacagtctcataggagagattgtacatattaccaag

SEQ ID NO: 717528 - DNA, 1430 bp, Homo sapiens
tgaaaaattcatgcttgctgtctactttttaaactattctctgattttttttccctagaatggtggcttagcattttattttgatccctaaggtttctcgtcatcagttcacagtagttatttgtgattcctgggcagtgtgttatacctacgcagtcacatytttgtgaaaagagcactctattctcttttcattaataaatccttttttcttcctgcccttgggaagcaagccctgagagagagttaagaaaatgttcccaggcctaaaattgactgccttgggattaagagcacaacctatgagacagagatggttaatctattaaagaacatgcagcttacagcacaataggtgtcacataaaaagtagagagatgggaatttcttttttagttgtaaatagacaacttataattgtacagggtaaaaaataatgtcaacatttatgaatggaatgtggagtaattaaatcatactagttaacataaccatcacctcaagtacttaacttttttgtggtgagaacatttgaaatttactctctcttcaattttgaaatatgtaatactttattcttaactatattcaccacactgtgcagtataacccagaacaagaaaacacatatttctcttgtctaatctcttttgtaccattgggccatcacttccctgttctctccatccccaacctctgttaccaccactctattctttgcttctagaacttcaatggttttagattttacatataagttagaatatgcagtacttgacaaactacacctgacttgttttacttagtgtaatgttctccaattccagagggttagaaatttctaagaacacagccttgtatctctctccacacagagctgtatcttttttagtatctcttcacttgccttcaataattcaagcatgtttaaatctgctatattgccaccagtaatctttgaaattcttccgaagtcctcttggctgtaacagacatgattggaaatgtagtaccaacaaaaggaaatagactatgagttgaaacacttgtcttttagttccacttctgccgaattgttctaggaccctggacgaagcatttaaacttcttgtactgctttatttgacaagtagatggtaaagacaacccaatttgactacttttatggttgaaaaatgaggtttaaaatagcatgtgtatgtataagtgtatgcataagtgtttaatataatgggttatacatatgagatattatactcctctaaatccatgttttcaccctctgaaaaggctggttctgaataattatcatgttgatggtacaaggaattgagtttaaatcttagttcttttgatttgtttttgctagtatttaaaaggtagtggtgtgacttcagattatacagaaatgaagaaaataagagcaaggg

SEQ ID NO: 717529 - DNA, 1430 bp, Homo sapiens
tgaaaaattcatgcttgctgtctactttttaaactattctctgattttttttccctagaatggtggcttagcattttattttgatccctaaggtttctcgtcatcagttcacagtagttatttgtgattcctgggcagtgtgttatacctacgcagtcacatctttgtgaaaagagcactctattctcttttcattaataaatccttttttcttcctgcccttgggaagcaagccctgagagagagttaagaaaatgttcccaggcctaaaattgactgccttgggattaakagcacaacctatgagacagagatggttaatctattaaagaacatgcagcttacagcacaataggtgtcacataaaaagtagagagatgggaatttcttttttagttgtaaatagacaacttataattgtacagggtaaaaaataatgtcaacatttatgaatggaatgtggagtaattaaatcatactagttaacataaccatcacctcaagtacttaacttttttgtggtgagaacatttgaaatttactctctcttcaattttgaaatatgtaatactttattcttaactatattcaccacactgtgcagtataacccagaacaagaaaacacatatttctcttgtctaatctcttttgtaccattgggccatcacttccctgttctctccatccccaacctctgttaccaccactctattctttgcttctagaacttcaatggttttagattttacatataagttagaatatgcagtacttgacaaactacacctgacttgttttacttagtgtaatgttctccaattccagagggttagaaatttctaagaacacagccttgtatctctctccacacagagctgtatcttttttagtatctcttcacttgccttcaataattcaagcatgtttaaatctgctatattgccaccagtaatctttgaaattcttccgaagtcctcttggctgtaacagacatgattggaaatgtagtaccaacaaaaggaaatagactatgagttgaaacacttgtcttttagttccacttctgccgaattgttctaggaccctggacgaagcatttaaacttcttgtactgctttatttgacaagtagatggtaaagacaacccaatttgactacttttatggttgaaaaatgaggtttaaaatagcatgtgtatgtataagtgtatgcataagtgtttaatataatgggttatacatatgagatattatactcctctaaatccatgttttcaccctctgaaaaggctggttctgaataattatcatgttgatggtacaaggaattgagtttaaatcttagttcttttgatttgtttttgctagtatttaaaaggtagtggtgtgacttcagattatacagaaatgaagaaaataagagcaaggg

SEQ ID NO: 717530 - DNA, 2006 bp, Homo sapiens
aggtcagcaataggaagatgccccaaattgaaagttcatatatttatatatgtattaagctttccatagtatctgtaatccacaacagacaggagagtgagcagtaaaaatcaggtcttctgaagtgagagtgttgagtttgaattttaactttaccattagccctccacactttatctgaaaatgttagcaataatattcatagtagagatttttaatgattaaattagtggatatatgcaaaacactgagaaaaatacttgtyctacaataatcactcactaaatactttctcttattattttttgaagactagatgtttttaccatttctgttttattcaacactttgtgaattcttcctcaaaatcagcaatatctgatgctctaaaaagttttaataagttaaatttggagatatcacattttactttgcatttcttaagtaatgagtttgctgtattagttttcctatgacatgttttgatatgtaaagtatgatttatattgtttacccatttttacattatagaatttatctctggtcttttcttcttactttttttgtgtgtttctacatattgctttagtgtgaattccaagaaaatagagcctgagtcaaaggtatatctggtttataaacaccaggagcactaaaattttttcataaatgttgtagtttttctattttatgttttaaattggagagatgaaagtatttaaatgcatataatctgatatgtctattttaaaaatgttttattggattgaatttatagcccatctagttgtgtatatcatatattgctagcataagcttagaacttttccttaagggcaattaaaaaaaagtcatctccctgttaagattggtgtttctaatatttgaaaacataatttcattcaaaaagtgatattctgttactgttaaagaaaaataattgaaaacattaatatatcatgacagaaatggtgatgaatttaacatttcttgactacttatggttatgaaataagaatgatatttatagatttaattaattaaataacattttttcaatagctacttttctagtaccactgagcaggtacatatttgtcttattttcctctcttctgaaatatgttttaaaataaaatgctgataatgatcccacagtaaaatatttcaccaaaataatgacatgagcatttaaaaataattattatttcttactatgaagggctattgaattccctattcctttgttatacgtgacattagaaatggaattgagttctctaattattgctgtaaattcttgtcttttataggagggatattttatggttgattgcaagctcaatgtcctatattagcaattcatcattttataatattaatattcatttttactaaatatagaaacctcatataatcagcaatttcctcatcaatttgaggaaatcaaattcattattaagagttagtataatattaacaacaaaatgcctttcctggtaaaaataaacaaatcttgattcacctattatgtttaattttgcataatacgacagaaaattataatgtgattcttaaataatcttaaatgtatctagtgaaataactcattcaacctataggctaaataaatgggagaaaaacagagagagagaaagaaagaaaaaagagagaaagagaaagagagagacaaagtgaaagaaagaaactaaaaataatgtttatttttttctaaagatattaacaagaagtacagaagtcttccagatcatctaaaaactaaccttgctcttagttaatatgtctttttcttgccaatgtaaatccaaaatttatacttaattttatttagttactttgagaactatctaggggtttgagggtaaaactattaacactagagcaatatgtatttttattcaaggagtatacaaggctggaaagggtataattatgcatattcaagtgaaagcaaaggtctcatactgctgaagataaagaataaa

SEQ ID NO: 717531 - DNA, 2006 bp, Homo sapiens
aggtcagcaataggaagatgccccaaattgaaagttcatatatttatatatgtattaagctttccatagtatctgtaatccacaacagacaggagagtgagcagtaaaaatcaggtcttctgaagtgagagtgttgagtttgaattttaactttaccattagccctccacactttatctgaaaatgttagcaataatattcatagtagagatttttaatgattaaattagtggatatatgcaaaacactgagaaaaatacttgttctacaataatcactcactaaatactttctcttattattttttgaagactagatgtttttaccatttctgttttattcaacactttgtgaattcttcctcaaaatcagcaatatctgatgctctaaaaagttttaataagttaaatttggagatatcacattttactttgcatttcttaagtaatgagtttgctgtattagttttcctatgacatgttttgatatgtaaaktatgatttatattgtttacccatttttacattatagaatttatctctggtcttttcttcttactttttttgtgtgtttctacatattgctttagtgtgaattccaagaaaatagagcctgagtcaaaggtatatctggtttataaacaccaggagcactaaaattttttcataaatgttgtagtttttctattttatgttttaaattggagagatgaaagtatttaaatgcatataatctgatatgtctattttaaaaatgttttattggattgaatttatagcccatctagttgtgtatatcatatattgctagcataagcttagaacttttccttaagggcaattaaaaaaaagtcatctccctgttaagattggtgtttctaatatttgaaaacataatttcattcaaaaagtgatattctgttactgttaaagaaaaataattgaaaacattaatatatcatgacagaaatggtgatgaatttaacatttcttgactacttatggttatgaaataagaatgatatttatagatttaattaattaaataacattttttcaatagctacttttctagtaccactgagcaggtacatatttgtcttattttcctctcttctgaaatatgttttaaaataaaatgctgataatgatcccacagtaaaatatttcaccaaaataatgacatgagcatttaaaaataattattatttcttactatgaagggctattgaattccctattcctttgttatacgtgacattagaaatggaattgagttctctaattattgctgtaaattcttgtcttttataggagggatattttatggttgattgcaagctcaatgtcctatattagcaattcatcattttataatattaatattcatttttactaaatatagaaacctcatataatcagcaatttcctcatcaatttgaggaaatcaaattcattattaagagttagtataatattaacaacaaaatgcctttcctggtaaaaataaacaaatcttgattcacctattatgtttaattttgcataatacgacagaaaattataatgtgattcttaaataatcttaaatgtatctagtgaaataactcattcaacctataggctaaataaatgggagaaaaacagagagagagaaagaaagaaaaaagagagaaagagaaagagagagacaaagtgaaagaaagaaactaaaaataatgtttatttttttctaaagatattaacaagaagtacagaagtcttccagatcatctaaaaactaaccttgctcttagttaatatgtctttttcttgccaatgtaaatccaaaatttatacttaattttatttagttactttgagaactatctaggggtttgagggtaaaactattaacactagagcaatatgtatttttattcaaggagtatacaaggctggaaagggtataattatgcatattcaagtgaaagcaaaggtctcatactgctgaagataaagaataaa

SEQ ID NO: 717532 - DNA, 2006 bp, Homo sapiens
aggtcagcaataggaagatgccccaaattgaaagttcatatatttatatatgtattaagctttccatagtatctgtaatccacaacagacaggagagtgagcagtaaaaatcaggtcttctgaagtgagagtgttgagtttgaattttaactttaccattagccctccacactttatctgaaaatgttagcaataatattcatagtagagatttttaatgattaaattagtggatatatgcaaaacactgagaaaaatacttgttctacaataatcactcactaaatactttctcttattattttttgaagactagatgtttttaccatttctgttttattcaacactttgtgaattcttcctcaaaatcagcaatatctgatgctctaaaaagttttaataagttaaatttggagatatcacattttactttgcatttcttaagtaatgagtttgctgtattagttttcctatgacatgttttgatatgtaaagtatgatttatattgtttacccatttttacattatagaatttatctctggtcttttcttcttactttttttgtgtgtttctacatattgctttagtgtgaattccaagaaaatagagcctgagtcaaaggtatatctggtttataaacaccaggagcactaaaattttttcataaatgttgtagtttttctattttatgttttaaattggagagatgaaagtatttaaatgcatataatctgatatgtctattttaaaaatgttttattggattgaatttatagcccatctagttgtgtatatcatatattgctagcataagcttagaacttttccttaagggcaattaaaaaaaagtcatctccctgttaagattggtgtttctaatatttgaaaacataatttcattcaaaaagtgatattctgttactgttaaagaaaaataattgaaaacattaatatatcatgacagaaatggtgatgaatttaacatttcttgactacttatggttatgaaataagaatgatatttatagatttaattaattaaataacattttttcaatagctacttttctagtaccactgagcaggtacatatttgtcttattttcctctcttctgaaatatgttttaaaataaaatgctgataatgatcccacagtaaaatatttcaccaaaataatgacatgagcatttaaaaataattattatttctyactatgaagggctattgaattccctattcctttgttatacgtgacattagaaatggaattgagttctctaattattgctgtaaattcttgtcttttataggagggatattttatggttgattgcaagctcaatgtcctatattagcaattcatcattttataatattaatattcatttttactaaatatagaaacctcatataatcagcaatttcctcatcaatttgaggaaatcaaattcattattaagagttagtataatattaacaacaaaatgcctttcctggtaaaaataaacaaatcttgattcacctattatgtttaattttgcataatacgacagaaaattataatgtgattcttaaataatcttaaatgtatctagtgaaataactcattcaacctataggctaaataaatgggagaaaaacagagagagagaaagaaagaaaaaagagagaaagagaaagagagagacaaagtgaaagaaagaaactaaaaataatgtttatttttttctaaagatattaacaagaagtacagaagtcttccagatcatctaaaaactaaccttgctcttagttaatatgtctttttcttgccaatgtaaatccaaaatttatacttaattttatttagttactttgagaactatctaggggtttgagggtaaaactattaacactagagcaatatgtatttttattcaaggagtatacaaggctggaaagggtataattatgcatattcaagtgaaagcaaaggtctcatactgctgaagataaagaataaa

SEQ ID NO: 717533 - DNA, 656 bp, Homo sapiens
tgaggaggcccatgtggctggggcagagccaagcaagagggagaggggaaggagatgaggtcagggaaatgatggagggtagattgcgcagggccttggaaatgacaaagaagactttggcttatgccctgagatggaagcctcacgttctcactttagcatctccctgaggtagtcactaaaatggtgaagagtgtccactcctttttcccaacccattcaatggcagagattgtgggttggcctctaacatccattccccactttctcctttacaaatgaaacctgcccagctaaagactgtgttgcccggcctctcttgcaggtcagtgtgactgtctgacatattgtgaacaacgggacagaagcaggtgtaacctcagaagaraagaacaggccttcttcttcctcttcccccactgccccccacctgtgtctggaaggtggccaccatcacaggggccggagtagccactgtggtccacaagatagaagttgggggctgaggaggcagagcaacaagaccgaaggagccctgggtccctggtgattgtggagcctctgctgcagcctgggttgatgcccaggttatgaggacaggagtgatgagtgtcacccttgtttaagccatggtcttatgggtttctggcaacata

SEQ ID NO: 717534 - DNA, 609 bp, Homo sapiens
tttaacatatatattaaacacatctaataatgtatttatcaaataatacattctatccaaatgtcatgtacaacatgaaatacatggaaaattcaagatactttgtaaaaacttcattaactgaagtaaaatcttgactaaggcaatgataaaaaagaaattattgcatatattcctcaaatgttagctcgttttatggacattatagtacacaatttaacagaatattttaagtactgctcaatattccaaaaatagacagctgccatataggttttattaatcttgatttaaggcactgaaggtcaaattattttcctctttccttttgaatggccctgtcttggaaggctacctgttgagtactatgctcactatgctcaccttggtgacaggatcttttgtataccaagcctcagtgacatgcaatttaaccatgtagcaaacctgcacatgtacccctgaacccaaaataaaagtagaaaaaaataaagagccaataaaatttattcttgttgtcrtagtcctacattatccaaaatatatacgttattcacataagaaattgatggctaaatttttatatatagttgaattttcatttattca

SEQ ID NO: 717535 - DNA, 641 bp, Homo sapiens
catgccagacccctaaggttaaccatgagatgttgcagaaggcacttctatgccattttagctattagattgaawcacctctgggctccctttcaaatctaaatgctaagatcccatgactcaagcctggaggattaataggtgagctcagacttgtttcttctatttttactattttgatagccaaagaaataattcatcaaattattcataagctaaagcctacttgggatttttacacctagaagatggtggggtatgatttcccagtgcagtaaatgagaaaacaataggagacatcaaggaggaaaaaaagaaggaagagataaagggaatgtcttaagggaggctcagaggttgaatgaaggaaatgaggtgattttgcagaggacagatgtggctatcaaagattttacaatttcacctttggaaagggatccaaacataatgtcactccaagtaagtgagcagccttttgtactcgaaaatagggccaggggagcaaagtttcttccaatttaaacacactcaaaaggatgtgtaattgctttctgatgggagggaactctgaaggtagaaagactattgttaccacagatcacttgtccctggagatatagcatctgaggactgactgtcta

SEQ ID NO: 717536 - DNA, 907 bp, Homo sapiens
ttaaaatgaagatgttgcttctgtaggtttggggtgaggcctgtgctcccaggcgatgccaatactggtagtcaatgactacattttgagtagcaagaatccagagcagtgtttctccaatttgctgtgctctggaatcacctgggtagctttacaaactacagaagccaccccaagcgatttttacttaattggtgtgggttgtggcctggacgttgggattttctttttacattacccaagtcatgctaacgtgcagccaagttggagaagcttgaaactcatcattctcggtagttggctaaatttaagtagtggcattctcaacatagcttccgccccatatatagcaacccaacagcacccaagatgaaaacagggctgcgaacatgacagacttcagccagcagacctacattccacccaagctttgtcatgaactctgatcttaagcaagtcacaaatctgagtttcaatttcttcacctaactaatgaggacaggaacccctaagataattgcaagaataaaatgagagaatatttgtgaaggtgctttggaaaatattgtatcttataagtcaacacatacataacccccatttttcactctgtctacaytgcctaagagaaatatatttcacttttaccactaaaacatgttgaaacagatgtaaatgtggtagcacatacttagttcaatttctagcagagtgcataatgatgcagttccaggaatgcactgtcataagagtggaagcacctgtaacaatcgaaggattagtaaaggattacctgctccaggaagaagacaaaggactgccatttcccagggttgtcagcactgccttttgccattaacttcaaatatacttaatgaaaacaaggaggcaggttcacagctgtaag

SEQ ID NO: 717537 - DNA, 910 bp, Homo sapiens
tagtcactcgattgtgctgctgaacactagatgttattcttcctaactgtatttttatacccattaaccatcccctcttaatccccacatccccactagtttttccatcttctggtaactaccatcattctagtctctgtctccctgacttcaaaaattggaatgttcctaacacaaagaaataataaaatgtttgaggtgatagatatcccaaataccctgatttgatcattacattttgtatgtttgtatcaaattataacatataccccataaatatgtgcaacttttctgtatccataataattaaaaataaaaaattttaaaaacaaatatgtttttttttttttcctagagttgcttagataccatagctttgctgcttacctggggatagctttgctgcttacatggggaatccaaaatttaagtttcttagtgctgattgaagctatcttataacttctgaaagcagtaatatatgattgtagaggatgaaaatctcttaagttactactatttatgaggaaactaggtattctttgaattagaaatttgttagaggaatctgtcatctcttccttctttctttcctccatgcacatttattagatgctgtgtctgtgtctgaattgcyttgtaacaaatcttctcaaaatttagtggcttaaggaaatattgacttactgtttctctttattctgtgggttgacagtcggggcactttttctgctggtattgttcatgcagtgagggtcattcagtactagattagagcttggggattcaaattattctgacagacctgtgtggcagttcaggctgatagctggagtttcttgtctttttctacatggcctttcatcttccaagagttagactatgattcttcacatcatgatggcttagg

SEQ ID NO: 717538 - DNA, 639 bp, Homo sapiens
gccaagatctcaccactgcaccccagcctgggcgacagagcgagactccggctcgaaaaaaaaaaaaaaaaaaaaaaaaaaaaaggattcatcatttttctggactggtgtctccttcccaggtcctcactgatggtgccactgtcactgtgtgaaaggcatgtggctctggggaraagaagctcatgtcctgagaacaccctgtcaccctttcatagaaaacggaattagcagctgtttgtcagcatttgcaaatgttacatggcttgaaaaggcagaattctgggaactcagtagctgccctgtcaccaaggtcaaatggtcctcatggctcaaaaactctcccagccctcctatagggtcttttttgactgtcttttttttagggcttcaccctgattttatccttttcctcctatttctggtatgaaataaaagtacttgatttcctactctgtaatgtgtgctttggttttcatcttaccttttataaacaactgtttgagcaaaataaaaatacatctttgcatagatcctttggttaatcttcagtgatgctcacttggttaacttttaagaaacctaagccgccgggcgcggtggctcacacctttaatcccagcactttgggaggctgag

SEQ ID NO: 717539 - DNA, 807 bp, Homo sapiens
tgaatagacctagggatatgatctggcctaagtttgtttaagggttacatagactgagtaggggattagaggaagagccctaccaaggattcctaagacaacactctgggctctgtagaggggagagtggagacaggaggactgtgtcactcagatctagctttcagggtcgtcatagtcagatcttggtctggacacacgcaagagacatgaaggagacttttgaaaggaacayacccttgtggtttgcggtattcaggccagtcaagggggccagatcacccccacagaatggggtggggatagtgtgaaaccagaggggacagagagcctaatggggctagtgaggagggaaggtttcctggaacctggaagaggagatgtgatccataggctcagtgcaattcctgccaaactcccaagtttttttgtgagaaagttggcatactgtttttcaaatttatatggaaaagcaaagaccgcagaagagcctagacaatctatctctctttttttttttatttttttgagagacaaggtcttggtctgttgcccaggctggagtgcagtggcatgatcctagctcactgcagcctgaaactcctaggctgaagtactccactggtctcagcctcctaagtagctaggactacaggtgtgtgccaccatgcctggctaatttttaaattttttatggagaagggtcttgctatgttgcccaggctgttctcaaactctggccttcagtaatcctcctgccttagcttcccaaagtactgggattatagacatgagctactgtgccca

SEQ ID NO: 717540 - DNA, 807 bp, Homo sapiens
tgaatagacctagggatatgatctggcctaagtttgtttaagggttacatagactgagtaggggattagaggaagagccctaccaaggattcctaagacaacactctgggctctgtagaggggagagtggagacaggaggactgtgtcactcagatctagctttcagggtcgtcatagtcagatcttggtctggacacacgcaagagacatgaaggagacttttgaaaggaacatacccttgtggtttgcggtattcaggccagtcaagggggccagatcacccccacagaatggggtggggatagtgtgaaaccagaggggacagagagcctaatggggctagtgaggagggaaggtttcctggaacctggaagaggagatgtgatccataggctcagtgcaattcctgccaaactcccaagtttttttgtgagaaagttggcatactgtttttcaaatttatatggaaaagcaaagaccgcagaagagcctagacaatctatctctcttttttttttwatttttttgagagacaaggtcttggtctgttgcccaggctggagtgcagtggcatgatcctagctcactgcagcctgaaactcctaggctgaagtactccactggtctcagcctcctaagtagctaggactacaggtgtgtgccaccatgcctggctaatttttaaattttttatggagaagggtcttgctatgttgcccaggctgttctcaaactctggccttcagtaatcctcctgccttagcttcccaaagtactgggattatagacatgagctactgtgccca

SEQ ID NO: 717541 - DNA, 807 bp, Homo sapiens
tgaatagacctagggatatgatctggcctaagtttgtttaagggttacatagactgagtaggggattagaggaagagccctaccaaggattcctaagacaacactctgggctctgtagaggggagagtggagacaggaggactgtgtcactcagatctagctttcagggtcgtcatagtcagatcttggtctggacacacgcaagagacatgaaggagacttttgaaaggaacatacccttgtggtttgcggtattcaggccagtcaagggggccagatcacccccacagaatggggtggggatagtgtgaaaccagaggggacagagagcctaatggggctagtgaggagggaaggtttcctggaacctggaagaggagatgtgatccataggctcagtgcaattcctgccaaactcccaagtttttttgtgagaaagttggcatactgtttttcaaatttatatggaaaagcaaagaccgcagaagagcctagacaatctatctctctttttttttttwtttttttgagagacaaggtcttggtctgttgcccaggctggagtgcagtggcatgatcctagctcactgcagcctgaaactcctaggctgaagtactccactggtctcagcctcctaagtagctaggactacaggtgtgtgccaccatgcctggctaatttttaaattttttatggagaagggtcttgctatgttgcccaggctgttctcaaactctggccttcagtaatcctcctgccttagcttcccaaagtactgggattatagacatgagctactgtgccca

SEQ ID NO: 717542 - DNA, 1118 bp, Homo sapiens
gacaaggcatgtaaaggagagctactttctcaactgtcagattcgagggtctttaagtagaacttcaattctcagccctgaaatctgaactttatgtaacaggtgaatgaggagaaatttgcattacttattttccctctcgtgtttttcaactacaaatgatattgtcagctgtggagtgacaaagtagatgtgctgatctagagaagagagaaagagctcagtgtttccccagggctactggaaatcctcatgcgacgttatatcagaatcccttgtgctcttgcatttgttaagtctaagtcttttagccatttgccatctcaggaaagtgaaatgctcaggcttgacttcaccatggggtcagagtgtcacatcctaagcaactggtaacatcagagaagtggcccagtgcatgaggtgcattccttcactaagacccaggtttccaaggtcccttaagtctcacaaagaaggctgttttgatgaaattttcgctgagttatccctgaaatttggctgttgaaagattaatttgaccttcacctaattaaaaaaaaacacagaaagagaacgttaatattactcatgagacattaaatacattgtttttaagaacaaggtacttttttttttctttttttgagaccgagtctyactctgacacccaggctggagtgcagtggcgcaatcttggctcactgcaacctctgcttcccggggtcaagcgattttcctgcctcagcctcccaagtagctgggattacaggtgggtgccgccatgctcggctaatttttgtatttttaatagagacggggtttcaccatattggccacgctggtctcgaactcttgacctcaagtgatccactcacctcggcctcccaaagtgttgggattacaggcatgagccaccatgcccggcccaagatactttatataaacatttgctgtacattttgcatatgtttatgttgagctattaaatatctcaattaagttcttagatattacttatggttttaatatatctgggtgtgttgcactcccatgcaatttgtattaaaggatgcaccgaacactatattgctggctggagatcattcattcattcattc

SEQ ID NO: 717543 - DNA, 1118 bp, Homo sapiens
gacaaggcatgtaaaggagagctactttctcaactgtcagattcgagggtctttaagtagaacttcaattctcagccctgaaatctgaactttatgtaacaggtgaatgaggagaaatttgcattacttattttccctctcgtgtttttcaactacaaatgatattgtcagctgtggagtgacaaagtagatgtgctgatctagagaagagagaaagagctcagtgtttccccagggctactggaaatcctcatgcgacgttatatcagaatcccttgtgctcttgcatttgttaagtctaagtcttttagccatttgccatctcaggaaagtgaaatgctcaggcttgacttcaccatggggtcagagtgtcacatcctaagcaactggtaacatcagagaagtggcccagtgcatgaggtgcattccttcactaagacccaggtttccaaggtcccttaagtctcacaaagaaggctgttttgatgaaattttcgctgagttatccctgaaatttggctgttgaaagattaatttgaccttcacctaattaaaaaaaaacacagaaagagaacgttaatattactcatgagacattaaatacattgtttttaagaacaaggtacttttttttttctttttttgagaccgagtctcactctgacacccaggctggagtgcagtggcgcaatcttggctcactgcaacctctgcttcccggggtcaagcgattttcctgcctcagcctcccaagtagctgggattacaggtgsgtgccgccatgctcggctaatttttgtatttttaatagagacggggtttcaccatattggccacgctggtctcgaactcttgacctcaagtgatccactcacctcggcctcccaaagtgttgggattacaggcatgagccaccatgcccggcccaagatactttatataaacatttgctgtacattttgcatatgtttatgttgagctattaaatatctcaattaagttcttagatattacttatggttttaatatatctgggtgtgttgcactcccatgcaatttgtattaaaggatgcaccgaacactatattgctggctggagatcattcattcattcattc

SEQ ID NO: 717544 - DNA, 761 bp, Homo sapiens
ttctgtgaagtgtggtctgaggaattttttaagaatctaaacccggcatgtgaatcaataataaagtacagtcatgagtcacttaatgtcacttaacaacagggatatgtcctaaagrcgccattaggcagttttgttgtatgcacatcatagagtgtacttacacaaacctaaatgacatagcctacacacctagaatatatggtattgctttgaggctacaaacctgtacagcatgttactgtactgaatgtgagaggcagttatagcacattggtaagaatttgtacatctaaatacatcttaagagaaaacgtacagtgaaaatgtggtattataatcttaagagaccactgttaggtatgcagtctgtcactgaccaaagcagcatttgtggcacgtgacttgcaaaagcaaacagaactgatttttctctttcttacagctagacagtctacagtataacctggttaattgaaagtattaataatataggtttgtggtaccatcaggctctataaaattgattctggcatttaatgattttctttggcaaaaactatttcaatattgcattttgggccaggcgcagtgactcatgcctataatcccagcactttgggaggccaagccaggcggatcacgaggtcaggagtttgagaccagcctgaccaacatggtaaaaccccattgctactaaaaatacaaaaattagccgggcatggcggcacgcacctgcagtcccagctacttaggaggct

SEQ ID NO: 717545 - DNA, 642 bp, Homo sapiens
aggccagagttctccaaacttgcttaaccacaatacctccccttttcctcacacagaaggaaggatagacccacattcattctcatgatcccagggggttctaaatgatcctaacaaggaaaggggccactaccccatagagagatagtcccaaaacagcaaaggaacgaagagcatccacactcttcacgccaataccctccatcaccaccacctactaactctggaacacatcatgtttctaaaaatcaaacagatccttcagacctaaacagctggcttcacccaaacagatggacactctggttgcccctgcacattccagaacccacctgctctgcccaacttcagcaaagccaacycccagggccacatgaatacccaagtaaaggccagatcccagaggctggggccagcggaaggtcttcatcaccactgggagggcagcactttctttgaagtgggtaggggaggagggatctgggtgcatgtcctgagtccccaggtggccgcccacagggtgcatcacatggttctgcttggctcactaagccaagaggctcctggcaacagctccctcactgtgctcactgcttacttacccacacagccgtgagctgccccactgccccgcctctgcag

SEQ ID NO: 717546 - DNA, 625 bp, Homo sapiens
aaaacaccatgaaattctgagacaaaggcaaatttacaaatttgtttttcagtgtaaattttagagagacaaagtatagatttgaatacaacatacctgaaacaaatgaacagagtaatttctatttcaataaggttgacattttcaaaaaggctattatagttaaatctctttaagaaaaaagcagttgtagggtgatgtaggagattttacctaaagcagttaaaactgtcgacacgtgagtcatctttgactggaaatttagcatgcatatttccaattcrtgctgaaaattaggtgtgtatcattttgtactgtgtttatattgggggaggtagaaatgagagttttgtttcttctatgtacataacataattctttattatgggtatgctacaaattcaggttgccagtgtaactggtccacattagtcctaaatcttgacaattccaattgtcaaatatggagaaaaattcactctgaataaagggagattcataccagtcaggttcataccagtcttttgaaccaaattgatatctctttctttctctctctgtctctctctctctctctctcacacacacacacacacacacacacacacacacacacacatttctg

SEQ ID NO: 717547 - DNA, 603 bp, Homo sapiens
aaacattagccaatttaacaattgccataataaatgttgcactaggccggcctggtggctcacgcatgtaattccagcacttatgggggctgaggagggcggatcacttgagggcaggagttgagaccagactagccaacatggtgaaaccccgtctctactaaaaatacaaaattagtggggcatggtggcaggtgcctgtaatcgcagctactcgggagtctgaggtaggagaatcgcttgaacctggaaagcagaggttgcagtgagctgagattgtgccactgcactccagcctgggcaacagagygagactccatctcagaaaaaaaaaattggcacataaaagtagaaaaaaagtacaattgagtagtatgcaaatactgtacacacaagcctgttgaatgttgatgttttcttccaaaatagtctaaaacttggtttaagtatttatattcctaaatcctgggaaaattgcacatcctgtcttcgattatgttctttgggatattaagggtttcacgaacaaaaacaaacaagttagcattaaataagtttggagaatagtgcattccttatcttcctcctggagattcccaaagc

SEQ ID NO: 717548 - DNA, 596 bp, Homo sapiens
ggcttgtgcttttttgtttcttacctaagaaatctttaagaacctgttgtttaatccaaagtggaaaagatttactctatatgtcttctcccagaaattgtgtagttacatttagatctatgatccattttgagttaatttgcatatatggtgtgaggtttattgtttttttgtttttttgccattttatttttattttttggagaaatgaggtctcactgtgttgtccaggctggtttcgaactcctggcctcaagtgatcctccggcctcgttctcccagagtgctgcaattataggcatgaggcatcatgcctggccttctttgtagatataggtatagatatatatccgtctatatctatatatatcttcaccaggtgtgatggcacactcctgtagtccccgctactggggaggctgaggcgggggtatcgcttgaacccaggaggtagaggttgcagtgagccaagatgacaccactgcactccagcctgggtgacagagcaagaacctgcctaaaaatatatatatatatatatatatatatatatatatatatatatmtgtatgtatttttatatatatttctatata

SEQ ID NO: 717549 - DNA, 596 bp, Homo sapiens
ggcttgtgcttttttgtttcttacctaagaaatctttaagaacctgttgtttaatccaaagtggaaaagatttactctatatgtcttctcccagaaattgtgtagttacatttagatctatgatccattttgagttaatttgcatatatggtgtgaggtttattgtttttttgtttttttgccattttatttttattttttggagaaatgaggtctcactgtgttgtccaggctggtttcgaactcctggcctcaagtgatcctccggcctcgttctcccagagtgctgcaattataggcatgaggcatcatgcctggccttctttgtagatataggtatagatatatatccgtctatatctatatatatcttcaccaggtgtgatggcacactcctgtagtccccgctactggggaggctgaggcgggggtatcgcttgaacccaggaggtagaggttgcagtgagccaagatgacaccactgcactccagcctgggtgacagagcaagaacctgcctaaaaatatatatatatatatatatatatatatatatatatatatatatrtatgtatttttatatatatttctatata

SEQ ID NO: 717550 - DNA, 596 bp, Homo sapiens
ggcttgtgcttttttgtttcttacctaagaaatctttaagaacctgttgtttaatccaaagtggaaaagatttactctatatgtcttctcccagaaattgtgtagttacatttagatctatgatccattttgagttaatttgcatatatggtgtgaggtttattgtttttttgtttttttgccattttatttttattttttggagaaatgaggtctcactgtgttgtccaggctggtttcgaactcctggcctcaagtgatcctccggcctcgttctcccagagtgctgcaattataggcatgaggcatcatgcctggccttctttgtagatataggtatagatatatatccgtctatatctatatatatcttcaccaggtgtgatggcacactcctgtagtccccgctactggggaggctgaggcgggggtatcgcttgaacccaggaggtagaggttgcagtgagccaagatgacaccactgcactccagcctgggtgacagagcaagaacctgcctaaaaatatatatatatatatatatatatatatatatatatatatatatgtatrtatttttatatatatttctatata

SEQ ID NO: 717551 - DNA, 596 bp, Homo sapiens
ggcttgtgcttttttgtttcttacctaagaaatctttaagaacctgttgtttaatccaaagtggaaaagatttactctatatgtcttctcccagaaattgtgtagttacatttagatctatgatccattttgagttaatttgcatatatggtgtgaggtttattgtttttttgtttttttgccattttatttttattttttggagaaatgaggtctcactgtgttgtccaggctggtttcgaactcctggcctcaagtgatcctccggcctcgttctcccagagtgctgcaattataggcatgaggcatcatgcctggccttctttgtagatataggtatagatatatatccgtctatatctatatatatcttcaccaggtgtgatggcacactcctgtagtccccgctactggggaggctgaggcgggggtatcgcttgaacccaggaggtagaggttgcagtgagccaagatgacaccactgcactccagcctgggtgacagagcaagaacctgcctaaaaatatatatatatatatatatatatatatatatatatatatatatgtatgtatwtttatatatatttctatata

SEQ ID NO: 717552 - DNA, 1052 bp, Homo sapiens
gcgtgagctcacttaacaccaaagagatggcccaacccattcatgagggaccggcccccatgatccaaacacctcccaccaggccccacccccagcattggagattacaattcaacatgagatctgggcaggaacaaatattcaaattataccagagaggttaagaaaattgaccaaggtcacacagcaagcatgtggtgaatacgttttgttaacccaggtaactgactctagaatttatgctccttttaatctgtcacagttgagttttactttgatgacttgttattagtgactgctgtaaatctataactgtttaggtcatctctactgtacaatggtcatgggtgattgaaccactaattaatcatgtgtctttgggtttattcactcattaaacaatgacttgttgagccccaattatgtgacagctactgagtaaggtaattgcactgyagcagggaataagagagatgcaattcctgtctttatgagcttacattatggaaacagtaagcaagtaaagagattaacatgttgaagtctgtgaagggattacttcagtgagtagaaccttaatgcaatccaatactccagattgctataggaatgagatgtactggtaaactgaatagtctggttatttatgtagactttatcaagaaatggatctggactcacttcatggcaaatctccaggtgacaatgcccatattgtttcacctacagattagtttccataaaacagtgcccctcattcttctgtgtatatgccactcaaactgttactcctttaatttttttctagttttttcctttggaagactttgctaggtttcactgttactaaaagggaagtagcagaccacttcagtagggttatgccatctctattttggagtgagggtgcttttaaaaaatggtactgggtttttcttcttttaaaggtcacacagttctgatttagaatgctctcaaaaacatatagataaatttaaaacatgaaatttgaacatgagtgctataataacatttatttaaaaaaaactatc

SEQ ID NO: 717553 - DNA, 659 bp, Homo sapiens
acaataaaggcaaacagagggaaattctttgaaagtcctgagtccctcccaacattataaagctatccctaaggaaaacctgttcaggagattctctgcaccccattctctcctgtttccctagagactttgctccatctgttagccactttcaaatataggttctttgttggatcttcttgtcatcatttaagcacgttctttgttggatcttcttgtcatcatttaagcacgttctagcctctttcatcttaaaaaacaaaaacaaaaaaaacccaaatcctccattaatcatacattctcttctagttactatctctctctctcyttctttatttttccagctaagttgctgacttcactttgcactacctgctcactcataaccctttgcggtctgtttttttccccaagattaaatgattgttataaaagtgcatcacactgtatggaaatcaacattttctgccataattttgcgtatctaggactatagaaatatcactgtctctgccccacatcttcaaatcacacgaataagtcttccttaagaggaacttctggaaaaacaagctatttcctgggcttatatttccctgcttttgtagcatgcatcaacaatctatccatgcagtatacattggggagtaaagagggca

SEQ ID NO: 717554 - DNA, 659 bp, Homo sapiens
acaataaaggcaaacagagggaaattctttgaaagtcctgagtccctcccaacattataaagctatccctaaggaaaacctgttcaggagattctctgcaccccattctctcctgtttccctagagactttgctccatctgttagccactttcaaatataggttctttgttggatcttcttgtcatcatttaagcacgttctttgttggatcttcttgtcatcatttaagcacgttctagcctctttcatcttaaaaaacaaaaacaaaaaaaacccaaatcctccattaatcatacattctcttctagttactatctctctctctccttctttatttttccagctaagttgctgacttcactttgcactacctgctcactcataaccctttgcggtctgtttttttccccaagattaaatgattgttataaaagtgcatcacactgtatggaaatcaacattttctgccataattttgcgtatctaggactataraaatatcactgtctctgccccacatcttcaaatcacacgaataagtcttccttaagaggaacttctggaaaaacaagctatttcctgggcttatatttccctgcttttgtagcatgcatcaacaatctatccatgcagtatacattggggagtaaagagggca

SEQ ID NO: 717555 - DNA, 974 bp, Homo sapiens
ttgtgctctgtagctactgaggaaagtaatcagagagactcagaaatcaacaagtactaactacttaaagtgtgtgcccagcctagggctaagtactgaagtggaggtgatttggggagaggaataaagtttgtatgtttgtgtgtctctstgtgtgtgtgtgtgtgtgtgtctgtgtgtgtgtgtgtgtgtacacacatatatatctctatatatctttaagctgctttaccactgaattcctagcatcaatgcctccatattcaatatgataggtaattacatagcatgcctcattttagaacccaaaacatatggaactttggaatttttaaagttattattattatttattttaaagattttcacatttttcctcatatcctaatagcgtgttcattttcaccattgcatgttttttacttatactttctcttctttatgtttccttgttttacttttaaagtgcaaataatcagaatatatcagattaagaaactttccatctcaaaaagtctaagtcagtatttaatgagtctgggatggatagcaagactgttgttaatacaaactaattttttaaaaaatagtggagtaagtttgtcttagtccatttggtactgctataacagaatccttgaggctaggtgatttatagtgaacagaaatgtattgactcacagttctgaaggctgagaagtctaagattgaggtgctggcctctggtgagggccttcttgctgcatcttcccatgatgggaggcatgacatgacagaagggcaaagagacggcaagagagagcagagagccagcaagaggaagctagacttgtccttctacagggaatccacttctgtgataacagcattaactcaatcatgagggcagtgcccccataatcgaaatgcctctcaattgggtatcaagtttccaatgcacaagcattagggtgcatattcaaaccatagcattc

SEQ ID NO: 717556 - DNA, 974 bp, Homo sapiens
ttgtgctctgtagctactgaggaaagtaatcagagagactcagaaatcaacaagtactaactacttaaagtgtgtgcccagcctagggctaagtactgaagtggaggtgatttggggagaggaataaagtttgtatgtttgtgtgtctctctgtgtgtgtgtgtgtgtgtrtctgtgtgtgtgtgtgtgtgtacacacatatatatctctatatatctttaagctgctttaccactgaattcctagcatcaatgcctccatattcaatatgataggtaattacatagcatgcctcattttagaacccaaaacatatggaactttggaatttttaaagttattattattatttattttaaagattttcacatttttcctcatatcctaatagcgtgttcattttcaccattgcatgttttttacttatactttctcttctttatgtttccttgttttacttttaaagtgcaaataatcagaatatatcagattaagaaactttccatctcaaaaagtctaagtcagtatttaatgagtctgggatggatagcaagactgttgttaatacaaactaattttttaaaaaatagtggagtaagtttgtcttagtccatttggtactgctataacagaatccttgaggctaggtgatttatagtgaacagaaatgtattgactcacagttctgaaggctgagaagtctaagattgaggtgctggcctctggtgagggccttcttgctgcatcttcccatgatgggaggcatgacatgacagaagggcaaagagacggcaagagagagcagagagccagcaagaggaagctagacttgtccttctacagggaatccacttctgtgataacagcattaactcaatcatgagggcagtgcccccataatcgaaatgcctctcaattgggtatcaagtttccaatgcacaagcattagggtgcatattcaaaccatagcattc

SEQ ID NO: 717557 - DNA, 974 bp, Homo sapiens
ttgtgctctgtagctactgaggaaagtaatcagagagactcagaaatcaacaagtactaactacttaaagtgtgtgcccagcctagggctaagtactgaagtggaggtgatttggggagaggaataaagtttgtatgtttgtgtgtctctctgtgtgtgtgtgtgtgtgtgtctgtgtgtgtgtgtgtgtgtacacacatatatatctctatatatctttaagctgctttaccactgaattcctagcatcaatgcctccatattcaatatgataggtaattacatagcatgcctcattttagaacccaaaacatatggaactttggaatttttaaagttattattattatttattttaaagattttcacatttttcctcatatcctaatagcgtgttcattttcaccattgcatgttttttacttatactttctcttctttatgtttccttgttttacttttaaagtgcaaataatcagaatatatcagattaagaaactttccatctcaaaaagtctaagtcagtatttaatgagtctgggayggatagcaagactgttgttaatacaaactaattttttaaaaaatagtggagtaagtttgtcttagtccatttggtactgctataacagaatccttgaggctaggtgatttatagtgaacagaaatgtattgactcacagttctgaaggctgagaagtctaagattgaggtgctggcctctggtgagggccttcttgctgcatcttcccatgatgggaggcatgacatgacagaagggcaaagagacggcaagagagagcagagagccagcaagaggaagctagacttgtccttctacagggaatccacttctgtgataacagcattaactcaatcatgagggcagtgcccccataatcgaaatgcctctcaattgggtatcaagtttccaatgcacaagcattagggtgcatattcaaaccatagcattc

SEQ ID NO: 717558 - DNA, 974 bp, Homo sapiens
ttgtgctctgtagctactgaggaaagtaatcagagagactcagaaatcaacaagtactaactacttaaagtgtgtgcccagcctagggctaagtactgaagtggaggtgatttggggagaggaataaagtttgtatgtttgtgtgtctctctgtgtgtgtgtgtgtgtgtgtctgtgtgtgtgtgtgtgtgtacacacatatatatctctatatatctttaagctgctttaccactgaattcctagcatcaatgcctccatattcaatatgataggtaattacatagcatgcctcattttagaacccaaaacatatggaactttggaatttttaaagttattattattatttattttaaagattttcacatttttcctcatatcctaatagcgtgttcattttcaccattgcatgttttttacttatactttctcttctttatgtttccttgttttacttttaaagtgcaaataatcagaatatatcagattaagaaactttccatctcaaaaagtctaagtcagtatttaatgagtctgggatggatagcaagactgttgttaatacaaactaattttttaaaaaatagtggagtaagtttgtcttagtccatttggtactgctataacagaatccttgaggctaggtgatttatagtgaacagaaatgtattgactcacagttctgaaggctgagaagtctaagattgaggtgctggcctctggtgagggccttcttgctgcatcttcccatgatgggaggcatgacatgacagaagggcaaagagacggcaagagagagcagagagccagcaagaggaagctagacttgtccttctacagggaatccacttctgtgataacagcattaactcaatcatgagggcagtgcccccataatcgaaatgcctctcaattgggtatcaagtttccaaygcacaagcattagggtgcatattcaaaccatagcattc

SEQ ID NO: 717559 - DNA, 974 bp, Homo sapiens
ttgtgctctgtagctactgaggaaagtaatcagagagactcagaaatcaacaagtactaactacttaaagtgtgtgcccagcctagggctaagtactgaagtggaggtgatttggggagaggaataaagtttgtatgtttgtgtgtctctctgtgtgtgtgtgtgtgtgtgtctgtgtgtgtgtgtgtgtgtacacacatatatatctctatatatctttaagctgctttaccactgaattcctagcatcaatgcctccatattcaatatgataggtaattacatagcatgcctcattttagaacccaaaacatatggaactttggaatttttaaagttattattattatttattttaaagattttcacatttttcctcatatcctaatagcgtgttcattttcaccattgcatgttttttacttatactttctcttctttatgtttccttgttttacttttaaagtgcaaataatcagaatatatcagattaagaaactttccatctcaaaaagtctaagtcagtatttaatgagtctgggatggatagcaagactgttgttaatacaaactaattttttaaaaaatagtggagtaagtttgtcttagtccatttggtactgctataacagaatccttgaggctaggtgatttatagtgaacagaaatgtattgactcacagttctgaaggctgagaagtctaagattgaggtgctggcctctggtgagggccttcttgctgcatcttcccatgatgggaggcatgacatgacagaagggcaaagagacggcaagagagagcagagagccagcaagaggaagctagacttgtccttctacagggaatccacttctgtgataacagcattaactcaatcatgagggcagtgcccccataatcgaaatgcctctcaattgggtatcaagtttccaatrcacaagcattagggtgcatattcaaaccatagcattc

SEQ ID NO: 717560 - DNA, 645 bp, Homo sapiens
tgaatctccatcttaaaatagaaattaggctgtacacctaagcacaagatttctacaatgatctaatgtaataatatatgtgaaaattggagagtgctaacttaaaggcatcattttcgtaataataagtattattaaagataatattgtaccattattaaactcccagggcctgatgtaggtgctcttagatacatctgagcttttgggataaatgatacttggcaaacatttatcatatatagaaagcaattttccaaatgagagatactttctcttttcgctggctactggccatgtcatgtctacagagaactctattaagaatgcacagctaatgtgaatagtgcctaagaaaataaatgcattgtaggkaggaaagtactgccacatccaaggccaaaatgaaatgcagcaaaaagtcagaattgctgtcttataccctaataaactcataaggttaatttgcacatcttgttttttaagctactgacaacattgtgagtcacacttagcagttaccattaggcctgggatttagaggtacggagttgagacataaagggattgagctcagtatagctgaatcttttccactgatggcccaagagagagattcttttcattattagcaagtgcatgaag

SEQ ID NO: 717561 - DNA, 1938 bp, Homo sapiens
cggaataagtttctgttgtttaaagccaccaaatgtggggtaatttgttacagcacccacgataaacaaatacagcagcttttctgacagtaagtgtgacgcagaacattcctatcttgtgataataaaacaattccatgggggcctaggagacttttatgtttaatcttagttatgcaaattacagttttttccttaaataattcagccattacagtgaactttgtgattgtctctctggtaaatattccactgcacccctcaccctgccatgatgtaataggcacagaatctgtacagggaagtaaactccacctgcaattctagggtgggctctatctatccatttatttatttatttatttatttatttagaaacagactctgtcacccaggctggagtacagtggcattatcttggctcactgcaacctctgacttttgggttcaagtgattcctcccaggtagctgagattacaggtgtgtgctaccacaccaggctgatttttttttctttttgtatgtgtatattttttttttagtagatacagggtcttgccatgttggccaggctggtctcaaactcctggcctcaagtgatccacccaccttggcctcccaaagtgctgggattacaggatgggccactgcgcctggtcagctctatctattatttaatctacccatgttaaacccatttccccaaccacagtgcttgtctcggttatggcagacaatgttaataagcaaatgaaattctcttggacatagacgatgatatagaaatatgatccaaatcctactaataagttatgagatgtttgagaaaaatggttcctcaccctttgcaagagttgttttttttttctcactggatatgaacaaggaaaaagttgatggcatggtaggcagaatggagagatgcaaagatatgggttctggatgacaatgttgatatattagattctttattgagtatctatcatggcataaaagctgcttcatacagattatatgattatttaatccctataacaatgctttgaggcatgttaccaatcttgaatcctgttacataaacaaatgagctccctttagtatacatacratacatacattcacactgatacacctagatacttttgtgtggggtaggtggggaggtatgcatcactgcctgaagtcaccaagcactgaaatcacattgtagcatgagcagaaaagtcctccttgattttctgcagtacaagcctaatcagtccccaactctgaattaacccaactttctgctttctcctggattgtttatatggtttggatatttgtcccctcccaattgtatgttgaaatttgatcccagcattggaggtggggcctggtggaaggtatttaaatcataggggcaggtccctcattaatgggttggtgcttttctcatggcaatgagtgaggttcaatgagtgaggttcatctattagttcatgagagaactgattgttaaacagagtctggtgtcttcttcctctccctctttccttctctctctccaagtgatagctgctctccttccccttctgccatgattggaagcttcctgaggttttcaccagaatcagaggccagaaccatgcttctacagtctgcagaactgagaacccgaaaaacctcttttcctcataaattacccagcctcatgtgtttcctttatagcaatataaatggactaaggcagatatcaaatattgttagtgaaagctatgtaactgaataatatgacaccctataaccccatcgttttccacttcattttagacatgagtgctgctcagttattccttcacttgctacttgccagctagcattcaattctctaatataattccaaacatttattgctttcctctattgccccaacccacctgattttcctgttctca

SEQ ID NO: 717562 - DNA, 1938 bp, Homo sapiens
cggaataagtttctgttgtttaaagccaccaaatgtggggtaatttgttacagcacccacgataaacaaatacagcagcttttctgacagtaagtgtgacgcagaacattcctatcttgtgataataaaacaattccatgggggcctaggagacttttatgtttaatcttagttatgcaaattacagttttttccttaaataattcagccattacagtgaactttgtgattgtctctctggtaaatattccactgcacccctcaccctgccatgatgtaataggcacagaatctgtacagggaagtaaactccacctgcaattctagggtgggctctatctatccatttatttatttatttatttatttatttagaaacagactctgtcacccaggctggagtacagtggcattatcttggctcactgcaacctctgacttttgggttcaagtgattcctcccaggtagctgagattacaggtgtgtgctaccacaccaggctgatttttttttctttttgtatgtgtatattttttttttagtagatacagggtcttgccatgttggccaggctggtctcaaactcctggcctcaagtgatccacccaccttggcctcccaaagtgctgggattacaggatgggccactgcgcctggtcagctctatctattatttaatctacccatgttaaacccatttccccaaccacagtgcttgtctcggttatggcagacaatgttaataagcaaatgaaattctcttggacatagacgatgatatagaaatatgatccaaatcctactaataagttatgagatgtttgagaaaaatggttcctcaccctttgcaagagttgttttttttttctcactggatatgaacaaggaaaaagttgatggcatggtaggcagaatggagagatgcaaagatatgggttctggatgacaatgttgatatattagattctttattgagtatctatcatggcataaaagctgcttcatacagattatatgattatttaatccctataacaatgctttgaggcatgttaccaatcttgaatcctgttacataaacaaatgagctccctttagtatacatacaatacatacattcacactgatacacctagatacttttgtgtggggtaggtggggaggtatgcatcactgcctgaagtcaccaagcactgaaatcacattgtagcatgagcagaaaagtcctccttgattttctgcagtacaagcctaatcagtccccaactctgaattaacccaactttctgctttctcctggattgtttatatggtttggatatttgtcccctcccaattgtatgttgaaatttgatcccagcattggaggtggggcctggtggaaggtatttaaatcataggggcaggtccctcattaatgggttggtgcttttctcatggcaatgagtgaggttcaatgagtgaggttcatctattagttcatgagagaactgattgttaaacagagtctggtgtcttcttcctctccctctttccttctctctctccaagtgatagctgctctccttccccttctgccatgattggaagcttcctgaggttktcaccagaatcagaggccagaaccatgcttctacagtctgcagaactgagaacccgaaaaacctcttttcctcataaattacccagcctcatgtgtttcctttatagcaatataaatggactaaggcagatatcaaatattgttagtgaaagctatgtaactgaataatatgacaccctataaccccatcgttttccacttcattttagacatgagtgctgctcagttattccttcacttgctacttgccagctagcattcaattctctaatataattccaaacatttattgctttcctctattgccccaacccacctgattttcctgttctca

SEQ ID NO: 717563 - DNA, 1938 bp, Homo sapiens
cggaataagtttctgttgtttaaagccaccaaatgtggggtaatttgttacagcacccacgataaacaaatacagcagcttttctgacagtaagtgtgacgcagaacattcctatcttgtgataataaaacaattccatgggggcctaggagacttttatgtttaatcttagttatgcaaattacagttttttccttaaataattcagccattacagtgaactttgtgattgtctctctggtaaatattccactgcacccctcaccctgccatgatgtaataggcacagaatctgtacagggaagtaaactccacctgcaattctagggtgggctctatctatccatttatttatttatttatttatttatttagaaacagactctgtcacccaggctggagtacagtggcattatcttggctcactgcaacctctgacttttgggttcaagtgattcctcccaggtagctgagattacaggtgtgtgctaccacaccaggctgatttttttttctttttgtatgtgtatattttttttttagtagatacagggtcttgccatgttggccaggctggtctcaaactcctggcctcaagtgatccacccaccttggcctcccaaagtgctgggattacaggatgggccactgcgcctggtcagctctatctattatttaatctacccatgttaaacccatttccccaaccacagtgcttgtctcggttatggcagacaatgttaataagcaaatgaaattctcttggacatagacgatgatatagaaatatgatccaaatcctactaataagttatgagatgtttgagaaaaatggttcctcaccctttgcaagagttgttttttttttctcactggatatgaacaaggaaaaagttgatggcatggtaggcagaatggagagatgcaaagatatgggttctggatgacaatgttgatatattagattctttattgagtatctatcatggcataaaagctgcttcatacagattatatgattatttaatccctataacaatgctttgaggcatgttaccaatcttgaatcctgttacataaacaaatgagctccctttagtatacatacaatacatacattcacactgatacacctagatacttttgtgtggggtaggtggggaggtatgcatcactgcctgaagtcaccaagcactgaaatcacattgtagcatgagcagaaaagtcctccttgattttctgcagtacaagcctaatcagtccccaactctgaattaacccaactttctgctttctcctggattgtttatatggtttggatatttgtcccctcccaattgtatgttgaaatttgatcccagcattggaggtggggcctggtggaaggtatttaaatcataggggcaggtccctcattaatgggttggtgcttttctcatggcaatgagtgaggttcaatgagtgaggttcatctattagttcatgagagaactgattgttaaacagagtctggtgtcttcttcctctccctctttccttctctctctccaagtgatagctgctctccttccccttctgccatgattggaagcttcctgaggttttcaccagaatcagaggccagaaccatgcttctacagtctgcagaactgagaacccgaaaaacctcttttcctcataaattacccagcctcatgtgtttcctttatagcaatataaatggactaaggcagrtatcaaatattgttagtgaaagctatgtaactgaataatatgacaccctataaccccatcgttttccacttcattttagacatgagtgctgctcagttattccttcacttgctacttgccagctagcattcaattctctaatataattccaaacatttattgctttcctctattgccccaacccacctgattttcctgttctca

SEQ ID NO: 717564 - DNA, 600 bp, Homo sapiens
actctgagagtgatttcaaaaaacaaacaaacaaatctattcaaagatacaaataccaaactgtttttttttttgtttgagacgaagtctcgctctgtcacccaggctggagtgcagtggtgcaatctgggctcactgcaacctctgcctcctgtgtgcaagcaattctcctgcctcagcttcccgagtagctgggactacaggtgcacgcaaccacacctggctacttttttggattttagtaaagacggggtttcaccttgttgcccaggctggtctcgaactcctgagctcagacaatccgcccacctcagcctcccaaagtgctggaattacaagygtgagccactgtacctggccatcaaactgttctttttgggcagaaaacaccacttagtttcacttcatccaaactcatccatgcacacacaccatcgtttcccaggctagtccactgctctgttgggatagtaacgaagaaatccacaatggtgttggctgaagcctcctcctgctctctaaatatgcaaagcctcaaattcaactcgggggtactttaacgaaaaattttgtgatacacataataagaacattttctag

SEQ ID NO: 717565 - DNA, 743 bp, Homo sapiens
ctgtgacaagactaacttgttagcttgcaaatggggtaaaatctcagccccttatggttatcaacagtttgattacttgtggctatggtatgatttttctacaaagatcttttagtactattatcaactttagattgcccattcacatctgagagatttaatgtgattcttaaggctgagataatctattgaaatatttctataacctctaatgtttaattaggtaagcaaaaacacttccctcccaaattccaggtttagattgtcacatatttctcttaggaaaaccatgaaggaatttcctccaatctttttggtaaagwgtcaagtttaaatacattcaattacatgaaaccaaggtaggaataattatcctaccttggatgggctattctcaatctttttctcagaggaagctgggtctcatatttggagaaaaacatggaaaaacttaaaataaattttgtctaacactgtacatttttttaaatggccttcattttagtgaatctaaaacatgaaactttttcagtcaccaaatattgcagatggccttgcatactcaatttagtagctttactcagaaataatttttggccaaatgtgtgtgaggttccacacaagccacattcacctctcattccctggatattgggtcagagtcataccagaggacatcaagatatccagtcccagactagggagctcccccttaattatggaagctgaaagagttctagaaa

SEQ ID NO: 717566 - DNA, 743 bp, Homo sapiens
ctgtgacaagactaacttgttagcttgcaaatggggtaaaatctcagccccttatggttatcaacagtttgattacttgtggctatggtatgatttttctacaaagatcttttagtactattatcaactttagattgcccattcacatctgagagatttaatgtgattcttaaggctgagataatctattgaaatatttctataacctctaatgtttaattaggtaagcaaaaacacttccctcccaaattccaggtttagattgtcacatatttctcttaggaaaaccatgaaggaatttcctccaatctttttggtaaagartcaagtttaaatacattcaattacatgaaaccaaggtaggaataattatcctaccttggatgggctattctcaatctttttctcagaggaagctgggtctcatatttggagaaaaacatggaaaaacttaaaataaattttgtctaacactgtacatttttttaaatggccttcattttagtgaatctaaaacatgaaactttttcagtcaccaaatattgcagatggccttgcatactcaatttagtagctttactcagaaataatttttggccaaatgtgtgtgaggttccacacaagccacattcacctctcattccctggatattgggtcagagtcataccagaggacatcaagatatccagtcccagactagggagctcccccttaattatggaagctgaaagagttctagaaa

SEQ ID NO: 717567 - DNA, 743 bp, Homo sapiens
ctgtgacaagactaacttgttagcttgcaaatggggtaaaatctcagccccttatggttatcaacagtttgattacttgtggctatggtatgatttttctacaaagatcttttagtactattatcaactttagattgcccattcacatctgagagatttaatgtgattcttaaggctgagataatctattgaaatatttctataacctctaatgtttaattaggtaagcaaaaacacttccctcccaaattccaggtttagattgtcacatatttctcttaggaaaaccatgaaggaatttcctccaatctttttggtaaagagwcaagtttaaatacattcaattacatgaaaccaaggtaggaataattatcctaccttggatgggctattctcaatctttttctcagaggaagctgggtctcatatttggagaaaaacatggaaaaacttaaaataaattttgtctaacactgtacatttttttaaatggccttcattttagtgaatctaaaacatgaaactttttcagtcaccaaatattgcagatggccttgcatactcaatttagtagctttactcagaaataatttttggccaaatgtgtgtgaggttccacacaagccacattcacctctcattccctggatattgggtcagagtcataccagaggacatcaagatatccagtcccagactagggagctcccccttaattatggaagctgaaagagttctagaaa

SEQ ID NO: 717568 - DNA, 743 bp, Homo sapiens
ctgtgacaagactaacttgttagcttgcaaatggggtaaaatctcagccccttatggttatcaacagtttgattacttgtggctatggtatgatttttctacaaagatcttttagtactattatcaactttagattgcccattcacatctgagagatttaatgtgattcttaaggctgagataatctattgaaatatttctataacctctaatgtttaattaggtaagcaaaaacacttccctcccaaattccaggtttagattgtcacatatttctcttaggaaaaccatgaaggaatttcctccaatctttttggtaaagagtmaagtttaaatacattcaattacatgaaaccaaggtaggaataattatcctaccttggatgggctattctcaatctttttctcagaggaagctgggtctcatatttggagaaaaacatggaaaaacttaaaataaattttgtctaacactgtacatttttttaaatggccttcattttagtgaatctaaaacatgaaactttttcagtcaccaaatattgcagatggccttgcatactcaatttagtagctttactcagaaataatttttggccaaatgtgtgtgaggttccacacaagccacattcacctctcattccctggatattgggtcagagtcataccagaggacatcaagatatccagtcccagactagggagctcccccttaattatggaagctgaaagagttctagaaa

SEQ ID NO: 717569 - DNA, 662 bp, Homo sapiens
tttttttgtaattctcctagatgagtcagaacttagttttgacgtaggtaaaaattttatggtcacaaatctcaggtgtgagaaaatctctttccttgatactctatataaatagaggatataaatatttcaagtctggaagtagtgagagaagctggtaattctggacatatagtgacagtcaaaaaggagctcaggtacaggactggtctaagctgctcaagattcaggagacagccagtacacagagaagctgaggaratacataagatatatctaaaacatttatctaaccttctgtggtaacaagctccttaaaggggctggatgatgttgtgttcactttttatcaccagcaaaggctaagataatgtatatagtaaatatttagtaactatttattaaataaataaatatttaagacagaataaacaagtataataaatgaaccaataagaatgcaccatctaagtcaaaatagccacttttatccttaacattgtacctgctttggctgctgcagaagcaaacttgttggcattagacaaatcaagctggtgatttaataaattccaatgtaagtcttaccagtattgatgaataactatccagcactcaccatgaaagttaaagaaacaacacagaaaaagttcctaagtggt

SEQ ID NO: 717570 - DNA, 662 bp, Homo sapiens
tttttttgtaattctcctagatgagtcagaacttagttttgacgtaggtaaaaattttatggtcacaaatctcaggtgtgagaaaatctctttccttgatactctatataaatagaggatataaatatttcaagtctggaagtagtgagagaagctggtaattctggacatatagtgacagtcaaaaaggagctcaggtacaggactggtctaagctgctcaagattcaggagacagccagtacacagagaagctgaggagatacataagatatatctaaaacayttatctaaccttctgtggtaacaagctccttaaaggggctggatgatgttgtgttcactttttatcaccagcaaaggctaagataatgtatatagtaaatatttagtaactatttattaaataaataaatatttaagacagaataaacaagtataataaatgaaccaataagaatgcaccatctaagtcaaaatagccacttttatccttaacattgtacctgctttggctgctgcagaagcaaacttgttggcattagacaaatcaagctggtgatttaataaattccaatgtaagtcttaccagtattgatgaataactatccagcactcaccatgaaagttaaagaaacaacacagaaaaagttcctaagtggt

SEQ ID NO: 717571 - DNA, 662 bp, Homo sapiens
tttttttgtaattctcctagatgagtcagaacttagttttgacgtaggtaaaaattttatggtcacaaatctcaggtgtgagaaaatctctttccttgatactctatataaatagaggatataaatatttcaagtctggaagtagtgagagaagctggtaattctggacatatagtgacagtcaaaaaggagctcaggtacaggactggtctaagctgctcaagattcaggagacagccagtacacagagaagctgaggagatacataagatatatctaaaacatttatctaaccttctgtggtaacaagctccttaaaggggctggatgatgttgtgttcactttttatcaccagcaaaggctaagataatgtatatagtaaatatttagtaacyatttattaaataaataaatatttaagacagaataaacaagtataataaatgaaccaataagaatgcaccatctaagtcaaaatagccacttttatccttaacattgtacctgctttggctgctgcagaagcaaacttgttggcattagacaaatcaagctggtgatttaataaattccaatgtaagtcttaccagtattgatgaataactatccagcactcaccatgaaagttaaagaaacaacacagaaaaagttcctaagtggt

SEQ ID NO: 717572 - DNA, 2571 bp, Homo sapiens
tcccagtggtattaaattctcaaagccaaatcatatcagaggtgcaggatgccaaacactatttgcatagaaaatcagtcttcaagactaaacaaaaaagaaattcataaaattaaactttttgaatagttgcattcgttgctttcaatttcttcatccatatctgttctggtcatacatattttttccttctttttatccagagagattaatacacagattaatacacaaaacttttgtaaatagcattccagttcaaagttgcttgtgatcatagccacgtgtgaaccgttagacaagtgtatgctatgccccaaaatgttttataattcttcagtgcagtttcttactgatgtttcccttaaaattaaggcttaatgaaagagaaatccatagtattatgaactgattttctttagcttctgaattaagtgcactctttccaaaatcaagtggtcctggagtaacgttaagacaacttgtattaatcagtgtcatgactgaagtagtatcttactggaggtcccggcaaatcttcatctccatcaatgtctggagcaaatgacacagtaagatccacatatttcttttcagtagtaggttttacaagtttatgcattctaagaaaaataagcaagaatgaatactttggtaaattctataaaatgaaaaaatgatttgctgactaatgccatccagagaacctggacttgtatctagactttaacatctaataataatctgctttcacatattcatttttctttactaaaaggtctgaactcatttatactcaagacactcatttacctaacagtgaataaatttggacacactggtcatgataaagaatacaaaccatttattaaaagacaaaaaaaggctcagcgtggtggctcacgcctgtaatcccagcactttgggaggctgaggcaggcagatcacctcaggtcaggagtttgagaccagcctggcccacatggcgaaaccccatctctgctaaaaatacaaaaacgagacgggaacagtggcacatgcccgtaatcccagctactcgggaggctgaggcaagagaattgcttgaacctgggagacagaggttgcaacgattttaaaaaattgattttcctcctaaacttcctcttaagtttggaggcatcataaattcaagcatttctctgtaaacagtaaaaaagcaagctagaatttaaaccttaaaatgtaagctagaaatacaaagtaaaagacattcttagctttttcccttatgtccaatctttatcctatttactgaaaaatcactctttgctatagccactactgccttaaatgaagtcatcatctacacaccccttacatcattgtattggcttctagctagctttctctagtctcttttctacttccaatctacactgctcctagaattctcttaaaatataaatttgatgtattctcctgcctaataattttatcatacactgtgtacctacttcatgccaggctctgaactatatcgatttaatcctcagtagctctttccatttcacaaagatattttgtcccgtacataaacttttcattctttccaccattcatgatcatcacctcatacttgagtcattccaaaaaaaaagtgaattctaaattcccaaattcagaatttagtaggaattctaaatactactcttaatttatccaagatacttaggtatcctaatgaaaatcaatataaggcaaattaatgccttagctaatataacagtagctttacttttgtatgtatgctctttttagctgcaaagactgttgcttttgcctggaataatccttcttcaaaggtagctcaaatgaaatctaccctgaactagaggtctgagttagcacaatactctgtaaaaattttcattatcacagttattcaattatactttaatgattaacatgaccagaggtgagacctagccaggtcactgtctcaagagttacaagcagaggaaacaactaaagcaaaggtcctacaatggagcatcattagagtgagtattcaaggacaaataagtaggccagtgtagctggaatattgtgagggcaaagtagggaaggaacttagaaggataactaggaatcaatttcctttaatagactgtgaactgcttgagggcagggcttgatgaccatgtatgataacaaaatattaacaggactaacatttatggaatacttcttacatgccrttacactattagcccttactattatttcagtgctcaactatgggcacagtcatccctatttgtggatttgtagctttttgaaactaagtttcaaaagctactcaaggtaacaaaactaagcagctgagcaagaatgtgaacccaggtctttctaaagccaacctcatgctattaatcataatcccactgactgacttaatgtgttcagtacttaacaggtactcaataaatacttgctaaaaggtcaatgtaataaaatgaaaaatattatcatgctggaggtttcaaatattggccaaatcttaaaagcatttttaaataacctgccgcaaat

SEQ ID NO: 717573 - DNA, 937 bp, Homo sapiens
tcgtcttttctaaagtgaactatttctaaacaaattaaaacatgagttaaagcactaaaagttcaaggccctgttattcagggactgaatgtttttaatagccttgctatttggggattgaatgtttttaatgccgtgacagaattgttgtgatttttaaaaaagaatatctatgatattagcaacactgaagcatcttcctttatgtaatcactgtatttttttaaaatctaggcaattcaggtcctattttacatctccaggagaattcactttggaaaataaagaatgcctcagaagtatgaatgactgtacttgaactgctttgtaaaatggtgtcctcaataattaccagctctaatagcagctgtgttaattggctttgacatgattgaactttacatttctctcaaaaggctcctaatgccatgtacaggcaataaggcctcaattaacgatggtcagtgcaacaggtctacactctgtgcctattttttacgctctttagtcagtaaacaaaagcaagctcggctgccgctgggtacgtttcagggtgaacatttcaatctacacttttttttttcccttttttagtcgagcctatttaccagaaagattgctacattttctccttagtactgttgcaataatatacaataggcaggtaaataaaggaagtgacccttggctggttaacaagaatatatatcatgagactgcctctgagctgatcaaaatatttaaaaatacttttgcacatttaattgaamcaatttcaaatctggcctggagaacaaagatatatttttcttaaaagaacatggaagaaaacatcctgcaaaatttgctcagcacagagaagtcactgtactgggagtcgagggactacccttctgattacatagaaataaagcacttgtgctcaggttgaactgga

SEQ ID NO: 717574 - DNA, 947 bp, Homo sapiens
aaaagaaaatgagtgaagaggttgcaaatttatcagattacttaagtctttgtgcctcaatttccttacctgtataatcgagttcatttattcattcaatacacagccacagcagttgaatattttctccctgctaggcactggcctgggtcctgggggtacaatggggaagaagacagactgggtcctgctcctgttccagggaacagagtcattattcagggacaaatcccagagcaaagaacaaggtgctcttgcagagaaaagaacccagagtcattggaatatggaggccaaagaaagttattctgctgggaccttaagctccatctagaggtgatgttttgcrctgagctaaaaagatgagctgggattctgtcaagacttggagcaggagcagggtgagtgcattctgaacaaaggggaaagtgtgtttggtcacatgaggcaatgaaagagtatctggaaacagggagatgctgctcctggagaaagacagagtggcagaagtgcgaagcgcagcagcagtgaggtgttgtgcctgtactaccttacttcacagaggtgctgggaccatcaactatgacaacactctgcaggctaggaaaatgattaacagaggtttttttgtttttttttttttctgattgtgaaaacaacaagcattacatttaaggccaatgtgattgacaggatttggtgatagagtgccatgggagctgaggaaggagaaactgaggatgagtagtcatggattcacagacattaaagtgcagatagttttatttaattgtagttaatttaggaaatacacgttagtattaaaaaaaaacaaaccctccagaatctctccccggagaaagaactgtaacattttgatgtgtttcttaacacctaggtgtgattccttgttactctctgtgatgtttaaactgagacctaaagat

SEQ ID NO: 717575 - DNA, 947 bp, Homo sapiens
aaaagaaaatgagtgaagaggttgcaaatttatcagattacttaagtctttgtgcctcaatttccttacctgtataatcgagttcatttattcattcaatacacagccacagcagttgaatattttctccctgctaggcactggcctgggtcctgggggtacaatggggaagaagacagactgggtcctgctcctgttccagggaacagagtcattattcagggacaaatcccagagcaaagaacaaggtgctcttgcagagaaaagaacccagagtcattggaatatggaggccaaagaaagttattctgctgggaccttaagctccatctagaggtgatgttttgcgctgagctaaaaagatgagctgggattctgtcaagacttggagcaggagcagggtgagtgcattctgaacaaaggggaaagtgtgtttggtcacaygaggcaatgaaagagtatctggaaacagggagatgctgctcctggagaaagacagagtggcagaagtgcgaagcgcagcagcagtgaggtgttgtgcctgtactaccttacttcacagaggtgctgggaccatcaactatgacaacactctgcaggctaggaaaatgattaacagaggtttttttgtttttttttttttctgattgtgaaaacaacaagcattacatttaaggccaatgtgattgacaggatttggtgatagagtgccatgggagctgaggaaggagaaactgaggatgagtagtcatggattcacagacattaaagtgcagatagttttatttaattgtagttaatttaggaaatacacgttagtattaaaaaaaaacaaaccctccagaatctctccccggagaaagaactgtaacattttgatgtgtttcttaacacctaggtgtgattccttgttactctctgtgatgtttaaactgagacctaaagat

SEQ ID NO: 717576 - DNA, 626 bp, Homo sapiens
cttctattttctgcccatttgtaccttgctgtcactctaagctgagcttccacactgcatggggatgctcttcccaattcactgcctcgatctcctgccacttagaggtcacttgtctctgggatcattccctgaccccacagtgtaagtaacatgttctgaaactcctctggatgccataacaccctgtgtttatctctcttaccccaaacaattatcagtttgcaggagactggtgggttcacctgtctgcatcactcagcagactgtaagtgctcttagatatcagaagccatgaatcttgtttacctttgtaatcccagtacatcatacaatgcctggcacatagtggattttctaaataaatgacttgctaacaatttgctaagtaaaggactcccaattccatatcttagccctggcctatwtcctgtaatttagctgcctgctgagcatttctaattgtttctagctagtacactccaaatgcactccaaaataaactcaacattttccaagactccagactttcttgtctctccatgacaacattattattctaatctcctgggcctgaaatccaggcaccatctctgactattttctccctcttgccaggcacatcc

SEQ ID NO: 717577 - DNA, 626 bp, Homo sapiens
cttctattttctgcccatttgtaccttgctgtcactctaagctgagcttccacactgcatggggatgctcttcccaattcactgcctcgatctcctgccacttagaggtcacttgtctctgggatcattccctgaccccacagtgtaagtaacatgttctgaaactcctctggatgccataacaccctgtgtttatctctcttaccccaaacaattatcagtttgcaggagactggtgggttcacctgtctgcatcactcagcagactgtaagtgctcttagatatcagaagccatgaatcttgtttacctttgtaatcccagtacatcatacaatgcctggcacatagtggattttctaaataaatgacttgctaacaatttgctaagtaaaggactcccaattccatatcttagccctggcctatttcctgtaatttagctgcctgctgagcatttctaattgtttctagctagtacactcyaaatgcactccaaaataaactcaacattttccaagactccagactttcttgtctctccatgacaacattattattctaatctcctgggcctgaaatccaggcaccatctctgactattttctccctcttgccaggcacatcc

SEQ ID NO: 717578 - DNA, 845 bp, Homo sapiens
cagggatgtccaagtcaggctgggaatatcaagccttaggcaatcagagtctattggaccatgaagtagcacctagtcctaccatgtcatttggtttttgaggcaactgaagcccagacgtgggcaatgacttacccaaggtggcctagcgcatggaatttggctccatcctgctgttttccaccagacgtgagtcatttttttcaacttttattttagattaggagtcattcttgatacatgctgctggtgacatcagctcagcaggagctgcaagttgatgaggggagagtgggcagggggaggtgctgtatgtggacctggagggagggaatggggctggccagcagccaaggctcacagctgctaccccagactccttagcmtcctgcctccactttgctgagctcagcagttctgggagctctggagaaaggccacagagcctctcccccaggccattgtctctgcatgcagcatcctcgatcttgaaagggatgggatagaggcagtaggaagacatatatcctacctggcacagataggaggttgtgcagagtctccaggttaggacctcatccttatgctcctcatctggagaggctgaaggttgctgtacacacacacacacacatgcactggagaggctgaaggttgctgtacacacacacacacgcaccgctcaggttgctgtacacacacacacacacacacacacacacacacacacacacggcccaggccagttactgatccacttgctctgtggggaaagattcctacagggaatctgcagtcctcatttggactttcctcttggaataccatttcttctttgggagaaa

SEQ ID NO: 717579 - DNA, 1079 bp, Homo sapiens
ttacttgctactaggcttgagaagtaccacctctgcagcttgctcccataggtataatactgctgcctcgaccgactttgctaactctttacctatgcctctttcagtgttgtcaaagattgctgccctgatttatggcatcacaaggctgttggttgcccagctaaacttcatttttttgcttcagaaaaataatatacagacttcatcctataaagcaattttgaaacccagggacaagacaaagaaaatcaatattatcacctaaagagaactctcttcttgactagatggtaggcttagtaataagctraatggcactttgcatttgaatcacacaaaatgtttagtctacaatttacccggtggagaagagcacatgcatgagtaatccaaaaaagaagacaaaacatttaagtattatctttagcatatattctttaagaaagagtatttgtttaacatttaaatgtattttgaggctaacagtaaaaacaattaattaatcagtaattaatttagtttcatagatgaagaagccacaaataccaagaaacatatttgcgataaagaattcatccaatttgagatatgccatacattggataattcttacattgattattagaagtgtgccgtattttactttatggactcaatttaagatttcttatattattatagctttatactttggcatcttttttgaaaatttattgactctaaagaattactaattttaaaggaatgattatatttagaataattttaattttgaatacacatagataattcataaccaattatgataggactgtgtatttgaataactgcccaatatgaataaacagagaccttcgtggaatatgcccattcaaataaatcacctgctaagttttctgagccaatcttattctttgtttagaatatgaatttgcagtaactggaatggatgaatgagttataactagttttgatttctgaagttctgcatttagctgctcttctgctcttctttacaacttttgcaccataaaatatgaatcacttaatatttgattgatgaatagcatatttct

SEQ ID NO: 717580 - DNA, 618 bp, Homo sapiens
ctaaatatccagtcaccaaattctatctcatctctctctagtatttccctcatgttggaccaccatggcctaatttccaacactggaattaccgccacagcttcccacttgaccttctgcttgcagtgttgactcctctgtcccttctttgcaggaaaaaaaacaattttccaaatatgcaaatctggtcatatcacttttctgctttgtttttccgtatgtcgctgaagcactccgggtgaaggctgagttcttcagagaggcctgaggaacactttagcttaagcaatcaacaccacctctcaacccaygctttcatgtggtcacgtgcaattacattactcctgaaaaagcatgctctcttctctcctgtgattccatggcctcatagatgctattccctctgtctggagagccttgtcaacttgtcttcttgacaaaatacttctcattaagattcaccaagatcctggcagctgtacgattctaccattgacttcccctacctggtgtaaggggtcttttctctctctctgttataccttacaaataccccaatgatctaaccttactgcttaggttattctgttacatattggtttaagaactaaacggaag

SEQ ID NO: 717581 - DNA, 618 bp, Homo sapiens
ctaaatatccagtcaccaaattctatctcatctctctctagtatttccctcatgttggaccaccatggcctaatttccaacactggaattaccgccacagcttcccacttgaccttctgcttgcagtgttgactcctctgtcccttctttgcaggaaaaaaaacaattttccaaatatgcaaatctggtcatatcacttttctgctttgtttttccgtatgtcgctgaagcactccgggtgaaggctgagttcttcagagaggcctgaggaacactttagcttaagcaatcaacaccacctctcaacccacgctttcatktggtcacgtgcaattacattactcctgaaaaagcatgctctcttctctcctgtgattccatggcctcatagatgctattccctctgtctggagagccttgtcaacttgtcttcttgacaaaatacttctcattaagattcaccaagatcctggcagctgtacgattctaccattgacttcccctacctggtgtaaggggtcttttctctctctctgttataccttacaaataccccaatgatctaaccttactgcttaggttattctgttacatattggtttaagaactaaacggaag

SEQ ID NO: 717582 - DNA, 1291 bp, Homo sapiens
tttgttggtgagagatgcatgcaatgaaaaatcaaacatgtagatggcactcatctggcaccagaaagataaaatggtttctattttgcttttgtaccwaaaagaaatgaagaatatgttttgtatgaaagctacacaactagaaatttcaaattcataaggtactctaaaaaattttaaaatggtcttttgacacatggagagtcctttaatgttcatttaatttatatatagacaatgagaggaggacgaataatttttactttgcttgttttaggaaaaaccaacaataaacgtatgcagataaaatttataagcacgtttctaaagtttcaaatgattacaatgtacacagatgtagagcaattaaacgaagagattcacatgttggaaaccattcagactggaaagcaaaatcaatgatggaatatacaagtgcgcattctcctttgttatttttacataactatattataaaaccaactcttcccttctccactccaccccattcaatctcctgctattggagctgtttgttcaacagccatcagactactttactatagctttgaaaacttacaggatggtaaaaggtatcaccttgactgggccacttggccggggggtgatctctggacctgtacccaaacgttactctggatgcgtctggatgagattaacatttgaattagtgggttcagtgaagcaagtggtcctctctaacgaggatgagcggcatccattcaactgaagacttggatagaacaaaatgactcacagagaactcctcctccctccttgcttgagcaaggatatgggtcttgacatgccttcggactcaaactgaaaaactggctcttcttgggtcttgagtcgggtgattttcagagtggaactacacttttgggcctccagcttgtcagctgcaactcttgggtcttctcaatttctgtaattgtgtgaaccaattcctcataataaatctctaggtagatagatagatagacttataggtgatagatagacagacaaataggcagacagaaaatctcctaattagaaccttgaatacacaaaaggcacaaaggccttcatgatctactcctgcgtatctcttctgcccatctcttgcctgggaaacagctctttcagcttcctaatcttggaacagcctcccctggctgacaaattatatcctgtcctctccttagccccgttttctgtctcctgaagcagttttttcttctaagcattctcttcttcatattaactaaaaaaaaaaaaaaaaaaa

SEQ ID NO: 717583 - DNA, 1291 bp, Homo sapiens
tttgttggtgagagatgcatgcaatgaaaaatcaaacatgtagatggcactcatctggcaccagaaagataaaatggtttctattttgcttttgtacctaaaagaaatgaagaatatgttttgtatgaaagctacacaactagaaatttcaaattcataaggtactctaaaaaattttaaaatggtcttttgacacatggagagtcctttaatgttcatttaatttatatatagacaatgagaggaggacgaataatttttamtttgcttgttttaggaaaaaccaacaataaacgtatgcagataaaatttataagcacgtttctaaagtttcaaatgattacaatgtacacagatgtagagcaattaaacgaagagattcacatgttggaaaccattcagactggaaagcaaaatcaatgatggaatatacaagtgcgcattctcctttgttatttttacataactatattataaaaccaactcttcccttctccactccaccccattcaatctcctgctattggagctgtttgttcaacagccatcagactactttactatagctttgaaaacttacaggatggtaaaaggtatcaccttgactgggccacttggccggggggtgatctctggacctgtacccaaacgttactctggatgcgtctggatgagattaacatttgaattagtgggttcagtgaagcaagtggtcctctctaacgaggatgagcggcatccattcaactgaagacttggatagaacaaaatgactcacagagaactcctcctccctccttgcttgagcaaggatatgggtcttgacatgccttcggactcaaactgaaaaactggctcttcttgggtcttgagtcgggtgattttcagagtggaactacacttttgggcctccagcttgtcagctgcaactcttgggtcttctcaatttctgtaattgtgtgaaccaattcctcataataaatctctaggtagatagatagatagacttataggtgatagatagacagacaaataggcagacagaaaatctcctaattagaaccttgaatacacaaaaggcacaaaggccttcatgatctactcctgcgtatctcttctgcccatctcttgcctgggaaacagctctttcagcttcctaatcttggaacagcctcccctggctgacaaattatatcctgtcctctccttagccccgttttctgtctcctgaagcagttttttcttctaagcattctcttcttcatattaactaaaaaaaaaaaaaaaaaaa

SEQ ID NO: 717584 - DNA, 1291 bp, Homo sapiens
tttgttggtgagagatgcatgcaatgaaaaatcaaacatgtagatggcactcatctggcaccagaaagataaaatggtttctattttgcttttgtacctaaaagaaatgaagaatatgttttgtatgaaagctacacaactagaaatttcaaattcataaggtactctaaaaaattttaaaatggtcttttgacacatggagagtcctttaatgttcatttaatttatatatagacaatgagaggaggacgaataatttttactttgcttgttttaggaaaaaccaacaataaacgtatgcagataaaatttataagcacgtttctaaagtttcaaatgattasaatgtacacagatgtagagcaattaaacgaagagattcacatgttggaaaccattcagactggaaagcaaaatcaatgatggaatatacaagtgcgcattctcctttgttatttttacataactatattataaaaccaactcttcccttctccactccaccccattcaatctcctgctattggagctgtttgttcaacagccatcagactactttactatagctttgaaaacttacaggatggtaaaaggtatcaccttgactgggccacttggccggggggtgatctctggacctgtacccaaacgttactctggatgcgtctggatgagattaacatttgaattagtgggttcagtgaagcaagtggtcctctctaacgaggatgagcggcatccattcaactgaagacttggatagaacaaaatgactcacagagaactcctcctccctccttgcttgagcaaggatatgggtcttgacatgccttcggactcaaactgaaaaactggctcttcttgggtcttgagtcgggtgattttcagagtggaactacacttttgggcctccagcttgtcagctgcaactcttgggtcttctcaatttctgtaattgtgtgaaccaattcctcataataaatctctaggtagatagatagatagacttataggtgatagatagacagacaaataggcagacagaaaatctcctaattagaaccttgaatacacaaaaggcacaaaggccttcatgatctactcctgcgtatctcttctgcccatctcttgcctgggaaacagctctttcagcttcctaatcttggaacagcctcccctggctgacaaattatatcctgtcctctccttagccccgttttctgtctcctgaagcagttttttcttctaagcattctcttcttcatattaactaaaaaaaaaaaaaaaaaaa

SEQ ID NO: 717585 - DNA, 1291 bp, Homo sapiens
tttgttggtgagagatgcatgcaatgaaaaatcaaacatgtagatggcactcatctggcaccagaaagataaaatggtttctattttgcttttgtacctaaaagaaatgaagaatatgttttgtatgaaagctacacaactagaaatttcaaattcataaggtactctaaaaaattttaaaatggtcttttgacacatggagagtcctttaatgttcatttaatttatatatagacaatgagaggaggacgaataatttttactttgcttgttttaggaaaaaccaacaataaacgtatgcagataaaatttataagcacgtttctaaagtttcaaatgattacaatgtacacagatgtagagcaattaaacraagagattcacatgttggaaaccattcagactggaaagcaaaatcaatgatggaatatacaagtgcgcattctcctttgttatttttacataactatattataaaaccaactcttcccttctccactccaccccattcaatctcctgctattggagctgtttgttcaacagccatcagactactttactatagctttgaaaacttacaggatggtaaaaggtatcaccttgactgggccacttggccggggggtgatctctggacctgtacccaaacgttactctggatgcgtctggatgagattaacatttgaattagtgggttcagtgaagcaagtggtcctctctaacgaggatgagcggcatccattcaactgaagacttggatagaacaaaatgactcacagagaactcctcctccctccttgcttgagcaaggatatgggtcttgacatgccttcggactcaaactgaaaaactggctcttcttgggtcttgagtcgggtgattttcagagtggaactacacttttgggcctccagcttgtcagctgcaactcttgggtcttctcaatttctgtaattgtgtgaaccaattcctcataataaatctctaggtagatagatagatagacttataggtgatagatagacagacaaataggcagacagaaaatctcctaattagaaccttgaatacacaaaaggcacaaaggccttcatgatctactcctgcgtatctcttctgcccatctcttgcctgggaaacagctctttcagcttcctaatcttggaacagcctcccctggctgacaaattatatcctgtcctctccttagccccgttttctgtctcctgaagcagttttttcttctaagcattctcttcttcatattaactaaaaaaaaaaaaaaaaaaa

SEQ ID NO: 717586 - DNA, 3332 bp, Homo sapiens
gggtcttcatctttttttaatgcattaaaaaaacagctgctgggcatctcccttggaccggacatgaaacctttagaggacagaaagatgaatgcagtatgtttggtggcctccaggagctgagtctaactggggagccaagacatacatataaaaggggagcacgagcagaagcaaggctatatgtaaggtgagtaattcggacacagatgtcatggcagatgaaggaaggggatcaagaccaggcagggtacaagctatgtgggcaacggcaatgtctgctcttggtcaactactgatctgtttccatgtccactaaacacgtgttttcatcagattctccctggacttcatgaaatctgtggtcctgacttaaatgtgtaagtaggtattttctgtacactcttctccagggaaaggtcattctcaccagtgagactaaacatattcactttacaacagagtctcaaggtagagtgtcatcatattttgccaagatgagtctaggactgtacagctggcccttgggtcccacggcaggttctgacactgaaatctgactgaagagctcagacttatgtagaaggactggaattgggacaaaacgtcttgatattaatgatgagaatgctgaggcggtagaagaaccatcatcatgacctgtaccccctcacatttcttccaggccagaattctgatccgtatgtctctgtacctgagcacagtccatcatcttcagcccttggcgttataaaccccagaatcctttgacctcttgaccatcctactttggtcaactcccagtcccgggagttggcttaggtaaggggatttgccagagggagaaggcaggaaggcagacagttgatgtattctcctactactgaaaccacgggcccatccaaatgaccagtgcagcgagtacagctgcactgaaaatggaatccatgatgtttctgatcagagtctatcgtaagggctcaaaactcttgggacatgtgtttcttccctctaaggaactcaagatatagctcagaagaaaggatactaacatggtagcaacaggcagtgtcctgttgcaagtggaagaccggcagggagaagtcacagaaaagtaagtaatgaggtcaagtctaccacaggtctgagcaggtggcaggattaaagctgttggacatagtatcaagggcttagttaagcaatagaatcaggaagtcggcatgtgtggaaagggtagggcaagaaaacaaaacaaatgaaaacaaacccaggcactgaccaggcagtagggattaggaagtcagacggggagctagtgcagccccaagttcagaacacacatagcatctgcagaatagatgtgtgacactagaggcttaaaaagaaagacgaacaggccaaaagggaaaagatttgagttagggagaactcagcagcccacctgtaaattcaaggaaatacccaaatgacacagaacaacaggggctgtattggtccactttgtgttgctataaaggaatacctgagactgagtaatttataaagaacagaggtttatttggctcatggttctgcaggctgtacaagcatgggaccagtacttgctccacttctggtgaggcttcaggaagcctttctcatggatggtgaagggggamgcagcgtgtcacatggtgggggagagaacaagagagatgtcaggttctttttaagcaaccagctctcatatgaactaatataacagaaagagaactcattaccatggggagggcaccaagccattcatgagggatccacccacatgacccaaacagctcccaacagaccccatctccaacactgggggtcacatttcaacatgagatttggaggagacaaatatctaaaccatatcaagggcaaaatcaggaaggattctgatttaaaatacatataaaacaaaattcaacatgtagggcagtagctaaggcatggttaatggagttgttgcctgtggaacctggcagtcaggatgaaagagagctcacaggtaggctgtgttttcaggggccaggggaggcttctctacctttgaagggatgaggtgaagaacaaagtattttctgcatcagcaaaaggtgcttaataaatatctgctgttgactacatcatgtcattctgaaaatgttctcctctggttcccttaataccacattagctagatctaccctgctctttctgggcactcttcttctgtttcctttggtcactcctctttcttctcccacacaacaggttggcatccctcaaagctcaatcctcacccctttctggcatcttttgtcttcaaattgatttccttgtattaatagaacttgtccaatgccagcatctagcacagtggctgacatatagtagttatatgataaatatttgttaaatgaataaatgagtggccagactctctaaaatgtttgttcatttgcccccagtatttcatctgaactctagcctccccacccttcctttcttttgatgcttcctcctgagcaccccatcccttcacatgtaacatctcccaaacttgacacttcatattcgttccccaatctttctgtttctatcaatcaccatgccctatatctcatgggcttgggaactaggatgaatttttcacctttctctcccctttgtctctcacacacttgtagtcactaagtctcaccatttctatctttgagatgttttacagacccattgtttctctgacaccacttctgttgctttgtggtgggctacaaatggcagcatcttttggacaattaatcagggcctgccttctgtttggtttgtgaacccgcacagtttgcccaatgatgaacatctccatccaggtacccagagtctttctggaaaccttactcttgctgcctgtacatcccctccatggtgctcagactgccccacagggaccttggctgcccaaacttcccacctgttctgtcctatcctgttggtttctgtgtatcagcttatggttgagaaggaagcaggtgttacggttcttgactactgacctggtgtcaatccattgctgtaccctgactcacgctaacagcatacactctgatggcctaccagcttccatcccagcttctccctttttcccaaggcagaacctgagaatccctcaggcataatcaatgcccacagctgacttcttctcttctctcccagacctgttttccttccaattctatctatataaactgtcccactcatgtcactccctactccaatccgtccttcccaacagatatatcttccttgaaaaaagaaaaaaaaaacaaact

SEQ ID NO: 717587 - DNA, 851 bp, Homo sapiens
aatagtttatggggggaaattttttgagggaggatcttataattgatcaaaagcatgggactgttagaaaagcttacacgggcagtgttcaaatctcaaacaatcctatgctcctaatctaaaccaccttcctaacaactcaagtaggcttctgttttgttttgtttttatttaactatttatttatttttcaataatcaggcagtctgtctgaactggaacaggttcagagagactccccaggcagacctctgtattccatgatgatggggctaccagctagtagttccgttaggcgagcagcagcatcctyactcagcagtacttgtgaaatcatgggaatattttattgcaaccattttcaaattctgtttcagagcatcttaagctccccaggaacctagtccaggggagaaggttcggcttcctactctggttcaatcctaattcaacttttgaagaaaaatggttccaatttttaaaaataaagattgccaaataaagattttaaaaccactgttaaaatgcattttgcagctgggcacaatggctcacgcctgtaatcccagcactttgggaggccgaggcgggtggatcacttgaagtcaggagttcaagaccagcctggctaacatgatgaaaatactaaagatacaaaaattagccaggcatggtggtgcacatctgtaatcccagctactcaggtggctgaggcatgagaatcgcttgaaactgggaagcagaggttgcagtgagccaagattatgccaccgccctccagcctgcgcaacaaattgagtctgtctcaaaaaaaaaaaaaaaatttgttgtaattttataacgagtggaaa

SEQ ID NO: 717588 - DNA, 1116 bp, Homo sapiens
attagccaggcgtggaggcgcatgcctgtaatcccagctacttgggaggctaaggcaggagaattgcttgaacccgggaggtggagcttgcattgagccgagactgtgccactgcactccagcctgggagacagagcaagactccgtctcaaaaaacaaaaacaaaaaacaacaacaacaaaggttgattgaaatacagccacactcatttatttacgcattgtctatgactgcctcacactacagtggccactctcagtagttacaacagagaccatatggcccacacagccccaaatatttactctatggccctttagagagagtgcgcatgtcccaggcctgcatcagaggggtagttggtaggctctggatggaaggggcatttgtatgtaggatctatgggagattaggggtaatgggtgccaagatatctgttacaaatgctagtcctgcaggcaatgggttgaaattaccatctatatcaataaggttatattatctatgtgcatatggtatgtaactccagaaagttcaaaaggatattctgtaaaaagaaggtcagccttccccctgccctctgggcattcagacaggacaactcctctgaggtcctcagttactcatgcttgggtatccgcacagagatttttttttcacctccaacattggggatggagatattcttacacatacatgtgtaagtttacatatatgtatattctttcatctttatatatatgcatgttatttcatttaaaaaaacccacatatagacatgtgcgagtttacatgtatgtatattctttcattaaaaaacccacaggctgggtgcggtggctcatgcctgtaatcccagcactttgggaggccaaggcagctggatcacttgagcctaggagttcaagattagcatggccaacatggtgaaaccccgtctctmcaaaaaatacaaaaattagctgggctggtggcgtgtgcctgtaatcccaggtacttagaaggctgaggtgggaggattgactgagtccaggagttcaaggctgcagtgcgccgtgattgcaccactgcactcctgcctgggtgacagagcgacaacaccctgactcaattaaa

SEQ ID NO: 717589 - DNA, 1101 bp, Homo sapiens
tccttatcttggattttggtttgacaatggttatgttgtaaaagtagtgaaaaaaaaataaagtgacaaatgaccacaagactataatgactgagacattgaatgtttttttgtttggatttaagaaaaaattttctaaataaaaaaataaaaatatttttgagtgaatcttcaaatacttaagaaaacaaactcttcaagcaccaatacaaaaaaaataatgctatgagtctatttattaaggcagatccttaataggaaacaccgattgtatgaaagtaaataaatttgaactactcagctgttaccctaaatagtgttacttatgccttggtaactctggatatttaktgttgatatgtatgctctatattataatgagatgttacagtggatgtcttcaaaattaatatgaaatttattctcactttctcagatgtatctctagaatatattatatgttgtttagactttgcatggtattaagattgtagttctttttcaacaggtctcactggtatctcgcagtcatttgttttccatggttagaagaagctgtgtatgaagattttccacaaactgtatcccagcagtcccaggctcagcagtcccaaaatgacaacaaaacaataggtgacatccataacgtagatggtgtttttaataatgatgacaataatttaatggttacagggaagaaaatgaagttaacggtagtatagttatttactatcattaaacctactttaacaggatgaataaaaaatctgaaatttttaatgatagacaaaatataattctgaagttgtactgttatatcaagttttattatggcacttaaaattactacttattgatcttatgaaatatttcaaacatacaaaaaagtataactaatatgaccaacatcaatacctgtttcacctggattaagaaattaaaacttttctgatataataataatctcctctgtgaccactcccatttctctttctttaatccagaagtaaccactaccctaaattttatgtttattccatgtattattattattattattatttccattgacattttttgcttgttttaacttaaaaaaat

SEQ ID NO: 717590 - DNA, 1101 bp, Homo sapiens
tccttatcttggattttggtttgacaatggttatgttgtaaaagtagtgaaaaaaaaataaagtgacaaatgaccacaagactataatgactgagacattgaatgtttttttgtttggatttaagaaaaaattttctaaataaaaaaataaaaatatttttgagtgaatcttcaaatacttaagaaaacaaactcttcaagcaccaatacaaaaaaaataatgctatgagtctatttattaaggcagatccttaataggaaacaccgattgtatgaaagtaaataaatttgaactactcagctgttaccctaaatagtgttacttatgccttggtaactctggatatttagtgttgatatgtatgctctatattataatgagatgttacagtggatgtcttcaaaattaatatgaaatttattctcactttctcagatgtatctctagaatatattatatgttgtttagactttgcatggtattaagattgtagttctttttcaacaggtctcactggtatctcgcagtcatttgttttccatggttagaagaagctgtgtatgaagattttccacaaactgtatcccagcagtcccaggctcagcagtcccaaaatgacaacaaaacaataggtgacatccataacgtagatggtgtttttaataatgatgacaataatttaatggttacagggaagaaaatgaagttaacggtagtatagttatttactatcattaaacctactttaacaggatgaataaaaaatctgaaatttttaatgatagacaaaatataattctgaagttgtactgttatatcaagttttattatggcacttaaaattactacttattgatcttatgaaatatttcaaacatacaaaaaagtataactaatatgaccaacatcaatacytgtttcacctggattaagaaattaaaacttttctgatataataataatctcctctgtgaccactcccatttctctttctttaatccagaagtaaccactaccctaaattttatgtttattccatgtattattattattattattatttccattgacattttttgcttgttttaacttaaaaaaat

SEQ ID NO: 717591 - DNA, 1526 bp, Homo sapiens
ttctaatgcgtgttcaaaaagatctcactgtgttttaatttgaatcctaaagacaaatgatgttgaacatcctttcatctttttattagccatttgcatgtcttcttttttgaactacctgttcaaatcttttgcccaagtttaaagctgggttgtttctcttttcaccatttatttgcaagattttttatgtagtcttgatacaagccatgtgcrtgatatgtaagttgcaaacattttctcctggtctgtggcttgctttttcattttattaattgcgtatgtatcagttttgtgtcttagctaagaaatctttgtctaacctaagaaataggctctgtttctttttctttttttgtttttacatgtggataccaaattgtttcactatcatttgatgaaaatgttatttcttctttcttttttttttttttttgacagagtcttgctctgtcacccaggttggagtgcagtggcacaatctcggctcactgcaacctccacctctcaggttcaaacgattctcctgcctcagcctcctaagtagctgggactacaggcatgtgccaccacatccagctaatttttgtatttttagtagaaatggcgtttcaccatgttgaccaggttggtctcgaactcctgacctcaggggatccgcccgcctgggcctcccaaagtgctgggattacagtcatgagccaccgaacccagtgaaaatattatcatttcttaattgaagttgtcttagcttctttgttaaaaatcaattgaccacatatgtgtggtctgtttctggactatattctgttccttttgtctatgtcttgattactgtagctttattataatcttgaaatctgatagtgtgagacttccaactttgtctttctttatcaaaattgtttgggctgttttagttcctttgctctttcatatcaattttagcattttcatgtctatatgatgagatctgcattaaatatatttaccaattatagaagaattaacatcttaacatattaaacttccaatccattaatgtgatttatcttttttgttttttaagtgttctatgatttgtttcaacattttttgtagttttagcataaaatattgtacatatttggtattttatcccaatgtattttatatttttttgtgcttttctaaatgatactatattttatttcaatttccaaatgttctttgacagtgaagtttcatatgtagcttctgtgtagattcacggaggtcccttctgaatataattccccttttgtttttgatatttgatgcaatagattccagccacttcagctgcccccaattccgatttctgcttcttcaccttggcatgtctgccatgacctgtttcatttcagctctttgtaccacggtcaggagattatccccatgtagaaggctgggcaattgtgggtctcaaatttttagtttttccactctcagggatcacattcttatgctgtctgttgttcaatgctgaaaatactgtctcatatatt

SEQ ID NO: 717592 - DNA, 787 bp, Homo sapiens
gatggcacttgtagatcttttcaaacttgccaaggacttcttcatctcccaagagtcaggccaagatcccacagggaacctcaaaactctgttccctaggatctgtatttttgtttttgttttttaaatttttttttaagtttttatttttggagatgaggtctcactatgttggccaggctggyctcgaactcctagcctcaagcaatcctcccatcttgatctcccaaagtgctgggattacaggcctgagccaaggtgcccggtccctaggatccgtttttaaccatccctgggcttcattttggcacggcagtaccaagattgagacaagaaactcttccctatgcttgctttcctgtgttctaagtttctctcgctactttttctcctatggagaccccttaggactgtaaaataaaggaggccaagtccaatttaaacagcaattggacttaactccacccctgtgccccaaatcctctgccactaccaacgaagcagtcatcagaactgtctttttagacagcccccggcccctcttcaaggacgggcagggctatcagccaacctgtttgggagacagctgaatgtcagcaccagaaagtattgtatcatcttcgcaccgctggagtcaggaagtggggtctccagagcctggtgccagggcctgtctcctgagtgaatacagaaggaaaaaaagtttcctaacatttggattcaaagtgagaacggtgagtggcacccatcatcactgtgcgtgcaaccccaacaaacacacacgcgc

SEQ ID NO: 717593 - DNA, 578 bp, Homo sapiens
caaatcatagttttcttttatcatcaaaccagtagccatgatttttctaattctgtttttcagcttctggagccaaattttgtacacctctggctgatcgctcttaaattatcttctgaaatctctttcagtgggacgacagagatctgactgacaagctttaatagcagcatttcttacagcattatcagcaaggtggtttcctgtagcctcaagagtctaaccatggccaggcacaatggctcatacctgtaatctcagcactttgggaagccaaggtgggtggatcatatgaagtcagaagttccaagaccagcctggcctagatggtaaaatcccatctctactaaaaatacaaaaattagccaggcgtggtggcgcatgcctataatcccagctactcaggaggcagacaggagaatcagttgaacctgggaggcagaggctacagtgagccaagatagcaccaccgcactctaccctgagcaacagggtgagattctgtaacaaaaraaaaagccaccccaaaaaaaaaaaaaaaaaaaaaagtaaagaaaagagagaaaaaagtctaagag

SEQ ID NO: 717594 - DNA, 1550 bp, Homo sapiens
caggcttaggtcaagtcacgtgcctgcagcacagctgccgggagaagggtgggaggaatagctgcttccatcctcaatagaaggggaagcagaactctgcatctggtgaaactcacacattggggcctgtgcccccaaaagaaaaaggtgtttggtactggagagtcaaaagatgacacacctccattataccatctcccaatgttgacaggatccaaggagacgcctgagtaaagcacctgacacacagtaggacttcaatccatggtggttactgctattactgttataactggggtctccatgcctgtgcctggacaggttagctcagggaagcccatacctggtactcaggcaaagcccctgagtcaccgagacatgctgcagggtccatcttacctatatgcagctcttgcagacatggtcaacttggactccttgcctcagaaccacctaagctgttgctaaaatacagattcctgggtcccttcccagatctgccaagtcagaatatctggtggtggagcctgggtgtgtatgtctgccacacttcctgagtgaagccacgtgcctgtccttgggaaccatggtgcggggtgatattaaagagggaggatgtagcagaaaggcttgaacccggccttgggggatgaacaatgtttgtttgcgcagcaccatttcacagggagactggggtgcaggcttgcgggttgtaggggtcagtggtcagtgatgaggaggttggtggcctgaaggggtgagtgacgcagtggggacatcaggtgggtgggtctagactcaccatggtgcagaaagggaagcaactgagtgttcccatcaggactgtgacatcatgatggcaggaaagaagctgtcacaagggtggccagcctgcctctctttttctgcatcttcctgagctgttccccgagtcacacttcccccaaggtttgtcaattgtaaagtagccacccagcctcgtggggagatggtgaccgcgtatgtggggcaacatcctgcagcaactacaagaggccctgggccagccggcagacagcacatctgggtggcagatagagtggagggggcagggctctgagggtggccctggctgctgctgctgctgctcctgctgctgcaggtaaggagagtgggtaarcaggctggggaagaggggaccagggagagggatgtagacagcccagcagaagtgcccactaatgggagtttcctcttatatctttgggatggactggaatgggatcaggtaatgtggtacaaatgggaaagggaaaggaggcaatgcatgcagacggtgcttgtccagcctgacccaggagggactgggcgatgaaacagaagctggaggtccctctactgcatcttgaagttgagagaattaggtggattcagcagagcaatcccccagcactgtgctgatatcctgggagatgtaaagaaaagcgagacagagtctccccttaaaaaagcattcactcactgtgcagaggaggcgttagtagagcaaaaggtaaataacagcaaaaaga

SEQ ID NO: 717595 - DNA, 596 bp, Homo sapiens
tttgatggagagaatttagattttaaaatatatctgcaggggtacttaaagcagtcacatctcatgtttagtatagttgtcattaacaatttcaaagttttgggggctagaggtctttcccccaattaatgagactaagtccaaaaggcttctgaccctctatgttctttatatttgatgatgctgccttgttaggtttttgtcacttttgccccgtgcaatcttttagctctaacacaagtgtttcttacttataaaaatagtaggaagcttgaggtacgtagacaaaatgtgacagtagtgatrttagtgcagcgggttacagtcctatccacatagaaaatgaaaattttacgtcctaagcaagaagttggcagcatgcaactgtaagaggcaccacagattccccatagatgcacctggttaaaagacagcctcctccttaacaataccagaagaaagctatagaacttgtgagtttataaaaatttaaaaagattagttaagatctgaacccgtaatatgaaatgagttttatttaaattcctaaagacaaacaagtacaaatgtaagaatacaacaacttatcaataagg

SEQ ID NO: 717596 - DNA, 571 bp, Homo sapiens
gcgtaaagggtgaagtgcttgtatttggcagtaatgaataamtgttatttagaatgtttcagtgaatatgttgggctacatttttgggttaaacacaagttttaaagacaaagcagagaaattattttgtaaaaggaatgatcaattagacttatatgataaagtatttgaacatgaagcaattaaatacttacataaaattttaactgttcgaagttttctctaatatgacaaggatgctttctcttttcctttgcattgcatcaatgtaaacattgtcagttcaaaattaaagcgtataaaaatggaagtacaattaatctaccaacatttcaagtgaaatgtgtagttataatccaaaatagcgtgtccggaatttgtgggttcttggtctcactgacttcaaacatgaagccgtggaccctcgcggtgagtgttcccattcttaaaagcggtgtgtccggagtttcttccttgtgatgttcagacgtgttcggaatttcttccttctggtgggttcgtggtctcgctggcttcagcagtgaagccgcagaccttcaagccggggcac

SEQ ID NO: 717597 - DNA, 571 bp, Homo sapiens
gcgtaaagggtgaagtgcttgtatttggcagtaatgaataaatgttatttagaatgtttcagtgaatatgttgggctacatttttgggttaaacacaagttttaaagacaaagcagagaaattattttgtaaaaggaatgatcaattagacttatatgataaagtatttgaacatgaagcaattaaatacttacataaaattttaactgttcgaagttttctctaatatgacaaggatgctttctcttttcctttgcattgcatcaatgtaaacattgtcagttcaaaattaaagcgtataaaaatggaagtacaattaatctaccaacatttcaagtgaaatgtgtagttataatccraaatagcgtgtccggaatttgtgggttcttggtctcactgacttcaaacatgaagccgtggaccctcgcggtgagtgttcccattcttaaaagcggtgtgtccggagtttcttccttgtgatgttcagacgtgttcggaatttcttccttctggtgggttcgtggtctcgctggcttcagcagtgaagccgcagaccttcaagccggggcac

SEQ ID NO: 717598 - DNA, 571 bp, Homo sapiens
gcgtaaagggtgaagtgcttgtatttggcagtaatgaataaatgttatttagaatgtttcagtgaatatgttgggctacatttttgggttaaacacaagttttaaagacaaagcagagaaattattttgtaaaaggaatgatcaattagacttatatgataaagtatttgaacatgaagcaattaaatacttacataaaattttaactgttcgaagttttctctaatatgacaaggatgctttctcttttcctttgcattgcatcaatgtaaacattgtcagttcaaaattaaagcgtataaaaatggaagtacaattaatctaccaacatttcaagtgaaatgtgtagttataatccaaaatagcgtgtccggaatttgtgggttcttggtctcactgacttcaaacatgaagccgtggaccctcgcggtgagtgttcccrttcttaaaagcggtgtgtccggagtttcttccttgtgatgttcagacgtgttcggaatttcttccttctggtgggttcgtggtctcgctggcttcagcagtgaagccgcagaccttcaagccggggcac

SEQ ID NO: 717599 - DNA, 613 bp, Homo sapiens
atagcatagaaatgatatctacgcaaaagttttaaagtaatctgttgaggagaggctaagtggaatccaatagctacttatcctcagagtcctaatactggagaaacaggatggaggtcacaggctaccataggaaattgagaaactgatggggtctggatgggataatagagtagagggtaaacacaagatgggtcagaacaagatggggttgggggacagaaatacatttggaagaacaggaggaaaaggaaagccaagtgtccagggaaagtgtatcttagatttgggggggaaaccaggagtagcattggaggaagactggtgtttttaagtgactaaatagtttgtaataaggaatattgagattgttgaaggtgctgcttgagatttgattggaaaaaccacattttggcttctttaaaacaagaaaaaaagatcattgtttacaataaattttagacccctgagattcaaaagctcttcaaagataaactaacctggggagatcccaaagcctcaaagtgccsactgtaattctaaattactcttaataagatttttgccattttgaagatgttggacagaattaatgccatagtgatgaaacctc

SEQ ID NO: 717600 - DNA, 575 bp, Homo sapiens
ctctcattattaatcattttctagccaatactcccaaccacattttccttctccttctattacatgtgcttgaatagacacatctacttgaactcagctgtccatctttgccctaactgaattacgtagcctgtaactgctagaaaaagtcagaaaactaagctgacaatttgcaactaaaaatcatgtttaaaaacctcaacttcacacacaaaactgcgtagaaacttttttactattacccagtacactgatttttgattctactatttaaagacatatattttgccctaaaatattccagactttaatttcccctatcctcatagaagacttattttttcattgtgaaaacggaagacttggactggaacttatcactcttaccataagataatcttcaaaattacatgtgtatatgtgtgtgtagtgtgtaattcagtctgttactatgtataaaacatccctgctytttataaagcccagtttctccctgagcaaataatgacaagtgaaagaaaaatgcctaataaaagatatttatttctaaaatactcattttagaataagtgttt

SEQ ID NO: 717601 - DNA, 1125 bp, Homo sapiens
tgcaaagtactggagataaaattatgaataggactagccaagttcttgctctcctggagtaccagcactctaygctcagctttttggatgtgaatccactgagtcggtgcacaccttaataaacatcctcctttattcaccgatattggtctctctggtcctctgattcctgtaacactgcagcttccatgttgaatactccataactctcaataatgctcgcttctttctacctgagtcagtgcatgttttggagtgaatactgtcatgtgcaaagtgccttgctcagtctcttctggagtaagtcactaatggacaagttcccacattggatttccaccagcaacacccaggaagctttccagggagcagattccagggccccatcacttgcatattggattagagcctccagagactccttattcatgggaaactcccaaggttttgatgatgaccttggcaatcactgccctagcatactagagtgaaaaagacaacattgaacttcacataaatacgttacagtaggatactgaccagactaggccaatgtcaagaattgagaggaacaacaagaaattatgttaaccgtgcttttgggtgtaattgtttccttgaggggaattttatgattatttaattaaagcatttcactttgattaaaggtgttgctttgacttctcgagtatgaaatacaagacttgtgagaatcaaacaacttgttaaatgcaaacagtttaccaagggccagccctaaacaagacaaaatataataaataataagctttagaaattaagtgtaaatgtctgtggagaacctaattatttctcttgttatgaacattaacccacattcagtttttaagcctgtgttattctaatgatgttcaccattagccatttctgactacaataaaaagaatcgcaggggggattttgttcattactgcatgctgggatttgcattgttttgtcttcacttgattggagtttcagatgcctcaagtcttcattcattgtgaatggagagaactaagagctgcccctgtgtgagagcaaaatgctttgcatttctaacagaactggagggctgagatagctcactgagacacatacatagaa

SEQ ID NO: 717602 - DNA, 1125 bp, Homo sapiens
tgcaaagtactggagataaaattatgaataggactagccaagttcttgctctcctggagtaccagcactctacgctcagctttttggatgtgaatccactgagtcggtgcacaccttaataaacatcctcctttattcaccgatattggtctctctggtcctctgattcctgtaacactgcagcttccatgttgaatactccataactctcaataatgctcgcttctttctacctgagtcagtgcatgttttggagtgaatactgtcatgtgcaaagtgccttgctcagtctcttctggagtaagtcactaatggacaagttcccacattggatttccaccagcaacacccaggaagctttccagggagcagattccagggccccatcacttgcatattggattagagcctccagagactccttattcatgggaaactcccaaggttttgatgatgaccttggcaatcactgccctagcatactagagtgaaaaagacaacattgaacttcacataaatacgttacagtaggatactgaccagactaggccaatgtcaagaattgagaggaacaacaagaaattatgttaaccgtgcttttgggtgtaattgtttccttgaggggaattttatgattatttaattaaagcatttcactttgattaaaggtgttgctttgacttctcgagtatgaaatacaagacttgtgagaatcaaacaacttgttaaatgcaaacagtttaccaagggccagccctaaacaagacaaaatataataaataataagctttagaaattaagtgtaaatgtctgtggagaacctaattatttctcttgttatgaacattaacccacattcagtttttaagcctgtgttattctaatgatgttcaccattagccatttctgactacaataaaaagaatcgcaggggggattttgttcattactgcatgctgggatttgcattgttttgtcttcacttgattggagtttcagatgcctcaagtcttcattcattgtgaatggagagaactaagagctgcccctgtgtgagagcaaaatrctttgcatttctaacagaactggagggctgagatagctcactgagacacatacatagaa

SEQ ID NO: 717603 - DNA, 1222 bp, Homo sapiens
gcacatgccaaagccacatgctctgggaggacaacctctgctgatggcagtgacgtgtcctccaccaagaagatatgaggacaagaaacagattttcattcatcttgagagcgcagtgcttgcagagtagcagttaattagaccaagactgggtcaaagtcaacttctggatgttgaaggggatcggggggacatgttcaaaagcttaagaagatgatactgacattgctttttattttgttttgtgaatgtctcatgcacttcaaattgtatgactttcttccttgaaaagggcacagtaaaactgcttggtaacacatctacaataatgcaaaatcaggcataaaccaatcagggatgagctccctgtcctgtgctcaactgggaacacctaaaattcgtatcctctgggtaaggagggtggggaaagcagtggggactgggtgaccaggggacaccacctaactggagattccaggaacagcagctgccatcttgggagtcctggttagccactagacacaaaatcatctcaggactggaagagtcttggatcagactaaactctcagaactgccggtcatcaagaagtacaatctcatcgggtcatgttattaaccccatgccaacccaacccataccgcatgctcctgagggatctggactgacgtatcaagtgtttctactgactaatccagctgctactacactgagcagcagagaggagggtcacrgtggggctggagtaaagtgcatttatctcagtaatatggtaaaaatctgtcaacaccccaacaaaatatggtctcacagtccctcttcttatctgtttctttgtggctccttctccaggtcacaaagtcatggtggttcagggtacaagtcagtcaggaagtaagtaaggttcctatgtggcccacaagccctggcctcagactagccactcccatctctgcagcgggcccctcaaggacactgactgagcgttctgggccctgatcctgcccaggtcctctccgcagatgctaaggatgaggtggctgtcactcaaatctggggcaggggctctgagagaggatggagtcacgcctctagtcatacatgcccaggggcactgaggttctggttgtgtttgtccctcacagctcctacaatgtgcgatatggtgttttaaggtgcaagttaaccaagagtgggttttgcccccaatagcagcatgttc

SEQ ID NO: 717604 - DNA, 1167 bp, Homo sapiens
gaaacagggttttgttatgttgcccaggctggtctgaaactcttggcctcaagtgatcctccttccttgggctcccaaagtactggggttacaggcatgagccactgtgtaaatgttttgtaggacttttagaaaacatggggttgtgcctttggccacacgcatgcttgtggatctacaagaacagcggtcctgtaactcttcagggaaggggcaccacatatctgtcctgtcaccatggcaaagctggaagggtctgcagagctacccagcatgctgctggtgttgttgtaaccaagcagagggcaagattctcgccatgagaattgatgtacatgtctagcatgtgaagcatcctaagggctgaggtgggttcctgaaacctgtggaggaaaatgctcagtgcaagaagccaaagaaaaaggcaccaggctcagcgggagcacccgcctggagaagcatactttgtgaggatcagcagaaaggagctgagtgtggaagctgtccccaagtcatggcacaaaagtattcaaaagaaaggatttctggattgttttttaaaaaacaaaactgtgatgtaaatgatgaattgtgctctgtggtctgattaggaatgtragtggatccagagtacagtggggctgaggcagtggaagtatttttttgtgtttttttttttaacttttaggtcagggatacgtgtgcatgtttgtttaatgggtaaacttgtgtcacgggggttcgttgtacagattattttgtcacccggataccaagcctagcaccccaatagttattttttctgctcttgtccttcctcctgccctctacactcaaggaggccccagtgtcttttgttcccatctttgtgtccatgtgttcacatcatttagctcccacttctaagtaaaaacatgaggtatttggtttcctgttcctgtgttagtttgctaaggataatatccgccagctccatccatgttgctgcgaaagacatgatgtcgttcttttttatggtggcatagtactccatggtgtatatgtaccacattttctttttacattctgtcattgggcattaggttgattctacatctttgctattgtgaatagtgctgcagcgaacatatatgtgcatgtgtctatataggagaatgatttatattc

SEQ ID NO: 717605 - DNA, 1167 bp, Homo sapiens
gaaacagggttttgttatgttgcccaggctggtctgaaactcttggcctcaagtgatcctccttccttgggctcccaaagtactggggttacaggcatgagccactgtgtaaatgttttgtaggacttttagaaaacatggggttgtgcctttggccacacgcatgcttgtggatctacaagaacagcggtcctgtaactcttcagggaaggggcaccacatatctgtcctgtcaccatggcaaagctggaagggtctgcagagctacccagcatgctgctggtgttgttgtaaccaagcagagggcaagattctcgccatgagaattgatgtacatgtctagcatgtgaagcatcctaagggctgaggtgggttcctgaaacctgtggaggaaaatgctcagtgcaagaagccaaagaaaaaggcaccaggctcagcgggagcacccgcctggagaagcatactttgtgaggatcagcagaaaggagctgagtgtggaagctgtccccaagtcatggcacaaaagtattcaaaagaaaggatttctggattgttttttaaaaaacaaaactgtgatgtaaatgatgaattgtgctctgtggtctgattaggaatgtaagtggatccagagtacagtggggctgaggcartggaagtatttttttgtgtttttttttttaacttttaggtcagggatacgtgtgcatgtttgtttaatgggtaaacttgtgtcacgggggttcgttgtacagattattttgtcacccggataccaagcctagcaccccaatagttattttttctgctcttgtccttcctcctgccctctacactcaaggaggccccagtgtcttttgttcccatctttgtgtccatgtgttcacatcatttagctcccacttctaagtaaaaacatgaggtatttggtttcctgttcctgtgttagtttgctaaggataatatccgccagctccatccatgttgctgcgaaagacatgatgtcgttcttttttatggtggcatagtactccatggtgtatatgtaccacattttctttttacattctgtcattgggcattaggttgattctacatctttgctattgtgaatagtgctgcagcgaacatatatgtgcatgtgtctatataggagaatgatttatattc

SEQ ID NO: 717606 - DNA, 538 bp, Homo sapiens
ctctgttgatagtttcttttgctgtgcagaagctctttagtttaattagatcccatttgtcaatttttttcttttgttgcaattgcttttggcatcttcattatgaaatctttgcccattcctatgttcagggcagtataggttgtcttccagagtttttatrgttttgaggtttacttttgagttgactttttctatgtggtgtaaggaatcagtccagtttcaatcttctgcatgtggttagccagttatcccggcaccatttatggaatagggagtcctttcctcattgcttgtttttgtcagttttgttgaagatcagattgttgtaggtgtgcaaccttatttctgggctctctattccaatccattggtctatgcttttttttttctttcttcttcttttgagacagggtctcactctgtcacccaggctagagtgcagtggtgcaatcgcagctcactgcagcctcaagtggaagtctcgatgagatcagggaggagtaggtgtgaagacagtagaagttctgggaggctg

SEQ ID NO: 717607 - DNA, 731 bp, Homo sapiens
tggggtgccttcgctaataagggcgagacagtcggcttctcacatctgcagcaaaagagagggagagacgggagggaagttgttcccgggccacgccagctgctgcctctgccttccctgctgagcctggagccctgggccccactggcagtggagcaagctgttgacatccccaacttgtgctacctggggacagtgggctgatgaaggcaggyggctctcatctggtgaggggtgcagaaatcagagcccacagtgagaacacagaccaacacacagaacagatggccagacgcccgctcggctctgcttctggggctgttgacattcttaagtgactaattttgacatgttatactactaatgaagttttttcagtgtgacccagtaaactgctctgcagccgagacggcgtgacttagctttacagccccgtgctttcctattccaccagcagccgactgctgacgcggctcgggtggaatcacagtgaacgctgtgtcacccgggatgggctgcatggagaaacttcctgagatgtctgcttgcagtccgaattgggacctgcagacttttctctagccacatgcctgcgtcaccagtctgtaaatgttctcgaggacaggaaataaaaccgggcagtccggcaggctggccctgtggccccacgagaccacggaggccgagcaagcaccatcgcggtggctcctgagctgacaggcagctgccca

SEQ ID NO: 717608 - DNA, 731 bp, Homo sapiens
tggggtgccttcgctaataagggcgagacagtcggcttctcacatctgcagcaaaagagagggagagacgggagggaagttgttcccgggccacgccagctgctgcctctgccttccctgctgagcctggagccctgggccccactggcagtggagcaagctgttgacatccccaacttgtgctacctggggacagtgggctgatgaaggcaggtggctctcatctggtgaggggtgcagaaatcagagcccacagtgagaacacagaccaacacacagaacagatggccagacgcccgctcggctctgcttctggggctgttgacattcttaagtgactaattttgacatgttatactactaatgaagttttttcagtgtgacccagtaaactgctctgcagccgagacggcgtgacttagctttacagccccgtgctttcctattccaccagcagccgactgctgacgcggctcgggtggaatcacagtgaacgctgtgtcacccgggatgggctgcrtggagaaacttcctgagatgtctgcttgcagtccgaattgggacctgcagacttttctctagccacatgcctgcgtcaccagtctgtaaatgttctcgaggacaggaaataaaaccgggcagtccggcaggctggccctgtggccccacgagaccacggaggccgagcaagcaccatcgcggtggctcctgagctgacaggcagctgccca

SEQ ID NO: 717609 - DNA, 1125 bp, Homo sapiens
acacactcacacaccgaaaacattgataaaatcagccattccagcaaaactagctacttagtgtctatctctccttgaagattcaaactagaaatgaggatttagagaggcatgatggttcgttctctcttggagcccagttcgaagttgactgactgattcagtcattgtaattggttggtcttggggaagaatccactttgactcttgggaagtcagctaggtcagcggacagagcaggggctctggagccagactgcctgcacccgacttctagctatgataccttggataaactacttatcacctgggcttcaggttcctcatctgtaaaatggggataagaatgctatctctctcacaactgttaggaggactgactgggttaatacgtgcaaagtaccragtacataagaaaccaacagccagtgctcattacaatcattattattttgggcaagttaagccgcatggtttctttaggtataaaattaggctttatttacctacctgttgggttgttccaaggattaatcacatagtgttcatgaattccctttataaactattatagaaaagaaatatagttaacattaattgaacacctactatgtgcgatcgttttaaggcttgccatgtgctgcttcattcagtccgcaccatgacattaggatcacactttcgttttccattttttttaaaattatactttaattactagggtacatgtgcacaacgtgcaggtttattacgtatgtaagcacgtgccatgttggtgtgctgcacccattcactagtcatttacattaggtatatctcttaatgttatccctccccctccccccgcccatgacaggccccggtgtgtgatgttcccctttctgcgtccaagtgttctcctagttcaattcccacctatgagtgggatcacgcggtgtttggtttttttgtccttgcgatagtttgctaagaatgatggtttccagcttcatccgtgtccctccgaagggcatgaacacatgcttttttatggctgcatagtattccacggtgtatttgtgccacgtttccttaatccagtctatcattgatggacatctgggctggttccaagtctttgctact

SEQ ID NO: 717610 - DNA, 1296 bp, Homo sapiens
  misc_feature 291, 292, 293, 294, 295, 296, 297, 298, 299, 300, 301, 302,303, 304, 305, 306, 307, 308, 309, 310, 311, 312, 313, 314,315, 316, 317, 318, 319, 320, 321, 322, 323, 324, 325, 326,327, 328, 329, 330, 331, 332, 333, 334, 335, 336, 337: n = A,T,C or G
  misc_feature 338, 339, 340, 341, 342, 343, 344, 345, 346, 347, 348, 349,350, 351, 352, 353, 354, 355, 356, 357, 358, 359, 360, 361,362, 363, 364, 365, 366, 367, 368, 369, 370, 371, 372, 373,374, 375, 376, 377, 378, 379, 380, 381, 382, 383, 384: n = A,T,C or G
  misc_feature 385, 386, 387, 388, 389, 390: n = A,T,C or G
tggtaaatggaaacttacaaatattacctagttaggttggtcaggatgtctaaactatctttgcaaatgataattgctaacattattgagtactgtgatgtgccacatggatatattttcatctcgtataatactcataaaagctcaatgtggttttagttactcttattattcccattttaaacatgtgaaaactgaggctcagaaagcttaagtaacttccccagtgttctagttatccattgctacaaaacaaatcggacaaatttttttttaaattatactttaagnnnnnnnnnnnnnnnnnnnnnnnnnnnnnnnnnnnnnnnnnnnnnnnnnnnnnnnnnnnnnnnnnnnnnnnnnnnnnnnnnnnnnnnnnnnnnnnnnnnnaaattcatataaattctaaaaataaaatgaaataacatacactacaaaagacgtttatttattaaatccccacagaaggggtctaagtgataaaggaaaataaaattccgggaacggtaaaatcaatcagaaatgccctacttcagtgctttccgaaatttgtctgacagagtggaaatccagtttttcactaagtcactgttctggaacagtttgtgtgtgtgtatgtacgtgtgtgagggctcacatacacaaattgaactaatggaagtgtaagcattcaaattatcagtttaatttagttctatacatatacacacacacacactcacacaccgaaaacattgataaaatcagccattccagcaaaactagctacttagtgtctatctctccttgaagattcaaactagaaatgaggatttagagaggcatgatggttcrttctctcttggagcccagttcgaagttgactgactgattcagtcattgtaattggttggtcttggggaagaatccactttgactcttgggaagtcagctaggtcagcggacagagcaggggctctggagccagactgcctgcacccgacttctagctatgataccttggataaactacttatcacctgggcttcaggttcctcatctgtaaaatggggataagaatgctatctctctcacaactgttaggaggactgactgggttaatacgtgcaaagtaccaagtacataagaaaccaacagccagtgctcattacaatcattattattttgggcaagttaagccgcatggtttctttaggtataaaattaggctttatttacctacctgttgggttgttccaaggattaatcacatagtgttcatgaattccctttataaactattatacaaaagaaata

SEQ ID NO: 717611 - DNA, 1296 bp, Homo sapiens
  misc_feature 291, 292, 293, 294, 295, 296, 297, 298, 299, 300, 301, 302,303, 304, 305, 306, 307, 308, 309, 310, 311, 312, 313, 314,315, 316, 317, 318, 319, 320, 321, 322, 323, 324, 325, 326,327, 328, 329, 330, 331, 332, 333, 334, 335, 336, 337: n = A,T,C or G
  misc_feature 338, 339, 340, 341, 342, 343, 344, 345, 346, 347, 348, 349,350, 351, 352, 353, 354, 355, 356, 357, 358, 359, 360, 361,362, 363, 364, 365, 366, 367, 368, 369, 370, 371, 372, 373,374, 375, 376, 377, 378, 379, 380, 381, 382, 383, 384: n = A,T,C or G
  misc_feature 385, 386, 387, 388, 389, 390: n = A,T,C or G
tggtaaatggaaacttacaaatattacctagttaggttggtcaggatgtctaaactatctttgcaaatgataattgctaacattattgagtactgtgatgtgccacatggatatattttcatctcgtataatactcataaaagctcaatgtggttttagttactcttattattcccattttaaacatgtgaaaactgaggctcagaaagcttaagtaacttccccagtgttctagttatccattgctacaaaacaaatcggacaaatttttttttaaattatactttaagnnnnnnnnnnnnnnnnnnnnnnnnnnnnnnnnnnnnnnnnnnnnnnnnnnnnnnnnnnnnnnnnnnnnnnnnnnnnnnnnnnnnnnnnnnnnnnnnnnnnaaattcatataaattctaaaaataaaatgaaataacatacactacaaaagacgtttatttattaaatccccacagaaggggtctaagtgataaaggaaaataaaattccgggaacggtaaaatcaatcagaaatgccctacttcagtgctttccgaaatttgtctgacagagtggaaatccagtttttcactaagtcactgttctggaacagtttgtgtgtgtgtatgtacgtgtgtgagggctcacatacacaaattgaactaatggaagtgtaagcattcaaattatcagtttaatttagttctatacatatacacacacacacactcacacaccgaaaacattgataaaatcagccattccagcaaaactagctacttagtgtctatctctccttgaagattcaaactagaaatgaggatttagagaggcatgatggttcgtwctctcttggagcccagttcgaagttgactgactgattcagtcattgtaattggttggtcttggggaagaatccactttgactcttgggaagtcagctaggtcagcggacagagcaggggctctggagccagactgcctgcacccgacttctagctatgataccttggataaactacttatcacctgggcttcaggttcctcatctgtaaaatggggataagaatgctatctctctcacaactgttaggaggactgactgggttaatacgtgcaaagtaccaagtacataagaaaccaacagccagtgctcattacaatcattattattttgggcaagttaagccgcatggtttctttaggtataaaattaggctttatttacctacctgttgggttgttccaaggattaatcacatagtgttcatgaattccctttataaactattatacaaaagaaata

SEQ ID NO: 717612 - DNA, 1296 bp, Homo sapiens
  misc_feature 291, 292, 293, 294, 295, 296, 297, 298, 299, 300, 301, 302,303, 304, 305, 306, 307, 308, 309, 310, 311, 312, 313, 314,315, 316, 317, 318, 319, 320, 321, 322, 323, 324, 325, 326,327, 328, 329, 330, 331, 332, 333, 334, 335, 336, 337: n = A,T,C or G
  misc_feature 338, 339, 340, 341, 342, 343, 344, 345, 346, 347, 348, 349,350, 351, 352, 353, 354, 355, 356, 357, 358, 359, 360, 361,362, 363, 364, 365, 366, 367, 368, 369, 370, 371, 372, 373,374, 375, 376, 377, 378, 379, 380, 381, 382, 383, 384: n = A,T,C or G
  misc_feature 385, 386, 387, 388, 389, 390: n = A,T,C or G
tggtaaatggaaacttacaaatattacctagttaggttggtcaggatgtctaaactatctttgcaaatgataattgctaacattattgagtactgtgatgtgccacatggatatattttcatctcgtataatactcataaaagctcaatgtggttttagttactcttattattcccattttaaacatgtgaaaactgaggctcagaaagcttaagtaacttccccagtgttctagttatccattgctacaaaacaaatcggacaaatttttttttaaattatactttaagnnnnnnnnnnnnnnnnnnnnnnnnnnnnnnnnnnnnnnnnnnnnnnnnnnnnnnnnnnnnnnnnnnnnnnnnnnnnnnnnnnnnnnnnnnnnnnnnnnnnaaattcatataaattctaaaaataaaatgaaataacatacactacaaaagacgtttatttattaaatccccacagaaggggtctaagtgataaaggaaaataaaattccgggaacggtaaaatcaatcagaaatgccctacttcagtgctttccgaaatttgtctgacagagtggaaatccagtttttcactaagtcactgttctggaacagtttgtgtgtgtgtatgtacgtgtgtgagggctcacatacacaaattgaactaatggaagtgtaagcattcaaattatcagtttaatttagttctatacatatacacacacacacactcacacaccgaaaacattgataaaatcagccattccagcaaaactagctacttagtgtctatctctccttgaagattcaaactagaaatgaggatttagagaggcatgatggttcgttctctcttggagcccagttcgaagttgactgactgattcagtcattgtaattggttggtcttggggaagaatccactttgactcttgggaagtcagctaggtcagcggacagagcaggggctctggagccagactgcctgcacccgacttctagctatgataccttggataaactacttatcacctgggcttcaggttcctcatctgtaaaatggggataagaatgctatctctctcacaactgttaggaggactgactgggttaatacgtgcaaagtaccragtacataagaaaccaacagccagtgctcattacaatcattattattttgggcaagttaagccgcatggtttctttaggtataaaattaggctttatttacctacctgttgggttgttccaaggattaatcacatagtgttcatgaattccctttataaactattatacaaaagaaata

SEQ ID NO: 717613 - DNA, 1433 bp, Homo sapiens
gcggcaggccgatcccctctgcgcagggaagtagcacgactccgtcaccatcttgggccacgctgggggcaccgccggacccctgttctggggctccgcctggatgtccacaaatgctgaggcctgcttgtgcatctggggcacccagagcccgaagctctgggcaggctgatgagagggcagtgggaattctggagcctcgagggccgcctcctcggccaccttcttagcttctgggtatccaggtgggaaccagcagggagctgtggctcgcaacatcttgctgccttcgggagcaccggccgggctctgctccgctcccaaatggcggcttgcctccggggccgcctccttggccaccttcttagcttctgggtatccagggcggaaccagcagggagctgtggctcgcaacatcttgctgccttcgggagcaccggcctggctctgctcccctcccaaatggcggcttgcctccagggccgcctcctcggccaccttcttagcttctgggtatccaggggggaaccagcagggagctgtggctcgcaacatcttgctgccttcgggagcaccggcctggctctgctcctctcccaactggcggcttcaatgagtgctgcggccgccacttgtcgcctttatataggcacagggcagactgggtgggacttctccttgataggttggtgcttcagtccaatcacactgagcctcatcttccaccagactccagcttgggaatgcctcagggggtgcgctaatggaatcaactggaactcccggttgctaaacttggagctaggttgcttttcctgagttaagtaactgtccctgcagggcagtcctataatggctactggaattgggctacctaggattaaattaaggttcagggaggttggtcaacttgcttgggcccacacagcaccccttggagccaggactgggccagcagtctgctgcatgctggagggcgggatccctctggggctgcctttccctgctctgtgcactccgccgctgcgggcaaattgaggacaggaagcgcaccgcacccacttctctcccaggacttgggcaatgttcaacacaggtggtcttccaaaggttcatagaaaatgcacatggtgaagaaactatgcatggatttccactggtttgcactaaaataaacttgtcctaacttctgataacctttctgaactagatctagtttgaggcactaagaaggatgagacatccactgaaaaggactcccrtcagagcaacatgaattccacgaaaattgcagcaagaggaaacatcaaatttatggtgaagcttgggtggaagatggaagaaatcattgacgttttaagaaaagcttgtaaggacactaccccaaagaaatgaactctttacgaatgtatagcttgtttcaagaagaggtg

SEQ ID NO: 717614 - DNA, 603 bp, Homo sapiens
tttcttttctataatagtttataaagggaattcatgaacactatgtgattaatccttggaacaacccaacaggtaggtaaataaagcctaattttatacctaaagaaaccatgcggcttaacttgcccaaaataataatgattgtaatgagcactggctgttggtttcttatgtacttggtactttgcacgtattaacscagtcagtcctcctaacagttgtgagagagatagcattcttatccccattttacagatgaggaacctgaagcccaggtgataagtagtttatccaaggtatcatagctagaagtcgggtgcaggcagtctggctccagagcccctgctctgtccgctgacctagctgacttcccaagagtcaaagtggattcttccccaagaccaaccaattacaatgactgaatcagtcagtcaacttcgaactgggctccaagagagaacgaaccatcatgcctctctaaatcctcatttctagtttgaatcttcaaggagagatagacactaagtagctagttttgctggaatggctgattttatcaatgttttcggtgtgtgagtgtgtgtgtgtgtatatgtatagaac

SEQ ID NO: 717615 - DNA, 603 bp, Homo sapiens
tttcttttctataatagtttataaagggaattcatgaacactatgtgattaatccttggaacaacccaacaggtaggtaaataaagcctaattttatacctaaagaaaccatgcggcttaacttgcccaaaataataatgattgtaatgagcactggctgttggtttcttatgtacttggtactttgcacgtattaacgcagtcagtcctcctaayagttgtgagagagatagcattcttatccccattttacagatgaggaacctgaagcccaggtgataagtagtttatccaaggtatcatagctagaagtcgggtgcaggcagtctggctccagagcccctgctctgtccgctgacctagctgacttcccaagagtcaaagtggattcttccccaagaccaaccaattacaatgactgaatcagtcagtcaacttcgaactgggctccaagagagaacgaaccatcatgcctctctaaatcctcatttctagtttgaatcttcaaggagagatagacactaagtagctagttttgctggaatggctgattttatcaatgttttcggtgtgtgagtgtgtgtgtgtgtatatgtatagaac

SEQ ID NO: 717616 - DNA, 608 bp, Homo sapiens
tgccaggaattaaggagcttactttctaaggtctgacagaaactataataatgaaaaagaaaatctgtattgttaacatttcttaaataatatttattttgtatgaatttattacccagtgtcctcaatatagtaatttaccttggcttacagcatatgttgggtcaggataagggttcctagttgccaacttttcaggaataagctcttctccatgactttcaagatctctygttgtctcacttctatatctgatcttgctctctttccccacacaggcagggcttcctgcctcccacttcacactagtgattcctcacctacctgtgacttcaccatcaccattgctgcatatgtgtacttgactttttttttcaagtaggatgacaatctcagtcccttcacatgtctttagaagcagtagtgcagagttttagaatttctttctaaatcccgtttgatctatctttcctcattcctttccagaagttgttaccagaaaggggtcccaattcagatcccaagagagggttctcgaatcttgtgcaagaaagaattcagggcgagtccatagagtaaggtgaaagcaagttaattaagaaagtaaa

SEQ ID NO: 717617 - DNA, 608 bp, Homo sapiens
tgccaggaattaaggagcttactttctaaggtctgacagaaactataataatgaaaaagaaaatctgtattgttaacatttcttaaataatatttattttgtatgaatttattacccagtgtcctcaatatagtaatttaccttggcttacagcatatgttgggtcaggataagggttcctagttgccaacttttcaggaataagctcttctccatgactttcaagatctcttgttgtctcacttctatatctgatcttgctctctttccccacacaggcagggcttcctgcctcccacttcacactagtgattcctcacctacctgtgacttcaccatcaccattgctgcatatgtgtacttgactttttttttcaagtaggatgacaatctcagtcccttcacatgtctttagaagcagtagtgcagagttttagaatttctttctaaatcccktttgatctatctttcctcattcctttccagaagttgttaccagaaaggggtcccaattcagatcccaagagagggttctcgaatcttgtgcaagaaagaattcagggcgagtccatagagtaaggtgaaagcaagttaattaagaaagtaaa

SEQ ID NO: 717618 - DNA, 608 bp, Homo sapiens
tgccaggaattaaggagcttactttctaaggtctgacagaaactataataatgaaaaagaaaatctgtattgttaacatttcttaaataatatttattttgtatgaatttattacccagtgtcctcaatatagtaatttaccttggcttacagcatatgttgggtcaggataagggttcctagttgccaacttttcaggaataagctcttctccatgactttcaagatctcttgttgtctcacttctatatctgatcttgctctctttccccacacaggcagggcttcctgcctcccacttcacactagtgattcctcacctacctgtgacttcaccatcaccattgctgcatatgtgtacttgactttttttttcaagtaggatgacaatctcagtcccttcacatgtctttagaagcagtagtgcagagttttagaatttctttctaaatcccgtttgatctatctttcctcattcctttccagaagttgttaccagaaaggggtcccaattcagatcccaagagagggttctcgaatcttgtgcaagaaagaattcagggcgagtccatagagtaargtgaaagcaagttaattaagaaagtaaa

SEQ ID NO: 717619 - DNA, 655 bp, Homo sapiens
gttttaattgtgggaatatcttaatcccaccatcaaagatactgtaatctacttgggacaacaagatgattagttaaaaacatgggaattgaatgacagggctggagaataacaggctcattattaagactaattaaaattttaatttcttccaattggtcaaagagcaaaattgtatatgtctccgtgagctacttccgttgtgtcagatgctaagttcatgccaatgtacctgacaaactcaacccttgtccacagtaagaatagatacctgatacaatgatattaattaaaaataagttttagataagtgaacaaactgctgagaaagagaaataaaagatgttcttaggcacagcatgtagaccctaaggtagtcatgtttggaagtggaaggtggcagaaatctgttactgggcattcaaacagacagctgagagatracgcagagttagttatgagaagaggagaaagaagagtatttctggcatcaaaaacagcaattgtgaagccccagaggtcaaagaaaatgaaatactgccacgacatttaacagatgctggactgcctgtcccagtagaaaaatctgattcttctaccatttttatccaagattactccatcataggcagatttgaattgactttatccatcc

SEQ ID NO: 717620 - DNA, 587 bp, Homo sapiens
ttgtcctttttgataacttgtcctggtaacaacttagtaattgacatgtctcttttctcagcctyctcagtagctgggattataggcgtgtgccaccacgcctggctaatttttgtatttttagtagagatggggtttcaccatgttggccaggctggtcttgaactcctgacctcatgattcacctgcctcagcctaaagagtggaagtgcttgtgagattgttttgtgaaattggaattataccattggcatattttttttttttttgagacggagtctcgctcagtcgcccaggctggagtgcagtggcacgatctcagctcactgcaagctccgcctcccaggttcataccgttctcctgcctcagcctcccgagtagctgggactacaggtgcccgcaaccacgcccggctaattttttgtatttttaggagagacggggtttcaccgtgttaacaaggatggactcaaatctcctgaccttgtgatccgcccgaccattggcatatttattttatgccaatggtataattccattatgccaatgggatctttccttatgaatggatgatggtaaaattgaa

SEQ ID NO: 717621 - DNA, 587 bp, Homo sapiens
ttgtcctttttgataacttgtcctggtaacaacttagtaattgacatgtctcttttctcagcctcctcagtagctgggattataggcgtgtgccaccacgcctggctaatttttgtatttttagtagagatggggtttcaccatgttggccaggctggtcttgaactcctgacctcatgattcacctgcctcagcctaaagagtggaagtgcttgtgagattgttttgtgaaattggaattataccattggcatwttttttttttttttgagacggagtctcgctcagtcgcccaggctggagtgcagtggcacgatctcagctcactgcaagctccgcctcccaggttcataccgttctcctgcctcagcctcccgagtagctgggactacaggtgcccgcaaccacgcccggctaattttttgtatttttaggagagacggggtttcaccgtgttaacaaggatggactcaaatctcctgaccttgtgatccgcccgaccattggcatatttattttatgccaatggtataattccattatgccaatgggatctttccttatgaatggatgatggtaaaattgaa

SEQ ID NO: 717622 - DNA, 607 bp, Homo sapiens
tggggtagcactagcttaaatttgcagggggatactaagtgaatctccatataaaatacatgataatctctaaatcatgtccagttctaaaagcttctgactcaatgaaaataaaaatatgtacrgacttagatatctaaccagcaatgaacaactttcccatgagcatttctaagcatccttcactgtaattgtattcaatgcattcttattcaattattaaactgaatatgaaacaaatattcataacgtcaatcatgtaaaaatgctttttgtgttggcttataagaattgattaatgaggctgggcgcggtggctcacacctgtaatcccagcactttgggaggctgaggctggcagatcacttgaggtcaggtgttcgagactagcctggcccacgtggtgaaactttgtctctactaaaaaaatacaaaaactaaccaggtgtggtggtgggtgcctgtaatcccagctacttgggagtctgaggcaggagaatcacctgaacccaggagacagaggttgcagtgagtcaagatcatgccactgcactccagcttgggcgagagagagactaagtcttaaggaaaaaaaaaaataaagaat

SEQ ID NO: 717623 - DNA, 607 bp, Homo sapiens
tggggtagcactagcttaaatttgcagggggatactaagtgaatctccatataaaatacatgataatctctaaatcatgtccagttctaaaagcttctgactcaatgaaaataaaaatatgtacggacttagatatctaaccagcaatgaacaactttcccatgagcatttctaagcatccttcactgtaattgtattcaatgcattcttattcaattattaarctgaatatgaaacaaatattcataacgtcaatcatgtaaaaatgctttttgtgttggcttataagaattgattaatgaggctgggcgcggtggctcacacctgtaatcccagcactttgggaggctgaggctggcagatcacttgaggtcaggtgttcgagactagcctggcccacgtggtgaaactttgtctctactaaaaaaatacaaaaactaaccaggtgtggtggtgggtgcctgtaatcccagctacttgggagtctgaggcaggagaatcacctgaacccaggagacagaggttgcagtgagtcaagatcatgccactgcactccagcttgggcgagagagagactaagtcttaaggaaaaaaaaaaataaagaat

SEQ ID NO: 717624 - DNA, 1383 bp, Homo sapiens
cggctaacgcggaaaggaaagtctcctcgttccccggccccgcggatttggcggctgcggtccctgtccccctgtggcgggcggtcggacccccgcactgcccaggtccgctgggctcgcgcggggaccccggcctcgtccccgcagggaggggaccccaggacagacgcgcgcgcacgctgtgcagagccacaagtggggaaaccctccccacacctcgactaaattgtgaaaaatgctttttaaaaaaccaaacattccttgtttcaagccatccacttttccatttagtcgttttcagggaggttttgtacaaggaatagttgtttgtgccgccgaattccaaggtagtgtggtatacaagttgcatgttgggatcttgactaatttctttggaaactggctgaacatactactaatgtatagcagtaccacaaaaacttgatttttgtgcataagaatcaataggaaaatttgtatttctcttacgatgaaaagtggttaaaaaaatgaatatcattagtatttcagtaaagcttggggggagataaatattaaaatctaatgagaattattgtggactttaaaagttgtgtttcttgaatagtatggacctttttaaaagaaaaccgaaaggacagagaaaaaagggctagaaaaaaagtctaaaaagctgttcaggtatgagttggtacccgaattatatctcaataaagttgttagttacaaaaaagttcaagtccagtaatcttaattcctatgtccaatatacaatctggatttccccaagaaatctagattcataacagaaaagttggatctttaggtgatgcaaagttgatgtcatgtatcatacactatcattgtcatcttcagtttttacttgaatttattaataaaatactaccattattgttaccgtgattgaaatgcaacacaattctcaaatatctaattacagtgattggagaatgtaggttgaaatagaattgtcagagaagttagtgggaaacacaacaaacagtaattaacggtggctcatgcctgtaatcccagcactttgggaggccgaggcgggcggatcacaagatcaggagatcgagacctgcctggccaacacagtgaaaccccatctctactaaaaatacaaaaagtagctgggcgtggtggcagctgcctgtaatcccagctactcaggaggctgaggcaggagaatcgtttgaacccgggaggcggaggttgcagtaagccgagatcgcaccactgcactccagcctgggtgacagagctagatgccgtctcaaaaaaaaaaaaaagaaaagaagcaaacgtttcaatcctactgcctcggrgttccagtgtctccctatattttctaaaatg

SEQ ID NO: 717625 - DNA, 643 bp, Homo sapiens
caagaaaaggaacgacatcagaagaccttggactcggctcccatctacccactcagcaccatgtttccatctactccattctgctaccttgctcaagggcccccaccgtcagctggcacacttaatctcccaacaatttccccactccactggctcattcctgaaaatgttatttctcatatataaacaaacttgtggggaccccaccttcctcaccagctgcagccccatctctctgattccctttgcagcaaaatgccttaggagaactgagtctactgatgcccacgattcctctccaatcttctctgacacccacaccaaagccttctctaccaatcatcgcacagagcagcctttgcctagcgtgaattcacagtcctaatcttagaggcactgtgtgtgaccactgaccactccttttcctttcatatcattttacctctttgctcagcayaccacactctcacggtccctcagtctgactcctttgctagtctccctctggagtcttaacaggagtgccccagcactcaagactttggtcccctcttctccacctgtgatttcactcatgctcatgacactgcatagcatcgatgtgccctacactcccaaattctctctcttcatttacagacca

SEQ ID NO: 717626 - DNA, 605 bp, Homo sapiens
cagccctttcttttgactccagactggtatagacaacttgccaataacatcttgacttaaatgtttcacaggcaacttatacttaattttttccaaagttaagttttaatttatttctcaaaagctgatcctgtctgcaatcctcctcgttataataagtaaatctgttctggcctcctttcatttctttgagtaggcagctctttgcttcagtctggaatgctttctccttaactcattagatggttggctcctactcatctttcaaatcttaacttaaatcttactatgaagacagacttttcttgtccttcctccatttctatcagagcaacatgttcactacagtcacagcactttctcagtttgaaattatatatatattgattttcctgtttattgtttgcttttccaacttaaatcataagctctataaaggtagggatcgtgtctgtttcatccatccttgcatactatgggcctagcaaaatgcgtgacatatcataggccctcaaaaatgtttgctgaataaataagtagtgttttagttttgctctttakaacacttaccactatatgtaattacatcagtaagctttcaaaaa

SEQ ID NO: 717627 - DNA, 1718 bp, Homo sapiens
acactttttttttgtatcagcagaaaataaaataaaaatattgctggcctaactaacattttccctcttatgatagcacttctcaatttagcaaaactatgcatacagttaaaccacacttcgatgacagctatcagagcacatctcactagaaagtcacagaaatctgggcataagcaggaatttgtccaaatcaagtaacttttaacatatgttacaggatcagtatagattcagtggaatttcccataccttttttcttttaactcatttttatagtatgtatatagagtgtacaacatgatgttttggtacacaaatacatggtgaaatgattactacaagtaagcaaattaatatagccatcaccttctatatctacctcgtgtgtgtgtgtgtgtgtgtgtgtgtgtgtgtgtgtgtgtggtaagagcacctaaaatctactctcctagcaaattttcaatacacaatatcataccccatttttcttaatcctgtatcttttaaactgcagtgttacataaccaatatttatgaaatgaccaagaggtcctaagaggtactgaaatgccatacgaatcataaaagaaagattaaattgacattcaaaatggtgttcgagtaaattgtatttgtgccctcaccaatctactgaaatttctcttctaaaagtcacaaatgtttacgatttcagccaatccttttttcacatgttgtccccttgttatcagcatttatcactccttctttgaaattcccttctccatgagtttcctctcttcccagtcatctactcttcatttgctcccatcgtcctgactgctcctcatctggcccctcttcctcctctgaactgtcccaaatgagttctcctcccactcctgttatatactttctctacaatattagggtttcaaccatcaagactacatgaagaatcccctaaacaacatcttcaaatactgacctttctcccaatctctttctagatgtcaactggcatctcttgatgtctaatatggaacttcccccaccctaacctcccagatctgtccttcctgctgactccttgatttttaatggttctaccaacctccaataatccaggatcaaaaatccagtgtcatttttactcttcatcattgtttctcttgtcaattattgtctagttttatataacctacctctgcaatattattcatttagttgttaaatacttattgaataactactgtagtaaattctgaggctatagcagtaagacaagtgaggaccttgccttcctgaagcttatattctagtgagaagacataatttcaggtggccaataagtcctattagaaaaataagatcaagaatgagtggtagtgatgatggagttgatcagagaaagcctctgcaacattaaagcagagacctgtggctgggcatggtggctcatgcctataataccagcactttgtgagacagaggtgggaggatcacttaaggccaggagtttgagaccagcctgggcaacacagcaagaccccatcgctttaaaaaaaaagagtaaaattagctgggtgtggtgttgtgcacctatagtcctagttatctgggaggctatagtgggacaatagcctgagcccaggagttcgaaackgcagtgagctatgactgtgctattgcactgcagcctgggtgacagagttagatcatctctaagaaacaaa

SEQ ID NO: 717628 - DNA, 754 bp, Homo sapiens
tatggttttcggagagtggtctgtgttttgttcacttgtcttcatgtattcatcagcaagtatttttcasgtcctgcttatttcctagcattgagcttagtgatagagaaagttaacgtagaaatctgggcctgcccaggtgtggtggctcacacctgtaatcccagcactttagaaggctgaggcaggaggatcgcttgagcccaggagtttgagaccagcctgggccccatctctacaaataattttaaaatggagcgaggtatggtggcattgcctgtggtcccagctacttggaaggctgaggcagaaggatcacctgaacccaggaggccaagtctttagagagttgtgatcacttgactgcaccccagcctgggtgatagagcaagcccctgtctcaaaataataataataatagtaattacattataaaatgattgtttatccacacaagacttggagcttatgacttttgtattttgctttttgcttattttggttttagagaaagttagagggttctaaaatattttctcacctactgatcatttacatgatcactgttctcctgctcagatcctagtgctataccctggccatagtacagttaactactaacatacatccactctcttatctcttacagtgccattcaggaattctgagtgggggccattacgtcacttatgccaaaaacccaaactgcaagtggtactgctacaatggcagcatctgtgaggtaaacattctc

SEQ ID NO: 717629 - DNA, 754 bp, Homo sapiens
tatggttttcggagagtggtctgtgttttgttcacttgtcttcatgtattcatcagcaagtatttttcaggtcctgcttatttcctagcattgagcttagtgatagagaaagttaacrtagaaatctgggcctgcccaggtgtggtggctcacacctgtaatcccagcactttagaaggctgaggcaggaggatcgcttgagcccaggagtttgagaccagcctgggccccatctctacaaataattttaaaatggagcgaggtatggtggcattgcctgtggtcccagctacttggaaggctgaggcagaaggatcacctgaacccaggaggccaagtctttagagagttgtgatcacttgactgcaccccagcctgggtgatagagcaagcccctgtctcaaaataataataataatagtaattacattataaaatgattgtttatccacacaagacttggagcttatgacttttgtattttgctttttgcttattttggttttagagaaagttagagggttctaaaatattttctcacctactgatcatttacatgatcactgttctcctgctcagatcctagtgctataccctggccatagtacagttaactactaacatacatccactctcttatctcttacagtgccattcaggaattctgagtgggggccattacgtcacttatgccaaaaacccaaactgcaagtggtactgctacaatggcagcatctgtgaggtaaacattctc

SEQ ID NO: 717630 - DNA, 754 bp, Homo sapiens
tatggttttcggagagtggtctgtgttttgttcacttgtcttcatgtattcatcagcaagtatttttcaggtcctgcttatttcctagcattgagcttagtgatagagaaagttaacgtagaaatctgggcctgcccaggtgtggtggctcacacctgtaatcccagcactttagaaggctgaggcagraggatcgcttgagcccaggagtttgagaccagcctgggccccatctctacaaataattttaaaatggagcgaggtatggtggcattgcctgtggtcccagctacttggaaggctgaggcagaaggatcacctgaacccaggaggccaagtctttagagagttgtgatcacttgactgcaccccagcctgggtgatagagcaagcccctgtctcaaaataataataataatagtaattacattataaaatgattgtttatccacacaagacttggagcttatgacttttgtattttgctttttgcttattttggttttagagaaagttagagggttctaaaatattttctcacctactgatcatttacatgatcactgttctcctgctcagatcctagtgctataccctggccatagtacagttaactactaacatacatccactctcttatctcttacagtgccattcaggaattctgagtgggggccattacgtcacttatgccaaaaacccaaactgcaagtggtactgctacaatggcagcatctgtgaggtaaacattctc

SEQ ID NO: 717631 - DNA, 754 bp, Homo sapiens
tatggttttcggagagtggtctgtgttttgttcacttgtcttcatgtattcatcagcaagtatttttcaggtcctgcttatttcctagcattgagcttagtgatagagaaagttaacgtagaaatctgggcctgcccaggtgtggtggctcacacctgtaatcccagcactttagaaggctgaggcaggaggatcgcttgagcccaggagtttgagaccagcctgggccccatctctacaaataattttaaaatggagcgaggtatggtggcattgcctgtggtcccagctacttggaaggctgaggcagaaggatcacctgarcccaggaggccaagtctttagagagttgtgatcacttgactgcaccccagcctgggtgatagagcaagcccctgtctcaaaataataataataatagtaattacattataaaatgattgtttatccacacaagacttggagcttatgacttttgtattttgctttttgcttattttggttttagagaaagttagagggttctaaaatattttctcacctactgatcatttacatgatcactgttctcctgctcagatcctagtgctataccctggccatagtacagttaactactaacatacatccactctcttatctcttacagtgccattcaggaattctgagtgggggccattacgtcacttatgccaaaaacccaaactgcaagtggtactgctacaatggcagcatctgtgaggtaaacattctc

SEQ ID NO: 717632 - DNA, 754 bp, Homo sapiens
tatggttttcggagagtggtctgtgttttgttcacttgtcttcatgtattcatcagcaagtatttttcaggtcctgcttatttcctagcattgagcttagtgatagagaaagttaacgtagaaatctgggcctgcccaggtgtggtggctcacacctgtaatcccagcactttagaaggctgaggcaggaggatcgcttgagcccaggagtttgagaccagcctgggccccatctctacaaataattttaaaatggagcgaggtatggtggcattgcctgtggtcccagctacttggaaggctgaggcagaaggatcacctgaacccaggaggccaagtctttagagagttgtgatcactygactgcaccccagcctgggtgatagagcaagcccctgtctcaaaataataataataatagtaattacattataaaatgattgtttatccacacaagacttggagcttatgacttttgtattttgctttttgcttattttggttttagagaaagttagagggttctaaaatattttctcacctactgatcatttacatgatcactgttctcctgctcagatcctagtgctataccctggccatagtacagttaactactaacatacatccactctcttatctcttacagtgccattcaggaattctgagtgggggccattacgtcacttatgccaaaaacccaaactgcaagtggtactgctacaatggcagcatctgtgaggtaaacattctc

SEQ ID NO: 717633 - DNA, 603 bp, Homo sapiens
gagctctgtgctgctctaagctgggggagcctactccctgagaagcaggacacccggaaggtgtttccccctggcgttgaggctggttatacaattcctttcctctagcagattaacatttgctaacrgggcctggcgcggtgacagcagcgtaaggttgctttttgcatgcctgtgctgtggggttggtggtgggggcaaggcggtggtaggggcgaggccagggcagtgagtgaggtcgcccatggtcattctctgccgtgctggggggttgtcatctcttggggcttagcacttgttggggatgggtgaagtccagtcccgagtcacagtgtgtgttgggggaggttgctgatattcatagccctgtatgtttgagtaatgacaacatccatctccaccttcagggtgaggagctgttggcctatctgtgtctgtctgtctgtctgtctgtcatccgtacctgtctctcccagggagagaaggcaggccccagggtctttccccaggatggccttgggtgagttcctactgtcctctctgcccaggaaatgaacgccctttgaggtcaggtggacaaggatgtcagtgtgaagatggaca

SEQ ID NO: 717634 - DNA, 603 bp, Homo sapiens
gagctctgtgctgctctaagctgggggagcctactccctgagaagcaggacacccggaaggtgtttccccctggcgttgaggctggttatacaattcctttcctctagcagattaacatttgctaacagggcctggcgcggtgacagcagcgtaaggttgctttttgcatgcctgtgctgtggggttggtggtgggggcaaggcggtggtaggggcgaggccagggcagtgagtgaggtcgcccatggtcattctctgccgtgctggggggttgtcatctcttggggcttagcacttgttggggatgggtgaagtccagtcccgagtcacagtgtgtgttgggggaggttgctgatattcatagccctgtatgtttgagtaatgacaacatccatctccaccttcagggtgaggagctgttggcctatctgtgtctgtctgtctgtctgtctgtcatccgtacctgtctctccsagggagagaaggcaggccccagggtctttccccaggatggccttgggtgagttcctactgtcctctctgcccaggaaatgaacgccctttgaggtcaggtggacaaggatgtcagtgtgaagatggaca

SEQ ID NO: 717635 - DNA, 603 bp, Homo sapiens
gagctctgtgctgctctaagctgggggagcctactccctgagaagcaggacacccggaaggtgtttccccctggcgttgaggctggttatacaattcctttcctctagcagattaacatttgctaacagggcctggcgcggtgacagcagcgtaaggttgctttttgcatgcctgtgctgtggggttggtggtgggggcaaggcggtggtaggggcgaggccagggcagtgagtgaggtcgcccatggtcattctctgccgtgctggggggttgtcatctcttggggcttagcacttgttggggatgggtgaagtccagtcccgagtcacagtgtgtgttgggggaggttgctgatattcatagccctgtatgtttgagtaatgacaacatccatctccaccttcagggtgaggagctgttggcctatctgtgtctgtctgtctgtctgtctgtcatccgtacctgtctctcccagggagagaaggcaggccccagggtctttccccaggatggccttgggtgagttcctrctgtcctctctgcccaggaaatgaacgccctttgaggtcaggtggacaaggatgtcagtgtgaagatggaca

SEQ ID NO: 717636 - DNA, 989 bp, Homo sapiens
ccaacaggatatgtgtattacatgtgtagagagagagagatttattttaaggaattggctcccatatttgtgttggctggaaagtctgaattttgcagagcacgctgtcaggctggagacccacggaagagttaaggttgcaggtcaattccaaaagcggtctccacgaggagttctctctttcttgggagacctcagtctgtttcacattaaggctttcaactgatctgatgaggcccacccaccgtgtggacagtaatctgttttactcaaagtctgctgttttaaatgttaatgtcatctaaaaatcacactcacagaagcatatagtgtgttgtttcaccaattatatagggaccatggcatagctaagttgagacataagatcagccatcacagcgggtgaccaaaggttcacagggcatatcgggtatacctccatggcaggcttgacctcattttaacttaattacctacttaaaggcccaatctccaaatacagtcacattctgagatactagggatttgaacatttagatttggaagagacacaattcagccccaaacagggacccgttggtctcaagggtctttccatatacttaaagtgccacaggagccagcactgtctctggagccagggcccctgtgtctaggtctgccaaaggtaactgaagagggctgcacrggcctgtgtcattagcacacacagaacagcacagattgtcgaagccagatggcagacacctgctctgagggcaagtgcagacctggagcaagtgtgtcctggatggcatccagcaggcttccctgaaggcccatcccatcctaatcattatgctttccacttggagcttcgcctgcactttcttctttggttcttatggccacccgtggagaaggctggaggaggatcaccatgcccatttcacagaggcctgatgaaagctagaggcaacacaacaaatgaggatggagtctggactaga

SEQ ID NO: 717637 - DNA, 989 bp, Homo sapiens
ccaacaggatatgtgtattacatgtgtagagagagagagatttattttaaggaattggctcccatatttgtgttggctggaaagtctgaattttgcagagcacgctgtcaggctggagacccacggaagagttaaggttgcaggtcaattccaaaagcggtctccacgaggagttctctctttcttgggagacctcagtctgtttcacattaaggctttcaactgatctgatgaggcccacccaccgtgtggacagtaatctgttttactcaaagtctgctgttttaaatgttaatgtcatctaaaaatcacactcacagaagcatatagtgtgttgtttcaccaattatatagggaccatggcatagctaagttgagacataagatcagccatcacagcgggtgaccaaaggttcacagggcatatcgggtatacctccatggcaggcttgacctcattttaacttaattacctacttaaaggcccaatctccaaatacagtcacattctgagatactagggatttgaacatttagatttggaagagacacaattcagccccaaacagggacccgttggtctcaagggtctttccatatacttaaagtgccacaggagccagcactgtctctggagccagggcccctgtgtctaggtctgccaaaggtaactgaagagggctgcacaggcctgtgtcattagcacacacagaacagcacagattgtcgaagccagatggcagacacctgctctgagggcaagtgcagacctggagcaagtgtgtcctggatggcatccagcaggcttccctgaaggcccatcccatcctaatcattatgctttccacttggagcttcgcctgcactttcttctttggttcttatggccacccgtggagaaggctggaggaggatcaccatgcccatttcacagaggcctgatgaaagctagagrcaacacaacaaatgaggatggagtctggactaga

SEQ ID NO: 717638 - DNA, 904 bp, Homo sapiens
cagttcattttggtagtatcttgaagcatcttttagagtaaaattaaatttgaattaaaagaatattatgttgaaattttaaagagcatttgggaaaatgcaagtttaacaatgcaacattttacagtgaaggtgaacatttatgaaaaggctacacattaaacaatgtaagaataaattacataagtataatgaatcttgagaattacctttaggaggaaaataggatttgctctcagctttatgaggccaatccacaatcagagggccaaagcgacgaaaactagctgtgatctcatctaataaacaacaaaggaaaacagtagatttaaatatttttatgatcattttttgaaagtttttcttttaagtttcaaatctactatttacaagaacagtaaaaagaactcctttatccccttcatctagattccccaactgttaataatttgcacatctgccttcaccctctttcttctctcttcctctttctccctctatctgtacatatgcacaaatcaatctagccatccaaccaagccagccagccagcatctttttctgaaatggtgccctgtaatcccaaacataactattggtatctgctcaaagcarggtcactcccttatatatcaattttgatataacactactatgcgattcacagacttcatttaaatttcaaaatcctttctgatccacagtgctatccagaacataggttgcacttaattatcatatcctcagagcatcagtcttttttcaacttggaacagctccatgttctttcttgtctttcatattcattctatagaatgactgctacggtccaaatgtttatgttccctcaaaattcatatgttgaaacctattccccaatgtaagggtatttggagctggggcc

SEQ ID NO: 717639 - DNA, 904 bp, Homo sapiens
cagttcattttggtagtatcttgaagcatcttttagagtaaaattaaatttgaattaaaagaatattatgttgaaattttaaagagcatttgggaaaatgcaagtttaacaatgcaacattttacagtgaaggtgaacatttatgaaaaggctacacattaaacaatgtaagaataaattacataagtataatgaatcttgagaattacctttaggaggaaaataggatttgctctcagctttatgaggccaatccacaatcagagggccaaagcgacgaaaactagctgtgatctcatctaataaacaacaaaggaaaacagtagatttaaatatttttatgatcattttttgaaagtttttcttttaagtttcaaatctactatttacaagaacagtaaaaagaactcctttatccccttcatctagattccccaactgttaataatttgcacatctgccttcaccctctttcttctctcttcctctttctccctctatctgtacatatgcacaaatcaatctagccatccaaccaagccagccagccagcatctttttctgaaatggtgccctgtaatcccaaacataactattggtatctgctcaaagcagggtcactcccttatatatcaattttgatataacactactatgcgattcacagacttcatttaaatttcaaaatcctttctgatccacagtgctatccagaacataggttgcacttaattatcatatcctcagagcatcagtcttttttcaacttggaacagctccatgttctttcttgtctttcatattcattctatagaatgactgctayggtccaaatgtttatgttccctcaaaattcatatgttgaaacctattccccaatgtaagggtatttggagctggggcc

SEQ ID NO: 717640 - DNA, 667 bp, Homo sapiens
gctgggtgccttgtattaatactaaaactacaaggcactcagccttgtactaaaaatattcaaatatttagcatagtactaaaaatacaagatgcccagccttgtactaaaaatacttaatatgtaaatattacattgtattactggctcatgcctgtaatcccagcactttaggaggccaaggcagaaggatttcttgagcccaggagttcaagaccagcctaggcaatatagggagacctcttctctacmaaattaaaaaaaaaaaaattagcctggtgtgataacatacacctatggtcccagttactcaggaggcccaggcaggaggatcacttgagctcaggagtttacgactggcctgggaaacttagcaagacttcatctctaataaaaataggaaaataatctgggtgtggtgacatacgcctgtggtcccaactactaggaggctgaggtgggaggatcgcttgagcctgggaaatcaaggctgcagtgaggcatgattgcacactgcacttcagcctgggagaccctgtccagcctggaggtaggaatcctgtctcaaaaaaaaaaaaaaaaaaaaaaaattagcacacaaaactcattacctatggtcggctgaaagaaggaaattgtgttgaaatccagcaagcaaaatgttata

SEQ ID NO: 717641 - DNA, 629 bp, Homo sapiens
tcgagcttcccggctgctttgtttacctaagcaagcctgggcaatggcgggcgcccctcccccagcctggctgccgctttgcagtttgatctcagactgctatgctagcaattagggagactccgtgggcgtaggaccctctgtgccatgtgcgggatataatctcctagtgtgccgttttttaagcccgttggaaaagcgcagtattagggtgggagtgacccgattttccaggtgcagtctgtcacccctttctttgactaggaaagggaactccctgaccccttgaacttcccgagtgaggcaatgcctcatcctgcttcggctcacgcacggtgcgctgcacccactgtcctgcacccactgtctggcactccctagtgagatgaacctggtacctcagatggaaatgcagaaatcacccatsttctgcgtcgctcacgctgggagctgtagatcggagctgttcctatttggccatcttggctccaccctcatttatctgcctatggtacttttataagatcaatctggaagaggtatgaaaaagtgttcctgagatcaaaatgatttcagagggtctttaaagaactaggtgatacttgtagcaataaagcttttattagaat

SEQ ID NO: 717642 - DNA, 514 bp, Homo sapiens
actgctctatttcttttcactaaaactcctaaaaagattttgctaaactcagtgcttccaattcttcatcttctgttctctctcaaacccacccagactttccatctacctatctccggtcctctgatactattccagttaaggtcaccaattcttccatgctgctaaattcagtggcaattcccagctgaaaatttcatcaatttaatagcagtatttgaaatggctcatcactacccttccctggagcactttgttcacttaacttctaagaccacatactctctcagctttctttcttatcccttaggtttgggctgcaataacattgcacaacaaataatcccaaaatcttaatggcttgcaaagaccaccattccatttctcacacacgggtctgatggttggttgtggygcagctgatcttggttggctgagctgggccaggttgaactctagcttccggttctgctctatagccctacatcctaggacccaggctaggcagacagca

SEQ ID NO: 717643 - DNA, 432 bp, Homo sapiens
tgaccaaagatgctctaaaaaattcagaacctccctcgtgggaattctaagggccttctaaattagaaagcaattcatcaatcaattgtatcctctcccctggggtgcttaaacggcagaaatacagagggtgtggtctgtgtatrgagagaggaagatgaagaaatgtagagtagaaaggtaaatagaaggcatgacttggagagccaggtttgggcaatccattagaaagaaaaagcgaaagaaagagaatccaagtactgaatccaagaaaagtgacttttaaatctggggttgatcaccagaatgactaccagactatttgacctgccactgcattctgaatggtagtaaatgaggcttctattgtccttaggtgcaggagattagattttcttttcccttgactttctttctccatcaagtccttca

SEQ ID NO: 717644 - DNA, 2027 bp, Homo sapiens
gttttttgaaatggggtctcgctttgttgctcaggttggtctcgaactcctggcatcaagcgttcctcacgtctcagcctcccatagtgttggaattacgtgcatgagccactgcaggcagtcggactaagggagtttaaacaaagaagccggagcctggccctcttcgggcttcggtggggcccagtaggcagccaaaactcacactgagacggcggctgctctccaggcgggtttgctcaggctgcccccgtgctccctgccctgggcttcagtcctggagaggacccggtttctcaacccgtgcatcgttggcactttgagcgacgggactgtcctgtgcgttgcacgatgttcagcagcagctttggcctctgctatccactaggggccagttccaccccctagcacctcagrttaacaaccgaaaatgtcttctagactttgccgaaggactcctgggggcaaatacgcccccattgagactcactggcttagaacaaggcaagctccagcctgtttcaggctttcccagagactgcccctacaccatctatggttgcatggctggcttctcatccttcaaccttccaccgaagtgttgacttcagagaaacatttttttcactagcctgtccaaggcccgagtatcccattccatcatgttactcttttctccttattacctgttacattttttaatttattcgtttatctccccaacctgcatgtgttaacaggtgtaagcttcctgatggcaggattctcttgtgttttgttcctcactgtgccccctgcctctgggacagcgcctggcacatagtggagtgaaagagtgccgcccaaaaatggccctcagcatggcttcagaaattgagaccccggcctgggatggtggctcacgtctacaatcccagcactttgggaggccgaggcggacggatcacgaggtcaagagatcgataccatcctggccaacatggtgaaaccccgtctctactaaaaatacaaaaattagctgggcgtggtggcaggcgcctgtagtcccagctactcaggaggctgaggcaggagaatcgcttgaaccagggaggcagaggttgcagtgagccgagattgtgccactgcattccggcctggtgacagagtgagacttcgtctcaaaaaaaaaaaaaaagacaaaaaaaaaagaaattgagaccccggcctgggatgatggctcacgcctataatctcagcactttgggaggctgaggcaagaggattgcttgagcccgggaggtagaggctgcattcagcagtgagggcatcactgcactccagcctgggtgacatagtgagaccctgtctcaaaaaaaaaaaaaaaaaaaggcaagaaagaaaggaatcgtgatccacagctgctgcaatgattcaattagtgtaagaccacctcctcttccttcatcattccctccagctaagatgagggtggagccagtagctgggaagttggcttgccagtaggtcatctggagaagtaatcctgccagtaagtcttgaagttgcatgcattctctttttaaaaaacttttttaaatgtccgacagatagactgatggtcagcacagtgctgccacacagcaggcaatatatatttaatcaatgtctaaggagagaataattgaatgcccgaattggacctttgccacctgtctgttgatgcttgtcatttccagctgtcagctcaaatatcactttcctaaccctgccacactaggttagctccccgtttttatggccttggaactccctatacttttttcccacagcaccggttataatttatacttattttgtgcaactattgaatgcctgtcttcaaagctgggatggccgggatctttgttttaaccacgattgtagttctagaggctggcacagcacttgccaatgataaataggtattagattgaactggatgagtgaatgactgaccatttgttgaatgtaaatgatgcaagtcaccttatgttctcatatatgtg

SEQ ID NO: 717645 - DNA, 1570 bp, Homo sapiens
tctgactcctgacctgcagaactgtgaaatgataagtgtgtgtcatcttcagccacttcagttggtggtatctgttacatcagcaatgggaaactaagacatcccctaaatgtaaaaaggctattcgaaagataatgtataaaaactagaaagcacaggctgggtgtggtggctcacgcctgtaatcccagcactttgggaggccgaggcgggcagatcatgagctcaggagtttgagaccagtcgggccaatacggtgaaactccatctctactaaaattacaaaaattagctgggcatggtggcgggcgcctgtagtcccagctactcggcaggctgaggcagaagaatcgcttgaacccgggaggcggaggttgcagtgagccgagatcatgccactgcactccagcctgggggacagagtragactctgtctcaacaaaaaacaaaacagaacaaaaacaaaaactagaaagtgcaagccgtgcagggcctgtgaagtgggcaggacagtggcatcattctggaagatgcccttgccttgctctggagggaaacagaggcacagacccaggtgagggggacccagttcctccaggctcagttggggctctctgctcctctccactgctggatcttccactttgtaggcacatctgggacctcaacatgattaaaatcagtctctctccaccacagccctctcccctgaacccctccgccctcccatgtttctctccagcctttcctccaagccaactgggaactcgcctggaaaaaatagaactctctgtagatggaagaggatggaagtgaaagaaaaaaaaaagttctttatttggagccatgcagtgaaagcaattatttgatatttctggagtacattttgcctttgctttatgaaatagagaaaatggtttttaaaaatgcaaaatatggttactatatggctatgagacacatgtttttaataagatcggggtgaggacaggtgactgttttcaggtatgtgaatagttgctgcaaatacatcataaagacggtgcctggaaggtgagctgtaattacagatcctagaatgtcatgtgatgattttttaccgagaacacacattccccaggtcccaggttactgacacataagtctactgtttggcttttgaccatattttcagtaattaggtaggaggatgcaggactgcctgggatgaaatgatggaaagttctggagtccagtgggtgtatgtttccatcaagctccacaactctctggttattttaagagtgctagagtttgggttgtaagtaacatgaattggaattatgtgaatacaaaaagaaagttgagaggatcaattatcagcaaaactttttaaaatataatcccttaaagtcaaaaatgtatcaggagtcacataaatttaaagctgtcaaataaagtccattgagacctgcctgctgtctactgacacattttggtaccgtattttaccaggtggacaaaattagcccccaacagttgtcaggaaagtcttgaattaaatgttgaagtacacccaggtattggaaat

SEQ ID NO: 717646 - DNA, 653 bp, Homo sapiens
tgagaacctgcctggattgatggcactgactctggtgcgcaggctggttcctcccttcactagaagcctggccaagcagcccaagcctggacacagatccatcatggtgggcaccagccagggtcagcagacatgtccaactctgccggcatctgccttctctccccagggaccctgagccatggcaaactcccagtcacaggcatgctagccctgtgggttctgcctagaactcaggtgtcctgtgtgagagagacacttccctatctgggccccagagagtgttttgctggcttgaggctgccatgagaccaccctgaagatgtttgcttcctggagttcctgctgtttcctggctggcttctctccaccctggaacttgaccctccagccacctcttgtagcagattggttttctctcctgtcctgagaatccagtggctactggtgtctgggagccagccctggccccaagggcttcattcttcaagttacccsccctgctgctggtttttttgtgtgtttgtttgttttttgatggagtctcgttctgtcacccaggctggagtgtagtggtacaatctcaactcacagcaacctccgccttgtaggttcaagcaattctcttggctcagcctccggagtagctggga

SEQ ID NO: 717647 - DNA, 1208 bp, Homo sapiens
agaacatggagtctcatttctcctgcaataatccctaattccagattcattcactgatgagttaacttcccctggccacctctgagaatgttcagttcccacagaagcaggccgcatgcacggggtgccaggaggcgaagggccagggaggggagcagggcctctgcttgttatctgttgcttcaggggagttcccatccttggccaggcctcagcctcctcggccacctgtgggacaaagacgctgggagtgtgtcctgtcctgtggaattaagtggcccacaggaagagcctagccagcactttccctaagtgctcagccagagctccttccccagtgtgtgtttcctgcaggtcccgtgccagctgctctggtacttggcagggtcaaatacacatttggtcacccgggtaatagagactctattcatctatatcaaggttattttcatttctgcccatgggtatatagctgtttgcttttaacattgggacacatccatcgtgtaattttaaaagtgaagactcrctcttaagaaacattctaagggacccccccccaagagaggcaaaaactggtcaaagtggaaggaatagaagggctcaaactgggggagaatgcccggaatttcaggtgctattcctacttcctacttgagagacatgttccctgggaagatgcagaaagcaggttcatccttttttttttttttttttttttaagacaaggtctcgctctgtcacccaggctggagggcagtggtgtgatctcggctcactgcaagctccgcctcccgggttcacgccattctcctgcctcagcctcctgagtagctgggactacaggcgcccaccaccatgcctgggtaatttttctatatgtttagtagagacggggtttcaccatgttaaccaggatggtctcgatctcctgacctcatgatccgcccacctgggcatcccaaagtgctgggattacaggcgtgagccaccgcacccagccagtttcatctttttactgtgaacctggagctactgaagctcgtctttttggtgcaggtgttcccagtgagtgacgcagctgcagatagttttgtaggtgtttggtagtgcttttcatcgggcctctggggcctcgcgtctccaaaagtcctgagagagtgagttttccttgggtgcttgccttgtgcattaacttacgtgtagca

SEQ ID NO: 717648 - DNA, 1208 bp, Homo sapiens
agaacatggagtctcatttctcctgcaataatccctaattccagattcattcactgatgagttaacttcccctggccacctctgagaatgttcagttcccacagaagcaggccgcatgcacggggtgccaggaggcgaagggccagggaggggagcagggcctctgcttgttatctgttgcttcaggggagttcccatccttggccaggcctcagcctcctcggccacctgtgggacaaagacgctgggagtgtgtcctgtcctgtggaattaagtggcccacaggaagagcctagccagcactttccctaagtgctcagccagagctccttccccagtgtgtgtttcctgcaggtcccgtgccagctgctctggtacttggcagggtcaaatacacatttggtcacccgggtaatagagactctattcatctatatcaaggttattttcatttctgcccatgggtatatagctgtttgcttttaacattgggacacatccatcgtgtaattttaaaagtgaagactcgctcttaagaaacattctaagggacccccccccaagagaggcaaaaactggtcaaagtggaaggaatagaagggctcaaactgggggagaatgcccggaatttcaggtgctattcctacttcctacttgagagacatgttccctgggaagatgcagaaagcaggttcatcctyttttttttttttttttttttaagacaaggtctcgctctgtcacccaggctggagggcagtggtgtgatctcggctcactgcaagctccgcctcccgggttcacgccattctcctgcctcagcctcctgagtagctgggactacaggcgcccaccaccatgcctgggtaatttttctatatgtttagtagagacggggtttcaccatgttaaccaggatggtctcgatctcctgacctcatgatccgcccacctgggcatcccaaagtgctgggattacaggcgtgagccaccgcacccagccagtttcatctttttactgtgaacctggagctactgaagctcgtctttttggtgcaggtgttcccagtgagtgacgcagctgcagatagttttgtaggtgtttggtagtgcttttcatcgggcctctggggcctcgcgtctccaaaagtcctgagagagtgagttttccttgggtgcttgccttgtgcattaacttacgtgtagca

SEQ ID NO: 717649 - DNA, 1208 bp, Homo sapiens
agaacatggagtctcatttctcctgcaataatccctaattccagattcattcactgatgagttaacttcccctggccacctctgagaatgttcagttcccacagaagcaggccgcatgcacggggtgccaggaggcgaagggccagggaggggagcagggcctctgcttgttatctgttgcttcaggggagttcccatccttggccaggcctcagcctcctcggccacctgtgggacaaagacgctgggagtgtgtcctgtcctgtggaattaagtggcccacaggaagagcctagccagcactttccctaagtgctcagccagagctccttccccagtgtgtgtttcctgcaggtcccgtgccagctgctctggtacttggcagggtcaaatacacatttggtcacccgggtaatagagactctattcatctatatcaaggttattttcatttctgcccatgggtatatagctgtttgcttttaacattgggacacatccatcgtgtaattttaaaagtgaagactcgctcttaagaaacattctaagggacccccccccaagagaggcaaaaactggtcaaagtggaaggaatagaagggctcaaactgggggagaatgcccggaatttcaggtgctattcctacttcctacttgagagacatgttccctgggaagatgcagaaagcaggttcatccttttttttttttttttttttttaagacaaggtctcgctctgtcacccaggctggagggcagtggtgtgatctcggctcactgcaagctccgcctcccgggttcacgccattctcctgcctcagcctcctgagtagctgggactacaggcgcccaccaccatgcctggstaatttttctatatgtttagtagagacggggtttcaccatgttaaccaggatggtctcgatctcctgacctcatgatccgcccacctgggcatcccaaagtgctgggattacaggcgtgagccaccgcacccagccagtttcatctttttactgtgaacctggagctactgaagctcgtctttttggtgcaggtgttcccagtgagtgacgcagctgcagatagttttgtaggtgtttggtagtgcttttcatcgggcctctggggcctcgcgtctccaaaagtcctgagagagtgagttttccttgggtgcttgccttgtgcattaacttacgtgtagca

SEQ ID NO: 717650 - DNA, 576 bp, Homo sapiens
ttcaaaaggtmggtacaaagtaaattatgcatatatgaatatacaatgtagttctccgaatcctagatccaacaataacaactagctgcatagacttaagttgcttaaccattctgatctttgaacccttcattttaagataaggttgatacctttatgggttcattgtgagaaatacataatagttgtaaagcgtcttattcaccacctgtcacaaaggtagtaatggactaatatggaacataaaggcttatttagatgtcatagtccatgttcaatctcaggagaagcctctttgtaatgaatactccatttaatcaagacttcacaaacttttaaataaatgatactgtagtgaggatatgtttctctttctttagactcttaaggaaaaactcatataaaaattattttcaaaagctgcaacttgttatttctctaataatgttaaagaataacgtttttggcaatccatctgaaataattaaaaagtcatttagattgaatgcctactgtttcatatttaacaggttagaatttaaaaaaagaactttatgaaagacagtggcattatta

SEQ ID NO: 717651 - DNA, 849 bp, Homo sapiens
tagttaaaatgtgatttttaaccagtatttaacatagtttaattaaggaaaagagaaagggagagaaatagagtactatgatttgagaaaaaaaaatatgagtaatgagaattcttttgcttgggcctcgaatacaaagtctgctatcctaagataacctaaaagtcacacaagtgcttcatgagaccccaaactactatctctgtctctggggtctcccgcggagctcagattcaataacttatatctcactgaacttttttttctgagatgaaaatcctacctgtttctattctacttaaaaatttctgagttcacctctttctagtatttggatatgaaaaggattcatatgccttaaaaaaatactactaatgtcattgttcttttggacaaactgatatctgtgaccactctgatgtctaggaacttaatttaagagttccaatttcatacacctattacattcttaaattatttaattttaattaaatattttaattccaagttttattcttggcagttgtctaatctggttatcactcaaaaccagacaactcatactttgtatttattygaatgtaattaaatgaagtttttattaaaatttctctatgagcgctatatttgatgttacatattttataactttatatatacatacacacacagacacacacacacacacacatatgtatatatggtttgtctttttgagatggagtcttgctctgttgcccagactcaagtccagtggtgcaatcttggctcactgcagcctctgactcctgggttcaaatgattctcctgcctcagcctccctagtagctggaactacaagcgcatgcc

SEQ ID NO: 717652 - DNA, 649 bp, Homo sapiens
aagtagagaaagaattaatgaatactggcacagtgaccctccgctgcagtgggattaataggtctaggtgagcatcccttgactaagactgatcgctgagtacagacacaaaatataagggccagctccaggaaaatccatggagagaagcacagtgtgattaagatgcagtccctgctaaactctgacctgggagagtgaagagaaagtgaaaggtgagtcactaggaaatagtatgagcgatattgtgatgagaagagaaagttagggagtcagaaggtggaacagtagtttgaaataaactgtgcagcttagcatgctggggcagaggtaagcagtggcaaagagggatagagcatgaggacccttggtgtcatctggtgaggtccaggaaaccagacattgagggcatggaatgaaggactctagatatttctgtgctagcaaaagatacacaaaggagagctgcattttgggctggaagggcctgtaggggaatgtgggtaatgtgcatggtaaatcttacacagtaatattagccagtggcattgcaaattgatcttgcctctttgccaagtactgtcctaagacttgggctaccaccrtctctggtctgagccactgtcgttccttgcctggattacttaat

SEQ ID NO: 717653 - DNA, 1148 bp, Homo sapiens
aatttcaaagttttaagtcttctaggaaatgaagatattttattcattctataaatgtatgttagatgaatgaggtcacaattagccaagttatatattatatatatattttaatatatagataaatatgaaatatatattatatattatgtaatatatattacgtataaggtgcaatacacaaaccatcacaatagtacacattcagacttatgataaagtaacatgtgaagagaaatgtgtggatggaaattgctaaacaatgttcgggttgctctactacttctcttttctttgtttctcttttctttagtgtgctttctcttctctctctttttggtgttctaataaaggagaaaggaagaggtataaaatgttgggaaaatatcagaagttggagtaggaatgaagcaccacaaggaagctaacctaagtaaattgtccctttgtcatccaatgctcataaaaaaactacaaattatttttagatttctaagttccttgttttggaattcaagttagtgcccacagtttaaagataccaataactcataccgtcttggaggcaattgctttaagttgatttactttgatcaatggaggaggcattaagttggtttacctttgtcccagatgggagaagtaggatctataatggaacaaaaacattttctaagatgaaaacttgtgggatgatgagtttcccatttcttttgttgcctgcccagaattcaggtgagaactcagggttttgtaattcaagcattgattaggaagtgtgtaaactagggttcatttgttaaaagcaaaattaaatatcttaggcaacttatgcaagaagggaatgtattgaaaggatttgtgaaagcttggagttgctaatagagtctagtagacctatggtggaaaaaagaaaaatccaggcaactccaaaaggtctagttggcaaaaccactccacaatacaggcaagacaccatcaatggaaagaacaaattcctactttatttaataaatgtttattgggtactcataagatctgggcagggrgatactacaaggaatgaacaagagtcctggtcttgtgctcttatattttagtgagtaaatagacacaaaactaataaataaataagtatgtaatactcc

SEQ ID NO: 717654 - DNA, 789 bp, Homo sapiens
tatacacacacccatatatatatacacacacatatatatatacatatatatgtatatatatatcactacatatatccaaatatatatacatatatttgcaaatataataagctgatatatttctcattccccttcaatcataatgtcctacaaaaggcaaggcagacacctcttagaacaaatcagtccacaaggtagaggagggggatatgaccttcaggatttcctcaccaagtaggaagcagaagagaaagtcctgtagtactgggaggggaaaragaatatcttagttccttaggagtaggttggagaggcagctgacctgttggaacagcggtaggttgagcttgatgctaatagtggcaggaggtgatttggccacggttagggatgcattgaggcagatggacctgacattgctctgtcttcaaagccagtgggtgggatgcagagtatcccaaagttcccgtggggcctcttggagaaatatccagttgtagaaggggtcagcaggtctgggtcaggatcaggaggtacactcaactataataggcaacattgactacagacttcagcagctgctccagcacattgctgccacaggttgtcacaacccaggactttggggcccaaagctgagaggacactctgctgattaagccccacctcccagccccattacactgaggactggtaagctactttttatatccacatgacatcttctcttcaaaaaagtacaggtgtcataaagaaaacttgagagacgagtatttttccaaatgagac

SEQ ID NO: 717655 - DNA, 789 bp, Homo sapiens
tatacacacacccatatatatatacacacacatatatatatacatatatatgtatatatatatcactacatatatccaaatatatatacatatatttgcaaatataataagctgatatatttctcattccccttcaatcataatgtcctacaaaaggcaaggcagacacctcttagaacaaatcagtccacaaggtagaggagggggatatgaccttcaggatttcctcaccaagtaggaagcagaagagaaagtcctgtagtactgggaggggaaagagaatatcttagttccttaggagtaggttggagaggcagctgacctgttggaacagcggtaggttgagcttgatgctaatagtggcaggaggtgatttggccacggttagggatgcattgaggcagatggacctgacattgctctgtcttcaaagccagtgggtgggatgcagagtatcccaaagttcccgtggggcctcttggagaaatatccagttgtagaaggggtcagcaggtctgggtcaggatcaggaggtacactcaactataataggcaacattgactacagacttcagcagctgctccagcacattgctgccacaggttgtcacaacccaggactttggggcccaaagctgagargacactctgctgattaagccccacctcccagccccattacactgaggactggtaagctactttttatatccacatgacatcttctcttcaaaaaagtacaggtgtcataaagaaaacttgagagacgagtatttttccaaatgagac

SEQ ID NO: 717656 - DNA, 1079 bp, Homo sapiens
caaggaagcatgccaaaaagatccagaaaatagcctgtaaaagagacaaatataagagttattggacttaaaggggaggtggagagatagggtagaaagtttattcagagrgataataggagagaatgtcccaaacctagtgaaagatattaacattcaagtagaagagagttatagaataccaagcatctttaacccaaagaagactacctcaaagcatcttataatcaaactcccaaaagtcaaagataaaggatcctaaaagcagcaagagaaaaaaaatgaattttcaagccactcacgtatgcccctaatactttctgtttacttcagcattgctttagttgtaaactagcaaacgtcagggattatatctatttaactgtatgcatgctgagacaggttaaaagtaaatatgaaaccaatgaccaagtggtttgccttgttctagttgaaacattgttgtatccatgtgaagcagtaagaatgaaaataaaaagcagggataattagagttgaagttcctctagctctataaatatttgctatgtgcattgggaagagatagttgattacacacatggtcggctggttggctgttctacctattgcacagtatcttcacagctattgaaatagatgcttagttgtgaaatacatgcctgcaccctgggtgtgtatgagagaatagggggagtgtaatgtactcctataccagcctacccaggggcgcaaagataatccctacttttaaacatggatacatttccttaagtgattttcttgcattttcttgcatatagattcttcagccaatatcgtccccaaaaaagtaatatcaaaaaaataaaagcaggaagctttcacatttctacctgcattaacatggcagaacacaatagttttgaaactgtttctgcttaataaacacccacatttgcatttgaagagtacctcagggtgccataaagtcaatacagcatagataattctgaagccaacccttctccttctctgaaaggtcttttgactataaaaaccaattttaataaaaggtatctgtgtccattacacaatat

SEQ ID NO: 717657 - DNA, 889 bp, Homo sapiens
ttatcaaaggccaactgtgagctaacattgtgttagggctcattattcttcatgagtaatccaagacagtttcacaaggaaaaaaaagccagagctggtcgttgaatagcaagtaatgtttaggaaatctgcttgtcaaggaagggaaatttatgagcaagaaacaaaagaagaagggaggaatgaaggaatgaaggaagagagggaggaaggaaggaaggaaagaaagagaaagtgaagtcaacattacatgtctcagagtaaggagaggggtctgctaagaatggaacatgtatgatgttgaataaaatgaagtaatttgaaaagaaatagtaaggtcacatgagcttgaatgacattmaattttgtgtgaccatacaagatcagaaatgaaaagctcagcccacgtcaggaatctcttaaatatggtaatttccaaaacttataagcagtcttatataaagggttttctgagactaattggcataccagatcattcttcttctccctctcccaagtgtctgtgtggctgaaggcacagataataaactgcaaagcaaaacagcctaatagggaaggagggagactttggagaggggtctttcatcaccagccctacaagagaatggcatttacatgaaattgattttcagtggtgaaattgtgcttgtgatgttccattgtaaatattgacagcattaaaaggaatgtctaaaagatgggcactaaactgtcaccagcaaaagactgaccagtatttatgctaaattcctcaaattgcatcccttttttacataagtagtgatgcctcatgaaacaaagcagataattcactagagctatgaagtcaaataaaatgaatgcacctacattctctgtcatgtagaaa

SEQ ID NO: 717658 - DNA, 889 bp, Homo sapiens
ttatcaaaggccaactgtgagctaacattgtgttagggctcattattcttcatgagtaatccaagacagtttcacaaggaaaaaaaagccagagctggtcgttgaatagcaagtaatgtttaggaaatctgcttgtcaaggaagggaaatttatgagcaagaaacaaaagaagaagggaggaatgaaggaatgaaggaagagagggaggaaggaaggaaggaaagaaagagaaagtgaagtcaacattacatgtctcagagtaaggagaggggtctgctaagaatggaacatgtatgatgttgaataaaatgaagtaatttgaaaagaaatagtaaggtcacatgagcttgaatgacattcaattttgtgtgaccatacaagatcagaaatgaaaagctcagcccacgtcaggaatctcttaaatatggtaatttccaaaacttataagcagtcttatataaagggttttctgagactaattggcataccagatcattcttcttctccctctcccaagtgtctgtgtggctgaaggcacagataataaactgcaaagcaaaacagcmtaatagggaaggagggagactttggagaggggtctttcatcaccagccctacaagagaatggcatttacatgaaattgattttcagtggtgaaattgtgcttgtgatgttccattgtaaatattgacagcattaaaaggaatgtctaaaagatgggcactaaactgtcaccagcaaaagactgaccagtatttatgctaaattcctcaaattgcatcccttttttacataagtagtgatgcctcatgaaacaaagcagataattcactagagctatgaagtcaaataaaatgaatgcacctacattctctgtcatgtagaaa

SEQ ID NO: 717659 - DNA, 889 bp, Homo sapiens
ttatcaaaggccaactgtgagctaacattgtgttagggctcattattcttcatgagtaatccaagacagtttcacaaggaaaaaaaagccagagctggtcgttgaatagcaagtaatgtttaggaaatctgcttgtcaaggaagggaaatttatgagcaagaaacaaaagaagaagggaggaatgaaggaatgaaggaagagagggaggaaggaaggaaggaaagaaagagaaagtgaagtcaacattacatgtctcagagtaaggagaggggtctgctaagaatggaacatgtatgatgttgaataaaatgaagtaatttgaaaagaaatagtaaggtcacatgagcttgaatgacattcaattttgtgtgaccatacaagatcagaaatgaaaagctcagcccacgtcaggaatctcttaaatatggtaatttccaaaacttataagcagtcttatataaagggttttctgagactaattggcataccagatcattcttcttctccctctcccaagtgtctgtgtggctgaaggcacagataataaactgcaaagcaaaacagcctaatagggaaggagggagactttggagaggggtctttcatcaccagccctacaagagaatggcatttacatgaaaytgattttcagtggtgaaattgtgcttgtgatgttccattgtaaatattgacagcattaaaaggaatgtctaaaagatgggcactaaactgtcaccagcaaaagactgaccagtatttatgctaaattcctcaaattgcatcccttttttacataagtagtgatgcctcatgaaacaaagcagataattcactagagctatgaagtcaaataaaatgaatgcacctacattctctgtcatgtagaaa

SEQ ID NO: 717660 - DNA, 889 bp, Homo sapiens
ttatcaaaggccaactgtgagctaacattgtgttagggctcattattcttcatgagtaatccaagacagtttcacaaggaaaaaaaagccagagctggtcgttgaatagcaagtaatgtttaggaaatctgcttgtcaaggaagggaaatttatgagcaagaaacaaaagaagaagggaggaatgaaggaatgaaggaagagagggaggaaggaaggaaggaaagaaagagaaagtgaagtcaacattacatgtctcagagtaaggagaggggtctgctaagaatggaacatgtatgatgttgaataaaatgaagtaatttgaaaagaaatagtaaggtcacatgagcttgaatgacattcaattttgtgtgaccatacaagatcagaaatgaaaagctcagcccacgtcaggaatctcttaaatatggtaatttccaaaacttataagcagtcttatataaagggttttctgagactaattggcataccagatcattcttcttctccctctcccaagtgtctgtgtggctgaaggcacagataataaactgcaaagcaaaacagcctaatagggaaggagggagactttggagaggggtctttcatcaccagccctacaagagaatggcatttacatgaaattgattttcagtggtgaaattrtgcttgtgatgttccattgtaaatattgacagcattaaaaggaatgtctaaaagatgggcactaaactgtcaccagcaaaagactgaccagtatttatgctaaattcctcaaattgcatcccttttttacataagtagtgatgcctcatgaaacaaagcagataattcactagagctatgaagtcaaataaaatgaatgcacctacattctctgtcatgtagaaa

SEQ ID NO: 717661 - DNA, 1432 bp, Homo sapiens
tgcatgttgcctaaattcttgttctgcagtcattcttattccctctatgggagaaaatatgtttcaaaataagagaaatactctcttgttggcagctgaaaatagaggaaactagatacggccggcctcactaactggacttttttttgtctgcattgtaaatttcaccacttatggtcattgggcaagaatcaatatttaagcaagtaagtaattttaagcaactatataagttagaggatagttgttaggattccattattatgctttaattcctcaaaccatggatgagattcatggctgcaatgccatgctaacctgacatcagtgtaagctctgacccacttagggtcaatgctagcttaaaaatgcttataggcagaagaaagcagcaaaggagagccttctttgttaatagctacctggaaaaacagtgtgataaagaaaggagcacaccatttctcgctagatgtgaaaatagggaggaggagctattctttggagaaatctaaaagagctattgatcttccaatgcttttttggaaatgcctgtgttgctttatgttgcattttcattcattcatagttgcttctgctaataaaggtcctctggtggcagtaattcttttcagcagattgaagtcgtttagtaatgaaatccttggtgtattcactaacatgaagtgcgatctgtccttgcacctggtacacattcagctttacagacagtcgcattgctattcatgccttttgtttagtcacacaagggaaatagaacaagaagtataggttttcaccttggcttttataacgtaccttatgagctatgcacctccttagaatgaatttggcagtcctagttcttaggcaacaatgatttgtaactggacttaagaaaaagggacattaattgctagtaattagtagttcacagggatttttttttattctgaattaatcaatccccttgagaaaagtgaggaccagaaaaagcaaggttttagctttagaattcaagcatttcaagtttagtgtcataccaatgattcattctagttttattttggagctctcaaagcttcacgtcaccctctctttttaaatttaatattgttttatcaaagttatrcatgtacattgtttaaaaagtcaaaccttctacaaagctcataatgaaaaacagcaatatcctgtcccacccttcccgcctccattccaactccccagagactacctctttcaactttaagctgtttcttctgctgtttattgccatatttctaaataacctgcttgtagtgttatttcttgatttgtttccagttctaggtcttacttactggccccttactatatggaaggcaagaatttagtgttcttaaaatcacctcccacaaccccaagatatatctccctcttcatcctctctttg

SEQ ID NO: 717662 - DNA, 1671 bp, Homo sapiens
tcgttaactggaatcatagaaccctcacctacttccttagctagctccaggaacaaacttttttatatagtgttttagcagacatcttttttattttatgggagagctaagcaatctctgatttgaatgtgttatttttgaattattatgaacattgaaaccatcctttaaaaccataaatatgcaccatagaaaggttttagttgaaaaatctagacacatttttgatgtttatacatacactaaatcattgagaaaatgttctgagatttgccaaagaaatttccctgaacttttatattcatatacacttgaaaggtaggtaaatgtggtctatatgtttctactcatctactattaaacctttcaaatgatgtttgttaaaagcacagaatccatacaggagtcattttcaactcctttttcttttttcgtttttttttttttttttttttttgagacagagcctcgctctgttgcccaggctagagtgcagtggcatggtctcagctcactgcaaactccgccttctgggttcaagtgatcctcctgcctcagcctcccgagtagctagggttacaggtgcctgccatcacacccggctaattttttgtatttttagtagagactgggtttcaccatgtcagccaggctggtcttgaactcctgacctcgtgatctgcccgcctcagccttccgaagtgctgggattataggcgtgagccactgcactcagcctcaactcctttttcataaactcttgagatgtttttccattccaagcccccaccacttcctgatggtgagagcctgatggtctttctaagaaatcatgttggaatatgccaaataaaaatagatagagatatatagtatagctatctatagatacaccaattaagtgccatgtagcttaaatgtaaatttttgcaaatggtgcattttttatttgttaaaaagtgatgtttaaatttgctatagagtttataagacttgtttttgatttcaacaaaaaccataatgcataaatttgtcagtctgaatgttgtcttttggtgacttatgttctcaagtttgtccttgatattaatagaacctagtttttttggtatcaaaatgttgggagttggtatggattcttcagagagggaaacccaggatataatgtacatttcatcttattccaaacccctctcggaagcattctgcttgaaaggaaaaggataatgttttatctgaacagccttcttctgtttttcaagggtaatttattcctgaaaaaattattgaaggaataaatcatcataaataaaaaatgtaattacaaataattgaaacagggaagaatttcatgttttgttttaactttttgtttttaaagaattatagattcacaagaagtcgccaaaaaatgtacagggacagggagttcctgggtacccttcaccaagtttcccccaayggtaacatttttgcataaccattaaaactggggtattgacattggtgcaatctatgtacatgcatagattgtgtgtgtgtgtagttgtatgcagttttatcatgtgtaggtttgtgtgacaaacaccacaatccagctacaaggctcttctgccaccacgagtctccctctcgttgttcctcatagccatacctaccaccttccctacc

SEQ ID NO: 717663 - DNA, 1413 bp, Homo sapiens
tcaaacatcctggaatctggatcaaagtacctaagaattgaattattttgacaaaatacaggttggacactcatatcctttttgtaaggaaatgaaaattccttacaaaaaggaaaagtgaaaattcctttttcatatcatccactctggtataatgcaaagtgcctttacactaatacaaatatataacatcttggctttgccacttatcggtcataaggctagggaaaaaaaaaaatctcccaaayaatgtgaactatgaattccataactaaaaagtggaagcgtaatacccttcttgcaaggtctttgtgaaggttataaataataaggataaagtgtctgattttgagtgtctactgctattcctaggctgtggtctttcattaggtgagtctaagagaccatagttaggtgggtttggctacttcatgtagctctgtgtcgagggaaaaaaggacagatttcaatgttaatttgtagattgcatttccatataaaaatctggctcttttacatttctttaattacgactaaggagcagtgtggtattcataatgtgacagacacaaagatgtgccactcacatcctccttcaagaaagcactcgctgcccagctgtgaggagtgtggtttgcccctggcctccagctgttagtccttcagggtctgcttcagctttccggtacatttcacacatgagcactgctagttgtgcggtggaccctagccaatgactgagtcgggcagtggtagccaagagcctgttctcgcagcagcctcctgccaatgactgaacagggagtgaggcaaggcccagccacttccacccaacgcagattcctctcatgggcaggtgtgctcccaagcttcccactgggctggcagaggcttggtcaggttggcatcatgactgacagcacccctgcccagtcctgctcccttccttttctgttcccaggcgtactccccaataaatagtttgcactcctaacagccacaatgtctgcttccagagaacccaaattgtaacacataaaaaaatgtttcagagatgtatcttactaagccacaataacaacaacaacaacaaatcctggtagaagaactaatggaaatgcagaggttcttcattactttgcctaaaacctcccagaccaggtatctactctatcctaaatgaacaattcatagcttcagtctgttcctgttagtgttaagccaatattagtatttttctgtttggtccagtgggaatttgcttgctttgagttgagcctgcttcgtcatgtattctctgtgtctctgtgaagatgaagaaaaaagcagctacactgtgattcaagacactgaagccattcttttatattgattaaaattctcaacttctttaaatatccctctgaggtctta

SEQ ID NO: 717664 - DNA, 625 bp, Homo sapiens
ttcctgccacagagaaaaggctcaataaatatttctgattaaaagaatgaataaatagtacacttcagatatgcccaggttgacaaattattagaaaatcaattctcgctttccctctggaagtgactgatgtgggcagtagttccagtaygttgtgacattttttcattgtggcatatgtgatagaaaataaatctctccttctgttttgaaagtaccagcagctatttcactaagtccagagagtattaccattctctgtgattttgacatgacatcaaatctatgctgttgaattctgaccaattctttgacttggtcagatatctcagaaacttctgaggaggttttccccaaaagtgctttggttaacagtaacaatggaagcagtgatgctggcatgatgtagcaccatgtattgctatagacctgacatcaggtttctcctttattagctcagttggtttgagtttactataatgagacctaggtcatgggttcaaacccctggtagaacaattagcttacatttgttccttggacataggattaactctgagctccagttagttccctttactttggttctgtgcttcagaaagaccaggagaaatcttcacacaaa

SEQ ID NO: 717665 - DNA, 625 bp, Homo sapiens
ttcctgccacagagaaaaggctcaataaatatttctgattaaaagaatgaataaatagtacacttcagatatgcccaggttgacaaattattagaaaatcaattctcgctttccctctggaagtgactgatgtgggcagtagttccagtatgttgtgacattttttcattgtggcatatgtgatagaaaataaatctctccttctgttttgaaagtaccagcagctatttcactaagtccagagagtattaccattctctgtgattttgacatgacatcaaatctatgctgttgaattctgaccaattctttgacttggtcagatatctcagaaacttctgaggaggttttccccaaaagtgcttkggttaacagtaacaatggaagcagtgatgctggcatgatgtagcaccatgtattgctatagacctgacatcaggtttctcctttattagctcagttggtttgagtttactataatgagacctaggtcatgggttcaaacccctggtagaacaattagcttacatttgttccttggacataggattaactctgagctccagttagttccctttactttggttctgtgcttcagaaagaccaggagaaatcttcacacaaa

SEQ ID NO: 717666 - DNA, 810 bp, Homo sapiens
gtcgccagcgtcctgtttatcccctctgcattcctttctcggcttacgtgtcccgggggcagtgcttacagtgcggggagcaacgtggagtaggaaggaaaaaagttatacttcttgtctacccacctgtcctggccatggtacccagaactgtggaggctgtgagtcccgcaagccgggacgtggagtccaacctccctcccaggctgggggggacattgaagcagactcctccgtggctactgacctgaaattccagtagcagccaccacccagctttgagaaggcctcttactatcctcagggcagtgttctggggtgcaagccgtagcaccccactttacaggtgaggaaaccggggcgcagagaagtggagtaatttgactaagctcacacacctggaattgacagaggcaggagcctgttcctacgttgaacacatttgtggttttttatttgtttgttttttgagacaatctcacttggttgcccaggctggagtgcagtggtgcgatctcggttcactgcagcctctgcctcctgggttcaagtgattctcatgcctcagcctctgsagtagctgagattacaggcgcccgccaccacacctggctactttttttttttttgatggagtcccgctctgtggcccaggctggagtgcagtggcgcaatctcgtctcactgcaacctccacctcccaggttcaagtgattctcctgcctcagcctcctgagtagcttggactacagttgtgtgccatcacacctggccatatttttgtatttttagtagagacagggtttcacc

SEQ ID NO: 717667 - DNA, 810 bp, Homo sapiens
gtcgccagcgtcctgtttatcccctctgcattcctttctcggcttacgtgtcccgggggcagtgcttacagtgcggggagcaacgtggagtaggaaggaaaaaagttatacttcttgtctacccacctgtcctggccatggtacccagaactgtggaggctgtgagtcccgcaagccgggacgtggagtccaacctccctcccaggctgggggggacattgaagcagactcctccgtggctactgacctgaaattccagtagcagccaccacccagctttgagaaggcctcttactatcctcagggcagtgttctggggtgcaagccgtagcaccccactttacaggtgaggaaaccggggcgcagagaagtggagtaatttgactaagctcacacacctggaattgacagaggcaggagcctgttcctacgttgaacacatttgtggttttttatttgtttgttttttgagacaatctcacttggttgcccaggctggagtgcagtggtgcgatctcggttcactgcagcctctgcctcctgggttcaagtgattctcatgcctcagcctctggagtagctgagattacaggcrcccgccaccacacctggctactttttttttttttgatggagtcccgctctgtggcccaggctggagtgcagtggcgcaatctcgtctcactgcaacctccacctcccaggttcaagtgattctcctgcctcagcctcctgagtagcttggactacagttgtgtgccatcacacctggccatatttttgtatttttagtagagacagggtttcacc

SEQ ID NO: 717668 - DNA, 2371 bp, Homo sapiens
gcagtggataactgttcactcccttgccttccccataagcctcttgtgaaatctccaagatcatagctgtctgccctccctcaaactcagttcctgcattagaattctccaacgctcagacttaatcgcccagtcagcagcaaagggcctcactaagggactgagtcttctccttatggctaaagtgaaaccgcactgctgtagcccacagcctggagcctgcagctcaaggccatatgaggtcccggaatagcctaagcatgtccatacacaaaccttgtgcaggcaacctctcctgcacccatgcacagccaccaccccgccaagccccacaggcctctgtgtcaactcccatgaggtggtaaccacagcaaaagtagtaataataccaaccatgaaacttcctcccttctcttcacagttcacaaagcactttcatgtattgtctgggtagggaagaggctgtgttttactcatctttagaaacccattgaataatgctaagtatatagtaaatactcagaaacaatgacttgaattatctttataatgagatttttaaaaattgccacttactcagcattcactattacttactcactctgctgagcatggaccatactcaactctccttgcatttcatcctcacaaccaccccatgtggtggtaagctcacttatcaatcctgtcttacagaagaggaaagtgaggctcagagaagttgagcaacatgcccaaggtcatgactagagagtgacagacctggggtttgaatccttgctcttatacctccagcttttttctggaagaggcagcacgcagcaggttggaagtctgtgagtgcagtctgaagaagtagatcaataatgacacaattttatagttggaaaaagaaaaatcctattgtcttcatgatacaaactacaaaaagcaaatataagcaaaatcaccttggctgaaggaacatgagagtctctgctctactttctgtggtccctctgcatctgtgtggctgttttaagtgcaccctcagcttccagatagcccgtagcatggagcaccttggcttccttcctgcagatccgcccacctcaaactttctagcagttttttcttcatcctacccaccattgtgggagctgaggggaacatcttttggaaaagggcccagagttgttaagttcctgtttccttggaggttttatctccagcagctgccccagccaagaacttagagtttatgagcaactgcctatgggaaggaggcyggcaaggagggatgtggtcagtgcaacccaggcatgagagacgcttcatttccctctttttcgtaagaaaaagatgaacagcaaaatgaggaaaccattggcattgatactcagccacaggattgggggtgatatggaatggtggggactgtggccaaccagagccccctggaaggagatggcagctgctcagttcaaacacatgccactgtgtgggcaggcaagtccagggttgccaaatcttactttccaagggatgccagaatcagatttctttttaccacatgaaatctcctgatttctaaatgttgtcaacgaattcttcccctctccgccttttgaaagtaaacacagaagtgagttggacttggccacaagctgcatgtttctaacctctgtactgatccttgcagtgcacagcatgctcactccccagatgtccccatggtcccctctacttcccagcccctgtgcagtaggtgacaccgtgtctcaggttctggccaacagcctgtgagtggaagagccatgtgtaactcccaggccatggcagttaaaagctagcctcctccagtttctcttccctggtgaggcagcaaccctggaggctgcatggtacaggtggcacagcaaggctgcaagatgaagcagctgctcttccctccagactccaggtgagggagaaatacacccctgagatcttggggtctgtcagtggaggcagccagcatcacctgccctcacacacacctagaaccctgtcttcattaccaaagaacccttgtagtagttcagcatttcccagttttcaaagcactttaacccccttaccttgtataactctcaactcaataagacagacagggcaaggctttattatctcatagtcacgtacactgaggctcagaagataaaactgaactgtcctgaggtgggcggacaataagtggtgagggtgggtagagctcactctggtccagtgttcctccccgctcccaacttaagtgctggcctctgcaacatgaactccctgttactctctaggtcatctgtgagctcgtgccttcccctgccacggttagctgcttgaagatcgacctctt

SEQ ID NO: 717669 - DNA, 613 bp, Homo sapiens
agggttgtaacccggggtgtacagcacacccaaggaaaattaagacaaaggaaagacacccacacaaatcgctttgaaagaaagctcactggtctcagaaactcactgcaggagttgccattagttcactgggggagatagtcattggtaggcaactgtcctgatctgaggttcttatctgaaatactgcaggccagagaaaattcctgtgagaagctcttcttgctgtttgcaagctatgagcaagacattcaaggatgcaagtacgtcagcttctttgttctggccctcactaactctattttggttagcgttttgacacgtgactctattttgtacttctcacttccacactgccttcagcctttgaactttgatttgtgcatacatgatggttagagctatagtagccatttttcaacaagaaaaagacaaggcacctgggcacagtggctcacgcctgtaatcccagcactttgggaggctgaggcaggtggatcacgaggtcaggaattcaagaccagcctggccaacatagtgaaaccctgyctctactaacactacaaaaattagccaggcatgggggtgggcacctgtaatcccagctagtcag

SEQ ID NO: 717670 - DNA, 633 bp, Homo sapiens
gatgatagtaccttatcatggagtcatgggagaatataagaatgcggtaagttggagaaaaaggaaaagaaacgtgaatgtctctgttagctccgcctgctgtaataaaataccatagactaaatacaatagaaattgcttgaacaacagaaatttctttttcctagatctgaaggctgagaagtctaagatcaaggtgctggccaattcatacaggagtcttctttctttcttgaggacagctgccttcttgctgcatccttacatgcaaagggaaagagagaaagaaagggagagaggagaagacagagcactacctctctcttgtttccttgaagagtaccaatcccatcataaggggcacagctttattacctcatcaaaccctaagtacctcccaaagacctcatctcaaaaatagcatacattgggggttaggactttgacgtacaaatttcagagacacaactcagttcatagccatggatttcacaggccattctgccacstaccagcctgtgatcttgacatgttacttaattctttcagtcttctacaaatctggagaaatgaacttgagacgaagtgaaagtgttctggaagtcttgcgatgtagacacagatatacctaca

SEQ ID NO: 717671 - DNA, 633 bp, Homo sapiens
gatgatagtaccttatcatggagtcatgggagaatataagaatgcggtaagttggagaaaaaggaaaagaaacgtgaatgtctctgttagctccgcctgctgtaataaaataccatagactaaatacaatagaaattgcttgaacaacagaaatttctttttcctagatctgaaggctgagaagtctaagatcaaggtgctggccaattcatacaggagtcttctttctttcttgaggacagctgccttcttgctgcatccttacatgcaaagggaaagagagaaagaaagggagagaggagaagacagagcactacctctctcttgtttccttgaagagtaccaatcccatcataaggggcacagctttattacctcatcaaaccctaagtacctcccaaagacctcatctcaaaaatagcatacattgggggttaggactttgacgtacaaatttcagagacacaactcagttcatagccatggatttcacaggccattctgccacgtaccagcctgtgatcttgacrtgttacttaattctttcagtcttctacaaatctggagaaatgaacttgagacgaagtgaaagtgttctggaagtcttgcgatgtagacacagatatacctaca

SEQ ID NO: 717672 - DNA, 630 bp, Homo sapiens
aattgcactccacacctgcccctgctctcgtgctccctgcagtgtgcccacaccagcacttccccaactctacaagtcctgctgcatgagctcctcagacgaggtcactgtcacctggtcccaggggactctgggtgagcggtgcccaaggaaatgatgccatcacttgcttataagcaagagccttttcccataccaaggacaccccttcactggcggaggaacctgctatgtctcaggaactatagctggagagaagatgtgtagaaatgggaccagggccaagagaaagaaagataaatggagaaaatgctagggaattggctttatttagccttaaaaatctagagagaggaaggaagggaggaaaacaccaaacaacaattttccaaataaaacccacataattataaagaagtctatcacaagcatttgataaacatggttgacctgttgtttcctccgattcacagcccctccccgacaagaggaaactgaaaatgtacagcaaatagcacttcaatcaagtcctttttgactactataatgagaagattagttgaatttctttctgtggctgtcttayacaagtgtcagaaactcagcttctgagcttcacgaaatagcatg

SEQ ID NO: 717673 - DNA, 1011 bp, Homo sapiens
taaaatacttcctctaataatacactttgggggctaatttccttaccataaaaacttaaaagcaaccttttgagaactcttctttacaatagaatacaacctagtgtaacactatttaraaagaaaaatacaagatcaagatggtgaggcaacactcacatctgtttattcacctcctccttattgatattatttcagtaggcttcctctgtatggttgaaaccaatcatactctccacctcctaagcacattttgcttaaggcagaaaccaaaagaattttcttactcttttcttatttcttccatgacttctttgtatttactgctcaataatttaaaacacatcatttctattttacagtgtaccattttgtccttctgtgattgtttcaatgtaactgtgaagaaaatagggcctgtgactcaacatttttcatatgtatgtggtggtttctgatttcaaatgcaacacattcaacagattttgttttgcagatggaaaagttaatcagatacatgcagtatttgtcttctctatccatgtttgctaaagcctatccctattctgaatggcatattttttctacctacctcattaaaaagataacataattaaaatggttaactacccaataacaacagataaatttgttgccagcttaaatcttatatgtagttatctggtaaaaatgactctatttaccaaatcttattagtcatctgataaaatggctctaactgctctccttgtctataagtgtttagtagattaaaacctgggatctttaatccaaaaaaattaaaactgcccctgattgttatattgaggtgccatctgtcattccaggtgttttcctggtttttcagagctgagaagtgagctgtcttccaactcacctgcataggtggaagtcttcccagatgctgtgcttgaatctctaatttgatatatttacaagacttgcagaggctgtgagctgtgtgaatacattgcacataagaactacaga

SEQ ID NO: 717674 - DNA, 2042 bp, Homo sapiens
ttattacacatttaaagcacattaaggcccaaacagctattgaagaagaaaaaaaaatggagaaacattggcttcacaagtaatcacatcagttttcaggaaggctgtattttatgaagacagagaaagatgcatggctgttgtccttcccagttttatactaactcattcttcttcagggaacaatattaatagatgttttgctacatttgtctgctgttgagagagtaatcctccccgcaaccttttcttttcttttcttttttttttaaatcatggatgtttaatcacttgcctttgagttgcaggcaactgtttggcatttttagtctgtaaaaaatctgctttgttggggtttaaaaaaaataaaacccatttcaagaaattgtagcttgaaattatttcgggctctgagaagctatgtgaaatccagtgatatttgactgcattttaattcttagtctctggggccaggcagagttggtcagagacagcagggatgccatgcacagttgtgaggttgtgcgttacacaaatgcacctgaggctgaaatgtagcctgtgctctgcctctaatccttgtgccctctgtcttggaggaaaaagcattttttaaaaattctgaatgtggtgaccacttacaaaatgatggcctttgggaccaccaccagtcagaggtggtgattttttcttatttgtgttttccagtagtggggacagggatgtggagctttgcagattgtgtatcattgcatttaggattctgctgattataggatgccccactattttacgaacaactaggaaacacaagacgctgccaaccaaatcctgatatgccattcattgattgtaagacaaatgccggtttcaaagatgccaaaaaatgaaaaagatacaatgcagtaattcatctgctggagagtgtgcacctttcttcaataaccgtgaaggtgccagtgcagatgaagatgaggatgaggatgaggttggcaagcctgtgacggtgaggttagtaagccccagggaaggtttccacaagattttgtctgtttcttggtataaacagtatcaccaaactctctgttctcctataggatgtcaactgattgaaattctaatagaagtagaaatgtggaatgttagagctcaagagacccccgggagcatctcatgcagtgcttctgaaaaacttggccccttggggacatttatcaatatctgaagaaattgttggttgtcacgatggggtaggggtgctactggtagcttgtgggttgaacccagggatcctattaaactccttcaatgcacaggacagcccccacaaggaattatctggccctaaatatcaatagtgttaaggattgagaatccctgatgcagtgggaggatgtatagccgagatataagaacccagacatcagagccaggcagacctgagttcaaatcccagctgtatacttaattttctgtgtggtcttgggccagttaattagtcttgttaagtctcagttttctcttctgtaaaatgaacatcatagcctctattttagagggttgttgagagcattaaataagataattaaggcaaaggttataaagacagcacagcaactaaatctaaattcaaatgcagttgtaagtgcttttatccatactaactaaattggcagggaaagtttgaggtagggattattattatctccattttgcagataaagaaattgagaaaaataacttgcccaggtcattcatgagtaagtggtggagccaggatttgaatctagatcacgtgttcccaagcagcccaatccaccctatagtgcctaaggacttaggaaaaagaggctgctagtaatatcgttattaatattattcaacccgaagccsctacttacagatggtgacttggcaggtttcctcttgagaagacagttgacttggcaagttcctgggtctcctgccccaccagaggataagtttctttctctttaccatgtggtctttgtcaaggagccaatatggaacccaaagtgggg

SEQ ID NO: 717675 - DNA, 1117 bp, Homo sapiens
gtccccacccaacccagaagtccaactggctttactctcaataagtgttcaggaaacaataccttcaactttactttcagatcagaaagaagctactgatattatataatgtaattgggacatataaaccaataaagcagaaagagtttatccagtttttcatcaggaaattagatcagaccaaacaagaaatactgttcaaacggtatacatcaggttataatctttaaaggaaattttaagaaagccgaggctmggagatgtactggccacctgctcttttgtaggatgtccataaccccttttcctggtcatagaacccatctcttcttttactttcaactaatatgatttttgaatctgaccccatgcacccccccaactccagggatggccatatagttcaaacctgaccaatgagaatacacatatcccagcctacacaattatttctggagaggcacacaacctgcctaacccaattagagaaaaccaaagccttttgctagatgtactgaaaataagatatgttcctcctgatgggattactatggtggtggcatagtctgcttcctatgtaagcacagtgctgctgatgatgacttttgtcaccctttgggagggtttgactgagaaaatgacaacacagagaaaagcaaagctcaaaaagagagagagatttttcagtggtcatatttgagtccctggatccagccatacctgaatgcagtggtacccctagattttctagttaagtcacccaataaattcctgttttgcttaagtcagtcttagcttgtcagtaggaaccatgtctgttcagtcacagtattcctagctcccacacagctagttcagtccaagaccctggtaaggcttaaggtcataggggagggtggacaacagattcacatttagaggatcaagcttgagattttttcctcctgtattatctactccctgcatgttcagttcaagttgaattgtcttgactgacaggttatttgggctttgtcattattcaatttatagctgcgtcagtggcgaacttggcaggagtaagcatcagttgattctaatagctggaatggcagagcttatgcagattccatgatct

SEQ ID NO: 717676 - DNA, 1355 bp, Homo sapiens
acattggccccacaatgattacgttgtctgggtcaatctgtcgggtaattattactttatatccttctcaggatagtttccatatgttcccttttgcctcagagcaatatcctaatctgctggcatgctgtttcatcaggaaagcatgcttggcttctcataggatcaaatgcaatgattccttttctgggactaatgaccgccaagtgtcctgggaacaggctaactgtggcctgatctgttcaggccaggcccgtcttagaaccaagcaattattcattgtccttatgtagtgttcagscacttacagtttctctgtttattcttctcaatatctcttccctgattgatgcataggacctctagctcgggctttcctcttagtttagaagttgaataccatggagtaagaggggtgggtgggtgagttgcaggagaccttagaggcagtgctaacttttgacaaaacagtgaagtagttgaacagaagaagaggcaatttctttctagaatttccactctttctccctctctcactctctctctccctccctcccccaccctctctctctcacatgcactcatacacacacacactcacacacactcatgcacactctccactcctttctcttcctttgcctccccatggcctctcctgaatcttctttttattctctactatctatcagtctatcttatggttttatttttttcttaaatatccactgataatattaaaagttatgatcccttcagaattatttgcatcttatctaggactcaagaccaaaagccttaagaacttaataaaagcaaagcaaaaaggttacagaaaaagaattgatttcacccttttctagctcctttgctttctgctgctctgcaataggcaggtggaggaggaaaggaagaaacgaaggaggaagaagaggagaaggaggaggaggaggacctggctccagctgcccacactctccttggatgctggagaccatgaggtggcaacagtgctaggcgactctggtgtgacctcataatggccttgtcttccactgcgtctcctcccagagcccaagaggccctgagcctgtggcacctagcattgaaatggggagcagacagcccagcccaggtgagcttggaagaagaccttcgtacctcagatgttgattacagcctttgggacattgatcagaagatctggttaagcttctgaccatggaaatgtgagggaggcaagatggctgactagacacagtgggaaagaacatctgccaccaagggaccaggaaatccagaggactggtgcattccaaacagatcttcagagaaggcattgaaaataaatggag

SEQ ID NO: 717677 - DNA, 1355 bp, Homo sapiens
acattggccccacaatgattacgttgtctgggtcaatctgtcgggtaattattactttatatccttctcaggatagtttccatatgttcccttttgcctcagagcaatatcctaatctgctggcatgctgtttcatcaggaaagcatgcttggcttctcataggatcaaatgcaatgattccttttctgggactaatgaccgccaagtgtcctgggaacaggctaactgtggcctgatctgttcaggccaggcccgtcttagaaccaagcaattattcattgtccttatgtagtgttcaggcacttacagtttctctgtttattcttctcaatatctcttccctgattgatgcataggacctctagctcgggctttcctcttagtttagaagttgaataccatggagtaagaggggtgggtgggtgagttgcaggagaccttagaggcagtgctaacttttgacaaaacagtgaagtagttgaacagaagaagaggcaatttctttctagaatttccactctttctccctctctcactctctctctccctccctcccccaccctctctctctcacatgcactcatacacacacacactcacacacactcatgcacactctccactcctttctcttcctttgcctccccatggcctctcctgaatcttctttttattctctactatctatcagtctatcttatggttttatttttttcttaaatatccactgataatattaaaagttatgatcccttcagaattatttgcatcttatctaggactcaagaccaaaagccttaagaacttaataaaagcaaagcaaaaaggttacagaaaaagaattgatttcacccttttctagctcctttgctttctgctgctctgcaataggcaggtggaggaggaaaggaagaaacgaaggaggaagaagaggagaaggaggaggaggaggacctggctccagctgcccacactctccttggatgctggagaccatgaggtggcaacagtgctaggcgactctggtgtgacctcataatggccttgtcttccactgcgtctcctcccagagcccaagaggccctgagcctgtggcacctagcattgaaatggggagcagacagcccagcccaggtgagcttggaagaagaccttcgtacctcagatgttgattacagcctttgggacattgatcagaagatctggttaagcttctgaccatggaaatgtgagggaggcaagatggctgactagacrcagtgggaaagaacatctgccaccaagggaccaggaaatccagaggactggtgcattccaaacagatcttcagagaaggcattgaaaataaatggag

SEQ ID NO: 717678 - DNA, 583 bp, Homo sapiens
tttatttttaaatcactcattctttataataggcatttgttgttttttgatccgttccatttttccaaagataatagtaccccaactttcttctgagggacacacctctctcctctaccactgtgtataatgctgggggttttataaatcaagatacccaccttcccctaaaaaaaaagtgtgagtagttgtcctgagcttgaataatcaggagagctctcccargacttcaaatcttgatagatgaaaaaataatgtttgaacctcatccattacagcagtgagattctgcaaagacaattgacttgttcctgccatgtggaagcccaaagctatctggttcctgcatttccaacccttttcctccacattttctagcatttctttgagctattaagtatgcttgctgtaaattactttcctgacaaagttagccagagtatctgatgcttgcaactagaaataatactgaacaacctgactccagcttccactgtgtattgagcaatgttatggttccctaagggataagggactaactgaagataagcttgcaaagctcagcatctaattggagaaaaag

SEQ ID NO: 717679 - DNA, 617 bp, Homo sapiens
caaacgtgggcagtctggcttcaggtccctggtttccaccactgtacaacactgcctctcattacccaggatgcacctaagactcccagaaatgggggctggggcacaaaagcagcagtggtgggaagtggaagaagcaagccagcaggatacttcagtggcactagacagtggagatgccacccccattacacatgggtccactctctaccttgcactggactctgtctcttaccacaggcttaaaatcttccagggccagagctctgccttagttatcttgayacatccacaacccaagcatgatgtcttgtgcatacaaagagctgagtgaacgctagatacattaaattgctagaaattattaataaaatctttatggttgagcatgtttttgtcttggagcactctgaagggtgcatttctcaaagaggcatgtaatgacaccaggaatggagctgtttgggtcacagctctcttctgctgggaccaatcccagtttcttgttctctcgacagcctagagggaaataataacttgtttttaatagtgctttgcacttttcacaatgtttttgaaaatacatcacctaagttaattttcaaaaaccccaaatg

SEQ ID NO: 717680 - DNA, 978 bp, Homo sapiens
ggcaatggcgggtgcccgtcccccagccttgctgccgccttgcagtttgacctcagactgctgtgctagcaatcagcgagactctgtgggcgtaggaccctctgagccaggtgcaggatataatctcctggtgcaccattttttaagcctgttggaaaagtgcagtattagggtgggagtgacccaattttccaggtgccgtctgtcacccccttctttgactaggaaagggaactccctgaccccttgtgctttccgagtgaggcaatgcctcgccctgctttggcttgcacatggtgcgctgcacccactgttctgcgcccactgtctggcactccctagtgagatgaacccagtacctcagatggaaatgcagaaatcaccagtcttctgtgtygctcacgctgggagctgtagaccagagctattcctattcggccaatttggctgccctctgaaaagttttattttaatgagaagattcagacttttgtaatcagaaaatctataaggaactcatttatattacaccatacatgtaagctatgtgtaatttcaaaaaataacgttatattttgagttacatacataagcacctgtggaatgccaaggtctttttatagcttttagtgtctattagtgctttaggtcttaatatgggcctagttaaaatataagcactcttgaaagatcacaactttccattagttttctattgctatgtaacaaattactacatatttagtggtttaaaactgcccacagctgggcacggtggctcatgcctgtaatcccagcactttgggaggccgaggcgggcagatcatgaggtcaggagatcgagaccatcgtggctaacacagtgaaaccccatctctactaaaaaaattacaaaaaaattagctgggcttggtagcgggtgcctgtagtcccagctactagggaggctgaggcaggagaatggcgtgaacctgggag

SEQ ID NO: 717681 - DNA, 597 bp, Homo sapiens
ttttttaaaaggctcaaaggtggcaacttttctcaaaattatctttaccaaaaagagtaaccatgctcttcttgccccattttccccatttctcacccccgtctcaacaagattcctggtaggttctggtgaccggggctgagccacacacctatgctstaaatgcaaaggaggttgggaaagtgtgtgcctggcatttccagtctccgtgtgagatggtagagtctgtctgcttggaggaagtgtgggtgcaaagcagggaagaagtaagtagagtgattgctgggtaggcctccaacacggtctttcaaaacaagaaaagaagaaaaggggagttattcatggatctcatgttcaggacctggcacagtgctttgctttctgcattgcaggcattcaattgatattttttgattgtggaatcattatcatggaaatagaaaatcaatgtcaggtcaggcgagtgagtagtgaaattaattattctttccaggccatgactagatgacaaaaaattaattctgttatttgaatgggtggctgttgatatttctagtgaggggttaaactgaaatactaatttaacatcaagagagg

SEQ ID NO: 717682 - DNA, 530 bp, Homo sapiens
aacacagccatttaactcttgtgaatttctastaatgcagaagacacccaaacactcaccagttattaaacatgaccaataatggaggaagagctatagcaaaagaccagcctacaaagagatttctttataaggcagtcagtagagaatagccttcagaatcagttgcagctgggtctagactctgttttcatcacaattttgctatgtcacttgaggcataaatactttgaatctgtttctcattgaaaaatgaggacagtaaagtgtaattcaagggtcagcatgaggattaaagtgcttattaagtatttgtgaacaaaactaaactcaaaatgaattaaagatgtaaaagtaagatatgaaactttagaacttctatgaaaaaacacaggggaaaagcttcaaaacattggtcttgaaaatgatttattggatatgacatcaaaagcacaggtaacaaaagcaagaatagacaagtggaaccacatcaaactaaacagcctctgcacagggaacgaaacaatcaa

SEQ ID NO: 717683 - DNA, 1033 bp, Homo sapiens
attcagtgttgcatccaattcggaatgcactgacgtgatgttaccagatttagcatatctgtggagagagggaaaaaatacagagtttactggcagcctgggtgagtcaaaaggccaagctatttttggtaaagaccactaaactgtctcaggcacttatatgcattttcttagcaatagggcaaagcaccctgctcaaattccagggaaagacctacacctttgctgcaawtcaatagtgaaagaaatatactttgtcaaataaagacaatacacactgaatactggctgggtagtatttatgttaggcttctaagtttgctgattggtaaggttttcaagtgacctaattattagataagacttgtagcttaaggagggacttaaataataaagcagcattatttaactcctttttttccccttttgcccacattgaattgaattaacacatccttaataagtattaatagttaccttgtgaagggtccctttgtcagtgctgtgagataaagtgaactcatgtatattaaatttggaaaacaacttttcaaactaaagtcagatcagtgggtctttctagtgtatgtgcataattaaaataaatacataacttttatttcatccccgatgttactgtcacatcaaaactactgaaatttgagtgagttcagctctactagagatggataactctgagaccctctgtgtgtgtgttgaggaggcagcaaaaagtagcatcaacaagtaaggactccagagacaaagactcgaatcccagttctgcctcctcatggctctcactggctctaccttggacaagggatataacctctggccgactttgtttccttgtctgaacaatggtgatcataactgcacctaatgtgagtattaaacatacacgtgaagcattctagctagtggctgacacatagcactaagtaaacactattagtattatttacttattactaaaataaactttgaattacagttttgtgtaattgtatatttggtaactttatgtata

SEQ ID NO: 717684 - DNA, 1033 bp, Homo sapiens
attcagtgttgcatccaattcggaatgcactgacgtgatgttaccagatttagcatatctgtggagagagggaaaaaatacagagtttactggcagcctgggtgagtcaaaaggccaagctatttttggtaaagaccactaaactgtctcaggcacttatatgcattttcttagcaatagggcaaagcaccctgctcaaattccagggaaagacctacacctttgctgcaattcaatagtgaaagaaatatactttrtcaaataaagacaatacacactgaatactggctgggtagtatttatgttaggcttctaagtttgctgattggtaaggttttcaagtgacctaattattagataagacttgtagcttaaggagggacttaaataataaagcagcattatttaactcctttttttccccttttgcccacattgaattgaattaacacatccttaataagtattaatagttaccttgtgaagggtccctttgtcagtgctgtgagataaagtgaactcatgtatattaaatttggaaaacaacttttcaaactaaagtcagatcagtgggtctttctagtgtatgtgcataattaaaataaatacataacttttatttcatccccgatgttactgtcacatcaaaactactgaaatttgagtgagttcagctctactagagatggataactctgagaccctctgtgtgtgtgttgaggaggcagcaaaaagtagcatcaacaagtaaggactccagagacaaagactcgaatcccagttctgcctcctcatggctctcactggctctaccttggacaagggatataacctctggccgactttgtttccttgtctgaacaatggtgatcataactgcacctaatgtgagtattaaacatacacgtgaagcattctagctagtggctgacacatagcactaagtaaacactattagtattatttacttattactaaaataaactttgaattacagttttgtgtaattgtatatttggtaactttatgtata

SEQ ID NO: 717685 - DNA, 1033 bp, Homo sapiens
attcagtgttgcatccaattcggaatgcactgacgtgatgttaccagatttagcatatctgtggagagagggaaaaaatacagagtttactggcagcctgggtgagtcaaaaggccaagctatttttggtaaagaccactaaactgtctcaggcacttatatgcattttcttagcaatagggcaaagcaccctgctcaaattccagggaaagacctacacctttgctgcaattcaatagtgaaagaaatatactttgtcaaataaagacaatacacactgaatactggctgggtagtatttatgttaggcttctaagtttgctgattggtaaggttttcaagtgacctaattattagataagacttgtagcttaaggagggacttaaataataaagcagcattatttaactcctttttttccccttttgcccacattgaattgaattaacacatccttaataagtattaatagttaccttgtgaagggtccctttgtcagtgctrtgagataaagtgaactcatgtatattaaatttggaaaacaacttttcaaactaaagtcagatcagtgggtctttctagtgtatgtgcataattaaaataaatacataacttttatttcatccccgatgttactgtcacatcaaaactactgaaatttgagtgagttcagctctactagagatggataactctgagaccctctgtgtgtgtgttgaggaggcagcaaaaagtagcatcaacaagtaaggactccagagacaaagactcgaatcccagttctgcctcctcatggctctcactggctctaccttggacaagggatataacctctggccgactttgtttccttgtctgaacaatggtgatcataactgcacctaatgtgagtattaaacatacacgtgaagcattctagctagtggctgacacatagcactaagtaaacactattagtattatttacttattactaaaataaactttgaattacagttttgtgtaattgtatatttggtaactttatgtata

SEQ ID NO: 717686 - DNA, 1580 bp, Homo sapiens
aggatttcatgggcaagggtgccacttggaaggagagtttcaactgagtattctgtcttgtattttagatccccaaaggtcttccagggagcactgaagtagttcttcacactaattacaggaatcacacgctcagaagaaactgtgttttttgtgtgtagggggtggtttgtttgtttttggtacagagatcaacactgactattttcaggccttggggaggtggtaaaccaaacaataattttttccaaactctctttgcagaattcaggaaatctcacaggaaccccctgacctggaaaaggcatgccaagctagggaaacagcacacccttttgaattaggggtggcaaagataaagaatggcctttttcataagcatttgaacattttaactgaagtaacttcattcacttcttatgggaacatggcaagtgtttgggctgatttgacctaatatgagttgataaaccagaagagaagaatgaaacatctcatccggtcattgacctcttcacagagacaattttcaaagacagtgagtgctgtaatgcaaggaactcccaaccaacaataagcaaaattcactgcaagctcagagctgcttcagtggtcttttcaggacattcccttgacctgagagtttctagtgaaagcatcttcttgaattttcctggggcttttaattgtctcaggtggagtgggttgacactagattacagaaatggaccagtagtgagtggcagctctggtttgttctgaatctttcagaaatagatggaacctatttcttcattcaacacacactccttgagcatccactatgtaccaggcatcatggagggaacttagcatgtggcatacataaaacgcaaatggtccttgccttcaagttcatacttgagtgagcacgcagacaataataagtgaagaaataattacagcaagtaattacaaataatgatcaaagtaatgcaagaaagcaagatgacatgtctgactttgttgctagtttgtcatttgaatatataatgggacaactttcagggtttctataattaattctcctataatatatataggagaattatatatgatacataattcagggctcctatagtgtaatcaattctcaatattataaaatgaggatttcctgattcaacttgcaaaaacatgtgaaagtaatgagaaatactgttttctcttgctgttcacattcagtttcctggaaagccacttttgagagttgtgtttgctttcaagaggcctggcttagagatccagagrgattcctttatcttgagtgccactgctaagtgagtcacatcctggtaggtaggagtcctgaagttttccccagcagaacttcccactggtctccctttcccatttcaacatggttcaggtgtgcccatttgttcatcaacacggactcttctcccttgccaaaaaatgatgagaataggatgggaaaactccacagatggtgcctgtgatcttcattagaagaagccgtataaatacagatatgaccaagaacactgatgcattttatatttttctaggtatttggacat

SEQ ID NO: 717687 - DNA, 606 bp, Homo sapiens
cccagtttgaagatggctgcctgccaggagatcttctggccgtcggcctcctgcgtgctgcactcatcctcagagtctgagcggcaccgcagacctgcccgcagggagagaggccactgttagcctgtaggcagtgaraagccctctgagggggccagggatgagtcctctcacatgcctgaaaggaaccccagcaatcttggggatcacttcttcaaaaccccaaggaggccaaggaggagcccagcagggcccaaggaaagccttggaacagcaggtggaatccagggttggagtctaagaacatttaggcttaaatggaactaaaaacagagccccatttcatctgcagtgaagacccaggtgtgcctgagtcagtgttgggtgctgtgagctggggggcaggaggaatgtgtctgtacactggggtcctgggagggctcggggccagtgtgcagacatggccatgggaggcaggtccctgcaaggggtggcagccccctctccacagctggccacaccgtctgtactgggttgaagagtgtctccctaaaattcatgttcaccccaaaccttagaatgtgtccttatttggaaacagggtct

SEQ ID NO: 717688 - DNA, 584 bp, Homo sapiens
aaaattaattaaagcataattattaatcacacaatattttttcatccaggcctccttttctttgtcatgcatgcatattaattgaggatggagaatatctacgcttgttcaggccagccaacatacgacagtttacttcaagacaggagacatgggttgaatgctggtatgttttaactctgcagcgcaaacagttgcaacaagtgtggtgaactaatcaccagatggccctttgctgccttatttgtcattgtgccttacatgtagcttgcaggatttgattacgcttatgttttgtggtgatcatactttcaactattcctaaaatactgcttcagtcttatctgtttggggtcaactgctgaggatttcatacaaattaatgaagtttgtgaatctaaacttctacacaaagggggaaatatttgcaaatcatttatcttgtaagagactaaaatttagaatatttttaaatatatttaagatatattcaaaaatctacarcaacaaactaactaaataaaaatcagacaactctttaaaaatgggcaaaagacttcaacatatatttccctaaagaagat

SEQ ID NO: 717689 - DNA, 1811 bp, Homo sapiens
cattcctattacattcctataattttagattttttaaagaagtatgtttatgaactttgggaggacggggagggtggatcacttgaggtcaggagttcgagaccagcctagctaatgtggtgaaattccatctctagtaaaaatacaaaaattagctgagcatggtggtatgcacctgtaatcccagctacctgggaggctgaggtaggagaatcacttgaacccgggagtcgggggttgcagtgagctgagatcttgccattgcactccagcctgagcgacagaagtgaaactccatcttgaaaaataaaaaaaaataagtatgtttatgtatgttgcatacacaaattgaacccttaaatcctgaagagaaaataacatatatgtgtataaatatatatatctgcaaacaaaatttaatgaattattcttattaaatgacagctgattcaaaatatataagaattacatwaaaaaataaaactattatgttgtttaaaaagttcatcagcaagaatgacttgtggcacttttctcaacaaatatatgtttgctttggtagctaatgagtcttgaggaaaactaaatatttacagtgaaatatgagctattcagttcaaatgaaatattatatcaactgaacacaataaaactccatcttaagactcaagtaattctgttaacagataccaatttttttttcttttttcttttgttttgtgatggtcctggacttggagatttttagtgtaatgaaaaacttatgttgctgaaaattatcaaaactaaatgactaagaggccagctgccaatttgaaagtagtccatagaaaaaaaatctgttataggatacaaagttacaactagataggagaataggttctagtgttctatagcactgtaggatgactatagctagaaggacatggaatgttcccaacacaaaaaaaacgataaatgtttgagatgatggatatgctaattaccctgatcttatcactatgtattgtatgtatttaaacaatactgtgtaccctataaacgtgcacaactattacgtgtcaactataaaaattaaattaaattttataaaaataaactatggattttgtctataagttgtttttatttatttgaaataaaattacctgagaatgcataggtaataagtattgacagatgtgttgatttactgtttatataatattgtgatttatttaaactctttgacaataaactattactttgacaaaataaacacctgcttatagaggtaaatgaacattccaatactacgactctcagagtcctaccattatgactttagaaagatttattttagaaagattatatattaacagaatactgtctaactttctaataaaaaaactaaaaaaaatgtaggaaataaaaataatattttcaattactacatcatatgtcatgtatttggtgtaaaatcactatagctttatatttttaaaacatgaatctttaactattttaaacaatgaatagcataatttaaaacaatgttgtttattcatttattacctacaaacccaccatctgtagccctatttaaaatatttcttctaatatctcattttaaatcttgtgaagcatgttagacaatttttgaataatagttaatacaaatgtaaacctatttcaataagttaatatgcaattataagttttggatcactcattttctgaactacataaggagatatacctaatgctaaatgacgagttaatgggtgcagcacaccagcatggcacatgtatacatatggtaactaatctgc

SEQ ID NO: 717690 - DNA, 669 bp, Homo sapiens
tagtattatttcagcaaaatgttgttagtggtactttcctttttctgcatcggaggaaatacaccagtaacagcaagaaaatatcctgttctttaactaagagatgtgagaagtaaattctgattcttgcccaccaatcaccattaatgccttaacacaaggaattccattcctatgaccaaagctctacagctcaaaaagatttcacagaagtcatgctaaatgatttcactaaaggaaaacagcattggtaagtagattcagkctctccttaacatggtagctttttggacactctgctttggttttgaccttcaaaatttccttttagaaattagcactctactacttactaccaaactcctacatctagaacagtaggtactaggtgtcatagttttggcccagcaagcactactcaagcatgtccatcatggctaagaggatactgggataatatggaatttggaagaaagattgattagggaggcaaacaactgacaggcaatgataaaaaacattcccatcagaggacacggggatggagactgagaatattttcaatagatatttagatgattgaaagagcataaccagataccgtagttaccaacattttctccgagtattgagtatcgcttgctttcttttagtgctgatcattcccat

SEQ ID NO: 717691 - DNA, 669 bp, Homo sapiens
tagtattatttcagcaaaatgttgttagtggtactttcctttttctgcatcggaggaaatacaccagtaacagcaagaaaatatcctgttctttaactaagagatgtgagaagtaaattctgattcttgcccaccaatcaccattaatgccttaacacaaggaattccattcctatgaccaaagctctacagctcaaaaagatttcacagaagtcatgctaaatgatttcactaaaggaaaacagcattggtaagtagattcagtctctccttaacatggtagctttttggacactctgctttggttttgaccttcaaaatttccttttagaaattagcactctactacttactaccaaactcctacatctagaacagtaggtactaggtgtcatagttttggcccagcaagcactactcaagcatgtccatcatggctaagaggatactgggataatatggaatttggaagaaagattgattagggaggcaaacaactgacaggcaatgataaaaaacattcccatcagaggacacgrggatggagactgagaatattttcaatagatatttagatgattgaaagagcataaccagataccgtagttaccaacattttctccgagtattgagtatcgcttgctttcttttagtgctgatcattcccat

SEQ ID NO: 717692 - DNA, 669 bp, Homo sapiens
tagtattatttcagcaaaatgttgttagtggtactttcctttttctgcatcggaggaaatacaccagtaacagcaagaaaatatcctgttctttaactaagagatgtgagaagtaaattctgattcttgcccaccaatcaccattaatgccttaacacaaggaattccattcctatgaccaaagctctacagctcaaaaagatttcacagaagtcatgctaaatgatttcactaaaggaaaacagcattggtaagtagattcagtctctccttaacatggtagctttttggacactctgctttggttttgaccttcaaaatttccttttagaaattagcactctactacttactaccaaactcctacatctagaacagtaggtactaggtgtcatagttttggcccagcaagcactactcaagcatgtccatcatggctaagaggatactgggataatatggaatttggaagaaagattgattagggaggcaaacaactgacaggcaatgataaaaaacattcccatcagaggacacggggrtggagactgagaatattttcaatagatatttagatgattgaaagagcataaccagataccgtagttaccaacattttctccgagtattgagtatcgcttgctttcttttagtgctgatcattcccat

SEQ ID NO: 717693 - DNA, 629 bp, Homo sapiens
ttttattttcaagtctctgccttcaagaaaatcattatctatgtgggggatagccatgcaaactatacatasagacagcataacagagaagttaaaagcacagttttcttgctaaacataaaagattggtgacttgcatttccttctgttccttcctgaattttcacctagatgacactaaagggattttaaaaggcataaatctaagagaaagaacatgaagggagacaacaggagagggtagaagaacagctgagagatgccaattaaattttggaagcctccaaatcagtttgcaattgctaactgatctagcagaccagagaaagctgaaacaatactgcctgcagagagggaagccaaaaagaaaaaccctgccttaaaaccctggaaaatctcaggaataggtagtattagtcatctctgaaggtaggggtaagaagtgaggctgaaaacagaaggatggattgaatatctgtgaatgaagcagttagacccttatatccctttccataccataggcagacaagtaacccagcccagcagaaaatggaaaggtattgaattgaggaactcaaactcaggcataggtgaaaggcaggaagctctgcagaaagtaggggaaataa

SEQ ID NO: 717694 - DNA, 1041 bp, Homo sapiens
tcactcttttttcagaggccacatggagaactggaagagatgtataccttggtctgaatggctctagggtcccacagcccaggaatgatcatcatccaactacgagacaaagcacatctgcacacactgcccccaaggagcctcctggtggcagaggggaaacagcctctgccagaatatagatgcctgtgatggaagtgttagtctgagaagaggacaggggcagccgagatcaggggcgctgtatggacttttcattctcctaatccttctccctgggcagctccatctatgggccacatgtggtggctcatatctctaacctcagcacttcgggagccgaggcaggaggattgcttgaacccaggagtttgagaccagcctgggtaacatagcaagaccctgtctctacaaaacatttaaaaattagccaagcatagggtgtgcacctgcagttccagttactcaggaggctgaggtgggaggatcacttgagcccaggagttcaaggctgcagtgagctatgatcactatgagtgcaccactacactccagcctgggcaacagagcaaaaccctgtctcaaaataaaaaagattattgagggggtctgagaccaaaaagtttaactgctgatacagacaatagagcaaagacattacaaaacaaaatgtgttgagcagcctcacatattaaccactataaaagtaaggaaatctgaggtgggaggactgcctgaggtgaaaagttggagaccagcctgggcaacacagcaagaccccatctctacarattttttttttaaaccgccaggtgtggtggcatgtgcttgtagccctagctacttgggaggctaaggcaggaggatctcttgagcacaggaagtcaaggttgtcatgaactatgatcctgccactgcaactccagcctgggtgacagagtggagagcctgtctcaaaaataaaaattttaaaacagtaagaaaatgtcatgcaggtgtgcccaaggacatgtagtttcttctcaagcaaggaaagtatct

SEQ ID NO: 717695 - DNA, 1041 bp, Homo sapiens
tcactcttttttcagaggccacatggagaactggaagagatgtataccttggtctgaatggctctagggtcccacagcccaggaatgatcatcatccaactacgagacaaagcacatctgcacacactgcccccaaggagcctcctggtggcagaggggaaacagcctctgccagaatatagatgcctgtgatggaagtgttagtctgagaagaggacaggggcagccgagatcaggggcgctgtatggacttttcattctcctaatccttctccctgggcagctccatctatgggccacatgtggtggctcatatctctaacctcagcacttcgggagccgaggcaggaggattgcttgaacccaggagtttgagaccagcctgggtaacatagcaagaccctgtctctacaaaacatttaaaaattagccaagcatagggtgtgcacctgcagttccagttactcaggaggctgaggtgggaggatcacttgagcccaggagttcaaggctgcagtgagctatgatcactatgagtgcaccactacactccagcctgggcaacagagcaaaaccctgtctcaaaataaaaaagattattgagggggtctgagaccaaaaagtttaactgctgatacagacaatagagcaaagacattacaaaacaaaatgtgttgagcagcctcacatattaaccactataaaagtaaggaaatctgaggtgggaggactgcctgaggtgaaaagttggagaccagcctgggcaacacagcaagaccccatctctacagattttttttttaaaccgccaggtgtggtggcatgtgcttgtagccctagctacttgggaggctaaggcaggaggatctcttgagcacaggaagtcaaggttgtcatgaactatgatcctgccactgcaactccagcctgggtgacagagtggagakcctgtctcaaaaataaaaattttaaaacagtaagaaaatgtcatgcaggtgtgcccaaggacatgtagtttcttctcaagcaaggaaagtatct

SEQ ID NO: 717696 - DNA, 1209 bp, Homo sapiens
ttggcatatagtagatgtgcagtaacatgcttcatgatccaattttgatgaatctagtgtcctcatttgtttcttgtccttttaaactcacagggtcaggaaaaatgagagaaaagatgtgagaattctgtgatcrtctgtgtggttgctgcatgcacacacaaataatgctgcgatttctgtacactgataactgtgtggacatatctcatgggccatgtttcttgaacattagtgtgtggctggcactgagggagtgcctcagatctgtagagctggttcccttaatgaaatccacttctagatccattgtatagctcaaccctgccagaaatactcctgtttaagtatgatatgtaacaagtattatttgaaagtcaattaccaaaaggacaccactgcagaataaaaaggaactaactgtggaaaattagaaagctactcagagcagtctttagtctcaattagccacattttcctgtcttctagcagctgaactcagagtgtcatttgagtaggagcttgggcctggcagctcacggcactctgttgcttctgaggtccccaattatgcaataatggtaatcactgatggagggcttggttgagaaatgcctgtttcctcatgtctagagctcagtaatcataggggaggagtatgtcagcacaggattcgttgatttcaaattattgtttgagaaggagctaagtgagatcaggcttttacagactggattgcggaggctgaggcttggggatgccacttcagagggtgctacaggcggacagcctgaccactcctctgaaagatctgctcaaagcctgcactctgtcctccatcaccaaaagttcgagggccatttgagacagagcagaaacctacttctggcatagcccacttgccactcaaaataactagttcttatcacagagggctgggaagtaaggatatggaatgggacaggctggtttcccatttctcacacccagtagggcttccagtctttcatcaaatctggtcattagcagaggcctcctgagttctctttagatgcctttgccatttctgaaatagcaagggcagtcatagattgcaaaaatggccacacattcttcccctcctattaaggggtggagcctgtttctctacttcttgaagctgggttggccatgtgatgtgttttggccaatgggacatatttgcaaaat

SEQ ID NO: 717697 - DNA, 646 bp, Homo sapiens
tattgccggagcaggcacaatgagatgggaccgggtcgcccattttccttcattcatcgcccgtagatgcttgtcgggagggcagccaggtttctgttcctgcttctcatccacaggcctactccatccagcctcaaccacagccacagggaactggctgtcctgttttagtactcaagctgatctgtamcccagaggctgatgggagacccaggccacaatgggtccctccgtaaactcgacttgaatagtatagtgtccttggtttgacctgaataaagcttccactgaaacccattgtgttccatgcgtccaccccttgcaaatccctttagttgcaaagaagttggctgtcattgccctgtggattcagaaagcctaagtcttgacgacaatttcaatcccaaagaaatctttaactccactcccatttcctacaataatgagagagaacaccagagagactagcaaacatcatcagatgaacagttcacattctcttggttcaagtccaaggtttttttctactatatttagaatgatattttccaaggtagtgtgtgagttggctcctgtctaactctccagtatcatctcaaaccagggtaccccagggcctttgcacggcctcttttgcctcttttgg

SEQ ID NO: 717698 - DNA, 646 bp, Homo sapiens
tattgccggagcaggcacaatgagatgggaccgggtcgcccattttccttcattcatcgcccgtagatgcttgtcgggagggcagccaggtttctgttcctgcttctcatccacaggcctactccatccagcctcaaccacagccacagggaactggctgtcctgttttagtactcaagctgatctgtacccyagaggctgatgggagacccaggccacaatgggtccctccgtaaactcgacttgaatagtatagtgtccttggtttgacctgaataaagcttccactgaaacccattgtgttccatgcgtccaccccttgcaaatccctttagttgcaaagaagttggctgtcattgccctgtggattcagaaagcctaagtcttgacgacaatttcaatcccaaagaaatctttaactccactcccatttcctacaataatgagagagaacaccagagagactagcaaacatcatcagatgaacagttcacattctcttggttcaagtccaaggtttttttctactatatttagaatgatattttccaaggtagtgtgtgagttggctcctgtctaactctccagtatcatctcaaaccagggtaccccagggcctttgcacggcctcttttgcctcttttgg

SEQ ID NO: 717699 - DNA, 587 bp, Homo sapiens
caaagaacgccagggatggctgccagccaccaggaactaggaagaggctagaaaggactctcccctagagccttcaaagggagtttggcccaaccaacaccttgattttggatgtctgaaaacagaactgtgagagaatacatttctgttgttttgtcacccagtttgtgctaatttgttacagagccctaggaaactaatgtacaagcccacccacattcaaggggaagggaatttccacctcttgatggaaagtggcagggttccagcagagcacatgggacaggagttactgtaccacccatcttggcaaagcacaatctgccacaaactctggagtgtatacgaagagtagggcagaagtgttgagtgtatgtttagggctccaagcataacagaggtttatttctcactcatggaaaccacaggcctccagttccttccaagacaatctaagctttctgaggttgaccatccccaacctagaaagctcctaaaggatttctgatgtggctggacctrggaaaggaatagaagctggatcgtgtggccagagaagctggagggatgggtatggctcctggctc

SEQ ID NO: 717700 - DNA, 586 bp, Homo sapiens
tttagcttgacaactggtcatttctacaaacatttaattatacgttataccccataacctttccaagtgagaatgcagcagagtggaaaaaactctttaaaccatgtgcttcgcagagattgttcttgccggtaagttttttcccctagtgtcttttttttttttttttttttaaatttgaaccttacttttacacatgagtctctgaagagttacatataattccagttaaataattaaattartaaatagaaatcaatgcatgtactatcttccttttgaacatgaaaaaatattcctgtggaacaagtaaaataaaaacccctgttaagaatgaaaaatttttagtaatttctgttgagataccagtttaatatattcagttgcggtgaactcttttatctgtaacaaggaatagaggttgccaggtcttaatggagccaagtctgttgccagcagaaatgcggtggcgttatcacctttcacttgtaggcagcatttagagtttgagaaatgaggtagagtgcttcattaaatagcaatttgtgtcttataccaagccaatttatctattgtaactgatact

SEQ ID NO: 717701 - DNA, 1044 bp, Homo sapiens
gatcaaggtgtttttttttgctttttgtcccttgtaaaagttaagagaagctgtaactagtaattaaaatagtaagccagcttctcattcatgtcaattctttcatattataggtacagttaaacctatagctgcaggttacgcacatacaaaatcggcaaggctagtcttctcttagaacagtcatgggtatgaattcaaacaaaagatctttgcttttggttaatataatagattgacaaactgctgaggagagttaagaaattcacaggctagtatgtaggctaaatgttcttttcgtactgctcccaggaatgttctgccttttagaactagaggctgatttcttttcttgayattttaaatccaaaggattcagcctttagattgggtttttaagctctgtgaaatcaccaactgtatctagttttagtttcctttctacctaatgaaaatgaaatttactcagtttcatttttagggggaaaggcaggagagcagtagctttgagcatatcactagggatgaattcaaaatcgatttttcttgaggcagtgacttatggcagatagttgacaagagaaaaattaagttttgagcttatatctcaaatactgaatgtgaattccactaaagaatatttaagaaaaaaagttgaaatggtttcatttaaagatggtaacataaacatttagcctggtctacagttgaaatattttctagattaaatgcaatttataatatagcaatatgaaaatactgtaatttgtttttagatatgtttttggtggggtaactgaagcaaactagggaactcaccatgttataatgataataattagcatctacttcatgtaagatcataaacagatgcttttgaaccttagtattaggataataaaataggcttaataagttttacttatgccatttactttgattgtagatagtgaaaagcctttcttacacttttttaaagctttttatttaccatacataaacttttaaatgtttgttattcatgcttgtgttttcttgtagcac

SEQ ID NO: 717702 - DNA, 750 bp, Homo sapiens
taagtgttcttaccataataaaaaataaccaggaggtaattcctcagttcaaagaaaagatgaatggttgtttgcattagaactgtagtagtggagctcaaggaaaagaaatgaatataagagatttagaaaataaacttaacaggcacattagaaacatatgtaggggtaagggaggggaagtagtcaaagaagtcttgaattataaaaatatatatgtggcagtattatagctgagatacatatgcaggattcattggtatatgggcagtaagaactgtcatgggcgtggatgagatcatgaaggaagtgaaaggttgatggtgaagaaagaaagtgagatgcaaagaaaatctaaagcttaacctgaacttcttagggtttacaggctaagttcagcaaaaggggttgacataaatctctgagaagaagatatactaataggcgtactccaattaatcaaaaaaagtcacatttaccattaattgcccattaatataaaccgaagagattatcataaggacataatccctgtataatccaatcttaaactttgtgatgatcaaaggaagaaactgcacagttccrattggtctttccttactctgatttcctaactctgtttgtataaagatgtgttgttctatagattagattgaagttactacataagcaaatgaattacttaaatcaactaattgtacagatttgccataagtcaacttaccgtgtggattcaacagaattcag

SEQ ID NO: 717703 - DNA, 594 bp, Homo sapiens
tgagatttttagagttttcaccaagctctcatctgtcagtgatacatgatgagatttgtatgtraaaattctattaatattaatgagattagctctcataaatctgatgttattgctgatagagtagattctggaaacagtaaaattctttacattaattagagagcaaattaggttactttgtcaagtacataaatacataaaataagtagtgaagtaatttaatatgactagtcaaagtcatgaaaaattctaataattatgataataaagaatttcaaacaattaccatttttgttctaacaactctctttttcttccaagcaaactgccatatagctcacttttctttttttttttttttttttttttttttttttgagacggagtctcgctctgtcgcccaggctggagtgcagtggcgggatctcggctcactgcaagctccgcctcccgggttcacgccattctcctgcctcagcctcccaagtagctgggactacaggcgcccgccactacgcccggctaattttttgtatttttagtagagacggggtttcaccgttttagccgggatggtctcgatctcctgac

SEQ ID NO: 717704 - DNA, 515 bp, Homo sapiens
  misc_feature 2, 3, 4, 5, 6, 7, 8, 9, 10, 11, 12, 13, 14, 15, 16, 17, 18,19, 20, 21, 22, 23, 24, 25, 26, 27, 28, 29, 30, 31, 32,33, 34, 35, 36, 37, 38, 39, 40, 41, 42, 43, 44, 45, 46,47, 48, 49, 50, 51, 52, 53, 54, 55, 56, 57, 58, 59, 60,61: n = A,T,C or G
  misc_feature 62, 63, 64, 65, 66, 67, 68, 69, 70, 71, 72, 73, 74, 75, 76,77, 78, 79, 80, 81, 82, 83, 84, 85, 86, 87, 88, 89, 90,91, 92, 93, 94, 95, 96, 97, 98, 99, 100, 101: n = A,T,C or G
tnnnnnnnnnnnnnnnnnnnnnnnnnnnnnnnnnnnnnnnnnnnnnnnnnnnnnnnnnnnnnnnnnnnnnnnnnnnnnnnnnnnnnnnnnnnnnnnnnnnntgctgctggagccaccagcaatgctacagtaagataacccactgatgtttctctccttagtagcacctaaggccgaagctacatcgtgccaaagcctggctgagattaattggcctctttgtgcaaaagcaatcatgctgagctgaaggatgttaacactatgagtgtgttaatrtcctccatatggattgctgtcttgcgttctcaccagaaatgaggatattgctttgctctatgtagtatacggattgcaaagcaggcagggcccacaagttttacagggctattaattagccatatcataggttttacttgtttttctctcttctttgaattctatttccatgagtgcaacagacactcaaattacttccaaatcccgtaattatagtcatttctcctgattaacaaaca

SEQ ID NO: 717705 - DNA, 574 bp, Homo sapiens
gaggccttccaatttggaaaaatgttccttttttctccttaacagtttagatcagggtttgcaaacctaaatatctacagttgtcaagcaactattgtcaacaggctaaggtagtagaatgtaaaaagcaagagagaagctgggcgcagtgcttcacgcctgtaatcccagcattttgggaggccgaggcaggtggattgcctgagctcaggagtttgagaccacccagagcaacatggtgaaaccccgtcactactaaaagtacaaaataaaataaaataagataagataaaataaaataaccaggtgtgatggtgcgcacctgtagccccagctacttggaaggctgaggcaggagagttgcttgagccccagaggcaaaagttgcagtgagcygagactgtgccactgcactccagcttgggccacagagtgagactctgtctcataagaaaaaaaaaatgaagaaagaaagagagaaacagtgactgtcaaagaggatcatctgccgcatctagagagtcaatgactactcacctctagctaattacttgcattgggataaggtcccata

SEQ ID NO: 717706 - DNA, 1382 bp, Homo sapiens
caaaatagtttcaaataaaatcagctaatcttccttattttcccttgagtctgaagtttctaaggctattgtagggtactgttcattttatttagagtggagttggtcataaactggaatgtaggtcaattagcataaatcctttgctcaatatcctcttgtcacaatcaactagatgctttgtagtgaactgtttaggagcttgctttatttttcaagaatgtgttagctttacaaagtacaaaatttgaattggtatagtgtcactaggggtttcaccatacttttcttttgaagagatgtatttaactaaggttccacttaacaaaactcttcatgtaaatctccttttattattaatacttttatctggcaaagttagagctgtctctgtgattacaaaaaatcgaggcctttctcccagacatttgaaaaacaaagaaaaattagggtaaatgagatgggttgaaactccaggacagagttagtttcaacctagaaattttagaggccttaaaaaatattagctcattattgtgtttcagcttatttaagttgaggtcattctattttcaactgtttgacaagaggtgaggagacaagggtaaatactgcaaagctgtgtactcaatgctcactatccatgctatagcaagcaaacaaagccacatcccaatgagaaatgaagccttgacctgtatgaacgacataaccagaataatggaataatgcgttaattctagaaagcagtatgataaaacaaattctttttcagtttaagatattcgctatttattttaagatatataaggtatgcttaaataatatacagtaataacaaaataaatatctcttgctagttgtataaactttcttattgtagaacctctaattttattgcctagctaaaataccttaaagcatatattaaatactgattcctgggtcccaactcccaagactcagattcagaaggcttgggcttgagagctggacctgcaattttaacatgtaatccgactgatgatgaggcaggaagtctggggcatgcaacgagaaaaactgactccagaatgcctttctttcaagctgacttagccactcattacagctgttattccttcacttgtatcgctaatcgctaatatacaggcgtaccctgtcttgttgcacttcactgtattgtgcttcgtagatactgtgctttttttttttttttttttttttacaaattgaaaggatcaagcagcaatttccacttccaagtcttattatttaaraactatatctcacaaggcaatagctgccatacatagtgattcctctaatggatctggacaaagtcaattgaaaaccttctggaaagaatttaccattctaga

SEQ ID NO: 717707 - DNA, 1382 bp, Homo sapiens
caaaatagtttcaaataaaatcagctaatcttccttattttcccttgagtctgaagtttctaaggctattgtagggtactgttcattttatttagagtggagttggtcataaactggaatgtaggtcaattagcataaatcctttgctcaatatcctcttgtcacaatcaactagatgctttgtagtgaactgtttaggagcttgctttatttttcaagaatgtgttagctttacaaagtacaaaatttgaattggtatagtgtcactaggggtttcaccatacttttcttttgaagagatgtatttaactaaggttccacttaacaaaactcttcatgtaaatctccttttattattaatacttttatctggcaaagttagagctgtctctgtgattacaaaaaatcgaggcctttctcccagacatttgaaaaacaaagaaaaattagggtaaatgagatgggttgaaactccaggacagagttagtttcaacctagaaattttagaggccttaaaaaatattagctcattattgtgtttcagcttatttaagttgaggtcattctattttcaactgtttgacaagaggtgaggagacaagggtaaatactgcaaagctgtgtactcaatgctcactatccatgctatagcaagcaaacaaagccacatcccaatgagaaatgaagccttgacctgtatgaacgacataaccagaataatggaataatgcgttaattctagaaagcagtatgataaaacaaattctttttcagtttaagatattcgctatttattttaagatatataaggtatgcttaaataatatacagtaataacaaaataaatatctcttgctagttgtataaactttcttattgtagaacctctaattttattgcctagctaaaataccttaaagcatatattaaatactgattcctgggtcccaactcccaagactcagattcagaaggcttgggcttgagagctggacctgcaattttaacatgtaatccgactgatgatgaggcaggaagtctggggcatgcaacgagaaaaactgactccagaatgcctttctttcaagctgacttagccactcattacagctgttattccttcacttgtatcgctaatcgctaatatacaggcgtaccctgtcttgttgcacttcactgtattgtgcttcgtagatactgtgctttttttttttttttttttttttacaaattgaaaggatcaagcagcaatttccacttccaagtcttattatttaaaaactatatytcacaaggcaatagctgccatacatagtgattcctctaatggatctggacaaagtcaattgaaaaccttctggaaagaatttaccattctaga

SEQ ID NO: 717708 - DNA, 548 bp, Homo sapiens
cacatggagaatattctccccagaataaacatcttgttattcattaaagacttcttccatcctcttacatttcagttccgtcacattttcttttaaatgaaattttattacttggtattggataaaaaagagtattacctgtaaattttatacaatttttcttaatttaatttctaaaatttatttaaaatgtcatgaaactttattgaaaatttttactaactttcagcaaaatcattaaaacctggaaaagaaaaatgcttctgctgttaaagctcctgctgcttcttttattttaaaaattcagacaccattttctctctatagtattttgttgaagagtggcttttagagtccagctaccttcattttaccttgattcacttctattggcttctagarcacagtgccttatgacccagaattcttcttccccttgattttgggcaaatggctttcttaatatataattattagatttttttattgaccacctaacgtttgatgaatgctataggcaaatttaacccaaactgatttaaaaaaaa

SEQ ID NO: 717709 - DNA, 666 bp, Homo sapiens
tcccctgtcttttggcagctctctcctttcttcccctctctgtgaccactagctgattttgtcagcctggattcctagcaatatcttacctgtaagtcttcccagtgtaagttctccctcactgaatcatagcctatgaaactctctttaggcactaacctggggcagttgtagggctcacattcttccctgtctcttaggaatcactgtttttcacatatgtatcgagaactaccatatcctatactttgtctattgaaagatttttcagaaaggatggtaaatccattctctgttaatcttttttttttcctggaaaaggaagtttcttctgatattagtgaaaatactagaatcatgtaattttgagtaaagcatcttgaaraggccaaatatttttaaagagcttaaatttggagagagaaaacccaagtattggagccatactgttttcaataatggctggactaatttacattcccaccaacagggttctcttttttgcacagctttgccagcatgctattttttgtctttttgataatagccattctaactggggtaagattctatctcttgtggttttgactgctggggtgaccagtgggaacgggatccccaaatggggggcaggagttggggggcacagtttgggccctggtgggg

SEQ ID NO: 717710 - DNA, 3810 bp, Homo sapiens
tttacttctcctagagtgcaaatcaaaatgacatctattactgtgctcacatttcagataatcaaggcctacaataatggaacaaatattgttaaatgtgcattattgcagcattcactttcatcttcatcaccatcattaaattagttgaaagcatgagcggggagcatgacattccactaagtgcttcctgccttttaggaaactataccactgtctccaacaccagagaagtaacagcaattaatctgagttaacaactccctccatcaacagccatctaatatgatttgacaaatatgcttatggaaattcttaggcactggaatagagttttgatgtgtatttatgtttccttacttataaaagggtaacaccccaagatacaaacagcaaaaataaagatcagagagctaagagtcatggcttgacaaatttgcactccattgctcacttgatagtgggcaggctggagtattaataccaaccccaacaccacccaccatgtttaaggaaatcactgatacttctccctatcagaaattgttttgtctttgctatgtgctacctcattgcttaatactgcttttctcctttcttcactcagtaaaaatctattcattctgtaagtactgacatctgggaaacaataagtaagttgaaagcacaaatgtattttacttattcttacactcccagtccttaagaggatagcacatacaacatggttgtgctgaatgtttattgaacaaataatcagaatcaggcaagcatagacttgaattttcgcttcaacttgactgactgtgtaagactgaacatttttgagccaaattttcctaatctgtaaaatcaagaaaataaaattcgtctcaaggccttataattttaagagatgtgtccgtaatgtgcttagcacagcctaaaaacctgactcactttccttccgcatggtgcctccttcttcatttcctttctcatgcacattctgttgttattggaattcctcttgagttttctttcttcctctttcaaattctcagaatcagagttagaccttcttcacactcaaacaaagagaaaatctccttttgatatatagtgtatagtgtccatcaactctgggtttattgattggtaaccctcattagtagaggtggatttcaagtgataaaaatcctgcaaaacacaatttatcagaaactctgattgcagagcacaaacctgtaacagtcacatgctttgatgctatgagtaataatttgcatactttatgcatcacgacactctaaataaaacaaacaaacaaaacattgatttgataaccaccctacagggaacctgaattatctgtcaattttccttatgataatttcccaaaaatattaccataaatataaggaacaagagagtatatggcaaagaaatgaagagaaaaaagggtagttggtggcaatctgttggggagttagttacttttaaaaggattatatttttcaagattttgttatatttgtggtgtttgtttttataaagttcaaatttgttgtatgttttctctttcaaaataagtattcatgttcatacttgattccttttaaagcgggttaaattgtacacatcttggcgcttgcctacaaaactagatccaacctcacttaaaacttttcttacaattagctgccttcttatttaaatagaaggtacacatgtacaagaatcacacattccctgtgcacttctgcatttcaatgcctacacactagtccaaacttcagatttccagagaaatgttttccatcttttaatgtgactatgagacatctcattttattatagttcatggtgactggctccctcaagctttacttcacatgaaatgtcaacattgaacataaatacatggaaagtacatctggtctggtgggatagtattgatgctggctttttggaaattgtgagttgggatgagtttgctgcagatatccaagcatctgccagttaattttgtgtggtatatctggaaaggtcccatgcacactgaggcataacttcaaatacgtttttttggctgtggattcctgggaaacaagatgagcagacagacaacactgcctagagtaattaggaacagagtgacttgctctacatcctcaggaaattgttgcaaactgggaaggcacatcccccaatttgtttttttcctctgaacatccctgtctattgagaggcaacagctggcagtgtaactggctgggctgcttgagtttgcactaatatcattaaagagtaaaatattaatatactcctgttaaaagaagttacacagaacttatccctgaaaagccatcattaatcttcataatgaccttccaaataagatagaaaaaatgaacacattttatagataggaaaatctggataactagggttttgttcaaggtcagaagtctaaaaaaatacacactgtatttctcataaattaagtttttgccatgattgcctcaatcctattctctgcctgctataagaaagtgttttctctgccaaaccgcatttctagcagaaataaatactttataaatccattccctttgaaacttgcattcaagtacagtcaatcttatttttagaacatttatgcattcttactttaaaaaatcatttaaagttatccttataaagatcatatttcttctttactgccaaaagatcacaaatgcctacagggcagaaaacttcctgttgaacaagggagattagatgagactttcaacaaaagattaatttgtctactgaaatacggttggtattgcttaagctgatgattttcttagsaaccattgcaatgaaagcaatgtgacttaatgtgtccagtttaatgagtaaacatgttggtactaccaaaatgtattagattccattttaaataatcatttacaagcaatatgaagcaagtgataatcaatggaaaattgcaacagaaatggagaatatgaagaattgaaagaatgtggctacgtttttaaaagtaaaattcgcaaataaaataatcagatcttcttcaaattgctgatagggcatagcttatacatctaattacaaagattgcatagaccatatcacataaacaaagaagcatttgtccttactgaagagggtattcaaaccacaaattgctctgtagtatgctccgaatacagataagcttgaaactgctttatttagtcttcatacacacacatcaaaatagaaaatggttgcatatttaaacattttagacccattcctattttagcaaattctagcttacaatatgattatgattacatagatttataaaacctcaaatatctccagttatcacttgggatttttcttcttccctgattttttttgggtgtgtgtgtgtgtgtgtacttaatcaggactcagataatcacatatggtctgaaatgcctttcctgctgcttgggctctcaatattatacatcattcaagtccttattaaaatactaccatgttcatgaaactgtcccactctctgattactgctcctaccaccattcccaataggactgattttccttccaaaataggttttggctggaagtccccattgcagtctttccaactttctactgaaaagctcacagataacctgaacatttgaatgcacagaaacaaaaacacttaaaaaatacccaaatgtgattttgaccaacaacttaccttcagaatctgagtagtattttgataaaatgttaagacccatgggcccaggttaaaagaaaaaatctaccaccgaat

SEQ ID NO: 717711 - DNA, 582 bp, Homo sapiens
gcaaaaattcctcaattccttcttatcatctgtaagacaaaatccaaaatccacaacttgacctggcctgcgcagccgcagcctcctgcaatgattacggtcttgccacatgactcttccagttttccctgcaggtcgggagccttcacgtggaggcatttcctctgctgagaatggttcaccccttccccttccatctataactggtaaatccccactcatgctttagatctcaaatgtaacttcatccaagaactctttgttaatcctccaattttcaccaggtctcctgtaattcaacttagtgattccctaaatgtctccttcagagcacctattatttcattacacaattagatgtgtatttagttgttaagcacctatctctgacaaaaacagagacacttctgagagcacagactgtctgttttattcactcctgtatcctcagcacctattacgtaaaagcaggtgggcacttttagattcccatgacatagacagctttatcaatcctcatccsacatacaggatgaaagtttctattgtcccatgaatctttgaaacaagtgactaatatta

SEQ ID NO: 717712 - DNA, 576 bp, Homo sapiens
caaatagaatgaaagaccagcagataagaggcagcctctctttttttttttgcgaccaagtctctgtcccccaggctggagtgcagtggcgcaatcctggctcacactgcaacctctgcctcctgggttcragcaattctcctgcctcagcctcccgagtatctgggattacaggcgagcgccaccatgcccagctaattttgtatatttagtagagatagggttcaaccatgttaaccaggctgatcttgaactcccgacctctggcgatacgcccaccttggcctcccaaagtgctggaattacaggcctgaggcaccgcacccagcagcaccctctcttcttgtaggtggttttaaagagcaactggaaaccaaccttacccagccatccctcagcagacctccttcctgtctgattagccaggattgggttacatgcacttccctgagccaatcactaaggaggggtgtggctctgccttgctggtataaatgtggaaggttatggaggcggagccacccgaacccaagggccatctgctggtgatgaggcaaggaggggcatggtggtggg

SEQ ID NO: 717713 - DNA, 639 bp, Homo sapiens
cttgaaatgggcatgccttttctttggtaaggctattagtacaggggttaagtcaatctaacaaatttaacgcaggagaggctagaagtgcattcatacagttggacttgatctcttgggcctctgcctttccctgtagcaacaatgagtctttacctagtccctgtaagttatagggtgctgcccttccccagcaatttaaaagtktggctatgtaggaaatatggttcagggtaagagggtgggctttgtgcctttctttctcacagtgaccagcccctcccccatgcctgcataaatgaggatggctctctggtctcttgttcttcccccagtctttcttgtgagggcttggcaaacatctatagaaaagagcctgcaactgggtacaaactcctcttgtgtcaggaggtccctgggattttcttcttctttaggctgcccatactcagcctaaagaaactcatgaaaatgttagttgatttatctttctcatttatatagcagcctcccctgcttcctatgttccatcacagaggagacacttcacatgttcgttctttcctcagagggacctctcccttctcagaattcaggctatttgcttgttctgtgacctcagctctctaatgggtctaa

SEQ ID NO: 717714 - DNA, 2199 bp, Homo sapiens
cccacccagatttacagttctgcaactctggcaatctgtcttttaacctgcccttcaggtgattgtgatccatgctcaaatttgagaactgctctgaataatcccactagaaaagcttgaatgccagatgcctgagctaatgctgcagaagaactgaaatggccagtcttcctggtctcagagctcacttccaggtggtaagtctgtgagtctaagattctacttgatttctcccgttgcttcttgcattcctgtatcacctttctgccagtagaaatcaaataacagtttacctttcagagtgcaagacagacctatgtagaaagccttccagcagcagtaccaactgggaactagttttagattcagaaaagtaagtgtttgcagtcatgtgcattcagtgagtgagtctcattactgaaaaaggagagttcatgttggctatgaagtccttcttgcagtcttgggtttttctggtcttaccccagtggaagcagtattgcctaatggcaggaacaggagctctgacttcatactgcctgctttcaatttgagtcccaacacttctctcttttttttttagacagggtcttgcgctgtcacccaggctggaggcaatggcatgatcatggctcactacagcctcaacatcccgggctcaagtgatcctcaaatctcagcctcccaagtagctgggaccacaggcacatgccaccacaactggttaattttttatttttttattttttgcaaagatgaggtctcactctgtttcctgggctggtcttgagctcctgagctcaagtgatccttctgccttggccccccaaagtgctgggattacaggcgtgagccacaatgcctggttgagtcccatcacttctgacttctgttaaattacttcttgtctcagaatctcagtttcctcatatgtaaattgggggaacacacagcacctgcttctttggagtcattgtgaggtttcaaaagagatagttcatataaacatgctcagcacagtggcttgcatggattcagcattcaatgaatgttatgcatcattagtccacttctcaggattctgcagctttcaaatgagggtgctgattttctttttttgtactaatgtgtgagaggtatgtaaatatgaaagaaaattaagtatttgaaaaattatatctgggaagtatgttatacatgcagcaattgtgcaatggtcaatgatgtcaaaaagaggaaagagttagatatcrtgacagtatctcaaaaagagaacagattagcacacctaatcccttttatagtgttctctaaacatacctctcgcctcctcacagtgctgaattctgaccctgttcttttggatcacttccaaagttcactgagctctaattaattggcttcccagattaggcaagtcttctattatatgctaataccacccccatatttctccttttgcagcacttattaccctcaaaacaatttgctcagttggtcctcacttggctcttagctctataagggccagaaccatgcctttgaattctgtcttcatggtttagctcagctcttagtgcaaatatcatagtcattccctggcaggtcatggcacaaatgggctttctgagtgagtaacttgtgtgctgagatactgatcacttagcccttcaggatctgggctcaggtagagattgcaagggtctcaggaccagtctctttccacctctggcagcttcatctgtttacaccagtatgaagtaaaattgtcttatgtgcgccattatgttaagaaagttggaaaacattgcaatcgttgggtgggtaaaagaacagctatatagatggatgaatagttggatgtcccaacttacgagaaattatgctcgtctattgtacaatgtaataaagtcaaagaactaggtgggtctatcacaggacagattcaatgacaaatagtctgaaacaaagctcagttgattgattgctaggcaagggagacccacattccttaggaaagatactttagtttctttaaatagaaaacaagagagttagatctagtctaagaaagaaactttattttaagtaaggtaaaaatctgagagttaatttctgattggattaaaaatagactggaaggtctctgttgggacaggctattactcagttttgtgtcattgacactgagaacatagt

SEQ ID NO: 717715 - DNA, 2199 bp, Homo sapiens
cccacccagatttacagttctgcaactctggcaatctgtcttttaacctgcccttcaggtgattgtgatccatgctcaaatttgagaactgctctgaataatcccactagaaaagcttgaatgccagatgcctgagctaatgctgcagaagaactgaaatggccagtcttcctggtctcagagctcacttccaggtggtaagtctgtgagtctaagattctacttgatttctcccgttgcttcttgcattcctgtatcacctttctgccagtagaaatcaaataacagtttacctttcagagtgcaagacagacctatgtagaaagccttccagcagcagtaccaactgggaactagttttagattcagaaaagtaagtgtttgcagtcatgtgcattcagtgagtgagtctcattactgaaaaaggagagttcatgttggctatgaagtccttcttgcagtcttgggtttttctggtcttaccccagtggaagcagtattgcctaatggcaggaacaggagctctgacttcatactgcctgctttcaatttgagtcccaacacttctctcttttttttttagacagggtcttgcgctgtcacccaggctggaggcaatggcatgatcatggctcactacagcctcaacatcccgggctcaagtgatcctcaaatctcagcctcccaagtagctgggaccacaggcacatgccaccacaactggttaattttttatttttttattttttgcaaagatgaggtctcactctgtttcctgggctggtcttgagctcctgagctcaagtgatccttctgccttggccccccaaagtgctgggattacaggcgtgagccacaatgcctggttgagtcccatcacttctgacttctgttaaattacttcttgtctcagaatctcagtttcctcatatgtaaattgggggaacacacagcacctgcttctttggagtcattgtgaggtttcaaaagagatagttcatataaacatgctcagcacagtggcttgcatggattcagcattcaatgaatgttatgcatcattagtccacttctcaggattctgcagctttcaaatgagggtgctgattttctttttttgtactaatgtgtgagaggtatgtaaatatgaaagaaaattaagtatttgaaaaattatatctgggaagtatgttatacatgcagcaattgtgcaatggtcaatgatgtcaaaaagaggaaagagttagatatcatgacagtatctcaaaaagagaacagattagcacrcctaatcccttttatagtgttctctaaacatacctctcgcctcctcacagtgctgaattctgaccctgttcttttggatcacttccaaagttcactgagctctaattaattggcttcccagattaggcaagtcttctattatatgctaataccacccccatatttctccttttgcagcacttattaccctcaaaacaatttgctcagttggtcctcacttggctcttagctctataagggccagaaccatgcctttgaattctgtcttcatggtttagctcagctcttagtgcaaatatcatagtcattccctggcaggtcatggcacaaatgggctttctgagtgagtaacttgtgtgctgagatactgatcacttagcccttcaggatctgggctcaggtagagattgcaagggtctcaggaccagtctctttccacctctggcagcttcatctgtttacaccagtatgaagtaaaattgtcttatgtgcgccattatgttaagaaagttggaaaacattgcaatcgttgggtgggtaaaagaacagctatatagatggatgaatagttggatgtcccaacttacgagaaattatgctcgtctattgtacaatgtaataaagtcaaagaactaggtgggtctatcacaggacagattcaatgacaaatagtctgaaacaaagctcagttgattgattgctaggcaagggagacccacattccttaggaaagatactttagtttctttaaatagaaaacaagagagttagatctagtctaagaaagaaactttattttaagtaaggtaaaaatctgagagttaatttctgattggattaaaaatagactggaaggtctctgttgggacaggctattactcagttttgtgtcattgacactgagaacatagt

SEQ ID NO: 717716 - DNA, 2199 bp, Homo sapiens
cccacccagatttacagttctgcaactctggcaatctgtcttttaacctgcccttcaggtgattgtgatccatgctcaaatttgagaactgctctgaataatcccactagaaaagcttgaatgccagatgcctgagctaatgctgcagaagaactgaaatggccagtcttcctggtctcagagctcacttccaggtggtaagtctgtgagtctaagattctacttgatttctcccgttgcttcttgcattcctgtatcacctttctgccagtagaaatcaaataacagtttacctttcagagtgcaagacagacctatgtagaaagccttccagcagcagtaccaactgggaactagttttagattcagaaaagtaagtgtttgcagtcatgtgcattcagtgagtgagtctcattactgaaaaaggagagttcatgttggctatgaagtccttcttgcagtcttgggtttttctggtcttaccccagtggaagcagtattgcctaatggcaggaacaggagctctgacttcatactgcctgctttcaatttgagtcccaacacttctctcttttttttttagacagggtcttgcgctgtcacccaggctggaggcaatggcatgatcatggctcactacagcctcaacatcccgggctcaagtgatcctcaaatctcagcctcccaagtagctgggaccacaggcacatgccaccacaactggttaattttttatttttttattttttgcaaagatgaggtctcactctgtttcctgggctggtcttgagctcctgagctcaagtgatccttctgccttggccccccaaagtgctgggattacaggcgtgagccacaatgcctggttgagtcccatcacttctgacttctgttaaattacttcttgtctcagaatctcagtttcctcatatgtaaattgggggaacacacagcacctgcttctttggagtcattgtgaggtttcaaaagagatagttcatataaacatgctcagcacagtggcttgcatggattcagcattcaatgaatgttatgcatcattagtccacttctcaggattctgcagctttcaaatgagggtgctgattttctttttttgtactaatgtgtgagaggtatgtaaatatgaaagaaaattaagtatttgaaaaattatatctgggaagtatgttatacatgcagcaattgtgcaatggtcaatgatgtcaaaaagaggaaagagttagatatcatgacagtatctcaaaaagagaacagattagcacacctaatcccttttatagtgttctctaaacatacctctcgcctcctcacagtgctgaattctgaccctgttcttttggatcacttccaaagttcactgagctctaattaattggcttcccagattaggcaagtcttctattatatgctaataccacccccatatttctccttttgcagcacttattaccctcaaaacaatttgctcagttggtcctcacttggctcttagctctataagggccagaaccatgcctttgaattctgtcttcatggtttagctcagctcttagtgcaaatatcatagtcattccctggcaggtcatggcacaaatgggcttyctgagtgagtaacttgtgtgctgagatactgatcacttagcccttcaggatctgggctcaggtagagattgcaagggtctcaggaccagtctctttccacctctggcagcttcatctgtttacaccagtatgaagtaaaattgtcttatgtgcgccattatgttaagaaagttggaaaacattgcaatcgttgggtgggtaaaagaacagctatatagatggatgaatagttggatgtcccaacttacgagaaattatgctcgtctattgtacaatgtaataaagtcaaagaactaggtgggtctatcacaggacagattcaatgacaaatagtctgaaacaaagctcagttgattgattgctaggcaagggagacccacattccttaggaaagatactttagtttctttaaatagaaaacaagagagttagatctagtctaagaaagaaactttattttaagtaaggtaaaaatctgagagttaatttctgattggattaaaaatagactggaaggtctctgttgggacaggctattactcagttttgtgtcattgacactgagaacatagt

SEQ ID NO: 717717 - DNA, 618 bp, Homo sapiens
gacagagtgataccccatctcaaaaaaaataaaaaagtatttttgttttttctatctttctcacctatccccatttttttgttgtttttatttttgttgttgttgttattgttgtttttgagatgaagactcgctctgtcatccaggctggagtgcaatggcatgatcccggctcactgcaatcttcatcttccaggttcaagtgattgtcccacctcagcctctcgaggagcggggattacagttgcaagccaccacgctggctaatttttgtattcttagtaaagacagsgttccaccatgttggccaggctggtcctaaactcttgacctcaagcgatccaccagcctcagcttcccagagtgctgagattacaggcatgagccacagtgcccagcttgtttttgtttttttattcccgtttctatatctttggtgcttagcatagtaaacactctagatgcctttgttcaattgaattaaaatcatataaactgcaaggattttaaacccctgtttggcttcaaggccaatgatctgtctatactagataattcctaaaccagtgtcatttctgattattcaaattcagtataatctatgtaagagtttgttca

SEQ ID NO: 717718 - DNA, 643 bp, Homo sapiens
gcccattaactatccatgggtatgaaaactagataaccaaatccaaaaggatggcatgtataaggtttctgggcaagggtttgtccttaacaaaaggcatgaacctcatgactttctgactttggccaggggctatttcccagttcttgctgtccagtctactccctgcccccttttacatactttaaagttttttttttcattgaagtagaatcccaaaacagaaaattgtataaatccagtgtgcagtttactggatcatcacaaagtaaacacactcatgtaacatccagcatgttctcactaacacttagtataaaatcaatctttttaagtttgccattttgattagtgtccagtggtatctaraaatttgaagtttcattatttctaatgtcattgaacacttttcccacacactttgtaaccatttggaagtaagtgttcaagtctcttgcctattttgctgttagtctatctttttttaattgatatgaccaattattttttcagattttgcagatctaaattttgttcacatttaattcttgtgttgatttttagtcaacaacaaatactaccctaggtggctttagtcattcgacattttattttgagattatttctaccaagaacctcatta

SEQ ID NO: 717719 - DNA, 1391 bp, Homo sapiens
ctggggtagggtgtgaggaacctggaatctaaggtgggctagggaagcccccagtaagggaataatcacctttacctatttaaccattttggccagggcctgcctgcaactcaggcctgcggttgatcaaccagccccatcctccctttatcccctgcccccatcccatcctgggctcagtgactgcacggtcccattttaggccctggtctgaggcctcaggtcaagtggatgagacctggtcctcatgcatgccagccccctggcaagataatcataaaccaagagaataaatgatttgatgaaatatattctagcttcctactttgacaaacatgcctcagtaaaatatacagtatgtacaaaactacagtttctacgtgactgaaattcagccaaatatcaaagatgactggattaaattattcttacatgtgtcttggtgtttggttgatgggccagtgatgttggggtgagtaatgaaataaatacacacataattcagaaactattacatattcatccatagattttagttttcatgtttttattttagcaaaatcataaattatattgttatataatcaagatattcatgtcatatgtgttctattgatggtaatgatctggagtttagaaaaatgtgattgtattcaaaatgtccaaagttttaacatatttttatcataaagtgtagattaaactaaaggtaaactatatgagtgtacatttttcatgttttaaaaaatgaattttctttgattgtattaaaatgtgcctattaaaaatgagtgaaaacttttatgattaatggatgtgaaatttttaatcaaaattatttaaataaaactaagtaaaattctagtgtgtgagatccttgtcattgccagtgtgaagaagcagcatcacttttcatgcacttatgtctataaacatgtctatgtmtagtggttctcaaagggtggttttgcttcccaggagcatcgtgtgggtacatctttggttgacacaacttgcttctggtatatagtggatggggatgagcgatgctgctaaacattctaggtcagccccacaacaaaaaagtaaccagtctaaaatgtcaatagtgctaaggttgagaaaccccggctacacacacacacacacacacacacacacacacacacacacgggttttataaactgtttaatattgcaagaggttccttaacaaagaagtaaccagtctaaaatgtcaatagtgctaaggttgagaaaccccggctacacacacacacacacacacacacacacacacacacgggttttataaactgtttaatattgcaaaaggttccttaactgctacagaaattgttgtgaattctacactagtttatgggtaactc

SEQ ID NO: 717720 - DNA, 1391 bp, Homo sapiens
ctggggtagggtgtgaggaacctggaatctaaggtgggctagggaagcccccagtaagggaataatcacctttacctatttaaccattttggccagggcctgcctgcaactcaggcctgcggttgatcaaccagccccatcctccctttatcccctgcccccatcccatcctgggctcagtgactgcacggtcccattttaggccctggtctgaggcctcaggtcaagtggatgagacctggtcctcatgcatgccagccccctggcaagataatcataaaccaagagaataaatgatttgatgaaatatattctagcttcctactttgacaaacatgcctcagtaaaatatacagtatgtacaaaactacagtttctacgtgactgaaattcagccaaatatcaaagatgactggattaaattattcttacatgtgtcttggtgtttggttgatgggccagtgatgttggggtgagtaatgaaataaatacacacataattcagaaactattacatattcatccatagattttagttttcatgtttttattttagcaaaatcataaattatattgttatataatcaagatattcatgtcatatgtgttctattgatggtaatgatctggagtttagaaaaatgtgattgtattcaaaatgtccaaagttttaacatatttttatcataaagtgtagattaaactaaaggtaaactatatgagtgtacatttttcatgttttaaaaaatgaattttctttgattgtattaaaatgtgcctattaaaaatgagtgaaaacttttatgattaatggatgtgaaatttttaatcaaaattatttaaataaaactaagtaaaattctagtgtgtgagatccttgtcattgccagtgtgaagaagcagcatcacttttcatgcacttatgtctataaacatgtctatgtatagtggttctcaaagggtggttttgcttcccaggagcatcgtgtgggtacatctttggttgacacaacttgcttctggtatmtagtggatggggatgagcgatgctgctaaacattctaggtcagccccacaacaaaaaagtaaccagtctaaaatgtcaatagtgctaaggttgagaaaccccggctacacacacacacacacacacacacacacacacacacacacgggttttataaactgtttaatattgcaagaggttccttaacaaagaagtaaccagtctaaaatgtcaatagtgctaaggttgagaaaccccggctacacacacacacacacacacacacacacacacacacgggttttataaactgtttaatattgcaaaaggttccttaactgctacagaaattgttgtgaattctacactagtttatgggtaactc

SEQ ID NO: 717721 - DNA, 1391 bp, Homo sapiens
ctggggtagggtgtgaggaacctggaatctaaggtgggctagggaagcccccagtaagggaataatcacctttacctatttaaccattttggccagggcctgcctgcaactcaggcctgcggttgatcaaccagccccatcctccctttatcccctgcccccatcccatcctgggctcagtgactgcacggtcccattttaggccctggtctgaggcctcaggtcaagtggatgagacctggtcctcatgcatgccagccccctggcaagataatcataaaccaagagaataaatgatttgatgaaatatattctagcttcctactttgacaaacatgcctcagtaaaatatacagtatgtacaaaactacagtttctacgtgactgaaattcagccaaatatcaaagatgactggattaaattattcttacatgtgtcttggtgtttggttgatgggccagtgatgttggggtgagtaatgaaataaatacacacataattcagaaactattacatattcatccatagattttagttttcatgtttttattttagcaaaatcataaattatattgttatataatcaagatattcatgtcatatgtgttctattgatggtaatgatctggagtttagaaaaatgtgattgtattcaaaatgtccaaagttttaacatatttttatcataaagtgtagattaaactaaaggtaaactatatgagtgtacatttttcatgttttaaaaaatgaattttctttgattgtattaaaatgtgcctattaaaaatgagtgaaaacttttatgattaatggatgtgaaatttttaatcaaaattatttaaataaaactaagtaaaattctagtgtgtgagatccttgtcattgccagtgtgaagaagcagcatcacttttcatgcacttatgtctataaacatgtctatgtatagtggttctcaaagggtggttttgcttcccaggagcatcgtgtgggtacatctttggttgacacaacttgcttctggtatatagtggatggggatgagcgatgctgctaaacattctaggtcagccccacaacaaaaaagtaaccagtctaaaatgtcaatagtgctaaggttgagaaaccccggctacacacacacacacacacacacacacacacacacacacacgggttttataaactgtttaatattgcaagaggttccttaacaaagaagtaaccagtctaaaatgtcaatagtgctaaggttgagaaaccccrgctacacacacacacacacacacacacacacacacacacgggttttataaactgtttaatattgcaaaaggttccttaactgctacagaaattgttgtgaattctacactagtttatgggtaactc

SEQ ID NO: 717722 - DNA, 622 bp, Homo sapiens
attctgctaaagcgcatcacccactcagttgtactgtttgtcagctacaccctgaaatacttcctccaacttcccaacttgcccagagaatatctgatctgtgtaactcagaagttacacagatgaggtaatgtggaagtgctctaaaaattcatgtgggtaacatgctgggattttttgtctgtttctgattgcagtacaacatatacatagtaaggagcataaagattaaataaattaataaatttttactgtgtacatgcccatgtaaacaccacccaaataaatacacagaacttttctattaccccagcaggctccctcacgccccttcccagtcaatatagactcctccccagataattacagcactggcttctatcactacaattagttatacctgtccttgaaattcacataaatttgaatcatacaagatgcgctcttgtgtttgtggtttctcttgataactataatgtstgtgatagttatccattatgttttgtgtagcaacatgtgttaattactagtgttgtgtagtatcctattgtatggatataccacaatttatatatttttcttggcaaacagtggactgcttttaatttgaggccattataaa

SEQ ID NO: 717723 - DNA, 591 bp, Homo sapiens
tgtcccaagatcaaggttattcttggcagtatgtcctgattacgactgaacagctyggatgagtaagagctcacttttttattactatttcaagcatttttgcatgacctgaaaacaataatcaaaggataactccagataaataagcaaaatgtgtccctcatagagtttaacatagagttatactatatcccagcaattccactcctaggtatatgcccaagagaactaaaaatgttatgtccacaggccaggcacagtagctcatgcctgtaatcccagcactttgggaggccgaagtgggtggatcacgaggtcaggagatggaccccatcctggctaacatggtgaaaccccgtctctactaaaaatacaaaaaattagccgggcttggtggcgggcgcccgtagtcccagctactcgggaggatgaggcaggagaatggcgtgaacccaggaggcggagcttgcagtgagccgaaatcgcgccactgccctgtagcctgggcgatagagtgagactccatctcaaaaaaaaaaaatgttatgtccacatagatatttgtacacaaatgttcatgatagccaaaaa

SEQ ID NO: 717724 - DNA, 591 bp, Homo sapiens
tgtcccaagatcaaggttattcttggcagtatgtcctgattacgactgaacagcttggatgagtaagagctcacttttttattactatttcaagcatttttgcatgacctgaaaacaataatcaaaggataactccagataaataagcaaaatgtgtccctcatagagtttaacatagagttatactatatcccagcaattccactcctaggtatatgcccaagagaactaaaaatgttatgtccacaggccaggcacagtagytcatgcctgtaatcccagcactttgggaggccgaagtgggtggatcacgaggtcaggagatggaccccatcctggctaacatggtgaaaccccgtctctactaaaaatacaaaaaattagccgggcttggtggcgggcgcccgtagtcccagctactcgggaggatgaggcaggagaatggcgtgaacccaggaggcggagcttgcagtgagccgaaatcgcgccactgccctgtagcctgggcgatagagtgagactccatctcaaaaaaaaaaaatgttatgtccacatagatatttgtacacaaatgttcatgatagccaaaaa

SEQ ID NO: 717725 - DNA, 654 bp, Homo sapiens
tagagtgcaaaattgcagcctctttaggttaagtttcacttaatacaggtgtttctattaaaggacatggttctcaggggtgcatgtcatcaacatgattgaatacaaatttctgaaaaaaaaaaaaaacacagagatagaataatagctatccatctgaaaaagtcccatggcaaatcaggtctcctgacttcaaagggcttgagaaggaatcaaaccaggtcaaggacttgaaaatgtcttgaaaaatataaggcaatacacaactgatgattagtatgcttttagatttattatcttcattcaaagacttaccatacaaaaagcctgcattgaatgctaaatttcttttactctaagacctacagcgatcacttgatgagtacgtctctaaaacaaaatcaatgcaatgttaagccataagtttatctgacaaaggtaaatatcacagtacagagttccaggtttttagcatccttacccaaagcaataaataaacagactcctcccaaagtaaagatggaaatataattattcagtctcttcwtgttagatttgcccagaaattgaaatattgttagcaaacacagatttaaattttgtgctccaatgaattggtagatctcttagtttattgtattgatttctctacat

SEQ ID NO: 717726 - DNA, 1075 bp, Homo sapiens
tgttatatacatgcaataaaatattattcaaccttgaaaaaggggaaatcctgataagtgctatgatatggatgaatctggaggacattgtgctaagtgcaataagccagtcactaaaagacaaatactgtatgattccacttacatgagttatctagatttgtcaaccctcatggacagaaagtagaatggtagttgccagaagctggggggagggagaatggggagttgttatttaatgggtatagaatttcagttttacaagacgaaaaagagttctgcacatggatggtggcaattgtagcccacaatgtaaatgtacttattgtcactggactgtacacctaaaaatagccaagatagtaaattttagattatgtgtattctaccacaataaaagaaattggaagaaaatatcagtggtaatccttcccaactctatagatacccctgaccctgctaatcccataggtctcaatgcacgattggttttctttataatcaaacttggctggtttctgtttattaaaaagatagttttaaaggattgtctgggtttcaggagtgtgtgtgtgcatcagtacacccgtgtgttatgggttgggttcttgggctgcagtgctgagatggactctggagtacaagatgtttattaggcatcaacacctgtgaaaggaaggggcagaaacaggagtgggcaaggtagaagctggactttgaggtaggccctccaaagcttcacccaagccagtggggagccctgggttcattattgcctatctggattgttccgtgatgaatggaaacagcaacatcttgtcacacctgcctcactctgtaggaaatgaaagctgcccaagaaatgtatggtctttagggaagcagctcactggagctgaggcccattctcaagtagctaatggctgaacagtgcttgctaatcactatccaccttacagttgggaggccaagtccctccttgaagggcaacctggrtggtacatatctgtgcctaccacaatatgggtgtagacttcagccccaccccacacacatacctagatctagtttagca

SEQ ID NO: 717727 - DNA, 639 bp, Homo sapiens
tataaccttatagttggaaaaacctaaagactccaccaaaacactattggaactgataaacaaatgcagtaaaggatacaacaccaacaaataaaaatcagtagcatttctgtgtgccaacagcaaamaatctgaaaaaaaatcagactcttactaggtgtttggagatctaaattaggatcttcttttctggacaagacgatttaagaaatccttttgatggcaataaaacagaagttaataaacactggagatgtgccttttactcctgttgtataccatgccagatacgagctacatttcttctggttgcttgtttgtgaatgtctaccctcattcaaatagtttctgagccctagaacaggtaggaaacattgattttgtgatttggaaagcgggtgaagggttttatcccaaatcttgacctttatatgtatgacaggtgactgttctgagatcaggagagatcttgaaatattttttaatttcacttatggcaaaaattaaagacctatttattaacctaattatgatctcctttaatcttatttgaaatgctgataaaaacttttcttctaatctctcatatataactatatgtatatacccagtaatgtttgatttgttctatcacccttc

SEQ ID NO: 717728 - DNA, 639 bp, Homo sapiens
tataaccttatagttggaaaaacctaaagactccaccaaaacactattggaactgataaacaaatgcagtaaaggatacaacaccaacaaataaaaatcagtagcatttctgtgtgccaacagcaaaaaatctgaaaaaaaatcagactcttactaggtgtttggrgatctaaattaggatcttcttttctggacaagacgatttaagaaatccttttgatggcaataaaacagaagttaataaacactggagatgtgccttttactcctgttgtataccatgccagatacgagctacatttcttctggttgcttgtttgtgaatgtctaccctcattcaaatagtttctgagccctagaacaggtaggaaacattgattttgtgatttggaaagcgggtgaagggttttatcccaaatcttgacctttatatgtatgacaggtgactgttctgagatcaggagagatcttgaaatattttttaatttcacttatggcaaaaattaaagacctatttattaacctaattatgatctcctttaatcttatttgaaatgctgataaaaacttttcttctaatctctcatatataactatatgtatatacccagtaatgtttgatttgttctatcacccttc

SEQ ID NO: 717729 - DNA, 2977 bp, Homo sapiens
  misc_feature 2030, 2031, 2032, 2033, 2034, 2035, 2036, 2037, 2038, 2039,2040, 2041, 2042, 2043, 2044, 2045, 2046, 2047, 2048, 2049,2050, 2051, 2052, 2053, 2054, 2055, 2056, 2057, 2058, 2059,2060, 2061, 2062, 2063, 2064, 2065, 2066, 2067, 2068: n = A,T,C or G
  misc_feature 2069, 2070, 2071, 2072, 2073, 2074, 2075, 2076, 2077, 2078,2079, 2080, 2081, 2082, 2083, 2084, 2085, 2086, 2087, 2088,2089, 2090, 2091, 2092, 2093, 2094, 2095, 2096, 2097, 2098,2099, 2100, 2101, 2102, 2103, 2104, 2105, 2106, 2107: n = A,T,C or G
  misc_feature 2108, 2109, 2110, 2111, 2112, 2113, 2114, 2115, 2116, 2117,2118, 2119, 2120, 2121, 2122, 2123, 2124, 2125, 2126, 2127,2128, 2129: n = A,T,C or G
tatataatatacaatatgtaattatatgttaatatcatatataattatataatgtatattgtagattatatgcaatataatttatagactgtattaatattgtaatatattcaatatataaataattgtgtatatattctataatattatagactatacaattttcaaatatatatttatttgaatgcctaccatgtagaaagtcctgtgctagatgccaaagggatttcaaaccgtatacattgacctctgcctgcaaaaacttctagtcttatcaggggagtgaagactgaggcccccaagggatgagctggctcaccaggcaagacaatggccgtctgaagggagatgtaagtaagagatgctcttacaagtctagagatgagggagatcactttggtggaatgctaggttataaagagatgtttataaactttaggatatgagttcatttctagcttgctatcatctatgtcttttccttccattagctcgtagctccttccagagctggaaccctgccctatgctttttctcttatctccgtagagtaccaaatatcagccatacacaagtgcttagcataacttaaatagaaaactataaggagttgactttttgaaatggagatttcctctttcataaagctcatctgttcagataagagcccatttccggggatggttggagaccacgagtctgggacacaactgggaccctgttctcacctaggttttctccctctggctgaaagctgacagacatttgtgaggcctcaagctatcagggcagtcttggggattatctggtatcttattcggctctatgtatttccaacaaaaaaaatgggagggaggaaaatgaygttccaaatcaaagtaagcccctttgatagtgttttgatgtttcagctgagaattatactggggagaactgtatttttctggggttgtcaaggctccccagctaacctccacagttgccgttttaagggacgaggagttttacctaacccatggggaaggtccctggaactaaagcagtcaccatgttttctgagggtgaaccaggtacaagattctgtgctagcagggtggtatagagaaaaggacatagaactaggagtcaggaaccctcaggttttaaacatttatttaaaaaaatttttttttgagagacagggtctagctctgttgtccagactggagtgcagtggcatgatcataacttactgtagcctcaaactcctgggttcaagagattctcctgtctcagcctcccaagtagctggaactacaggtatgcatcagcatgcccgactaaatttttttctttctctttctttctttcttttttttttttttttttttttgggaagagacaggggttatgtcttgctatgttgcccaggctggtctccaactcttggcctcaagcaatccttccaccttggcctcccaaaaccctgagattacaggcatgagccatcccgcctggccttgttttaaatgagatgtttcaactaggtggcctctgaagtttcttctagtttaacaattttgttccataggagaaacaagtatttaactattcactcaattcagaccctgcagagttgagacaatgtgctcaggcttgaagggagaagagccctgggaactttcgcattagaataagctctagttttcacataggtttcacggagggaaatcctgagctccaggaggttaccactgcactgaggtagaccatgcaccacgcactcatcagtgacatgtcctgtagttcattccatgcaaaaatctgcaaagaggcctgtgaacagcagaagagcgtggaaaattctcattaagctctatggtgccaaggaaggaggaggccctagctggggaggtaggcgagcccgcaggaacgaaggctgttcccggtttcacagctgctctgcaccttggccactccaaactcctcactttactgtcaaggaaacgagatatgtgcagaatctccaatttaggctgaagtcgagttannnnnnnnnnnnnnnnnnnnnnnnnnnnnnnnnnnnnnnnnnnnnnnnnnnnnnnnnnnnnnnnnnnnnnnnnnnnnnnnnnnnnnnnnnnnnnnnnnnnaagtgttattttcccatagttctacaatggttcataaatgatctctttctttaaactgccaattctctttctatgtctaaggactttacatattcagtgctcttcctacagaggggagtgaatttgaatatttggggtgagctacttaacatcagcatgcttcactgttttcatgtataaaacataatgatgatatagtttagaaattttttattgtttttcaggtaatgggagttgagactgagtcccagatggatttttattcagatcctccaggccttaatgaaaaaagaatcagaagctttaggttattgtgcattttacttctctagatttaagctccaatgggctatggagaacaggaaggcagctacaactacaagcagccgtaccagggagcttcatcttcatgtcggagggttttgttttttttttttgagatggagtctctgttgcccaaagtggagtgcagtggctcaatctctactcactgcaacctctgcctctcaggttcaagtgattctcataccttagcctcccgagtagctgggactacaggtgtgcaccaccatgcccagctaatttttgtatttttagtagagacagggtgtcaccatgttagccaggctggtctaggactcctgacctcaggtgatccacccgcctcagcctcccaaagtgctgggattacgggcatgagccaccatgcccagcccatgtctgagagttttatctttatatttcttaggacaacctaatgttaactgcaacagtgatattttatttagggttcctctgccctccttagggtcaatctctgtagcacccataccgtgtttaggatacat

SEQ ID NO: 717730 - DNA, 2095 bp, Homo sapiens
ctgggattcactcgtctattttccgttctgctagtctctcttctgctctattttgttctcttgtattcatttaaaaatactggtatcaattcatcgaatggatttcataacccaacaatgggccacgacccacggcttgatcagccttctgtaagccatgctgcagatgttgggatgttttctaaaacaggtgtgagtgtggagatcctccttgtgataaattgacttactaaggtgatgaactggacaaaaagctgagctattgtctctgtggaatttatgactttcccgcttgttgaataccagccatgcttgtcagcggagatcctgctcggagggcattccttgccgcagatgggtctatccattcatctgttaatatgcatttggaaggagtcccgctgaattcaaagacgaccagtgaggcccaacaatgaaagcttagcttctgaggcccttcacagcagcttgctttctgctcactttttttgtaaggattactcttcctaagcattattcctatggggaccagatgttccttttgcctgcctctttatataaattgggttcaagtcttcttgtgattagaaatgagctccttcaagtcttggtattcaattcatgcattctgagtgtagttcattgactcaggatgagagaaacagattctggcagtatttacagagtttattagtaagtttggatccctggtagaggtgaatgcttttgttttagatttttaggcacatttgtcctgagttttaatattttcagtgatagagacaataataaaacttcagggcaggatttctcagctttggaactactgacatattaggccagataattaattatttgttgtggcgaactgtcctgtatgttgtacggggttcagtagtatccccctagccttaacccactaggtgacagtagcagaccccagttgtgacaaccaaaaatattcccagacatgccaaatgtcccttgggggacaaaatcacygtagttgagaatgactgctttaaggttgtaccagttcaatgcgcattcaggttattttcttacatttcctaacgtgagttatctactaatgagagtgtatggcttgtgtcactggttttctttacatttgatagactgcttgcaaattaggtagttttatatgctgtaataatttggaggaattgatcaaaatgaaatgctaaaacctagaagattctaaatttatctatatataatatttaatttaataatagataatgaaagatctgaaatgacagttttaataagatctaatatcataatatacaaaatcagacttaaagctaaaatttaataatactttgtgttgcattattgaataatgagtaggtaatgacagacctgaaacagcagttattatgagatctgatatcataacatacaaaattagacttataactacaaattaataatagtactctgttgcatttcccagtattttagatggtttcacatatgtttccacacttgattctcagtctgtgaggtagtagtgcagatatttttatcctcaagttgcaaatgaggaaaaagaaattcagaaagcttgagcagtttgcccaaagtctcacatgctgtttgagagacagaagcagggcttaacccgagttcgctgacacaaaccagactagaatttacggagactcctctccttagtggttaaagctgtccccgaccctccccaaataaagaaaaccaagtagatattgctatggttaatgatggctagcccttttgttatctggctcttgtcactatctgaagtatttgcctgggactaggatgagggtcctagtttagtataagaatctctctggagcgacgtgaagcctgttggtatctcctggtagtagcacttgcgcttcctctcacggtcttggccagctgtagatctccttttttgcagtggctccgttctgtttgctgtccccgatccagcccccgccctcctcgcaggcctctgctcagcaccatctgcccacccggagggtttcctcctattccccttcagttgctccatctgggcagccagctcagggcctcagtccagaga

SEQ ID NO: 717731 - DNA, 898 bp, Homo sapiens
ggtagaggcatgccatgagtatttacaatgagagggatttctattctgtagaagtacagagttttgttttgttttgttttgttttttttttttgagacrgagtctcactctgttgccaggctggagtgcagtggctagatcttggctcactgcaacctcccgccccctgggttcaagtgattctcctgcctcagcctcctagaagtacagagttttaaaaactacaataatagaatcgtgacctcaaggatctgccgtgatattggtcaataaagtacttaaggttgtgtcggtttgttgtaaagtgtcattttggaatgttccaggagaggacagaatatttgagtttttatgacattggtgaaagagaaggcagggatgcacagcttaaagtctatgattgaattacggacactgggttactttctgtggtcgacatacatattgaggaaatgatctgtaatgttatttttcctagtttttgtgtgtgatagatgggaacgtgctgtggctgcaggaagccctgggacatgatttttggctgtggaactgcgatctggagccatttccttcacttggggagtcactgtttgggtgtgttttgtgttataagagatttgtctggatcactgttcattgcagaacgtaattcattaaagcaagaagcgtgggtgtctttctgggccacgtatattttctaagcttttgtcttactccttttgtggcacttgctgaaatcaaagtaccatactataacagcagtttagacattccagcgtcctctcacatctcacaaatattatcgtgttgctgtacaaaagttctccaaagaaaactaataaggacatgccgattacttgtgaagttcctgaggaatccattttagaaagcaagatta

SEQ ID NO: 717732 - DNA, 898 bp, Homo sapiens
ggtagaggcatgccatgagtatttacaatgagagggatttctattctgtagaagtacagagttttgttttgttttgttttgttttttttttttgagacggagtctcactctgttgccaggctggagtgcagtggctagatcttggctcactgcaacctcccgccccctgggttcaagtgattctcctgcctcagcctcctagaagtacagagttttaaaaactacaataatagaatcgtgacctcaaggatctgcygtgatattggtcaataaagtacttaaggttgtgtcggtttgttgtaaagtgtcattttggaatgttccaggagaggacagaatatttgagtttttatgacattggtgaaagagaaggcagggatgcacagcttaaagtctatgattgaattacggacactgggttactttctgtggtcgacatacatattgaggaaatgatctgtaatgttatttttcctagtttttgtgtgtgatagatgggaacgtgctgtggctgcaggaagccctgggacatgatttttggctgtggaactgcgatctggagccatttccttcacttggggagtcactgtttgggtgtgttttgtgttataagagatttgtctggatcactgttcattgcagaacgtaattcattaaagcaagaagcgtgggtgtctttctgggccacgtatattttctaagcttttgtcttactccttttgtggcacttgctgaaatcaaagtaccatactataacagcagtttagacattccagcgtcctctcacatctcacaaatattatcgtgttgctgtacaaaagttctccaaagaaaactaataaggacatgccgattacttgtgaagttcctgaggaatccattttagaaagcaagatta

SEQ ID NO: 717733 - DNA, 898 bp, Homo sapiens
ggtagaggcatgccatgagtatttacaatgagagggatttctattctgtagaagtacagagttttgttttgttttgttttgttttttttttttgagacggagtctcactctgttgccaggctggagtgcagtggctagatcttggctcactgcaacctcccgccccctgggttcaagtgattctcctgcctcagcctcctagaagtacagagttttaaaaactacaataatagaatcgtgacctcaaggatctgccgtgatattggtcaataaagtacttaaggttgtgtcggtttgttgtaaagtgtcattttggaatgttccaggagaggacagaatatttgagtttttatgacattggtgaaagagaaggcagggatgcacagcttaaagtctatgattgaattayggacactgggttactttctgtggtcgacatacatattgaggaaatgatctgtaatgttatttttcctagtttttgtgtgtgatagatgggaacgtgctgtggctgcaggaagccctgggacatgatttttggctgtggaactgcgatctggagccatttccttcacttggggagtcactgtttgggtgtgttttgtgttataagagatttgtctggatcactgttcattgcagaacgtaattcattaaagcaagaagcgtgggtgtctttctgggccacgtatattttctaagcttttgtcttactccttttgtggcacttgctgaaatcaaagtaccatactataacagcagtttagacattccagcgtcctctcacatctcacaaatattatcgtgttgctgtacaaaagttctccaaagaaaactaataaggacatgccgattacttgtgaagttcctgaggaatccattttagaaagcaagatta

SEQ ID NO: 717734 - DNA, 589 bp, Homo sapiens
gtccataaaaagagaatgcctttacatttgcaatgaaaaacagtaagccgggtaaataattattatgtcttcacgattgagagagtctgctctctactgaaaactcttaacatattttctacaggcagaaattgagaagttaaccatgtagtatactattcagaccctctttaaatattgttattcaaaaatataaagctaaacaactccattaattaatgtcctttaaaaaaacctgcttctgtgggacatttcctccaggcatcttgaggagttatttaggctcaccaaagagttcactgtctggagaattattaaggcagaaaaagagaaaagtgattcaggtattataaaaatgtttctttttccttagtgccttttatatttttgttaaattttgtgttccgaatccttttagaccctctcagctctcaaacattcatgacagtaccaatcttttccttagccattgattcgcaagggcagtgattcaagatttttacatgtttsggggggaagggtggtggtgtctgtgtgtgtgtctattcttagccatttagtagtaaagatgaattgaaaagttgatttc

SEQ ID NO: 717735 - DNA, 589 bp, Homo sapiens
gtccataaaaagagaatgcctttacatttgcaatgaaaaacagtaagccgggtaaataattattatgtcttcacgattgagagagtctgctctctactgaaaactcttaacatattttctacaggcagaaattgagaagttaaccatgtagtatactattcagaccctctttaaatattgttattcaaaaatataaagctaaacaactccattaattaatgtcctttaaaaaaacctgcttctgtgggacatttcctccaggcatcttgaggagttatttaggctcaccaaagagttcactgtctggagaattattaaggcagaaaaagagaaaagtgattcaggtattataaaaatgtttctttttccttagtgccttttatatttttgttaaattttgtgttccgaatccttttagaccctctcagctctcaaacattcatgacagtaccaatcttttccttagccattgattcgcaagggcagtgattcaagatttttacatgtttcgsggggaagggtggtggtgtctgtgtgtgtgtctattcttagccatttagtagtaaagatgaattgaaaagttgatttc

SEQ ID NO: 717736 - DNA, 1477 bp, Homo sapiens
  misc_feature 635, 636, 637, 638, 639, 640, 641, 642, 643, 644, 645, 646,647, 648, 649, 650, 651, 652, 653, 654, 655, 656, 657, 658,659, 660, 661, 662, 663, 664, 665, 666, 667, 668, 669, 670,671, 672, 673, 674, 675, 676, 677, 678, 679, 680, 681: n = A,T,C or G
  misc_feature 682, 683, 684, 685, 686, 687, 688, 689, 690, 691, 692, 693,694, 695, 696, 697, 698, 699, 700, 701, 702, 703, 704, 705,706, 707, 708, 709, 710, 711, 712, 713, 714, 715, 716, 717,718, 719, 720, 721, 722, 723, 724, 725, 726, 727, 728: n = A,T,C or G
  misc_feature 729, 730, 731, 732, 733, 734: n = A,T,C or G
catgatttaaaaaataaagaaacagacaaatacaaatctgcttagctgtagacatggactactccttataaaaaggaaaaatgactcgggtggaacaaagagcccaggatgaatataagagctgcggagaagaactctcaggttgtgggtctaagccttatcaaggaactggtaacatgttccctgctggatttcagaattgctatgaaacagtgattatattttcgaatagcagtggttatcctatatcggtttgactattgtatgttcagtgttttggagaaagataacctctctcttacattcacaggtcagattgcaagaaatacttgaggaactgcactcgaggtgtcttatttacatatcacccatttgattgattgactgattgagatggggtctcactctgtcactcaggctggagtacggtggagcaatcacagctcactgcagcctaggcctcccaggctcaagtgacctcccacctcagcctcctgagtagttgggactataggcatgcygccacgctcacttaggtttgttttttgtttgtttgttttttgcagagacgaggtctcattaagctgcccaggatggtttcaaactcctgagcttaagtgatcctcctgtctggnnnnnnnnnnnnnnnnnnnnnnnnnnnnnnnnnnnnnnnnnnnnnnnnnnnnnnnnnnnnnnnnnnnnnnnnnnnnnnnnnnnnnnnnnnnnnnnnnnnngaattccccaagactgggtaatttataaagaaaagaggtttaattgactcagctccgcatggctggggagggctcaggaaacttacaatcatggcagaaggcacctcttcacagggcaccaggagagagattgagtgccagcaggggaaatgccagatgcttataaacccatcagatctcatgagaacttactgtcacgagaacagcatgggggaaaccacccccatgattcaattacttcccaccgcatccctcacacaaaaggtggagattatgggattacaattcaagataaggcttgggtagggacacaaagccaaaccatatcagatacattgcaagatattataaacagcttttgatgtcatgctagaagttttggactgcatgctataggagaggaaacatgatcaaaatcatgttttgatggcacgtaaagtggatgtgattgacagagtgatggattatacacatagataaaagacatggatgggttttaatgatagcagcaagagtggagaggaaatataagaagcttatctgagaaaaactttgtacacttgactaagttcagaagtaaattaaatgtggggatgctagtagaaggagaaagaggaaggaataaagataatctcaatttctagttcagaaacctatgggaatgcagaaatgtcattaattggtttgaggacatctgtaggaaaggagttctggaaaattggtgaggagaaaaagaaagaggg

SEQ ID NO: 717737 - DNA, 1678 bp, Homo sapiens
tatgcatcaataagccataaattttaagaagtaatgactggcgtgaactcaaactttgtactttcagttaaaaatcttagctggtgacacattgcagaagataagactccatcttcctcttccaaaacatatatacactcctctccccacttatttggctggtttgtcccattttatagtagggttgaaatatttcaagctaagataacaaagtcaaattcaaggtcttgttagcacaacttggggaaatgccaagcatagcagcctgctattcctgacaggtacaactccatcagtttcttaaaagagagaaagaattacagaatacgccatagggaaacagagtaaactccttggtgagttgcaatcactgaattatattctttggcaccttgtgtttatatcttttatggagccactaaaaaaagatgacaggactgaaaataaaatgcaagccttagtagaaaggcttctatctggtcagtcactactacaagaaaatagaggatttgagggatttgtccaagataaacacaagagagaattgtgcaatgtaaataatactgcttaaccttctctttctcaactaacagactgtctttaggctctgccagccgtccagacctcttcctcaaggatgtttccaatgtgtgttttcattgtgctactgtcaaactctgtagctcaccctaggatgtgggctcattatttctggattggttgaacaaagtttaagtatgtgtgtcatcagcaggtagagaatcagagcttctccaaggatataacctgaaatatttgtcaggcaaacctcaacaaatctcatgtttttaagtgaaaactcacatttataaaatcagcattgctttctattgccataacttccttagactttcctcaggaaaccagaaaacttttggaaaatataagttttgtcctagcagactgattacttatccttgaagcaagcggaatatgaatttttaaaagatattttttcttgtatttgcttctaggcatctaggcagcttctcagcaactgtgctgggcagatgggaatctagtctattaaaaaaatatctgctgagaaatacacttcacagctgcccatttagctaatgttaattatttgtaatgtcttttttaatgcattagatattatattgcacagtgtccaaacccaagcccatctttataattatatataattatctgaaagaaatatgtttttaagtcaacaatcatgcctaagaactgttttaaaayaagcagatgaatgtatatccataaacatttgaacagtagtttgaaatatttagaattattattaaagcaacctatagaatgtgagttaattctaggagaaattatagacagtgggccaggtgtggtggctcactcctctaattccagcactttgggagactgaggatcacctgaagtcatgagttggagaccaggctggccaccatggcaaaatcccgtctctactaaaaatacaaaaaaaaattagctgggtgtggcggcaggtgcctgtaatctcagctacgcgggaggctgaggcaggagaatcacttgaacctgggaggcaaaggtttgcagtgagccaagatcacgccattgcactccagcctaggtgacaagagttaaactccatctcaaatatatatatattatttta

SEQ ID NO: 717738 - DNA, 1678 bp, Homo sapiens
tatgcatcaataagccataaattttaagaagtaatgactggcgtgaactcaaactttgtactttcagttaaaaatcttagctggtgacacattgcagaagataagactccatcttcctcttccaaaacatatatacactcctctccccacttatttggctggtttgtcccattttatagtagggttgaaatatttcaagctaagataacaaagtcaaattcaaggtcttgttagcacaacttggggaaatgccaagcatagcagcctgctattcctgacaggtacaactccatcagtttcttaaaagagagaaagaattacagaatacgccatagggaaacagagtaaactccttggtgagttgcaatcactgaattatattctttggcaccttgtgtttatatcttttatggagccactaaaaaaagatgacaggactgaaaataaaatgcaagccttagtagaaaggcttctatctggtcagtcactactacaagaaaatagaggatttgagggatttgtccaagataaacacaagagagaattgtgcaatgtaaataatactgcttaaccttctctttctcaactaacagactgtctttaggctctgccagccgtccagacctcttcctcaaggatgtttccaatgtgtgttttcattgtgctactgtcaaactctgtagctcaccctaggatgtgggctcattatttctggattggttgaacaaagtttaagtatgtgtgtcatcagcaggtagagaatcagagcttctccaaggatataacctgaaatatttgtcaggcaaacctcaacaaatctcatgtttttaagtgaaaactcacatttataaaatcagcattgctttctattgccataacttccttagactttcctcaggaaaccagaaaacttttggaaaatataagttttgtcctagcagactgattacttatccttgaagcaagcggaatatgaatttttaaaagatattttttcttgtatttgcttctaggcatctaggcagcttctcagcaactgtgctgggcagatgggaatctagtctattaaaaaaatatctgctgagaaatacacttcacagctgcccatttagctaatgttaattatttgtaatgtcttttttaatgcattagatattatattgcacagtgtccaaacccaagcccatctttataattatatataattatctgaaagaaatatgtttttaagtcaacaatcatgcctaagaactgttttaaaacaagcagatgaatgtatatccataaacatttgaacagtagtttgaaatatttagaattattattaaagcaacctatagaatgtgagttaattctaggagaaattatagacagtgggccaggtgtggtggctcactcctctaattccagcactttgggagrctgaggatcacctgaagtcatgagttggagaccaggctggccaccatggcaaaatcccgtctctactaaaaatacaaaaaaaaattagctgggtgtggcggcaggtgcctgtaatctcagctacgcgggaggctgaggcaggagaatcacttgaacctgggaggcaaaggtttgcagtgagccaagatcacgccattgcactccagcctaggtgacaagagttaaactccatctcaaatatatatatattatttta

SEQ ID NO: 717739 - DNA, 3121 bp, Homo sapiens
tagatgtcttaaaagatagaaaaattgtagcttatgaagacactgcagaattctctcttaaaataggtatatatagtgcaaaggattactgccattgcaatatttcacctaatcaaagattttatccaacgtgtataaacgggtatctttttagataagaaactggtcaaaatcataatagtggcatatgttgaggtcacatagtgaagttatctatgcagatcagacagtattgtggagaatacctagaatcttgagaatttacacaaatagtaataacttagatctgtatagcaaataatatacatatcagattcatttagtttatgtaatctttataatctgagaataatgagtcaagtgttatccttagtttactgattatcaaagaaaaatacagcttggagaagtcaaatgaattttccaaatttatgctacttataaatgggagagctaataaaagccacctgtctgggtataaccctgtacctatttcttctaaagcatattgttttctaaagaaagtagttacattttaaatgaatatataaggaatacatcttgaatgaagacaatatgcattttataatttacatatttctgtatttcattattcagaattcatttaaaaagtctccttgttggcatggacaaaattggcagctaatcctatcccataaatattttcaatggtcttcagctgatggcgtgaaagttcagcaaaggccaagtcacaatgctttgaagtttgtcatcttttttatcactgctcagattgtcatgaagacaccaagtaatacatggatcaattatagttaaatgactgcaagttgatcttatcaagcagttagtgggcaagatttcacttttaccattttttctggtaatgatttagagtgtaagaacactaggaatttaaatctacttagttttacttaatcaatgatgtatttgtttatttaatttaaaacattgtttttggagaaggaagagaacacaagaagttcttgatccataaataaggcgttcagaaggagaccagttaaactaaattttgactgtaattcagaattgtgtaaaatgccctactttattttaagctcattattttcataattcctttaccaagatagcagaaacatggctttatctattaaattataaatgtagttttttttgttttaaacataatcaatttataagagatctaagacatataaaactacattgaggtagaaatttaataaaaattaactttacatctatgtaacttacgtctatgtattcagtttatttaaagtaggtcataaccaagtatttctgggttgtgtggccaatagctttgctcctaaatcacaaagatgtttctgtgtgtgacactttttaaatccctggaatattttaaatgttcatttcaaataatctataactttgaaacagttcttttttcttgaacacattgttctgtcacgtctaataggataaccaattagttggttatcctaattctaatatgcttcataactagtgacataagataaacatatggagtatttattactctgataaaagatactggttaggagcaagacagtttttactttgtaatcataaaaacatagcgtcctgcgtacactaggcagctacttatatagagctaatctcactctttttcggactccaatatttaccataaaagtgctttacagcatctatataattttttcttctttttgtcccttctttgtagttatttgaaattacagtgcctctctctcaaggccccaaaccagtaacaatcagttttgccaatcacacttcctgccgatgcatgtctaaactggatgtttacagacaagttcattccattattagacgttccctgccagcaacactaccacagtgagtatgaattaaatctattttttctgcatcctctactaatattaaattattttcaagtaaacataagttaaacaaataacctctgtgaaatttactgtaatatactctgcttcaaatacaaaacaaagacaaaattttgtatagtatacaatgaaaataaactgaaaattaaaattcagtgggaagcgtattttagaggcaaagtaattcacaatataaaagaagtatgtctgtgaaataaaacacattccaccagtgttcataaaatatcagtaaggtagcttaattgatttaacattcctgaaatcaggtatgctaactcataaatcatattaaagttcaaaacatttcagccttgataagattttaggccaaaacaaaaagtaaatataaataattttatatctattagcattcagttgctttcttcaatctcaaacataaaaatatatatgtgtgtgtgtgtatatgtgtatatatgtatctccatgtttcttatttcagcaatatttgaatagtgaaatagtgcttaattacttgaaaaaaatttctgttaatatcatttcaaattgacattcaaaccattatttgttattcaggtttcctttccatcctatttttttggaggggcaaatggcagcatatacctcatgtgatcatataggagaacttatcacgttctcctgtatgatcatgttctgaccctgtgaatagctgataatgaattaatatgcattactgcctaagatctgagagttttctgccccaaagtagggatgcaaccctttgttccttaggatatccggtgcatatggatgaaacttacataactctagcatttgtaacaaatgtataaataaattgatcaaaatacatatatattacaaaaaagaaaaccttacatttttaaaagactcaacaataaatgtaatatgcaaaccatggtyttccccactgaatcacgttgtactactctgcttagtgtggcagatagggggaccccttgtttgtccagggacagtttaggaaaacctggaagatagcctaatttgagtgacagagatctgtccccttttatgtgagaaagcaaagatcttacagacatttgtgaataaatgtatgctaatacaagcaagagaccactaccatctgaactcaagaggatgccgtatgtgcaatttcatccccgcaggctagagagttctgttcaccttcc

SEQ ID NO: 717740 - DNA, 3121 bp, Homo sapiens
tagatgtcttaaaagatagaaaaattgtagcttatgaagacactgcagaattctctcttaaaataggtatatatagtgcaaaggattactgccattgcaatatttcacctaatcaaagattttatccaacgtgtataaacgggtatctttttagataagaaactggtcaaaatcataatagtggcatatgttgaggtcacatagtgaagttatctatgcagatcagacagtattgtggagaatacctagaatcttgagaatttacacaaatagtaataacttagatctgtatagcaaataatatacatatcagattcatttagtttatgtaatctttataatctgagaataatgagtcaagtgttatccttagtttactgattatcaaagaaaaatacagcttggagaagtcaaatgaattttccaaatttatgctacttataaatgggagagctaataaaagccacctgtctgggtataaccctgtacctatttcttctaaagcatattgttttctaaagaaagtagttacattttaaatgaatatataaggaatacatcttgaatgaagacaatatgcattttataatttacatatttctgtatttcattattcagaattcatttaaaaagtctccttgttggcatggacaaaattggcagctaatcctatcccataaatattttcaatggtcttcagctgatggcgtgaaagttcagcaaaggccaagtcacaatgctttgaagtttgtcatcttttttatcactgctcagattgtcatgaagacaccaagtaatacatggatcaattatagttaaatgactgcaagttgatcttatcaagcagttagtgggcaagatttcacttttaccattttttctggtaatgatttagagtgtaagaacactaggaatttaaatctacttagttttacttaatcaatgatgtatttgtttatttaatttaaaacattgtttttggagaaggaagagaacacaagaagttcttgatccataaataaggcgttcagaaggagaccagttaaactaaattttgactgtaattcagaattgtgtaaaatgccctactttattttaagctcattattttcataattcctttaccaagatagcagaaacatggctttatctattaaattataaatgtagttttttttgttttaaacataatcaatttataagagatctaagacatataaaactacattgaggtagaaatttaataaaaattaactttacatctatgtaacttacgtctatgtattcagtttatttaaagtaggtcataaccaagtatttctgggttgtgtggccaatagctttgctcctaaatcacaaagatgtttctgtgtgtgacactttttaaatccctggaatattttaaatgttcatttcaaataatctataactttgaaacagttcttttttcttgaacacattgttctgtcacgtctaataggataaccaattagttggttatcctaattctaatatgcttcataactagtgacataagataaacatatggagtatttattactctgataaaagatactggttaggagcaagacagtttttactttgtaatcataaaaacatagcgtcctgcgtacactaggcagctacttatatagagctaatctcactctttttcggactccaatatttaccataaaagtgctttacagcatctatataattttttcttctttttgtcccttctttgtagttatttgaaattacagtgcctctctctcaaggccccaaaccagtaacaatcagttttgccaatcacacttcctgccgatgcatgtctaaactggatgtttacagacaagttcattccattattagacgttccctgccagcaacactaccacagtgagtatgaattaaatctattttttctgcatcctctactaatattaaattattttcaagtaaacataagttaaacaaataacctctgtgaaatttactgtaatatactctgcttcaaatacaaaacaaagacaaaattttgtatagtatacaatgaaaataaactgaaaattaaaattcagtgggaagcgtattttagaggcaaagtaattcacaatataaaagaagtatgtctgtgaaataaaacacattccaccagtgttcataaaatatcagtaaggtagcttaattgatttaacattcctgaaatcaggtatgctaactcataaatcatattaaagttcaaaacatttcagccttgataagattttaggccaaaacaaaaagtaaatataaataattttatatctattagcattcagttgctttcttcaatctcaaacataaaaatatatatgtgtgtgtgtgtatatgtgtatatatgtatctccatgtttcttatttcagcaatatttgaatagtgaaatagtgcttaattacttgaaaaaaatttctgttaatatcatttcaaattgacattcaaaccattatttgttattcaggtttcctttccatcctatttttttggaggggcaaatggcagcatatacctcatgtgatcatataggagaacttatcacgttctcctgtatgatcatgttctgaccctgtgaatagctgataatgaattaatatgcattactgcctaagatctgagagttttctgccccaaagtagggatgcaaccctttgttccttaggatatccggtgcatatggatgaaacttacataactctagcatttgtaacaaatgtataaataaattgatcaaaatacatatatattacaaaaaagaaaaccttacatttttaaaagactcaacaataaatgtaatatgcaaaccatggttttccccrctgaatcacgttgtactactctgcttagtgtggcagatagggggaccccttgtttgtccagggacagtttaggaaaacctggaagatagcctaatttgagtgacagagatctgtccccttttatgtgagaaagcaaagatcttacagacatttgtgaataaatgtatgctaatacaagcaagagaccactaccatctgaactcaagaggatgccgtatgtgcaatttcatccccgcaggctagagagttctgttcaccttcc

SEQ ID NO: 717741 - DNA, 1136 bp, Homo sapiens
tattgtgttgaggtatgttccttctatatccagtttttttttttagggtttttggtacagcattttaacagcttcgtcaggtgatcycaaaatatcctactttgagaaacactgagttaaatgctctgtgtgacgcaaataagcataagttataaaacttgtattttagagaagttcagggatcgccgagaagatgacttctctacacacagaagtattaaattaatatcaatcaaatgcaataagtcatgtgaaggaacttaggtgaaaaatcatttaaaaaatcattaaaatgtaagggaatgcccaccacttgaattaagtaaggagtgaatggttgagaggagagagcccaatgaagacatgacatgctgaggaaaggcttcctggaggaagcagcagcatgaaccagcagcaaagctcaactgtctctgttgttaatctcagcatacattgaactcatgcaatcatcaagaagcatccaccagacactgaggatgcagcagcttggaagtgatggggtgagatggagctctgggcattagctagtaaggaagggaaatgtattataagactgtcatgttcttacagatgctcagactccagacagtagagttcctctgaacatatgaccagtattgccacccgcatggtgctattattggcataaggatttggtatgagaagaaccaatatttgagttccggaccctctctgggcaccaatatctcacacactttgcaataattcaatgatccacctagaactcacacctttatgtatattttaccttctactttcagttttttccagggtcatttaggaaacaatggaaggaaaacatgaatcccttaattgaagaagctgttaaaatgcaccaaaatccccaacctttttgttaaaataggaatttcttcagggcagcagctccatttctcattctgaagaggttcgttgtctgatgtccaggttagttagtgggcatccagttttaataactttaaattgttggacttggggaaattttccattattgacaagcttttaagaagatagggaaaattttctatcaaatagtacttcaacatcctgtctcaaactgttgaactttgaagctaagtgatacttatgactac

SEQ ID NO: 717742 - DNA, 1136 bp, Homo sapiens
tattgtgttgaggtatgttccttctatatccagtttttttttttagggtttttggtacagcattttaacagcttcgtcaggtgatctcaaaatatcctactttgagaaacactgagttaaatgctctgtgtgaygcaaataagcataagttataaaacttgtattttagagaagttcagggatcgccgagaagatgacttctctacacacagaagtattaaattaatatcaatcaaatgcaataagtcatgtgaaggaacttaggtgaaaaatcatttaaaaaatcattaaaatgtaagggaatgcccaccacttgaattaagtaaggagtgaatggttgagaggagagagcccaatgaagacatgacatgctgaggaaaggcttcctggaggaagcagcagcatgaaccagcagcaaagctcaactgtctctgttgttaatctcagcatacattgaactcatgcaatcatcaagaagcatccaccagacactgaggatgcagcagcttggaagtgatggggtgagatggagctctgggcattagctagtaaggaagggaaatgtattataagactgtcatgttcttacagatgctcagactccagacagtagagttcctctgaacatatgaccagtattgccacccgcatggtgctattattggcataaggatttggtatgagaagaaccaatatttgagttccggaccctctctgggcaccaatatctcacacactttgcaataattcaatgatccacctagaactcacacctttatgtatattttaccttctactttcagttttttccagggtcatttaggaaacaatggaaggaaaacatgaatcccttaattgaagaagctgttaaaatgcaccaaaatccccaacctttttgttaaaataggaatttcttcagggcagcagctccatttctcattctgaagaggttcgttgtctgatgtccaggttagttagtgggcatccagttttaataactttaaattgttggacttggggaaattttccattattgacaagcttttaagaagatagggaaaattttctatcaaatagtacttcaacatcctgtctcaaactgttgaactttgaagctaagtgatacttatgactac

SEQ ID NO: 717743 - DNA, 1136 bp, Homo sapiens
tattgtgttgaggtatgttccttctatatccagtttttttttttagggtttttggtacagcattttaacagcttcgtcaggtgatctcaaaatatcctactttgagaaacactgagttaaatgctctgtgtgacgcaaataagcataagttataaaacttgtattttagagaagttcagggatcgccgagaagatgacttctctacacacagaagtattaaattaatatcaatcaaatgcaataagtcatgtgaaggaacttaggtgaaaaatcatttaaaaaatcattaaaatgtaagggaatgcccaccacttgaattaagtaaggagtgaatggttgagaggagagagcccaatgaagacatgacatgctgaggaaaggcttcctggaggaagcagcagcatgaaccagcagcaaagctcaactgtctctgttgttaatctcagcatacattgaactcatgcaatcatcaagaagcatccaccagacactgaggatgcagcagcttggaagtgatggggtgagatggagctctgggcattagctagtaaggaagggaaatgtattataagactgtcatgttcttacagatgctcagactccagacagtagagttcctctgaacatatgaccagtattgccacccgcatggtgctattattggcataaggatttggtatgagaagaaccaatatttgagttccggaccctctctgggcaccaatatctcacacactttgcaataattcaatgatccacctagaactcacacctttatgtatattttaccttctactttcagttttttccagggtcatttaggaaacaatggaaggaaaacatgaatcccttaattgaagaagctgttaaaatgcaccaaaatccccaacctttttgttaaaataggaatttcttcagggcagcagctccatttctcattctgaagaggttcgttgtctgatgtccaggttagttagtgggcatccarttttaataactttaaattgttggacttggggaaattttccattattgacaagcttttaagaagatagggaaaattttctatcaaatagtacttcaacatcctgtctcaaactgttgaactttgaagctaagtgatacttatgactac

SEQ ID NO: 717744 - DNA, 863 bp, Homo sapiens
tgagaaagtaaaaagcctgagcttgctgtcaggctctgtctccaactgtgtatttgaaccaggcattcaaaactcattggtttccacattctgtaagatgaggaaatggactagactatttctaattctcatccagctccataatttcaatgactgacttagtgaacggatgggtagttgggtgattagatgagggaatgaaatgagatttaccgacttccaaattattaaagacttattaaaaactaaatgtatagagaaggtaggtgtataattatrtacattagtatagtttccaaattattcattcatttcaaagagaaacagagaccaaggaagattctgtagcccagcacttcccaaaagctgctccttgcacactagctctgtcacatgtaatagtcttagaagaaactggtaagaaatggtttccaggtcaaataaatgtaactgttttactacagaacttctcaagtcttttagtataatagtatgcattgtgagtttctcacattgactggaccaatgactgtttcttttttctcttttgtcttgttttgttttgttttaatggaatgcatttctgaggactggcattctgatgaacgtactttagtaagcactgaagaaggaaacacaattgataagatggtctccaaatgacatatcagtcagactatgacctgtttattgtgcatacttttcaaaagtatcattgtttctgcaatggcagtattatgaatgcactgctttgttaactcagcaagccaagagtagtagttaatagtttagcacctctatggctgaatgattccattctaagtaggggtcgcagcccaattctggattcagtagctaaattc

SEQ ID NO: 717745 - DNA, 909 bp, Homo sapiens
tggatacctcatagaaactacatatgaataaagatccaatcctaaaatctggggtggcttctccctcgactgtctcgaaaaatcgtacctctgttcccctaggatgccggaagagttttctcaatgtgcatctgcccgtgtcctaagtgatctgtgaccgagccctgtccgttctgtctcaaatatgtacgtgcaaacacttctctccatttccacaactacccacggccccttgtggaaccactggctctttgaaaaaaatcccagaagtggttttggctttttggctaggaggcctaagcctgctgagaactttcctgcccaggatcctgtgtgaccaaaagtgcctctgctgggagctgggatcctcgggaccatgcttgctagcgctggatgagtctctggaaggacgcacgggactccgcaaagctgacctgtcccaccgaggtcaaatggatacctctgcattggcccgaggcctccgaagtacatcaccgtcaccaaccgtcaccgtcagcatccttgtgagcctgcccaaggccccgcctccggggagactcttgggagcccggccttcgtcggctaaagtccaaagggatggtgacttccacccacaaggtccccactgaacggcgaaratgtggagcgtaggtcagagaggggaccaggaggggagacgtcccgacaggcgatgagttcccaaggctctggccaccccacccacgccccacgccccacgtcccgggcacccgcgggacaccgcccctttatcccctcctctgtccacagccggccccaccccaccacgcaacccacgcacacacgctggaggttccaaaaccacacggtgtgactagagcctgacggagcgagagcccatttcacgaggtgggaggggtgggggtgggg

SEQ ID NO: 717746 - DNA, 1446 bp, Homo sapiens
gaatctggtttaaaacattgccaaaaataaacttagaaagcaagaattgtagggttttgttgacctctgttctggaatctgtggcattcataataagcagtacttctagatatttgccaaccagctcagatttggggagctagaactagcatagctctttttaatgtctcagttcatataaatttcacagatcggagggaccacaggaggaatactggttactggcaatatttaatttatcacaattacctagttaaccgaagttaaccaaagtagtaaaataactctagaggcagaacgcaaagcaatcaagatttttagccttaaggtaattatttccttagagaaaatggggaagaattctaaagtgtttctgcttgcctgcatattttattatattttaatatttttatagattaatatttattaatggtgggaatattgatgaggaagtttgcatacagggagagaaggggaagaggaagatgtgaagaaatgacagggcttcatgtagtgaaagcggtggtgttctcttgtcttattctcctccaattaggaatctcaggctgtagtatgaatatggcagagtcagcatatttttactccatcaattagtatagtgaacactatttttattaataagatattaacaaatacaaataccttaaaatattattacatgtacaagaattaatagcttataaaagtaagaatgtaaatatgggttcatttgtaaaataataatatcttcacagagaacttacccagactgacaagcactgaccatccaaccagataggacagttctttggaacttatccttcaaggtagcaaaacaagtgcaattatgttatatgatttcactgagtgtcttctctatttcaatataagtcacctggcccaagtcaggcttcctgttttcttggttaacttctgctaaaccagagaatcagataggcaaatagtaaattaggctgaatcaaaatatgttaattcctacttatgtgattatagaatactcaatgttttctctttctacatctagattataaccaatataattagcttcacaaatcagcatttggctgacatattgcacaaatcaatggggattattcttatctgcaaaacctgcacaactgtgtagtctatggtgttcctgtctgagaaaatgataaggttatggctattactcgcactttttccattacaggaaaacctcagagttcttccttctgtcattatcctgaagagctggcctgtctttcttcctccctcccttccttttttctctttcttcctttttctttcgtttttttttttttttttttggccacaataracctaaacagagtgcttgtccagctgttgtcaaattcaagcctgtacactgtggactcagagattcggccactaccatctgaaagctgatcacatgctaccaag

SEQ ID NO: 717747 - DNA, 1446 bp, Homo sapiens
gaatctggtttaaaacattgccaaaaataaacttagaaagcaagaattgtagggttttgttgacctctgttctggaatctgtggcattcataataagcagtacttctagatatttgccaaccagctcagatttggggagctagaactagcatagctctttttaatgtctcagttcatataaatttcacagatcggagggaccacaggaggaatactggttactggcaatatttaatttatcacaattacctagttaaccgaagttaaccaaagtagtaaaataactctagaggcagaacgcaaagcaatcaagatttttagccttaaggtaattatttccttagagaaaatggggaagaattctaaagtgtttctgcttgcctgcatattttattatattttaatatttttatagattaatatttattaatggtgggaatattgatgaggaagtttgcatacagggagagaaggggaagaggaagatgtgaagaaatgacagggcttcatgtagtgaaagcggtggtgttctcttgtcttattctcctccaattaggaatctcaggctgtagtatgaatatggcagagtcagcatatttttactccatcaattagtatagtgaacactatttttattaataagatattaacaaatacaaataccttaaaatattattacatgtacaagaattaatagcttataaaagtaagaatgtaaatatgggttcatttgtaaaataataatatcttcacagagaacttacccagactgacaagcactgaccatccaaccagataggacagttctttggaacttatccttcaaggtagcaaaacaagtgcaattatgttatatgatttcactgagtgtcttctctatttcaatataagtcacctggcccaagtcaggcttcctgttttcttggttaacttctgctaaaccagagaatcagataggcaaatagtaaattaggctgaatcaaaatatgttaattcctacttatgtgattatagaatactcaatgttttctctttctacatctagattataaccaatataattagcttcacaaatcagcatttggctgacatattgcacaaatcaatggggattattcttatctgcaaaacctgcacaactgtgtagtctatggtgttcctgtctgagaaaatgataaggttatggctattactcgcactttttccattacaggaaaacctcagagttcttccttctgtcattatcctgaagagctggcctgtctttcttcctccctcccttccttttttctctttcttcctttttctttcgtttttttttttttttttttggccacaataaacctaracagagtgcttgtccagctgttgtcaaattcaagcctgtacactgtggactcagagattcggccactaccatctgaaagctgatcacatgctaccaag

SEQ ID NO: 717748 - DNA, 657 bp, Homo sapiens
ttttattagtcaattattgtttatcaaattatttgtttgaatgaaacaatttttttaacttataattatctaaccacaatgtttcaggartaagatacttgaaagatcttgcaattttctttttatcaggtaagtatttatttagtacctactatgagttgggcattctattgacacttaaatatttcatttaattttcccagtaaatgactttcattttctgatggtgaaggcaggctcagaatcttttttcacatgcacaaggttccagttagtgaatgtcagaactggaatatgaatccagagatttttaccttttctgtgctttttagctgtggtgattaaggacaattttgtagagtggtgaaaactttgagttgtagctctaccacttgatcactgtgggctgtgggcacctcattttaatctaaggtgaattgtttttttctggaaatgggagtaatacaagtacctacttcacagggtcactgtgaagattaaataaaatgatgtgtttaataataatctctacatgttttgagtgcataacacaacaatatttataatgctctcaccttggtgcctgggacatagcaaatagtacattgctaggtgctcctctttataagtattctgtatcaggttgtccttaatagc

SEQ ID NO: 717749 - DNA, 620 bp, Homo sapiens
tggataattcctcaagccattagagctcaggtccagggcagaaaaacaatttcatttgtttatttcacagacaccagttccaagactgaaccacatgggtcycagctttataaggtttacatacataattgttattttgttgctataattttcatgcaatttgaataggtcaagaaacctggtctatgtagggtaccttaaatatcccctttaatatttactgtattattcacagtactttctgcatggatcttcctttcttcctggttatctggggtgagaagcatggtgtaatagaaaggttctgggctttggagtcaggcaaactttggattcaatcctggctgtgatccttatcaacagtgcctatctgtaagtatattacttacctttactaagtcttggcttctttttctatgaaatacgtatagtaaaatctactccatgaattgttaaaatgtaattcacatacagcttagtaagagatgctgagaaacaatatatagttggccctctgtaagcatggatttggaggatcctaaatcctcagattcaatcaatcacagatcgaaatccgcagatatggagggctgactatacttgattatatgtaaaaagct

SEQ ID NO: 717750 - DNA, 1255 bp, Homo sapiens
ctttctctctagggttcccattcccctttcttttcatggcaccacctcctttgactatctggtctcccgcaggcaaaggtcagccactctgtcctttacgtccttcactcacaggtctttccattctgggtaagttatgcctttgcagcctgctgactttttctttttgtcatgtcttctgtcttctttgacatttgttgctgctacggccctttggaaagcctggaattctactaataatgtcctgaaaactggggattggcatgtaagagtgctaaagttttcacagcagggacttcggagtgtctttatgcttgtgtgaaacaagtaaagaagtgcacacacacagcacaccacccacaaaacaacaaaaaggtgagtgtaatggctacccagggtctgcctccccagccacaagcctgggcgagatgtcaggctttgactctacaccttcctccacacagaggtgactcctcccacccagactgagggctgttaataggtaaccaacaccaaaatcatttacaaaggattaayagtaatctctcaagcacacaatatctcctttgctataatcattacctttgagtatttcatttctccatctgctttgagaatgtttgagaattttctttgtctttcactatcaatgtaaacaattgcttgggatccccaggtacttactccaagttttgcattttgtggtttcactgctgtttctgtttcagagaccaagagctactagtggcccaggaattcccaaactgggctggggtgcctcagagcactgtagggaactcacaatggcagtgggaatattttaaatttttgagggaaatgcggcaatacttgacattgacagatacctcatgaactgaggtagttcagagttcagcattaaacccaactatattctttacaataatatcctctcttttcaaagctgaatttttggtggttattgtggtaaaagggaagtgtcaacccaaattcaacatggagcagaaatgagggtggcagtgtccaatctaattccaaagtttgagaaactgtgcagtgtgcaacaggtacacatatcctcttggtgagtaatggtgagtatttaagaatgaaataataatattcgtttttggctgggcgtgtggctcatgcctgtaatcccagcactttgggaggccgaggcaggtggatcacctgaggtcaggagttcgagaccaggctggccaacatggtgaaaccctgtctctactaaaaa

SEQ ID NO: 717751 - DNA, 633 bp, Homo sapiens
aatatatatatatatacaaaaaattagcagggcgtggtggcgggcacctgtagtcccagctactcgggaggctgaggcaggagaatggcgtgaacccgggaggtggagcttgcagtgagccgagatcgcgccactgcactccagcatgggtgacagagcgagacttggtctcaaaaaaaaaaaaaaaagaaacccgtctctactaaaaatacaaaattagccgggcgtgctggccggcacctgggatcccagctactcgggaggctgaggcaggagaatcgcttgaacccggaggtggaggttgcagtgagtaaagattacgccactgcactccagcctgggtggcagaatgagactgtctcaaaaaaaccaaacctaaccaaccaaaacaaaaaaaaagagccacgtcccatgtgagctccrcgcctcagcagtcccctctgcctgggacccccccgtcctctactccccatcttgctgggacccctcctcttccgtgtcaggaccacagctccacacccaccaagctccaagccccgcacccccagccaaggccggatgttctgagcagaggcaggcatgggggctgcgtctcccacagagggaacagagggaggcatcgtccggttgcca

SEQ ID NO: 717752 - DNA, 545 bp, Homo sapiens
tcaggattcacgatttatgtgtaaatttaattcaatcatcttccctcccataattcatttgtgtatctattaatagacatttactggatgtaagctccatgtcaatcatcttgccagatgtagagagcgttatgggttgaattatgtcccccaaaaatgacatgttggagtcctaacatccagtacctcagaatgtgaccttatttggaaatgggacctttacaaaggtattcaagttaaaatgaaatctttcaggtgggccctaattcaatatgactggtgttcttacaaaaaggggcaaatttggaaacagactgacacacrcagatggagaacaatatgcaaatacaagaaactaccaaaaactagaagagaggcctggaacagaactttccctagcacctccaaagggagtgtggctctgccaacaccttgatttcagacttgtggccttcagaactgtgagacaataaattttgaattgctgaagtcactcagtttgtgttactttgttatggcagcctagatatttaaggtgtaaaaag

SEQ ID NO: 717753 - DNA, 932 bp, Homo sapiens
  misc_feature 543, 546, 547, 548, 549, 550, 551, 552, 553, 554, 555, 556,557, 558, 559, 560, 561, 562, 563, 564, 565, 566, 567, 568,569, 570, 571, 572, 573, 574, 575, 576, 577, 578, 579, 580,581, 582, 583, 584, 585, 586, 587, 588, 589, 590, 591: n = A,T,C or G
  misc_feature 592, 593, 594, 595, 596, 597, 598, 599, 600, 601, 602, 603,604, 605, 606, 607, 608, 609, 610, 611, 612, 613, 614, 615,616, 617, 618, 619, 620, 621, 622, 623, 624, 625, 626, 627,628, 629, 630, 631, 632, 633, 634, 635, 636, 637, 638: n = A,T,C or G
  misc_feature 639, 640, 641, 642, 643, 644, 645: n = A,T,C or G
attttgtgaatggcactctgtcattttgtattctatcaattatgtttaaaaattctmttcataactcattgggttgatttcatgccaatgaagagttgtgatttatgatttgaaatacactgctccagagcaattcttgcactatgtaatagaaaaagtccaatagaagtttcaaaaaaacatttttgtaacatataaaaacacataatcatgatgcctacttataagaaaatgaggactagcttgtgttgtatagttatacaatgaacaattatgtagcaataaaagtaaattaaatttagttcacaaaagtcatcttcaacaaatactgcaaattacgtaagaatacagatgcttctgattcatgcaaagttaaaatatgcaaaattaagaaatacacaagggagaagtggggaagagattatagataagtacatacatatttgtgaaacaatatttctaaatattcattaaaataatctgtataagtattggccccattagcacaatcaattaaacattattttagaagttgatatggtnttnnnnnnnnnnnnnnnnnnnnnnnnnnnnnnnnnnnnnnnnnnnnnnnnnnnnnnnnnnnnnnnnnnnnnnnnnnnnnnnnnnnnnnnnnnnnnnnnnnnnattttacaaactattttctctctcgaaaagttgcagttagctattatttacagttatttctttgacagatgaattcctccttgcctctcaactgaaacctgtctgaggccacagtgacctcctgaattaccaaatctttgccttttttctttcatgtcatttagctttgctattatctatggccaaatatttttcctaaagcattgaaagatctcatgcttagactcaacattttttaataggaagaataaagaaaagtagtatttattaccgactatgtttcaggc

SEQ ID NO: 717754 - DNA, 1411 bp, Homo sapiens
ttagtaatttgtcttcccgaggaaatgtctgtctcatgaggaaaacatgggactcttgcaggcagggaatgtgtggtatttgccttccagcattagcacagtgcctgaaaaatagaaggtactcacacacagttatcgcagggaaggcttttctgagttgatttactccagctcccagcctctccttccctcactcacatattttcctggtgggagagaccctaagttctaaaagccagtgtctgccagaggcttgttccttgaacttctaatttccaacagtcacctcctctctgtgcacagttgagatttttatgcgacaaaataagttgacaggggctcagtgacaagtttgctgtgttatggcgctccaacctcattgaaaaacccttctcatctacttcctacaccaagttctaccactccctgggtagaagccaatgcccaggcttgctcagctttctgtatcatgatcccaagtgtatcacttctgaaaaagaagggatgttcatgaatagctgacgttgatgttaaaatattccctagttgaagaatttcctcacccacacctatcttttagaataagttatgattcttttgttttttttttttaatttacaagttagggccaagaaggagtgtcccattttcaggacagatcaagggagtattcaatacagaaggacttgacttatagtaaagtgttagtcactaggagctcaagagatactttaaaggaccaggatttatgtaccccattctcctctagcctcctctttgatcactgaccttctcaacctttacggtataacctttaatccaatcacactgtactcagtgatcaaatagcccaggcaccatgcctctggtgtgtgtgtgtgcccgttggcggggggcgggggtatgtctgtgtgtgtgtgtgtgcgttggtgggggatatgtgtgtgtgtgtgtgcacgttggcagggggtatgtctgtgtgtgtgtgtgtgtgcacattggcggggggcaggggtrtgtctgtgtgtgtgtgtgtgtgtgggaggggagtgtcccaccccttcagtgcccatcctgcaaaccaataatcctctttcaagatgcagcccaaacagcacatcttctgcaaagcactcccacagttagaaatataaacaaagtactatggaagaagctattaatacttatgtcattgtattctaatttatctgtttacacatctctatttacacatttatttaacaacccgttattgagcatcaggcaccaatcggtgagctctttgagtacctggcctgtgtctgtcattcctatcatgctagacctcaacaccgtacctggcataagctatgtacacagtatctctttggtgcatgaaacaatgatggaaagataaaacccagctctttga

SEQ ID NO: 717755 - DNA, 1411 bp, Homo sapiens
ttagtaatttgtcttcccgaggaaatgtctgtctcatgaggaaaacatgggactcttgcaggcagggaatgtgtggtatttgccttccagcattagcacagtgcctgaaaaatagaaggtactcacacacagttatcgcagggaaggcttttctgagttgatttactccagctcccagcctctccttccctcactcacatattttcctggtgggagagaccctaagttctaaaagccagtgtctgccagaggcttgttccttgaacttctaatttccaacagtcacctcctctctgtgcacagttgagatttttatgcgacaaaataagttgacaggggctcagtgacaagtttgctgtgttatggcgctccaacctcattgaaaaacccttctcatctacttcctacaccaagttctaccactccctgggtagaagccaatgcccaggcttgctcagctttctgtatcatgatcccaagtgtatcacttctgaaaaagaagggatgttcatgaatagctgacgttgatgttaaaatattccctagttgaagaatttcctcacccacacctatcttttagaataagttatgattcttttgttttttttttttaatttacaagttagggccaagaaggagtgtcccattttcaggacagatcaagggagtattcaatacagaaggacttgacttatagtaaagtgttagtcactaggagctcaagagatactttaaaggaccaggatttatgtaccccattctcctctagcctcctctttgatcactgaccttctcaacctttacggtataacctttaatccaatcacactgtactcagtgatcaaatagcccaggcaccatgcctctggtgtgtgtgtgtgcccgttggcggggggcgggggtatgtctgtgtgtgtgtgtgtgcgttggtgggggatatgtgtgtgtgtgtgtgcacgttggcagggggtatgtctgtgtgtgtgtgtgtgtgcacattggcggggggcaggggtgtgtctgtgtstgtgtgtgtgtgtgggaggggagtgtcccaccccttcagtgcccatcctgcaaaccaataatcctctttcaagatgcagcccaaacagcacatcttctgcaaagcactcccacagttagaaatataaacaaagtactatggaagaagctattaatacttatgtcattgtattctaatttatctgtttacacatctctatttacacatttatttaacaacccgttattgagcatcaggcaccaatcggtgagctctttgagtacctggcctgtgtctgtcattcctatcatgctagacctcaacaccgtacctggcataagctatgtacacagtatctctttggtgcatgaaacaatgatggaaagataaaacccagctctttga

SEQ ID NO: 717756 - DNA, 786 bp, Homo sapiens
ggactgcctgatagagcttgccctctggggactatcacaatcgggactaaattagggcccctgctcccaagggtttttattctagctggggagagaagtcactaatggaaacttttttttcccttaaaatagcttacaccttacaaagcactttcacattcctgattccgttaaaatcataaagctagaactgaaaggaaatttagagatcatctctaggkgtcaaatattggcaaatattgggccacctgctaggctcttgcccatggtagacatggctaacataccgcacactcacccgttcatgtcatgtattcacttacttatcagacatcctccatgttctacattgcatgttagaaataaagcagaaaaccagacagacttgtttgctaccttatggacaaacaagaggaagagagacattaaacaaataattacacgcatgaagagtgtttttaggccgggcgcggtgactcatgcccgtaatcctagcactttgggaggcctaggcgggaggatctcttgagcccaggatttcgagaccagcctgggcaatataggagacactgtttttttttttgttttgttttttgttttaagtgtttttaaaagccggtgttggggcagacaaggacatcacacactgggaggtaccctgcgggtgggaaagggtcgggaaagactccctcaggaagtgatgtttaaactgaagtctaggggattaggaaacggagtctctgagagggtgaagaaatattacataccagtatgaagcatggcctg

SEQ ID NO: 717757 - DNA, 627 bp, Homo sapiens
ttccttatgagactctaaccaatgcctgatgagctgaggtggaacagtttcatccccaaaccatgcccatacaaccctctcccactggccgtggaaaaactgtcttccacgaaaccagtccctggtgccaaaaaggttggaaactgctattttgctaaatcactaatcttatcccctgctgtatgttggggtgatcagacccaacaccaggctgtgggggccacaaagtccagcggagtcaaaggaatgagacaaaacaagttaagagtgcataaagtgggactagggrgccaatgctagtatggaggctgtgaaggtcccaagttctggaagcctgcactatttattggtgatcaaacaaagaagcagctggtgaggatgtgggggttgaaagaaagcagtgtatcagcacatgatctatagctgtgacagtttagcattttctttgaagcatgtggaacatgttctgctacttgagataatgggaaacatgttcttctagtttaagatacaatcggtcgggcgtggtggctcacgcctataatcccagcactttgggaggctgaggcaggcagatcacctgaggttgggagttcgggactagcctgaccaacatggagaaacccc

SEQ ID NO: 717758 - DNA, 2579 bp, Homo sapiens
caataacttaagtcaagaaagagccagactcaaaatgttaaatattgtgtgattccatttatacaacattctagaaaaggcaaaacaatgaggatgaagaaggcatcactggctttgagggaataggtgtagggatggtttcaagacaaaagggcaacacagggaatatctgtgggtgagagctctattctgtaacctgcctgtgatggtgattacacatctctatgcatttggtacagmtctgtatgtaagctctatctgaattttaaaacaaattaaagcaggaacatcaacaataaaatggcttaaaacaacaccaattttattaggtctcacatgtatgtggatcaggaatataggcagggatttgctgggtaacttttctgctcctcttgtcattgatataaaatctctggtttcagctggaggatcagcattcaaaatggtttcattcatatgcctagtgtcttggtgaggaagcctggaaatctggacccagctgggactgttgaccagagttcttacatgtggctccttcagtgtagtttctctggggtttctaacttctgacatggcagccagctgtgtctcagagcgcttcaagagacagggtaaaagctttgaggattcttacaacccataggacatctttaatctgacacagtcggccttctagtgacattgtttacattcttccaatatgcaaaacataaacaccccttcctaaagaccccagcttttttgtcccactatagcattgttttgaagtctggaattgtgtcaactaaattagatgcgagtgcaaatgaggttcccaaaaggtggatcttatgattcctctcgatcaaaagacctgtgaatttaagaacaggttttctatcccacacaaagtcagcctacagaggcgatacagaataggaaaactgcaatagggataaggtgttcccattcaatagggaaagggtgatgggaagtacattgtagtcactggttcatagcaattctggagcctgggaaagcatatccttccagttacattattaaggcccagtcctgctcccagaaaatgtggatcttgactttaccgtgttggctcttgtttctgccttctgagtcatctttccttttcggtaaaaatgagccatgtttgctacaaagtagccttttcataccgcttcctgctcatagaaatgtgggaaccttgcaagctctttgcattttgaactgtccctgcccatttcaaatgaagccaatggtgcttctactagtctaattctcttaacatttttgtgggcttcctatgattctctaccttgggttgggaatcaagattctttgagataatgctcttatgattcttagaaactttttaatctaattgagaacatttatgaggcacatttttaatatttctgaagtataggcaaggggtcgtagtcacatccttgagaagatctttacccagagcccacaaaaaagtgaagtggaatttttcaggaatttaccagaaaatattcttggccaaatgcaacagttcattagttgcatattctgttttctacattactgaaatgagttgtcaagctttctgccccacaatgtaggggtggattttcttttctctcctctaataagaatttccttctcattcctttaaccatcacaacaatctcttcaaatccttgcaacctacttcttgctacctgctcccagagtcaagggaacatgttttaagttttcttcttagagcagcacccacttctagtttcctagttctattccagttgttgctgcatagcaaactatcccaaaactttgtggtttatacaaaacaaacatttcattacatgccatgattttgtaagccagagatctgagcagggctttactgagccttttctacatggtttgaacagaagttgctcagtggaattcagctggtatatgggcatagtccctgagagaaaataatctgccaccataaaagagaccttgcctatgagatggtgtcacttgtggtaagcagtatattatgtggcatgctgagttattttgatagcaaaaggcctgaatgaaaagcagtgagatctcagttgttgttcttgtcctacaatacaccactggtaaagatgcttaatttagtacatgtgttctcatcacttcaaataatttttttgtcatgaaagtattcgagtataaatagcaagctaattttacagagaaaagaaatatcaatcgattccgaacagatcaaaactataatgtggaaatgaaataatcatacttaagtatttctaaaagtttcagctgcaacattatgctaaacctacactaggatttacattcaacaaaatatgaatttcctcaagtttacatgctcaaatagaaggtaatactcacaggttgccaaatatttgtatgcaatgcaagaacacaccaaaattttgcaacctatcttttgcctgtgataccctacattcaaatacctttatatatgtatgcataaacccaaatacctgtaaatgtagaaatattaaaatgagtggtgttctctacccaagtagaaaatatctaatgat

SEQ ID NO: 717759 - DNA, 1244 bp, Homo sapiens
agaatgtcctttggttcatgatagctgtcactggatacagagcctggcacactctacttctatatgaccaggtgtgcataagacattgctttaaaaagccacttcatctttgaccgttagcctcgattgtttattgttggtttccagaagcccatttctttatcacacatgtgatgttgtcattctgtgtatctttcaaacatttattctgatacctaggtttgctttaattatcttaccttaactcgttggacactggaggaaatcctgaagctgaatatgctattaatgtggcgcaagatttatttcagttttggaattcttgtttctttctagaaaattgtgatagacctaacctggcaattctgtgttatgtatgagttacataaaatacaaatttaacagtagaaaacagagtgttctaatcagataactctttaaaatgtgtccagtttttggtctagctcatttacacattttcttctttgtgctcatgcattttgatataggtatgttttattttacaatgtgggctatgtataagacaatctcttctagtgtaggaaaaattattagaaatggtatttctatttattttaatactactatctcagggttggatagattttgtgtatactttataatgttccaaatcagtgaataaggcagtatatgtgtatatttcacagataaaactatgcatgcgtgaggagaatgtgtagcctttttttttgctatgaatgtgcaatcaaataaaggtgggaaacaaaactgatgacatcttttagagctctttcacacaagaatatgttgacaaatattcaacactcccctgatgtaagcagatatgtgatatcagtttcctggaacatgacttgaatatttcctcttaataactatacattggaaaaaggttcatataatttaactaaaaaacacattccatattctcttttatatttttcatattggtctattcagcagcttccctaagtagacatcttrggaacattggatagtgtcttttctagttgaaagaacatcccaaaagattgaaaagtgggtgaatagaatccagaacaggtggttatgttaattaaaactgtattatctgcattttgattgtatgtagcggtttatgcactgagaaacttgcaaacaatgtgtacaaatcccattcctgagaggtctaattatttttaaggaagtttaataattctgactacactgccagtcataagtca

SEQ ID NO: 717760 - DNA, 1734 bp, Homo sapiens
tgtgatgaatataatattgaattttaagacctttgaacaatggcaatatatatttttaaaagggagagtggatagttaaatcaaaatgactgctcaaatttgtaaaggtaaataagaactgagccttgattatcatagatttaactgaaaataaaagcaacagaatccaactaccttcgttagctattgtgcatgatttttttgtgaaagttatgatatatgattgtttgtatgaagcaaaaacatgtttaattcaaaactatcactctaccaacaaggtcattctggttgttatttttatcaccacagtcatggggcataggattatattttcttctatataataataatataatacaaatatatatatatgaaatggtaaactgtaacagcaataaaattagctttcatagcatcatcttcaaaccaaaatatatcaaaatctataagaagttaattattaatcaaactgggtaatcttcaattattaaatgattatttccaaataataagatttaataattattatgaataaaattaaacattcttttctcatgtattatgaagaaatgataaatgtaaatctatacttacaacggtcagaaaaaattcccctgaaagtggaacaagttttaaccccaaaaggacatatttttaaaagattaatctgttttgtgtcctttggtttgctaatagcttccacttattaaatattctctgatgagaaattactgcttttaacatccagtctcctattttaaaaaccctactttacaggtattaggagagatctaagtgaaaaataagcccagtgaatggctgttcaattagggtgtaaaacctttttaagtgccatttcaaaaagtcagactatgtacttgatagaacttagaggaggtcatgtgccaaagaattactcataatgatttaattcattcatttcatagattatagtttctgctcttctgttgatgcacaatggatttatgtgtttaactcccattaacactaatagtggctttgtgcataaaacagaaatacatttaaaagacatagtctcttttcctgtctattaaccatctaccgtcttttctttgtaaaggaaaaaatttgaatttagataaaaattttaaattctattataaggacatttaaattattgacagtttacttagagaaatatttttatcatttaaaatcttctaaaaatgattaccttaaaaatgcagaggttttttttatccctgtgattatttgggattagtttttcatgttgtttattgaatcattgcaggacatttaacccttgaaattaataagtattctattgctatagataacattaggcttaaamccctctctttccctaggttaaacatttaaaaaattgtttttcattgtaagactctattttgactatcttacttcttaagtctgatgtagctctagtgtagagaacatttaaaatggtagtggcaatgtgtccaaattaacttctctgacagatggattgcaaaggcaaaatggacatttatttgatgtgatacttaggaatcagcataaagacctgaaggtgcgttgagttttgtttctggagatagtgcatacaacttattagtgttgtgcagtttaaggtgagttacagtaagataatatacagactttacgtgatctatctgtctcttttgcagtagatgaacataaaaactctaagtaataataattggaagacaa

SEQ ID NO: 717761 - DNA, 603 bp, Homo sapiens
atgaattcatttctcctttgaagtcatttattattttataaattgagaacaaccacaccaccaaatgtcacaccttcttataaagtgtgaacaaggaaggtcatgtttttgtgggtattttgtcagacttagaggtttcatttcagggcatagtcaaaggcatcatcctcccaactacccacttgattatgtatttcagatccctccgtgggggccttcttctgacagagaattctttgaggtmcgcagtagtgcttttgtcagcacagactgctaatctacatcttgctgcgttctgtttgctgaggttgggcttattcatttaacacataccaaccattatccagaggcaccatggagagttagtcatggaataaagcactgtccttgcagatgaaaaaagtctccagagcagacttctgacaggaaaggtttagatgctggagagttgaagaggtgtaagaagagatcgtgccctcatttttcacttatttttttggttattcatttataataaaaggttggcattgatatggtacaacctgcaaattacttgcagttctgagtttcagataaaacattataaaacattaaattcaatac

SEQ ID NO: 717762 - DNA, 603 bp, Homo sapiens
atgaattcatttctcctttgaagtcatttattattttataaattgagaacaaccacaccaccaaatgtcacaccttcttataaagtgtgaacaaggaaggtcatgtttttgtgggtattttgtcagacttagaggtttcatttcagggcatagtcaaaggcatcatcctcccaactacccacttgattatgtatttcagatccctccgtgggggccttcttctgacagagaattctttgaggtccgcagtagtgcttttgtcagcacagactgctaatctacatcttgctgcgttctgtttgctgaggttgggcttattcatttaacacrtaccaaccattatccagaggcaccatggagagttagtcatggaataaagcactgtccttgcagatgaaaaaagtctccagagcagacttctgacaggaaaggtttagatgctggagagttgaagaggtgtaagaagagatcgtgccctcatttttcacttatttttttggttattcatttataataaaaggttggcattgatatggtacaacctgcaaattacttgcagttctgagtttcagataaaacattataaaacattaaattcaatac

SEQ ID NO: 717763 - DNA, 903 bp, Homo sapiens
aaaaaaaaaaaaaaaagtgaaaaacacaggataccaaattatgcaaacagtaagagcacagttttatgaaagcaaaaacaaaaagccgtaagtagatttttttaaaaaggaagtaaaagaaataaatggaaacgttaatactggttgtctttgggtgataattgatttttttttccttttctatgatttcgaagtgttccgtaatgaatgtacattttataatttgggcaatgaatatactttttatttttgtaaatgcggccatcaagaggttttaatgcctcctagattatgtgctggctccttactctgccatagaaaaaattctttcatgatctggccatgaacccccttgtctcatctctggccagtcctctccttgcttctggtcagcagtgagtacctggtgttcccagtgtagccctggactcttcttcctctgccccatccatattgatgctgtttgcatcayctgtatgcccctccactgggattcccgctggccaggtcctgcccatctgcagacacttctccaggaagggtcctagtccccactgcccagacatgattcctttttctattttgaatctcttttcccatttgacttattctctctggttttacaggcattttcattctcattttatctcttctgtcagaagagaagattcttcagccagccgtgctcatagcacaagcatgtacttttttctttctttatgtaagtttatcagtatttctttttagagtaatatgtacaatagaaacattggagagtattcattggtataaagaaaaaaagtaaaaaagcacttatcatcccaccacctagagatactccatcactgttaacattttgaaatgtatacatgtgaaaaattgggatcatgagttatatgcaat

SEQ ID NO: 717764 - DNA, 598 bp, Homo sapiens
aaagatgtacgtgttgtttgtctgtaattcaaatttaactgaacatcctgctycctcccccatcactaactctggctccccgggaagttctgattcccaccacagccaccaccattcacctgtgaaccatattgcaaggggcaagctgacttaccgggaacaggaaccgcataaaagagcaaactgagcaggggtcttccccaaccctagtctccaactcatttccttctactccaaaaccatgcatttctcattcccctttgccttgcacctttcccaggattatccagtagcaagcctgttgcagtgggcccatggagccccctgaaaactcagagaggagaggcagaaacgatcacagtgcctgaggccagtggctggggtttctttgagtcttcccaaggagacactgcacgaaccgagcactgtaacttcccactcttggctcaaatcaaacctgcagcctgcgggcagccagagattgggtttcagaagtgctggggttttagaagtattaaatattcataggcatctcccctcggttttgactctgagaatagaattccaaacattccccctctagtggggtctctcctgg

SEQ ID NO: 717765 - DNA, 658 bp, Homo sapiens
tacaacgagtgctgaaagttattatgtctctttggcttttatttattggaataatggagattatatgccaaatgttgcaggagcagaggagggattgatgaataggctggagaaggctttgcctggaatggacatttatactgaatcatcacagataagaatttcttcaagtggaaagaaggatgaaggaaactccttgcaagagaaaggctggagcaagggtataatcatgttcagccagtgtggctgaggtttaggggctgtaggaggtgatggaaggaaaggcacctgggaaagaagcaatggggtgatactttgaaagccttaaataatagcttaaacwatttggactttattctgtaaagaatgtggagtcaacaaaaggatttttggttcattttaaggatggcagtgaagtggtcagatttttgctattgaaaattatggcagcagtatgaaggcaaactagctggagaagggactcggggaaggtaatcgtgttaaagtgtttaggttatgtactcatagtgaaatagggcagtgggaatgaaaaagaggcacagtgaaaaggagacaggagacatttctaaagtagaatcgatatgagcctcagtcagtttgctgcatttttcaactacaaagttcacatttcccaaca

SEQ ID NO: 717766 - DNA, 1724 bp, Homo sapiens
aatcatttgcatttaaacttgatagaccaattacatcaaacagctacctctccgccccagcagattttaatcaacaaacagaaattaatttgtatgtagaaagacagacatgaactgatttatagaatacagttttaaggcaaaaaatatttcttttctttagcaagataagattaaaggactcttctgtacatgactggaaatgaaagccatgttaaagttacatgatatttttggcctggaatttagaaagaattagtaaaacaaactttattacyaggcctattttccaaactggtaatattatagtatgaaagagtcacataatttcttccttttttgctacaatttaacattctagtttgatcttttgctttaaatggtaattcacttaagttttggtctcctctcacctaaagtcacttgctcttaaggaatataaaacatatgtatatttaaaattattttctagttcttagatattaaagatatagggttgccactccacagggctttgaaaaattctactttgcttgggtttttacagtgattaaagtattatttctctttagtaggtacattttaatcactgaacttagaagatatctagtgatattgtactattgtaatttgttgtcattcatttgcctaaagaaaggtgagataagttatatcctttgtattgctgaaaaaatacatcattttgaacatatatcaatacaataagcaaaactctgaaatacattaatatttatataacttcttcaagaattttctcacactgttttagcagttcgtgatggaactaaatctattagaaaaaatactaaaggcattgtacaatatctcatattgcattcttgtatcccataagacaatgggaatttagcaaggagtcaggatcatcttaattgttaaactaaagttttcatttgaatttctgttttattaatggatcaccatgtgcccctgaaggtttttatattggaatgttttactagattccttaacagccatttgcctctcttggatagtggagctccaagcacaaaactttgaagtgttataaaaagcagaacactcctggaatctttacaaatggaacaagactaataccttatgcctacatgatatcaaggcaggtaaaattatattatactaataaagagaaagatgattaaaacacacacacacacacacacatttggcaggctaacagacaaaacatggtggtgtcaaggataccaaactcaagacaaatgtcattattcttctctatgtagtgttgagacctgggtcctgaatttcttagcacattattcacacatttactttttagaaaacttcccacttatgctgacattttacattgtgttttgtgtgaccagaaactacagaatacagaagcagaatactataaagagtggaggaaaaaacccagcaatttgaaactcaaacgtcctggttttgaaccctgacaccagacttcctagccatatgactttgaatatatttaaccactacacctccctacttcacaaactgtaaagcagggacaatcacacttatctttcagcattaagtcgataatgaatgtacgatatcagtaacctggaacatggtgggtgcttcacaaaggatagtccaatttcccccctttttttttttttttgaggcagagtctcgctctgtcgcccaggcttgagtgcagtggtgtgatcttg

SEQ ID NO: 717767 - DNA, 1416 bp, Homo sapiens
gagtaacttatttattgattccttccctttttataaaattaaacacatcctagcaaatgaacgggagtagaaattatgagtgttggaataaggtctacaacaccaaatcctcaatgttcatagtagaaagtatagacaacgtctaaaactgggggagaaaaaacacctcaagaaataggccaggcatagtgactcacacgtgtaatcccagcaattagggaggcctaggcaaggacaatcacttgaggccaggagactagcaggggcaccatgcctggctaatttttgtattttagtagagacaggggtttcgccatgttgaccaggctggtcttgaactcctgacctcaggtgatccgcctgcctcgagctcccaaagtgctggtattacaaacatgagccaccgcgcccagctgaaaggccaatacatttttaacagtgtctacaaatgtactagccatggccctaggtacagtgtgaatggaattaaacagacaataaactcatagataggaggatttcaaatttcgacaaatgccacatcgatgacagaaatatagcaaagcatagggaaggagggaggcatacatgtagctggaatgaacaaaggcctctatggaggagacatttgagtgaagcctggatgataaggaatcagccatgccatgttctagacggaaaatataccaaccaagaagccagaccaaatgcaatgatcctgtgattctgggactggaataaatttaatttgtacagggacagaaaagtcagtgtggctatgatatagtgaaccagagacagaattaaaaagatgactaggccaggcttggtggcatgtgtctatagtcccagctaccttggaggctggggtggaaggattactttagtccaggagttggtggctgcagtgagctatggctgtgccactgcactccaacccttccacctgggcgacagagtgagacctcctcctgccccgccaccmcaaaagaaagaaagatgaagaaagattcagtagagttaagggttttaaagggagtggctgtagtggtggatcataaaacataaaaccagaaaacacggacataaaaaaagtaaaaaagttaaaaaaaaaaaaaaaaaaaaaaaagaaggccaggcacagtggctcacacctgtaatcccagcattttgggaggccgaagtgggtggatcaactgaggtcaggagttcgagaccagcctggccgacatggcgaaaccctgtctctactaaaaatacaaatattagctgggcgtggtggcaggttcctgtagtcccagctactggagaggctgagacaggagaagtgcttgaacccgggaggcagaggttccagtgagccgaaatcgcacaattgcactccagcctgggcaacaagcaaaattctgtctcaaa

SEQ ID NO: 717768 - DNA, 590 bp, Homo sapiens
ctttctttacttacaggctttgggtagagcagagaggaatagggctataggattcattataaagatgtgttgtttccttgcaagtttattccttggaaactttcaataaaggtatactgtatttgaaattaatccargtatagtattataaattaagcataggactagagttagtaagacctggattaaaactccagctccacaacttctagccatttgttgattcaacaagtttattgaaggcttgttttgtgccaagcactgttgtagacattgagaatgcagggggaagaagacaaaaaaaaatcccttgtagagcttagttgggggatagaggtaagagaacacttgtgtaaatagacaaaagcaaataagtataatatcaagtggtgtgaacaaaaataaagcaagataacagcaagaagaagtagaggagagaagatggggagtgtgtgtgtgtgtgtgtctgtctgttgtagatgggacagttgtggaagccttataagagacttgagtaagtgagggaggaagatttaggggaagaaggtaaaagagtagaatgcaatattccagaatcaaatgaactaagt

SEQ ID NO: 717769 - DNA, 953 bp, Homo sapiens
agtctcactgtcccctatctaaaacacacatctgcacatatctaaatctattctttaaggctcagctcaattgttattttttcccagaaggttatttgtgctctatcatcatctcctactttccctgccaagctagaggtgatccttctctttcagctgaaagcactctatttctctctcctctcctctttctcatgtatgtctgtagtgctttcatctctcagcccatgcatttacggaaccttatggaactccttccccattaggcctactgtgaggaataaagggatgaagaaatatgaaagccatgtaatgcaatgtttaaaaaacaagaatgctattacaatatcaatatgagaataaaatgtagaaacaattaagccagtcttattatactcaataagagtatatgatatgcatccatggggaatcctcaactgaagtgagacaccaaaaattcagtttgaaagttaccaagaaacagcttagaagtacaactggttaggaagcagaaacatgcatgccttttcagaagagagaccaaaggccattttaaatattctcttgacacaggcacaggggatgaggaagcagggtggggtgatgggggaacccggcggggagttgaggggactcttctctcctcctgtgggtatacaacaagaaaaacaggatgtgggatctatttagggaagagttttctcccagcaaaagtcgtgcatggggatgagattactaagggaaatgattgggtctctttcattagggagccttaaaaatcaggtacrttgttatatctgcaactgtatagatggagtcagtttctagaacatttttccatttgctaactcttctgtcagagttcagagcagggaatgaatagactctatatagtcaaatcctgatatcctgactccacaggaaagaatagtttctaaaatataagggcacaa

SEQ ID NO: 717770 - DNA, 2601 bp, Homo sapiens
ctaataatataaaattgacttgaaacataaaaataatgatatggcttgctaggttttagatgataaattgttcraatttataggtttcctggatctttgtttttcatattgtgatatattcttaagcatgctgtgataatagaaaaaatagattacaattatgttacacatttaaatactcatgaaactgttttgtaatttcaaatgaccaacttaatagaaataaaattagttgaaaaataaatatagctgaaaagttataattgaaattaaaccgagttgaaaagggagacatgtatctatgtaattctgaaacttaaggctcatagctttattttgattcactttctttttcaaaaatagaatttctcagaagatcaaaggttttctgaatcctaacatgtactatctagttctagatatccagaagaggacattgtttttgtcattgtttcttgggctgccctcataccttcagaaaatacattacacatattgcacatatatgtatttttctgttataaccaatgaaacataaaaagctaccaaagctctcacatgaaactgctgtttgttgttttttgttgttgttgttttcttaatactagttaatttcagaacttattccacacagttccccaatagagttggtcatcagtttgtaccttagcttcctagtttataaatcagtcattgatttctatgaggaataattttgaattccaaccttataaatggagattgggcccataaatgctttttcatccataagacaactgaactacagtatagagttgtgggtgctaaaatcaaactgttggagtccaaatcctgacctcaaaaattacagcttgaccttgggcaaattagctaacctctgtgtgcattggtttcttcatctgtaaatggggatgataattgtgcttatctattggcttcttttcaaaattatgtcacacttgcaaagtgcaagaacagtatctaggaggaatgcttaataaataatacctattattcatgtatttattcattcaaaaatattaaatgggcccctattatgtcccaagcatttcactaggtatgggaaatacaagatagagtaaaaataagcatggtccctttcctcataaagcttatagcctagtgaaggagacgcaggcattaatgaaataatcacacaaataaatgtaaaattacaactgtgatgcatgccataaagcagatctatagtgccataagagtgcatatttagggggaatctataatggcagaaagacttccttgataactgaaggaagctgatgtctgcaggttgaaagtgaatatagcccggtcaaggaatagaccaagggccctgtggctagcgtatagagagccaggtggagaatggaaaaagatggaaatgtaggcaggagcagataatacagaatgttgtagaccacagttataatattcgtccttaaagaccagtgggaaactaatgaaggattgcatttcaatgtggaaactgtgttgtagtctcccagagcataagaggtaagagaaggtagagaaaaatgaccccttcctagatgtagcattggtctcaggctaaatttagaaacgagcatttgccattgcactcttgactccctctctgttccttctacctgggtcattccacctgagcctgtggttcccacgtcactgtttatccctctgcatcaagctagtcttgcccataaaagtacctcttgcctcaaaatgctcgacctttcttgcttctaagcaaatttcattcagatagaagtttcagattcataccagtatttagaggaaagcatattgactaagatgtgagtagctttcttccggaacagtgttctccaacttttcgaactcctttacagtcttaaaatttgctgacgaccagagagaacagttgtttatatgggtgatatttatctattgatcacatttgaaattaaagctggaaaattattaattcatttaaaaataataacttcatcatatgtaaatttgcacatttttatgaaatatcactatattttcccaaacaaaaactagtgggaagagtactattgttttgcattttgcaaatctctttaatgcctggcttaacataaaactgttggtgtatcaaatctcttttgatatcacatgtcatgtagcctctggaaaactccactatataactgcaagagaatgagagtaaaaaggcaaataatgtgttagtaatataatgaaagtagtttttgtctcaccgagccctccaaaaggtcttaggaacccgtaggtccccaggccacaccgtgaaaactactacttcaaaagaaaacatgcaattttaaaatagatgcttattaagccaaaaagactatcatccaagatggcatttcaggtagtctacaagtgaaatgaaaagaattcaggcagcgtggctctaacctagttctgcttttcaccgcttcttccgtgtatctgtttgaaccaattaaaccctctaaaaattccaaatgatttgtagtgttggtagagattcctgtgagtgtttagacaacattgaaaattcttgaaacgtgatatttttgcattggttac

SEQ ID NO: 717771 - DNA, 832 bp, Homo sapiens
cttcctcctccagttcccactgtggccattccaaacctccagcacggtgacctcattcctagcagatggcctccctcctgtgttcctgttctaggcccgcttttctcccctgctgccccagcacccattccttcctcgtgtctcatgccagatcacagcttatgcctcctttccaattccaatccctctggcttacttccttcctttctacctgccccatcactgagtcttcctgctcctcccctcatgccagccctccagccctgttgctgccctgccacttttccttgccataaggtatttattctagaaagaagggcgtagacttggtccatgctttccattcaaaccttctaacgtcgcagtctgctgtcttccccacctgtgtgctaaagagattttcagcagtgtctccaaaagctcccaaacccccaagtttattgggctcttgtcaccttcacagcccttcctctctctgtgggatttgatattcttggtccctcctctcttggcttccaggacccccactaaggccctgttctaccaccatcaccctcccccaaccaccatgtcttgccccattctatttacctctgttccctccattagagggtgtgttctgtatctcctgtgcctagcatggcacctgacayagtatagatgctcaataaatactaagtaagtcaaacccaccaaatacagaagggcccacagaaagtttaaaacttctcactctacagaaaagtatttggaggcatacgcatttgtgctgaatggcaggagacaaaacagaaatgagattccactcactaggggagttttgaagtgtggg

SEQ ID NO: 717772 - DNA, 832 bp, Homo sapiens
cttcctcctccagttcccactgtggccattccaaacctccagcacggtgacctcattcctagcagatggcctccctcctgtgttcctgttctaggcccgcttttctcccctgctgccccagcacccattccttcctcgtgtctcatgccagatcacagcttatgcctcctttccaattccaatccctctggcttacttccttcctttctacctgccccatcactgagtcttcctgctcctcccctcatgccagccctccagccctgttgctgccctgccacttttccttgccataaggtatttattctagaaagaagggcgtagacttggtccatgctttccattcaaaccttctaacgtcgcagtctgctgtcttccccacctgtgtgctaaagagattttcagcagtgtctccaaaagctcccaaacccccaagtttattgggctcttgtcaccttcacagcccttcctctctctgtgggatttgatattcttggtccctcctctcttggcttccaggacccccactaaggccctgttctaccaccatcaccctcccccaaccaccatgtcttgccccattctatttacctctgttccctccattagagggtgtgttctgtatctcctgtgcctagcatggcacctgacatagtatagatgctcaataaatactaagtaagtcaaacccaccaaatacagaagggcccacrgaaagtttaaaacttctcactctacagaaaagtatttggaggcatacgcatttgtgctgaatggcaggagacaaaacagaaatgagattccactcactaggggagttttgaagtgtggg

SEQ ID NO: 717773 - DNA, 546 bp, Homo sapiens
ccatgaaagcaaggagagagtagagtgggatattttagctgtggaaagaagtaaaacccaccaacctagagttctgtatacagtgatattatgaagtatttaaaaaaaaaaaaaaytgatgtaaacttgccctgcatgacatactttttaaaaaaattattcaaaaagaaaaatgatacagcgcagaaatttggatcaagataaaggcaaagcataagaaaaataataaatgaaggtaaaagaaaaatattataagatactttaagtcaaacacggaagaattattacatacatttatatcttctgtatttcaagtcctcattaaaagagtagaaaaagaaacaaagaaggaggctaaacatagaacaaaggggagcatgggaaccatcaacaagagggagattgtgtcgaatatttaggagacagtcagcagatcaaggatcctccagtcatgctccggttctgcagtcagatgtgcaacttccctgactacaccaagttagaggaggcaacaactggggtatgcatggaaggaactgtgactaa

SEQ ID NO: 717774 - DNA, 546 bp, Homo sapiens
ccatgaaagcaaggagagagtagagtgggatattttagctgtggaaagaagtaaaacccaccaacctagagttctgtatacagtgatattatgaagtatttaaaaaaaaaaaaaactgatgtaaacttgccctgcatgacatactttttaaaaaaattattcaaaaagaaaaatgatacagcgcagaaatttggatcaagataaaggcaaagcataagaaaaataataaatgaaggtaaaagaaaaatattataagatactttaagtcaaacayggaagaattattacatacatttatatcttctgtatttcaagtcctcattaaaagagtagaaaaagaaacaaagaaggaggctaaacatagaacaaaggggagcatgggaaccatcaacaagagggagattgtgtcgaatatttaggagacagtcagcagatcaaggatcctccagtcatgctccggttctgcagtcagatgtgcaacttccctgactacaccaagttagaggaggcaacaactggggtatgcatggaaggaactgtgactaa

SEQ ID NO: 717775 - DNA, 630 bp, Homo sapiens
ttttttttttagatggaatctccctctgttgcccagtctagagttcagtggcatgatcgcggctcactgttacctctgactcccaggttcaagcaattctcctgcctcatcctcccaagtagctgagattacaggcgtgtgccaccatgcctggctagtttttatactttkggtagagactgggtttcaccatgctggccaggttggtctcgaactcctgacctcaggtgatcctcctgcctcagcttcccaaagtgctaagattacaggtgtgagccactgcacccagccaataatttatttacatcatttgaaactatcacctattttgaagtatattctgttacaaaagaacaccctaatttttctttgaactttctgaattcttgcttctctttgtttgattctactgttcatccaatttaccattagaacctaaagcccagcattaaattattttattatgatgttagatatagatgattcaatatctacagtgaaacaaagtgccaaggatttatatctagaatgtatgaagaatgccaataaattaaaaagaagaaacagaaacttaaaagaaaaatggccaagagatttaaagattttcttttagaaacaaagataatcaaa

SEQ ID NO: 717776 - DNA, 383 bp, Homo sapiens
cattgctggacacacccttcaaggtcttcaatatctgagtggaggtcttgaaaactgaacaggataggaaagaatgagagagagataagtggcaggcccacwgtatggtcgccactgttgctaattccctacgtatactactctggatgagagtttagagtttgcttttcttttcagtattccagtggacactctctagtatcctctggcaactgatggcaactggtcagggccactccctgatgtagcctgaaggccagggttgaacaggttggctgccttgtctggaagggaggaaaggtctcttctattctttctgatcaaaagtccccaatccctatgtgtggcacagtcagaagagtaagctcgaccatggtgaattc

SEQ ID NO: 717777 - DNA, 624 bp, Homo sapiens
catttactattttccatgtttctctgtgttgatacacagttctgctgatgtaagccatgctctgctgatctcaacggagtgtacctatgcatctgcagtcagctgccacgtaatctgcagctggtttatctaggatggcctcattcttacgtcttacgtctggcaattggaggtacatattatttggagtgatgggagtgatatgatcattgtctttcatcaggtgacagctaccctggggaagaatatttcagtggcatcaagaaggracgaatctcaatgcataagcactttttaagcctctgcttttttcacatttactactttccaattaccaaagcaagagacatggattctatgctcagaatcagtatggaggggaactctgtgagggcatagatacagcaggaagtgactaaattgtagcaatctataagaaattttatgccttaattaattttgatttctcccacaaagatgtatgatatcaaagtttttttttttcaagtcactagactgttataaaaagtgaagctgaatgagatcgtgattttactagacagagagtgaaactaataatgaaaaatgaagccagtgttactgggtattgtccagggctagcat

SEQ ID NO: 717778 - DNA, 332 bp, Homo sapiens
atttatagttaaggctaaaaagtatatttattgcagaggatgttcataaggccagtatgatttataaatgcaatctccccttgatttaaacacacagatacacacacacacacacacacacacaaaccttctgcctttgatgttacagatttaatacagtttatttttaaagatagatccttttataggtgagaaaaaaacamtctggaagaaaaaaaccacacaaagacattgattcagcctgtttggcgtttcccagagtcatctgattggacaggcatgggtgcaaggaaaattagggtactcaacctaagttcggttccgatgaattc

SEQ ID NO: 717779 - DNA, 1465 bp, Homo sapiens
gctcagagtcatgcacctgttccctatttcatgtggaggacacagtggcttggaatgggaacatatatatactcatgggtggaagcgaatcgtctgaaaagctggtcagggacctggaaggaggactgaaaaattgcagacaagaatgtttggtggagaggaatgtgtgtgaacctataggagtgggcaaaatatgtgaagatttttggctcttgtattcatgaacactagaaagcatcaatcacagaagaggcactgaacaacagagtagacaaaatgactaggccagttgacattaggcagtctctgagctgatgtgactgacacatgaacggagcagccacagtgcagagatagaagccatacatgggctccgtctcacacctcagtactgacgcctgtgcaagtctaacctgtcagcaacagggaaaaacaccgctcccaatacgacatcttcaaggaggtgatcttcaatcgtgattttccttgtgggaggggatccatgtgcatccgacatatgtggcagcacattcgacattttcttgaaaaatcctgggaattgtagtgccttcagtgcccagattaccctcaatgttgggtcatttcctggcttcagcctcatgcctattaagttgaatgagcacagtcgtacaaattactcaggaaaaccaaccaatgaactaaggctttttgttttgttttgttttgcttttttgatacggagtcttgctctgttgcccaggctggagtgcagtggagtgcagtggcacgatcttggctcactgcaacctctgcttcctgggttcaagtgattcttctgcctcagcctcccgagtagctgggactacaggtgcgttgcaccatgcctggctaatttttgtatttttagtagagacagggtttcaccatattggcccggctgatcttgaactcctgacctcatgatctgcccgcctgggcctcccaaagtgctgggattacaggcaagaaccactgcacctggccaaactatagtatctttaccaaccatatctggaacatttaatcagtagtgtatgcaaaatttttgcctcatattaggcatataatgctaattgctttataaatgttagttgaataattatcagtaagactaytggcctggatattagaatttggaaatttaacattttaatgggaattataaaatgccatgtccccattcttgtcttaaaataattttataacttcagtatttcttaatagctttgtgtcaacctatggacatcaagctctgcctagaattaacaatgatgtcctcaggggctgatggaatgtataagggcatgtttgtcctttacttagcatttggagtcccctcttctctagctgatggatttgctgttatattccttgacccctgttctgacttacagttattagtggacactgagattttacagtcagggttgaaaggaacagaaag

SEQ ID NO: 717780 - DNA, 606 bp, Homo sapiens
cagtgataattgcatcaaaattctccgtcatggaaaaataaacaatgaattgttaagagracaaaaatgtcaacaagtttacaatttatttttgctgaatggaactaactttggtgcaactaatggtctagggaagttggcaaaggctggaatgtcaggaagaaagctacattctacacccaggcccctaagtgactccttgctgttctcaggccaaaagaagagaaactctattgctacaaaagggagcaatcctcaacttctcttttcctttgtgggctactgtggctgggcaggagaccccacagatgctatgaagtccctggggattagagaggtagttttaagttgaaatgaggaaggagaaaaaaaattaataaaaaatggggatcctttcaacatagtgttggaagttctggccagggcaatcaggcaggagaaggaaataaagggtattcaattaggaaaagaggaagtcaaattgtccctgtttgcagacaacatgattgtatatctagaaaaccccatcgtctcagcccaaaatctccttaagctgataagcaacttcagcaaagtctcaggatacaaaatcaatgtgcaaaaacc

SEQ ID NO: 717781 - DNA, 1894 bp, Homo sapiens
tttatgatgaaaaaaataacaggaaacactaagttactgtagattgaagagccagggaagatcactctgagaaagtaagaaacaaatctgaggaagtaaaagaggcctctaggatagaaatgagatttccttgaaattagtctggggaatattgttccatgcaaagcagagaatatgtatgaagcttccaagaagggaaaaaagtatgttagttcgagcttttaatgaaagtctgaaggctagtgagtttagagctgttgtccaatacagtggccattggccacatatggttattcaaatctagatttaattaattaaaattaaaatctgctcctcagttgctctagacacattttaagtactcagtagttacatatggctactatattgaacagtgcacatgtggaacatttccttcatcacagaaagttctgttggagagcattagtccaaagcatatrtagagatctatagtatatttgaaataatattcatatggaattttcattaaatggaaaattataaatggaaggcttttaagtatcagtatacaaaccaggaaatagaatgatatcaaatatattaaaaataaatgttcaatcattggatttaaagttgatgatgtacttaacatggatgtatccagctgtaatacctggaccactgatcaatcttagcacaaaaaagatggcccaccattgtgtacttccagatggaataacacatcatcacctatgaaacagtcttgcaaaaaaaatcaaacctgaacctgctcaatcctttagattagcactatccaacagaaatataatgcaaaccacatgtataattttaagttttctactagcctcattaaaaaagtaaaaatgaataggtgaaaacaattttaacatatttttattgaatctaacatattcaaaaatcattgaaattatgattgaagcattgaaattacaattgattgattgattataatcaatgtaaaaataattaatattttatatctttttctgttaagttttggaaatgtgttgtatttttacattatcagcacatcacaattgagactagttgcaattcaagcactgagtagccatatggatgctgattcaaacaaactaacagaaaaaaattatgagatgatggaggaaacgtgaataccatcagaatatttggttatagtgagagcttattatttcttttcaggtataataacagtactgtgtttaagtttttaaagagagcccttatcttttagatgcatattgaaatatttatgaatgagattatataacatctaggatttgcatcaaaataatccagtgatgtctgtatggggagtgaataagaatgcagaagacacaagattggctatgagctgattggttgaaactaagaaaatgacaccagctttctgtttaatgttactgttgaagaatagagagggtcttgttcattgaacccactacaaatgagataatggaattaggattagctgttattactgtcaatcacttctgacccaaggggaggttataacaatggctagaatgcttcctctgactgtgaagcagacgtccaattgtggatgatatttctgccaccctactgctgaggaaaaaaaaaaaaaaagattgtggctctaaatctactctgttatatgaaaaaaatgaagaaatttcagctactctcagggaagaaaataaatgtttccaacccagcttgaatcagagtgttcctaggggagaagctagtatggtggagatggcgctaacccaaatatgaaacctcccaatgggaagttaacactcagagtgagaagactgagctactgtgatcagttaaccattccctcatggaatatcactttctttctggtactaaactttggaag

SEQ ID NO: 717782 - DNA, 642 bp, Homo sapiens
tcactgtgttagccaggatggtctcgatctcctgaccttgtgatccgcccgcctccgcctcccaaagtgctgggattacaggcgtgagccaccgcgcccggcaaaaaaaattatttttaaagtagccccaaaaattagtgctgcctaatttatgatccaagggttatctccacactccagtttttctttttctttttttttttgagacggagtttcactcgtttgcccaggctggagcgcagtggcatgatgtcagctcactgcaacctctgccctctggtttcaagcgattctcctgcctcagcctcccaagtagctgggattacaggcgcccgccgccacacctggctaatttttttatttttagtagagacggggtttcaccatgttggccaggctggtctcgaactcctgacatcgtaatctgcccaccttggcttcccaaagtgctgggattgcaggtgtgagccaccgcgcccagcctgtttttctttatacgttctttgtctatgaattgtccctcttccctaatgcctacttttatggaagaaaaagtttaactartatgaagtacacgacaaagagaagagaaaaatttttaaacacagctcttaaaccctatatcatatttggaattaccta

SEQ ID NO: 717783 - DNA, 1098 bp, Homo sapiens
ataaaaatcaatatagcagtacagaaaaaaaggcctaaattgatgtgctaattataggtacttaaaagctgatttcaataaatacgtgaaaatcagtctaaccctcttccatctttttttccttagtgccatctgggattgacagctcagcctgaactctatcttctgaacaccatggacgctgactcacttgtgtctagatgactgacagcctgagagactctataagaacatgtttttctaagccctttttgtgccaggtgtcccgttaacgtctctgttagttcagaggtgagttttgttcagacgttttgaacaaaaggcaaagatttcctcatgggaagggtgttcaaaactgacagctataaatgtaggtcagagacccacccacctcataacagtcatacactcccagagttaaacgattggcctctgatggccacacacccctatgggcttgtgtcttggactctgggatttaaaagatatatatgtatatatatttatgtaaacctgagcatctcagtttgggtagagttttaaggttatatgaaactgatagaacttttgtattttttttttaaatattgttttgatatatcagatatttgttttgtctggatcacaagtgagaaagaaaagagaacaatgctctttttcacaatgaactggtcaaattgactatcttgtaaagtgatactttactatgtcagtgaaatttcagtttgattttagtcaaccagattatatcctttgtatctactgatattaacacatcatattaacacatcatttcttaaaaaaacatttcttctgtttggcaatcataattaactctggttatcagcctattttgtaattattgtctttgtcgtcacttttcttgaattgttttctagtcattaaacagatatgaaggcattgccaaagagctttaatatccagtaacaagatccagaaaccamactttaaccagtgatcagttttccgtgctgcattgtaactcagctcattctggcattcaagttttaggcaaaaaaagaggaaacttctaacatttagcttgtaagtcctgacataagatagtgaagatattta

SEQ ID NO: 717784 - DNA, 2149 bp, Homo sapiens
aaaaaaaatgaaaaaagaaaggagaagaaatacattttttctcggccaagggctttctttaatacctgttaatatatttgctttttctccttacagtagaatgaagctctttagtgcatgcacagataattgttcacactgtggggatttgggttcattgattaagacctggtagccttttactacactttaatttgccctttttttttcaagaaggtagttttgcattcagtgggtgcaagttgaagggtgtttcacatttttctgtatatccaaggatcatccagtcattcacataccttttcctctctgtgttagaaggcaagtgagtgtaaattaggggatacatgtctggaaatagacggtatgtttgtggaaatagattttcgtgtaggagggaagatgagacgggtttttgagaagcttggacccagaaaggtgatggtacgtaagatttcccatcttcccactctggatttattcttttgacttgtgctagtgaatatagcagccagtagtcacatacggctattcaattaaaattaygtaaattgggctggcacagtggaccccagcactttgggaggccgaggtgtgtggatcacttgaggccagcagttcaagactagcctggccaacacagtgaaaccctgtctttactgaaaatagaaaaaattagccaggctggtgactcacgcctgtaatcccaactacttgggaggcaggagaatcgcttgaacccgggaggcggaggttgtagtgagccaagactgcaccactgcactcccgcctggacgacagaatgagacttttgtctcaaaaaaataaataaaatgacagttttccaattgctgcatttctagtgctcagtagccacatgtgctagtagctgccatcattttggacagcacagatattcccatgattgcagaaggttcaagggacagtgctgctctgggatggtcactgaggaggtgcatgccgctcatgtctatgaggctaacctttcctgtctcttggcagctgaccaagaatgggacagtggagtcggtggaggctgatggcctgacgctggatgatgtgtcagatgaagatattgatgtggaaaatgtggaggtggatgattacttcttcctgcagcctctgcccaccaaacggcgacgggccctgctgagggcttctggggtccaccgtattgatgctgaagagaagcaagaacttcgagccatccgcctgtcacgggaagaatgtggttgtgactgccgactgtattgtgacccagaagcgtgtgcctgcagccaggctgggattaaatgccaggtcagtccaagttggcctgagatagtatatgtacaccagggtcagcggggtgaggtgtgggtgccactgaacatgggaggcccattcaggggtggattccctatggttgtgaacactctccagttccacaaccctcctccgtcaacagagtaagcaaacagcacacggccaggcatggtggctcacacctctaatcctagctatgtgggaggctgaggtaggaggatctcttgagtccaggaggtcaaggctgcagtgagctgagttcacaccagtgcacgccagcctgggtcacagagtgagaccctgtctcttaaaatttttgcaaagaaaacaagcatgacaggattcttaggctgtggaggtatctcatctttttttgtttcatttctcagaggtgataagaagcagctgttaggaaagggatgaagaggagttagtacatttaacatttagtaaatgtttcctaaatactgattcctaaacagtatttcctaaatactgtttcctaaatactgattccttgagataaaaggaagcaggactgggcatggtggctcacatctgtaatcccagcactttgggaggccgaggcaggcaggcagattgcttcccaggagttcgagaccagcctgggcaacatggctaagccccatctttacaaaaaatacaaaaattagctggacatggtagcatgggcctgtagtcccaggtactcaagaggctgagatgggaggaggatcacttgagcctgggaggcataggttgcagtaagctatgattgtgccactgcactccagcccgggcgacagagcaagaccctgtctca

SEQ ID NO: 717785 - DNA, 2149 bp, Homo sapiens
aaaaaaaatgaaaaaagaaaggagaagaaatacattttttctcggccaagggctttctttaatacctgttaatatatttgctttttctccttacagtagaatgaagctctttagtgcatgcacagataattgttcacactgtggggatttgggttcattgattaagacctggtagccttttactacactttaatttgccctttttttttcaagaaggtagttttgcattcagtgggtgcaagttgaagggtgtttcacatttttctgtatatccaaggatcatccagtcattcacataccttttcctctctgtgttagaaggcaagtgagtgtaaattaggggatacatgtctggaaatagacggtatgtttgtggaaatagattttcgtgtaggagggaagatgagacgggtttttgagaagcttggacccagaaaggtgatggtacgtaagatttcccatcttcccactctggatttattcttttgacttgtgctagtgaatatagcagccagtagtcacatacggctattcaattaaaattatgtaaattgggctggcacagtggaccccagcactttgggaggccgaggtgtgtggatcacttgaggccagcagttcaagactagcctggccaacacagtgaaaccctgtctttactgaaaatagaaaaaattagccaggctggtgactcacgcctgtaatcccaactacttgggaggcaggagaatcgcttgaacccgggaggcggaggttgtagtgagccaagactgcaccactgcactcccgcctggacgacagaatgagacttttgtctcaaaaaaataaataaaatgacagttttccaattgctgcatttctagtgctcagtagccacatgtgctagtagctgccatcattttggacagcacagatattcccatgattgcagaaggttcaagggacagtgctgctctgggatggtcactgaggaggtgcatgcygctcatgtctatgaggctaacctttcctgtctcttggcagctgaccaagaatgggacagtggagtcggtggaggctgatggcctgacgctggatgatgtgtcagatgaagatattgatgtggaaaatgtggaggtggatgattacttcttcctgcagcctctgcccaccaaacggcgacgggccctgctgagggcttctggggtccaccgtattgatgctgaagagaagcaagaacttcgagccatccgcctgtcacgggaagaatgtggttgtgactgccgactgtattgtgacccagaagcgtgtgcctgcagccaggctgggattaaatgccaggtcagtccaagttggcctgagatagtatatgtacaccagggtcagcggggtgaggtgtgggtgccactgaacatgggaggcccattcaggggtggattccctatggttgtgaacactctccagttccacaaccctcctccgtcaacagagtaagcaaacagcacacggccaggcatggtggctcacacctctaatcctagctatgtgggaggctgaggtaggaggatctcttgagtccaggaggtcaaggctgcagtgagctgagttcacaccagtgcacgccagcctgggtcacagagtgagaccctgtctcttaaaatttttgcaaagaaaacaagcatgacaggattcttaggctgtggaggtatctcatctttttttgtttcatttctcagaggtgataagaagcagctgttaggaaagggatgaagaggagttagtacatttaacatttagtaaatgtttcctaaatactgattcctaaacagtatttcctaaatactgtttcctaaatactgattccttgagataaaaggaagcaggactgggcatggtggctcacatctgtaatcccagcactttgggaggccgaggcaggcaggcagattgcttcccaggagttcgagaccagcctgggcaacatggctaagccccatctttacaaaaaatacaaaaattagctggacatggtagcatgggcctgtagtcccaggtactcaagaggctgagatgggaggaggatcacttgagcctgggaggcataggttgcagtaagctatgattgtgccactgcactccagcccgggcgacagagcaagaccctgtctca

SEQ ID NO: 717786 - DNA, 1570 bp, Homo sapiens
ccgaagtactgggattacaggcatgagccaccgtgcctggccccttgttggccctctgatgggggacagtttaagacacatttcagttgaaaacagcaataccatccctaagaatgaaatttatctggaacttaattattgagggtgtagatgctgagtccttgtggttggatttctcctaactcactctttctttatttttagctgggtaacaaataactgtggtatatctggccaaatactgcttttcagaccaaagtcccataatgagtcattctgttacacacacacctgagaacagtcctaagaattgatgcagctgggcctggcatgttggctcacacctgtaactagcactttgggaggctggggtggaaggactgcttgagcccaggagtttgaggccagcctgggcaacatagcgagaccccatctctacaaaaaattttaaaattagggccgggcgcggtggctcacacctgtaatcccagcatggctccaggctgcagtgagccatgatggcaccactgcactccagcctggacgacagagcaagaccctatctccaaaggaaaaaaaaatggtataactggagtggagatttctataagtcagtatcatagaaagacattgtgatttgtacatgcttatttgcttacttgtggttttaatttttccttttatttttggtttatgtgtttttcctgttggaatatgaaagtgataaggaggtagaaagcatctcctttccagatattcctggtctgtaagttaattatcttggtaactgcttcagaactaaactagtcaaccctcagggaaaataaagcaggtagctaaaaaattggccactgtgtgaacctgcgttctagcaccttagcaaactaaggcacatttgcttagtttccccagaatgtattttttttgaagtagcaagatcttccactcactctcccatgcctgtcattgcaggccataggcttggttccagccttttgttgtctcagtgaaccaggtaagttctgaaaaagtctctgaggctcgtaaatttcctctgtgaaaactatcagcattcagagaagtatctctggactcttaactggaaggaccctgtgctgtgattttgtctacttgttatttagaagaggaaacaaagccctagagagataaatgattctcttgaggtcacaccactaattaatggctgagctgggattgaaatgcaagtggtctgataactaccatctagtgttctgttagctcacactgcatgctatgctttgaattggttgcttttcttcttayaaggagacctcaaatcccaactgcctgtttgccagctcatgtctcctgtctccattgttaggattgtaggtctcatcttgccccaaccttcttgtccccgctcaggtggatcgcatgtcctttccatgtggctgctcccgggatggctgtgggaacatggcaggacgcattgaatttaatccaatccgggtccggactcattacctccacaccattatgaagctggagctggagagcaagcggcaggtgagccgcccagcagccc

SEQ ID NO: 717787 - DNA, 3711 bp, Homo sapiens
tgacttmagtgagtttgcactggcgcctgccgccttccttagaggcctgagcaaatgatgaattttttttttttttttgccttgtgaattactacatctcagtttaaatcggcaacatattagttaaaacaactcatctcaccttaaaattcttctacagtttgaagttcaggactaggatattgcattataatccatacacagtcttgaatttaatgacaaaaaagaaagaaaatctatagaccaaagaataatactgaagaaaaaaataatatttgaaaagggtttaataatagacttctagtttctttctctgtttttctttcctgtcacttaactaaagctatatctgcaagagtcacagatatccagactcccaaaaatcaaattaaaaataccccagaatctttgctttctttttatacttgaatgcctctcacttctatttgcagagatgctgcctttctttcctgtggcagagccttttgcttcaaaggaagctcatttacgctattagcaaccccactaaatcaataattctctccctcactcttttgcaatgttttgtttcttcaattcacactgagacctgcacgaagttgtggaaactgctctttcccagggagattaacatgaattcatcttgaagtcctaactgtgttctggctatttaatgctgtacatttataacctttgtcttccttctttaagctgcagtttctttgtgttatcacagagataggaaaactgacacaggaaatgcataacacatgttagactccaagacctctctccatatgggctcagttctgatttcctctgtttcctatatggcactgagacaaatgcctggacacagggttttttcttcctaaagactcacccagaagttctgctattaatcatcaatccgttcctcaaaataacttggcatagctaaacctagcaaagtaaggaagatctgacatatggtgaagttctccaacagcaattgtgggattacaagataacagccacaaatctgtgtgcatggctattttacatagctcaagacttcttgagggggagtaaatacccaaacactgctgatgacacccacttccaaatttccagccagtgctctgcataatgtaggtgtttaatccaggttcgtggatgatgattaaaataattcatgattctgtcctgcatgaagagcatagactaagctttcttctctaacagtaattcaaatccatgatcctacatttcccactaagccagcctaggaagaaaccacagtgagaaagtgaattctagggcttaacaaaaactgaggtttttaaaattctctttctataatatttaagggaatgtaatcaaaccaccaaatataaaaggaattaattgtgtaatctaccattaccactaaaaagaaagaggcaagaagaaaattcgactacaataaaaggtacaattatttcaatttcatctcttttcaaaatgaacattctttcacatcagacatctgcaatttagtacaaatttgctccctaaaatagtatcaattacaaaactttaacctaaaaatgatgaaataacatttgcaagttatttaatggtatttataaatttaagaatgataaagttatctgattggtaatgttgtgtctttattgttaatccagttattatcaagaacattatggacatagatgatgatagatagatagatagatagatagatagatagatagatagacagatagatagatagatgatagatagataatgtctgtgtatagagagtctaggtgtgtagataaattgcttctttcccagaaccataaatacccaaaaagaaatcttttttatataatcatgcctttgccttttgaatttctgtgagtgcctataatcatgtaaggtccaaaaaggtaatcaattgaccttatcattgtgttgatccttccagtttgtgcccaagtatttgtaatcactttaacatcccattaaggaaattgtcattaattcctcccatggaccttaaatttagagaggaagatcaaatttgcttctcaaattgagacccattatggtccagtaagcctgtctctcacaggcaggatggaggcaaaaagtttttgatagcagacgggcatagcctcaccagagtggtcatcaagaaatctgtaactaggatcagcataatagaatgtctactgtggagtgcaggagttcctttctgcaagagctgattgttaaatatttaagaattacagcttatctcaggtatgatggaattatttacgccttaaaaacaggcaaatgctacaagtctgggcttttgttgttgtcactgtttttgtgatcattgaaacagacagtttatcagcacaccaatgcatgtagtacagcacagagtcagcaatccatataagagcattctaatttagaagccagcactgcaattccttcaaagaaatggcaccacactatgtagctggggccttttatcgcagactgcctaggctattcatgttactccacccaaaatactttattaaccattatatagctaagtttacaactgattctttaaggttcattagacagtaaacaataaaatgtacatttttataggggttacaataagcatctgtgtaataatctcaaagtctacttcaaaatttttaatacttgagttataattcatctgtgtttatttcctagaacgaaagtatttttaattaaaataaaaatgattaatgatattttacctttactacacagactcaataagcctatcaaaagagtaatcattagtactactgttgagtacctactatgtgcaagataatttttatcacattccaccacaatgagtaagaaattattatccccattttatagcagcaaaactaaggtttcaggactttaacttatctaaagtttcacaacaagtagagtccaagttgggattagaactctgactccaaagctcattcttttagccactatattttattgcattttgtgcatgcatggttcttatatactcaggcacacacaaatgtttcttttcaccagcttaaaatcttcataactgtttgctgagctaaccatagaattattgacatgtccataggtcatttatattgatggcctttgagagtttttgctaaaccgagttgttcattttagtgcacccatcaactaaatatttggtgtcacaattgccacaatattaaacatgtgcaaactccttcattatatagttatatcacagttcaaaaatttccctgcctttcacagcagccatactctgcaatgaaatttcaattggtgccaatggttctatatactaaatatgtttcttttaaagtaagcatttccattgatccaaaacaaaataaaaagcatctaaactcataatttcctgttagtttttatatctaaaaattgaatcctattatttaaattaatctgatccaacaatttatatatcacttttgtcctcatctctatcagtaaggtgaaattctacacatttagaatgaagagtgttcttggaaataacgccaagagatagctgacagatttccacaacagcaatcgacaggaaaatatcaattactttctgaagctgacaaatctaatagtccctgctatgttgagaaatgtcttataaatgttggagaaggaagagcttaaaccttgggaagtcactga

SEQ ID NO: 717788 - DNA, 3711 bp, Homo sapiens
tgacttaagtgagtttgcactggcgcctgccgccttccttagaggcctgagcaaatgatgaattttttttttttttttgccttgtgaattactacrtctcagtttaaatcggcaacatattagttaaaacaactcatctcaccttaaaattcttctacagtttgaagttcaggactaggatattgcattataatccatacacagtcttgaatttaatgacaaaaaagaaagaaaatctatagaccaaagaataatactgaagaaaaaaataatatttgaaaagggtttaataatagacttctagtttctttctctgtttttctttcctgtcacttaactaaagctatatctgcaagagtcacagatatccagactcccaaaaatcaaattaaaaataccccagaatctttgctttctttttatacttgaatgcctctcacttctatttgcagagatgctgcctttctttcctgtggcagagccttttgcttcaaaggaagctcatttacgctattagcaaccccactaaatcaataattctctccctcactcttttgcaatgttttgtttcttcaattcacactgagacctgcacgaagttgtggaaactgctctttcccagggagattaacatgaattcatcttgaagtcctaactgtgttctggctatttaatgctgtacatttataacctttgtcttccttctttaagctgcagtttctttgtgttatcacagagataggaaaactgacacaggaaatgcataacacatgttagactccaagacctctctccatatgggctcagttctgatttcctctgtttcctatatggcactgagacaaatgcctggacacagggttttttcttcctaaagactcacccagaagttctgctattaatcatcaatccgttcctcaaaataacttggcatagctaaacctagcaaagtaaggaagatctgacatatggtgaagttctccaacagcaattgtgggattacaagataacagccacaaatctgtgtgcatggctattttacatagctcaagacttcttgagggggagtaaatacccaaacactgctgatgacacccacttccaaatttccagccagtgctctgcataatgtaggtgtttaatccaggttcgtggatgatgattaaaataattcatgattctgtcctgcatgaagagcatagactaagctttcttctctaacagtaattcaaatccatgatcctacatttcccactaagccagcctaggaagaaaccacagtgagaaagtgaattctagggcttaacaaaaactgaggtttttaaaattctctttctataatatttaagggaatgtaatcaaaccaccaaatataaaaggaattaattgtgtaatctaccattaccactaaaaagaaagaggcaagaagaaaattcgactacaataaaaggtacaattatttcaatttcatctcttttcaaaatgaacattctttcacatcagacatctgcaatttagtacaaatttgctccctaaaatagtatcaattacaaaactttaacctaaaaatgatgaaataacatttgcaagttatttaatggtatttataaatttaagaatgataaagttatctgattggtaatgttgtgtctttattgttaatccagttattatcaagaacattatggacatagatgatgatagatagatagatagatagatagatagatagatagatagacagatagatagatagatgatagatagataatgtctgtgtatagagagtctaggtgtgtagataaattgcttctttcccagaaccataaatacccaaaaagaaatcttttttatataatcatgcctttgccttttgaatttctgtgagtgcctataatcatgtaaggtccaaaaaggtaatcaattgaccttatcattgtgttgatccttccagtttgtgcccaagtatttgtaatcactttaacatcccattaaggaaattgtcattaattcctcccatggaccttaaatttagagaggaagatcaaatttgcttctcaaattgagacccattatggtccagtaagcctgtctctcacaggcaggatggaggcaaaaagtttttgatagcagacgggcatagcctcaccagagtggtcatcaagaaatctgtaactaggatcagcataatagaatgtctactgtggagtgcaggagttcctttctgcaagagctgattgttaaatatttaagaattacagcttatctcaggtatgatggaattatttacgccttaaaaacaggcaaatgctacaagtctgggcttttgttgttgtcactgtttttgtgatcattgaaacagacagtttatcagcacaccaatgcatgtagtacagcacagagtcagcaatccatataagagcattctaatttagaagccagcactgcaattccttcaaagaaatggcaccacactatgtagctggggccttttatcgcagactgcctaggctattcatgttactccacccaaaatactttattaaccattatatagctaagtttacaactgattctttaaggttcattagacagtaaacaataaaatgtacatttttataggggttacaataagcatctgtgtaataatctcaaagtctacttcaaaatttttaatacttgagttataattcatctgtgtttatttcctagaacgaaagtatttttaattaaaataaaaatgattaatgatattttacctttactacacagactcaataagcctatcaaaagagtaatcattagtactactgttgagtacctactatgtgcaagataatttttatcacattccaccacaatgagtaagaaattattatccccattttatagcagcaaaactaaggtttcaggactttaacttatctaaagtttcacaacaagtagagtccaagttgggattagaactctgactccaaagctcattcttttagccactatattttattgcattttgtgcatgcatggttcttatatactcaggcacacacaaatgtttcttttcaccagcttaaaatcttcataactgtttgctgagctaaccatagaattattgacatgtccataggtcatttatattgatggcctttgagagtttttgctaaaccgagttgttcattttagtgcacccatcaactaaatatttggtgtcacaattgccacaatattaaacatgtgcaaactccttcattatatagttatatcacagttcaaaaatttccctgcctttcacagcagccatactctgcaatgaaatttcaattggtgccaatggttctatatactaaatatgtttcttttaaagtaagcatttccattgatccaaaacaaaataaaaagcatctaaactcataatttcctgttagtttttatatctaaaaattgaatcctattatttaaattaatctgatccaacaatttatatatcacttttgtcctcatctctatcagtaaggtgaaattctacacatttagaatgaagagtgttcttggaaataacgccaagagatagctgacagatttccacaacagcaatcgacaggaaaatatcaattactttctgaagctgacaaatctaatagtccctgctatgttgagaaatgtcttataaatgttggagaaggaagagcttaaaccttgggaagtcactga

SEQ ID NO: 717789 - DNA, 3711 bp, Homo sapiens
tgacttaagtgagtttgcactggcgcctgccgccttccttagaggcctgagcaaatgatgaattttttttttttttttgccttgtgaattactacatctcagtttaaatcggcaacatattagttaaaacaactcatctcaccttaaaattcttctacagtttgaagttcaggactaggatattgcattataatccayacacagtcttgaatttaatgacaaaaaagaaagaaaatctatagaccaaagaataatactgaagaaaaaaataatatttgaaaagggtttaataatagacttctagtttctttctctgtttttctttcctgtcacttaactaaagctatatctgcaagagtcacagatatccagactcccaaaaatcaaattaaaaataccccagaatctttgctttctttttatacttgaatgcctctcacttctatttgcagagatgctgcctttctttcctgtggcagagccttttgcttcaaaggaagctcatttacgctattagcaaccccactaaatcaataattctctccctcactcttttgcaatgttttgtttcttcaattcacactgagacctgcacgaagttgtggaaactgctctttcccagggagattaacatgaattcatcttgaagtcctaactgtgttctggctatttaatgctgtacatttataacctttgtcttccttctttaagctgcagtttctttgtgttatcacagagataggaaaactgacacaggaaatgcataacacatgttagactccaagacctctctccatatgggctcagttctgatttcctctgtttcctatatggcactgagacaaatgcctggacacagggttttttcttcctaaagactcacccagaagttctgctattaatcatcaatccgttcctcaaaataacttggcatagctaaacctagcaaagtaaggaagatctgacatatggtgaagttctccaacagcaattgtgggattacaagataacagccacaaatctgtgtgcatggctattttacatagctcaagacttcttgagggggagtaaatacccaaacactgctgatgacacccacttccaaatttccagccagtgctctgcataatgtaggtgtttaatccaggttcgtggatgatgattaaaataattcatgattctgtcctgcatgaagagcatagactaagctttcttctctaacagtaattcaaatccatgatcctacatttcccactaagccagcctaggaagaaaccacagtgagaaagtgaattctagggcttaacaaaaactgaggtttttaaaattctctttctataatatttaagggaatgtaatcaaaccaccaaatataaaaggaattaattgtgtaatctaccattaccactaaaaagaaagaggcaagaagaaaattcgactacaataaaaggtacaattatttcaatttcatctcttttcaaaatgaacattctttcacatcagacatctgcaatttagtacaaatttgctccctaaaatagtatcaattacaaaactttaacctaaaaatgatgaaataacatttgcaagttatttaatggtatttataaatttaagaatgataaagttatctgattggtaatgttgtgtctttattgttaatccagttattatcaagaacattatggacatagatgatgatagatagatagatagatagatagatagatagatagatagacagatagatagatagatgatagatagataatgtctgtgtatagagagtctaggtgtgtagataaattgcttctttcccagaaccataaatacccaaaaagaaatcttttttatataatcatgcctttgccttttgaatttctgtgagtgcctataatcatgtaaggtccaaaaaggtaatcaattgaccttatcattgtgttgatccttccagtttgtgcccaagtatttgtaatcactttaacatcccattaaggaaattgtcattaattcctcccatggaccttaaatttagagaggaagatcaaatttgcttctcaaattgagacccattatggtccagtaagcctgtctctcacaggcaggatggaggcaaaaagtttttgatagcagacgggcatagcctcaccagagtggtcatcaagaaatctgtaactaggatcagcataatagaatgtctactgtggagtgcaggagttcctttctgcaagagctgattgttaaatatttaagaattacagcttatctcaggtatgatggaattatttacgccttaaaaacaggcaaatgctacaagtctgggcttttgttgttgtcactgtttttgtgatcattgaaacagacagtttatcagcacaccaatgcatgtagtacagcacagagtcagcaatccatataagagcattctaatttagaagccagcactgcaattccttcaaagaaatggcaccacactatgtagctggggccttttatcgcagactgcctaggctattcatgttactccacccaaaatactttattaaccattatatagctaagtttacaactgattctttaaggttcattagacagtaaacaataaaatgtacatttttataggggttacaataagcatctgtgtaataatctcaaagtctacttcaaaatttttaatacttgagttataattcatctgtgtttatttcctagaacgaaagtatttttaattaaaataaaaatgattaatgatattttacctttactacacagactcaataagcctatcaaaagagtaatcattagtactactgttgagtacctactatgtgcaagataatttttatcacattccaccacaatgagtaagaaattattatccccattttatagcagcaaaactaaggtttcaggactttaacttatctaaagtttcacaacaagtagagtccaagttgggattagaactctgactccaaagctcattcttttagccactatattttattgcattttgtgcatgcatggttcttatatactcaggcacacacaaatgtttcttttcaccagcttaaaatcttcataactgtttgctgagctaaccatagaattattgacatgtccataggtcatttatattgatggcctttgagagtttttgctaaaccgagttgttcattttagtgcacccatcaactaaatatttggtgtcacaattgccacaatattaaacatgtgcaaactccttcattatatagttatatcacagttcaaaaatttccctgcctttcacagcagccatactctgcaatgaaatttcaattggtgccaatggttctatatactaaatatgtttcttttaaagtaagcatttccattgatccaaaacaaaataaaaagcatctaaactcataatttcctgttagtttttatatctaaaaattgaatcctattatttaaattaatctgatccaacaatttatatatcacttttgtcctcatctctatcagtaaggtgaaattctacacatttagaatgaagagtgttcttggaaataacgccaagagatagctgacagatttccacaacagcaatcgacaggaaaatatcaattactttctgaagctgacaaatctaatagtccctgctatgttgagaaatgtcttataaatgttggagaaggaagagcttaaaccttgggaagtcactga

SEQ ID NO: 717790 - DNA, 3711 bp, Homo sapiens
tgacttaagtgagtttgcactggcgcctgccgccttccttagaggcctgagcaaatgatgaattttttttttttttttgccttgtgaattactacatctcagtttaaatcggcaacatattagttaaaacaactcatctcaccttaaaattcttctacagtttgaagttcaggactaggatattgcattataatccatacacagtcttgaatttaatgacaaaaaagaaagaaaatctatagaccaaagaataatactgaagaaaaaaataatatttgaaaagggtttaataatagacttctagtttctttctctgtttttctttcctgtcacttaactaaagctatatctgcaagagtyacagatatccagactcccaaaaatcaaattaaaaataccccagaatctttgctttctttttatacttgaatgcctctcacttctatttgcagagatgctgcctttctttcctgtggcagagccttttgcttcaaaggaagctcatttacgctattagcaaccccactaaatcaataattctctccctcactcttttgcaatgttttgtttcttcaattcacactgagacctgcacgaagttgtggaaactgctctttcccagggagattaacatgaattcatcttgaagtcctaactgtgttctggctatttaatgctgtacatttataacctttgtcttccttctttaagctgcagtttctttgtgttatcacagagataggaaaactgacacaggaaatgcataacacatgttagactccaagacctctctccatatgggctcagttctgatttcctctgtttcctatatggcactgagacaaatgcctggacacagggttttttcttcctaaagactcacccagaagttctgctattaatcatcaatccgttcctcaaaataacttggcatagctaaacctagcaaagtaaggaagatctgacatatggtgaagttctccaacagcaattgtgggattacaagataacagccacaaatctgtgtgcatggctattttacatagctcaagacttcttgagggggagtaaatacccaaacactgctgatgacacccacttccaaatttccagccagtgctctgcataatgtaggtgtttaatccaggttcgtggatgatgattaaaataattcatgattctgtcctgcatgaagagcatagactaagctttcttctctaacagtaattcaaatccatgatcctacatttcccactaagccagcctaggaagaaaccacagtgagaaagtgaattctagggcttaacaaaaactgaggtttttaaaattctctttctataatatttaagggaatgtaatcaaaccaccaaatataaaaggaattaattgtgtaatctaccattaccactaaaaagaaagaggcaagaagaaaattcgactacaataaaaggtacaattatttcaatttcatctcttttcaaaatgaacattctttcacatcagacatctgcaatttagtacaaatttgctccctaaaatagtatcaattacaaaactttaacctaaaaatgatgaaataacatttgcaagttatttaatggtatttataaatttaagaatgataaagttatctgattggtaatgttgtgtctttattgttaatccagttattatcaagaacattatggacatagatgatgatagatagatagatagatagatagatagatagatagatagacagatagatagatagatgatagatagataatgtctgtgtatagagagtctaggtgtgtagataaattgcttctttcccagaaccataaatacccaaaaagaaatcttttttatataatcatgcctttgccttttgaatttctgtgagtgcctataatcatgtaaggtccaaaaaggtaatcaattgaccttatcattgtgttgatccttccagtttgtgcccaagtatttgtaatcactttaacatcccattaaggaaattgtcattaattcctcccatggaccttaaatttagagaggaagatcaaatttgcttctcaaattgagacccattatggtccagtaagcctgtctctcacaggcaggatggaggcaaaaagtttttgatagcagacgggcatagcctcaccagagtggtcatcaagaaatctgtaactaggatcagcataatagaatgtctactgtggagtgcaggagttcctttctgcaagagctgattgttaaatatttaagaattacagcttatctcaggtatgatggaattatttacgccttaaaaacaggcaaatgctacaagtctgggcttttgttgttgtcactgtttttgtgatcattgaaacagacagtttatcagcacaccaatgcatgtagtacagcacagagtcagcaatccatataagagcattctaatttagaagccagcactgcaattccttcaaagaaatggcaccacactatgtagctggggccttttatcgcagactgcctaggctattcatgttactccacccaaaatactttattaaccattatatagctaagtttacaactgattctttaaggttcattagacagtaaacaataaaatgtacatttttataggggttacaataagcatctgtgtaataatctcaaagtctacttcaaaatttttaatacttgagttataattcatctgtgtttatttcctagaacgaaagtatttttaattaaaataaaaatgattaatgatattttacctttactacacagactcaataagcctatcaaaagagtaatcattagtactactgttgagtacctactatgtgcaagataatttttatcacattccaccacaatgagtaagaaattattatccccattttatagcagcaaaactaaggtttcaggactttaacttatctaaagtttcacaacaagtagagtccaagttgggattagaactctgactccaaagctcattcttttagccactatattttattgcattttgtgcatgcatggttcttatatactcaggcacacacaaatgtttcttttcaccagcttaaaatcttcataactgtttgctgagctaaccatagaattattgacatgtccataggtcatttatattgatggcctttgagagtttttgctaaaccgagttgttcattttagtgcacccatcaactaaatatttggtgtcacaattgccacaatattaaacatgtgcaaactccttcattatatagttatatcacagttcaaaaatttccctgcctttcacagcagccatactctgcaatgaaatttcaattggtgccaatggttctatatactaaatatgtttcttttaaagtaagcatttccattgatccaaaacaaaataaaaagcatctaaactcataatttcctgttagtttttatatctaaaaattgaatcctattatttaaattaatctgatccaacaatttatatatcacttttgtcctcatctctatcagtaaggtgaaattctacacatttagaatgaagagtgttcttggaaataacgccaagagatagctgacagatttccacaacagcaatcgacaggaaaatatcaattactttctgaagctgacaaatctaatagtccctgctatgttgagaaatgtcttataaatgttggagaaggaagagcttaaaccttgggaagtcactga

SEQ ID NO: 717791 - DNA, 644 bp, Homo sapiens
agggcatccttgtcttgtgccagttttctaagggaatgcttccagtttttgcccattcagtatgatactggctgtgagcacactacatttttaatgatgaataaattacaaatgttcttaaaggttaacacaaatcaatgttttgacattttacgatttgaagagatggctttcacttctttttcttgaaaccatacaagttgattcatttgttttgtctgttagattacaagagtaaattggttctatgttaacctattctatatcgtttgttcaaattctctgctagttctcccttagatccatcttacagctctcccccaggtacactagtcactgcccactccaattacgtagaataataacaataataataatgacaggcatttacaatatgtcagacactaagttgatcactttacatgtgacatctcatttagtaccccctatttcatgaaataagtgctattattaccttttacacataagaaaactcaggcttgaagaagtatgctatttacccgaactctcagttrgtcagtagctaaagtgaatatgaacctaggcagagcccatgcattcaaacactatactactctccctcccgaaaaattgtgttatctgataataatttatccatgcaa

SEQ ID NO: 717792 - DNA, 961 bp, Homo sapiens
aaactctcaataaactaggtgttgatggaacatacctcaaataagagccatttatgacaagcccacagccaatatcatagtgaatgggcaaaagctggaagcattctccttgaaaacctgcacaagacaaaaatgccttgctctctcaccacttctattcaacatagtattggaagttctggccccggcaatgagaccatttcttaaagaaaccccaacccccttgccttttcctgyaccctcttgggctggtcagatttccaggaaaaagccttctagtcacttgcctaaagggtacaggtttggctgtcaaatttctgacagctaatgggagaaggctgttggtgattaccaattcatattagtaagtatagtctgttatttcccattgtgcagacgtgataaatatgaccccaactgtttacagtatcttctagtccagaaattctcttttttctctctctaaaagtaaactttctgtcaggatgggggtgggtgtgttgagggaaacaggagatttgagattgtacatacgcctttaaaacaaaatttttcttattttatctcagaccaccaaactataccaaaagtacctggtattgcctgttcctaaacattttagaaattctgtgctgtaaattgcacagcttcttggctttcactgttactggtttgagatgatccttcttggctaagccttttctgctttcaaaattctattgttgtgctctgcagtatatttgtaggattattctttattgaaattttttctttaatgtggtttcaggagagaggaaatgtagatgtacgttttcacattttaacccaaaagattatatttttgtttttaagactttagaaatatgaaataaaatttgatctattaaaatgatgtctcaccactcctattcaacatagtattggaagttctggtcagggcaatctggcaagagaaagaaat

SEQ ID NO: 717793 - DNA, 961 bp, Homo sapiens
aaactctcaataaactaggtgttgatggaacatacctcaaataagagccatttatgacaagcccacagccaatatcatagtgaatgggcaaaagctggaagcattctccttgaaaacctgcacaagacaaaaatgccttgctctctcaccacttctattcaacatagtattggaagttctggccccggcaatgagaccatttcttaaagaaaccccaacccccttgccttttcctgtaccctcttgggctggtcagatttccaggaaaaagccttctagtcacttgcctaaagggtacaggtttggctgtcaaatttctgacagctaatgggagaaggctgttggtgattaccaattcatattagtaagtatagtctgttatttcccattgtgcagacgtgataaatatgaccccaactgtttacagtatcttctagtccagaaattctcttttttctctctctaaaagtaaactttctgtcaggatgggggtgggtgtgttgagggaaacaggagatttgagattgtacatacgcctttaaaacaaaatttttcttattttatctcagaccaccaaactayaccaaaagtacctggtattgcctgttcctaaacattttagaaattctgtgctgtaaattgcacagcttcttggctttcactgttactggtttgagatgatccttcttggctaagccttttctgctttcaaaattctattgttgtgctctgcagtatatttgtaggattattctttattgaaattttttctttaatgtggtttcaggagagaggaaatgtagatgtacgttttcacattttaacccaaaagattatatttttgtttttaagactttagaaatatgaaataaaatttgatctattaaaatgatgtctcaccactcctattcaacatagtattggaagttctggtcagggcaatctggcaagagaaagaaat

SEQ ID NO: 717794 - DNA, 961 bp, Homo sapiens
aaactctcaataaactaggtgttgatggaacatacctcaaataagagccatttatgacaagcccacagccaatatcatagtgaatgggcaaaagctggaagcattctccttgaaaacctgcacaagacaaaaatgccttgctctctcaccacttctattcaacatagtattggaagttctggccccggcaatgagaccatttcttaaagaaaccccaacccccttgccttttcctgtaccctcttgggctggtcagatttccaggaaaaagccttctagtcacttgcctaaagggtacaggtttggctgtcaaatttctgacagctaatgggagaaggctgttggtgattaccaattcatattagtaagtatagtctgttatttcccattgtgcagacgtgataaatatgaccccaactgtttacagtatcttctagtccagaaattctcttttttctctctctaaaagtaaactttctgtcaggatgggggtgggtgtgttgagggaaacaggagatttgagattgtacatacgcctttaaaacaaaatttttcttattttatctcagaccaccaaactataccaraagtacctggtattgcctgttcctaaacattttagaaattctgtgctgtaaattgcacagcttcttggctttcactgttactggtttgagatgatccttcttggctaagccttttctgctttcaaaattctattgttgtgctctgcagtatatttgtaggattattctttattgaaattttttctttaatgtggtttcaggagagaggaaatgtagatgtacgttttcacattttaacccaaaagattatatttttgtttttaagactttagaaatatgaaataaaatttgatctattaaaatgatgtctcaccactcctattcaacatagtattggaagttctggtcagggcaatctggcaagagaaagaaat

SEQ ID NO: 717795 - DNA, 961 bp, Homo sapiens
aaactctcaataaactaggtgttgatggaacatacctcaaataagagccatttatgacaagcccacagccaatatcatagtgaatgggcaaaagctggaagcattctccttgaaaacctgcacaagacaaaaatgccttgctctctcaccacttctattcaacatagtattggaagttctggccccggcaatgagaccatttcttaaagaaaccccaacccccttgccttttcctgtaccctcttgggctggtcagatttccaggaaaaagccttctagtcacttgcctaaagggtacaggtttggctgtcaaatttctgacagctaatgggagaaggctgttggtgattaccaattcatattagtaagtatagtctgttatttcccattgtgcagacgtgataaatatgaccccaactgtttacagtatcttctagtccagaaattctcttttttctctctctaaaagtaaactttctgtcaggatgggggtgggtgtgttgagggaaacaggagatttgagattgtacatacgcctttaaaacaaaatttttcttattttatctcagaccaccaaactataccaaaagtacctggtattgcctgttcctaaacattttagaaattctgtgctgtaaattgcacagcttcttggctttcactgttactggtttgagatgatccttcttggctaagccttttctgctttcaaaattctattgttgtgctctgcagtatatttgtaggattattctttattgaaattttttctttaatgtggtttcaggagagaggaaatgtagatgtaygttttcacattttaacccaaaagattatatttttgtttttaagactttagaaatatgaaataaaatttgatctattaaaatgatgtctcaccactcctattcaacatagtattggaagttctggtcagggcaatctggcaagagaaagaaat

SEQ ID NO: 717796 - DNA, 1055 bp, Homo sapiens
gagaaaattattttctgtaactaatattccaaatgagaagcaaattaaatatcctaaaactatgaaattatattctagcatatattgaaaggggtatattaaaaggaatcatttgacctatatcttggtaggtgggtgatgatcagagaatattctgagacctaaattctggaatacccaaggagtagcagtaattgttttagatgctgcatttctgtgcactgctgtttcttctcctttctttgtaattattatcaagccatgaaaaagtttttcttagatgaccttgataaattgttgataaatacagtgtttatcttacagccagcaacaaaacaaagcaccttgatgagggcaatagtaatatcactttttaaaatatttgctggaatgtaacctaaatcatttgattatttgtaacattttttgaccaaagtactcacaataatttctcatgtaacatttcgaatattgttaggaaataacgaaggaaagcattataaaataagcacaagaaaaactttgtagttaggttaaattcatgcaatgaaaggcaatcttgttggagctcaggctgaattctcatttaggtcaccaacttgcttgatgattctgcataagctaaaatacctttcttaaccttagtatttacagctgaagatttacattagtggttctcaaactttagtctgcactagaataaccagactttttaagaaacagattactctttcagtaaatctggagtgatatccaataatatctcaaatgatgttgctgctgatcttgagaccacactttttaagaagcactaatgtataagatgacacacwaacacacacaaatttccaggggtcaaatttctctattagataatttaaatttaaacttaatccttttgacttgacatcatatatgttggatgtacttttctaattttgaaacgtaaagagaggcagcattcactcctcaaacttcaaaaggtagtagtatagataacactgagtagcataaaatgaccatatataattagtaaatttacctattaaaaaccc

SEQ ID NO: 717797 - DNA, 672 bp, Homo sapiens
atcatttgttattctggggcctactctaagtgatgagtaggtgagtccataagttagcttttttagtatcgtcctatttcaattagcatatttttcttcaggtttatccatgttgtcagactgactaatacttcattgagtatatatacaacatgttttsttgatccattcagcattcaacaacatttagattgtttttatatcttggcaattttgaataatgctgcaagtaacatggggatccaaatactcaagatactaattttatttctatatattatatatatacacagaagtgggactgatgtattgtatggtagttctgtggggtttttttctaaataatctccacactgatttttataatgactaccaatttataactcattaacagagtacagaatttttttcacacccttttcaaaacattatatatttttttttttgtataaactctgggagcacaagtgtaattttattacatgaatagattgcagtggtgaaattagtgcttttaggatattcattacctgagtaacatacatgtctcattttttttatattagccatcttaacaagtgtgaagtgatagctcatcatgattttaatttgcatttgcctgatgattggtcatgctgagcagtttttcatatatctgttggccatttctat

SEQ ID NO: 717798 - DNA, 785 bp, Homo sapiens
tgtaggcggagtcacacgccccgggtatcacagctaattaagaagtgagctgagccttgaaatgcacttgctttttcccttacctgggtctgcttgtataatgcatcttattagctatttaaaagtagaaagtagaacaattggacacctttttaacaactttctaatcatttggataatgcaggaaagacccttatcccatccctgagctcctctctcagcatgctgtaccacactgctgaccacaacgtgggatggctattagaaatggaggggcagcgggggctgggaacggataagcaagaattatgttgcccaaatatgctttttttttctttttttctttttctttttctttttttttttatttgagacagagtctcactgttgcccaggctggagtgcagtggcttgatctcagctcattccaacytccacctcccgggttcaagcgattctcctgcctcagcctcctgagtagctgggattacaggcgcctgccactacctccagctaacttttttgtatttttagtagagatagggttttgccatgttggccaggctggttttgaactcctgacttcaagtgatccgcctgtctcagcctcccaaagtgctgggattacaggcgtgagccaccacgaccaggcaatatgctcatcttagaaagactaagatatattcacacacacacatatacacacacatatatatacacacacacctatatatgtggacaaggccagaggaaagtatatttagtacaacacaaccatgaggctg

SEQ ID NO: 717799 - DNA, 785 bp, Homo sapiens
tgtaggcggagtcacacgccccgggtatcacagctaattaagaagtgagctgagccttgaaatgcacttgctttttcccttacctgggtctgcttgtataatgcatcttattagctatttaaaagtagaaagtagaacaattggacacctttttaacaactttctaatcatttggataatgcaggaaagacccttatcccatccctgagctcctctctcagcatgctgtaccacactgctgaccacaacgtgggatggctattagaaatggaggggcagcgggggctgggaacggataagcaagaattatgttgcccaaatatgctttttttttctttttttctttttctttttctttttttttttatttgagacagagtctcactgttgcccaggctggagtgcagtggcttgatctcagctcattccaacctccacctcccgggttcaagcgattctcctgcctcagcctcctgagtagstgggattacaggcgcctgccactacctccagctaacttttttgtatttttagtagagatagggttttgccatgttggccaggctggttttgaactcctgacttcaagtgatccgcctgtctcagcctcccaaagtgctgggattacaggcgtgagccaccacgaccaggcaatatgctcatcttagaaagactaagatatattcacacacacacatatacacacacatatatatacacacacacctatatatgtggacaaggccagaggaaagtatatttagtacaacacaaccatgaggctg

SEQ ID NO: 717800 - DNA, 785 bp, Homo sapiens
tgtaggcggagtcacacgccccgggtatcacagctaattaagaagtgagctgagccttgaaatgcacttgctttttcccttacctgggtctgcttgtataatgcatcttattagctatttaaaagtagaaagtagaacaattggacacctttttaacaactttctaatcatttggataatgcaggaaagacccttatcccatccctgagctcctctctcagcatgctgtaccacactgctgaccacaacgtgggatggctattagaaatggaggggcagcgggggctgggaacggataagcaagaattatgttgcccaaatatgctttttttttctttttttctttttctttttctttttttttttatttgagacagagtctcactgttgcccaggctggagtgcagtggcttgatctcagctcattccaacctccacctcccgggttcaagcgattctcctgcctcagcctcctgagtagctgggattacaggcgcctgccactacctccagctaacttttttgtatttttagtagagayagggttttgccatgttggccaggctggttttgaactcctgacttcaagtgatccgcctgtctcagcctcccaaagtgctgggattacaggcgtgagccaccacgaccaggcaatatgctcatcttagaaagactaagatatattcacacacacacatatacacacacatatatatacacacacacctatatatgtggacaaggccagaggaaagtatatttagtacaacacaaccatgaggctg

SEQ ID NO: 717801 - DNA, 652 bp, Homo sapiens
aaatgagtatatgtactcattgcggatttccaaacaaacgaaaagagagccatcatctgctttcagaggtttcctgaggcagttttaaaatatagtacatagtatattctatgaggcaaattgctcagcaggttgcttcatggccaaatttggagtggataactttgacaattcatattcttctcaattgaagaktaatactttccacaccctagtcagggagctaagtcaagttataaaatttcagaatagtatatattcccttaatagctttctttgaatatctaaaagaactttgaaggtagcaaagcaatttttaagcaagtgaacatgatgtaatggacaaagaacagagaggagacttaagagcgccaacttttagctggagttagccaccgactggcagtgtaggtaagccatttacactctccatgtctctctctatgcataactaaacttgagaaaataatacctcatctatttagttgacaaaatttactcgttaaaataatggaaactctaaggctcaaatctctgaaaagggaaacattatgtaaaactgaattgttttattaaaattattatattatctcttcctgtaagaaaataaaagttggagaatagctgagaaataataatagtgacaatgata

SEQ ID NO: 717802 - DNA, 652 bp, Homo sapiens
aaatgagtatatgtactcattgcggatttccaaacaaacgaaaagagagccatcatctgctttcagaggtttcctgaggcagttttaaaatatagtacatagtatattctatgaggcaaattgctcagcaggttgcttcatggccaaatttggagtggataactttgacaattcatattcttctcaattgaagagtaatacttyccacaccctagtcagggagctaagtcaagttataaaatttcagaatagtatatattcccttaatagctttctttgaatatctaaaagaactttgaaggtagcaaagcaatttttaagcaagtgaacatgatgtaatggacaaagaacagagaggagacttaagagcgccaacttttagctggagttagccaccgactggcagtgtaggtaagccatttacactctccatgtctctctctatgcataactaaacttgagaaaataatacctcatctatttagttgacaaaatttactcgttaaaataatggaaactctaaggctcaaatctctgaaaagggaaacattatgtaaaactgaattgttttattaaaattattatattatctcttcctgtaagaaaataaaagttggagaatagctgagaaataataatagtgacaatgata

SEQ ID NO: 717803 - DNA, 652 bp, Homo sapiens
aaatgagtatatgtactcattgcggatttccaaacaaacgaaaagagagccatcatctgctttcagaggtttcctgaggcagttttaaaatatagtacatagtatattctatgaggcaaattgctcagcaggttgcttcatggccaaatttggagtggataactttgacaattcatattcttctcaattgaagagtaatactttccacaccctagtcagggagctaagtcaagttataaaatttcagaatagtatatattcccttaatagctttctttgaatatctaaaagaactttgaaggtagcaaagyaatttttaagcaagtgaacatgatgtaatggacaaagaacagagaggagacttaagagcgccaacttttagctggagttagccaccgactggcagtgtaggtaagccatttacactctccatgtctctctctatgcataactaaacttgagaaaataatacctcatctatttagttgacaaaatttactcgttaaaataatggaaactctaaggctcaaatctctgaaaagggaaacattatgtaaaactgaattgttttattaaaattattatattatctcttcctgtaagaaaataaaagttggagaatagctgagaaataataatagtgacaatgata

SEQ ID NO: 717804 - DNA, 1663 bp, Homo sapiens
aaagtaattgattttataattattaaatcatgtttattgaatgaagattcatggataatattaatatgcaggagactaaagctgagaattatgcctaatataagagcaacaccaaccaaaatagaggaaattactgttttattttgttacttgtaaatatgatcattaaactattaaaatctctttactatttcaaaaattgttgtcagggttatccatgtgtttataattgtatattggatagctagttaaaatcaacagtgcaaaaaacaaacagttttaaacttcaaacaattattaatcataaggcagaatgagtaaataggatttcacttgaaagggtgtctagatctggcaagtcacaacttgacacgtcaaggcaaagaaactttgcactccccacaccccccagaaagaataaatggtctatgtatctacagaagatatgttttaaaaagaaggagggtctgcagcatgaggggtgatcagaccattgattgtggacttggattacacacagaactttgtggcgttggatgcacataatccttaatcctggggcttaaaactagaaaatcaaggacactaatatataaggctcaagttttaactagatgctgtactctatgcagctgctttgttgacaccttgtcacattaaattcagtagaagttgaaagtaagagaaaagcaacaagaaaaatggaaacaaaaagaaatcaatgtgttgcagtggatctggggaccaatctgaaagacaaggttctagttgtatttccaatgcgcattttccattttgtgatgttgtaaaagtaaagtcttcattagatacctctgatgtttacaatccccacaatagaaataaagaggaaatgagatgttccatttttaatattacacatacaatcattttacagtgtggaggttaattccgctcacaaaagtgcatgaaaggaattaaaggaaacaatttgaacattttaattcttttcatatatttcaaggggaggaattaggcaccaaaacacaaaacaattatatgtgtaatttaaaatgcatattgatttttttcacagcgataaayaggcaatggcagtacagtgtaaagcttaccttgcataaatgaaacatttgcctacctaataacacaaaactttaaagacagctgtagcagatgcctagctcatcaagataatattggtataatggcattaccctggtaattgttatttgaaaagtacacatgaaacaaactagacacagccaaaactgtggcttaaattttccttcttcctcttcactattttcaaaatgtactgctatgtttatttagagaacacttaaattcttagaaacctctaacagaatatcaacaacctcatagaaccctttgacttgctgctaactggataacatgccagatatcataataactaatgggaacatgctttcagttctaatattagagattattaagtcagtctttcttttgatactctgccaattttctctacctttgagatttcaaatacaaaaaaaaaacttattagatacatttagaatatttatttcatttctttccaacttacttgactgagttatatcatatgcaaagttccatctcatattggtcatggtgaagtttcatgtgaagggaaagccca

SEQ ID NO: 717805 - DNA, 678 bp, Homo sapiens
cagtagtttgatcccatctcgagatgaaagaacttgatttgccctatatgaatttaagaccagagacaaaaatggctttcaaaagaattatagcttggtgtagagtcaagatcaaccattgagttaaaggaaccacaggataataaccaaatgttttggatttgggttgctcaacctgtacaacctttcagtgggacaatttggtcgcatatatcaaaaacctttaaaaatatgctaactttctagctgtgaagttgctctcctaggaatttatcccaaggaagaattctaagtatataaagatgcacaaagacatttaatgtagtatctttaggaaagtaaaatattagaaataattgagtamtgatttaaataagccaggatgcttaatagaattctatgaaccacttaaccatatataaaaaataaataaatgagcagacaaggaagatgttaataatatattaagtagaaatattaccaagaagaatgtatcaatcccatttttatataaaaactttttacatgtaatcataaacatagaaaaacatcacatataaatactgtgaaacattaatgatggttatatctaggtaaaataatagattgttctgtttttgcttacctgtattttctaacttttttacatggaagatacattacttgtaaaataaaaaa

SEQ ID NO: 717806 - DNA, 678 bp, Homo sapiens
cagtagtttgatcccatctcgagatgaaagaacttgatttgccctatatgaatttaagaccagagacaaaaatggctttcaaaagaattatagcttggtgtagagtcaagatcaaccattgagttaaaggaaccacaggataataaccaaatgttttggatttgggttgctcaacctgtacaacctttcagtgggacaatttggtcgcatatatcaaaaacctttaaaaatatgctaactttctagctgtgaagttgctctcctaggaatttatcccaaggaagaattctaagtatataaagatgcacaaagacatttaatgtagtatctttaggaaagtaaaatattagaaataattgagtaatgatttaaataagccaggatgcttaatagaattctatgaaccacttaaccatatataaaaaataaataaatgagcagacaaggaagatgttaataatatattaagtagaaatattaccaagaagaatgtatcaatcccatttttatataaaaactttttacatgtaatcataaacatagaaaaacatcacatataaatactgtgaaacattaatgatggttatatctagktaaaataatagattgttctgtttttgcttacctgtattttctaacttttttacatggaagatacattacttgtaaaataaaaaa

SEQ ID NO: 717807 - DNA, 1082 bp, Homo sapiens
ttttttttggaatttactgtttgactgaacaatctagttctatttagtaaattatattttgtagtaaaaagagttgaaagttatactaatagctaatgtcagacctatttaggatcacgaggacatatgcaaacaaacccactgaaattgctctcactaaaattatcactgacctttttccaggttgccaaatccaatgaatgcatttatgtctttatttttattggcttttctacaaaagcmaatactgttggctagtgttagcttgaaactgttccttttgtgtgtgtgtgtgcgcatgcacacgctttctctttttgtcctgaaatctgttggtgccctttttctgagcattcttctttgccttcctttttagtgttgcagtttccaaggctctatcattgccctttttcattttctgtaatactcttaagaaatcttatctacattttgccttcaatctacaattgaataactatgaaagttctagttttagaccaaagcttccttcctttttagccttaaatattcaactgtatcccagaagtatctcaaattcagcacatttcaaagtttaatttttcagataatcctttaagtgaagtgtctgcaaatgatggcctaaaggctaatactggccggtgagcaacttgtttgtacggttggaaaaaaaaaccaaatgaagaatactatttcatggcacataaaacttgtatgaaattcaaatttcagtgtccagaaattaagttttattggcacacagccacacttattcatttcccatatgactgctttcacattacaactgcagcagagtaactgcaacagagaacacatggcccacaagtcctcaaatattcattattattatttggcctttcacagaatacatttgctgaccctctctcttaaagccatcccatattcttcctcctttccccaggtttcccactcaaatctctatcaccactttttaatgatttcaactctaagtatatctcatcagagaccatttcacctacaagcatctcccagattttggcatcagccacctcctgatctactgaagtagcttcctgtaa

SEQ ID NO: 717808 - DNA, 968 bp, Homo sapiens
caagtatttgtctctataattgcacccacttctataatcccattttgttttccttgatagttttagctaatgtgtgagtgtgtgttagcatgttgagtttttcctgtcttatgagctcgacaatgcatttgaaaattacaatttttcatgcatcagtgttgtggcaataaaggacttttcagattatacttcatgattagtcttagttcaagaaatgagagaccccagaactggaaaattaaacttcctgagaaacttactcagagatcttgttctgatttacttaaaaacaaaagttaaaacctagaatttattatttcaatattttatcaaaaagaaaaatattattaaatatataacgatttttattcccccccccacccccatatgcttatgatgagtttaccagagcactctgcaacaaccagatgtgggaattagtgattgatagtcaaaaagaagagtattcttttagacataaagatgataattagaaagttcaatctggtgggagaaaaatgttaagcataaaaaattagaattaggctgggcgcctaattaggctcatgcctgtaatcccagcactttgggaggccgaggtgggtggatcacctgaggtcaggactttgggaccagcctgatcaacatggagaaacccaacctctactaaaaatacaaaaaaattagctgggcgtggtggcgcatgcctgtaatcccagctactcgggaggctgaggcaggagaattgcttgaactcaggaggcagaggttgtggtgaggcgagatcttgccattgcactccagcctgggcaacaagagtgaaactycatctcaaaaaaaaaaaaagttagaattaagattgcttgagtacgtatttaaatacatactcctcaacatagacatatttgacttattttagctcagttcacatactcttaaaattttagattttatagttcatgaattca

SEQ ID NO: 717809 - DNA, 1326 bp, Homo sapiens
ttttccatactctcatcccttctgcagaagcatccagcaacccaagggttcctgtcccaaaatgtgaagagcaaccacagcccttccaaaaaagtcacccttatggcaagtaagagcagaaatgctgggagcacagtcaggtcctcagcacagctggaaggtacacctgtagtcacatggagcaggtatgggggagaccgggggaacggatggaggatgattctgagaactcagtcaaagatacttgttgaggaacaacccttctggtggaacctgctgcaagcaccaatataggcaaggaacgtggccagggttgtgtacccatacagaataccacagacatggctgtgtggctctcatgaccccacaggagcagacccagccctgctggaggtcccagccagtgccaggcctacctaggggaactgaccaacttttggcacaactgcctctgcccagcaaagctttggaggcacccagagctgctcttttctgaggcaagtcttgcctctagagtcacagggagtgggagggtgggagaggggtccatggaccccacaggctatcacttactggcacttcctggagtcctctagatctttgctgccaattgtttataagcctgactcctttggggagaagggcctgtgtgttcttgagctctctcccgccagccagtgctagacctagagtgcctgggagctacctatttttatttttaattaaaaattaaacttttatttttattttatttttattttttgagatggggcgtcactytgtggcctgggctggtctcgaactcttgggctcaagtgatcttcctgccccagcctcccaaagcactggaattataggtgtgagccacctcacccatcctgagccacctcttgacctctccccacctccccgggaggcccctcagtctcactcccagctccagcatcgtaactcagccctggggtcctggggaaggggagcacagcacctgggtggcacaggaagtagagccccccatcctcagccttgtttctggaggcccctggaatggggaatcccctcctagtacgaatagatctaggaggagcttttggaccatgctgtctaatcccaccacgacggaggagcctgcccaggctgcccaggtcacccagccctctctttcaggaaggtgtgagctgcaagctgacatccaaatgttcttcctccacagccctctccagcctagaggttaaggggtcattttttagagaagagaagtaagaagaaggggctctgacaaacccattcccatctacgtgtcggtgatgttcttccttcagacaa

SEQ ID NO: 717810 - DNA, 1474 bp, Homo sapiens
ccacctctttgtttttactctgtttccacccactcaatagcccagggagccaagatttgtttcatgactgttcagtccagtgatttattataaaatcatttttgttcaagtactactgagttgaaaccaatttatttttaggttttaaatcaatagaaaattattttaaaatatatataactagtgaacataaagaatccccaaaggacaaagaccaacatttgctttgtcactctgaagccacacgctgcacactcacagatgccaaggaagggaggactgcatggagccggcggcgtctgaacgtacctgtcatggtaaatccaccaaccaataaaccaatatctcggccaccaactatgatggcttcgctgcgctcttctgcgctgccactgtttttggttctccaggcagcccatattccaaccagcaaaattagaaggtagaacacgatgatagctatcagtccttccacatggaaagccatttttatctaatgatccagattcttctgcagctggctacttcattaagtcttctgaagaaaatacagggatgcattataaaccagtcaagcactatgcacatgtaggcagccaggaataaaccagctggctcatgcgagatcctgtgccactcacagaaagagtacaaccctgaaaccacacgtgaaacgggcagttaacaataagtgtccactacattatcctacttctatttaacaatttaacattattttgagtttgcaagaaacagaaaaaaaaacggaaatgtagtttaacaaatggaatcataatccttgtgtgtttcatacatgctttaaatttaaaattaaccttgtcgtgtatatcttaactcagtaactgtcaaatcatttacaaagagtagcgctgtatctgcgttttggaactaagttactcttctagaattatttattctagaagtgttaagtgtttcataaatgaccattctgaaaattttaaaatattcattaatttattcattcttttatctgtcctttcaaacaacttcagagaatggcttcagtagtaatctgatataaaaatatctgaaaaaaatctttagaaaaatccatttcaaaaacacatcaaactccacattttcaacaagtttctgtarttcaagttactatagcaactaagtatgttttttgttgttgaaaggatccattctcttgatcttcttcgcccaatatccttcattcaattcatcaccccccattaatggtacatacaggaaaaggttttgttgttgttgttgctgttgttttaaacacaattgcctaaaagcacatcagaagcctcaaagatattaaaatcaagactcttagaagacagatgtcaagttcgaaagcattcaccttctgaaattcttgtccccttttatttttatttttatttattttttacctttgtgaccacagctgttccatgaacccaaactctcacacaca

SEQ ID NO: 717811 - DNA, 635 bp, Homo sapiens
gcccggctagtttttgtatttttagtagagaccaggtttcaccctgttgaccaggctggtcttgaactcctgacctcagatgatctgaccatcttggcctcccaaagtgctgggattataggcttgagccaccacacccagcccttcctttaaatttttaatggaaaacaatctatacaaaaatagagggaatattataatgaatcctatgtacatgaaattgcacctctcagcttcaaatgttgttatttatgatgagtcttgtttaatttataaacctattcacttcccagctcatgccagcatcttctgatcaaatccacatatcattttatttataaggatttcagtgtttctctaaagaattattttaaaaagataactacactacaattgtcataccccaataataataacaaagacaataactcctcattaccatcaaatattcattactyagtattcaaagtgccctgagtgtcttataaatatgtaaattttatcttaataaagatctaaatacagtccatatattgcaattaattaatgtgataaagtttttgctctttgagaaagcttatattttggtctaatgtttccatttatattaatacccttgttgaaactattgttct

SEQ ID NO: 717812 - DNA, 1316 bp, Homo sapiens
catttgcaaaaatttcaagccagcccaaatgcacacaaatagaatgtcaaatatataatttatactctagtcatatcttagaaaactagtcagtgtttaggtgaatcaattaaatcccttaattcaacatgaataaatccaaaaaggacaatattgagtgacaaaaacaagttttcatttatataacttccataataaaagtataaaatatggatggaaacattggtgggattgaagtacggtgcttactctgaaagaaaggacatatttgtatgactatgagcttcaattgtatgtttagaattttatatagttgaagccatttgtggtggtgtgcccctgtattctcagctactccagaggctgaggcaagaggattgcttgagcccagaaattcaaggccagggtggacaagatagtgagaacctgtctcaaaaaaacaaaaacaaaccaaactttttaaaattatgtggttacataaaaatagttcagaagaaatatatcaaaaatatgtaaagttaacatattgaatgaataatctaaattataactgattctttttacattttactttttaatttaaatattataattttatgggaacaggaggctagaaatttttagatacaagaaaatttaataattgcatttttagtaaaattagttctattaaaattgtatatagtttcatatttgtggcattctggcccaataatgctgccaaactactgtggctctagttgaagacaaatgatggcagaaacaytgcagctttaaaggtgacatagattagcattcaggactctcaaaaccacttgaaatttaatggggaaatgtcagtaagacaattgccaagggaataagatccaaattccaagcataaactctgcccaaaaccctggctgacagctaacatacacatgcatgaggtgagatttccaaggagcctggcaaaaagaaagaaggaggcagagaggacaaaaagctactcttgaaaaatagtgctacacagaggtaatttgtcacttttcaaatcccttagtccactaaatggagatggcagaataaagaatcaaagcatttgaaagtagatgaataagttgacaaatctcccccaaaagaaagaaaacttaaagagaaataatcaggatttcagttttgttggacaacatcaaatagtacaacatttatgtaattaggaactcagaagaagaactgagatatctgcagaatgaatacttgattaaataatggccatcaacttcccacatttgatatagaacgttaattttcagatctaaaatccatacatttca

SEQ ID NO: 717813 - DNA, 1426 bp, Homo sapiens
ttatttgctttttaatgctagatacttgcatatttattaatttttgttttatacttttcagatatatctatgtggtatcatcatgaataatggctgattctgaatggtttttagtaattttgaaggaagtatatttttgagggagaaagttttgcaatcactgagaatatgtaacacagtatttattttctctgaaaataaatccaaatgagaatttccaaatatgttgggccaacatcatgttaaaaaatgattaaaatccatgacttggagattagcccatattgatatttgagcaatgcataggagttggagaaaggaawctgtaaagccctttgactagagaccaatgcattggggcagaaggaagacaaagagttattaacctgctgacaagagactggctaaggagtatttccacaccagtcaggaatcatcattataatagagaaaacaaaaaggtattactgtttggctccatgggattcaatttcaccagcaggccacaatttggggacatctttaggtcagaagcatcaagtgagcaatccttatctaggaatatacttttaattacaaagattcaaccgctcactcacttgtatattaaatatgcttttgacttcttcaagtctccagaccctttgttgggtactagagatgtaaatctcaaaacataactaaaacccattcttatacccatgaaatttataggctaggggaaatggaaaataatgataagacagtatgatagaagcaagcaaagtaattatgaaggtacctaataggtaacaacaaagagtgagagaagattcactttcagttcagaaactggtagttaagttaagaaaaaagaattgagtattattacatattgaagaaactatggtatccaatgagctgcaaatattgctggatcattagttacccttggaaggagagtcatgtgaagcagcttcatacacaggcaggggctagattatgaaggctattgtgtgtcaatatgaaaacaattatgaaaacaactggatgatttttaaaagaaaactggtaggacaaaatttgtgttttgaacaaatcacttatgtaacaccctgggaggaatgaattggataggagaggtgtgtgggcagagcgctgcattaggaaactattatagtaataaagttgtgaattgagaagggcagaaatttacctagcaatggtgaatcaagattaagggcagattgagagctttttatatggtcaaattaacatgatattgagactaactagagataggttaaagagcatgacaggaagaaattaatggtgaaatagatatcaagctggcaactaggagaaaagtggtgacattcgttgagatggagaatgcacagagaaacagatttgagtaatggagtttaatattaattaaaatttagat

SEQ ID NO: 717814 - DNA, 605 bp, Homo sapiens
tgaaattgtatgtatgtatcatgtacaacgtgacgttttgaagtatacctacattgtggaacagtaaaatctagctaattaacaaatagttaccaattttagggtgagaagacttaattaacatccattatctttgcatttcttgagaatatagtattgtcattaactatagtcaccatgctgtatgatagatttattgaacttattcctcctgcttaactacaattacatatcctgtgaccaacatctccccttcccccacctatcctaactaccccagcctctggtaacsaccattctactctgtttctatggcatgaaaccttttagattccacatatgggtgaggacataacagtatttgtctttctatgcctgggccatttcacttaatgttgtcacaaaaaggaaaaatgaaatattgtcaattgtcttatgtttctaaagggccctatagctgctagatgaggctaggagagaatcacagagattagttgggaagaaattatagaggagatggagaacaatgtgaaactgcatggtagtgatggagtagtgagaagtaataggtgttggatatattttgaagagagcatttatagtat

SEQ ID NO: 717815 - DNA, 612 bp, Homo sapiens
taaaataggttgtcaattttttctgtttctttatgtgttgtagttttgtgtgatttttttttttcatctctgtaaataccctccctagtggaggaacagacaagttaaaaagatagtagaacgcatyttacctctcttctgattattgttatttctgatcataagaaaattgactgagatattttctaaattagtgctttcttgactttaaaaattatattacagggccgggcgtggtggctcacgcctgtaatcccagcactttgggaggccaaggtgggtggatcacgaggtcgggagatcgagaccatcctggctaacacggtgaaaccctatctttactaagaaatacaaaaaattagccgggcgtggtggtgggcgcctgtagtcccagctactcgggaggctgaggaaggagaatggcgtgaacccaggaggcggagtttgcagtgagctgagattgtgccactgcactccagcctgggcgacagagtgaagactctgtctcaaaaaaaaaaaaaaaaaaattatattacagtagtaatccagtggaggaggtagagttttgccacttttctctggagttcaggcttgtatagtcttaataatgct

SEQ ID NO: 717816 - DNA, 1513 bp, Homo sapiens
ttcaagccctgccccttttcaaactgtttaatcctattattttctgttagagcctgtaatttccaaaacaccagcatttagatatcttcagaagctattttcacacagtattcctagagataaaatgatgaaaaaaatcaaagtatcccaggaaggcaccacaatgcacattcctgattgtaaaactgtttcaaatttttttctaaaaccttacacagcagcttgaatataaccactattcagtgaatgtttgctgaactgagaatgtttttgctaaactctattttgctttttgacacatgagagaaggcactgtctttataccaaaaagaatccacatttcagcactgtgcatcagaaatgctttgtcaagcatattttctcaattctctccagaagactcctacttaaaagttggctgcatattacagtatatttaactgggtgctctgaattgctcactatacttacagagggaatgcacttgtcgcctctctgcagtgattacacagagataaaaatgaattaattgaaatacatttatttagcatgcaaaaaccaattactaactcaaattatggatattaaaacatccacaggaaacaaaatcctagaagtgaattattacctaagaattacctttaggctgggtgcagtggctcatgcctgtagtcccaacactgtggtagggtgaggagggtggatcacctgaggtcaggggtttgagaccggcctggccaacatggtgaaaccccatctctactaaaaatacaaaaattagccgggcatggtggcacatgcctgtaatcttagctccttgagagactgaggcaggagaatcccttggacccaggaggcggaggatgcagtgaaccaagatcgcacactgcactccagcctgggtgacagaatgagactccgtctcaaaaaaaaaaaaattacctttaaaaactctaaaatctaaattataattaaagactttaatgtaaacagtataaaataagtctttttcatttcttatctttgcctgccctctaattatagtttacaaaatcaaataactgtcacatcataaccccaattcaaaaaatgaagttcattttctcatttcttctaaaagtagtatccagccttcccagttccacaagtagacaatgtccttcttagacaaasagttcctttttcttttacatttaatatatttctttattgattatatcatatctgaaatttcaatcacttagttcttaaaagacattttaagttttttctcatatttcaatgcttattaaatggggaacactgatagtactatttacagagtgcagaaaactttgaaaaatattattctcaaacaattcctactcacatctcagattaacaacaatagaagattctttgtggaattaatatttttacaattttaagaaaagtttagcaataacttaagaaaggtttagcaataaaaaaccctaattaaaagttgaatattaagtaacattttttaattaaa

SEQ ID NO: 717817 - DNA, 731 bp, Homo sapiens
atttttgtatttttggtagagacggggtttcaccatattggccaggctggtctcaaactcctgaccttgtgatctgcmccccctctccccggcctcccaaagtgctgggattacaggcgcaagccaccacgtccggccaaaaaactgaattttccattgcaacatttttataatgacacatgttaaattaaacaaatacttcaatgtggtagtatgtgtggtctctctttgttgggcatcatcaaccagacagaattttagaagggtttgagcctgtaaataacatttttctatatcaaaccatctgtcctaccacaaccctgaaatttttctgtaaataagccctctaactttggttgcattttgtttaaaatagttgaaaatctttaaacaaagtatctgaaatatggaataccaaaaactctagttttagaagatttagagaagtgtaattattgaaaaccatgcttgcaaacaagaagacattgaaatgtacccatataggagcaagggaataattgaatatactacataatgggagttcaaaatatgtataagatttaattttaaaattctctaattatgctttggaatatctcaacatatgtgaagactcttttgatagtgctgttatttatttattgtttttatagaaacaggatcttacaatgtttcccaggccagtatcaaacttctggcttcaagcaatcctcctgcctttgcctcccaaa

SEQ ID NO: 717818 - DNA, 626 bp, Homo sapiens
aacttcagggacaaggcccttcctcctaggccccggctctcctccctcccagagggtcctcagcctgggcctgcatggggtgatggaggaggcatctctgccttcccttctgtgcaatggttgctctgtcaccgcagcctatcaaaaggagccagggcacacaaagctagggaggaggaggaaggaggaaggccaccaggtcagctttctgttagagctcagacagaaggaaaggccagcagtctcaggaagcctcagccaggactgaggcagcctaggggctggaaggcctggagctcaggcttggccaccccggggccagagtctgggcgagagtgactgcagtgacctcatccccatttcagagaggcggagattgaggctgagggcgggtccccagggtcctttgtgttcaaggagaatgcagttggggtgggccagtygtgtgccaattgcagggttgccatggttactgggggatgcccagagctgttgggagcaccaggttctctcttctcctcctccctccccgggggaggggcagcggggaccaaggcacgtgccaggtaagttcctggcactagccaatgggggatgaggatcctggtagccagggaacggtaacc

SEQ ID NO: 717819 - DNA, 599 bp, Homo sapiens
tatatgtctctgcatcatgctgacgagtcccacaccaacctgacctgaaragctgaatataactcagatctagatgactccaaggtgggcctaagatgtcccccaaatttttttctcacagaagttgcctataaacagtttacataatgtaaaactctaggtaaatgcttatcacacattttggggagcataaatcagcataacttccagatttttttttccgggaaagtcataattcggagcctacttccagatttcaacaaattcaatttacatttcaatttgatatgcacacccaatccctgaatccactatcccattggcccattttgtgattcctaatgggcccaaattgaaggtctcccaaactggaaagttgtcttcccaggtagatgtagtgagcctgacattttcccacttgtgttcaaccccgcttttgcagatgttgaaagagaaaatagttctatctgagtagatcaaatgcccagttttattaaaacattgtagcagctcctaatgaatggaaattcccagaatgaagcctgtctctgatgcattcagccctgtattccaagagctgggttaaataccatgcaggt

SEQ ID NO: 717820 - DNA, 738 bp, Homo sapiens
tgaatcccagctccacttacacagtagactctgtggcatgccaccaagatcccccttcagaactaaagaagattgattctcccagctgttgggagtgttgccagcagactgctgtcagctgtcagccccctccgggaaccgtcctctactgaagagaactgcctgactcttcagggataacttccataatattttatattctttgtgtcccaattctaaaaaaacaatgcagggccatccctgtcccagaactctccatggagctgccagaagccyttgttgagactgcatcacatcccgacttctccctctgcccattcctgtttcctgttcttcccccaaggtgttgaccctagaaacactccctcatatacttcccacatgcaaatgtccaaaccagagtccacttctcagagcacccaacctgcaacaactaacttgtagaatcttgcaagtcactgaacttctctgtgcttcagtttcatcatctattaagtggggataataatataacctacttcatagtaatatcatggggattaaatgaattaatatatgtaaagtgtttagaacagaacagcattgatacatgataagtgctattttattctctgttattcttatatttagtattatttttattactactatatagcaagttaagtcttatttcccttttatacaacttacattgattaagattggacaagtttctaagggatcctaactttgaacaca

SEQ ID NO: 717821 - DNA, 986 bp, Homo sapiens
cctcccctagaatcctctcagcctctgcccccatcattccccacagcccctgaccctcctctcctagcccctgccacaaccttcctcatccttctctttctttctgccagtccccagcccctggctcccctgctctacaggcaaggacccacttgcccaacacccagaatagcgtcctggggtctcaccccttagttcaggagggacatccctgcttgccccctcccaccctgagctgagcaggcgcagcagacagcaagcgcgcctctcagcaaatcccagccccattcagcctggtgattaatggcgctgccctccccatgaacctgcctttaatactgaggaagttatgaaaccgctatacatcagcagctccggccccactgcccccgcccgcgtcctcctcccctctaacccccaccctccagctccctcttcaaaatctcatctgggctcctgtctcctgggcccacccctcctctggcctttgctggggggaggagggtgtctgtccctgctgccatccctggtaaggaccacatctcattttcccttcctctctcccccctgctccgccctctctccctccccccaacccacggctgcatctccggacccatttagaattgctgacattttatctgcattacatacatcactccgtccccagcagccatctctcatggattatyggggggcgagggcggggtggtcctcagcttggggaagtgacagagaaacagggtggaggtgcggagatagatagcacttcctccacacgctttttccctcagggcccaatccccagccacctgagaggctgtgcaggtgggagcctaggatagctgatggcaagggttgtaccctagccgcctcctgccagtcactgctatctcataacatcaaaagcctttttctcagaccacacagactaaggaaggtcatgttgcgtgtcttcctgccatgggactcctcctcaggacatt

SEQ ID NO: 717822 - DNA, 986 bp, Homo sapiens
cctcccctagaatcctctcagcctctgcccccatcattccccacagcccctgaccctcctctcctagcccctgccacaaccttcctcatccttctctttctttctgccagtccccagcccctggctcccctgctctacaggcaaggacccacttgcccaacacccagaatagcgtcctggggtctcaccccttagttcaggagggacatccctgcttgccccctcccaccctgagctgagcaggcgcagcagacagcaagcgcgcctctcagcaaatcccagccccattcagcctggtgattaatggcgctgccctccccatgaacctgcctttaatactgaggaagttatgaaaccgctatacatcagcagctccggccccactgcccccgcccgcgtcctcctcccctctaacccccaccctccagctccctcttcaaaatctcatctgggctcctgtctcctgggcccacccctcctctggcctttgctggggggaggagggtgtctgtccctgctgccatccctggtaaggaccacatctcattttcccttcctctctcccccctgctccgccctctctccctccccccaacccacggctgcatctccggacccatttagaattgctgacattttatctgcattacatacatcactccgtccccagcagccatctctcatggattatcggggggcgagggcggggtggtcctcagcttgggraagtgacagagaaacagggtggaggtgcggagatagatagcacttcctccacacgctttttccctcagggcccaatccccagccacctgagaggctgtgcaggtgggagcctaggatagctgatggcaagggttgtaccctagccgcctcctgccagtcactgctatctcataacatcaaaagcctttttctcagaccacacagactaaggaaggtcatgttgcgtgtcttcctgccatgggactcctcctcaggacatt

SEQ ID NO: 717823 - DNA, 721 bp, Homo sapiens
cacaattatttcttttcttaggttttaaaaatgatggtacattacagagagccacacattctttgatactcttcccattgagaagtgaaggttaattcctctaccttgaacctgggatggtcttagtaacttgcctgaccaataggatgttgcagaaataacattttgggacttctaagaatatgatataaacatccttggagtttctgtcctagacttttagattactcaccctgggaaagctggctgctacataagaaatcttgctacagtgagaccactatacagttctgaagccctccataactacagagacaggccataygtaaaacaagggagagttgtccaggcaaccccagcttttcagctatccaagctcaggcccaagacatgaatgaacatgagcaaagaagttatgttaggagacatatcagccccagaagacataacatggagaagatctaaggaattcaaaagacagccagaactaagttgaaaaatatggccccagtcaccaattccaggcatctctagccattcaagtcacctaagctgagactccaggtactgcaaagcaaaaatgcgctgtctcccattatattctgcttgaattcctgaggcacaaatcataagcataatagaatgatattgtttgatatctctaagttttaggaaggtttgttagcaagcaatagataaccaaaatagacccccatttgta

SEQ ID NO: 717824 - DNA, 721 bp, Homo sapiens
cacaattatttcttttcttaggttttaaaaatgatggtacattacagagagccacacattctttgatactcttcccattgagaagtgaaggttaattcctctaccttgaacctgggatggtcttagtaacttgcctgaccaataggatgttgcagaaataacattttgggacttctaagaatatgatataaacatccttggagtttctgtcctagacttttagattactcaccctgggaaagctggctgctacataagaaatcttgctacagtgagaccactatacagttctgaagccctccataactacagagacaggccatatgtaaaacaagggagagttgtccaggcaaccccagcttttcagctatccaagctcaggcccaagacatgaatgaacatgagcaaagaagttatgttaggagacatatcagccccagaagacataacatggagaagatctaaggaattcaaaagacagccagaactaagttgaaaaatatggccccagtcaccaattccaggcatctctagccattcaagtcacctaagctgagactccaggtactgcaaagcaaaaatgcgctgtctcccattatattctgcttgaattcctgaggcacaaatcataagcataatagaatgatattgtttgwtatctctaagttttaggaaggtttgttagcaagcaatagataaccaaaatagacccccatttgta

SEQ ID NO: 717825 - DNA, 683 bp, Homo sapiens
catggcaaaacccagtctctactaaaaatataaaaattagcccagcaggttggtgtgttcctgtacttccagcttctcaggaggctgaggcaagagaatctcttaaacccggatggcrgaggttgcagtgagctgagatcgtgcccctgcactccagcctgggtgacagaacaagactccatatcaaaaaaaaaataaaaagaaggagaagaagaagctttttgtcgcttcctgtacagaccctggtatttcccaacttttgctggtgtgattccctctaccaggatttcctgccccagcctttgcctctaggactcagcttagcggtcatcttctccaagaagctatccctcccctgtactctatctttgtcattgaaacaaccaatgccatgacatcattcgaactctgaaacgtaagtaataagactaaggagaaaaggaaggagagggcttattggactgtatgcctccaatgcctagtacagagcccagcctaaggaagttctcaaaaggatggttattgaccaaaaatatgtgaatccatcctgagggtgtttgcaaatagtgaaaatgaggagaccagagtatgcctgccaatgttggttttctgttgtccgatgtccttcaaaaatgaccaccatcatttttttttattattacagccttggaaagaaggcctgc

SEQ ID NO: 717826 - DNA, 619 bp, Homo sapiens
catattaggtaagtattcttaaaatgaccatttcttaagaatctccctactaaattcaatattctttaggtgatgagtcagtccttatttcttccaacactcaacctctgcccctcgccctgccccacccttcaacctggtcagcagtgtgcatgttcacacacacacacacacgtgcccatacacacatctatacatattcatgcattcaataaatgttattattttctaacctttaatgtctgttttactgargggttcagctttgaatgtctttgggaacatatagataactttctcaccttcctttcaacactgaaatactctgtgattattcctattttttttctacagtcatgccatttgtatgtcagtgatagataattttgaggctaagtcctcatctcagcatccagttttattgcatttgtaacagtaacacagatacatgagctgctgggctctcaggatgccattagcgcttcatgattaatctagaagaggaaaaggacagttgttaaagaaatacccaacaacttgctccatgttaaaatcatttcctctcctgaccaggagatgcttgtgacaactaaaaatagaggcagctcttggttgacaa

SEQ ID NO: 717827 - DNA, 619 bp, Homo sapiens
catattaggtaagtattcttaaaatgaccatttcttaagaatctccctactaaattcaatattctttaggtgatgagtcagtccttatttcttccaacactcaacctctgcccctcgccctgccccacccttcaacctggtcagcagtgtgcatgttcacacacacacacacacgtgcccatacacacatctatacatattcatgcattcaataaatgttattattttctaacctttaatgtctgttttactgaagggttcagctttgaatgtctttgggaacatatagataactttctcaccttcctttcaacactgaaatactctgtgattattcctattttttttctacagtcatgccatttgtatgtcagtgatagataattttgakgctaagtcctcatctcagcatccagttttattgcatttgtaacagtaacacagatacatgagctgctgggctctcaggatgccattagcgcttcatgattaatctagaagaggaaaaggacagttgttaaagaaatacccaacaacttgctccatgttaaaatcatttcctctcctgaccaggagatgcttgtgacaactaaaaatagaggcagctcttggttgacaa

SEQ ID NO: 717828 - DNA, 662 bp, Homo sapiens
aagaggtaggaaacaaggagaaaaaaaaatttacctgtaattaaatcctttaaagataaaatgacacattctgattggtgatttgccatgggatcatagaattgaagatttaaggtgaatgaagggctggttgagccaatcaccaaaatggcttgaattccagccacaccattcaatcaaagagtcatccattctttccttgaacaccttcaattatgcatacttgatgaaagaataaaaagcagcttagggtttttgtgtctctctgctcgtttgttttgcagagctagtaacaaagataaaaggaggaaagcaggtaagcagacaagctaacatttaccaaatgtcatttgrctaggacctgtgtatagcacatctgtacatattatttcatttaatttttgcaacaatgctatagggttgatgtgcccatttttcagaagacctgaaccttagagagttgaaataattcatgtatctgccaagttgttatatcttccatcttctaaagtgataaaggcagtgtttactctacaagagcatggcagatccttgaaagaaggcaataggaaaagacagagaggattaaaagcatttggctaatgattggtgagctgacatttgcagttcatttcactggaagactggggaaaatagcatta

SEQ ID NO: 717829 - DNA, 662 bp, Homo sapiens
aagaggtaggaaacaaggagaaaaaaaaatttacctgtaattaaatcctttaaagataaaatgacacattctgattggtgatttgccatgggatcatagaattgaagatttaaggtgaatgaagggctggttgagccaatcaccaaaatggcttgaattccagccacaccattcaatcaaagagtcatccattctttccttgaacaccttcaattatgcatacttgatgaaagaataaaaagcagcttagggtttttgtgtctctctgctcgtttgttttgcagagctagtaacaaagataaaaggaggaaagcaggtaagcagacaagctaacatttaccaaatgtcatttggctaggacctgtgtatagcacatctgtacatattatttcatttaatttttgcaacaatgctatagggttgatgtgcccatttttcagaagacctgaaccttagagagttgaaataattcatgtatctgccaagttgttatatcttccatcttctaaagtgataaaggcagtgtttactctacaagagcatggcagatccttgaaagaaggcaataggaaaagacagagaggattaaaagcatttggctaatgattggtgagctgacatttgcagttcatttcactggaagactggggaaaayagcatta

SEQ ID NO: 717830 - DNA, 647 bp, Homo sapiens
ccattgttctcatcggagatcagaagcttcagatgcacttatgtcaactcaagagtagaatgcttccttagcttccctccagagtcaggttttgtgtttctagttcccaagtgcacagcaggagtagtgatgtcctcactggcttctcatttgcattaagctgtgagcttctttagcgtggggacaggaccctgctcccattgcattctcagcaccacaccacacactccttgtttgaggccactccagacagcatgtgctgaaggatgccttgtggtcagaaacaagttcattaactttctctttgaagtgttttcgcccctgtttcctagcgttctgggaattttacacatccttcctataaaaccaagtatcaggtgagatccttaggatcaggaccatgaatcaagtggwgtgagggcaacacagcaaacttaccctttttaggccgtttcctttttctgccctcaatctctgtgaactgaaccttgttaaagtcagtcaacaccagggtggatggtttgccgttgtcacctattttcaggacataacaccctgacttaggagccattccgatcatttctaattcaatagatgcgcccagcattcagattgccttttctctcaaccaggatctttaaagtcga

SEQ ID NO: 717831 - DNA, 1137 bp, Homo sapiens
tgcaacctccgtctcccgggttcaagcaattcctctgcctcagcctctgagtagctgggactacaggtgtgcgccatcatgcccagctaatttttgtattcttagtagagatggggtttcaccatattggccaggctcgtgtcaactcctgacctcgtaatctgcccaccgyggcctcccaaagtgctgggactataggtgtgagccactgcacccggtccaagtaaaattattttaacaatatactatgaagagaaaaacactggctatgaaagaatatgcatagttttaccctgtttaaaaataaagattgaaagaatacatatgcaaataagtttacttttatttttggtaatactttactggattgtctgaatattgacaatcagtatgcatcatgaagctacatggctaacattgagtactcactgtgtgtgccaggccctgggttcaatgctctacatgcacttatatttcatttaattctctctgcaacctgagatggtatagccacctcattttacagagttgaaactgaggcccagagactgaaagttaagcctgaggttacagtcaataagaggcagagctggaactgaaacctacgtgtgtctgaccaccagttcatgttctgacggcacgctagtctgcatcacagagtgtggggtagatggtgcatgcctgctaggatgggctaggtatcactgtaggtaagaaacagccccaaacgatggaaatgtacaccactgaaggctcttttcttgcccatgctgcacatcctccatggctctcctgtgccctgtgccccacatgccctcatcctgccacgagaataaaggagcagcctccatatgggagctgtcagctgctctaagagatgaaggagagggtggccagtctcaatggctcccaactcttgcctcgaggtgacacacttcacttccactcacatctcttgggtcaaagcaaatcccatgggtacatccactttcaagtggcccaggagagaacctgaaatactcggtggactccattaaggctgtcatatggtgtcagcctacatgggagactgtggaggggcagaggaggagagtggggaactgatgggaaatgacaggaggactaagtcaccgcaga

SEQ ID NO: 717832 - DNA, 1137 bp, Homo sapiens
tgcaacctccgtctcccgggttcaagcaattcctctgcctcagcctctgagtagctgggactacaggtgtgcgccatcatgcccagctaatttttgtattcttagtagagatggggtttcaccatattggccaggctcgtgtcaactcctgacctcgtaatctgcccaccgcggcctcccaaagtgctgggactwtaggtgtgagccactgcacccggtccaagtaaaattattttaacaatatactatgaagagaaaaacactggctatgaaagaatatgcatagttttaccctgtttaaaaataaagattgaaagaatacatatgcaaataagtttacttttatttttggtaatactttactggattgtctgaatattgacaatcagtatgcatcatgaagctacatggctaacattgagtactcactgtgtgtgccaggccctgggttcaatgctctacatgcacttatatttcatttaattctctctgcaacctgagatggtatagccacctcattttacagagttgaaactgaggcccagagactgaaagttaagcctgaggttacagtcaataagaggcagagctggaactgaaacctacgtgtgtctgaccaccagttcatgttctgacggcacgctagtctgcatcacagagtgtggggtagatggtgcatgcctgctaggatgggctaggtatcactgtaggtaagaaacagccccaaacgatggaaatgtacaccactgaaggctcttttcttgcccatgctgcacatcctccatggctctcctgtgccctgtgccccacatgccctcatcctgccacgagaataaaggagcagcctccatatgggagctgtcagctgctctaagagatgaaggagagggtggccagtctcaatggctcccaactcttgcctcgaggtgacacacttcacttccactcacatctcttgggtcaaagcaaatcccatgggtacatccactttcaagtggcccaggagagaacctgaaatactcggtggactccattaaggctgtcatatggtgtcagcctacatgggagactgtggaggggcagaggaggagagtggggaactgatgggaaatgacaggaggactaagtcaccgcaga

SEQ ID NO: 717833 - DNA, 725 bp, Homo sapiens
tattagttcagctgtcaagaaagtgtaaaataaacctaacatttttttactaagtgaggattttcttttttgaaacatcatcatttatatttatccagtttgcaacttcatcagctgaatctcaggatgygttccatgacactgaaggacaattaaatcatatccatgacaatatatgagaagctgacaggagaacatggtggcatttgaattaatgtctatcattagatagaatttctgatcacataatttaagttgtagttttccatacaatttaatcaagataagcacttattaggtgagtgatatactttggctctgtgtccccacacaaatctcatgttgaatcgtaatccccacgtgtcaggggaggggtctggtaggaggtgatttgatcatgggggtggatttcccatactgttctcgtgacagtcagtgagttctcacaagatctgatggtttaaaagtgtgtggaacttccccccggctcttctctctactgacaccatgtgaagaaggcacctgctccccctttaccttctgccatgattgttagtttcctgaggcctcccagtcgtgcttcctgttaagcttgcagaactgtgagtcaattaaacctcttttcctcataaattacccagtagttctttatagcagtttgagaagagatagatacagaaaattggtaccagagaagtggggcattgctataaaaatacctgaaa

SEQ ID NO: 717834 - DNA, 659 bp, Homo sapiens
ctaatttgctccttactggtgtttctctctctttctctccttcaactctttacgagcccagccaccatgcaaataattccaaactatcttttctagaaagctcacatgaagaaccgaggcatcctatctgatatccagccaaatgattaaacattctagaagcagactatgatgcactgaatttgtgaaatcctaacccccagtgtaatgatagtaggaggtggagcttttggtagatgatagtctgtcttcatgttggggattagtgccttgattattattttttatttttatttttatttatttatttatttattttttgagacagagttttgctctgttacccaggctggagtgcagtggtgccatgtcagctcactgcarcgtctgcctcctgggttcaagtgtttcttctgcctcagcctcctgagtagctgagtagctgagactacaggtacgcaccaccacacctggctaatttttgtatttttagtagagacggggtttcaccatactggccaggctggtctggaactcctgacctcgtgatctgcctgcctcagcctcccaaagtactgggattacagatgtgagccaccgtgcccagccggggattagtgcccttgtaaaagagaccccaaaaagcgtccttgcccctt

SEQ ID NO: 717835 - DNA, 659 bp, Homo sapiens
ctaatttgctccttactggtgtttctctctctttctctccttcaactctttacgagcccagccaccatgcaaataattccaaactatcttttctagaaagctcacatgaagaaccgaggcatcctatctgatatccagccaaatgattaaacattctagaagcagactatgatgcactgaatttgtgaaatcctaacccccagtgtaatgatagtaggaggtggagcttttggtagatgatagtctgtcttcatgttggggattagtgccttgattattattttttatttttatttttatttatttatttatttattttttgagacagagttttgctctgttacccaggctggagtgcagtggtgccatgtcagctcactgcagcgtctgcctcctgggttcaastgtttcttctgcctcagcctcctgagtagctgagtagctgagactacaggtacgcaccaccacacctggctaatttttgtatttttagtagagacggggtttcaccatactggccaggctggtctggaactcctgacctcgtgatctgcctgcctcagcctcccaaagtactgggattacagatgtgagccaccgtgcccagccggggattagtgcccttgtaaaagagaccccaaaaagcgtccttgcccctt

SEQ ID NO: 717836 - DNA, 2412 bp, Homo sapiens
cccttgacacgtgggaattattacaatgcaaggtgagatttgggtggggacccatccaaactatgtcagtatgttttgacttcttgcttgattgctaggttgcatagaggacaaacatggaaattaatgaagtaccttaatatctggcttcagatcttagacaggatcagagggccagctcaaatttgcaaggaggggaggtagatcccaccattttatgggtgaatggcaaaatcaaacagaaattatgtgggatgggagatactgatgcagscatctttggaaacattctacttagctaattttatgctaggctttaggtcaagaaggagagagagagctgacatgctgtggtacacacttatagtcccagcgacttggaaagctgaggcaggaggattgcttgatcccaggagtttgaggtagtgtgcgatgatcgttcttgtgaatagccactagccactgaactccagcttgggcaacattgagacaccctgtctcttaatttaaaaaaaaaaaaaaaaaaaggaaagaaagtggtctcagtttttaatgtaagtatttttaatgggataatgatattttaagattaatgtatattgtatatcagttaactgtaggtcaataattatataaaacttaaggtatgaaaaacatttatttttgctaacatatctgtgagttgactgttcttggcttggtgaggctgcaagctgcagatagagtctaggtatgttttctgtgtgtttgttcccccttggatcagtggactacctgagaatgtgtttttgtcacagtgatagaatcacaaggaaactccagttctggaagtacattttaagccattgcttctctcatgtccactaacattcagtcagccaaagcacataccttgtccatggctaacattgatagtatagataaatatacctgatctctagcaggaggaactgcattgtcttggggaaaggttttagatatagggaggggtgatgagttgggaacaataatgtagtctgccacaaacatattaaagtgtaactggatatggttgctgcagaattttgaacctttgttttaattgtgatttttactcttttccccctatctagtgcccttttgtaatacagtaattatcatgatttttgtctgaactgaaatcttctgagattagattgtctacgaaaatacagtcgatcctccttgttttcagcttttgtatttgtgaactcacctactattttttgtaacccccaaatcagtactcacagcactttcatagtcatgtgtttgcgcagagtgtcaaagaatttgagtttgaacaggatgatattctgccttctttttcagctctcatacaatagtcaggtatcctttttgtggtctatttaatgccatgcttttcctgtttttgtgctgtttgttggttgttttgccatttaaattaacccccaagcatagtgctgaagtgctgcttagcattcacaagtccaagaagtctgtgatgtgtcttacagagaaaatacatgcattaaataaactccattcaggcgtgagtgctgtagtgccgttggctgtgagttcaatgttaatgaatgaacaatgtatattatttatttattcttcatttaattaattattattattattttttttgagatagagtctcactctgttgctcaggctggagtgcagtggtgcagtcttggctcactgcaacctctgcctcctgggttcaagcgattcccctgccttagcctcccaagtagctaagactacaggcatgcgccaccatgcctggctaatttttttttttttttttttttttgtagttttagtagagacggggtttcaccacgttggccaggctggtctcgaactccagacctcaaatgatctgcccgccttggcttcgcaaagtgctgggattacaggcgttagccactgtgcctggccaacaatatatattaaataagcacacatacaacaaaagtaggtgttggtaagcttacaaaagtgtgaccagtagcttgctgaaacctaactttttatttgttcatggaactttctagaccgtaactacactgaataatgagaatctgctgtaatctttttaggtgctgtagatgagccattggattaaattattacagtatgtttcagactgctgtatgttgaaccctagtgaaatgcctctcaaaccttcataaggatcacaatctcatgtccttttttttttgttattaaatgcccagtatgtgttagcgatttaaacaaaattcaaatatttttttttttttttgagacagagtctcgctctgtcacctaagctggagagtgcagtggtatgatctcggctcactacaacctctgcctcccgggttcaggcgattctcctgcctcagcatcctg

SEQ ID NO: 717837 - DNA, 1418 bp, Homo sapiens
  misc_feature 657: n = A,T,C or G
gtttatctcagcgagcagagggaagagtttgaatagaatgggaggcaggttggccctgagcagttcccagcatgagttttccctttagcttagtgatttgggggccctaagatttattttcctttcacagtatccttacatcttgctctaattatttatttcatttttaaaactatttaaacaaggagttgtattttagctaaaacaaaatcgtaattggaaggataggattggttattcctctcttagttggctgttctacggaaagcattcccgttcagatcagggccctctttaattttttcaaattttatttcagtagttttttgggaacaggtggtttttagttacatgaataatttctttagtggtgatttctgagattttggtgccccatcaccagggccctgtttaaaggaactgctgttcacttgcgatcaaaatatatactgattttctttaaactggccaaagaaaccaccctcttgagggttgatcttattctagatttatgaacatgatggtagccgtcaggtccagagcatgggatgtctttcaagagtaatcgactctgtatagcttaattccacctccccttctatgcgcactcaagaattgcttatagtcatttcaatttaataacacaggtattgattnwttttttttttttttttttgagacagagtcttcctctgtcaccaaggctggagtgcagtggcacgatctcggctcactgcaacctctgcctcccgggttcaagcaattctcctacctcagcctcccgagtagctgggattacaggcatgcgccaccatgcctggctaatttttttttttttttgtatttttagtagagatggggtttcaccatattgactaggctggtctcaaactcctgaccttgtgatccacccgcctcggcctcccaaagtgctggggttacaggcgtgaaccaccgcatccagccatagttattgattttactgaatacatctaccttgcatttcaatctagtacaacaatgaaaggatggattttaagtaaacaaaaagaccacgcaacacttccattgttatttagagatgcatggagttttagcaaggagaatgaaaactgtcagtttgaaatactaatttcttgagttttcaagtaagaaggccaaaattatgcttgatttctttgaagttctatgatttgatactttaccatccatactcattaataaggcagaggcccctaaggttcaatgtccactcaatgacccgttccagggaacataattcaacagtagaaaatattttaagagcctgttataaggattagaaagacccagtcctggggctcagtcatggctgaaaatagtgccacttccaccagccagagttggaaaacctcaccagttataagacattgggtaga

SEQ ID NO: 717838 - DNA, 3076 bp, Homo sapiens
gattacagacatgcaccaccacgcccggctatattttgtatttttagaagagacggggttttaccatgttggccaggctggtctggaactcctgacctcaggtcatccacctgcctcagcctcccaaagtgctgggattacaagcatgagccaccatgcctggccggggagaaataattctaaggaaacaatactctgcctgaagctcagccttggcgtggctttgcaaaggaagcctttggaatcagagagggttcaaaccccatctctaatctctcctagctgtgtggcctcaggcaaatcacctgacttctctgtgcttacagtccttgttctagggacagagatgagcaatgaacagggcaaacatgtcatctgattggcaacaaggcttggtgccaatcaaatgacagcaccaagatttgacaagggccatgaaggaaatcaaacagaggccatgacagaagataatgagggccgaggaagtctctctgcaaaggcgacatttaaactgtgaccgcatttttatgtaatggaataagccgtctctcaccccttgtggcagccagggtcctggaagggaacagatggcaagttcaaattaagataatttgtgaggaaattaataaaaggactattcataaaggtatgggtagggggtaaaggagccacaagttataatctggtgccctgcagctagtgatagtgaggatcccacctctgccctcatccctaaacccaaatacagacagagagggttgcctgacagcagcagagatcttagcttaggaatatagcagcccatgggagggagtagggcctataaatgccctcttctatcctgcctcctcctgtaacattctatgggctccctattgcccaaacccaattagaaaccagtgggaaaaggtgcctcgtgctggggtttacacagtaaagcctaccagggcccaaataacagtggagaagagcagaaatcgggtctgtaaagataagcagatgctacccatttgttccctttctgcacatcggaatcttggggggtcatattagaatttgttagcgcttctaatcctgcattcataaggccaatgagaattaccttgtatgtgttttatgtgtatgtgtttaattctaaatgcttgatgatttgctatagatgcatttcttgcaaggggctttcactgtctagagctttagatgtaacaggtaatcaataatgctgcagctctgattccaaattaaataactgcacattcattacccgttcctggaagcacaccaggaactccccctccagaagcacaaatccccatgctcagagccttccttctcctctgctagcccactctaaccgtctggcagcttggatcggacaatgtgaatatcatccggcttttagaaatcaaactcccttcgctagtctaacctaaattgggaagaagaatgccaaggctctgaaatttactccgccaagctgagccccaagggaggacataacatttggctgcggaatcagggaatgtttggctgcttccctgtcatctgcttctccaaggaaagtggaggaacacagaatttcagctccatggtgtgtggatcccctgatccctccctactgagctgccaaaacaaaaggaagggttacctagaagtggggagtgaggtgggccacggtgatgcgtaatgagaaccaaggagaactgcatttggggctgagcaagttgagtttcacatcacgccctttctgtctcagctaacgaaaaacatcacgctaactggccagggaagaacaatagtgtctgagccagaaawttccttcagtgagacaacacgtcattttgcaagtacgaatttctaggaggtcttttctgtgatcagaaagctataaagcacccataacagaaattcgtcctgacatacatgcccatcaggagagaagagagactggtgttatatgcaccccagcccccagataggaagatttgcaatgagggtaagcagtaagatactgactatggatcaaatatcgtctagacaaaaatcagaatgaaccctattagttgtcccatgccaactcagcttcttgtagattaagagaaacagcccgtgcaattacttcaataacttatgcaaagtaagatcgtttcccaaattggaagtgacagtctgggccacctggtaggaaaggcagcctgtccccaggaggggctgagcatttctctcctagctctttgggtatttgattggtcgtgagataatcataatcaaaatcattacctccttccccagcaccatcaccatcatccatctgccaacgtagcagcgcattgagtgcaacttttcagttcccctgaaaccagctctaaggcctgtggctaggaaaaaaaatacaggcaccaaaaatatcttcagcctgggcaacaaagcaagaccccatctctacaaataatttttaaaattagctggatgtagtggcatgcgcctgtgcttgcagctactcaggaggctaaggtgggaggtatcgcctgagcccaggaggtcgaggctgctgtgagccttcattgtaccaccacactccagcctgggtgacagagcgagacctgtctcaaaaaaataaataaataaataaacaccaaaatagtttaccaatgtgtgttttccaaatctgtatatacagataacatcagttacaaaaagtttagtatgtgctatcatggctagatggagaggtagacatttttatttgaataactgggagaactagattgagaaaggttaacttggagggctgcctggaagacgcaagactctagccatcttgaggaaaggatttctgcccagaaaatagaagaaacttcgaagttaaaggcagggtctgcacaaacccagaggcacccaagaggcagggaaaggagctggtggtttgtgcagcgataaattaaaaggcatccatggagcaaatcatattaaacatgtatcttgtcctcaacaagtaaattccagacactactcaaaacacttaatttatcttactttgcttcaactccacaatgacccggtaagatggacactg

SEQ ID NO: 717839 - DNA, 542 bp, Homo sapiens
atgggaaaccacaggaagatagcatttctttcttaaaacaccccagctcctgaactaggattcccagagggcacacacagaaaccctagctgccttgaggaagacctcactctgtgagtactctctgatttcagggccccaggagttgaaataccccctctgcccccaccaggctctgaaatcagccaagcacctccgttgggtcaggacccaactcctcccctcaccaaatgcagcccccatggaggagatcaaacyccacacatgctccccttggtctcagaaggctgagtcagttgcttgcacaggaaggaccctggcttagtcaaaatggcaagggcccactgcacagacactgtatggaacatgaatctgagggccagcctgccccgagcccagcacatcactcttcaagccaagaacaccttctctttctttctctctctgacgcaagcttgcgcttctgccgtattccagaattgaacaagacgatttcccacctaaagtgggagaagataccataactcccttttttcttgtca

SEQ ID NO: 717840 - DNA, 542 bp, Homo sapiens
atgggaaaccacaggaagatagcatttctttcttaaaacaccccagctcctgaactaggattcccagagggcacacacagaaaccctagctgccttgaggaagacctcactctgtgagtactctctgatttcagggccccaggagttgaaataccccctctgcccccaccaggctctgaaatcagccaagcacctccgttgggtcaggacccaactcctcccctcaccaaatgcagcccccatggaggagatcaaaccccacacatgctccccttggtctcagaaggctgagtcagttgcttgcacagraaggaccctggcttagtcaaaatggcaagggcccactgcacagacactgtatggaacatgaatctgagggccagcctgccccgagcccagcacatcactcttcaagccaagaacaccttctctttctttctctctctgacgcaagcttgcgcttctgccgtattccagaattgaacaagacgatttcccacctaaagtgggagaagataccataactcccttttttcttgtca

SEQ ID NO: 717841 - DNA, 1475 bp, Homo sapiens
  misc_feature 824, 836, 841, 870, 871, 872, 879, 880, 881, 882, 883, 884,885, 886, 887, 888, 889, 890, 891, 892, 893, 894, 895, 896,897, 898, 899, 900, 901, 902, 903, 904, 905, 906, 907, 908,909, 910, 911, 912, 913, 914, 915, 916, 917, 918, 919: n = A,T,C or G
  misc_feature 920, 921, 922, 923, 924, 925, 926, 927, 928, 929, 930, 931,932, 933, 934, 935, 936, 937, 938, 939, 940, 941, 942, 943,944, 945, 946, 947, 948, 949, 950, 951, 952, 953, 954, 955,956, 957, 958, 959, 960, 961, 962, 963, 964, 965, 966: n = A,T,C or G
  misc_feature 967, 968, 969, 970, 971, 972, 973, 974, 975, 976, 977, 978: n = A,T,C or G
tgcacaaagggcaagtgggggctgtggtgccttcggcaaatctgtacaaaggcactgtcatggaccgaacagtgtcccaccaaatccatgaccctggccaggcatggtggctcacacctgtaatcgcagcactttgggaggccgaggcgggtggatcacctgaggtcaggagtttgagactagcctggcccacatgatgagaccctgtctctactaaaaatacaaaaattagctgggcatgatggtgtgcgcctgtagtcccagctacttgggaggctgaggcaggagaattgcttgaacccgggaggtggaggttgcagtgagccaagattacaccatygcactccagaatgggcaacaacagcgaaactccatctcaggcggggttggtggcattgtgggggttggaaagaatgcgaccttatttggaaataagatctttgcagatgtcattagttaaggatcctgaaattagggtgagccctaaatccactgactgatatccttataagaagagaggatacagagagacatggggagagaaggccatgtgaagacggaggaagggactggaatgatgcagccacaagccaagggctgttggcaacccccagaagccggaagagcaaggaaggcacatgtcctggagcttccagagggaatgaggccctaagacaccttgatttcagacttacagcccacagacctctgagagaatgaatttatgttgttcaaagccactaagtttgttttaacttgatgcacaactctaggaaactaatacagaccccacaggggcttcagaagtccaggggctagggcanatgtgtcgcagntcatncgatggctcgcagcactgcaatcaacttnnncccgctnnnnnnnnnnnnnnnnnnnnnnnnnnnnnnnnnnnnnnnnnnnnnnnnnnnnnnnnnnnnnnnnnnnnnnnnnnnnnnnnnnnnnnnnnnnnnnnnnnnnaggtgggtccatatacattggctgccagagatgcccattgtggattacaggacccaggtaagcatgactcaaaagagagaccacagggccgtcagagaatctgacgaactcaccaaaaagaaaaacagcaaaatctgtgggacacggctaaagcattgcttagagggaattagatcgcattctcagaaaacaaaaatgggcaccacccaccgcaccctcacctgcgttccacctgctggcgcaggttgttgaaacgctggcccagcttgtgcacctcggcctcctggcgctccaggtccggacagtgctcctggaagcggctggccagtgtgctcgagcactgcttggccgcctgcaagttctgctccacctcacccaggagggacttctgggcctgtaactcacaggccatggcctggcggggcagaggaggagacggcggtgctacggccagagctcccagagccaggcgatgacacccactgaagcccctgggc

SEQ ID NO: 717842 - DNA, 638 bp, Homo sapiens
cgaatcaggttggaatctccagcagtgaagaccaaggatctgcagttctygaatccacccaggtgatggccacatacagttagatggtaaacccaggtctacaccctgcataaatgctgcagtggtcctagaagccgatggctttggggaagtcagggtcaccccataacgtggtagggtatctataaggggccttgtcagccctttcatcgggatatcccatagtctcacaaaccacagaagctcatacacacctagctgcactctccacagaggtaagtcaatcaagacacaggatactcacaagaaacaaatagctacaggccaagggcaaccatggatccagaccacggcacatgtctacaagtttaaaaatcccaagagagcccaaagcaggaaacaccccagatgtccatcactggatgaacagatcaataaaacatggctcagccatacaacagaatattattcagccttaaaaaagaaggactgagtcattccacaacagggatgaacattgaaaacattatgctaaacaaaagcagccagttaccaataccatacattgcataattttactgatgtgaaatatccagaaaacgcaatcctgtagagacagaaaacagattagtgatttc

SEQ ID NO: 717843 - DNA, 638 bp, Homo sapiens
cgaatcaggttggaatctccagcagtgaagaccaaggatctgcagttcttgaatccacccaggtgatggccacatacagttagatggtaaacccaggtctacaccctgcataaatgctgcagtggtcctagaagccgatggctttggggaagtcagggtcaccccataacgtggtaggstatctataaggggccttgtcagccctttcatcgggatatcccatagtctcacaaaccacagaagctcatacacacctagctgcactctccacagaggtaagtcaatcaagacacaggatactcacaagaaacaaatagctacaggccaagggcaaccatggatccagaccacggcacatgtctacaagtttaaaaatcccaagagagcccaaagcaggaaacaccccagatgtccatcactggatgaacagatcaataaaacatggctcagccatacaacagaatattattcagccttaaaaaagaaggactgagtcattccacaacagggatgaacattgaaaacattatgctaaacaaaagcagccagttaccaataccatacattgcataattttactgatgtgaaatatccagaaaacgcaatcctgtagagacagaaaacagattagtgatttc

SEQ ID NO: 717844 - DNA, 638 bp, Homo sapiens
cgaatcaggttggaatctccagcagtgaagaccaaggatctgcagttcttgaatccacccaggtgatggccacatacagttagatggtaaacccaggtctacaccctgcataaatgctgcagtggtcctagaagccgatggctttggggaagtcagggtcaccccataacgtggtagggtatctataaggggccttgtcagccctttcatcgggmtatcccatagtctcacaaaccacagaagctcatacacacctagctgcactctccacagaggtaagtcaatcaagacacaggatactcacaagaaacaaatagctacaggccaagggcaaccatggatccagaccacggcacatgtctacaagtttaaaaatcccaagagagcccaaagcaggaaacaccccagatgtccatcactggatgaacagatcaataaaacatggctcagccatacaacagaatattattcagccttaaaaaagaaggactgagtcattccacaacagggatgaacattgaaaacattatgctaaacaaaagcagccagttaccaataccatacattgcataattttactgatgtgaaatatccagaaaacgcaatcctgtagagacagaaaacagattagtgatttc

SEQ ID NO: 717845 - DNA, 638 bp, Homo sapiens
cgaatcaggttggaatctccagcagtgaagaccaaggatctgcagttcttgaatccacccaggtgatggccacatacagttagatggtaaacccaggtctacaccctgcataaatgctgcagtggtcctagaagccgatggctttggggaagtcagggtcaccccataacgtggtagggtatctataaggggccttgtcagccctttcatcgggatatcccatagtctcacaaaccacagaagctcatacacacctagctgcactctccacagaggtaagtcaatcaagacacaggatactcacaagaaacaaatagctacaggycaagggcaaccatggatccagaccacggcacatgtctacaagtttaaaaatcccaagagagcccaaagcaggaaacaccccagatgtccatcactggatgaacagatcaataaaacatggctcagccatacaacagaatattattcagccttaaaaaagaaggactgagtcattccacaacagggatgaacattgaaaacattatgctaaacaaaagcagccagttaccaataccatacattgcataattttactgatgtgaaatatccagaaaacgcaatcctgtagagacagaaaacagattagtgatttc

SEQ ID NO: 717846 - DNA, 638 bp, Homo sapiens
cgaatcaggttggaatctccagcagtgaagaccaaggatctgcagttcttgaatccacccaggtgatggccacatacagttagatggtaaacccaggtctacaccctgcataaatgctgcagtggtcctagaagccgatggctttggggaagtcagggtcaccccataacgtggtagggtatctataaggggccttgtcagccctttcatcgggatatcccatagtctcacaaaccacagaagctcatacacacctagctgcactctccacagaggtaagtcaatcaagacacaggatactcacaagaaacaaatagctacaggccaagggcaaccatggatccagaccacggcacatgtctacaagtttaaaaatcccargagagcccaaagcaggaaacaccccagatgtccatcactggatgaacagatcaataaaacatggctcagccatacaacagaatattattcagccttaaaaaagaaggactgagtcattccacaacagggatgaacattgaaaacattatgctaaacaaaagcagccagttaccaataccatacattgcataattttactgatgtgaaatatccagaaaacgcaatcctgtagagacagaaaacagattagtgatttc

SEQ ID NO: 717847 - DNA, 587 bp, Homo sapiens
agccaagcagccctggctctgagctaaggcacacccagctggccgcctggcagcaggtggcatccaagtcacccaggcggtgaagtggggccatccgtacaaccacttctcccactccttgagatgctctgcaagctcagtgggcacttacccctcggaaaatggtgccaggctgagacccacgcagctgaggatgttttcccacaagctcaattaccaatcagtccctgcagctgctcccagatcagagtggaatccaatcagccggcgctcccagaacccagaagagccaggctgccctcactggctcttcaggcccaactgttattcatgcatccattgttggggtccccctaggcaccatcactacgctgggccaagggaggcagctgggaacgagggaggcagagtccaggccctcttggggcttacaagctgttgtaggtaatgctgagcagataaagaattaactgccrgctgggcgcagtggctcacacctgtaatcccagcactttgggaggccaaggtgggtgcatcacctgaggtcaggggttcaagaccagtccagccatgttggtgaaaccccg

SEQ ID NO: 717848 - DNA, 811 bp, Homo sapiens
gttacagtgaggtccctcccttaagcataatgactgcttctttggtccatttagtttgggtcttttgcaatttatcagagatgagttccctggagtctgggatcccattcaaagcagtgtgggcgcacgcataagtgtgttgattgcatttccacaatcctcagattctgcccttgagaggggctgtccctccactgattcctggaatggatgggcaaacagagccccagtgtctccaaaagcacttcagaatccccctcaccaccaccgccacgccgccaggaaatgaattaacctggacacccagacagctgccattaactcgacctcccctccataaagaagcacgcagagccggagtgtaaagaggatatggttaggatacgatgtttaacagagagaaagaaaggaggagaaacaactgtttgctttagatgcaaataaactcaacttcacctttaaagctgaaaacctgtgcccttggcaagacgtttggggactgttccagagatattaatcttcctccgtttacatgttaaatagatctttggaaacggtttctccagcactgttttttctctccggcacaatctccttctctctttctttttttagtacagtcaggactccccagcagcgagaagccccgggggacgaaggtggaggcaccaasccgtgtggatttcagagccatccgcggctgccggctgttggggcggccaggagtggcctgccagcagatggcgctgcgccgcacgttatggaccctcgtgtgcccgaccggctcagggaaggagacagacggctcaaa

SEQ ID NO: 717849 - DNA, 1531 bp, Homo sapiens
agttttttcctgtttttttctcctaagttttcttttgctccctgccctgtctctctctcccaaattcttccatttatttgtctgtctctgttttctgttgaaagcatcctttagttgtctgttgagcttttgcagtttgtacaaagctgaktaaatgctttgtacctagacagagtttgtcagttgatggactttattgtagagtgactaacagggactcagtcattttggtgaagaatgccccaatgtctgtaccttacagatgttttctctgggatttttagtttctccagagaaaaatcctcctctcctaggagatggattttgccagttttatccgtgtttctggagccaactatggggcaggggctgaaggtcttaccacccagttttctgagtctggcatttctccttattttggctcgtctcgagatttggagactctcagggttccctgcctcctccagttctgagcttttccagggttctggaatttaggcttttttcaaaggtgtccacctctctgcatacgggagtatcttgctttctctgttctgcaaatcaccccatttgccttccgtatcccaagtgtgttgacgtggcttatcaacctttgtctcttacgtgctctttgttccggccatcgtcttgtttaacaaaagttgaggtaaccactttgaaccactctggtttttgttctggcagttaccaccataatcccattgatacattaatattcttcgtttcttgttttattcgttatctttatatcgattacatagtatttagttatatggatataccatacttatgattattacttttaaatcttacatgtaatactgcagtgagcctcattgtacacacatctttgtacacttgtgtaagaatatcttcaggatgggttcttagaagtgttctcccccctgtgttccagccactctatcctttcttgactgtggctctaaagatcattagtcccattgtattttgatgtcattgcaacctaaaatgggttcatatccacagtctcttctggacacacctctcagaataggacaggtagggggatggtttctatttcacattcagggctagagacttcagatcctctggggtgtcactggttctgtagggactgtttgggtcattctttttttccaggctagaccagggaagcagggagagattctttttgctagtgttatgtagggagggagaccttagagatgcctctgtgagctgtgttctggatgtccagggagttttaggaatagtagttgatgtgatctcttcttgggagaaagaagggctagagtatgtatgattctgagggactggcgactcttctctcagttccatggagctggatggaggacaaaggatgtccttttcctttcaaaacatttttctgaaaggcatacataacttctgcttatgttttactaaccagaacctaatcacacagtcaccttagctgatagggagaccggaaaatgttgtcttttttttttttttcctttttgagata

SEQ ID NO: 717850 - DNA, 1373 bp, Homo sapiens
cttttttttttaattaaataaatggatcaaattaaataattcaagccctgccttcaaaatgaaattttttttttagtattatttagcaaaaacaataaaacccaaatttttttaaccatcactcatgtctcaggtttgtgcgtccttcagaggccccaggggagaggatccaaggtatgtctgtctgrtttgacctttctctttagagtctcttcttcctactatttaccctctcttttcacccccgaggactcatccagaaatataatgcagggtataatttaagatgggggtccagggtttggagtggtgtgtaggtggagtgtggggaaaaggctgtagtcacatacatagaaccatttgttacaggactgtttggaggcacaaatggtcggcgagctgagaagtaaactttcagatccacctgccactggtctgaacttgatttaaagaactgagcctttgatttagcctacatgggaatgtagacttagagaaggtgagagagggagaagggaagagaccttgtaagatctataaaacctaagagatacgatgagtggaggtgattaattaatgggaaacagcaagcctgggaggaagctcttcatcatgtgtcccacatcttcctgtccccccccattggtcttaattctgtaaatggggggaagtgagtaccaactgggtttggcaggaagcacttttgactccttagttttagttgttaaatgatgtggaactttaaacagttcaggaggtggagttagtgtggttggaaaggcaggcagtgaggtgtggaataaagaacaagggctttgataacttcattcctcatgttgttcctggataagtcatttcatctttcttagccttaaatttcccaactgtaaatgtggaaataatgtccatctcctagggttgatatgaagggttaataagatattttaaaagcctaatacttagaaagtgctctgtaaatgttagtataaatgttagcttgatccttggacagttaaatctggaggtgagattggagtagatgatttctagaagttccatgtttgctttagaagccttagtttagaccaggtgcagtggcttatgcctgtagtcccagcactttgcgaggccaaggcaggagctcaagaccattctgggtggcatagtgagaccccccatctctacagaaaatacgtttaaaaaaaattaggcagatgcgatggtacatgcctgtagtcccaactacttgggagactgaggtgggaggatcacttgagccagggaggttgaggctgcagtgagttgtgatcgtaccactgcactccaggatgcactccaacctggtgacagcaagatactgtctctttaaaaaa

SEQ ID NO: 717851 - DNA, 2103 bp, Homo sapiens
ctggagctcccaaatttatcaaacaattactaatagaccccagaaatgagacagacagcaacacaataatactgggggacttcaatactccactgacagcactagacaggtcatcaagacagaaagccaacaaagaaacaatggatttaaactatgccttggaacaaattgacctaacagatacatacagaatattccattcaacagctcatggaactttctccaagatataccatatgataggccataaaacaagcttcaataaatttaagaaaattgaaattatatcaagcactctctcagaccacagtggaataaaactggaaatcaactctataaggaggatccagacccatgcaaatacataggcatcaagtaacctgctcctgaatgagcgttgggtcaaaaaagaaatcaagatagaaattagaaaattctttgaactgaatgacaataatgacacaacctgtcaaaacctctgggatccagcaaaagcagtgctaagagtaaagttcatagccctaaacacctacatcaaaaagactgaaagcacagacattctaaggttacacctcaaggaactagagaaacaagaacaaaccaaaccaaaatccagcagaagaaaggaaattactagaaagtttttattcatgaattaaacaaaaataattcatgaattctattaatcctcataaattttaaacattacatgactatacttctgtaagcctgagacactaatctacaaccttgcccaaatagtgaccacaagatttaaattaattgaaaattatctctactacaattatttttttgaaatggagttctgttcttgttgcccaggctggagtgcagtggtgcaatctcggctcactgcaacctccacctcctgagttcaagtgattctcctgcctcagcctcccgaatagctgggattacaggtgcgcaccaccatgcatggctaatttttgtatttttagtcaagacagggtttcactatgttggccaggctggtctcgaactcttgacctcaggtgaacctcctgccttggctccccaaagtgctggaattacaggcatgagcctccgcacccagcctctttactacaattctaaaaaatattacaaatttacagttatttttgagttttacaaataagatacattatatataaataaagagtatacctttcaacttctaatcccactcctgatctgaatttcatagtccaacaagtacagacagccataattacacattatttaagtgtattgtatacttattagtatatacttgtatattatatatatcattataattgcttcatatatttacataatgttctatacatcttttcaactttattttattcaactgtatacttctgtgttctatctgtgtagatcgagataagttcattgttttaatcattttacagtattttgatatgaatacactacatgttatttatccatcatattagtgaaactttaggttgcctaaaatattttctatatcaaaagatgccacagttaatggtttaaaatatcaaattgttccaatcttatgtatctgagtaatggataagtacagacttccccagtggtttggagcagcttactcttattagcatgagcaaactgaaagacatatttaggaaattagaaaattaaggagaggtaattccttctcaggtctttaaataatgtagtaaatcaaaccaggtggtaaatgtcttgaaaatctcttttaaatatgctagtgctttcaaagtgagtaacaaattaacttcaaaccccaaatagctgcaatgaaacatgaggaagaaacgcagctttctggagtactacagtgtgcctggacatagatgtaatatatctcacttcaaagttaaggagtttatatttagaagtgttgtcatttctagtaagattttaaaatttcagatgtttggcaatgtgcacagctgcactgaatttttctcrttgataaatgactgaggcaaagggactgtactgcagagttttaaagatactatttatttctattgtttggcaagtgggtccttttggttgtctggaatgctacccaatcatgtctca

SEQ ID NO: 717852 - DNA, 1947 bp, Homo sapiens
taagaaagacatatttcatttggcctgagagaagaacaaaagactgtcgaattctcaagcaaattagcagactattagaatatagtgtgatacatgctgcaggacaaatataaagagccctcttcatacattgcagagtgttcatggcaaagttctttcactgagtactggtgacactggaggcaggtctgaaggtgagacygtctgagctgtgtttaaaggaggaaagtaggagtcaactcttacataatagtagggaacaaaaaagatgagaaatggctccatattgctgcattgagagggagttactgagaagcgtgcctggagttgtaaaaggaagccaaatgttaaggagcttgggcattattcttggggctacagggcaactgttcaaagttaattaaataacttgaatggtggcatgatggaatttccttgagaaaacagattttcttgtcaataatgaatctacagtagaaaaggcagctgaaaatcaagcaaaggaaatgcagaaaaataggtttaataatgatattatttaaaaaaccaaccaaagaaaaaatatcatctttgataatagtagctaaaatttattttgtacatactatatgccagtcatttttataaaaatcatgtacatgataacctctatataagataaattctattataatagaattattattatcattattatgatagtgtgagaatgagtggtagtttgcacagatgtgaaaaccatgccacttgaggtgaaagcttcactccaccatttattttcagtgtgaccttgtacaaattaattgatacacctaaatacagtcacacatatttgatatatttttgtggcagttcagggtttctccaacccacatctgtccctttttcatgccttggattttagtgagacagtgaaaataagttatacataagagcaagagaaatgaatgtgaagcaaacgagagaaatgacaagtgaagcaaaacactatagctccatcaaaataccaagcaaatgtcaaacagaaagaaaattcaaagaaatgaattatctgcaaacagagattctgaaattaggaataggctaagtggtgaatgacatgggagaaaggagacaggaataaacagatttcctgatgtcctttgatggaaaaggggactttatatgaattataatgcaactccatgaaaatggatgtgactttttggaaccctgtccttatctcttcccaaatgtatgacactgggcagaagtctcaacctctctttgcctcaatttcctacgccaaacctagataaataatagtattgaactcataatatactgtgaagattgagttaatatatataaaataatgaagcagtcctggcatatagtagcaccatatttgttatctattattattattatcattaaaatatcctttggatttcatgttttggcatgtgtgtccatttttcagattcatataatcctaaactcttaaagaattagggccataggaaagagtttgctgtctttggttgctgaaacgttcatattgtgtaccttgccatttaaagaaatgccatttaaagaaaacttaataccatttaaagaaaacttctaaactgttagttaatggtatttgggggtggacatcccttttctgtggaatatggtggtcatcttcagtggatgcccttggggaatgtaatgtcaaaactggatattccaaggacagtgcaggatcttagagttcataatatgagaaatgagcttcatgcgagaatattgaaggaatagtgttcatggatggtgatttgtaccttgttatggaacataaaatgtaaaatgaatgtttctttttttttcccagagaagaaaagatctctaagtgatgattatgatatgacaaaaagctcagacatttttcaggtggttgaaatgtgttctctggacggaaaa

SEQ ID NO: 717853 - DNA, 1947 bp, Homo sapiens
taagaaagacatatttcatttggcctgagagaagaacaaaagactgtcgaattctcaagcaaattagcagactattagaatatagtgtgatacatgctgcaggacaaatataaagagccctcttcatacattgcagagtgttcatggcaaagttctttcactgagtactggtgacactggaggcaggtctgaaggtgagaccgtctgagctgtgtttaaaggaggaaagtaggagtcaactcttacataatagtagggaacaaaaaagatgagaaatggctccatattgctgcattgagagggagttactgagaagcgtgcctggagttgtaaaaggaagccaaatgttaaggagcttgggcattattcttggggctacagggcaactgttcaaagttaattaaataacttgaatggtggcatgatggaatttccttgagaaaacagattttcttgtcaataatgaatctacagtagaaaaggcagctgaaaatcaagcaaaggaaatgcagaaaaataggtttaataatgatattatttaaaaaaccaaccaaagaaaaaatatcatctttgataatagtagctaaaatttattttgtacatactatatgccagtcatttttataaaaatcatgtacatgataacctctatataagataaattctattataatagaattattattatcattattatgatagtgtgagaatgagtggtagtttgcacagatgtgaaaaccatgccacttgaggtgaaagcttcactccaccatttattttcagtgtgaccttgtacaaattaattgatacacctaaatacagtcacacatatttgatatatttttgtggcagttcagggtttctccaacccacatctgtccctttttcatgccttggattttagtgagacagtgaaaataagttatacataagagcaagagaaatgaatgtgaagcaaacgagagaaatgacaagtgaagcaaaacactatagctccatcaaaataccaagcaaatgtcaaacagaaagaaaattcaaagaaatgaattatctgcaaacagagattctgaaattaggaataggctaagtggtgaatgacatgggagaaaggagacaggaataaacagatttcctgatgtcctttgatggaaaaggggactttatatgaattataatgcaactccatgaaaatggatgtgactttttggaaccctgtccttatctcttcccaaatgtatgacactgggcagaagtctcaacctctytttgcctcaatttcctacgccaaacctagataaataatagtattgaactcataatatactgtgaagattgagttaatatatataaaataatgaagcagtcctggcatatagtagcaccatatttgttatctattattattattatcattaaaatatcctttggatttcatgttttggcatgtgtgtccatttttcagattcatataatcctaaactcttaaagaattagggccataggaaagagtttgctgtctttggttgctgaaacgttcatattgtgtaccttgccatttaaagaaatgccatttaaagaaaacttaataccatttaaagaaaacttctaaactgttagttaatggtatttgggggtggacatcccttttctgtggaatatggtggtcatcttcagtggatgcccttggggaatgtaatgtcaaaactggatattccaaggacagtgcaggatcttagagttcataatatgagaaatgagcttcatgcgagaatattgaaggaatagtgttcatggatggtgatttgtaccttgttatggaacataaaatgtaaaatgaatgtttctttttttttcccagagaagaaaagatctctaagtgatgattatgatatgacaaaaagctcagacatttttcaggtggttgaaatgtgttctctggacggaaaa

SEQ ID NO: 717854 - DNA, 1659 bp, Homo sapiens
ttatcactatagcctccaaaagtcaagcacactattataatatacagccacatggatatataaatataatgatgataaatgatataatacacagtgtgtatgtatatgtgtacattattactaatttaaaatgcctataaactctttttggaagctctatgaatgactttgttgcctcttccacgtgttataggatgtctgcattccttagctggctagtctcttccttcaaaacaagcagtataatactgaattttctctctctctctgacttctgttcttctgtcattctgtcatcacattttcctccttcacagaacctctttctctgattctgactttcctgtctttctcttatgagaatccttgtgattacattggacacattcagattatccaagataatcagcctatgtcaaaatccttaatcgtatctgatatggtttggctgtgttcccacccaaatctcatcttgaattgtagttcccataatccccacgtgtcgtggaaggaaccaggtagagataattcaatcatggggcctgcttctcccatccacttctcctgatagtggttcttacgagatctgatggtttttatatggggcttccccctttgctgggcactcattcttctccttcctgccaccatgtgaagaaagatgtctttgcttccctatctgccatgattgtgtttcctgaggcctcccgaggcatgctgaactgtgagttaattaaacctctttcctttataaattacccagtcttaggtatgtctttattagcagtgtgagaatggactaatacaacatcttttgctcttttgccctacaaggtaatattcatagattcaggtattagaatgtggacatctttggaggccattatttagcatgccacattgtgtgaactaggacaagttacataagctttcgtggtcttaatttcctcatcaataaaatgagttattaatagcatttatgtcctgagtaaactgagtgtgtatgtgtacatatgtatatataaaactgtgtgtatattactcatgtatatatacacacatatacatcactgtgttatatcatttatcatcattttaattatccatctacctggctctctaccatagtactgtgcttgacttatagttattaaggaacacgtattttagacttcgaaaaaatattatattaaatactattaataataacaatgatagcatcctgagcacttatttgctctctatttaattttatttattgtttgtctcctatctcactcccattaatcttcaccactccttataaatttaatattcttaagtttttacgtatccttgagaaatatgtagtggtgctttgagagtaatttgtttttaatttatataaatggcaatttgctatcatattcattatcttacatttttcacacgctatgttgttagagagctctaattaaaagcacagtctttgaaaggatataacaagagtttgtaatggtgctacccactaatattcatgtgatgctggaaaaattgctagcatttctgtttctygatgtttctagattatttcctcagaccacatctctgatatttaacatgttttttcttctggtgatagacaactaaggcttctctaactcactaccttaaatggaa

SEQ ID NO: 717855 - DNA, 1031 bp, Homo sapiens
gcagaggcggggttctgccatattggctgggctagtctcgaactcctgacctcaagtgatctgcccacctcggcctcccaaagtgctgggattacaggcgtgagccaccgcacctggcctaatttaacattttaataatgagtattcccataccactttactcaggtaaaatattagcctagaaacagatcttggtcaatatgaatgacaaactttataatcaaataaacaataggtagttaaaaagatggagcaatttttctcaggctttggaaaattttatcttcaatagccactttttaatgacaaatgtcaaacattaaaaacttgctcatatggtacacttttttatcttacaaaaataagcacaacaaaaatgtgcttctgaacactaaagctttgtgagttaatggcctgaaaacatcttccaaatctgaaattcacgttattttaccattcttttatgatctgaaaaaaaattttcccaaaactgtacacaaggactaagatgaataaccctaatagaaaataaactatttttggaatttttaaaatttactcctagtgaaattagtgttctcaattggttgcctttgttttccaatacacagacttgccagctgtttttatttttcagcaacagcttttatatctgtgcttaaggcagcagttgttgaattatttttaaattatttttgaagtgcttattcgaaaagttaaggaaattttttttttaatttacttggaacaaatagttcatattgttttcttcctttccctttctttttttacttcttttgttcttttctgcaaatagtctagggtagtgctctgacaataacttagctatcacggacttttttttcctttgtaggtgacatwgttgtgcttgactgaaaacaatagagttttaataaatatgaatgtgattaaaaatatatattagctgaatagcatgctgttttcatttgtaaggggaagggctgggtgagactttgtgcttagagataggatcagagtgcgatgttttc

SEQ ID NO: 717856 - DNA, 1353 bp, Homo sapiens
gtaaacgttttgggaagggatctggttactgtgtttcctggaatacaactctgttctatttgcaaatctgttctgtttgcaaatcccttttccttttccctatattcttaatttcttataggctgaaactccaagccaagagcacaataaagtttgaagagttctatgcagcagtttggggacaggaacccgttccctcggaattcttgctgggtttgacccttttaacagaaggcggggacactgatggcagcctcgcagatccatataaacctcaacggagaagcccaaacaagggagacacctttctgcttttgacctaacgagtaaatcactgcatgtctttttcaaaaaaaggaattgcaggctgattctgaatgtccagcagcttctgttggaactcatagggctaaatgtctttcacagacggcttttatctcagacacggctataggcgtgacttattggttatttcccctctgccttcacactgataaataataaaattctaacaatcaaaatgaacatgttttattagcaaaagaaaaagccaatgggagtctatatacagtacagatatatctgtagtgaaacatatttcacattttagccaatccattgttctttttattgaaaacaggttcctggatctcataccatggaatagctcagtagatgaaagaacgatattgaggctagaattttaaaaaagacctctccaagccttgattaagaaagagggagattcagtggaaggggaaagtagctaagaacattagttattaattacaaggataacaggccgggcgtggtggctcacgcctgtaatcccagcactttgggaggctgaggcaggcaggtcacctgaggtcaagagtgtgagaccagctcggtcaacatggtgaaaccctgtctctaccaaaaatacaaaaattagccaggcgtggtggcacatgtctataattccagctactcgggaggctgaggcatgagaattgcttaaacccaggaagcggaggttgcagtgagctgagatcgtgccactgcactccagccttggtgacacagtgagactctgtttcaaaaaacaaaacaaamaaacaaaaaaaacaaaaattacaaaggtgacaaagtcaggcccaaacatattctgtctgggcctgactcagagaatcagcctgtgaaatcacacagcccagagggccaggacctgtccctgtaatttcctactaagagcaaagcatgagcagttgatgtatttcaccataattacgcatgcaagagtatatgtggtgtgcatacaatgagaatatttttttcaaatccaaactcaggacacatggtctgacaaag

SEQ ID NO: 717857 - DNA, 1353 bp, Homo sapiens
gtaaacgttttgggaagggatctggttactgtgtttcctggaatacaactctgttctatttgcaaatctgttctgtttgcaaatcccttttccttttccctatattcttaatttcttataggctgaaactccaagccaagagcacaataaagtttgaagagttctatgcagcagtttggggacaggaacccgttccctcggaattcttgctgggtttgacccttttaacagaaggcggggacactgatggcagcctcgcagatccatataaacctcaacggagaagcccaaacaagggagacacctttctgcttttgacctaacgagtaaatcactgcatgtctttttcaaaaaaaggaattgcaggctgattctgaatgtccagcagcttctgttggaactcatagggctaaatgtctttcacagacggcttttatctcagacacggctataggcgtgacttattggttatttcccctctgccttcacactgataaataataaaattctaacaatcaaaatgaacatgttttattagcaaaagaaaaagccaatgggagtctatatacagtacagatatatctgtagtgaaacatatttcacattttagccaatccattgttctttttattgaaaacaggttcctggatctcataccatggaatagctcagtagatgaaagaacgatattgaggctagaattttaaaaaagacctctccaagccttgattaagaaagagggagattcagtggaaggggaaagtagctaagaacattagttattaattacaaggataacaggccgggcgtggtggctcacgcctgtaatcccagcactttgggaggctgaggcaggcaggtcacctgaggtcaagagtgtgagaccagctcggtcaacatggtgaaaccctgtctctaccaaaaatacaaaaattagccaggcgtggtggcacatgtctataattccagctactcgggaggctgaggcatgagaattgcttaaacccaggaagcggaggttgcagtgagctgagatcgtgccactgcactccagccttggtgacacagtgagactctgtttcaaaaaacaaaacaaacamacaaaaaaaacaaaaattacaaaggtgacaaagtcaggcccaaacatattctgtctgggcctgactcagagaatcagcctgtgaaatcacacagcccagagggccaggacctgtccctgtaatttcctactaagagcaaagcatgagcagttgatgtatttcaccataattacgcatgcaagagtatatgtggtgtgcatacaatgagaatatttttttcaaatccaaactcaggacacatggtctgacaaag

SEQ ID NO: 717858 - DNA, 1353 bp, Homo sapiens
gtaaacgttttgggaagggatctggttactgtgtttcctggaatacaactctgttctatttgcaaatctgttctgtttgcaaatcccttttccttttccctatattcttaatttcttataggctgaaactccaagccaagagcacaataaagtttgaagagttctatgcagcagtttggggacaggaacccgttccctcggaattcttgctgggtttgacccttttaacagaaggcggggacactgatggcagcctcgcagatccatataaacctcaacggagaagcccaaacaagggagacacctttctgcttttgacctaacgagtaaatcactgcatgtctttttcaaaaaaaggaattgcaggctgattctgaatgtccagcagcttctgttggaactcatagggctaaatgtctttcacagacggcttttatctcagacacggctataggcgtgacttattggttatttcccctctgccttcacactgataaataataaaattctaacaatcaaaatgaacatgttttattagcaaaagaaaaagccaatgggagtctatatacagtacagatatatctgtagtgaaacatatttcacattttagccaatccattgttctttttattgaaaacaggttcctggatctcataccatggaatagctcagtagatgaaagaacgatattgaggctagaattttaaaaaagacctctccaagccttgattaagaaagagggagattcagtggaaggggaaagtagctaagaacattagttattaattacaaggataacaggccgggcgtggtggctcacgcctgtaatcccagcactttgggaggctgaggcaggcaggtcacctgaggtcaagagtgtgagaccagctcggtcaacatggtgaaaccctgtctctaccaaaaatacaaaaattagccaggcgtggtggcacatgtctataattccagctactcgggaggctgaggcatgagaattgcttaaacccaggaagcggaggttgcagtgagctgagatcgtgccactgcactccagccttggtgacacagtgagactctgtttcaaaaaacaaaacaaacaaamaaaaaaaacaaaaattacaaaggtgacaaagtcaggcccaaacatattctgtctgggcctgactcagagaatcagcctgtgaaatcacacagcccagagggccaggacctgtccctgtaatttcctactaagagcaaagcatgagcagttgatgtatttcaccataattacgcatgcaagagtatatgtggtgtgcatacaatgagaatatttttttcaaatccaaactcaggacacatggtctgacaaag

SEQ ID NO: 717859 - DNA, 1936 bp, Homo sapiens
gagctatgtatttgaatatcgtattttcaacaatttttcccattataaatttagctttaaaggtataccttttatggaataggagaacattctgagtggagctctgatggagtggagtggatttagtacatgtacatgataatttgtaggactagctgataaacatatgttaacaatattaaatgtttcaatccatacaacttctatttaaggtttatgagagtttaaaagctttttttctttttttgaatatcactacttgcatgtaaagcagcttgtatattttattttcatctcttcaacatgttgtataattaatataattataaactaaatttttcattggctatcaaaaagggttaaattagttctttgattattttgaataaataacttaccagttattttcttttataggacagaaggagattatttaagaagcaacattttgatctttccaaattgtagacctgttatttacagagttttgcaattatcagaaacatttgaacagaagcttagaactttctttctgtggtccaaatttcaaacagtgaaagcagtaaaaacagtgagcagactctgatactgtaaatgtcaagaattttctccatttgctcaggcccttttcttagtgagagtctttttttttttttccattcaatccaaatagcagcttttttcttccttttctttttaaactttgagagctttgaaatggaattcttcattttaaaattatccgatcatttcttccatgtatagagaaatgcatttagctcttgtgacctacctatcttgcatttctattttcaaagaaatataactttatggccaggcacggtggttcatrtctgtaatcccagcagtttgggaggtggaggcaggcgggccatgaggtcaggaaattgagaccatcctgccaacatggtgaaacactgtttctactaaaatacaaaaaaattagctgggcatggtggtgcacacctgtagtcccagctacttgggaggctgaggcaggggaatctcttgaacctgggaggcggagattgcaatgagccaagattgcaccactgcactccagcctggtgacagagcaagactctgtctcaaaaaaaaaaaagaaatacaactttatgtgatataatgaaactgttttgtaccatttattggacacgtactctatgtggagtgctgtgttggttttttttgcttatattaccacatatctttataagaacttagtacggcactgttataatctctgacctacaggaaaatgtaatgaagttcattgaagttcgtatgcctaattttagccaagtagtaaaaaggagagactggatttgagggaagcttcattgggatttaaaatccagttataccactaaacaaaaatcttcttttatgaatttttcttatgccctgaatttcctcccattcacaatgaaagctgtactgttgttgttcctactcaatccacaccctggttctccctgcatgaacttggtgtcaggattgggatttgttcctgattcagccaaagatgtacacgagctggaatggaaagcctcccttgaggcaatttctatgacttgtattttttattccttttcccccattttctcaccaaaagatcttctagcttcctggaaggctgatttattttccagattcattgtctttctttgccataactggtgaatttctgttagatctgcattttaattttagctgagcaaattattaactgtggatttgtttcttcatagtactttatttagatgtttagtagagagtttagtgtcccatattcatctaatttccatgctggaacaggtcaggttaccttttctggaatttccctgtatgattgctgatgaactaactcttgttatttcaacctttccttgtgtcaaagttcagccttaaaata

SEQ ID NO: 717860 - DNA, 1981 bp, Homo sapiens
  misc_feature 1476, 1477, 1478, 1479, 1480, 1481, 1482, 1483, 1484, 1485,1486, 1487, 1488, 1489, 1490, 1491, 1492, 1493, 1494, 1495,1496, 1497, 1498, 1499, 1500, 1501, 1502, 1503, 1504, 1505,1506, 1507, 1508, 1509, 1510, 1511, 1512, 1513, 1514: n = A,T,C or G
  misc_feature 1515, 1516, 1517, 1518, 1519, 1520, 1521, 1522, 1523, 1524,1525, 1526, 1527, 1528, 1529, 1530, 1531, 1532, 1533, 1534,1535, 1536, 1537, 1538, 1539, 1540, 1541, 1542, 1543, 1544,1545, 1546, 1547, 1548, 1549, 1550, 1551, 1552, 1553: n = A,T,C or G
  misc_feature 1554, 1555, 1556, 1557, 1558, 1559, 1560, 1561, 1562, 1563,1564, 1565, 1566, 1567, 1568, 1569, 1570, 1571, 1572, 1573,1574, 1575: n = A,T,C or G
cttggcatacactttcccaccaaccccaagcagatcaattgattcagatgtctggaggtgtattttgttatgtggctatgaggaggcaatgcaactcaaaaattatatatttcttcaaatagaaagaaaagcatattttctttttgttttcctttttttattttactttatttacttgaaaatctgggatasagaacatgcaggtttgttacataggtatacgtgtgccatggtggtttgctgcacctatcaacccatcactgaggttttaagccccgcatgcattaggtatttgtcctaatgctctccctcttcttgcctcctacccccaacatatgtcttatatactttaaatcatcattataatataaaatacaatgtgtaaatgctatgtaagtagtttttatactgtattgacttttgtattatttttatggttgtaatttttttcttctttttttaaaaaagacagatttggccaggcatggtggctcatgcctgtaatcccagcactttgggaggctgaggtgggcacatcacctgaggtcaggagttcaagaccagcctagccaacatggtgaaaccctgtctctacaaaaaaaaaaaaaaaaaaaaaatggccaggcatggtgctgcacgcctataattccagctactcaggaggctgaggaaggagaatcccttgaacccaagagacagaggttccagtaggcagagatcatgctactgcactccaacctgggtgatagagcaagactccatctcagaaaaaaaaaaaaaaaaaaaaacagattctcactctgttatccaggataaagtgtcgtggtgtagctctaaatcctggcctcaggtgatcttgccactttggcctcccaaagtgctgggattgcagggggagccaccgtgtctggcctgtattaacttttattttctattttttgccatatttctgatctttggatggttggacccatatatatgaaggacttactatataagcacattttcaatccaaataaacatcaaaaagaaagatttaaattgttctccccccagttgacaaaggcattccaaggtatagattcctattaattcacaatcaaggagactgaataagagtgacttcgattcggtttcgctagggtattaaaatgatgacacaggtagttttttcctgggaaacattttcaatacctgcccacaagaaaatcataaaactataaaaatttctgtgacttagaacaaagccataaataattttgttaagtgacttctatgctatctgaagtcactcttgttcagacacatttctttgtatcagagccaacactcaatgtgaccaccgggatatttgcatatttttctttcaaggtgctgctatatgcaaactaagagaatctcccagagacattgtagatgtgtggcagaattagttgtgtccctcactaaagatgtctagaaaagtctcttctgggnnnnnnnnnnnnnnnnnnnnnnnnnnnnnnnnnnnnnnnnnnnnnnnnnnnnnnnnnnnnnnnnnnnnnnnnnnnnnnnnnnnnnnnnnnnnnnnnnnnnctcctcttcagatgctgtagtctattctatgatagagagacttttttgatgttcaacagtcagtggtgacatcagtggatgatctgagcttgggcaacatatatgaacagtcagaatcatgtttcacattgcagataatcagtggatctgaaaagcaacaaattggagtgtagaatattttggaatgtctttttcaagagtgttattaggaaaaatgatttatcgaaatcactgtctcatattttaagaatatgtagtcttaaaaattagtaaaatttaaaaagcaaacataacacagcatatagtttgctttatgtagctgtcttcttgttcgataaggggctatataccaaatgtttagctagtttaattgtcctattaattagcatttttctgatatgttgta

SEQ ID NO: 717861 - DNA, 1981 bp, Homo sapiens
  misc_feature 1476, 1477, 1478, 1479, 1480, 1481, 1482, 1483, 1484, 1485,1486, 1487, 1488, 1489, 1490, 1491, 1492, 1493, 1494, 1495,1496, 1497, 1498, 1499, 1500, 1501, 1502, 1503, 1504, 1505,1506, 1507, 1508, 1509, 1510, 1511, 1512, 1513, 1514: n = A,T,C or G
  misc_feature 1515, 1516, 1517, 1518, 1519, 1520, 1521, 1522, 1523, 1524,1525, 1526, 1527, 1528, 1529, 1530, 1531, 1532, 1533, 1534,1535, 1536, 1537, 1538, 1539, 1540, 1541, 1542, 1543, 1544,1545, 1546, 1547, 1548, 1549, 1550, 1551, 1552, 1553: n = A,T,C or G
  misc_feature 1554, 1555, 1556, 1557, 1558, 1559, 1560, 1561, 1562, 1563,1564, 1565, 1566, 1567, 1568, 1569, 1570, 1571, 1572, 1573,1574, 1575: n = A,T,C or G
cttggcatacactttcccaccaaccccaagcagatcaattgattcagatgtctggaggtgtattttgttatgtggctatgaggaggcaatgcaactcaaaaattatatatttcttcaaatagaaagaaaagcatattttctttttgttttcctttttttattttactttatttacttgaaaatctgggatagagaacatgcaggtttgttacataggtatacgtgtgccatggtggtttgctgcacctatcaacccatcactgaggttttaagccccgcatgcattaggtatttgtcctaatgctctccctcttcttgcctcctacccccaacatatgtcttatatactttaaatcatcattataatataaaatacaatgtgtaaatgctatgtaagtagtttttatactgtattgacttttgtattatttttatggttgtaatttttttcttctttttttaaaaaagacagatttggccaggcatggtggctcatgcctgtaatcccagcactttgggaggctgaggtgggcacatcacctgaggtcaggagttcaagaccagcctagccaacatggtgaaaccctgtctctacaaaaaaaaaaaaaaaaaaaaaatggccaggcatggtgctgcacgcctataattccagctactcaggaggctgaggaaggagaatcccttgaacccaagagacagaggttccagtaggcagagatcatgctactgcactccaacctgggtgatagagcaagactccatctcagaaaaaaaaaaaaaaaaaaaaacagattctcactctgttatccaggataaagtgtcgtggtgtagctctaaatcctggcctcaggtgatcttgccactttggcctcccaaagtgctgggattgcagggggagccaccgtgtctggcctgtattaacttttattttctattttttgccatatttctgatctttggatggttggacccatatatatgaaggacttactatataagcacattttcaatccaaataaacatcaaaaagaaagatttaaattgttctccccccagttgacaaaggcattccaaggtatagattcctattaattcacaatcaaggagactgaataagagtgacttcgattcggtttcgctagggtattaaaatgatgacacaggtagttttttcctgggaaacattttcaatacctgcccacaagaaaatcatraaactataaaaatttctgtgacttagaacaaagccataaataattttgttaagtgacttctatgctatctgaagtcactcttgttcagacacatttctttgtatcagagccaacactcaatgtgaccaccgggatatttgcatatttttctttcaaggtgctgctatatgcaaactaagagaatctcccagagacattgtagatgtgtggcagaattagttgtgtccctcactaaagatgtctagaaaagtctcttctgggnnnnnnnnnnnnnnnnnnnnnnnnnnnnnnnnnnnnnnnnnnnnnnnnnnnnnnnnnnnnnnnnnnnnnnnnnnnnnnnnnnnnnnnnnnnnnnnnnnnnctcctcttcagatgctgtagtctattctatgatagagagacttttttgatgttcaacagtcagtggtgacatcagtggatgatctgagcttgggcaacatatatgaacagtcagaatcatgtttcacattgcagataatcagtggatctgaaaagcaacaaattggagtgtagaatattttggaatgtctttttcaagagtgttattaggaaaaatgatttatcgaaatcactgtctcatattttaagaatatgtagtcttaaaaattagtaaaatttaaaaagcaaacataacacagcatatagtttgctttatgtagctgtcttcttgttcgataaggggctatataccaaatgtttagctagtttaattgtcctattaattagcatttttctgatatgttgta

SEQ ID NO: 717862 - DNA, 972 bp, Homo sapiens
  misc_feature 2, 3, 4, 5, 6, 7, 8, 9, 10, 11, 12, 13, 14, 15, 16, 17, 18,19, 20, 21, 22, 23, 24, 25, 26, 27, 28, 29, 30, 31, 32,33, 34, 35, 36, 37, 38, 39, 40, 41, 42, 43, 44, 45, 46,47, 48, 49, 50, 51, 52, 53, 54, 55, 56, 57, 58, 59, 60,61: n = A,T,C or G
  misc_feature 62, 63, 64, 65, 66, 67, 68, 69, 70, 71, 72, 73, 74, 75, 76,77, 78, 79, 80, 81, 82, 83, 84, 85, 86, 87, 88, 89, 90,91, 92, 93, 94, 95, 96, 97, 98, 99, 100, 101: n = A,T,C or G
annnnnnnnnnnnnnnnnnnnnnnnnnnnnnnnnnnnnnnnnnnnnnnnnnnnnnnnnnnnnnnnnnnnnnnnnnnnnnnnnnnnnnnnnnnnnnnnnnnngaattccaattccatgtttaatacagaaagcattgctttaataaggattttctgggcctggcgcggtggctgatgcctgtaatcccagcactttgggaggccaaggcgggcggatcacraggtcaggagatcgagaccatcctggctaacacggtgaaacccccgtctctactaaaaatacaaaaaattagccgggtgtggcggcgggtgcctgcagtcccagctgctggggaggctgaggcaggagaatggcgtgaacccgggaggcggagcttgcagtgagccgagatggtgtcactgcactccagcctgggcgacagagcgagactccatctcaaaataaataaataaataaataaataaataaataaataaataaagattttcttttgtaggtatagacatcaggggagtcatgcagtgactgcctggctgtgaaagatgattatgcggatggagttgtctcgctcaacgtatctcttcttgagcgtgtttacttttaaaaatctagaaattcccttttcagttactatttaaaatttgtaatttgatttctttatacacacaccgtcacacatacaacacataattttatataaaggcaacatagttttttccctaattttttgcctttccctctcataaattccctctatttgcagcccttctctgccctctgttaaatcagactctttcaaatttttccccttactaacataattgtgtataggcgtaaacaaacacaaacacatatgtatatactcctagaaccttattcattatgactagcttttataaatgcaccaaacttttgattatttttcttctctctcaaaagtgccacacagaaattcctccaagtcatgtggtg

SEQ ID NO: 717863 - DNA, 972 bp, Homo sapiens
  misc_feature 2, 3, 4, 5, 6, 7, 8, 9, 10, 11, 12, 13, 14, 15, 16, 17, 18,19, 20, 21, 22, 23, 24, 25, 26, 27, 28, 29, 30, 31, 32,33, 34, 35, 36, 37, 38, 39, 40, 41, 42, 43, 44, 45, 46,47, 48, 49, 50, 51, 52, 53, 54, 55, 56, 57, 58, 59, 60,61: n = A,T,C or G
  misc_feature 62, 63, 64, 65, 66, 67, 68, 69, 70, 71, 72, 73, 74, 75, 76,77, 78, 79, 80, 81, 82, 83, 84, 85, 86, 87, 88, 89, 90,91, 92, 93, 94, 95, 96, 97, 98, 99, 100, 101: n = A,T,C or G
annnnnnnnnnnnnnnnnnnnnnnnnnnnnnnnnnnnnnnnnnnnnnnnnnnnnnnnnnnnnnnnnnnnnnnnnnnnnnnnnnnnnnnnnnnnnnnnnnnngaattccaattccatgtttaatacagaaagcattgctttaataaggattttctgggcctggcgcggtggctgatgcctgtaatcccagcactttgggaggccaaggcgggcggatcacgaggtcaggagatcgagaccatcctggctaacacggtgaaacccccgtctctactaaaaatacaaaaaattagccgggtgtggcggcgggygcctgcagtcccagctgctggggaggctgaggcaggagaatggcgtgaacccgggaggcggagcttgcagtgagccgagatggtgtcactgcactccagcctgggcgacagagcgagactccatctcaaaataaataaataaataaataaataaataaataaataaataaagattttcttttgtaggtatagacatcaggggagtcatgcagtgactgcctggctgtgaaagatgattatgcggatggagttgtctcgctcaacgtatctcttcttgagcgtgtttacttttaaaaatctagaaattcccttttcagttactatttaaaatttgtaatttgatttctttatacacacaccgtcacacatacaacacataattttatataaaggcaacatagttttttccctaattttttgcctttccctctcataaattccctctatttgcagcccttctctgccctctgttaaatcagactctttcaaatttttccccttactaacataattgtgtataggcgtaaacaaacacaaacacatatgtatatactcctagaaccttattcattatgactagcttttataaatgcaccaaacttttgattatttttcttctctctcaaaagtgccacacagaaattcctccaagtcatgtggtg

SEQ ID NO: 717864 - DNA, 1740 bp, Homo sapiens
tcacatattaatattcaaaattgcatgtgctactgaatttagtactttagtacaattcaatattgatgaggagaaaaatccctagccttttatctttatggaatcctttgtcactgctaaatgatcattgcaaatgttcctgaagaaagcctgatgacttatctcttcatgggcatcttactgttaaaacacatttcctttcaaagaatatagataaccatgaaaatagcaaaatagttaagatacagaacactctcggggtccatttgtcaaagttaaattatagctgtctcagtttattcttgtctgctctttcataatccagaagaaataatcgaaatgatagtgagttagaatataaatggaaataaagcttaactctcactcttgatattgatatgcagtctggtaatgcaattagaatattcctgcacataagtaataccctaacatttctgtattgattattctctcaaatatcatgccatctagccccagcatattttgccatgaaaaggaaaagtggtttgctgcacccctttaataataccaattaattggtaaataatacaaaattttttaaatttcatttaacagcactttgtgggggacaattctctgtatttaaatggcaatcttatttttaagcatcaaggtctaagagctcaggatctgtagactgtatgcttactgattattttaaactcaattaatacctttcttattctcctcaaccctttcttcttatgtctataccttccacgcttaggcttaaaacatagtaacatttatcccagtctaagacaaatgtcagcaggttctgcaacagaaatacactagaaagaggcatagccttatataggaaacatttgacacgtaccagatggttttttgacatcatataatctcttattttgatctttgttcagattataaaacgtctgcaaggattggaaaaaaaaatcttaatataccatgctgatggtcctcttttgtagatgggaaagcactaaataagtttcttaaatctgtggttttcagtcctgtatgaccaaagaataatctatgaagcttgtaaaatatatgtatactcagccctctgccctagagattctgatccatagctctactgaaaaagtgaattggaatatctggagatgggggcttaggaattattttttaagatccacaagtgattcaaatgggtaaagttaagccgatagggttaggtaattttccaaggttaccaaagtattacataaatggcaatacagaaagcatgtctccatatttagggcactagatatttaggtcaagcctcatttgatgttcttttaatgcattgagttgtcagcatcattctatctaagaagagccacaaatttaccatccaaaatattcaatgctagcaaaaagcctcaacatttctccaactttataagaggtgttatataacctgaatatgattgttgaattaaatagaagtatatggattatttatttaaaattaatcattgaatttaatatgctattgtatgttctcattgttaaccatgtagtatgcagtaatgaaatgactttggagtagtgttatagactatatgtttctgtcccccaaaattcatatgttaaagccctaatgtccaatgggatggtattaggagatgaagcctttgggaggtarttaggtctaggtggagtagtgagggtgaaacttccatggtggaattagtgccctta

SEQ ID NO: 717865 - DNA, 1405 bp, Homo sapiens
tgttaaycaggttatgtggaataccctccagaaagagtggctattatctttatacagaaccttgacaacagatgtgtttatttcttcaattaggttgagccatatgtaattgttaatcttttattctttctaacttacaaaaatggcaatattctatggctcaacttatatgctaaatatgacaggaaaaatgcacagtaatctgggtaaatatatgtataaaatttacctgtgtgtgcatatatatgtatatgtgtgtgtgtgtactgatttcatttcttctttgacttcctcaggtttacaactatagttcccaattctgaaatctacaaactaaatggataccagtaacttcagtaaaacaaacaaaaagaaggctgttaactacctggaacacaactacttataaacataaccgctcctctgcagttacatgcaggttgaatgcgttactcagtcctttagtggggaaaacacacctctggacttcactatgcttttgcagcattatgataagatagttatttaatagctatatttccctattatataactatataaagaaaattctaggtaatgtgccaagtatttttcagtagtgagtaaagttttcatttatacctttgtatcatcataattcatttatatagtggtctcctaagcaaatctaaccacttcataatgtaacacaatgtaacacataaatctaacacacacacacaaatgcataaggaaaaaaatctattttatcccttattacaggagaaaatagagaaagaaatgttatttaaaaacatttttttaaattagggtttaaaaactccctcattttcagaaagttgattctcacacacttttcttccattattcactccttccctaaataccttaaggcttggctatgccagtcttatgaagcctatttctccataaacttaaagtatgttcacactaaggcaaagtgagacttgcacttataggaggtatgatgaaagaggaaacatgtccttggaacttggggcggcagatttaggtgagatgctgaaatgggaatagaatggcatgctgaaagagtgtgcagtaaaaaggaaactaactcaatgatcatctgtgacatgtcaacaagtttgtttctgcaggaattctgcaaaatcaggctatcccttcccactccacatgtgaataacttgagattaataaaattactcaagctaatatacattttatttattatttattcatttgttaatttataatatttgttttggcaaagtgatatgaaacatttttagaatcatacatttaatcaattatacagctcactttggaatacagatctcttttgttacatattatacatttccacattgccaggcgagccatgtcataagttcttaatatgaaa

SEQ ID NO: 717866 - DNA, 1405 bp, Homo sapiens
tgttaaccaggttatgtggaataccctccagaaagagtggctattatctttatacagaaccttgacaacagatgtgtttatttcttcaattaggttgagccatatgtaattgttaatcttttattctttctaacttacaaaaatggcaatattctatggctcaacttatatgctaaatatgacaggaaaaatgcacagtaatctgggtaaatatatgtataaaatttacctgtgtgtgcatatatatgtatatgtgtgtgtgtgtactgatttcatttcttctttgacttcctcaggtttacaactatagttcccaattctgaaatctacaaactaaatggataccagtaacttcagtaaaacaaacaaaaagaaggctgttaactacctggaacacaactacttataaacataaccgctcctctgcagttacatgcaggttgaatgcgttactcagtcctttagtggggaaaacacacctctggacttcactatgcttttgcagcattatgataagatagttatttaatagctatatttccctattatataactatataaagaaaattctaggtaatgtgccaagtatttttcagtagtgagtaaagttttcatttatacctttgtatcatcataattcatttatatagtggtctcctaagcaaatctaaccacttcataatgtaacacaatgtaacacataaatctaacacacacacacaaatgcataaggaaaaaaatctattttatcccttattacaggagaaaatagagaaagaaatgttatttaaaaacatttttttaaattagggtttaaaaactccctcattttcagaaagttgattctcacacacttttcttccattattcactccttccctaaataccttaaggcttggctatgccagtcttatgaagcctatttctccataaacttaaagtatgttcacactaaggcaaagtgagacttgcacttataggaggtatgatgaaagaggaaacatgtccttggaacttggggcggcagatttaggtgagatgctgaaatgggaatagaatggcatgctgaaagagtgtgcagtaaaaaggaaactaactyaatgatcatctgtgacatgtcaacaagtttgtttctgcaggaattctgcaaaatcaggctatcccttcccactccacatgtgaataacttgagattaataaaattactcaagctaatatacattttatttattatttattcatttgttaatttataatatttgttttggcaaagtgatatgaaacatttttagaatcatacatttaatcaattatacagctcactttggaatacagatctcttttgttacatattatacatttccacattgccaggcgagccatgtcataagttcttaatatgaaa

SEQ ID NO: 717867 - DNA, 1041 bp, Homo sapiens
aaaggattccctatttaataaatggtactgagaaaactagccagccatatgcagaaaacagaaactggaccctttccttacaccttatacaaaaactaactcaagatagattaaagacttaaatgtgaaacccaaaatcataaaaaccctaaaagaaaaccttggcaataccattcaggacataggcatgggcaaagacttcatgactaaaacaccaaaagaaatttcaacagaagccaaaattgacaaattgggtctaattaaattaaagagcttctgcacagcaaaataaactagcatcagaatgaacaggcaacctacagaaaagttggattctttaagctacagtatactttcataatctaattcaaatagttcagattacagataagataattaaggattagagaggaaaaatggcttgtataatgtaagagacaaaaacagacagagctagatgaaatttcatgtttcctgatgcctatttcatttcacattgtattcttggcacaaaaggggctgagaaatgttgtaattattaagaaatttggtattagcaatctcagtctccttaattccttaatatagaacataaattcttataatatttttacatatttactgccaaagtaatgtttgttaatgtttatttcttttaagttatcataaatcttaccattttctgtttgtcaagcagtttcatgagttattaagaaactactcgtaaaaaatktgctgcaaaattctgaaggaagattaaaaaatttaatcaagtcatactgatttcctgatgtaaatgcagatgccatatggtacccagtatttcagtggttaatagcatagactatggagttaaagtgagaagaaattctgactgtttcactttcaaagtttgggctataatgatcatgtataaatctcttgacctgaattttctcattagcacatgtacagtaatgatggtgataacaataacagcaacaatatctgatttgagcaagtgagaaaaattcatacataaaaaattcatagcaagagtct

SEQ ID NO: 717868 - DNA, 2872 bp, Homo sapiens
tgatgccaggtttctggcttaggcaatttttggacacagcccttcactgagagggaagtcaggaagaacagtgtttttggtgaaagatgggtcgacaagttcaattgtaaaattgtgggaaaacggctcaaattctctcagctttagttgagaatctgtaaaatgtaacagttaacttacccacattttcatgtgttaaatagggtaatttgtgtaaagcattgaacccatgataggtaattaattgaaaatatatacatatataatttctattactaagaaatatgatgaatttatagtcattctgcagaaatataaaggaactagatctcctaatggccttagtgatgattaatacgttcatctcatctagaatagacttctattacaatttttttctttttctcatttgctaaatataggtatctagcactcttcacattcttctcattaaaaggaaatcggaatggcccattgctaagaaccacaatattctcgctggccttgtgaatttcactgatgaacagtagtcaaccagtaatcagacaattattaatgccccaaatttccattcagtctcactggcaaagttaaataataaacagcaaggcatgtttttatttccttccaatttttaaccttactttatgccccaatttgtttctcctgaacaataaacacatctccaaaatcatcttaagtgaccataattcataatagtagattatatgtattgacaggttattatatatgctgtcatattatatatagggttaataatagtgcttttctcatgaatttgttctgaagagtaaatgaaatgacgtgcataacacatccgtacctattttataggcacggaaattaagtcacaagagtagtaaataacttctaaggacatgctattaagaaagtggtgtatcagtgagtctccaaagcctaatatcttaaccacaaatttgaaagaatatactgatttggctatgagtttatcagttaaatgttcattgcgtccttcaagaacttactgtatattgcttctttcttctctattacgcaaataaatgttgactttgtttactatatttayttttaattaaattacaaataacatttcccttttataatatacaacattgtttcatttcaccttcatatttgattttcaaataatgttatgaagaaaacagaaccaatttaaatctctctattttctggtaaatacattgggaaccatgaagaggcacaagttatcaggaaaatgttggcagaattgttaattaacagtactactttagattcaaacatttaaggtccttatgtaagaggaaaccaaattacactgcggaagtaaccataatgaaagtattggctaacattttattggattttcttccatttacaaatgagtgtatgttcatcttctaataattttctcttgcttacatgaaaagtaaatgtgaccctcctacactcaggttctgtaactggcttcatatgtcttagagcactttccatgtctatatattactatccattttggttgtacttgaatatatttttaccactgataatttacggtgtttccaattttttctttctctcttaaaaattaataaagtgtatatatgtggacacaaaagaattcctgagtacttctgtgatataagtttctaaaagtgtaaatatttcactaaaagtcaacatgttaattttttttggtggggggagtagggtgggaggtctggcttcagtgcccatatcttgtatttattttttttttaatttttaatttttgtgggtatttagtaggtacatgtatttatggggcacatgagatattttgtgttagtttcaatatgtgctggtaaattgcctatcagctattctagcctataattttcttagtatcttctggtgttcttcacaccttcacctaaaccagactgtcttatctccctttttcttaaaagaaaatttgctaatggcatgagtgaaaaatgataccctctttctgatgtaatttgtatttactttattagagattgattatattttcataagattaccacttgtatttctttctctgtgaattatctgtttatatgttttgcctatttaaattttgagttagttacttattagttttctagggcttccataacaaagtaactaagactgggtacctcaaataatagatatttcgtctcacaattctggaggctagaaatccaaaatcaagttgtttgtagggctgtttcctgtgagggctgtgagagaaggatctgtcttaggcctctctcatcagcttgcaaatggctgtcttctccttatgtctctccacagcatcttccttcccggtgtatctctgtgtctaaattccccctttacataagaacactagtcatattggtttagagtctgccctagagaccttattttaactttattacctctgcaaaaactatctccaaatgaagttacatctaatgtactagagattaagatttcaacacataaatttggaggcacatattccaacctattacatttacctaatttatttggaagattcttgtccactctgggttttagttcattgtcattatatggatttttttttcatacctcttattggtatttacatttacccctctccaatttcttttaaataatttatttagattaatcctttttctttatggcatctggactattcttaggtttctccaacccatgttatttaaaagtttatgtacatttataaaaatgtatcaatttttaatttttactaaactacccaattgatttttgtatctacatataaacatatatacaaatatatatgtatagtaggaaggggtactataac

SEQ ID NO: 717869 - DNA, 685 bp, Homo sapiens
gatgctgaacaggaacaaataaattagacagagtatttgaagcagaagagtacagatayagcctcgttttattgcacttagcttcaatgagcttcacagatactgcatttttaagaaattgaaggtgtgtgaaaaccttgtctggtaagtcttttagcaccacttttccaacagcatttgctcactttatatccctgtgtcacattctgggaattctcatattatttcaaacttttccatcattattattattattatcattatttagatggagtctccctctgtcgccgaggctggagtggagtggcatgaattcagctcattgtaacctctgccttcggggttcaagtgattctcctgcctcagcctcccaagtagctgggattacagggtccattattgttatatctgtcatactgatctgtgcttagtgaactttgatgatattattgtaaatgttttggggagccatgaattgtacacagagaagatggcaaacaataaataatgttgtctgtgatggccattgccccatctcgctccctctcatcaggggtccctattaccagagacacaacaatattgaaattaggccaattatagtaataccctacaatgaaagaaagagtcgcaagtctcttactttaaatcaaaagctaggaatgtttacgcttagtgggaaaat

SEQ ID NO: 717870 - DNA, 685 bp, Homo sapiens
gatgctgaacaggaacaaataaattagacagagtatttgaagcagaagagtacagatacagcctcgttttattgcacttagcttcaatgagcttcacagatactgcatttttaagaaattgaaggtktgtgaaaaccttgtctggtaagtcttttagcaccacttttccaacagcatttgctcactttatatccctgtgtcacattctgggaattctcatattatttcaaacttttccatcattattattattattatcattatttagatggagtctccctctgtcgccgaggctggagtggagtggcatgaattcagctcattgtaacctctgccttcggggttcaagtgattctcctgcctcagcctcccaagtagctgggattacagggtccattattgttatatctgtcatactgatctgtgcttagtgaactttgatgatattattgtaaatgttttggggagccatgaattgtacacagagaagatggcaaacaataaataatgttgtctgtgatggccattgccccatctcgctccctctcatcaggggtccctattaccagagacacaacaatattgaaattaggccaattatagtaataccctacaatgaaagaaagagtcgcaagtctcttactttaaatcaaaagctaggaatgtttacgcttagtgggaaaat

SEQ ID NO: 717871 - DNA, 685 bp, Homo sapiens
gatgctgaacaggaacaaataaattagacagagtatttgaagcagaagagtacagatacagcctcgttttattgcacttagcttcaatgagcttcacagatactgcatttttaagaaattgaaggtgtgtgaaaaccttgtctggtaagtcttttagcaccacttttccaacagcatttgctcactttatatccctgtgtcacattctgggaattctcatattatttcaaacttttccatcattattattattattatcattatttagatggagtctcsctctgtcgccgaggctggagtggagtggcatgaattcagctcattgtaacctctgccttcggggttcaagtgattctcctgcctcagcctcccaagtagctgggattacagggtccattattgttatatctgtcatactgatctgtgcttagtgaactttgatgatattattgtaaatgttttggggagccatgaattgtacacagagaagatggcaaacaataaataatgttgtctgtgatggccattgccccatctcgctccctctcatcaggggtccctattaccagagacacaacaatattgaaattaggccaattatagtaataccctacaatgaaagaaagagtcgcaagtctcttactttaaatcaaaagctaggaatgtttacgcttagtgggaaaat

SEQ ID NO: 717872 - DNA, 1030 bp, Homo sapiens
ttgagatttgacaatttaactactttgcttctattgttctattaaaaacattgtaggcagagcacggtggctcacgcctataatcccaacactttgggaggccgaggtgggtggatcatctgaggccaagagttcgagaccagcctggccaacatagtgaaaaccccatctctactaaaaatacaacaattagccaggtgtggtggcagatgcctgtattcccagctactttggaggctgaggtaggaggtggagtttgcagtaagccaagattgcaccactgcactccagcatatgtgacaacagtgaaactccatctcaaaacaaaaacaaaagcattgtataaaaattttatgggggggatttattcttaaataaaatttaaataaaattaacatttaaagattaatataaaaattaaattaccttaaatacagaaatactattattttaatatgtatatatatgtatttctcagtgttttttcaatcatgtcaggactatttagaaataaatgcatagagaaagaattgtattaactccaagataaatataattttataaggcatgaaaattatgcaaacaaatttaatgtcaatgatttataagaggcagtccttaacacatgtgcaagggagtcattaacattcacttgaacttgaacaataaaattcaagtaaaataccaaataagtatccaggtgaaatcaggtttctgttctgttggaaactcccacctgcacactaggctttcagtctctcctcagatacgtggaataggaaccttgactaaaacaaagcagagagaagagacagaattcagtgtagggactatgacaaggttgaagagctggccagagkcctggaaatgtgattttcacaagaatgataagaacaaagacacgattatagcaagtccctcaaagacatcttagatgaggcaaaatctgggattaaaatgaatggatttgtttagctgcctcaagcataagatatcttcccacacagataaaattggaagatgaaaaaca

SEQ ID NO: 717873 - DNA, 616 bp, Homo sapiens
taaattgctaaaaaaccttctaaagtaatatcaaaatttttagtagaatttctgctgatggcgttatattttagttaagcgacttaactggggaatagggcattttaattaaattttcatgagaactgagtatttttatgtgtatgtattgaaactgtccagaccaagggtgtaggtgtgagttaattgttaagccatgtgtctctgaatcctcttatatatgtggatgtattccagaattttagcattataaacacatctttagctacaatatgaactgtctttaaataagcatcataaacttcaacttctggccataatggtctaacttaactccttgttgttaaaaactagaaaataggaaaaaatacctaaaactactattttcagacattggacaatagataaggcaggtctatacttgagaaaatggtataaataaagtgtgttctattgtcaccttgactttttgctttgtggcattttaaaaaygcagaatgaaggagaggaatctcaaacaaagttcagtggattccgggttttgagtagactgggatcagagcccagggaggctgaggctactgcaagttgcaaggcagagttttggaaagtaggg

SEQ ID NO: 717874 - DNA, 1229 bp, Homo sapiens
catttgagaagagtacataataaatgcattcagacattgcagctgttttttgtctgttttccaaacacataatgtgctaatttggaaaaaaaatcaacaacagctgcaaatacatgtcaacagcaaggtcttcaagggaaggccttaataggttttgttaatcagtggtgaaccaggtgtgaataaataattaacacacttgataacggagccttgttgccactactgctgtagctaaagttctgataacctttcctttaagttcaggatttacccacaatatttttttttaaatgtaatcactataaattcaataaagttaatgtcagatttttttaaaagaatattaagtatggatatcaggaaagaaacctcacataatttaggatgccttttaatcttacaataacaataaatgtctaataatctgtttcattagtatattattttgttaaacagagacctcattcctgttagtatagaaatgattgatcaaaattaatctcttatagaacatgtcagtatatttattaacattatgattgttcattttccttttgacaattggaaattccataatacaaaagatgcataatcataacggtatgtgagcataagatgtacaccagaactctgtggttattacccttaaatctggtattgtaaatgttaataaacctacgtgtattttaaccacttactgtgtaagggaatagaaaagaaatataaggcacattaactattcttattgtgtataaaatataattgatgaaatcttaacatttgtggatattaacaaacaggcaacaagacagaagagtcattattttatagaagatgtacctactatgcactaggttttagaatatgccagtagttctaaactagtggttccaggatcagccacatcagcrtcacccagaaactagtttaaaaggcagattctcaggcccttccagaaacccagtctgaactctgagggtgagccccagagatttgtggtttaagaagcccctctgggggattttgatgcctgctaaatgttaagaattatttttctatgttagtcacaaatttgtgtaacagaatagtgttaattgccaaatgcatggttggatgactaaggcccacatctgggaacaaaagctgttttacatcccacacactctgtcagaaaaaccagcagctgttggtgtcacttctctgttagactttctggaggcaccagg

SEQ ID NO: 717875 - DNA, 577 bp, Homo sapiens
caatcaacaaaaataatgaaattattttttcctacctgtactaatgatataaataacaaactatatacataatgagtgaattgaagaatattgaaataaaataatgaaaaagaaaaaatattttatgaagtgtttcccaaaagcacaggataaaactggtctaatatgcatcttcccatcttttgttttgcataaggtaagatttaaggtgaaactattttttaaaaaattggacagagtgacctaatttcaagaacatagtacaagatactaaaatagcaaggttgaaatatcactgaagggaagagaagcaagggaatccaattccattctcacagaactagttggctgtaaaatagatgtgttccctctacttcatatatgcacagtggcagagagagtggcctctgcagcccaactgtccttacctaaacttcagttctatcactttacaaattgtgtgaccatgagcaagttacttaacgctgctgcacattgcttcgaaaactaaaaatgaagataattrtaggtgttgctttatcattattatcactatttaatgagttaatatatgtga

SEQ ID NO: 717876 - DNA, 716 bp, Homo sapiens
gggaatctgatggtccttaaggtacttggagactcctgagtgtcacaaaactaggatcaaaaaccctggcaaaatgccagcgggaaaagcaaaggcagtcaagtggacgcctgtggggctgggggttagggggcaggggatgcttatgtgtaatttgactccttttgacattttgtcaaagtattgtggctcaaacagacatttgaagcctgattattttttgagaaattaaagacctgccttgctgtttcttagctgacggtttacatatttgaaagccatttaaatattctgtagagggttgttaataagcattaatttgggcaattatggattttgtagctgttactggaggttgatgtgtacctgagatacwttagaggacaagagaaagaatacagcccaacctagggttgctgtgttctctacacaagaaagtttgcacttttccataaaaggaggagttgaggagtagcccctgaggagggctggtgaatcatagtcatctttattttttctgtgtttctccagtcctaatgtgatggttccccttggtctgactttctgccttccttcctggatcattgattttaacttgataatctgtcctccactttgaaatcttcaatctctctataccttaaatctgtgaatgtagggcattttctttctcacatcttgagggttctggagcttcctggacagaaagccttaag

SEQ ID NO: 717877 - DNA, 933 bp, Homo sapiens
tttaatcagatatatatactggaggctcatgagtaatataaataatattagacgacaaggtatttgtggggaaaatatggcttttagcacatttcctcactgtgtaaaaattagtagtgtacacttaatataaaagatctcctaacatctatcacaaaatacaaamaatacaaaatgaaaattggagaaatatataagcaagatatttatagaaaggaatattctataatgttgtaaatgagaaaatacagtggttttaaaaatgaaaaataatattcatatatttgcccatcacacaattgaagatatcaataatatccaataaatgtacgaaaatggagactcagactcctgtggagtgaagtatacatttttaaattctttttgaaaactaacctgggcccagtgcagtgggtcatgcctgtaaacccagcactttgggaggccgaaatgggtggatcacctgaggtcaggagttcaagaccagcctggccaacatggtgaaacccagcctctactaaaaatgcaaaaaaaattagctgggcatggtgacaagcacctgtagtcccagctacttgggaggctgaggcaggagaatcgcttgaacctgggaggtggatgttgcagtgagccaagatcatgccattgcactccagcctgggcaacaagagcaaaatttcgtctaaaaaaaaaaaaaagaaaaaaagaaaactaatctggcatatctattaaaatttaaattgagaatatattttagacagtcctactttaggaatctatcctatagaagtcaaaacatcaacatggtttgtagtgaaatcttaccaaaagttgaattctgttcatgtgggaaattaattgaataaaatataatattttcagactctattacattacacagctatgaaaaagcataagttattctactcatgt

SEQ ID NO: 717878 - DNA, 933 bp, Homo sapiens
tttaatcagatatatatactggaggctcatgagtaatataaataatattagacgacaaggtatttgtggggaaaatatggcttttagcacatttcctcactgtgtaaaaattagtagtgtacacttaatataaaagatctcctaacatctatcacaaaatacaaaaaatacaaaatgaaaattggagaaatatataagcaagatatttatagaaaggaatattctataatgttgtaaatgagaaaatacagtggttttaaaaatgaaaaataatattcatatatttgmccatcacacaattgaagatatcaataatatccaataaatgtacgaaaatggagactcagactcctgtggagtgaagtatacatttttaaattctttttgaaaactaacctgggcccagtgcagtgggtcatgcctgtaaacccagcactttgggaggccgaaatgggtggatcacctgaggtcaggagttcaagaccagcctggccaacatggtgaaacccagcctctactaaaaatgcaaaaaaaattagctgggcatggtgacaagcacctgtagtcccagctacttgggaggctgaggcaggagaatcgcttgaacctgggaggtggatgttgcagtgagccaagatcatgccattgcactccagcctgggcaacaagagcaaaatttcgtctaaaaaaaaaaaaaagaaaaaaagaaaactaatctggcatatctattaaaatttaaattgagaatatattttagacagtcctactttaggaatctatcctatagaagtcaaaacatcaacatggtttgtagtgaaatcttaccaaaagttgaattctgttcatgtgggaaattaattgaataaaatataatattttcagactctattacattacacagctatgaaaaagcataagttattctactcatgt

SEQ ID NO: 717879 - DNA, 1407 bp, Homo sapiens
tatgtcttaatttgattttttttctttgctacttaccaaggacaatactcttgaaatccaatacagaaagagtgaggcctgacatgttccccttttaatttctcagtattgatgattttatggttagacctgcgtgcagagaaaataaagggagaaagtcatgcaaaacaaattattacctgtcaaactctttttttttttaaatttaacattagagattatagccccaacaaatggattttttccctccctatttaaaagcactctcttctgattgatatttaatgcttacagtgaccacacgggacatgtattgtttgcagccatgtaaactgccttcatttaaagggttcaatataaaagcccagaaggacaattcatttatttagttgcctttggtcaaaactgaaacagttcctgggcactttaaaggaatattgatcattcaacccactatgctatttgcagaaaggcagatgaaaccactttgtgcctttcataaaaatcctttcaattatagttgaaagagctttatttacacctgccaatgctgccttttatgtctctgctttactttctgcagagataatctttgttccatcatgtcttttaaaaagtgtaggtcacagtgaataatgatagaactcatgaggaaatgtgggactccatgggggacagtttcagttccttcttgagattgtcattagggctgttccaaaatactccatacacatggtaggattgcacctctctgcctacaggaggttaggagtggtcacaggactcgctctgacagagaggtgtacatggaagtgatgtgtgtcacttccaggcaggtttaaaagccagtgtgtacatggccatattctcttttcccactgccgtgacaacctgccatggtctagagagcagcttcttcagcctgagtcccagagagaagacataaagcagtggagcaaagctcctgctggcccttgatggacaatggcacaattatacacctttgctgtttcaaaycatcgagatttaggggccaagtcccaaggagaaaccgtcttgtaagtgccgattagaagggaaatttgtttagaggtcacaataaccaaatgagagcattgtcttttatataaattgaataaataagttaaaattctgtatttatgtaatgattgacccagtcccttctccctcccagcattatttttatttttaaataggagaaatcatgtgaccttttgggacacaaactgccgttatcactttcattttgagatgtatttctttaacagcaattttattactaaagaacatgtgcccccagcaaaagaaatgaccatcagagtgaacaggcaacctacaaaatgggagaaaatttttgcaatctacccatctgacaatgggctatta

SEQ ID NO: 717880 - DNA, 1407 bp, Homo sapiens
tatgtcttaatttgattttttttctttgctacttaccaaggacaatactcttgaaatccaatacagaaagagtgaggcctgacatgttccccttttaatttctcagtattgatgattttatggttagacctgcgtgcagagaaaataaagggagaaagtcatgcaaaacaaattattacctgtcaaactctttttttttttaaatttaacattagagattatagccccaacaaatggattttttccctccctatttaaaagcactctcttctgattgatatttaatgcttacagtgaccacacgggacatgtattgtttgcagccatgtaaactgccttcatttaaagggttcaatataaaagcccagaaggacaattcatttatttagttgcctttggtcaaaactgaaacagttcctgggcactttaaaggaatattgatcattcaacccactatgctatttgcagaaaggcagatgaaaccactttgtgcctttcataaaaatcctttcaattatagttgaaagagctttatttacacctgccaatgctgccttttatgtctctgctttactttctgcagagataatctttgttccatcatgtcttttaaaaagtgtaggtcacagtgaataatgatagaactcatgaggaaatgtgggactccatgggggacagtttcagttccttcttgagattgtcattagggctgttccaaaatactccatacacatggtaggattgcacctctctgcctacaggaggttaggagtggtcacaggactcgctctgacagagaggtgtacatggaagtgatgtgtgtcacttccaggcaggtttaaaagccagtgtgtacatggccatattctcttttcccactgccgtgacaacctgccatggtctagagagcagcttcttcagcctgagtcccagagagaagacataaagcagtggagcaaagctcctgctggcccttgatggacaatggcacaattatacacctttgctgtttcaaatcatcgagatttaggggccaagtcccaaggagaaaccgtcttgtaagtgccgmttagaagggaaatttgtttagaggtcacaataaccaaatgagagcattgtcttttatataaattgaataaataagttaaaattctgtatttatgtaatgattgacccagtcccttctccctcccagcattatttttatttttaaataggagaaatcatgtgaccttttgggacacaaactgccgttatcactttcattttgagatgtatttctttaacagcaattttattactaaagaacatgtgcccccagcaaaagaaatgaccatcagagtgaacaggcaacctacaaaatgggagaaaatttttgcaatctacccatctgacaatgggctatta

SEQ ID NO: 717881 - DNA, 1407 bp, Homo sapiens
tatgtcttaatttgattttttttctttgctacttaccaaggacaatactcttgaaatccaatacagaaagagtgaggcctgacatgttccccttttaatttctcagtattgatgattttatggttagacctgcgtgcagagaaaataaagggagaaagtcatgcaaaacaaattattacctgtcaaactctttttttttttaaatttaacattagagattatagccccaacaaatggattttttccctccctatttaaaagcactctcttctgattgatatttaatgcttacagtgaccacacgggacatgtattgtttgcagccatgtaaactgccttcatttaaagggttcaatataaaagcccagaaggacaattcatttatttagttgcctttggtcaaaactgaaacagttcctgggcactttaaaggaatattgatcattcaacccactatgctatttgcagaaaggcagatgaaaccactttgtgcctttcataaaaatcctttcaattatagttgaaagagctttatttacacctgccaatgctgccttttatgtctctgctttactttctgcagagataatctttgttccatcatgtcttttaaaaagtgtaggtcacagtgaataatgatagaactcatgaggaaatgtgggactccatgggggacagtttcagttccttcttgagattgtcattagggctgttccaaaatactccatacacatggtaggattgcacctctctgcctacaggaggttaggagtggtcacaggactcgctctgacagagaggtgtacatggaagtgatgtgtgtcacttccaggcaggtttaaaagccagtgtgtacatggccatattctcttttcccactgccgtgacaacctgccatggtctagagagcagcttcttcagcctgagtcccagagagaagacataaagcagtggagcaaagctcctgctggcccttgatggacaatggcacaattatacacctttgctgtttcaaatcatcgagatttaggggccaagtcccaaggagaaaccgtcttgtaagtgccgaytagaagggaaatttgtttagaggtcacaataaccaaatgagagcattgtcttttatataaattgaataaataagttaaaattctgtatttatgtaatgattgacccagtcccttctccctcccagcattatttttatttttaaataggagaaatcatgtgaccttttgggacacaaactgccgttatcactttcattttgagatgtatttctttaacagcaattttattactaaagaacatgtgcccccagcaaaagaaatgaccatcagagtgaacaggcaacctacaaaatgggagaaaatttttgcaatctacccatctgacaatgggctatta

SEQ ID NO: 717882 - DNA, 833 bp, Homo sapiens
ggatcctggaatgccaaatagttctctagagtagctgctttagtttattctactaccggggtatataaaaggcctcatgttcccatatctacctcagtgcacagattttatttttctcgtgtactagttctaaaatatctaatttccattttcatttaattcatccaattaccaatgattttgaacatttagtcaaatatgtagtaactttgggggttttgaattgccagtttatgatttacacttttacattggagttgtattatattgtactcttgttaaccaaaagttatttctgtatactgaatgttaaaccctttctctttctttttatctgttatctcgtgggtcagaaatcttgtattttgataaactaaagttagtaatttttggccatgcagtctaagatacctcatggttgaggctttaaaagagaaatcctttgccaattaataatgtatgttccatttgcttctatgcattttatagttaatcctaaatatttatgttttaatcacttagaatctgtgttgcttctagcataggtggagatttagggtttttttttctccatatagtatgccactttcctaacatctaaaaacaaaaatctaactttccgtcattgattgttatcatatttattyagcttcctaagtttatttgtatatttggtgagcgattatttgataatgtggctttgaggtgtgtcttaaagcaggccagagcaagtataacttctttattcttttttttttttttaaggtcaacttagcttttcctttaaaatatattcttgacgatatgaattcattgaattatgagacaatttg

SEQ ID NO: 717883 - DNA, 833 bp, Homo sapiens
ggatcctggaatgccaaatagttctctagagtagctgctttagtttattctactaccggggtatataaaaggcctcatgttcccatatctacctcagtgcacagattttatttttctcgtgtactagttctaaaatatctaatttccattttcatttaattcatccaattaccaatgattttgaacatttagtcaaatatgtagtaactttgggggttttgaattgccagtttatgatttacacttttacattggagttgtattatattgtactcttgttaaccaaaagttatttctgtatactgaatgttaaaccctttctctttctttttatctgttatctcgtgggtcagaaatcttgtattttgataaactaaagttagtaatttttggccatgcagtctaagatacctcatggttgaggctttaaaagagaaatcctttgccaattaataatgtatgttccatttgcttctatgcattttatagttaatcctaaatatttatgttttaatcacttagaatctgtgttgcttctagcataggtggagatttagggtttttttttctccatatagtatgccactttcctaacatctaaaaacaaaaatctaactttccgtcattgattgttatcatatttatttagcttcctaagtttatttgtatatttggtgagcgattatttgataatgtggctttgaggtgtgtcttaaagcaggccagagcaagtataacttctttattcttttttttttttttaaggtyaacttagcttttcctttaaaatatattcttgacgatatgaattcattgaattatgagacaatttg

SEQ ID NO: 717884 - DNA, 623 bp, Homo sapiens
cattccatattaaagatgtttggacgcattatttctgaagagaagtctgttgtctttctcacttttgtttctccaactatttttttctctcactacttaaaaaccttattatcttttatcactgatttttagaaatttgatcattttgtataccacagcatacttttatatatatatatgtttttttgcttcagatttgttgaactactgggatggttggtttcatagatttcatcaaatttatggtcattagtgctataatattttttctttctctccatcttttatgtggactgcaaatcatacatgcttggtttcctgatattgtcttatcactcactattactgctgcttttctgtgtattcgtttcraaagtgtcttcaagtttattaattgttttcttctatgccatatcatctgctctctatcttccctaggcattttttccagatactgtatgttttaccactttaacttttattttgaatttttaatacattttatttttttctcctcatgttcatcctttcttctaccatcttgaattgttataacagttgtcttaatgccctgtctaccaattttatttcaaatgtcattcctacatttgttccttttgata

SEQ ID NO: 717885 - DNA, 1446 bp, Homo sapiens
tttctttttcctgttttttttgtttgtttgtttttgttttttaatttttgagacagggtctcactctgtcacccaggctggagtagagcaatcacggctcactgcagcgttgacctcctaggccctagtgatcctcccacctcagcgttctgactagctgggactacaggttcaagccactacacccagctaatgtttttattttttgtagccatggggtcttgctatgttgccctggcacatctcgaactcgtgggcttaagttatccccctgactcagcctcctaaagtgttgggattataggtgtgagccattgtgcctggcctgttttcttgtatgtatgtgcatatgtatttatttattgagatgaggcctcactgttttgcctaggctggcctcaaactctggggctcaagcaattctgtcatctcagcctcccaagtagctaggactacagttgtgtgccactgcactcggctgtcattattttacattgttaccatcttcctttacctctttacatctctttatcaggccaaatttaaattatttgcccatcaattctggctttcccttttctatatgattctatagtccagtttttgttttttttttaagtctttgtgttccttgaatgtctcaatattttggcctgtgaactcatttttccctggcgttatgagcttttctttctggcagtatatgttggggaaggcccatcccaatctggtcagctccaaggagctcagggagttgagggtgtaaatgagctatggggtggagagccccaggcaccagaaaaccacaactacctgcagaacaatccctaaagtgaagtctaaaacctctggttaaaaggaaaaagcaacattaagatgtatcatttcttagactgtagaattctttagccctaggagtttggaggtgaggtggagactgcctgtgatcagtgagttaccatctgtttttctccacactttatggcacagarcttgcattgctaccctgatttttttttttttcctccagaggatttctggaccagaagtataaattgccttatggatgggtaggccctatttgtcccagtacaattggggatggggaagaggatgggatgggaagtaagaacagaaccccaagagcctccccaccctctttgatcccctcctcctctacaggccttctgcccttggccaaaatcacttcagggacacaaaccccagtacaaaacaggccctccaactcgaggttttccatggttttctccacttctctctctgttccccacagaaaggaagccaacaatcatactaattcagcatcttagatgacaccagaatcaggaatcccctatatctttatttttttaattcaaaagtgtttttgagcattgttttgcatgttttgaattatgttattaattcagtaagtaaaaaatttat

SEQ ID NO: 717886 - DNA, 2245 bp, Homo sapiens
ggtttcaccatgttggccaggctggtctcaaactcctgacctcaggtgatatgcccacctcggcctcccaaagtgctgggattataggtgtgagccaccgtgcccggcccctcttaattaaaaaagggtattttggggtcgggcatggtagctgatgcctgtaatcccagcagtttgggaggctaaggcaggaggactgcttaagcccaagagttcaagaccagcctgggcaaccaagggagaccttatctctaaaataaataaataaataaaatttaaaaatgattatctaagccaaagttcctcaactgactgtgccctgtagggggaacattagtcaatgcctggatacrcttttggatgtcacaactcagaggaaggtacactactggcatctagtgggtggaggccaagaaggctgctaaacatcccacaatacacaggacagacttcgcagcaaagaatcttccagcctaaaatgtcagtggtctgaggttgagaaaaccttttctgagctagtgttactgatctgtttaaggaagtctcataactaacatctcagttgtgtgtcagcaaatgggtggtgctatgtgatgcaaaagctctacaaataccttttctcaacttcctaaatatttctttcacatagtcctgcttacactataggcgtactgacgtctttaattcagagaacaaagagggtaaaccttgttcctagtctaactcacctccacggttattaggaaactcaaatgtgggggactgagtttctgacgctttattatacaaaatcattagctcttttttaaaacctctaaatggtgagtcggctgtcctaatctcatagcagaagaaacaacagccctaaataagaactgtcttattagaaatactagattccaaagacagtaattaacttcttcttcagttatatacaatctgaattttaaaaaaaaaaacattatatccagcccctgcataatatatcaggaagatgtaattgtttctgattaaaatgctcagtttgacgcggtgtggtcgctcgtgctgataatcccaacactttgggaggttgaggtgggaggatcacttgagagtagctggggcaacatagcgagaccctgtctctacgaaaagtaaaaagtcatctgggcatggtgatgcatgcctgtagtactagctacttgcagactgaggtgggagagaatggcttgagcccaggagttcaaagatgcagtgagttatgattgcaccactgcactcctgagtaatagagcaagactttgtctctaaataaataaataaaacactacatttggcttacttcttttttgtttccctattccttcaaggaaattaaatagatgtagaaatacagtggaacgccacagaatcattagagaagttagagtgatgtaacattttaagggtaccacattttatccttttacaaacaacacaaaataagaacaatttaagtataggtcctgccaaatacatgttaagggatatataaaaataagtttaaatttatacatggattgtacaaaatttttgaggttaaatattttaagcttattgtcttaagtgggttaaacattttcctgaaattgtcttcatactgttaatttattcagtcaagttaaacctccgctcttcctgtggcacaattatcaagaattcttgcacttatgtgttacactaaacagacagcctaatgaatacttatggctactgatttattctacaataaataacagtaaaagaattattattacaatgcaatgataaaaagacaaaacacccaattaaaaaatggcaaagggcctcacagacatttctccaaagaggaaatacaaatggctaacaggcacatgaaaaaatcctcaatataatttgccatctgggaaatgcaaatcaaaaccatcatgaaataccactccacactcactaggatggttagaaaataacttatgttggcaaggatttagataaattggaagcctcaaatactgctggtggtacaaaatgtgaagtggtgcagccacttcagaaaacaatcaggcagttcctctcaaaggttaaatgcagagttaccatatgaccaagcaattgcactttgaagcatatacccgaaagaaatgaaatatgaccacataaaaacttgtacacagattttcatagcagcattattcataatagccaagaagtggaaacaactgacgtttatcaactgatgaatgca

SEQ ID NO: 717887 - DNA, 636 bp, Homo sapiens
ttggggaaaagacaatacatagactggctctgtaaaataatgttattgagaggtcgatccctctgttctttcattactacatgagtggttgtcttttatgactggttctgtcctctttcccaacccacagaagttctggattatgtacagtgtcttatttgagagttctttagaaagcttggattattcatgatggcgtattttttatttttgacttattcaaaaattcattatctttaagattggtttgcaaattgcaacttttttgttaggcagcttttggggcctaaagacaactgacagtatatgatagtcatggggtacttgttttcctggattcctctaaggtcttaactcttacaagggcagrttccttcccttgttttctaaagcttagggagtcagcaggagttattactgatatctggtcttttcccttttttttttgtattgagttgcttcataaggattgcctttctccattgatgccaatttaaaagaatttgtcaaatactcttctaaattttgatacaaagctttgagatctcgtctaaatgcactcatttttttcttcttttaagtgtaattctttgatatttgtacaccaagctcttttttcttagacactttctttgt

SEQ ID NO: 717888 - DNA, 641 bp, Homo sapiens
taaccagctcaaaatatgccaaagtagcatatttcagggtgggatattctggtctcctacagtcacattttgaagtggtgtgtcctgagccccaacacaggcaaggggcctggggatactctaggaggtgatggggactttctggcgctgggaaactgaactttttgtttgtgctgtgttccagggctttcctcaggcctctgtgatgcatttctctcagaacacctatcacagtggaggaaagagaggctggcagacaggttccataacgcagctgagtctgctagtgccaggcagggcttgtacctaggtctgtctgttggattaataccaaggtctctgctctttccccatccctcccagcaaccaacccttcccagaatccaggcacagtccttcaacaaaagagcagtgagactgtatggtgcatttatacaatgaaatgtgacagaatagcgaaaatgaacaaactccagctgcagcacggatggatcccacaatgttgaggggagaggccaggcatgaaagagcacaggctgcatgcttctatttatacaaagcccaacagcaagcaggtctgagccacgaggtgtgagtcaggtggtggggaccccagrggaagagggaagacagggggccaa

SEQ ID NO: 717889 - DNA, 561 bp, Homo sapiens
aaagtgttaacaaattaatgtttaagtaaagcttgtcagaaataataaggaagaaggtgtataaatatccaccttagagtaagcattaataaacaaacaaacattcaaacaaacaacaaaagcttttccttccaagcccagaaatttacacaagtgatgaagatgagagacatctaccccttcactaactcagatcgattaacttaaaagttttaagttttataccacagacatttcatctctactctctttatatatagatttccctgtactggactctcatatggattgaattatagatgtggtcttttgtgactgccttctttctctaggcatagtgttttcaagtttcatccatgttrtcacaggtagcagtacttcattttttatggccaaataatacaccactgtgtggacacacacttggtccctccctttgtctatcaacagccaactggattgtttccacttcttgcctatctcaaatattgccataaatatttatgcacaaattcatctgtggaaatatgtttttattttttctgggtatatacatagaag

SEQ ID NO: 717890 - DNA, 600 bp, Homo sapiens
agatttactaatgtactaataaagtataagcttcagaaaacctcatttatatagggcttatttttaggaattatacttaatattgtattttagaatgtatagattattaaggggcctccaaattgtacaggcttccttctggtgctgtaaaacttgcatcagcccctgctcatgatgctatgcacctgaccatatctgagtcttaaatgtacacctgtgagtgcctttacatattaccacctagatatactttccaacagggaggattcacacaggcatcccaaactcagagtatgcaatttgaatttatatctatactctaaacttttattctggtaattkaattttcacccagttagtcacccaactaagaaatgtgacaggcttccttaatccctcctatatttcagcccaaaacacacatgaggaatttcattttcagcaagacacagaaaaccctgaatgtggccaccattggcctctcctgctaagctacagtaaatgcaccctaagccatccacattatttacagacccattaaacctgtgacacctctctgcctttgagattactatgttttatgattacaatggtctctcc

SEQ ID NO: 717891 - DNA, 789 bp, Homo sapiens
gtatgtgtacatatagagatcaaactaaatatgcgctttcatccagtacatggtagctgccataccattgaaaccatttactaacaggcttatgattaatgcacrtagatgtaattctgtgcttaaaaaagaaaaataaatattaggaaaacaagcaaaaactgacattatatgacatactgcatttggaaatcttgaaatggatttcaatatttatcagaacttcaggcctgaaaatttagcttagttatttttgtttgtgtgttgtttagtgatatgcacttcaagcaatgagacattaatctaatacacaagattcataagctattttttggcaaacatataataagatgattgtgtcattgttgctttaaagcccaagatctccctaatatccagtgtcatcctgtccagtgccgtatcagtctgtgaaatctaaactaatgtctgttttagggtatcatttattagtacaggttaagagcaattctattgaatcataagtggcaaaacaaggctcaccaatttctggattttcatcacttttttgcttatgaaatataactaatgaccttccatgcttgctgggctggtcatggatgagaatggacaatagttgaatctaaaactgaaaactaagtttgtagtttccttgatgggcaacctcaagcaatgtggcctctctattagcttgctcaaaaacaaatggtagcccatatatcattttatttttcaagcatgaaaagtaaaacctttgggaaagtatctttgccttggttttaaatactc

SEQ ID NO: 717892 - DNA, 789 bp, Homo sapiens
gtatgtgtacatatagagatcaaactaaatatgcgctttcatccagtacatggtagctgccataccattgaaaccatttactaacaggcttatgattaatgcacgtagatgtaattctgtgcttaaaaaagaaaaataaatattaggaaaacaagcaaaaactgacattatatgacatactgcatttggaaatcttgaaatggatttcaatatttatcagaacttcaggcctgaaaatttagcttagttatttttgtttgtgtgttgtttagtgatatgcacttcaagcaatgagacattaatctaatacacaagattcataagctattttttggcaaacatataataagatgattgtgtcattgttgctttaaagcccaagatctccctaatatccagtgtcatcctgtccagtgccgtatcagtctgtgaaatctaaactaatgtctgttttagggtatcatttattagtacaggttaagagcaattctattgaatcataagtggcaaaacaaggctcaccaatttctggattttcatcacttttttgcttatgaaatataactaatgaccttccatgcttgctgggctggtcatggatgagaatggacaatagttgaatctaaaactgaaaactaagtttgtagtttccttgatgggcaacctyaagcaatgtggcctctctattagcttgctcaaaaacaaatggtagcccatatatcattttatttttcaagcatgaaaagtaaaacctttgggaaagtatctttgccttggttttaaatactc

SEQ ID NO: 717893 - DNA, 1072 bp, Homo sapiens
agataaaacagtgttataacaagatacattaaataactagacaaatatctttaagtgagctagtgtggaaattaatactagaatacaagtaactttcttaaagtgaacattcatttttattttatcatatctgcactttttctagaggtagtaacattgtattgcagaaaaagtgtcatataattgaatatataaattttagagaagcattatgatacagtgcttatgtgatttcaaaccatacatttgaaattaatacaaaacacaaaaaagtatttgtaattatcaacaatttctattcagcctcaaatccttcatttcctcaaatgagatttttattcttaatcaattactgtatttaaagtatattggatctcagtaactcattttagaatgtagttatagccttgttcgtgttacaagcataattgttggatatatttacatcaggttggtcccaagaatgtaaagtgataataagaactcaatttttaattttgaagacactgtaactttaaatgatcaaaatattaatggacagagtgcagaatattcaggtgayacccagctccatcttgggatttataaatggtaagctttttttttttttttttttttttttggggggggggggaatcagccaccctaataatttgccttaaataaagctgttcaaaaaaaaaaaagagaccaaaccttgtgaaaacataacaggatttcaaatcccatagctcccaaaaatcatgggacaggcttttttaattaaatcttatctaaggaaagtatacagggttcaataaatggtaaaaaattatggaaaataaaaaatattttctggactggcttttgctttttgggggaaaacactacactatttcatataaaaataaatatttttttgaaaaacttgcttaaaaattacatttggaatgtaagctaaacttggagtaatgtatgaatcataggggacaagttttgtaactggaataattatacttaaaaaaaacactatatgtctagttaatatttattttttaatctgaatatatttttggataaaatagccaatcac

SEQ ID NO: 717894 - DNA, 967 bp, Homo sapiens
tttacttctattttgcaattgatttatgaaaagcaatttaaattgtcaatcactgtcttggcatggtttaagtgacagattttgcttagactggtacaaattaaacagttttagattcaaataagggttttctcctccgacttttacaaatattaaaagtttacaaggggaatttatgtcgtcacacaaaaggacagtattctttcgattacaaaaatatacatgtcttttcaagacagtcattgttttcactggagtggaaatcacattccatcactttcttagaataaaagcaatttgagccaatactttccacaaagaaaatgaaccaaaaatgagcctttaaaaaaatgtgtcttcataattaagcatgtaaacaggcatacacaattatttaacaagctctttttatgtgccagaaagtagactatttcaaactaaataacgaaaaacatggaaaatatgaatatctgcagggtatgcatatacacatgtgtattgttataaaataataatacttttaattatctttcttttcctacagtatacaaagattcagatttttgarttaagtttttttctatttacccttgctatgttattatttctaaaattaaaatcgttattatttttaagtatgttttctcttaatttaggtatcaaagaggacctatgaaggggcaggtccctttcagcctatcaactctatgtagggtaacttggtggtttagtttagaaccatgggaccagcaccaatcttttttgcctggaaactatactatagccttctcatactctagccaccctcgagggagttggtatatccttacaaacctcccctaccccttacctccagttaaagaagttgagtcaaagatggcacttgaaaagtatgaaaaataagttcttctcttggatttcttgtcttgggcttaagaaaatctgtctttccattggatgcacctgc

SEQ ID NO: 717895 - DNA, 967 bp, Homo sapiens
tttacttctattttgcaattgatttatgaaaagcaatttaaattgtcaatcactgtcttggcatggtttaagtgacagattttgcttagactggtacaaattaaacagttttagattcaaataagggttttctcctccgacttttacaaatattaaaagtttacaaggggaatttatgtcgtcacacaaaaggacagtattctttcgattacaaaaatatacatgtcttttcaagacagtcattgttttcactggagtggaaatcacattccatcactttcttagaataaaagcaatttgagccaatactttccacaaagaaaatgaaccaaaaatgagcctttaaaaaaatgtgtcttcataattaagcatgtaaacaggcatacacaattatttaacaagctctttttatgtgccagaaagtagactatttcaaactaaataacgaaaaacatggaaaatatgaatatctgcagggtatgcatatacacatgtgtattgttataaaataataatacttttaattatctttcttttcctacagtatacaaagattcagatttttgagttaagtttttttctatttacccttgctatgttattatttctaaaattaaaatcgttattatttttaagtatgttttctcttaatttaggtatcaaagaggacctatgaaggggcaggtccctttcagcctatcaactctatgtagggtaacttggtggtttagtttagaaccatgggaccagcaccaatcttttttgcctggaaactatactatagccttctcatactctagccaccctcgagggagttgrtatatccttacaaacctcccctaccccttacctccagttaaagaagttgagtcaaagatggcacttgaaaagtatgaaaaataagttcttctcttggatttcttgtcttgggcttaagaaaatctgtctttccattggatgcacctgc

SEQ ID NO: 717896 - DNA, 652 bp, Homo sapiens
ccctgtatttggcacacataatcttctagttatctaaaactataatcaattgtgtgtgataaaaaggagctctggactagaaaccagaagacagaatttctaggaaataattaaccatatactttcacagtgtgtgtgtgtgtctctctctgtgtgtgtacacactatagaaatattttaacttctgttctcatttatttttcccattggtaaattgagacgcttaacctggatgatttctaatgtaattgcatttctataatcttacacatctgtttatttcaatagattaaaaccttctactgtgtgaagcaagtgttaagtatgtagagaaaaaaaatccaaatcaaatttcatttcaacaacaatttgtttgcctgttgcttaattttaataaatagtctgttatttgttattttctgactgtgatctagttagcaatatagctacactaaagtcttcggctgggtatggtggctcatggctgtaatcccagcactttggggtgctcaggtgtgtggatgacttgaggccaagrgtttaagagcaacctgccaaaaatggtgaaaccccatctctactaaaaatacaaaaattatctgggtgtggtggcacatgcctgtaatcccagctagttggcaggctgagacaa

SEQ ID NO: 717897 - DNA, 804 bp, Homo sapiens
tgacctgttctgtgcccgtacacagagatttgagaaaaattaaatgacaccttccaggagattataatttatctgaagcttgttttctcttaatatatttatttgcatagtttgtttcctgagtgctattataaattagataattatttattctgttgtatgatttttctgttgtagaaatgsaagtttaaaacttggaaatgttggtaagtggaatagatttgaatattttaaatcattaagaaatagttgaattcaaaattttctgaagagttttcgttgtcagtttcttttttcctagagtgccttaagtggatactaccatctttgattaaaatgacatcaaaacagcaaagcaaaagccatgagctaatgcttaattagtttattataggatatcattcaggacatttaaaaaattacataagtaaaacaaatcatgctctcaaaaataagcattatttaggcttcatgaatttaaaaaactatcaaaatatttgattattttagagaacacacaatacctatgtaatcaacagtcagttctaagtttaaaaataaattttgattatacaatatacaatatcttaagtccacattaatggaaatttattttttgaaattaaatttgttgaaaactaaagaaaaacaaaaacattaaaaagtaagcaattctcaaataaattgtaaaatcacaactttgacaaaaagttgaaatatagacaaacaatatttgaggattacgatgcaacaagtatttcatatattatagtccacagaactaggaaatcaaccttctacccc

SEQ ID NO: 717898 - DNA, 630 bp, Homo sapiens
ctttgaagtttgtatattctcaacatttttgatggcttaaatgtatggattcattttagcactctgtaatcttcaatatatttctactcttatgtatgtgcttagctcattttttattcttaaaaaatcatctagctaacattattcaccaaatgcttcaagtatttattaatttaatattgttaaacrttattcttttatgaataaaaatgctcttaaaatagccatttgtgacagctttccaaatattcatcataataaagctatgtattacagtaataaagtttaaagatgagcaagcattaggtactcacagttacataagtttgactgtggaaagttatttttcttatgtacttaatatatttatcaatactataaatggtgatattgtagtatcctagtgttaaaattcatcaataaggcaaatcaaagcaacagtcacgagcatgaagaattagacataaatttttttctttgaagatagacgttgaggattttggtattaacacatgattcatgtacagaaaattttgttccttcctcttttatttccttcagatacttttgaaatgacatttaaatgtagttctaaatattgttataggaattaagactgtggacacaaga

SEQ ID NO: 717899 - DNA, 630 bp, Homo sapiens
ctttgaagtttgtatattctcaacatttttgatggcttaaatgtatggattcattttagcactctgtaatcttcaatatatttctactcttatgtatgtgcttagctcattttttattcttaaaaaatcatctagctaacattattcaccaaatgcttcaagtatttattaatttaatattgttaaacattattcttttatgaataaaaatgctcttaaaatagccatttgtgacagctttccaaatattcatcataataaagctatgtattacagtaataaagtttaaagatgagcaagyattaggtactcacagttacataagtttgactgtggaaagttatttttcttatgtacttaatatatttatcaatactataaatggtgatattgtagtatcctagtgttaaaattcatcaataaggcaaatcaaagcaacagtcacgagcatgaagaattagacataaatttttttctttgaagatagacgttgaggattttggtattaacacatgattcatgtacagaaaattttgttccttcctcttttatttccttcagatacttttgaaatgacatttaaatgtagttctaaatattgttataggaattaagactgtggacacaaga

SEQ ID NO: 717900 - DNA, 586 bp, Homo sapiens
gttatgacttctagattatgttaatatggaaactctccaaagtctaatactcgcaaagcacatcattgttcaacccgccacaacccatgcatttactcatagcaataaattcaatcacattacttcagttatggcagatttacattcaatcgctatcagtcagtacattgactataaaatttggctcagagtttttcattacctctgtggaacttctctttcattcctatcagaattggcctccatttatacgtgccctcagtccttacttactaataataaatctcaaattcatcaacccccttgtcaggtatctcatccatgggcaacagagcattcacctgttacgccccagagctgtggaattccctgatctgaacactcttctccaaaacccctgagctttataaatccctttttgagtctcacttattaaaatttgctttaaatatttgatctgccactgacacatgctatacgcttggctgtcataaaaaagaagaagaaacgtatttttattttccttaccatgtatgagaagrattgaaatttcttcttctttcttcatattttatatttttcatca

SEQ ID NO: 717901 - DNA, 698 bp, Homo sapiens
tcagctttctgactagtattccagggctggtatttacttgaagttctgtggcacatgagggttctgggtgaaatctgatggtagagaaggtgtgggggagaacaatgaagtcatgtgaggtatttgcctgtggtaggttgtctctaaactaggtggtgctcctattgttcaattatttatatgttctcctccatccaaaatgattcaatctgaaccctgtccttctctcttcatctaactgctgaaatgtaatagtcttagggagtgatatggtttggctgtttccccacccaaatctcatctgtaattccagctcccataatccacacgtgtcacaggagggacccagtggaagggaattcaatcatggcagtgggtttttcccatcctgttctcgtgatagtgaataagtatcacgagatctggtggtttgataaagggcagttcctctgcacatgccctcttgactgcctctatgtaagatgtgcctttgcgcctcctttgctttctaccatamttgtgaggcctccccagccatgtggaactgtgagtccattaaatctcttttgctttataaattgcccagtcttgggtatgtcttcattagcagcatgagaacagactaacacagggagcgaaattattactttttttccttcttcacatgtctctgcagtatcattatcatctgcccagga

SEQ ID NO: 717902 - DNA, 587 bp, Homo sapiens
tgagaaaaataagctttaactgaccactctttccttcctatccaaagcttagtcaatgagaaaatgttgcaagagaaggagaatggggggtacctgagactccaggagagtacataccctttttaaaaaagcaatacaagccagcagaaaaaggaargatgggactctggagcgattatgtgaatctgtggttctcaaagttcagcatgcatcagattcccagagggcttgtttaaacaaaaatttctgccctgcaaccacagagtttctgattcactaggtctgggggtggtgggtgtggttcaagaatctgcatttctagaaagttcccatgtgatgttgactccagtgctgatgctgctggtcagaccacactctggaaactactgccatagaacatctgagagtcacaatttgaaactgtctcaagaaatttctaagtaaaatgcaatgcaataaattacttaagaattctctatatttacaactctttatttgtatagtttccttccccctcagtatgttggctggtaagaatgttctttttgattattcatctgtgtgggctcaagagtgtgtcactgagt

SEQ ID NO: 717903 - DNA, 832 bp, Homo sapiens
ttcacttcatcttcacagaagccttatggatgggaaagctaggtcttagagagattaagaaacttatctggtcaccagcttataggtaggtggtagagcctgaggactgtgctttcttctcctggacagaaagtgctgcctgagccctcccctgtacccagcctgtcagggaggcctccctgggtggtttctgagctggctgctttgcagggctagaaggcccatccctcctcacctgcctgtgtctgtgggaggctcttggcaagggtgctgtgtcaggcggcccaagtgctttcagcacttgggggtggcaggctaatttactggcctgctgagcagctggtggatgactggggattgtctgaagtctgcctagaaccatggcctggggcagggctccttccagcaacttccctggagagctggctgcaaggcagggccaaaccagccatcatgatagtgtgaagggcattttctgtcaaaagaggatgttggacaagagttggaaagacttgagttctgatcctggctttgccactagctagttgtataaaactgarcaagttactgagcattcctggttcccactgcttacaaaatgggagcagtaatcatgcttacctcccaaacttgttgggaaaatatatgcaatgtgattagcccaggtgcaaaaataaatgttagatattttatgtttattatgatttattattagctacagcccccctcatctgtaaaatgagaggtttcattcagtaaccacaggcctggcactattgagcagtaggtgctcaataaatgttaattcccttcctagtcccttattcttcct

SEQ ID NO: 717904 - DNA, 1145 bp, Homo sapiens
ttgcttttatgtcctctccatgatgactctaacaaatcctgattcaggtttatatattgtttttgtttgtttgtttttttgtcctcaatcaatgctggctgagactgttggagtatcagtaccccagctccctcacccctggagtagataactctgaagtgtgtgtctatgctgtctcccagagcttcctggcagctttgagctccagctgcccatagcagtaacttccttgataatttgctctttattggctgctttctatgtccagcctcactccatcccccctcttcctggagaaggccacctccarataaactatgtgcctctgactccttgtctcagggtctacttcttgggcaacccaaactgagataagctctcatcctcctctgagacaatcatttaatctcaaccattacctgttgcttcttttttttttttttttaagacagggtctcactctgctgcccaggctggagtgcagtggcatgatcatagctcactgcagcctccaactcctgggctcaagcaatcctcctgcctcagcctgctgagtagctggcactacaggcatgcaccaccatgcccagccaattttttattttttgtagagaggggggtctcaccatgttgcccaggctggtctggaactcctggcctcaagtgagcctcctgcctcggcctcccaaagcactgggattacaggagtgcaccactgtacagagagcagccccacctttgctctttccccacatgtgctttatcaggggtgtggttagcaaggatggggaatagcaggggcacttcaagattggggcctctgaaaactaggcagcatggggacagagctgcctcctcttaccggcaaagagaaggtgcaaatcagaagttttaacatattccttaattagagcctgattttgttctcagctgcccagccgtgtggggcccgataacaccaggcagcattgttgtttttatgcttatgaggcagatcagctggaagagcgcattccaaatgagattacatcttatacatgtttaatgtactgttctcgccatttaaaatgcagctctgttaaaatagcagggagggaaagttgactcatggagctgggtgtggagacaatagatcactagtgaaa

SEQ ID NO: 717905 - DNA, 623 bp, Homo sapiens
acatacagtcatataacaatcacagtcaagagaggggacccttgtgacccttctgtagtcaactcctttcgtgcacccactctggcaaccgaagacatgttctctgctactcctacagttctgcctcttccagatacttgtttccttcctccctccttcctttcctccctctttccttcctcccctctccctccccttcttctttccctccctcccatttttttctgctcctccttcccttccttcttccctccctccytccttcctctccttctctccttccctcccctctcttcttcctcccctccttccttccttttttcttctccctcgttctttcctgtctcctttagcagccaacttatttctgcaaatgaacaagaaggaaagcaaaccaatttttttaaggaaacaaattctgtgtgcttcctgatgaatgctagtctacttagctcaagggaagaatttgagagcagaaatttctttgcttttcctggccagaactcatgctgagattgggggtgggggcggttatattactattctgatggagccgagaatttatttggatgaaaaatggatctccacttgagcaggaatggggtcttatggcaggaacggag

SEQ ID NO: 717906 - DNA, 1141 bp, Homo sapiens
aggtaataatgtctgactatgcccaagaagcgatcggaaaacaaatattaataagatttaattaatatgttttaatttcaacagaaaagaaatgtattacattatttcccaatgttgtgatttttaaattaattataataccattgaggttcaatccagggcaattagactgttaaatcctagttaggtttgttttctccgattcattgcagtcacagggcagggctaactttagaagcctcatcataaaggtctagagcatggaattgttgctgcagagggacatgatttaacttgcagctttttctttttcttttttttttttgagacggagtcttgttctgttgcccaggcyggagtgcagtggcacaatcttggctcactgcaacctttgcctcctgggttcaagcaattctcctgcctcagcctcccaagtagctagggttacaggtgcccaccaccacacccagctaatttttttttttttttgatacggagtcttgctctgtcgcctaggctagagtgcagtggcgtgatctcggctcactgccagctccgcctcctgagttcacgccattctcctgcctcagcctcctgagtagctgggactacaggcacctgccaccacgcctggctaattttttgtagccaggatggtctcgatctcctgaccttgtgatcggcctgccttggcctcccaaagtgctgggattacaggcatgagccaccgcgcccggcctaatgtttgtatttttaatagagacggggttccaccatgttggccaggctggtcttgaactcctgacctcgtgatctgcccgcctcagcctcccaatgtgctgggattacaggcgtgagccaccgcacccggcctaacttgcagctttttcaattcacaaaacaaagtactgcattttgttgatgttctattggatactacatctacatgtcaaatataaggattttttttcttagagatatttccctttctaaaaaaaattgaccttcaacttgggaatacctgttgaaatttggcaagctattcctgatccctgatcttgagaaaattatgaaaagaagaagcaaaagatgatcatacctattttaataaaattgatcactaaaataaaagaaaacccca

SEQ ID NO: 717907 - DNA, 1141 bp, Homo sapiens
aggtaataatgtctgactatgcccaagaagcgatcggaaaacaaatattaataagatttaattaatatgttttaatttcaacagaaaagaaatgtattacattatttcccaatgttgtgatttttaaattaattataataccattgaggttcaatccagggcaattagactgttaaatcctagttaggtttgttttctccgattcattgcagtcacagggcagggctaactttagaagcctcatcataaaggtctagagcatggaattgttgctgcagagggacatgatttaacttgcagctttttctttttcttttttttttttgagacggagtcttgttctgttgcccaggctggagtgcagtggcacaatcttggctcactgcaacctttgcctcctgggttcaagcaattctcctgcctcagcctcccaagtagctagggttacaggtgcccaccaccacacccagctaatttttttttttttttgatacggagtcttgctctgtcgcctaggctagagtgcagtggcgtgatctcggctcactgccagctccgcctcctgagttcacgccattctcctgcctcagcctcctgagtagctgggactacaggcacctgccaccacgcctggctaattttttgtagccaggatggtctcgatctcctgaccttgtgatcggcctgccttggcctcccaaagtgctgggattacaggcatgagccaccgcgcccggcctaatgtttgtatttttaatagagacggggttccaccatgttggccaggctggtcttgaactcctgacctcgtgatctgcccgcctcagcctcccaatgtgctgggattacaggcgtgagccaccgcacccggcctaacttgcagctttttcaattcacaaaacaaagtactgcattttgttgatgttctattggatactacatctacatgtcaaatataaggattttttttcttagagatatttccctttctaaaaaaaattgaccttcaacttgggaatacctgttgaaatttggcaagctattcctgatcccygatcttgagaaaattatgaaaagaagaagcaaaagatgatcatacctattttaataaaattgatcactaaaataaaagaaaacccca

SEQ ID NO: 717908 - DNA, 995 bp, Homo sapiens
taccataaatggatcagaacaatcactttattttagagaatatagggaaaaggttgaatgtgcaacccagtcagttccccttccattttaccttctagaaacttcctctcaacatagtaactcacagcagtttatccttcaaaaaattccccagaaaaagtgttaattggtttgggaaaatattttttgacatattatataaataggccctatatccaggggttgaagacatatatctaggggttggatatatgccctatatygagaggtttgagttggaattcgagtagacagaaatctccttaaaacaaaggttattgaacagtcatgagactcttaaaatgacatttatttatctatatattattttggtgagagaaggaaacaaagagagagaagctagtgcttttggaatgcctactgtgtcaggacagatgctttgaaatacattttcactgatatgacaccctagaatttgagaagaaaaccttaaaggaaataaatttggaaaaagaggatatgaaaagtagggttgttctattttactgaagaaagatgaatatatactcaacaaaatagtagcaaaaatattcaacaaaatactagcaaaccaaatccagtagtttattaggaggattatgcatcatgaccaagtgggatttttaccaggtatataatataatatgccacagtaatagatggagggaaaaaaaacacataaccacatgatcatctcaactcatgcagacaaagcatttgacaaaatgcaacatcatatcatgagaaacgcattcaacaaagtaggaatagaagggaacttcatcaacgtgataaagagaatttttgaaaaattcacaggcaatattaatgcacggtgaaagacaaaaatttcctaaaattaggagcaaaacaagaataccactttcaccatttcttttcaacactgtgctaaagttctagctgtctactatggcaaaagaaagagagaaagagag

SEQ ID NO: 717909 - DNA, 1115 bp, Homo sapiens
tcaatttgttttgttccacaaaaacaacatattgatattttaattgtaattacctttgatttgtaagctaacttagagagaatgatgtctttacaatattgacttttactatccacatacattgtatagcttctcaaagtttcaaatcttcttttatttctttcatgaatattgggaagcctttctctcatatgtttttctcgtttcaaattattttttctatgtaattcatcttttttgtggcttctcaatcttcatttggactaattagttgctgatgaatacatgaaaactactgattactaacttatgtgtagtaatttttcagatgggaatttttttcttattgaataaagcccagacttgtttctctgtttgtttgtttgtttattgagatggagtctcactctgtcacccaggctggagtgcaatggcatgattttggctcactgcaacctctgcctcccaggttcaagcgattcttgtgcctcagtctcccgagtagctgggattacaggtgcacgcgaccatgcctggctaatttttttatttttagtggagatggggtttcaccatgttagccaggctggtctcaaactcctgacctcaagtgatctgcctcagcctcccaaagtgctaagwtttaaggtgtgagtcaccacgcctggccttcccagaattgtttagaatgcaattaaactgtccaaaatttatctttctggcactatgtgtgattttttttcctccaccttcctgtccagcctctctggttcactttctttttctaaacatgccacatactttcatattaatgtggttttgtctttttgttttgtttccatttcagccaccaaatagccaaagtccaaattattagtattggctccatgcagctttctcaaatgtcgaatttatctagtgagcatagctcctgtctctcttttgctgcagcatgttgcatagatctggtccctctcttacacgctaagttgatcaattgcatttctatgatccctctagcttttgagttccttaacagccatggctctttttaatttctatattccttttgcatcttggatgagtgcttagaccatagtatatatatgttgaag

SEQ ID NO: 717910 - DNA, 1115 bp, Homo sapiens
tcaatttgttttgttccacaaaaacaacatattgatattttaattgtaattacctttgatttgtaagctaacttagagagaatgatgtctttacaatattgacttttactatccacatacattgtatagcttctcaaagtttcaaatcttcttttatttctttcatgaatattgggaagcctttctctcatatgtttttctcgtttcaaattattttttctatgtaattcatcttttttgtggcttctcaatcttcatttggactaattagttgctgatgaatacatgaaaactactgattactaacttatgtgtagtaatttttcagatgggaatttttttcttattgaataaagcccagacttgtttctctgtttgtttgtttgtttattgagatggagtctcactctgtcacccaggctggagtgcaatggcatgattttggctcactgcaacctctgcctcccaggttcaagcgattcttgtgcctcagtctcccgagtagctgggattacaggtgcacgcgaccatgcctggctaatttttttatttttagtggagatggggtttcaccatgttagccaggctggtctcaaactcctgacctcaagtgatctgcctcagcctcccaaagtgctaagatttaaggtgtgagtcaccacgcctggccttcccagaattgtttagaatgcaattaaactgtccaaaatttatctttctggcactatgtgtgattttttttcctccaccttcctgtccagcctctctggttcactttctttttctaaacatgccacatactttcatattaatgtggttttgtctttttgytttgtttccatttcagccaccaaatagccaaagtccaaattattagtattggctccatgcagctttctcaaatgtcgaatttatctagtgagcatagctcctgtctctcttttgctgcagcatgttgcatagatctggtccctctcttacacgctaagttgatcaattgcatttctatgatccctctagcttttgagttccttaacagccatggctctttttaatttctatattccttttgcatcttggatgagtgcttagaccatagtatatatatgttgaag

SEQ ID NO: 717911 - DNA, 1281 bp, Homo sapiens
aaaggagagagttccctaagaaaggaacgcgcgggatataggcatcagaagacacacacagacaataggaaccccagaatgatagctgtgcacccggcatagagggccactggacctgactggagccatcagaagacctcatcaatggagtacctacgtgaataaagattctgagagatttataaacagaaaattaggggattaaatgtctgcaaatattaaatgtctgtaaagataattggcaatagtggtaaaaatactagtaagataattatggtacatttatacagttgaatcttatgcagctgttaagggggtttgctttatatactgagatggaagtatctccaagatatatggttaatagataaaagtaaaataatggacagtgtatgtaatagctmccattcctgtaaaaagagcttaatattatgcatcgaattttatttagaaagatcaataaaaatgaagtagatgtatacacactgatatggaaacatcttcagaatatattactaattgaaaaaagatatacaacagtgtatattgtatactcccattttgtaaataaataaataaacaaaagtgactacataataaatgtaatacccttgcatactagagactggcaggggtagttggctctagcagggggattttttcaaacgatagtagggtaaatattctctcatacacagaagagcaactaattcatactgggacaaagatactaagtactgtgatgtatcgagttgcctacctgttcaagcatcactatggagtctcggagcactccctttaaacgatgggcctgatctttattcttctgaatagtttctgctcttgacaccatatcagaggctaaactgaaagaaaaatgccatcttcaaaatctggagaatagcttctgatctttttttcatttccagaaatcatcagagccccataaatttgcaaacaaaacacaaaattaaacaaacaaaaacaggctgtttatggctacaggatagttagcagaccacagtctctgaaactgaaattaagttttctgcaactgaagaattactgaaataatatggtgaatacaggtcagggggaaaaagacttactttaaagatttctcttcttggaggcggagacggtaaaaggactgagcagcatgttctatctttgacagcttcagaaacagtgtcacattcaacaaaactaataacaacacactaggcagagcaaattatatgttaatccacacttttccagacctaaagcattgctaatgca

SEQ ID NO: 717912 - DNA, 1281 bp, Homo sapiens
aaaggagagagttccctaagaaaggaacgcgcgggatataggcatcagaagacacacacagacaataggaaccccagaatgatagctgtgcacccggcatagagggccactggacctgactggagccatcagaagacctcatcaatggagtacctacgtgaataaagattctgagagatttataaacagaaaattaggggattaaatgtctgcaaatattaaatgtctgtaaagataattggcaatagtggtaaaaatactagtaagataattatggtacatttatacagttgaatcttatgcagctgttaagggggtttgctttatatactgagatggaagtatctccaagatatatggttaatagataaaagtaaaataatggacagtgtatgtaatagctaccattcctgtaaaaagagcttaatattatgcatcgaattttatttagaaagatcaataaaaatgaagtagatgtatacacactgatatggaaacatcttcagaatatattactaattgaaaaaagatatacaacagtgtatattgtatactcccattttgtaaataaataaataaacaaaagtgactacataataaatgtaatacccttgcatactagagactggcaggggtagttggctstagcagggggattttttcaaacgatagtagggtaaatattctctcatacacagaagagcaactaattcatactgggacaaagatactaagtactgtgatgtatcgagttgcctacctgttcaagcatcactatggagtctcggagcactccctttaaacgatgggcctgatctttattcttctgaatagtttctgctcttgacaccatatcagaggctaaactgaaagaaaaatgccatcttcaaaatctggagaatagcttctgatctttttttcatttccagaaatcatcagagccccataaatttgcaaacaaaacacaaaattaaacaaacaaaaacaggctgtttatggctacaggatagttagcagaccacagtctctgaaactgaaattaagttttctgcaactgaagaattactgaaataatatggtgaatacaggtcagggggaaaaagacttactttaaagatttctcttcttggaggcggagacggtaaaaggactgagcagcatgttctatctttgacagcttcagaaacagtgtcacattcaacaaaactaataacaacacactaggcagagcaaattatatgttaatccacacttttccagacctaaagcattgctaatgca

SEQ ID NO: 717913 - DNA, 622 bp, Homo sapiens
ttgattatctagggcaatgagatatttaaacagcacataaaaacaaatctaagataatacaaaatttctagctgtacctgcctttccaaaaaacctttattagatatgatctgtgcacataaaaacagtgacactgagctgagcatggtggctcacgcctgtaatcccagcaatttggggggccgaggtgggcagatcacctgaggtcaggagtttgagaccagcctgaccaacatggagaaaccctgtctctactagaagtacaaaatcagctgggcatggtggcgcatgcctgtaatcccagctaattgggaggctgaggcaggaggattgcttgaaaycagtaggtggaggttgtggtgagtcgagatcatgccattgcagtccagcctgggtaacaagatcaaaactctgtctcaaaaacaaacaaaacaaaacaaaacgaaaacagtgacactgaatcccatgagctacatgggagagtgactttctatcaccttagtaatactttgatcaataattgattttggccggccacagtggctcatgcctgtaatcccagcactttgggaggccaaggcgggtggatcccttgaggccaggagttcgagatcagcctggc

SEQ ID NO: 717914 - DNA, 650 bp, Homo sapiens
gaacagcaaggagtcacttaggggcctgggtgtagaatgtagctttcttcctgacattccagcctttgccaacttccctagaccattagttgcaccaaagttagttccattcagcaaaaataaattgtaaacttgttgacatttttgtyctcttaacaattcattgtttatttttccatgacggagaattttgatgcaattatcactgagctttctgacaaaagagaaatagctgaggaattttgatgagttacccacttcattaatcagaacaagcatctctagtgacagggttagaattacaatgaagattagatagcaaattgctgttccacctaacgtcaatcattcctagtgacagtagtgtgattacacttcagggaagagcttttctggctaacagaacgagggcaactccagtgcaggtaataaatttagcagagcgagctgtcatttcttctcttcagtggaatccttaacaaccaaatgatgtattgtggaagattttgtggggaggacaccatttcactttaaaagtttctaaatttcaccaggtagtattttattttagaaattattatagataggtacttaggaacagttcttccttcagtgactttctgtattttatttacctatatcaagcctta

SEQ ID NO: 717915 - DNA, 615 bp, Homo sapiens
cgaaggagctcttccaggaaattaaagagcatgataactaaatgtaatgtgtaatcctgaactgagtctgtttgctataaaggatattattgggatagttatggaaattgaatgggatctaagaactgaatggcagtaacagatcagtgttaatttttcgatgttgaattatattgtggttatatagaaaaatgtctttgttggaagtacatgccagaatatctaaggtgatggaggatcaaggtgagaatttattctcaattagtgcaggagcaaaagctctttgtactgcatttgcaagtgttctatagggataagactgtttaaaaataaaaatagccaggctcagtggtgcacaccagaagtcccagctacttgggaagctaaggttggaggatcgcatgacccaaatgctcgaggcyggcctgtgcaacatggcaagaccctgtctctaaaaaaagagtaagataaaatttaaagtgaatttagaagaatctccacaagattaaaaagtataattacaaagatttaatatcatggtactaattctctctcccctcctcccccaaaactctccctgtctctttttctccctccctacccctcctctttttt

SEQ ID NO: 717916 - DNA, 1469 bp, Homo sapiens
tgtcgatagatgccactcaggcgagcttctgattgacagtgctgctgagaaacatgattgattacccagaggcccacagcagcctgcagacatgagtgtgggaaggcctaattgcctcaccaataatagcgcaggaaacactcattagtgcaaatatcattcttcatagaagatctgagaatgaacgccctgtatcgagaggacactttctaaaatcatctgtgagagaatgtctaacacgcagatcatgcctctcctcccccgcccaaataaaataaattctagtataaacaggaaaaaagtaccccatgattagataatgtgatgtgcatatagacttgcagttcagaggaaatggaagtgtgtggggggcagatagcctgtggaggaagaggaaattatgactgcgatgtagtagttgttaggtttgtctgaaactgtccagttttctctctttagtgccttcatatttgaatctcagcattaacattgctgcatttctgtggacttcacaattactatattgttgggggaacaatcagtgatacgttttttcaattgactagaaataaacacatttttcttttgggggctgttacaatgattattcctcaacaatatgcatgcatatttaattttttttttcgtggggatggtggtagttatttcaatccatcttattctcttggaaagaggccctgagctcctactttaattatgccactcttgtttgcttaaattgattttgaatattattgtgattgtgttttattatgaatgtacctactcctggttgaaagtaaggtagcccatgaacctcatgttcttctcatggggctgcttcctctttgatttatttatttttatccatggaatctgaaatgtaaataggcaactacaactgtcaataggtaaggtaaacaagagagtttcaacatgttagaatttccaactctaatttaggttagagttggacaattccttaatttgccaagaaaactcatttgatttaaaattcaccgattcaaatcatcccttaacattgctcagcctcagtttttctcctctgtaaaatggagacaaaactatctcttcggcctctcctgggaggtttttttaaggattaagtgaagtaagtggggcattgctatacaatgtactttgttatccttattaaaacaagaatcaaacaatctagaccaaaggcatggggtttactcagacccctgacaacataaaggccttggctgcttttcctgtttttctttagatctgagaggcagcgtgtgaagctgttaagtgtcaaaagtcrgagctgcactgcctggggtgaatcccagctttaccatttactaactgagtgacctgggcaaattgtttaaatcttctgtacctcagtttccttatctgtaaaatgaggataactctagtactactttataggattgttatgtggattacatgagcga

SEQ ID NO: 717917 - DNA, 1469 bp, Homo sapiens
tgtcgatagatgccactcaggcgagcttctgattgacagtgctgctgagaaacatgattgattacccagaggcccacagcagcctgcagacatgagtgtgggaaggcctaattgcctcaccaataatagcgcaggaaacactcattagtgcaaatatcattcttcatagaagatctgagaatgaacgccctgtatcgagaggacactttctaaaatcatctgtgagagaatgtctaacacgcagatcatgcctctcctcccccgcccaaataaaataaattctagtataaacaggaaaaaagtaccccatgattagataatgtgatgtgcatatagacttgcagttcagaggaaatggaagtgtgtggggggcagatagcctgtggaggaagaggaaattatgactgcgatgtagtagttgttaggtttgtctgaaactgtccagttttctctctttagtgccttcatatttgaatctcagcattaacattgctgcatttctgtggacttcacaattactatattgttgggggaacaatcagtgatacgttttttcaattgactagaaataaacacatttttcttttgggggctgttacaatgattattcctcaacaatatgcatgcatatttaattttttttttcgtggggatggtggtagttatttcaatccatcttattctcttggaaagaggccctgagctcctactttaattatgccactcttgtttgcttaaattgattttgaatattattgtgattgtgttttattatgaatgtacctactcctggttgaaagtaaggtagcccatgaacctcatgttcttctcatggggctgcttcctctttgatttatttatttttatccatggaatctgaaatgtaaataggcaactacaactgtcaataggtaaggtaaacaagagagtttcaacatgttagaatttccaactctaatttaggttagagttggacaattccttaatttgccaagaaaactcatttgatttaaaattcaccgattcaaatcatcccttaacattgctcagcctcagtttttctcctctgtaaaatggagacaaaactatctcttcggcctctcctgggaggtttttttaaggattaagtgaagtaagtggggcattgctatacaatgtactttgttatccttattaaaacaagaatcaaacaatctagaccaaaggcatggggtttactcagacccctgacaacataaaggccttggctgcttttcctgtttttctttagatctgagaggcagcgtgtgaagctgttaagtgtcaaaagtcggagctgcactgcctggggtgaatcccagctttaccatttactaactgagtgacctgggcaaattgtttaaatcttctgtayctcagtttccttatctgtaaaatgaggataactctagtactactttataggattgttatgtggattacatgagcga

SEQ ID NO: 717918 - DNA, 1083 bp, Homo sapiens
tagttatatatatggtttacaaaactgtatgtatagttatatatatggtttacaaaactgtatgtatagttatatatatggtttacaaaactatatatgtaacatatatacaagttatagttgcatatatatatagatacacatacaactataacttgtcgaaaatgaattttttwaaaaaaacccaaaaaatggctcaatataaacaaatcccagtgtagaaaatgcctcagttccccgagatttacaataatgatcacagcccccaactgtcccatccttaattttctcaagtttatatgtttaggcaacttagggcactatgaatgggaaggacaattctacaaggaaaagttggaatgctattattagatgtgaaatatactgatgagcagacctaaacaactgctgttcactacctcccaacccttgactattccatgcatatactctctcctttctgttcataaatatgtttaatgccttggtctaacatcacaaaaagtacttacctactccttaaagggagacaattgaaagtcagctccgactccttcaactggctacaagtataaaatctctaaatgagctctatctgtatattaccaataaatactgtgaaaaaagtggttaattatatcataaaccaacataccctatataaaacaataaaagaaataaaaaataaatgcttgaaaaatattaatgctacaacacaatgattaggaaaatacaggtagcattatttgtgctgttcattataagcccgtaatagctgacttgcgttaacaatcctcctctattatgcatttcatacttttgtgtttagccaataccacaaataagctgtgttctttatgtaaaacttcatttctgtgtgatattagcttttgagagaactgcctgggcaggctttacattttcccatcttttggactttaatggctcccattatattttacaactgagatggggtacaattatatgtatatatttttcaaggtagctaaggtgaaaattaaccctattttatcttcacagtttcaaaaattgcaggcaaactgtaatacccatcttttatca

SEQ ID NO: 717919 - DNA, 1083 bp, Homo sapiens
tagttatatatatggtttacaaaactgtatgtatagttatatatatggtttacaaaactgtatgtatagttatatatatggtttacaaaactatatatgtaacatatatacaagttatagttgcatatatatatagatacacatacaactataacttgtcgaaaatgaatttttttaaaaaaacccaaaaaatggctcaatataaacaaatcccagtgtagaaaatgcctcagttccccragatttacaataatgatcacagcccccaactgtcccatccttaattttctcaagtttatatgtttaggcaacttagggcactatgaatgggaaggacaattctacaaggaaaagttggaatgctattattagatgtgaaatatactgatgagcagacctaaacaactgctgttcactacctcccaacccttgactattccatgcatatactctctcctttctgttcataaatatgtttaatgccttggtctaacatcacaaaaagtacttacctactccttaaagggagacaattgaaagtcagctccgactccttcaactggctacaagtataaaatctctaaatgagctctatctgtatattaccaataaatactgtgaaaaaagtggttaattatatcataaaccaacataccctatataaaacaataaaagaaataaaaaataaatgcttgaaaaatattaatgctacaacacaatgattaggaaaatacaggtagcattatttgtgctgttcattataagcccgtaatagctgacttgcgttaacaatcctcctctattatgcatttcatacttttgtgtttagccaataccacaaataagctgtgttctttatgtaaaacttcatttctgtgtgatattagcttttgagagaactgcctgggcaggctttacattttcccatcttttggactttaatggctcccattatattttacaactgagatggggtacaattatatgtatatatttttcaaggtagctaaggtgaaaattaaccctattttatcttcacagtttcaaaaattgcaggcaaactgtaatacccatcttttatca

SEQ ID NO: 717920 - DNA, 1083 bp, Homo sapiens
tagttatatatatggtttacaaaactgtatgtatagttatatatatggtttacaaaactgtatgtatagttatatatatggtttacaaaactatatatgtaacatatatacaagttatagttgcatatatatatagatacacatacaactataacttgtcgaaaatgaatttttttaaaaaaacccaaaaaatggctcaatataaacaaatcccagtgtagaaaatgcctcagttccccgagatttacaataatgatcacagcccccaactgtcccatccttaattttctcaagtttatatgtttaggcaacttagggcactatgaatgggaaggacaattctacaaggaaaagttggaatgctattattagatgtgaaatatactgatgagcagacctaaacaactgctgttcactacctcccaacccttgactattccatgcatatactctctcctttctgttcataaatatgtttaatgccttggtctaacatcacaaaaagtacttacctactccttaaagggagacaattgaaagtcagctccgactccttcaactggctacaagtataaaatctctaaatgagctctatctgtatattaccaataaatactgtgaaaaaagtggttaattatatcataaaccaacataccctatataaaacaataaaagaaataaaaaataaatgcttgaaaaatattaatgctacaacacaatgattaggaaaatacaggtagcattatttgtgctgttcattataagcccgtaatagctgacttgcgttaacaatcctcctctattatgcatttcatacttttgtgtttagccaataccacaaayaagctgtgttctttatgtaaaacttcatttctgtgtgatattagcttttgagagaactgcctgggcaggctttacattttcccatcttttggactttaatggctcccattatattttacaactgagatggggtacaattatatgtatatatttttcaaggtagctaaggtgaaaattaaccctattttatcttcacagtttcaaaaattgcaggcaaactgtaatacccatcttttatca

SEQ ID NO: 717921 - DNA, 1083 bp, Homo sapiens
tagttatatatatggtttacaaaactgtatgtatagttatatatatggtttacaaaactgtatgtatagttatatatatggtttacaaaactatatatgtaacatatatacaagttatagttgcatatatatatagatacacatacaactataacttgtcgaaaatgaatttttttaaaaaaacccaaaaaatggctcaatataaacaaatcccagtgtagaaaatgcctcagttccccgagatttacaataatgatcacagcccccaactgtcccatccttaattttctcaagtttatatgtttaggcaacttagggcactatgaatgggaaggacaattctacaaggaaaagttggaatgctattattagatgtgaaatatactgatgagcagacctaaacaactgctgttcactacctcccaacccttgactattccatgcatatactctctcctttctgttcataaatatgtttaatgccttggtctaacatcacaaaaagtacttacctactccttaaagggagacaattgaaagtcagctccgactccttcaactggctacaagtataaaatctctaaatgagctctatctgtatattaccaataaatactgtgaaaaaagtggttaattatatcataaaccaacataccctatataaaacaataaaagaaataaaaaataaatgcttgaaaaatattaatgctacaacacaatgattaggaaaatacaggtagcattatttgtgctgttcattataagcccgtaatagctgacttgcgttaacaatcctcctctattatgcatttcatacttttgtgtttagccaataccacaaataagctgtgttctttatgtaaaacttcatttctgtgtgatattagcttttgagagaactgcctgggcaggctttacattttcccatcttttggactttaatggctcccattatattttacaactgagatgkggtacaattatatgtatatatttttcaaggtagctaaggtgaaaattaaccctattttatcttcacagtttcaaaaattgcaggcaaactgtaatacccatcttttatca

SEQ ID NO: 717922 - DNA, 1083 bp, Homo sapiens
tagttatatatatggtttacaaaactgtatgtatagttatatatatggtttacaaaactgtatgtatagttatatatatggtttacaaaactatatatgtaacatatatacaagttatagttgcatatatatatagatacacatacaactataacttgtcgaaaatgaatttttttaaaaaaacccaaaaaatggctcaatataaacaaatcccagtgtagaaaatgcctcagttccccgagatttacaataatgatcacagcccccaactgtcccatccttaattttctcaagtttatatgtttaggcaacttagggcactatgaatgggaaggacaattctacaaggaaaagttggaatgctattattagatgtgaaatatactgatgagcagacctaaacaactgctgttcactacctcccaacccttgactattccatgcatatactctctcctttctgttcataaatatgtttaatgccttggtctaacatcacaaaaagtacttacctactccttaaagggagacaattgaaagtcagctccgactccttcaactggctacaagtataaaatctctaaatgagctctatctgtatattaccaataaatactgtgaaaaaagtggttaattatatcataaaccaacataccctatataaaacaataaaagaaataaaaaataaatgcttgaaaaatattaatgctacaacacaatgattaggaaaatacaggtagcattatttgtgctgttcattataagcccgtaatagctgacttgcgttaacaatcctcctctattatgcatttcatacttttgtgtttagccaataccacaaataagctgtgttctttatgtaaaacttcatttctgtgtgatattagcttttgagagaactgcctgggcaggctttacattttcccatcttttggactttaatggctcccattatattttacaactgagatggggtacaattatatgtatatatttttcaaggtagctaaggtgaaaattaaccctattttatcttcacagtttcaaaaattgcaggcaaactgtaatacccatcttttrtca

SEQ ID NO: 717923 - DNA, 1631 bp, Homo sapiens
agaatgctgtgatgagacatttgcctaatttggatatagtccaatgggatgtcccaagttgtaccggacatcagctggttggctgtctgtgatggactgagaccggttttttgtttgtttgtttgtttgtgtggttggctttgttttaagccagttatagaaaatgtttccgtgttgtgttccagttgttgatataagagcactgggggcagaaacaaccccaggcgaatggcctgctacttattttgcttgaatacttttgtttcactaaacacatgagggtttttagactatatgagcgtaaatatctgcacattctaattcgtgaaaagtaagtaacatacattaacaggagacaaagttagcctagtcagaaatttaatttgaagtggaaattattctagtatgggttgagtttatctttagagatgtcccacctgacttagtatttaataatgtctataagaagtttatgttcttattcctcaggtactctaaataataaaatttatgtttcctacttgttctgttttatgcattctacgaattatattattattgctgttatttgccccaaattctgaagaaagaaatgaaacatcattctcaaaaataagtttgaaacagcatggttagacaggtggtttcctcaaaggtccattatcaccattttttctttaatgccataatcacatttttagtgagtcagatggctgtacagctgcctcccatgcagccagctgtggccctccaatgaccttcagggaaatttcaatatatgcaaaagtggcctctgtacagctgcctggctatgtcctttgagaagggtgtgccctgcacttagctttagttctctctcctggtagctgggccaacagggtgcgggagatgtgcaccagctcagcttctgaggtgttatttgtacgcttggatggtccagtgcatcaacattgaaggagacaggattcctgactgcatgtagtgacatattacctggaatgttaaatgtgaactaagactagccaactgagcgcaatacctaaaacttcaggaaaaaaaaaatacatagctggcaagatttcactctcaataatctattttaccttgaaattgatatgtagtttcagatgaagccatgctgtctttccatagaagatttaaaaggggatttcacctttgggtgcactctccaacgtatactagcactcaatttaggttaaataatttatcacagacaataaatgcaatgcacattttcaaacattcaattgtagtttgtgaaaatgccattatcatgcacatatgtgttttttaaccttttattataaccccaacgtaatatgcttcagaatatatactaatgatgatgtactgttgtgaagtctcttgtttaagctcattgagggtttgacctattttcacatcagatttagtttaatatctacttaattaaacatcggaagaaccattctttttattattgacatatttytttcacatttaaattgtgttcttaccattttcaagaaacgtttcattaatttcagtgacattaaggcaggtatttcaagagactgttttataatccttgacatcttttcagcaactttcgctctcagcttttactttca

SEQ ID NO: 717924 - DNA, 996 bp, Homo sapiens
ataagtctcatccctaagtcataaataaataatctctttcctggtctgacttccatgccaggatcaatatctcttaacatcttacttattttattactgcttttggttttctgggactgattgaaagttgctcagaggaaatctttggttttgcttaagtgtccgtgacatttaatcatgactttccttgcagtttaattccaaccagtcaatccgttaatccacttcgattgattctgggctctcagttattggcttgcactcattgggcatccgctggtgtcggctcagctgggtggcctgcgtgaagctcctctcacacctctcgcacctggtggaggcaagagagaaaattgagaccagggagcggggcctgcagggtgatgggcttcctctcatcctgcctaatcagaacagacactccaaagtggcttcagattttaccagctcaagaggtttaattggtggctccttccaaggcctggatgcctgtgatgggacaaagcccgtctgatgcagaacagagggatctgtcaataggcagggggaaggtgatttctccagagagccctgtcctgctgcagctctgatcactgtcagttcaaatagataaagaacaaaaagagatttttaggagtgagccatcaaagaagcagcttgcctgcagttttctactctgtaaccccaaagagaaattgatgayaaatagaatttcacctactgctaatttacaattgggaattctactcccttcagaacagcagccaaagagtgtacatcttggaatttggaaactagaggaagcaatatgttagactgcagtgactgtgaggggcagtaggcgtggtcgctgcttttttgcaaaagctggttacagtgtcacagcctaaccaaacttagggttaaaataatttataaaactagaatttgcagtggcacagtggaaaggatgtacctatgggctagaattaagggcagtgtgtctgatgaggagaa

SEQ ID NO: 717925 - DNA, 3234 bp, Homo sapiens
tacatttattttgatgttggtgtatagaagcttttgtatttaatgccatcacatgaatccatctttttcttaatgatcagtgccttttgtatcttggtaaagaaatcttttgtgaacaaaatattttcttttttttaaattttgttaawtttttttattttattattattatactttaagttttagggtacatgtgcacaatgtgcaagtttgttacatatgtatacatgtgccatgttggtgtactgcacccattaactcgtcatttagcattaggtatatctcataatgctatccctcccccctccccccaccccacaacagtccccggagtgtgatattccccttcctgtgtccatgtgttctcattgttcaattcccacctatgagtgagaacatgcggtgtttggtttttttgtccttgagttcatgtcctatgtagggacatggatgaaacaaaatattttcttaaaaattgttcacagctgggtgcggtggctcacgcctgtaatcccagcactttgggaggccgaggcgggcagatcacgaggtcaggagatcgagaccatcctggttaacacagtgaaaccccgtctctactagaaatataaaatattagccgggcatggtggtgggcgcctgaagtctcagctactcgggaggctgaggcaggagaatggtgtgaacccgggaggcggagcttgcagtgagctgagatcacgccactgcactccagcctgggcaacagagtgagactctatctctaaaaaaaaaaaaaaaaaaaaaatcaccaaaatattttctaatattttcttctaaaatgggcttttcatttttgcatctttaattgacataaaatttatttttctttatggcattaggtagagatttaattttatcctgtatcatagagatatgctgattctgccacttattagcagtgtgtccttgtccaagttacctaccttctgtgtacaatagtttcttcatcgatgagatgggattaataatagtctttacctcgtatatcatttagaagattaaataaaataatagtgtaaactacaatgcctgctacataatgatcaccctatacttattcgttaatagacctaacgacttattcagcaccatttattgaatagcccctacttcacctgttgagtgcctcatgtacacatatatggattaatttctaggttctctattctgtttcttgatatattaattctttgcaacaatactcaaatttcaattattgtaatttaacagcaattcttatctgatggagtgagtccctcctaagggttacttaaaaacgtttgggctttttactcatatgtatgaaatttatgtgaaagttaatttctgttaaatcagtgttggaattttgatcagagttgcattgaatttataagttatttgggctaaaactgtcgtcttgatgatattgattattctgctcaataaaatagtatatcacttcattgatttaggttgtattttatttattattataaaacctatctatattaattacaaggaggacatggtttctttgaatcctggtgtaggctgctcatttcccacactccagaaaccaaggagcttggagacaaaattgctacagttaagagttgttggcatatctcctccctgactgaaattcttgcatagtgtacccattacccacaagataaaattttcaaactcttgaatgtgatacaacaccttccatgacttcctagtttatttctctagtccaggtgtcttcactaaatgtccagacttgtatatccatctaattgtttaccatttccactgaatgtctaacagatattgaaagctgactcatttcttgacacatagtctccccactgaccctggaatctcattaaatggcatcatcattcactcagtagttcaagcttgaaaacttcaagttattctagactcctatcttcctcttgctttcacatttcagatcagttcatcagcctgatattactttcttcaaaatatatctgaattctaaccttttctgcctacccctatacccccaactggctaccatgttaaaccaagccatcattgttttttgcctgggttaatgaagaaactttgaaacatatgttcattctcctcattttttttctcccttctgatcaactatccacataacaggctaggcactcttaaaatacaaatcagatcatgccatttacacgctcagaaccctcccatatcttcctatcgtacttgggtgaaaaaaactctggtcatgtcgaaggaagccttcaagttctggcctgtcctcctctcaggtttcatctcctatcactctctctttaacagtcttccctggatatgcttgtccccttgctgtttcctaatcagacaaacagattcctccctcaggacctttgcactgcctattctctctgcctagaatgctttcagaaacagttattagacaatgtggacaaagtaataaatattagcaacctttggaaaatgctatgtaacaactatgagatcattgacagggaaaggacaatctaactttaacaattaagataaaatctttaaatgaaagattattaggtgtgaatttatgaaatatatttatgtttcaaacattttaaaaactataaattttgaagaactgggaaatttatttctcactgtattagtcaattctcacattgctagtggtttaattggctcaccattctatagactgtataggaaacatagctagggaggcctcaggaaacttacaatcatggcaggaggtgaaagtgaagccagtacatcctacatggctggagcaggaggaagtgagagtgatgggggaagtgctacacacttccaaacaacaaggtctcgtgagaactgtatcacgagacagcactaggggcatggtgctaaaccattagaaaccacccccatgatccaatcacctcccaccaggcccgacctccaacactggggatcacagttcaacatgagatttgggtggggatgtggagccaaaccatatcagtaacactttggtcacatcacatcaatgagtaaataggtcctgggctaatctcaattggccttttaaaattcatctcatctatatttgtgaaacaatcagataaaatatttaaaaaccttaaaaagaaaaaatatctttggaagtacagttatttcataaaatgtgaaaacacagaagtataaaagatc

SEQ ID NO: 717926 - DNA, 3234 bp, Homo sapiens
tacatttattttgatgttggtgtatagaagcttttgtatttaatgccatcacatgaatccatctttttcttaatgatcagtgccttttgtatcttggtaaagaaatcttttgtgaacaaaatattttcttttttttaaattttgttaaatttttttattttattattattatactttaagttttagggtacatgtgcacaatgtgcaagtttgttacatatgtatacatgtgccatgttggtgtactgcacccattaactcgtcatttagcattaggtatatctcataatgctatccctcccccctccccccaccccacaacagtccccggagtgtgatattccccttcctgtgtccatgtgttctcattgttcaattcccacctatgagtgagaacatgcggtgtttggtttttttgtccttgagttcatgtcctatgtagggacatggatgaaacaaaatattttcttaaaaattgttcacagctgggtgcggtggctcacgcctgtaatcccagcactttgggaggccgaggcgggcagatcacgaggtcaggagatcgagaccatcctggttaacacagtgaaaccccgtctctactagaaatataaaatattagccgggcatggtggtgggcgcctgaagtctcagctactcgggaggctgaggcaggagaatggtgtgaacccgggaggcggagcttgcagtgagctgagatcacgccactgcactccagcctgggcaacagagtgagactctatctctaaaaaaaaaaaaaaaaaaaaaatcaccaaaatattttctaatattttcttctaaaatgggcttttcatttttgcatctttaattgacataaaatttatttttctttatggcattaggtagagatttaattttatcctgtatcatagagatatgctgattctgccacttattagcagtgtgtccttgtccaagttacctaccttctgtgtacaatagtttcttcatcgatgagatgggattaataatagtctttacctcgtatatcatttagaagattaaataaaataatagtgtaaactacaatgcctgctacataatgatcaccctrtacttattcgttaatagacctaacgacttattcagcaccatttattgaatagcccctacttcacctgttgagtgcctcatgtacacatatatggattaatttctaggttctctattctgtttcttgatatattaattctttgcaacaatactcaaatttcaattattgtaatttaacagcaattcttatctgatggagtgagtccctcctaagggttacttaaaaacgtttgggctttttactcatatgtatgaaatttatgtgaaagttaatttctgttaaatcagtgttggaattttgatcagagttgcattgaatttataagttatttgggctaaaactgtcgtcttgatgatattgattattctgctcaataaaatagtatatcacttcattgatttaggttgtattttatttattattataaaacctatctatattaattacaaggaggacatggtttctttgaatcctggtgtaggctgctcatttcccacactccagaaaccaaggagcttggagacaaaattgctacagttaagagttgttggcatatctcctccctgactgaaattcttgcatagtgtacccattacccacaagataaaattttcaaactcttgaatgtgatacaacaccttccatgacttcctagtttatttctctagtccaggtgtcttcactaaatgtccagacttgtatatccatctaattgtttaccatttccactgaatgtctaacagatattgaaagctgactcatttcttgacacatagtctccccactgaccctggaatctcattaaatggcatcatcattcactcagtagttcaagcttgaaaacttcaagttattctagactcctatcttcctcttgctttcacatttcagatcagttcatcagcctgatattactttcttcaaaatatatctgaattctaaccttttctgcctacccctatacccccaactggctaccatgttaaaccaagccatcattgttttttgcctgggttaatgaagaaactttgaaacatatgttcattctcctcattttttttctcccttctgatcaactatccacataacaggctaggcactcttaaaatacaaatcagatcatgccatttacacgctcagaaccctcccatatcttcctatcgtacttgggtgaaaaaaactctggtcatgtcgaaggaagccttcaagttctggcctgtcctcctctcaggtttcatctcctatcactctctctttaacagtcttccctggatatgcttgtccccttgctgtttcctaatcagacaaacagattcctccctcaggacctttgcactgcctattctctctgcctagaatgctttcagaaacagttattagacaatgtggacaaagtaataaatattagcaacctttggaaaatgctatgtaacaactatgagatcattgacagggaaaggacaatctaactttaacaattaagataaaatctttaaatgaaagattattaggtgtgaatttatgaaatatatttatgtttcaaacattttaaaaactataaattttgaagaactgggaaatttatttctcactgtattagtcaattctcacattgctagtggtttaattggctcaccattctatagactgtataggaaacatagctagggaggcctcaggaaacttacaatcatggcaggaggtgaaagtgaagccagtacatcctacatggctggagcaggaggaagtgagagtgatgggggaagtgctacacacttccaaacaacaaggtctcgtgagaactgtatcacgagacagcactaggggcatggtgctaaaccattagaaaccacccccatgatccaatcacctcccaccaggcccgacctccaacactggggatcacagttcaacatgagatttgggtggggatgtggagccaaaccatatcagtaacactttggtcacatcacatcaatgagtaaataggtcctgggctaatctcaattggccttttaaaattcatctcatctatatttgtgaaacaatcagataaaatatttaaaaaccttaaaaagaaaaaatatctttggaagtacagttatttcataaaatgtgaaaacacagaagtataaaagatc

SEQ ID NO: 717927 - DNA, 1237 bp, Homo sapiens
caactaattggaaaaggcctaagcacactacagaggataatctattctactcagtttacaaatttaaatgtttatataccatctaaaaacacctccacagaaacacttagaataatgtttaaccaaatatttgggcacctcatggcttggtaaaatkgacacataaaaagcatcacacctgccatatagcaataaggaaccattttttgttttgttttgttttaagtggagttgcaatcattcctggaatatagtagctttagagtaaataagattcttgtttttgatgaattgggatggcacacaggtggaaatgtgatagcttatccaatatccgtattgtgtgacggatatagtggcaatgatactatcagaaatgtgtaactgttaagtgcaattgattcactgaacaaagaaacagacagcctgaaattagccaaccaccatctagggtcaggtttggaagccaaaagtcctctatggtggtgtttttttaaaaaagcttcatcttcagcaaggaaacagtagattagtctgaaaactaggccaagatttggttgtaactatagcagaattgcagagaaattttaaattaataaccctatcaactttcctctgctgacatcaaagcactaataagaactactataacatctggttgatgcacttaagagctttgattctctgattccctggaaccctctgatccaggggttctagccaactatactcttgctagaagatagcaccctccctcgcctggaaataatatagaagcgttagttagaatacattttgcaagaatatatttgtcctgcttaagaagtatccttcatggcttctaagcatctaactaggtcttttccagctgagaaagaaagggctgccccagctttgagaaaaaataaattatttgccaaaaagccccagtgaaaacagctaaggattagagcttaggagtgatagactggcttaataaaagagtggataagacttgggtttttaaaaaattgtttctttatccagtattaactctaaacaattacttgcagacactccaatctgagaagtatggtaatgacaagcttagacattcactgatgaggattctgttatccaaccaaagaagggaatctagagcagccgagccatctaagcatgagaggattctagatcaggtgctagagaaagaagatgaatttccattgcagccttagtaccaattacagcagggtga

SEQ ID NO: 717928 - DNA, 1333 bp, Homo sapiens
aatatgtgaataatacgttggccaacgtacatttgatctcagagacaaaaatacagattatttttccattagagtaacttatgtattcctcataacagatcttgtttatgagaaaacatgcataaaaatattattgacaagcctagaactatagagggctctcaactctaggccactcattttcacttaagcctttatttaaacattcatctttattttccatagtggaaaacacacacattccttctagttgataagaaaaagagtcattcttttgcttttctttaattctgctttatagctctgaattatagtgttttaaataaactatgatcactcaaaaaatttctccttcagaaagatgttataacagtttatacatttcaatcaagctataaaacctgaatgtaaacctaattaactactattagctgggaaacagaaggtagacgtataccttccaaattgaggaggagttactggttttcaggacttggtcctcacctttacagtacagaaattagatgttcatttgatgagtatttttttaagtttaccagacagatgcattactatttttctgaactgcctattcagttttattttcttgtcccatttttctattgcagtggtcatcatttttattgatgtataataatattgtatcataaatcttcataatatgtgcttccaaagttttttctaatttttcactaacctttgatttggtatttaatttttagttgtcagaagtttttaatatttgtatcatcaaagctatcaggttattaaaattgacttctcatttagacatactacratttttttttaggtaacagaaataaatatgtatcaaaaaaaaaccagagcatagcaaagctggctatgtccaatggcaataggatcggtcacctttcttagctcttgacagcatgtacatgtaccttcattcatgaagttctctctttagcttccaggataatatcttccggatttcttgtttcctcttttgcccctctttttctatctgcttcataggcccatcatgcattacttgcatatttgttgcaattcttcaagatttagtgataatacctcttctgattttattttttactctcaaccttggatacctcattcatgctaataaatttaactgctctctatagtccattggttgctcacatttttatatccccaacttggatcactcctctgatctctgtgtatgttcaactgcctacttgacacatgtacttgtaaaccactaaggtacctgaaactcaacatgtgcaaaactaagtgccttattccctctcttcctgcgtgatgc

SEQ ID NO: 717929 - DNA, 1333 bp, Homo sapiens
aatatgtgaataatacgttggccaacgtacatttgatctcagagacaaaaatacagattatttttccattagagtaacttatgtattcctcataacagatcttgtttatgagaaaacatgcataaaaatattattgacaagcctagaactatagagggctctcaactctaggccactcattttcacttaagcctttatttaaacattcatctttattttccatagtggaaaacacacacattccttctagttgataagaaaaagagtcattcttttgcttttctttaattctgctttatagctctgaattatagtgttttaaataaactatgatcactcaaaaaatttctccttcagaaagatgttataacagtttatacatttcaatcaagctataaaacctgaatgtaaacctaattaactactattagctgggaaacagaaggtagacgtataccttccaaattgaggaggagttactggttttcaggacttggtcctcacctttacagtacagaaattagatgttcatttgatgagtatttttttaagtttaccagacagatgcattactatttttctgaactgcctattcagttttattttcttgtcccatttttctattgcagtggtcatcatttttattgatgtataataatattgtatcataaatcttcataatatgtgcttccaaagttttttctaatttttcactaacctttgatttggtatttaatttttagttgtcagaagtttttaatatttgtatcatcaaagctatcaggttattaaaattgacttctcatttagacatactacgatttttttttaggtaacagaaataaatatgtatcaaaaaaaaaccagagcatagcaaagctggctatgtccaatggcaataggatcggtcacctttcttagctcttgacagcatgtacatgtaccttcattcatgaagttctctctttagcttccaggataatatcttccggatttcttgtttcctcttttgcccctctttttctatctgcttcataggcccatcatgcattacttgcatatttgttgcaattcttcaagatttagtgataatacctcttctgattttattttttactctcaaccttggatacctcattcatgctaataaatttaactgctctctatrgtccattggttgctcacatttttatatccccaacttggatcactcctctgatctctgtgtatgttcaactgcctacttgacacatgtacttgtaaaccactaaggtacctgaaactcaacatgtgcaaaactaagtgccttattccctctcttcctgcgtgatgc

SEQ ID NO: 717930 - DNA, 1150 bp, Homo sapiens
ctaagaagcgatgctggaaacacagaaataattaagaagaggagaaggatgacagctataatgtattaaacatttactatatattattaagtaccagaaaaccgtggcttggagacactagtactatgcccaatttccacatcatatcagccattaggagagctaggattcaattctgggacaaacgtctgagatcctggcaaactgtgttcttaaaactaatagtcagtaaaagagaagttcaacaaccatggaagccacaagtgtgcctaacagaggagcacaactctggagggggagaccaggaccaggactcatgaatgtgattttctattttcctggcgcatagcctcatatcagagccacatgtgctccaaaatgtcatcggaggcaaaagaagcagacttacagagtcactgctaggatatcacagtgatcacagatccttcctatatggaccagagaaagagagagttgtgatctgccccaatacagcagggtcaggacaccctccccatctacaaagctgaggatgccatgtcccagggttggtggctgggcttctgccccctcccaatcctcatgaaactatatgtacaataacagcctgtggctgttgcctgtcaacccctgctctagaatgttgaaaaaaaatcttgctccagagttctagcattacatttgccagaatgttcacagtagcactgtttgtaatggtcaaaatctaraagtaacctaaatatcacctcaacgatagaaaaaacaacatactcaaaggtacgctatacagctctgaaaattaatgaactaccaactgtatacttcaatgcggatgcgtctcaaaacaaacactgtgtgagaaaagccagccacagaagagataccatgtgattctatttgtggcaagttcaaaaataagtaaaactaaacaatatggatgcatacctacatatatgggggtggaaaagaaaagcaagggactgattcagcacaacacttacccctggcatgggagaatgatgacacagttgtggaggggctcggagggggcttcccacggtggggggtgaaacacaggcctacttctgattatgaatctttaaactataatccatgtattatatacactatttggaatggctgataattc

SEQ ID NO: 717931 - DNA, 647 bp, Homo sapiens
taagctcagcatttaaatatcagtgagaagatgtgcagaaaaaaaccagtgacatcaacggggaggattatttatcaaattgatgcagggttttgttttgttttgttttgttttttgtcgtcgttgttgttgttgttttgccatagttaagggatgtctttttacctaagaagagagagcaaacaaaattgagtacatttatactttacatcaaactctaggatattacacctcaatagacactaaagattttcctaatccaactctacctccctgatttgaagtgagaaagtagaagcctagggaggtgaaggaatgacccaatttcccaagagacaattatctcctaggttctcaaattttactttttagtaaatattgctcaatttttattcttaccactacatttacaaaccacttattataatacataatttttttaactttttagtatgaaaamtttcaaacatagacaaaagttgaaagaatagtaaaatgaggggagaaagagcattaggacaaacacctaaacgcatgcaaggcttaaaacctagatgataggttaataggtgcagcaaatcaccatggcacatgtatacctatgtaacaaacctgcatggtctacacatgtatcccagaacttaaag

SEQ ID NO: 717932 - DNA, 585 bp, Homo sapiens
tttttttttaaactagcctcctatctacttttcctattaaagtattgtagggttttttttgtttgttttttgagtcagagtcttgctctgtcacccaggctggagtacagtggtgtgataagggctcactgtctccacctccagggttaaagagatcctcctacctcagcctctcaagtagctgagactacagatatatgccaccatgcccggctaatttttgtattttatgtaatggtggggtttcaccatgttgcccaggctggcctcgaactcccaggctcaggcaatccactgcctcagcctcccaaagtgctgggattacaggcatgaaccactgcaccctgccctattaaagttttaatagtacttctttgtatatactcttttataaactgacttttatttttcaaatttgtggaaatattttttctacttagttttaaaaagtattttattatgttctttagtgtatagaatttttagtttatgaatgcaatggtgttgatttytcacattgcaatttattttatcctgagcataaatactcacacacccactagcagtacagaaaattctatttct

SEQ ID NO: 717933 - DNA, 646 bp, Homo sapiens
cccattgtctttgcatcctcagctctctccgagcctcaattcttggacccttgggctctgccgatggtagcctatcctggtacrtgcacgcctgggataggtgactgcttgaccatgcccaaatgcgagtacgggaccaacctacttttaggggtgctcaggtaacgaagggggaactagccaggcacagtggctcacacctgtaatcccagcactttgggaggctgaggcaggcatatcacgagtacaagaggccaatatggtgaaaccccatctctattaaaaacacaaaaattagctgggcatggtggcatgtgcctgtagtcccagctactcaggaggctgaggcaggagaattgcttgaacccaggaggcggaggttgcagtgagccgagatcacgccactgcactcctgcctggtgacagagcaagactccatctcaaaaaaaaaaaaaaaaaaaagaagagggaactagcaagtcaactttagtgcattccaactggggagtgaaaaaccacatgtgatctaacaaaattgaatagaaatggattccgcagcatcagagttgggaggaaaggatggagttgtggtaaagtttcaagcagtagtggggctgcagccagtgcaaagtttgcataagggaca

SEQ ID NO: 717934 - DNA, 642 bp, Homo sapiens
acacaatcaaaaatatagaaactttgtatttggatctgtggggatttttgtgtttgtcttgacttttgcataggttaaaaaaataacacaggccgggcacagtgactcacgcctgtaatcccagcactttgggaggccaaggcgggtggatcacgaggtcaagagatggagaccatcttggccaacatggtgaaaccccgtctctactaaaaatacaaaaattagccgggcgtggtggcatacacctatagtcccagctactcgggaggctgaggcaggagaattgcttgaacccaggaggcggaggttgcagtgrgtcgagattacgccactgcactccagcctggcaacagagtgagactctgtttcaaaagaattaatcaataaaaataaaataacatttaaagcaaagtcttgggggtatcagtaggagatgaccaggccttaatgtaatcacatgtggaggggtaggggccaccatgggttgttctctaacagaagagcctggagactcctcctaggaaatgcagcctggtcctacctccagttcccctacatgtcctggtccccaaggcttggcctggacttccctatttagttatggaatggagaagcaagtcacgtgaggagttaactaggagg

SEQ ID NO: 717935 - DNA, 625 bp, Homo sapiens
aagtgtatattataagaagagagaacagaaagaggatgcagagaaggaagagaagaagatagtggaagcaagcaagaaagaaggaagttaagaatgtttttaaataataatctagaaacaaaagtccagattasagttaaaaaggcaaggggtttagagagaaaaaaaggaaatgaagaaagggaagaaagatactgatatattattgaatatatttttataaaatacacaaatacttgtgttgaaaactgagcataacaatggaaagaatagaaataaaattttcagctatcgaaataaggatgaaatgaaattcattcaattcagaagaagataagaaaacatggagaatgaatggcaaataaaaaacacaaagtgagaaaacagacatcagtaatctctgctcacaatgactgaatgaactagattctcctattctcagatcgagattataggactgtatcaaataaaggaaccaaactatcatacctaaaatgtcttttgttttcttttgtatttcttttttaaattatttttctaaaagttttgtatagtaggtgtatatttttatgaggtacatgagatgttttgatacaggcatacaaagtgaaataagcacatcatg

SEQ ID NO: 717936 - DNA, 625 bp, Homo sapiens
aagtgtatattataagaagagagaacagaaagaggatgcagagaaggaagagaagaagatagtggaagcaagcaagaaagaaggaagttaagaatgtttttaaataataatctagaaacaaaagtccagattacagttaaaaaggcaaggggtttagagagaaaaaaaggaaatgaagaaagggaagaaagatactgatatattattgaatatatttttataaaatayacaaatacttgtgttgaaaactgagcataacaatggaaagaatagaaataaaattttcagctatcgaaataaggatgaaatgaaattcattcaattcagaagaagataagaaaacatggagaatgaatggcaaataaaaaacacaaagtgagaaaacagacatcagtaatctctgctcacaatgactgaatgaactagattctcctattctcagatcgagattataggactgtatcaaataaaggaaccaaactatcatacctaaaatgtcttttgttttcttttgtatttcttttttaaattatttttctaaaagttttgtatagtaggtgtatatttttatgaggtacatgagatgttttgatacaggcatacaaagtgaaataagcacatcatg

SEQ ID NO: 717937 - DNA, 625 bp, Homo sapiens
aagtgtatattataagaagagagaacagaaagaggatgcagagaaggaagagaagaagatagtggaagcaagcaagaaagaaggaagttaagaatgtttttaaataataatctagaaacaaaagtccagattacagttaaaaaggcaaggggtttagagagaaaaaaaggaaatgaagaaagggaagaaagatactgatatattattgaatatatttttataaaatacacaaatacttgtgttgaaaactgagcayaacaatggaaagaatagaaataaaattttcagctatcgaaataaggatgaaatgaaattcattcaattcagaagaagataagaaaacatggagaatgaatggcaaataaaaaacacaaagtgagaaaacagacatcagtaatctctgctcacaatgactgaatgaactagattctcctattctcagatcgagattataggactgtatcaaataaaggaaccaaactatcatacctaaaatgtcttttgttttcttttgtatttcttttttaaattatttttctaaaagttttgtatagtaggtgtatatttttatgaggtacatgagatgttttgatacaggcatacaaagtgaaataagcacatcatg

SEQ ID NO: 717938 - DNA, 594 bp, Homo sapiens
gagttagttaagccttttgagctgttggaatatttgcatataataacgcaattttgggggtgctaatgctggaattcactgtactgaattgtttctgctcaataatattctatgttgaagccctaaatctcacagtactrtattacagatgggcctttaatgaagtaattaaggttaaatgaggttataaatgtggggtcctaatcttatagtactggtggctttatttattttatttttatttttatttatttatttacttgagacagagtcttgctctgtcacccaggctggagtgtagtggcacaatctcgctcactgcaatcgcaacctcccacgttcaagcaattctcatgactcagcctctcacatagctgggattacaggcgtgcaacaccatgcttggctaatttttgtattttttgtagaaacggggtttcaccacgttggccaggctggtctcaaactcatggcctcaagtgttccatccactttggggctcacaaagtgctgggattacaggtgtgagccactgtgcccagccttggtggctttataagaaaatgtaaagagggagaactttctcttcatgtg

SEQ ID NO: 717939 - DNA, 643 bp, Homo sapiens
ttggggatgtgtcaggtattttacttttgtgatccatgtcaagcatagtacctggtacgtagtaagtatttaatggcttaatacgtaactactaaaattactaaacatagttcattgattgccartgtttctgaatgtcagatacccttagctttttctgcatcaaaatgatcgtgtcatgtctctgttcaaatatctgtattttgtaaaaatagtcaaggttttagaagggatactcaaaatcaaatgctgttaagcaaaagagatgatgtttaatgttgtttttcaaatagccaaacactgaagtaagtatttgctggtaaatgaagatattttcaacaaaaataaatattttgcttgggctccatcttttttgttagaagtcatccaatattttacattaatctttatcattctaatcccaataatgtttaagatagttttgttcatcactaacacaatattttttcaaatgcaaataataatttaaaacatttgtattttacttgtacaagatcttagatttacagtgaactttttttaatactggcaactcaatgattgcagaaagtactttattattataatcatttttattttgcatggtaaatttgtctctggggtattatggaacttgagatga

SEQ ID NO: 717940 - DNA, 643 bp, Homo sapiens
ttggggatgtgtcaggtattttacttttgtgatccatgtcaagcatagtacctggtacgtagtaagtatttaatggcttaatacgtaactactaaaattactaaacatagttcattgattgccagtgtttctgaatgtcagatacccttagctttttctgcatcaaaatgatcgtgtcatgtctctgttcaaatatctgtattttgtaaaaatagtcaaggttttagaagggatactcaaaatcaaatgctgttaagcaaaagagatgatgtttaatgttgtttttcaaatagccaaacactgaagtaagtatttgctggtaaatgaagatattttcaacaaaaataaatattttgcttgggctccatcttttttgttagaagtcatccartattttacattaatctttatcattctaatcccaataatgtttaagatagttttgttcatcactaacacaatattttttcaaatgcaaataataatttaaaacatttgtattttacttgtacaagatcttagatttacagtgaactttttttaatactggcaactcaatgattgcagaaagtactttattattataatcatttttattttgcatggtaaatttgtctctggggtattatggaacttgagatga

SEQ ID NO: 717941 - DNA, 1332 bp, Homo sapiens
  misc_feature 671, 672, 673, 674, 675, 676, 677, 678, 679, 680, 681, 682,683, 684, 685, 686, 687, 688, 689, 690, 691, 692, 693, 694,695, 696, 697, 698, 699, 700, 701, 702, 703, 704, 705, 706,707, 708, 709, 710, 711, 712, 713, 714, 715, 716, 717: n = A,T,C or G
  misc_feature 718, 719, 720, 721, 722, 723, 724, 725, 726, 727, 728, 729,730, 731, 732, 733, 734, 735, 736, 737, 738, 739, 740, 741,742, 743, 744, 745, 746, 747, 748, 749, 750, 751, 752, 753,754, 755, 756, 757, 758, 759, 760, 761, 762, 763, 764: n = A,T,C or G
  misc_feature 765, 766, 767, 768, 769, 770: n = A,T,C or G
taaataaattcttgtttccattttaaattatgctattttatatattttcttcatacatagagataaaatgcacaaaataaagatatagcatgtaaatctgaaataaatttgctgttctgaagatgtagaatgattattaaaggtaagtgagatgcttaaaatttcataacctggaatgagagataaacaaaaaaaataagtggttgacagaggactacttacagttatggcctcagcctcttaatattattttcagttaatacaattcagacagaagcagaaatttttaatttagaccacaraaacaaatcaaatggcataaaacaaatgtcatacaaaataattattgaatgtcatggcaagtaaaaattttatgaggctctgaattgactccgacttaaataaacacaggaggatatagaaaagggaagtccaagagaaagtgatcagcacataattattataaaagaagggcagactttcaaataattgccatgccatgaagtaatttccattatttcacaaacatttaattagtgttttccctagcatgacgataggcctataatgactgcctcttatacactgttattttgtttgggctagacagtaattatgagaggtaaagtttcacccaacatgataaaagtttattcagctgaaattaaatnnnnnnnnnnnnnnnnnnnnnnnnnnnnnnnnnnnnnnnnnnnnnnnnnnnnnnnnnnnnnnnnnnnnnnnnnnnnnnnnnnnnnnnnnnnnnnnnnnnnaaacctatttaattgacatttcaaagttgtgtttatccagagtggcctaataagctatgattgattatctataactgaacagcttgtctttaatgatcaaactgaattttatatcacatagtttatgaacaattctgggttttttttcttcatgataaagatacaaacataatctcacctaggaaaacctttcctcaagaatcatgctgttccaatgacccctttatgaagaaaaaatagagatgaaattttttaataaaaaaatttaaattacttttcaaatgagtttcaccacgacttttttggcaggtagataagcaaattgagtagttttctaaatcaacctgctgataacggtcccttagacaatataattggtccggctaattgtgttctcatattgttcaaatggcttattcctgatattttctacctggaaataaatggcttaacttcattttttgggtttgagcaatgaggcatctatgttcctcacgtttgcttggttttacgttttttaaaacttttattcctctgggtgtttgtttcctaaagcttctag

SEQ ID NO: 717942 - DNA, 1332 bp, Homo sapiens
  misc_feature 671, 672, 673, 674, 675, 676, 677, 678, 679, 680, 681, 682,683, 684, 685, 686, 687, 688, 689, 690, 691, 692, 693, 694,695, 696, 697, 698, 699, 700, 701, 702, 703, 704, 705, 706,707, 708, 709, 710, 711, 712, 713, 714, 715, 716, 717: n = A,T,C or G
  misc_feature 718, 719, 720, 721, 722, 723, 724, 725, 726, 727, 728, 729,730, 731, 732, 733, 734, 735, 736, 737, 738, 739, 740, 741,742, 743, 744, 745, 746, 747, 748, 749, 750, 751, 752, 753,754, 755, 756, 757, 758, 759, 760, 761, 762, 763, 764: n = A,T,C or G
  misc_feature 765, 766, 767, 768, 769, 770: n = A,T,C or G
taaataaattcttgtttccattttaaattatgctattttatatattttcttcatacatagagataaaatgcacaaaataaagatatagcatgtaaatctgaaataaatttgctgttctgaagatgtagaatgattattaaaggtaagtgagatgcttaaaatttcataacctggaatgagagataaacaaaaaaaataagtggttgacagaggactacttacagttatggcctcagcctcttaatattattttcagttaatacaattcagacagaagcagaaatttttaatttagaccacagaaacaaatcaaatggcataaaacaaatgtcatacraaataattattgaatgtcatggcaagtaaaaattttatgaggctctgaattgactccgacttaaataaacacaggaggatatagaaaagggaagtccaagagaaagtgatcagcacataattattataaaagaagggcagactttcaaataattgccatgccatgaagtaatttccattatttcacaaacatttaattagtgttttccctagcatgacgataggcctataatgactgcctcttatacactgttattttgtttgggctagacagtaattatgagaggtaaagtttcacccaacatgataaaagtttattcagctgaaattaaatnnnnnnnnnnnnnnnnnnnnnnnnnnnnnnnnnnnnnnnnnnnnnnnnnnnnnnnnnnnnnnnnnnnnnnnnnnnnnnnnnnnnnnnnnnnnnnnnnnnnaaacctatttaattgacatttcaaagttgtgtttatccagagtggcctaataagctatgattgattatctataactgaacagcttgtctttaatgatcaaactgaattttatatcacatagtttatgaacaattctgggttttttttcttcatgataaagatacaaacataatctcacctaggaaaacctttcctcaagaatcatgctgttccaatgacccctttatgaagaaaaaatagagatgaaattttttaataaaaaaatttaaattacttttcaaatgagtttcaccacgacttttttggcaggtagataagcaaattgagtagttttctaaatcaacctgctgataacggtcccttagacaatataattggtccggctaattgtgttctcatattgttcaaatggcttattcctgatattttctacctggaaataaatggcttaacttcattttttgggtttgagcaatgaggcatctatgttcctcacgtttgcttggttttacgttttttaaaacttttattcctctgggtgtttgtttcctaaagcttctag

SEQ ID NO: 717943 - DNA, 648 bp, Homo sapiens
tttcaagggaacatccaactggaagccacgattgtatattaggtagaaagtaattttattatgctattaaagtaattcactgtggatgcttaagaaatttaaaaggggagttagctttgaattttaacagaagactttgttattcccagagtgtctttaattgtatgtgggtatatggaagtagggagagtatttgtttcaatgcttgctttttactacagcattttcctattttgagaagctgacaggagtcaggaacttggcagcttgtttctgaaagattgttgctcttgattctagaaatttctgattactagygcttagctggtgttatggtacatcgactctgggaaacattttattttataaccagaaattgtagaggtaatatatattatttttgtttgttttttattctggttactgcattactgttgaaaaattagttatggtcagttatacggtcagaagcaagtgtcctaagatggtgaaaatgagaactattttgagatcaagaattactatggagccaattacacatatgattatggcctgtgcatatttaagggcctatgaaaatatttgagacctgaaaaataatttattggccttgaaatactaaaaagtggcaaaataaaaagtaatata

SEQ ID NO: 717944 - DNA, 1078 bp, Homo sapiens
ttgggaggctgcctgcgcattatgagcatttagtagtatccttggcctctacccactggtgtcactggcaccccaccactgtccccaaacctccacccctgttataacaatcaaaatacctatagacattgccaaatgtttcctgggggtacaaaatcacctctgcttaagaaccacctatctggaaggcaaatacrtggaatataagaagaacaacaacagtaataattactagtactgctatcatttaaaaggtaaaattgcaccaccagctaatggataagtcatcggcttcctaaaaggcactaattacgtgctgagacttttatggccttatcttatttagtcttcacaaccaagaaaccagtctgtgttgacaaaacattcacattacaaggaaactgaagatcagagatgccaagtaacttggccaagggtgcagagctgtcagtggctgaactaccatttgaaaccagactttcctgactgtaaaatctgagcctgtcaccacctccagatcctgaggtcacatagcacagatagttctggaacagtcctcactctcaaaagttctgccagagtatgctagcactattcaaataatatatctagatttagatttaaagacataaagactgtagctatcctctgtaagaaattgacccaaagtgtgactgctgtggaggttttccaataggggaatagagcgggccagagtcttggccagtaattgactgtatggcctttatttggggtcagttacttaagctcttgaagtctcttcttgttcatatataagataaaaaattttgtcagagcaatggtactcaactctggctgcacattaaaatcacttgggtagctttttgccatggtttggatctgtgtccccacccaaatctcatgtaatccccaatgttggaggtggggcctggtgtgaggtgggattggatcatgggggcagatttcccccttggtactgtcctcaagatactgagttctcatgagatctggttgtttaaaagtatgtggcacctcccttctctttctcttttgctcctgctcctaccgtgaagac

SEQ ID NO: 717945 - DNA, 1333 bp, Homo sapiens
caaggcagcctcactgcttgcccctctccatttcatctgctatggagtccaactgagcctcatctgccccttcaacgcacactctttctcctctgggagtctctgaagtgggtaatatcctctgcttataatatgcttccccttaaacctctactcccttcctagctagctttgactcctctgtcacttgtctgctttggcatcacctcctcatagaagacttctatgactcccgagattctcaggagcatggcaggtgaagtgctcctcccatgaatggatggagattagggagtgtgtgttattcatgcttaattcaccagtgcttagctgagtacctggcataaaatagttactgtggtggccaaagtaataagccccaccgccaccaattgctcatgtcctatgttacacagcacaattacataggaagggggaattaagagtgcagataaaattaatgttgctcatcagctgaccttaaaacaagattatcctggagtatctaggagatcccatgtaattacaagcattctttaaaactggaagagggaggcagaaggttaagaaccagagacggtgggcacaatggctcatgcctgtaataccaatactttgggaggccagggcaggaaaatcccttgagtgcaggagttcaaggtcagccgtggcaacatactgaggtcccatctctacaacaaaataaaaacaaaattcactgagtgtcacgatgcttacctgtagtcccagctactgggaaggctgacatggtaggattgcttgagcctgggagtttgaggctataatgagccatgataggaccactgaactccatcctgagtgacagggcaaggtcctgtttctaaagaaaaaaaggacattggaatcagggtcctctccatcctgaggtgcctacaaggcatctgtctctgcaaaygagtaaacatcaccctccaactccttacagagtggagcagcaggaaaactccttcacctcatttctgtgctgcttgggaggcctggacagcccaataaccagctccttgctgatgaagcaatcaggaaatggctcgagttgagctaaggagaatttggatcctccttttggttctcaataggcagggcaggggccagacatggtggctcatacctgtaatccttgcactgtggggggccaaggtgagaggattgcttgaggccaggagctcaagaccagcctgggcaacatagcaagacctgggtggcatacacctgtggtccctactacttggtaggatgaggtgggaggattgatcacttgatcccaggagtttcaggctgcagtgacccatga

SEQ ID NO: 717946 - DNA, 1333 bp, Homo sapiens
caaggcagcctcactgcttgcccctctccatttcatctgctatggagtccaactgagcctcatctgccccttcaacgcacactctttctcctctgggagtctctgaagtgggtaatatcctctgcttataatatgcttccccttaaacctctactcccttcctagctagctttgactcctctgtcacttgtctgctttggcatcacctcctcatagaagacttctatgactcccgagattctcaggagcatggcaggtgaagtgctcctcccatgaatggatggagattagggagtgtgtgttattcatgcttaattcaccagtgcttagctgagtacctggcataaaatagttactgtggtggccaaagtaataagccccaccgccaccaattgctcatgtcctatgttacacagcacaattacataggaagggggaattaagagtgcagataaaattaatgttgctcatcagctgaccttaaaacaagattatcctggagtatctaggagatcccatgtaattacaagcattctttaaaactggaagagggaggcagaaggttaagaaccagagacggtgggcacaatggctcatgcctgtaataccaatactttgggaggccagggcaggaaaatcccttgagtgcaggagttcaaggtcagccgtggcaacatactgaggtcccatctctacaacaaaataaaaacaaaattcactgagtgtcacgatgcttacctgtagtcccagctactgggaaggctgacatggtaggattgcttgagcctgggagtttgaggctataatgagccatgataggaccactgaactccatcctgagtgacagggcaaggtcctgtttctaaagaaaaaaaggacattggaatcagggtcctctccatcctgaggtgcctacaaggcatctgtctctgcaaacgagtaaacatcaccctccaactccttacagagtggagcagcaggaaaactccttcacctcatttctgtgctgcttgggaggcctggacagcccaataaccagctccttgctgatgaagcaatcaggaaatggctcgagttgagctaaggagaatttggatcctycttttggttctcaataggcagggcaggggccagacatggtggctcatacctgtaatccttgcactgtggggggccaaggtgagaggattgcttgaggccaggagctcaagaccagcctgggcaacatagcaagacctgggtggcatacacctgtggtccctactacttggtaggatgaggtgggaggattgatcacttgatcccaggagtttcaggctgcagtgacccatga

SEQ ID NO: 717947 - DNA, 637 bp, Homo sapiens
agggcatttttcacacatgtaccttattttggaaaagccatgaaatgaaggtaaaataatgacgaaatctctttcttcagcagagctattctgttcaaaaaaggcctcttttatccaaggtccctctaatcaagagatcgtgtctccactgctawgatatgcttcctgaacacctggttctaacttgctgcagtgttatttcttatatagtcctatgtgctagagtttgtagccccctaaaaaactctggatctcctgtatatcattaaaaacaaaagctctacaaaatactggatattacagagtgactgagaaacaatttaaccacacggtcacttttcatgtgccatggcgcaggcactccgcagcattgcgattactatgaattagacaaaatccctgctgtaatggaacttacaatcaagggagtgaaagagtaaacataaataaatctaagcgaattttaggtagtgataaatacaatgaagagatcagcaccatacccatgattgtcatagctctatcagtttgctagggctgccataacaaattaccatagactgtgtgacttaaaccacagaaattgattttctcggttccggaggccagaggtcccagataaaggtgtcagcaggtc

SEQ ID NO: 717948 - DNA, 665 bp, Homo sapiens
taaaaacgtggacaatctttggtgagcaaactttcagttttggcagcttcactgttgtgtttgtgtgtgtgcatttatttcagcaagtaacttctactattacattttagaaaaataaagaaaacatggaaaaacccattgtaactaataataggtgtccttcttataaaattatggcaaaattgcattttcttccatgcttaatatggcataatttgaaccttaataggacatcactacatttcaacatgtaggctacaattcaatttaaaaaaatgatataattgaaaagcatatagacttacagrcataaaataatgcttaaaattatgaataattagtttttttgatttgatttttagttgttctttacaacagtgccatgaccatggccaacatctacacataaccacaactttaaatctgttgaaatttaacagttggtttttttcagtcgctttcaggaataaattatatgtaaaagcagtgggctgctcagcaaacatgaatacataatcataaatgtaattatgcatgtccacatatatgcatgtgtacatagtcttaataatgtaggaaaaattcaaatttgaacttaattgtatcttgtttgaaataactcatgatattttatgatgtgtttaatagtggtacaaaatgcgtat

SEQ ID NO: 717949 - DNA, 665 bp, Homo sapiens
taaaaacgtggacaatctttggtgagcaaactttcagttttggcagcttcactgttgtgtttgtgtgtgtgcatttatttcagcaagtaacttctactattacattttagaaaaataaagaaaacatggaaaaacccattgtaactaataataggtgtccttcttataaaattatggcaaaattgcattttcttccatgcttaatatggcataatttgaaccttaataggacatcactacatttcaacatgtaggctacaattcaatttaaaaaaatgatataattgaaaagcatatagacttacaggcataaaataatgcttaaaattatgaataattagtttttttgatttgatttttagttgttctttacaacagtgccatgaccatgrccaacatctacacataaccacaactttaaatctgttgaaatttaacagttggtttttttcagtcgctttcaggaataaattatatgtaaaagcagtgggctgctcagcaaacatgaatacataatcataaatgtaattatgcatgtccacatatatgcatgtgtacatagtcttaataatgtaggaaaaattcaaatttgaacttaattgtatcttgtttgaaataactcatgatattttatgatgtgtttaatagtggtacaaaatgcgtat

SEQ ID NO: 717950 - DNA, 555 bp, Homo sapiens
ctgaccattcgccgggccacgcctcaggacagcggcaagtacgaggtgtacgtggagaacagcctgggcatggaccagagcttcgctcgcgtsgacgtggcctgaacggcacccccggaccttccgccctggcgccgagcccgggggtggtgggacccacagccctccaccagcttgcttaataaagctgctctctgaccctccgcgtctgtcctgctcttccgcgtcgccattccctctcccccgcaccagcgcccacacgtattccagacccccacgccaaggtcacagcctgttggagtcacagggaggtctggagagcgcctagcgccgtgctgcatttcagacagtcaaactgataagagttgccctcgccgtccaaggcgccctcacttcccagcggtaccgccggctgggcctgggactccgccttctccgcttttgagcgcctccagccccagccccttgtggctgtttgcccctggccccgccccttccagggctggccacacacccctgctgtccttagtcccgttttcctgtgggacccagttc

SEQ ID NO: 717951 - DNA, 489 bp, Homo sapiens
  misc_feature 388, 389, 390, 391, 392, 393, 394, 395, 396, 397, 398, 399,400, 401, 402, 403, 404, 405, 406, 407, 408, 409, 410, 411,412, 413, 414, 415, 416, 417, 418, 419, 420, 421, 422, 423,424, 425, 426, 427, 428, 429, 430, 431, 432, 433, 434: n = A,T,C or G
  misc_feature 435, 436, 437, 438, 439, 440, 441, 442, 443, 444, 445, 446,447, 448, 449, 450, 451, 452, 453, 454, 455, 456, 457, 458,459, 460, 461, 462, 463, 464, 465, 466, 467, 468, 469, 470,471, 472, 473, 474, 475, 476, 477, 478, 479, 480, 481: n = A,T,C or G
  misc_feature 482, 483, 484, 485, 486, 487: n = A,T,C or G
atttcagtgatttaaatataagtaatmtgatatgaacatctatgtgttttgattagcaattccactaacttacatgaatctattcttatatacctgctttctctcctgtttcaataaattgtctgtgctcccatctaagacaaacacaactacttcatttatttattcattttttcactcatttatttgtttatttttttgcctggcaaatattgtgtgtctattacacgcctataacctaattctattctcaataagacaacaactacaaaaaaaactctactgtcatagatccttatttgaaggcctgaggaaataataaacacaaaataattgcattagatagtaaattaaagcattataatcccagcccttttacttttgaagnnnnnnnnnnnnnnnnnnnnnnnnnnnnnnnnnnnnnnnnnnnnnnnnnnnnnnnnnnnnnnnnnnnnnnnnnnnnnnnnnnnnnnnnnnnnnnnnnnnnaa

SEQ ID NO: 717952 - DNA, 635 bp, Homo sapiens
taaagcactcggcatgggcagggcatctgagggaagcctgaacacttggcattgggcattgttattgttcttcctcaggctcctctcatgttgttctttctttacagcaaagttggcccgagatgaccaaattcacattctcaagcaacaccgacgtaaagaactggaaacacggcaaaaacaatatcggtgagttatgacatcagatcgagtggccacggggccatggtttcttctatctcaagagcatggtatgaaataaaccctttccacagtgtatggcctgtcrctgctggaaagtcaccaaggcaccagctcccagtgtgggtgcacaatccccaaacttcaccttacctacaactccagacaagagatggagaggagagtaatgaaaataactttggatcaaccatattggcatgtaggaagaatgggcagaaaagcttgagtgtaccttaatgttctccattgtaggggttgcctcttacttcttatgtcttcttataacaattcaattataaaagtgatacatgatcagcaataaaattgacaactcttcagccaactgaccagaggattcaaaccattaaaatgagcaataagagaaaatcaatacagaaattaaaatgaataaa

SEQ ID NO: 717953 - DNA, 629 bp, Homo sapiens
tgtaggagcatagtggagcattggttacttcttgggtggctgtctcaaacccatgtctctcatccagtggtgacagaatccacctgaatgtctaaagtagggagagcagaaaagacaggatcaggccagagcttttcyacagaactcagcatcctagcattcactgttaacacatttatcctctgtggtttccgaaaccttgctgcttcagtagaattgtttaaatctcctattttgactttttaaatgagtgatgctttccgcttcttttgttattgacatgaaactgtccgttcataatgtacatggaaagagccttaggaaagttaattagggcagtgcaggaggcccagaaggcaaggttgagcttacctatctgtgattttcaacttgtttttacatttcttttttaacaccctggtactctattctgtgatatgtggactcaaaactaaattagtaaaaatggtggcaggttttctgccttctaaattcccacatttaaaaatatagtgtacctgggatcaaaggagaccaagtatccttctcaagagaaaggggacggtgtcaaggccctgcgcaatagtgtttccttgagctgtgtcatctggaattaccaccattcatca

SEQ ID NO: 717954 - DNA, 1974 bp, Homo sapiens
  misc_feature 1295, 1296, 1297, 1298, 1299, 1300, 1301, 1302, 1303, 1304,1305, 1306, 1307, 1308, 1309, 1310, 1311, 1312, 1313, 1314,1315, 1316, 1317, 1318, 1319, 1320, 1321, 1322, 1323, 1324,1325, 1326, 1327, 1328, 1329, 1330, 1331, 1332, 1333: n = A,T,C or G
  misc_feature 1334, 1335, 1336, 1337, 1338, 1339, 1340, 1341, 1342, 1343,1344, 1345, 1346, 1347, 1348, 1349, 1350, 1351, 1352, 1353,1354, 1355, 1356, 1357, 1358, 1359, 1360, 1361, 1362, 1363,1364, 1365, 1366, 1367, 1368, 1369, 1370, 1371, 1372: n = A,T,C or G
  misc_feature 1373, 1374, 1375, 1376, 1377, 1378, 1379, 1380, 1381, 1382,1383, 1384, 1385, 1386, 1387, 1388, 1389, 1390, 1391, 1392,1393, 1394: n = A,T,C or G
tttagcatccacatattggtatccaaaatccaggcatcagtctaagaaccaagacccctaggagaaatcgttattctagggatggatcagggaccttacaaaagaaacacgaggtatcttattgtgctaaaaataaggaggtactcaaagaatgatgaggacatttcaaaaggatatggaaaccaggtagccaaactggggacaattttagcatcaatacaaatgagaagaaaccttttccttactgtagaagactagctgactaatgtataaggaaggagaaaatcatttgtcagccatcacaataataatcaggcaagaaacatcaatgaatgctaaaactagtggcaggaagtttggtgaggaatgggatactgtctgaaagtatctctacaaagggataaagagtaactttacatctaagaaaccgacagacattaacttaatcaaatgatcaaggtgaaaattaccaaataggacaaatcaaaactatctaacacctgtttgggtaccatgaaaacacaacatcatatttgtaatatttctgccccaaatgcataacctgaatgcaatcatgagaaaacatcagacaagccagagtgaaggaaattctttaaagtaactggcctgtaattctccaaagtgtcaatgtcatggaagccaaggaaaccagcaatgccaaggaaaccagcaatcaaggagtcattgctggaaatggaagattaaagagacagagtcacctagtagagtcctggattrcaccctttgctgaaatgcataatcttgacccattggtgaaacgcgagtggtgtaagtgaatcagagggtagtaatacattaatactaagttgtctagtttgattattgtactggggctttagaggaattttttttgtaggagatgcattctaaaatatttatgggtaatgatgcaatggaacagcaaaactgttagtgaaagtttgaaaccatttcaagagagaaaagaaaaaacatcaggaatccaaaacatctgttttctagagctggctctgctgtgagctggttatttgaaggacgacaaatcactccatctctttatgtctccatttcttcatctcttaatgttccatggaggttagttaattaattaatactgcatgtgtcatcgggcatttataatctagcctaatcctgggagactaagataaaataccaaagcaaggttaacataagtgccataatacaactcaatgtaatgcaagatcctatatttgatgatgaatcaccacaaaatttgctataaagaacatgannnnnnnnnnnnnnnnnnnnnnnnnnnnnnnnnnnnnnnnnnnnnnnnnnnnnnnnnnnnnnnnnnnnnnnnnnnnnnnnnnnnnnnnnnnnnnnnnnnnttattatgctctatagctatgtatgtaccaatatttacagatttactgacaagaacatgtgtctatccatgaaatattatagcagattttcagagtttgtgtattattactgtgtaatccgatttaatgaatactctggggtgaataaacacacatatttatgtataaaactatatgtgcatgaacatatattcatgtgtatttattaatattatgctattctattttgaaactactttaatatcactataatgcatgtaaatgaaaggtccttaatatttcatcagacaattttccttctgtaattaagaaatatcttatacttcagctagtcttaaccactggtaaactgagactgttaatagcctatagctttactagtatggtaaccatcaaccacatgtggctatctaaacttaaatgaattaaaactaaataaaaatgaaaattcagctcctcagttgcaccaagtacatttctagtgttcaatggacacacgtagctagtcatctctttattagattttgcagatataaagtgtgtctatcactgcacaaagtccaagtgggtagtactggtc

SEQ ID NO: 717955 - DNA, 2418 bp, Homo sapiens
tttaataatggctaaattgcataaactaaaacattgaaattgcataaactaaaacatttatcttacacgtaagaactaaaacacgcatttcaaatatcagtgtaaagaacatcaatagaaygaagcttctggaattgaaactgagtgacagcaacaatgttatgagtacaaaacagacatgatccttttcaagtttttaataagcaaatacgtagcagcagaattgtaagttttctatattttataaatgtatcattttaactgtcaatcaatcatattttaatgtttaaataaaaaatgctttcactttccttctactaaatgatcacattttcctactttaaaatttggattccattagttttacatttgttctgccacacataaatgaagataaagtaattttctggcaaatttttcagacagacggctatacactagagttcagagctttcatgtggtcgtagagcattccacatgaacattttcccacaagtcagagctcttccttccatttctgtgctaataggacctgcaaggcaggctgtgtatgagtatttgcggggagcaggagaggtgggggaaggaaagtgatcaaaggaaatcacccacccagaacctgcttgtattgcatgtaacacaaattgcgctaattcatccctgctgaggaacccataaaaaactgccaccagggtccaaatatcttctcaatggtcttgcctatgaaagagcaagaaaatggcacatgtttatgtaataaaccctgcagaaacaattttaagcagaaacttgtagcaaaacatattcaaaagtaaattaggaaaactacagtttggttatacacataattgaagaaaagcagtattttattttattttgtaaattacatttttatttaagaagtatgtatatatagaaaattgacaaaataactttcagagtttgacctagtgtttggatagggagtgccaattactatgccaattagtgcatagtaaagagaaaggattttgaaacatttttaggatgttttcctgcttttagaatttttatttcaatagcatttggaggagaggtggtgttggttacatggaaaagttctttagtggtgatttctgagattttggtgtacccatcacccaagcagtgtacaccttgcacaatgtttagtctcttatttctagcccactcccacccttccctccaagtccctgaagcccattacatcattcttatgcctttgcatcctcatagcttagctcccacttataagtgagaacacactatatttggttttctattcctgagttacttcacttagaataatggcctccagctccatccaagttactgcgaatgccattatttcatttctttttatggctgagtagtattccgtgatgtataaatgccacattttctttatccacttgttggttggtggacatttaggttggttccatatttttgcaatggcaaattgtgctggaagagcagtatttttaaagtggaactttgtaaaagttctgcaatttacttagaaatcatgatacaagaatctgacgatttaagtgaagaccagcataggacatagacaacctcactataatctacagagagaaccagaatcacatttcctgtagttccaccagcctagcttccatgaaaacttgagagaggtgatagagaaatgaatagattgtgtgagttactcactccgtcgtctaccgtctatccatctgtgtgtgaacatgatcttcaggacgttgaacacacactccctgctataacatgctgtgaatctggggatgtttctacatattttttcccataggcaaacatccagtacctagaacagtgcctggcacacagtgagtcttcaataagtgcacgctaatatgaatgaatgaatgatataagcacttctatttttgcttcccactgtcccatgaaacccattcaatacttgcggtccagtccctgcccttaagtgccaatgcagacaattgccactactttttggatcactcttagataatagaaaggcccatgaaaccttcaagtagcaaatacgatctccagtaatgtaaaatttccttttccagatgatgttagaaagcgctaacttgatttgaagttaaatcttagtccctgccctcagcctatacttaggagggctagggggaagtgtccttcctgcttccatcagctgaggttggggaaggttggatatcaaagtggccagatgactgtttgtgcttcttacatgatcgtgacggtcacaagtagatgccctgctttccagacctggcagaggtttgcgagctgactttcttgcacagacgctttgtgagttatttaaaggcgcctctactaagcctcacaattgcaactcctgtgccacgggcagtgcctttc

SEQ ID NO: 717956 - DNA, 2418 bp, Homo sapiens
tttaataatggctaaattgcataaactaaaacattgaaattgcataaactaaaacatttatcttacacgtaagaactaaaacacgcatttcaaatatcagtgtaaagaacatcaatagaatgaagcttctggaattgaaactgagtgacagcaacaatgttatgagtacaaaacagacatgatccttttcaagtttttaataagcaaatacgtagcagcagaattktaagttttctatattttataaatgtatcattttaactgtcaatcaatcatattttaatgtttaaataaaaaatgctttcactttccttctactaaatgatcacattttcctactttaaaatttggattccattagttttacatttgttctgccacacataaatgaagataaagtaattttctggcaaatttttcagacagacggctatacactagagttcagagctttcatgtggtcgtagagcattccacatgaacattttcccacaagtcagagctcttccttccatttctgtgctaataggacctgcaaggcaggctgtgtatgagtatttgcggggagcaggagaggtgggggaaggaaagtgatcaaaggaaatcacccacccagaacctgcttgtattgcatgtaacacaaattgcgctaattcatccctgctgaggaacccataaaaaactgccaccagggtccaaatatcttctcaatggtcttgcctatgaaagagcaagaaaatggcacatgtttatgtaataaaccctgcagaaacaattttaagcagaaacttgtagcaaaacatattcaaaagtaaattaggaaaactacagtttggttatacacataattgaagaaaagcagtattttattttattttgtaaattacatttttatttaagaagtatgtatatatagaaaattgacaaaataactttcagagtttgacctagtgtttggatagggagtgccaattactatgccaattagtgcatagtaaagagaaaggattttgaaacatttttaggatgttttcctgcttttagaatttttatttcaatagcatttggaggagaggtggtgttggttacatggaaaagttctttagtggtgatttctgagattttggtgtacccatcacccaagcagtgtacaccttgcacaatgtttagtctcttatttctagcccactcccacccttccctccaagtccctgaagcccattacatcattcttatgcctttgcatcctcatagcttagctcccacttataagtgagaacacactatatttggttttctattcctgagttacttcacttagaataatggcctccagctccatccaagttactgcgaatgccattatttcatttctttttatggctgagtagtattccgtgatgtataaatgccacattttctttatccacttgttggttggtggacatttaggttggttccatatttttgcaatggcaaattgtgctggaagagcagtatttttaaagtggaactttgtaaaagttctgcaatttacttagaaatcatgatacaagaatctgacgatttaagtgaagaccagcataggacatagacaacctcactataatctacagagagaaccagaatcacatttcctgtagttccaccagcctagcttccatgaaaacttgagagaggtgatagagaaatgaatagattgtgtgagttactcactccgtcgtctaccgtctatccatctgtgtgtgaacatgatcttcaggacgttgaacacacactccctgctataacatgctgtgaatctggggatgtttctacatattttttcccataggcaaacatccagtacctagaacagtgcctggcacacagtgagtcttcaataagtgcacgctaatatgaatgaatgaatgatataagcacttctatttttgcttcccactgtcccatgaaacccattcaatacttgcggtccagtccctgcccttaagtgccaatgcagacaattgccactactttttggatcactcttagataatagaaaggcccatgaaaccttcaagtagcaaatacgatctccagtaatgtaaaatttccttttccagatgatgttagaaagcgctaacttgatttgaagttaaatcttagtccctgccctcagcctatacttaggagggctagggggaagtgtccttcctgcttccatcagctgaggttggggaaggttggatatcaaagtggccagatgactgtttgtgcttcttacatgatcgtgacggtcacaagtagatgccctgctttccagacctggcagaggtttgcgagctgactttcttgcacagacgctttgtgagttatttaaaggcgcctctactaagcctcacaattgcaactcctgtgccacgggcagtgcctttc

SEQ ID NO: 717957 - DNA, 2418 bp, Homo sapiens
tttaataatggctaaattgcataaactaaaacattgaaattgcataaactaaaacatttatcttacacgtaagaactaaaacacgcatttcaaatatcagtgtaaagaacatcaatagaatgaagcttctggaattgaaactgagtgacagcaacaatgttatgagtacaaaacagacatgatccttttcaagtttttaataagcaaatacgtagcagcagaattgtaagttttctatattttataaatgtatcattttaactgtcaatcaatcatattttaatgtttaaataaaaaatgctttcactttccttctactaaatgatcacattttcctactttaaaatttggattccattagttttacatttgttctgccacacataaatgaagataaagtaattttctggcaaatttttcagacagacggctatacactagagttcagagctttcatgtggtcgtagagcattccacatgaacattttcccacaagtcagagctcttccttccatttctgtgctaataggacctgcaaggcaggctgtgtatgagtatttgcggggagcaggagaggtgggggaaggaaagtgatcaaaggaaatcacccacccagaacctgcttgtattgcatgtaacacaaattgcgctaattcatccctgmtgaggaacccataaaaaactgccaccagggtccaaatatcttctcaatggtcttgcctatgaaagagcaagaaaatggcacatgtttatgtaataaaccctgcagaaacaattttaagcagaaacttgtagcaaaacatattcaaaagtaaattaggaaaactacagtttggttatacacataattgaagaaaagcagtattttattttattttgtaaattacatttttatttaagaagtatgtatatatagaaaattgacaaaataactttcagagtttgacctagtgtttggatagggagtgccaattactatgccaattagtgcatagtaaagagaaaggattttgaaacatttttaggatgttttcctgcttttagaatttttatttcaatagcatttggaggagaggtggtgttggttacatggaaaagttctttagtggtgatttctgagattttggtgtacccatcacccaagcagtgtacaccttgcacaatgtttagtctcttatttctagcccactcccacccttccctccaagtccctgaagcccattacatcattcttatgcctttgcatcctcatagcttagctcccacttataagtgagaacacactatatttggttttctattcctgagttacttcacttagaataatggcctccagctccatccaagttactgcgaatgccattatttcatttctttttatggctgagtagtattccgtgatgtataaatgccacattttctttatccacttgttggttggtggacatttaggttggttccatatttttgcaatggcaaattgtgctggaagagcagtatttttaaagtggaactttgtaaaagttctgcaatttacttagaaatcatgatacaagaatctgacgatttaagtgaagaccagcataggacatagacaacctcactataatctacagagagaaccagaatcacatttcctgtagttccaccagcctagcttccatgaaaacttgagagaggtgatagagaaatgaatagattgtgtgagttactcactccgtcgtctaccgtctatccatctgtgtgtgaacatgatcttcaggacgttgaacacacactccctgctataacatgctgtgaatctggggatgtttctacatattttttcccataggcaaacatccagtacctagaacagtgcctggcacacagtgagtcttcaataagtgcacgctaatatgaatgaatgaatgatataagcacttctatttttgcttcccactgtcccatgaaacccattcaatacttgcggtccagtccctgcccttaagtgccaatgcagacaattgccactactttttggatcactcttagataatagaaaggcccatgaaaccttcaagtagcaaatacgatctccagtaatgtaaaatttccttttccagatgatgttagaaagcgctaacttgatttgaagttaaatcttagtccctgccctcagcctatacttaggagggctagggggaagtgtccttcctgcttccatcagctgaggttggggaaggttggatatcaaagtggccagatgactgtttgtgcttcttacatgatcgtgacggtcacaagtagatgccctgctttccagacctggcagaggtttgcgagctgactttcttgcacagacgctttgtgagttatttaaaggcgcctctactaagcctcacaattgcaactcctgtgccacgggcagtgcctttc

SEQ ID NO: 717958 - DNA, 604 bp, Homo sapiens
tttgtagaagatggcttttctyatggtattattttaaaagtgttcaaatgatatcaaagctgccattgttaaaagtaaaaaaatcctaatgtggatacttacaaatgtctaatatcctaatacttcaataatgtcccagtactttactgtgtaccccaaatgttatgtgtcgttttataaaatgattatataatcttgctggggtgttcttgtcactcaccattacggaagagaaagccgactcggagaggagtggccatttgtccttcttcacagcattaataaatagtagacccaggaccgagagggctgtttttatatccctgcaatgtttcgtatgtttgaaatgtgttgattgaaaatgttcttcctctttgatgaagaagagccacagtgaccgccaaagaaaccgatttagaacagtttcttctaaagctttccgcttggacttgaccgtgggtgtgtctgaatgtttctgagccagctccacaccaagcctgaatgagcccaagcaggtcacgaaattgaaaggactataaagcaccgtatcagaaaaggaggagaaacccaaggcgtatccgttagtggctgcatatgccaatac

SEQ ID NO: 717959 - DNA, 604 bp, Homo sapiens
tttgtagaagatggcttttcttatggtattattttaaaagtgttcaaatgatatcaaagctgccattgttaaaagtaaaaaaatcctaatgtggatacttacaaatgtctaatatcctaatacttcaataatgtcccagtactttactgtgtaccccaaatgttatgtgtcgttttataaaatgattatataatcttgctggggtgttcttgtcactcaccattacggaagagaaagccgactcggagaggagtggccatttgtccttcttcacagcattaataaatagtagacccaggaccgagagggctgtttttatatccctgcaatgtttcgtatgtttgaaatgtgttgattgaaaatgttcttcctctttgatgaagaagagccacagtgaccgcmaaagaaaccgatttagaacagtttcttctaaagctttccgcttggacttgaccgtgggtgtgtctgaatgtttctgagccagctccacaccaagcctgaatgagcccaagcaggtcacgaaattgaaaggactataaagcaccgtatcagaaaaggaggagaaacccaaggcgtatccgttagtggctgcatatgccaatac

SEQ ID NO: 717960 - DNA, 3447 bp, Homo sapiens
  misc_feature 2658, 2659, 2660, 2661, 2662, 2663, 2664, 2665, 2666, 2667,2668, 2669, 2670, 2671, 2672, 2673, 2674, 2675, 2676, 2677,2678, 2679, 2680, 2681, 2682, 2683, 2684, 2685, 2686, 2687,2688, 2689, 2690, 2691, 2692, 2693, 2694, 2695, 2696: n = A,T,C or G
  misc_feature 2697, 2698, 2699, 2700, 2701, 2702, 2703, 2704, 2705, 2706,2707, 2708, 2709, 2710, 2711, 2712, 2713, 2714, 2715, 2716,2717, 2718, 2719, 2720, 2721, 2722, 2723, 2724, 2725, 2726,2727, 2728, 2729, 2730, 2731, 2732, 2733, 2734, 2735: n = A,T,C or G
  misc_feature 2736, 2737, 2738, 2739, 2740, 2741, 2742, 2743, 2744, 2745,2746, 2747, 2748, 2749, 2750, 2751, 2752, 2753, 2754, 2755,2756, 2757: n = A,T,C or G
agatatataacaatataactgataaaagcttgatctcacacacgtgcatacaagtatacaaagttacaggccttctcctgctgagcaaatgatcattataaattaaaagctcacctataaggaaatagaaatcataagccatatgctgaaaaaaaatgtacagaaacaaaaataaaaacaattttgtttttattacattttgcaattaaaacttcaaaaataaatttcagtaacgcacaatgctgcctaagcctacagcactatgaactggctcatttcaacttcagagcaacctggtcaagtgcaacatcgttggtcagaatcagactacatggataatattataataatataatatttataataaaatcctatatataattgtcaattctgttagtagatggaagcataaatattaccatgaattgcaaaagtcaaaataaaaatgtatgtttcaacacattaaaagtataaaatacacaaacatgaatactagcaaaaattaaaatagaaatttataggatgcaaataccttttcttttcatgtgcacaagtattttgtttttctacaaagtttcataagtatctaatgcaatagataattaaaattccctgacacactctttatcaatagaagagacttaacgttatgcggggaagggttatctttacttgctggtgttgaggagcccagaatcagctccccatcaccttcgtgtatccatttccctgtggatggcaattgctcagagtaatattgacctcttgtcttcctgagatcccaatctaaaatctaggggaataagatcataagacacatttcagcatttccttaatgaaggatttttcattaatcatgacaattgttattaaaacaactaatgacactgaacatggaaaactgtccactatggcccagatttggggtaacacccggctaacttctctggatgctgtccccttgcctcggccatacctaactcacctccccacttagctgttggttattcttaagttctaaaggatgggatgcaggctatactctaacaaataaaactatttgttcctggttgggcttctgccctcaaatcctatctggtcaccaaatgttggttgaactggttgactgtgaaagcctcaagcattctacttgtcctttctgttaaggcctaaaccagaactgaagagaccaggcccttgcatcacagtacctgatcccaatctgacttttctaaattctctgctaagaaaaggggcctcaaaagcaaacgaaaggggaaaagaatgaatcatttcagacatactttttgaataatttcatcgccgaagacccggcacctcctggaggcggggctaaaatggagcactgtgcagtaaacttgcaagctatgttgtcagcaggtcaggattctccctgcagctggattcgttggcaaaatatagtcaacatttgtcagtctgaaaattattttccaataattgtataataatatctagtgagtagtctagcagcatctctaagttttttttcctaagtattttatcttcaccgtttttttttttcttttttgagacagagtctcactctgtcacccaggctgcagttccgtggcgtcatctcggctcactgcaacttccgcctcccgggttcaagcaattctcctgcctcagcctcccgagtagctgggattacagacgcccaccaccatgcccggctacttttttgtatttttagtagagatgggtttcaccatgttggccaggctggtcttgawctcctgacctcaagtgatccgcctgccttggcctcccaaactgctgggataccaggcgtgagccaccacacctggcccatccttttcttgaacacaacaattttaaagagactctcacagtgtcttaacatacttcaatttattaagacatttctattcttaaataggagaggaaggtaaaaatcaatttgtggaatatctgattggggactgcattaagaggaaaactttaaaattcttgtgcaaataacatttgcataaaatttttaaaaatattgtcacttttttcagaccattatattgttcagctgcatagtttttgttacaacataaaaattagtcaaagcggagagaaagcttagaacttggaatgtaagttatgactttgtactgagagtttctaagagaaattaattatgtctctcttaatagagggataataagtctacagaagatagagagaaagggctgtaaaatttttgatacttgagtaaggtaccttaattcccaaatgaggagccagtgacaagtgccataaaatcatggataacccagtaatgatttggtgtgagctggctttactcaagaaggagcacatcaacatgaataataattgaagattaggggaaatgtatttaatcacacttaacataaaaaaaaattttgatctaaattatatattattcatttaaatgtgcattatttaaatgtactggatagtgattctagtagacactaaatatagttctttcaagtgtttttgtgtcttaaaagagcacaaaaaggacactgggttaaatctctcagataatcatgctcttaggaggagtggatgtgaatatgagaatagcccagctatatcctcacactcggtagaaaaatnnnnnnnnnnnnnnnnnnnnnnnnnnnnnnnnnnnnnnnnnnnnnnnnnnnnnnnnnnnnnnnnnnnnnnnnnnnnnnnnnnnnnnnnnnnnnnnnnnnngatgtgtctggaagcactattccggacaaaacaatagtctctctcttccagccaattctcagcatcctctgcagggcaagcttgtcacccagctgtgtcatgatggctaaaagtatgggggggcagacaacacagcctcaagcacaaccacctggcactaatttgaaaaccccagggctgtctgggggaaatgctgtgatatttcccattaggcgaaaggcagcttaacattcataatttgattgagaaaaatggagctattttataggccagtaggctccaaattgttattctactcagatctttattgcttggcctttcttaatttaataagcaacctgtatctctcgtactgaagacaaatagattctataagtgaagatctaaaatctgaagtgttaataacagaactaaaaatatagttttgtttatttttctccatgtcagattctgttttctgtacaagcaaaccaatatgttcttgctctgagggacatacttgaaatgacagaatcatggggtctccattcatggcactgccatagtaacagattgggaccacgatgatttaacattaccaggagttactgttggaacaggtcaacacaacgtgaaacctctgctacacatcccacacacacttggccccaagacgttgcttctactttggaaaaatcacttttccaaaat

SEQ ID NO: 717961 - DNA, 3447 bp, Homo sapiens
  misc_feature 2658, 2659, 2660, 2661, 2662, 2663, 2664, 2665, 2666, 2667,2668, 2669, 2670, 2671, 2672, 2673, 2674, 2675, 2676, 2677,2678, 2679, 2680, 2681, 2682, 2683, 2684, 2685, 2686, 2687,2688, 2689, 2690, 2691, 2692, 2693, 2694, 2695, 2696: n = A,T,C or G
  misc_feature 2697, 2698, 2699, 2700, 2701, 2702, 2703, 2704, 2705, 2706,2707, 2708, 2709, 2710, 2711, 2712, 2713, 2714, 2715, 2716,2717, 2718, 2719, 2720, 2721, 2722, 2723, 2724, 2725, 2726,2727, 2728, 2729, 2730, 2731, 2732, 2733, 2734, 2735: n = A,T,C or G
  misc_feature 2736, 2737, 2738, 2739, 2740, 2741, 2742, 2743, 2744, 2745,2746, 2747, 2748, 2749, 2750, 2751, 2752, 2753, 2754, 2755,2756, 2757: n = A,T,C or G
agatatataacaatataactgataaaagcttgatctcacacacgtgcatacaagtatacaaagttacaggccttctcctgctgagcaaatgatcattataaattaaaagctcacctataaggaaatagaaatcataagccatatgctgaaaaaaaatgtacagaaacaaaaataaaaacaattttgtttttattacattttgcaattaaaacttcaaaaataaatttcagtaacgcacaatgctgcctaagcctacagcactatgaactggctcatttcaacttcagagcaacctggtcaagtgcaacatcgttggtcagaatcagactacatggataatattataataatataatatttataataaaatcctatatataattgtcaattctgttagtagatggaagcataaatattaccatgaattgcaaaagtcaaaataaaaatgtatgtttcaacacattaaaagtataaaatacacaaacatgaatactagcaaaaattaaaatagaaatttataggatgcaaataccttttcttttcatgtgcacaagtattttgtttttctacaaagtttcataagtatctaatgcaatagataattaaaattccctgacacactctttatcaatagaagagacttaacgttatgcggggaagggttatctttacttgctggtgttgaggagcccagaatcagctccccatcaccttcgtgtatccatttccctgtggatggcaattgctcagagtaatattgacctcttgtcttcctgagatcccaatctaaaatctaggggaataagatcataagacacatttcagcatttccttaatgaaggatttttcattaatcatgacaattgttattaaaacaactaatgacactgaacatggaaaactgtccactatggcccagatttggggtaacacccggctaacttctctggatgctgtccccttgcctcggccatacctaactcacctccccacttagctgttggttattcttaagttctaaaggatgggatgcaggctatactctaacaaataaaactatttgttcctggttgggcttctgccctcaaatcctatctggtcaccaaatgttggttgaactggttgactgtgaaagcctcaagcattctacttgtcctttctgttaaggcctaaaccagaactgaagagaccaggcccttgcatcacagtacctgatcccaatctgacttttctaaattctctgctaagaaaaggggcctcaaaagcaaacgaaaggggaaaagaatgaatcatttcagacatactttttgaataatttcatcgccgaagacccggcacctcctggaggcggggctaaaatggagcactgtgcagtaaacttgcaagctatgttgtcagcaggtcaggattctccctgcagctggattcgttggcaaaatatagtcaacatttgtcagtctgaaaattattttccaataattgtataataatatctagtgagtagtctagcagcatctctaagttttttttcctaagtattttatcttcaccgtttttttttttcttttttgagacagagtctcactctgtcacccaggctgcagttccgtggcgtcatctcggctcactgcaacttccgcctcccgggttcaagcaattctcctgcctcagcctcccgagtagctgggattacagacgcccaccaccatgcccggctacttttttgtatttttagtagagatgggtttcaccatgttggccaggctggtcttgaactcctgacctcaagtgatccgcctgccttggcctcccaaactgctgggataccaggcgtgagccaccacacctggcccatccttttcttsaacacaacaattttaaagagactctcacagtgtcttaacatacttcaatttattaagacatttctattcttaaataggagaggaaggtaaaaatcaatttgtggaatatctgattggggactgcattaagaggaaaactttaaaattcttgtgcaaataacatttgcataaaatttttaaaaatattgtcacttttttcagaccattatattgttcagctgcatagtttttgttacaacataaaaattagtcaaagcggagagaaagcttagaacttggaatgtaagttatgactttgtactgagagtttctaagagaaattaattatgtctctcttaatagagggataataagtctacagaagatagagagaaagggctgtaaaatttttgatacttgagtaaggtaccttaattcccaaatgaggagccagtgacaagtgccataaaatcatggataacccagtaatgatttggtgtgagctggctttactcaagaaggagcacatcaacatgaataataattgaagattaggggaaatgtatttaatcacacttaacataaaaaaaaattttgatctaaattatatattattcatttaaatgtgcattatttaaatgtactggatagtgattctagtagacactaaatatagttctttcaagtgtttttgtgtcttaaaagagcacaaaaaggacactgggttaaatctctcagataatcatgctcttaggaggagtggatgtgaatatgagaatagcccagctatatcctcacactcggtagaaaaatnnnnnnnnnnnnnnnnnnnnnnnnnnnnnnnnnnnnnnnnnnnnnnnnnnnnnnnnnnnnnnnnnnnnnnnnnnnnnnnnnnnnnnnnnnnnnnnnnnnngatgtgtctggaagcactattccggacaaaacaatagtctctctcttccagccaattctcagcatcctctgcagggcaagcttgtcacccagctgtgtcatgatggctaaaagtatgggggggcagacaacacagcctcaagcacaaccacctggcactaatttgaaaaccccagggctgtctgggggaaatgctgtgatatttcccattaggcgaaaggcagcttaacattcataatttgattgagaaaaatggagctattttataggccagtaggctccaaattgttattctactcagatctttattgcttggcctttcttaatttaataagcaacctgtatctctcgtactgaagacaaatagattctataagtgaagatctaaaatctgaagtgttaataacagaactaaaaatatagttttgtttatttttctccatgtcagattctgttttctgtacaagcaaaccaatatgttcttgctctgagggacatacttgaaatgacagaatcatggggtctccattcatggcactgccatagtaacagattgggaccacgatgatttaacattaccaggagttactgttggaacaggtcaacacaacgtgaaacctctgctacacatcccacacacacttggccccaagacgttgcttctactttggaaaaatcacttttccaaaat

SEQ ID NO: 717962 - DNA, 3447 bp, Homo sapiens
  misc_feature 2658, 2659, 2660, 2661, 2662, 2663, 2664, 2665, 2666, 2667,2668, 2669, 2670, 2671, 2672, 2673, 2674, 2675, 2676, 2677,2678, 2679, 2680, 2681, 2682, 2683, 2684, 2685, 2686, 2687,2688, 2689, 2690, 2691, 2692, 2693, 2694, 2695, 2696: n = A,T,C or G
  misc_feature 2697, 2698, 2699, 2700, 2701, 2702, 2703, 2704, 2705, 2706,2707, 2708, 2709, 2710, 2711, 2712, 2713, 2714, 2715, 2716,2717, 2718, 2719, 2720, 2721, 2722, 2723, 2724, 2725, 2726,2727, 2728, 2729, 2730, 2731, 2732, 2733, 2734, 2735: n = A,T,C or G
  misc_feature 2736, 2737, 2738, 2739, 2740, 2741, 2742, 2743, 2744, 2745,2746, 2747, 2748, 2749, 2750, 2751, 2752, 2753, 2754, 2755,2756, 2757: n = A,T,C or G
agatatataacaatataactgataaaagcttgatctcacacacgtgcatacaagtatacaaagttacaggccttctcctgctgagcaaatgatcattataaattaaaagctcacctataaggaaatagaaatcataagccatatgctgaaaaaaaatgtacagaaacaaaaataaaaacaattttgtttttattacattttgcaattaaaacttcaaaaataaatttcagtaacgcacaatgctgcctaagcctacagcactatgaactggctcatttcaacttcagagcaacctggtcaagtgcaacatcgttggtcagaatcagactacatggataatattataataatataatatttataataaaatcctatatataattgtcaattctgttagtagatggaagcataaatattaccatgaattgcaaaagtcaaaataaaaatgtatgtttcaacacattaaaagtataaaatacacaaacatgaatactagcaaaaattaaaatagaaatttataggatgcaaataccttttcttttcatgtgcacaagtattttgtttttctacaaagtttcataagtatctaatgcaatagataattaaaattccctgacacactctttatcaatagaagagacttaacgttatgcggggaagggttatctttacttgctggtgttgaggagcccagaatcagctccccatcaccttcgtgtatccatttccctgtggatggcaattgctcagagtaatattgacctcttgtcttcctgagatcccaatctaaaatctaggggaataagatcataagacacatttcagcatttccttaatgaaggatttttcattaatcatgacaattgttattaaaacaactaatgacactgaacatggaaaactgtccactatggcccagatttggggtaacacccggctaacttctctggatgctgtccccttgcctcggccatacctaactcacctccccacttagctgttggttattcttaagttctaaaggatgggatgcaggctatactctaacaaataaaactatttgttcctggttgggcttctgccctcaaatcctatctggtcaccaaatgttggttgaactggttgactgtgaaagcctcaagcattctacttgtcctttctgttaaggcctaaaccagaactgaagagaccaggcccttgcatcacagtacctgatcccaatctgacttttctaaattctctgctaagaaaaggggcctcaaaagcaaacgaaaggggaaaagaatgaatcatttcagacatactttttgaataatttcatcgccgaagacccggcacctcctggaggcggggctaaaatggagcactgtgcagtaaacttgcaagctatgttgtcagcaggtcaggattctccctgcagctggattcgttggcaaaatatagtcaacatttgtcagtctgaaaattattttccaataattgtataataatatctagtgagtagtctagcagcatctctaagttttttttcctaagtattttatcttcaccgtttttttttttcttttttgagacagagtctcactctgtcacccaggctgcagttccgtggcgtcatctcggctcactgcaacttccgcctcccgggttcaagcaattctcctgcctcagcctcccgagtagctgggattacagacgcccaccaccatgcccggctacttttttgtatttttagtagagatgggtttcaccatgttggccaggctggtcttgaactcctgacctcaagtgatccgcctgccttggcctcccaaactgctgggataccaggcgtgagccaccacacctggcccatccttttcttgaacacaacaattttaaagagactctcacagtgtcttaacatacttcaatttattaagacatttctattcttaaataggagaggaaggtaaaaatcaatttgtggaatatctgattggggactgcattaagaggaaaactttaaaattcttgtgcaaataacatttgcataaaatttttaaaaatattgtcacttttttcagaccattatattgttcagctgcatagtttttgttacaacataaaaattagtcaaagcggagagaaagcttagaacttggaatgtaagttatgactttgtactgagagtttctaagagaaattaattatgtctctcttaatagagggataataagtctacagaagatagagagaaagggctgtaaaatttttgatacttgagtaaggtaccttaattcccaaatgaggagccagtgacaagtgccataaaatcatggataacccagtaatgatttggtgtgagctggctttactcaagaaggagcamatcaacatgaataataattgaagattaggggaaatgtatttaatcacacttaacataaaaaaaaattttgatctaaattatatattattcatttaaatgtgcattatttaaatgtactggatagtgattctagtagacactaaatatagttctttcaagtgtttttgtgtcttaaaagagcacaaaaaggacactgggttaaatctctcagataatcatgctcttaggaggagtggatgtgaatatgagaatagcccagctatatcctcacactcggtagaaaaatnnnnnnnnnnnnnnnnnnnnnnnnnnnnnnnnnnnnnnnnnnnnnnnnnnnnnnnnnnnnnnnnnnnnnnnnnnnnnnnnnnnnnnnnnnnnnnnnnnnngatgtgtctggaagcactattccggacaaaacaatagtctctctcttccagccaattctcagcatcctctgcagggcaagcttgtcacccagctgtgtcatgatggctaaaagtatgggggggcagacaacacagcctcaagcacaaccacctggcactaatttgaaaaccccagggctgtctgggggaaatgctgtgatatttcccattaggcgaaaggcagcttaacattcataatttgattgagaaaaatggagctattttataggccagtaggctccaaattgttattctactcagatctttattgcttggcctttcttaatttaataagcaacctgtatctctcgtactgaagacaaatagattctataagtgaagatctaaaatctgaagtgttaataacagaactaaaaatatagttttgtttatttttctccatgtcagattctgttttctgtacaagcaaaccaatatgttcttgctctgagggacatacttgaaatgacagaatcatggggtctccattcatggcactgccatagtaacagattgggaccacgatgatttaacattaccaggagttactgttggaacaggtcaacacaacgtgaaacctctgctacacatcccacacacacttggccccaagacgttgcttctactttggaaaaatcacttttccaaaat

SEQ ID NO: 717963 - DNA, 859 bp, Homo sapiens
ttgcttatttgtacactcgaatatttaccaatagtgtaaagtgagaatgggcgtatttttcttttttattaacccataagtccgtttgtctttcatgttcaatctttgtaatttagaatgcagccaatatagaggagatacattttttgttttactttcctgaaagctagtgctctctcgtggtaaagtamccaattttgcacatttactttaattgtgagtatcaactactaaatttcattaatccttctcttgacacccgtataattttacataatttccaatttctgtcaattcttaatttactgaacttcattccattgactaaataatgagctttgagaaaaaaaatacataatccaaagcattatcttaaagtaatatggttttttcctgcgtgaattttgtatatacactaagagaaaaaaaaatctaataaaatgtttttaaagtggaaaaaatttaaatatcatcaaaataattaaaacgctagtccatattagacctatgctatttaccaaagaaaggcttgctcaaatatttcctccctggcaagtgtcttaactttaagacacttttcattttccccaattataaaataagaatagtaatcgaattagtcaagggtttgtggaatgcaattcaaattagtttaggtacaaaaaggcttattaccacagcttcgtgaaaagtgccaaagatagcaccggttcactcaggcggtgtccgtgagctcagacgagggtgctctccatcactcacgcccgctctccaacgctcacgcccgctctccatcactcacgcctcttttcccgggatgagcttcatttccaggcagaggccgtaatatgtgaggtcc

SEQ ID NO: 717964 - DNA, 859 bp, Homo sapiens
ttgcttatttgtacactcgaatatttaccaatagtgtaaagtgagaatgggcgtatttttcttttttattaacccataagtccgtttgtctttcatgttcaatctttgtaatttagaatgcagccaatatagaggagatacattttttgttttactttcctgaaagctagtgctctctcgtggtaaagtacccaattttgcacatttactttaattgtgagtatcaactactaaatttcattaatccttctcttgacacccgtataattttacataatttccaatttctgtcaattcttaatttamtgaacttcattccattgactaaataatgagctttgagaaaaaaaatacataatccaaagcattatcttaaagtaatatggttttttcctgcgtgaattttgtatatacactaagagaaaaaaaaatctaataaaatgtttttaaagtggaaaaaatttaaatatcatcaaaataattaaaacgctagtccatattagacctatgctatttaccaaagaaaggcttgctcaaatatttcctccctggcaagtgtcttaactttaagacacttttcattttccccaattataaaataagaatagtaatcgaattagtcaagggtttgtggaatgcaattcaaattagtttaggtacaaaaaggcttattaccacagcttcgtgaaaagtgccaaagatagcaccggttcactcaggcggtgtccgtgagctcagacgagggtgctctccatcactcacgcccgctctccaacgctcacgcccgctctccatcactcacgcctcttttcccgggatgagcttcatttccaggcagaggccgtaatatgtgaggtcc

SEQ ID NO: 717965 - DNA, 595 bp, Homo sapiens
tttaattcactttaactaggattatatttgggtttctttgagacggagtcttgcgctgttgcccagaatggagtgtcatggcactatctcagcttactgcaacctctgcttcccgggttcaagcaattctcctgcctcagcctcccaagtagttgggattacaggcacacgaccccacgcccagctaatttttgtatttttagtagagccagggtttcaccatgttggccaggctagtctcaaactcctgaccttgtgatccgcccacgtcggcctcccaaagtgctgagattacaggcatgagccaccacgccagccracctatctgggtgtcttaaattgatacataataaatggacatattattggggtacacgtgatattttgatacacccatataacgtgtgaaagtcaaatcagggtaattaggatatttattacattaatctttttatgctaggcactttcaaattattctcttgcagcaattttgaaatgagcataactttaaagctgctcacacatactcacaacccctgtgaaagtcgttgataacttttccaactcagatctgtgaataagcatcttaatatgt

SEQ ID NO: 717966 - DNA, 595 bp, Homo sapiens
tttaattcactttaactaggattatatttgggtttctttgagacggagtcttgcgctgttgcccagaatggagtgtcatggcactatctcagcttactgcaacctctgcttcccgggttcaagcaattctcctgcctcagcctcccaagtagttgggattacaggcacacgaccccacgcccagctaatttttgtatttttagtagagccagggtttcaccatgttggccaggctagtctcaaactcctgaccttgtgatccgcccacgtcggcctcccaaagtgctgagattacaggcatgagccaccacgccagccgacctatctgggtgtcttaaattgatacataataaatggacatattattggggtacacgtgatattttgatacacccatataaygtgtgaaagtcaaatcagggtaattaggatatttattacattaatctttttatgctaggcactttcaaattattctcttgcagcaattttgaaatgagcataactttaaagctgctcacacatactcacaacccctgtgaaagtcgttgataacttttccaactcagatctgtgaataagcatcttaatatgt

SEQ ID NO: 717967 - DNA, 689 bp, Homo sapiens
gtgtgtaacattagatattagaatcataatatatttgtctagccacaaatgtatttgaacaatgttaaaatgatgcttgcggcatgtatttcttcctaaggcttctgtttaagaaagtctgggctgggcgcagtggctcacgcctgtaatcccagtactttgggaggctgaggcgcgtggatcacctgaggccaggagttcgagaccaacctggccaacatggagaaacmccatctctactaaaaatacaaaaattagccaggtgtggtggcggtcgccgtaatcctagctactcgggagactgaggcaggagaatcacttgaacctaggaggcagaggctgcagtgagccaagattgcgccattgcactccagcctgggcaacaagagcgaaactctgtctcaaaaaaaaaaaaaaaaaatggtgcttgtctatctgacaggcacaatacaaatattaatttgttcaaaccttataatagccttttaaagacagcattattatatatcatccttgataagaaaactgagacgctgagcacagttggccaatatctcctgactaataactgactgaactgggatttgaaccccacctatttcattccagattctgtgttctcaaccactatcctctgctacctctccagtatatactactaataaaaatattttctgaatatgctgaca

SEQ ID NO: 717968 - DNA, 689 bp, Homo sapiens
gtgtgtaacattagatattagaatcataatatatttgtctagccacaaatgtatttgaacaatgttaaaatgatgcttgcggcatgtatttcttcctaaggcttctgtttaagaaagtctgggctgggcgcagtggctcacgcctgtaatcccagtactttgggaggctgaggcgcgtggatcacctgaggccaggagttcgagaccaacctggccaacatggagaaacaccatctctactaaaaatacaaaaattagccaggtgtggtggcggtcgccgtaatcctagctactcgggagactgaggcaggagaatcacttgaacctaggaggcagaggctgcagtgagccaagattgcgccattgcactccagcctgggcaacaagagcraaactctgtctcaaaaaaaaaaaaaaaaaatggtgcttgtctatctgacaggcacaatacaaatattaatttgttcaaaccttataatagccttttaaagacagcattattatatatcatccttgataagaaaactgagacgctgagcacagttggccaatatctcctgactaataactgactgaactgggatttgaaccccacctatttcattccagattctgtgttctcaaccactatcctctgctacctctccagtatatactactaataaaaatattttctgaatatgctgaca

SEQ ID NO: 717969 - DNA, 3094 bp, Homo sapiens
tgattgtgaggcttcctcagccttgtggaactgtgagttctccattaaacttctatcctttgaaaattgcccagtctcggatatgtctttatcagcagcatgaaaacaractaatacacaatactacaaagaggaaaagaaagagaaagaagaagtgaagaaagatgaggaagaggaggaaatagaaaatatcagaatatttacatgtagtaaggactagtgttattttgtgaaacctctgtttcaattgtgtttatgtgtgcttgtactgggttaccatataaactaagtttctttctatgagttgcaataaaataattttgaaagccaagactaataaaaatttaaataatccaactcttgttaatcatttagtttggcatctttgcttactgtttttgttttgtttttctttaaattacctgagagggtaggtatttgttgtatatgcatatccatggaattcacacatgcgtgatgtggatctccatgaatgcccgtagaaactttttggtgtttctcagacctatgattcatccaattaccaagttgtatagttatccattagcaagttagatcatactaaataataatcagatgtatttacataggttatttagggcaactaatagtctaaaatagaccagcactgtctcacagaactttctgtgatgatggaaacattctatatctgcacattcaatatggtagcctcaagccacatgtagctctttagtacttgaaatgtacctagtgtgactgaggacctgtattgtaaatttaaatttaattagttaaaatttaagtagctgtacatgagcagtggctaccatgttggacagcataactctaaattctagaattagtattttgaaaaacagatggctatatttcttgttttccagactagacagtcaattggtctgatagaattattttattctggcatcgctcactgaagagtgagaagagctaacattccattggctgggcagggcttacttttcttggtccagagtattactagagacaaatgacccaacttctacatgtagaattttaagttcttatccccacttatttctggtttttcatattgaaaattgcttgatgcaagttatttgaactatatggattaaaagctataataattatttgataattataatagtaactataataacaataatacggatctatgtcctcacccaatctcatgctgaaatgtaatctcaggtgctggaggtggagtctgtgggaggtgattggatcatgggggcagagttctcacgaatggtttggcaccctcccccttggtattgtatagtgagtgagttctcatgagacctggttgtttgaaagtacgtagcaccttccccctcgctgtcttcctcctgctcccagtcacgtgaagtgctggctcctgctttgccttctgccatgattgttacctgaggcctccccagaagcagaggacatggtgccaggctttctgtacagcctgaaaaactgtgagccaattacacctcttttctttataaattaccctatctcaggtatttctttatagaagtgcaagaagagactaacactagaaataataaaagtaatgaaaatagcagcaagaatagcagacacttaataagtgcttactatgtacccagcactgtgataagccctttgtataccttattccacttattcttcacaatcatcctatgagataagagagatattatcctatatgaggaaactgatgtttgtaaaggttaagtaacttacaaggtcactcaggtagtgactgaatgagccagaatgtgaatcccattctgtcaggtttaaagtcccttgtggtaaccactatggcattcctacagggtgtgaatcagttagtttttccatcaatccattgtttccttgataaaaacatgtccaagatgaattactagtgactgcgctaggactagggcctgggtcctgtgattctgatgtgggtactccccactgccacactcttattataaatttatcattaatgctatttcggccacatttgcaggtgcatgctggtgggcttcattgggaccaagagtttcactcttgttgcccaggctggagtgcaatggcgcgatctccgcctcccaggttcaagtgcttctcctgcctcatccttccgagtagctgggattacaggcatgcgccaccatgcccggctaattttgtatttttagtagagacagggtttctccatgttagtcaggcggtctcaaactcctgacctcaggtgatccacccgcctcagcctcccaaagtgctgggattagaggcgtgagccaccgtgccagatcaaagtggggaatttttaaaaacagagaaattacaaaaatgaaaacagacattgacagaagagaagttagaagtaagtaagcaatttgcaattttgaagcgacccagcaagaaaggcaggcgaagtagagaaacaaaaagcaaaacccacggtgggcctaaaagcaaacttcctttctctttgtaactgacgttgggtgcagagctgaactctacagtccagaggccatctgaggccatcaatccaagccctgcactgctgccatgaccagtgggactgacacatgtgggacaatggcagaatgcagcctgagaaacgaggggttcctgtctcagcaagggctgcatttcctctgctttcttttcacaaagctgctactcacatcaaagtgggtccctgtgacccacgatgcccacagcctaaactcagagccctctctcccatctcagtctcaggccttttttgcagttgtttcaaccacttatctttagggactagatcttatgcccaaatttatagataatttctatgtttattagggtgtgcgttattttctggtttaatgtgtatagccagttggcgccagctgatgttttcccctcttaatatcacatcctcaagcacttgaaaaacaaaaaaaggagaaattatttttaaaaatgcatatgcacacaaacatatatatgtatacactgaatatgaatatattgaatataaagatattatgtaggcatacttacatacaca

SEQ ID NO: 717970 - DNA, 3094 bp, Homo sapiens
tgattgtgaggcttcctcagccttgtggaactgtgagttctccattaaacttctatcctttgaaaattgcccagtctcggatatgtctttatcagcagcatgaaaacagactaatacacaatactacaaagaggaaaagaaagagaaagaagaagtgaagaaagatgaggaagaggaggaaatagaaaatatcagaatatttacatgtagtaaggactagtgttattttgtgaaacctctgtttcaattgygtttatgtgtgcttgtactgggttaccatataaactaagtttctttctatgagttgcaataaaataattttgaaagccaagactaataaaaatttaaataatccaactcttgttaatcatttagtttggcatctttgcttactgtttttgttttgtttttctttaaattacctgagagggtaggtatttgttgtatatgcatatccatggaattcacacatgcgtgatgtggatctccatgaatgcccgtagaaactttttggtgtttctcagacctatgattcatccaattaccaagttgtatagttatccattagcaagttagatcatactaaataataatcagatgtatttacataggttatttagggcaactaatagtctaaaatagaccagcactgtctcacagaactttctgtgatgatggaaacattctatatctgcacattcaatatggtagcctcaagccacatgtagctctttagtacttgaaatgtacctagtgtgactgaggacctgtattgtaaatttaaatttaattagttaaaatttaagtagctgtacatgagcagtggctaccatgttggacagcataactctaaattctagaattagtattttgaaaaacagatggctatatttcttgttttccagactagacagtcaattggtctgatagaattattttattctggcatcgctcactgaagagtgagaagagctaacattccattggctgggcagggcttacttttcttggtccagagtattactagagacaaatgacccaacttctacatgtagaattttaagttcttatccccacttatttctggtttttcatattgaaaattgcttgatgcaagttatttgaactatatggattaaaagctataataattatttgataattataatagtaactataataacaataatacggatctatgtcctcacccaatctcatgctgaaatgtaatctcaggtgctggaggtggagtctgtgggaggtgattggatcatgggggcagagttctcacgaatggtttggcaccctcccccttggtattgtatagtgagtgagttctcatgagacctggttgtttgaaagtacgtagcaccttccccctcgctgtcttcctcctgctcccagtcacgtgaagtgctggctcctgctttgccttctgccatgattgttacctgaggcctccccagaagcagaggacatggtgccaggctttctgtacagcctgaaaaactgtgagccaattacacctcttttctttataaattaccctatctcaggtatttctttatagaagtgcaagaagagactaacactagaaataataaaagtaatgaaaatagcagcaagaatagcagacacttaataagtgcttactatgtacccagcactgtgataagccctttgtataccttattccacttattcttcacaatcatcctatgagataagagagatattatcctatatgaggaaactgatgtttgtaaaggttaagtaacttacaaggtcactcaggtagtgactgaatgagccagaatgtgaatcccattctgtcaggtttaaagtcccttgtggtaaccactatggcattcctacagggtgtgaatcagttagtttttccatcaatccattgtttccttgataaaaacatgtccaagatgaattactagtgactgcgctaggactagggcctgggtcctgtgattctgatgtgggtactccccactgccacactcttattataaatttatcattaatgctatttcggccacatttgcaggtgcatgctggtgggcttcattgggaccaagagtttcactcttgttgcccaggctggagtgcaatggcgcgatctccgcctcccaggttcaagtgcttctcctgcctcatccttccgagtagctgggattacaggcatgcgccaccatgcccggctaattttgtatttttagtagagacagggtttctccatgttagtcaggcggtctcaaactcctgacctcaggtgatccacccgcctcagcctcccaaagtgctgggattagaggcgtgagccaccgtgccagatcaaagtggggaatttttaaaaacagagaaattacaaaaatgaaaacagacattgacagaagagaagttagaagtaagtaagcaatttgcaattttgaagcgacccagcaagaaaggcaggcgaagtagagaaacaaaaagcaaaacccacggtgggcctaaaagcaaacttcctttctctttgtaactgacgttgggtgcagagctgaactctacagtccagaggccatctgaggccatcaatccaagccctgcactgctgccatgaccagtgggactgacacatgtgggacaatggcagaatgcagcctgagaaacgaggggttcctgtctcagcaagggctgcatttcctctgctttcttttcacaaagctgctactcacatcaaagtgggtccctgtgacccacgatgcccacagcctaaactcagagccctctctcccatctcagtctcaggccttttttgcagttgtttcaaccacttatctttagggactagatcttatgcccaaatttatagataatttctatgtttattagggtgtgcgttattttctggtttaatgtgtatagccagttggcgccagctgatgttttcccctcttaatatcacatcctcaagcacttgaaaaacaaaaaaaggagaaattatttttaaaaatgcatatgcacacaaacatatatatgtatacactgaatatgaatatattgaatataaagatattatgtaggcatacttacatacaca

SEQ ID NO: 717971 - DNA, 3094 bp, Homo sapiens
tgattgtgaggcttcctcagccttgtggaactgtgagttctccattaaacttctatcctttgaaaattgcccagtctcggatatgtctttatcagcagcatgaaaacagactaatacacaatactacaaagaggaaaagaaagagaaagaagaagtgaagaaagatgaggaagaggaggaaatagaaaatatcagaatatttacatgtagtaaggactagtgttattttgtgaaacctctgtttcaattgtgtttatgtgtgcttgtactgggttaccatataaactaagtttctttctatgagttgcaataaaataattttgaaagccaagactaataaaaatttaaataatccaactcttgttaatcatttagtttggcatctttgcttactgtttttgttttgtttttctttaaattacctgagagggtaggtatttgttgtatatgcatatccatggaattcacacatgcgtgatgtgratctccatgaatgcccgtagaaactttttggtgtttctcagacctatgattcatccaattaccaagttgtatagttatccattagcaagttagatcatactaaataataatcagatgtatttacataggttatttagggcaactaatagtctaaaatagaccagcactgtctcacagaactttctgtgatgatggaaacattctatatctgcacattcaatatggtagcctcaagccacatgtagctctttagtacttgaaatgtacctagtgtgactgaggacctgtattgtaaatttaaatttaattagttaaaatttaagtagctgtacatgagcagtggctaccatgttggacagcataactctaaattctagaattagtattttgaaaaacagatggctatatttcttgttttccagactagacagtcaattggtctgatagaattattttattctggcatcgctcactgaagagtgagaagagctaacattccattggctgggcagggcttacttttcttggtccagagtattactagagacaaatgacccaacttctacatgtagaattttaagttcttatccccacttatttctggtttttcatattgaaaattgcttgatgcaagttatttgaactatatggattaaaagctataataattatttgataattataatagtaactataataacaataatacggatctatgtcctcacccaatctcatgctgaaatgtaatctcaggtgctggaggtggagtctgtgggaggtgattggatcatgggggcagagttctcacgaatggtttggcaccctcccccttggtattgtatagtgagtgagttctcatgagacctggttgtttgaaagtacgtagcaccttccccctcgctgtcttcctcctgctcccagtcacgtgaagtgctggctcctgctttgccttctgccatgattgttacctgaggcctccccagaagcagaggacatggtgccaggctttctgtacagcctgaaaaactgtgagccaattacacctcttttctttataaattaccctatctcaggtatttctttatagaagtgcaagaagagactaacactagaaataataaaagtaatgaaaatagcagcaagaatagcagacacttaataagtgcttactatgtacccagcactgtgataagccctttgtataccttattccacttattcttcacaatcatcctatgagataagagagatattatcctatatgaggaaactgatgtttgtaaaggttaagtaacttacaaggtcactcaggtagtgactgaatgagccagaatgtgaatcccattctgtcaggtttaaagtcccttgtggtaaccactatggcattcctacagggtgtgaatcagttagtttttccatcaatccattgtttccttgataaaaacatgtccaagatgaattactagtgactgcgctaggactagggcctgggtcctgtgattctgatgtgggtactccccactgccacactcttattataaatttatcattaatgctatttcggccacatttgcaggtgcatgctggtgggcttcattgggaccaagagtttcactcttgttgcccaggctggagtgcaatggcgcgatctccgcctcccaggttcaagtgcttctcctgcctcatccttccgagtagctgggattacaggcatgcgccaccatgcccggctaattttgtatttttagtagagacagggtttctccatgttagtcaggcggtctcaaactcctgacctcaggtgatccacccgcctcagcctcccaaagtgctgggattagaggcgtgagccaccgtgccagatcaaagtggggaatttttaaaaacagagaaattacaaaaatgaaaacagacattgacagaagagaagttagaagtaagtaagcaatttgcaattttgaagcgacccagcaagaaaggcaggcgaagtagagaaacaaaaagcaaaacccacggtgggcctaaaagcaaacttcctttctctttgtaactgacgttgggtgcagagctgaactctacagtccagaggccatctgaggccatcaatccaagccctgcactgctgccatgaccagtgggactgacacatgtgggacaatggcagaatgcagcctgagaaacgaggggttcctgtctcagcaagggctgcatttcctctgctttcttttcacaaagctgctactcacatcaaagtgggtccctgtgacccacgatgcccacagcctaaactcagagccctctctcccatctcagtctcaggccttttttgcagttgtttcaaccacttatctttagggactagatcttatgcccaaatttatagataatttctatgtttattagggtgtgcgttattttctggtttaatgtgtatagccagttggcgccagctgatgttttcccctcttaatatcacatcctcaagcacttgaaaaacaaaaaaaggagaaattatttttaaaaatgcatatgcacacaaacatatatatgtatacactgaatatgaatatattgaatataaagatattatgtaggcatacttacatacaca

SEQ ID NO: 717972 - DNA, 3094 bp, Homo sapiens
tgattgtgaggcttcctcagccttgtggaactgtgagttctccattaaacttctatcctttgaaaattgcccagtctcggatatgtctttatcagcagcatgaaaacagactaatacacaatactacaaagaggaaaagaaagagaaagaagaagtgaagaaagatgaggaagaggaggaaatagaaaatatcagaatatttacatgtagtaaggactagtgttattttgtgaaacctctgtttcaattgtgtttatgtgtgcttgtactgggttaccatataaactaagtttctttctatgagttgcaataaaataattttgaaagccaagactaataaaaatttaaataatccaactcttgttaatcatttagtttggcatctttgcttactgtttttgttttgtttttctttaaattacctgagagggtaggtatttgttgtatatgcatatccatggaattcacacatgcgtgatgtggatctccatgaatgyccgtagaaactttttggtgtttctcagacctatgattcatccaattaccaagttgtatagttatccattagcaagttagatcatactaaataataatcagatgtatttacataggttatttagggcaactaatagtctaaaatagaccagcactgtctcacagaactttctgtgatgatggaaacattctatatctgcacattcaatatggtagcctcaagccacatgtagctctttagtacttgaaatgtacctagtgtgactgaggacctgtattgtaaatttaaatttaattagttaaaatttaagtagctgtacatgagcagtggctaccatgttggacagcataactctaaattctagaattagtattttgaaaaacagatggctatatttcttgttttccagactagacagtcaattggtctgatagaattattttattctggcatcgctcactgaagagtgagaagagctaacattccattggctgggcagggcttacttttcttggtccagagtattactagagacaaatgacccaacttctacatgtagaattttaagttcttatccccacttatttctggtttttcatattgaaaattgcttgatgcaagttatttgaactatatggattaaaagctataataattatttgataattataatagtaactataataacaataatacggatctatgtcctcacccaatctcatgctgaaatgtaatctcaggtgctggaggtggagtctgtgggaggtgattggatcatgggggcagagttctcacgaatggtttggcaccctcccccttggtattgtatagtgagtgagttctcatgagacctggttgtttgaaagtacgtagcaccttccccctcgctgtcttcctcctgctcccagtcacgtgaagtgctggctcctgctttgccttctgccatgattgttacctgaggcctccccagaagcagaggacatggtgccaggctttctgtacagcctgaaaaactgtgagccaattacacctcttttctttataaattaccctatctcaggtatttctttatagaagtgcaagaagagactaacactagaaataataaaagtaatgaaaatagcagcaagaatagcagacacttaataagtgcttactatgtacccagcactgtgataagccctttgtataccttattccacttattcttcacaatcatcctatgagataagagagatattatcctatatgaggaaactgatgtttgtaaaggttaagtaacttacaaggtcactcaggtagtgactgaatgagccagaatgtgaatcccattctgtcaggtttaaagtcccttgtggtaaccactatggcattcctacagggtgtgaatcagttagtttttccatcaatccattgtttccttgataaaaacatgtccaagatgaattactagtgactgcgctaggactagggcctgggtcctgtgattctgatgtgggtactccccactgccacactcttattataaatttatcattaatgctatttcggccacatttgcaggtgcatgctggtgggcttcattgggaccaagagtttcactcttgttgcccaggctggagtgcaatggcgcgatctccgcctcccaggttcaagtgcttctcctgcctcatccttccgagtagctgggattacaggcatgcgccaccatgcccggctaattttgtatttttagtagagacagggtttctccatgttagtcaggcggtctcaaactcctgacctcaggtgatccacccgcctcagcctcccaaagtgctgggattagaggcgtgagccaccgtgccagatcaaagtggggaatttttaaaaacagagaaattacaaaaatgaaaacagacattgacagaagagaagttagaagtaagtaagcaatttgcaattttgaagcgacccagcaagaaaggcaggcgaagtagagaaacaaaaagcaaaacccacggtgggcctaaaagcaaacttcctttctctttgtaactgacgttgggtgcagagctgaactctacagtccagaggccatctgaggccatcaatccaagccctgcactgctgccatgaccagtgggactgacacatgtgggacaatggcagaatgcagcctgagaaacgaggggttcctgtctcagcaagggctgcatttcctctgctttcttttcacaaagctgctactcacatcaaagtgggtccctgtgacccacgatgcccacagcctaaactcagagccctctctcccatctcagtctcaggccttttttgcagttgtttcaaccacttatctttagggactagatcttatgcccaaatttatagataatttctatgtttattagggtgtgcgttattttctggtttaatgtgtatagccagttggcgccagctgatgttttcccctcttaatatcacatcctcaagcacttgaaaaacaaaaaaaggagaaattatttttaaaaatgcatatgcacacaaacatatatatgtatacactgaatatgaatatattgaatataaagatattatgtaggcatacttacatacaca

SEQ ID NO: 717973 - DNA, 3094 bp, Homo sapiens
tgattgtgaggcttcctcagccttgtggaactgtgagttctccattaaacttctatcctttgaaaattgcccagtctcggatatgtctttatcagcagcatgaaaacagactaatacacaatactacaaagaggaaaagaaagagaaagaagaagtgaagaaagatgaggaagaggaggaaatagaaaatatcagaatatttacatgtagtaaggactagtgttattttgtgaaacctctgtttcaattgtgtttatgtgtgcttgtactgggttaccatataaactaagtttctttctatgagttgcaataaaataattttgaaagccaagactaataaaaatttaaataatccaactcttgttaatcatttagtttggcatctttgcttactgtttttgttttgtttttctttaaattacctgagagggtaggtatttgttgtatatgcatatccatggaattcacacatgcgtgatgtggatctccatgaatgcccgtagaaactttttggtgtttctcagacctatgattcatccaattaccaagttgtatagttatccattagcaagttagatcatactaaataataatcagatgtatttacataggttatttagggcaactaatagtctaaaatagaccagcactgtctcacagaactttctgtgatgatggaaacattctatatctgcacattcaatatggtagcctcaagccacatgtagctctttagtacttgaaatgtacctagtgtgactgaggacctgtattgtaaatttaaatttaattagttaaaatttaagtagctgtacatgagcagtggctaccatgttggacagcataactctaaattctagaattagtattttgaaaaacagatggctatatttcttgttttccagactagacagtcaattggtctgatagaattattttattctggcatcgctcactgaagagtgagaagagctaacattccattggctgggcagggcttacttttcttggtccagagtattactagagacaaatgacccaacttctacatgtagaattttaagttcttatccccacttatttctggtttttcatattgaaaattgcttgatgcaarttatttgaactatatggattaaaagctataataattatttgataattataatagtaactataataacaataatacggatctatgtcctcacccaatctcatgctgaaatgtaatctcaggtgctggaggtggagtctgtgggaggtgattggatcatgggggcagagttctcacgaatggtttggcaccctcccccttggtattgtatagtgagtgagttctcatgagacctggttgtttgaaagtacgtagcaccttccccctcgctgtcttcctcctgctcccagtcacgtgaagtgctggctcctgctttgccttctgccatgattgttacctgaggcctccccagaagcagaggacatggtgccaggctttctgtacagcctgaaaaactgtgagccaattacacctcttttctttataaattaccctatctcaggtatttctttatagaagtgcaagaagagactaacactagaaataataaaagtaatgaaaatagcagcaagaatagcagacacttaataagtgcttactatgtacccagcactgtgataagccctttgtataccttattccacttattcttcacaatcatcctatgagataagagagatattatcctatatgaggaaactgatgtttgtaaaggttaagtaacttacaaggtcactcaggtagtgactgaatgagccagaatgtgaatcccattctgtcaggtttaaagtcccttgtggtaaccactatggcattcctacagggtgtgaatcagttagtttttccatcaatccattgtttccttgataaaaacatgtccaagatgaattactagtgactgcgctaggactagggcctgggtcctgtgattctgatgtgggtactccccactgccacactcttattataaatttatcattaatgctatttcggccacatttgcaggtgcatgctggtgggcttcattgggaccaagagtttcactcttgttgcccaggctggagtgcaatggcgcgatctccgcctcccaggttcaagtgcttctcctgcctcatccttccgagtagctgggattacaggcatgcgccaccatgcccggctaattttgtatttttagtagagacagggtttctccatgttagtcaggcggtctcaaactcctgacctcaggtgatccacccgcctcagcctcccaaagtgctgggattagaggcgtgagccaccgtgccagatcaaagtggggaatttttaaaaacagagaaattacaaaaatgaaaacagacattgacagaagagaagttagaagtaagtaagcaatttgcaattttgaagcgacccagcaagaaaggcaggcgaagtagagaaacaaaaagcaaaacccacggtgggcctaaaagcaaacttcctttctctttgtaactgacgttgggtgcagagctgaactctacagtccagaggccatctgaggccatcaatccaagccctgcactgctgccatgaccagtgggactgacacatgtgggacaatggcagaatgcagcctgagaaacgaggggttcctgtctcagcaagggctgcatttcctctgctttcttttcacaaagctgctactcacatcaaagtgggtccctgtgacccacgatgcccacagcctaaactcagagccctctctcccatctcagtctcaggccttttttgcagttgtttcaaccacttatctttagggactagatcttatgcccaaatttatagataatttctatgtttattagggtgtgcgttattttctggtttaatgtgtatagccagttggcgccagctgatgttttcccctcttaatatcacatcctcaagcacttgaaaaacaaaaaaaggagaaattatttttaaaaatgcatatgcacacaaacatatatatgtatacactgaatatgaatatattgaatataaagatattatgtaggcatacttacatacaca

SEQ ID NO: 717974 - DNA, 3094 bp, Homo sapiens
tgattgtgaggcttcctcagccttgtggaactgtgagttctccattaaacttctatcctttgaaaattgcccagtctcggatatgtctttatcagcagcatgaaaacagactaatacacaatactacaaagaggaaaagaaagagaaagaagaagtgaagaaagatgaggaagaggaggaaatagaaaatatcagaatatttacatgtagtaaggactagtgttattttgtgaaacctctgtttcaattgtgtttatgtgtgcttgtactgggttaccatataaactaagtttctttctatgagttgcaataaaataattttgaaagccaagactaataaaaatttaaataatccaactcttgttaatcatttagtttggcatctttgcttactgtttttgttttgtttttctttaaattacctgagagggtaggtatttgttgtatatgcatatccatggaattcacacatgcgtgatgtggatctccatgaatgcccgtagaaactttttggtgtttctcagacctatgattcatccaattaccaagttgtatagttatccattagcaagttagatcatactaaataataatcagatgtatttacataggttatttagggcaactaatagtctaaaatagaccagcactgtctcacagaactttctgtgatgatggaaacattctatatctgcacattcaatatggtagcctcaagccacatgtagctctttagtacttgaaatgtacctagtgtgactgaggacctgtattgtaaatttaaatttaattagttaaaatttaagtagctgtacatgagcagtggctaccatgttggacagcataactctaaattctagaattagtattttgaaaaacagatggctatatttcttgttttccagactagacagtcaattggtctgatagaattattttattctggcatcgctcactgaagagtgagaagagctaacattccattggctgggcagggcttacttttcttggtccagagtattactagagacaaatgacccaacttctacatgtagaattttaagttcttatccccacttatttctggtttttcatattgaaaattgcttgatgcaagttatttgaactatatggattaaaagctataataattatttgataattataatagtaactataataacaataatayggatctatgtcctcacccaatctcatgctgaaatgtaatctcaggtgctggaggtggagtctgtgggaggtgattggatcatgggggcagagttctcacgaatggtttggcaccctcccccttggtattgtatagtgagtgagttctcatgagacctggttgtttgaaagtacgtagcaccttccccctcgctgtcttcctcctgctcccagtcacgtgaagtgctggctcctgctttgccttctgccatgattgttacctgaggcctccccagaagcagaggacatggtgccaggctttctgtacagcctgaaaaactgtgagccaattacacctcttttctttataaattaccctatctcaggtatttctttatagaagtgcaagaagagactaacactagaaataataaaagtaatgaaaatagcagcaagaatagcagacacttaataagtgcttactatgtacccagcactgtgataagccctttgtataccttattccacttattcttcacaatcatcctatgagataagagagatattatcctatatgaggaaactgatgtttgtaaaggttaagtaacttacaaggtcactcaggtagtgactgaatgagccagaatgtgaatcccattctgtcaggtttaaagtcccttgtggtaaccactatggcattcctacagggtgtgaatcagttagtttttccatcaatccattgtttccttgataaaaacatgtccaagatgaattactagtgactgcgctaggactagggcctgggtcctgtgattctgatgtgggtactccccactgccacactcttattataaatttatcattaatgctatttcggccacatttgcaggtgcatgctggtgggcttcattgggaccaagagtttcactcttgttgcccaggctggagtgcaatggcgcgatctccgcctcccaggttcaagtgcttctcctgcctcatccttccgagtagctgggattacaggcatgcgccaccatgcccggctaattttgtatttttagtagagacagggtttctccatgttagtcaggcggtctcaaactcctgacctcaggtgatccacccgcctcagcctcccaaagtgctgggattagaggcgtgagccaccgtgccagatcaaagtggggaatttttaaaaacagagaaattacaaaaatgaaaacagacattgacagaagagaagttagaagtaagtaagcaatttgcaattttgaagcgacccagcaagaaaggcaggcgaagtagagaaacaaaaagcaaaacccacggtgggcctaaaagcaaacttcctttctctttgtaactgacgttgggtgcagagctgaactctacagtccagaggccatctgaggccatcaatccaagccctgcactgctgccatgaccagtgggactgacacatgtgggacaatggcagaatgcagcctgagaaacgaggggttcctgtctcagcaagggctgcatttcctctgctttcttttcacaaagctgctactcacatcaaagtgggtccctgtgacccacgatgcccacagcctaaactcagagccctctctcccatctcagtctcaggccttttttgcagttgtttcaaccacttatctttagggactagatcttatgcccaaatttatagataatttctatgtttattagggtgtgcgttattttctggtttaatgtgtatagccagttggcgccagctgatgttttcccctcttaatatcacatcctcaagcacttgaaaaacaaaaaaaggagaaattatttttaaaaatgcatatgcacacaaacatatatatgtatacactgaatatgaatatattgaatataaagatattatgtaggcatacttacatacaca

SEQ ID NO: 717975 - DNA, 3094 bp, Homo sapiens
tgattgtgaggcttcctcagccttgtggaactgtgagttctccattaaacttctatcctttgaaaattgcccagtctcggatatgtctttatcagcagcatgaaaacagactaatacacaatactacaaagaggaaaagaaagagaaagaagaagtgaagaaagatgaggaagaggaggaaatagaaaatatcagaatatttacatgtagtaaggactagtgttattttgtgaaacctctgtttcaattgtgtttatgtgtgcttgtactgggttaccatataaactaagtttctttctatgagttgcaataaaataattttgaaagccaagactaataaaaatttaaataatccaactcttgttaatcatttagtttggcatctttgcttactgtttttgttttgtttttctttaaattacctgagagggtaggtatttgttgtatatgcatatccatggaattcacacatgcgtgatgtggatctccatgaatgcccgtagaaactttttggtgtttctcagacctatgattcatccaattaccaagttgtatagttatccattagcaagttagatcatactaaataataatcagatgtatttacataggttatttagggcaactaatagtctaaaatagaccagcactgtctcacagaactttctgtgatgatggaaacattctatatctgcacattcaatatggtagcctcaagccacatgtagctctttagtacttgaaatgtacctagtgtgactgaggacctgtattgtaaatttaaatttaattagttaaaatttaagtagctgtacatgagcagtggctaccatgttggacagcataactctaaattctagaattagtattttgaaaaacagatggctatatttcttgttttccagactagacagtcaattggtctgatagaattattttattctggcatcgctcactgaagagtgagaagagctaacattccattggctgggcagggcttacttttcttggtccagagtattactagagacaaatgacccaacttctacatgtagaattttaagttcttatccccacttatttctggtttttcatattgaaaattgcttgatgcaagttatttgaactatatggattaaaagctataataattatttgataattataatagtaactataataacaataatacggatctatgtcctcacccaatctcatgctgaaatgtaatctcaggtgctggaggtggagtctgtgggaggtgaytggatcatgggggcagagttctcacgaatggtttggcaccctcccccttggtattgtatagtgagtgagttctcatgagacctggttgtttgaaagtacgtagcaccttccccctcgctgtcttcctcctgctcccagtcacgtgaagtgctggctcctgctttgccttctgccatgattgttacctgaggcctccccagaagcagaggacatggtgccaggctttctgtacagcctgaaaaactgtgagccaattacacctcttttctttataaattaccctatctcaggtatttctttatagaagtgcaagaagagactaacactagaaataataaaagtaatgaaaatagcagcaagaatagcagacacttaataagtgcttactatgtacccagcactgtgataagccctttgtataccttattccacttattcttcacaatcatcctatgagataagagagatattatcctatatgaggaaactgatgtttgtaaaggttaagtaacttacaaggtcactcaggtagtgactgaatgagccagaatgtgaatcccattctgtcaggtttaaagtcccttgtggtaaccactatggcattcctacagggtgtgaatcagttagtttttccatcaatccattgtttccttgataaaaacatgtccaagatgaattactagtgactgcgctaggactagggcctgggtcctgtgattctgatgtgggtactccccactgccacactcttattataaatttatcattaatgctatttcggccacatttgcaggtgcatgctggtgggcttcattgggaccaagagtttcactcttgttgcccaggctggagtgcaatggcgcgatctccgcctcccaggttcaagtgcttctcctgcctcatccttccgagtagctgggattacaggcatgcgccaccatgcccggctaattttgtatttttagtagagacagggtttctccatgttagtcaggcggtctcaaactcctgacctcaggtgatccacccgcctcagcctcccaaagtgctgggattagaggcgtgagccaccgtgccagatcaaagtggggaatttttaaaaacagagaaattacaaaaatgaaaacagacattgacagaagagaagttagaagtaagtaagcaatttgcaattttgaagcgacccagcaagaaaggcaggcgaagtagagaaacaaaaagcaaaacccacggtgggcctaaaagcaaacttcctttctctttgtaactgacgttgggtgcagagctgaactctacagtccagaggccatctgaggccatcaatccaagccctgcactgctgccatgaccagtgggactgacacatgtgggacaatggcagaatgcagcctgagaaacgaggggttcctgtctcagcaagggctgcatttcctctgctttcttttcacaaagctgctactcacatcaaagtgggtccctgtgacccacgatgcccacagcctaaactcagagccctctctcccatctcagtctcaggccttttttgcagttgtttcaaccacttatctttagggactagatcttatgcccaaatttatagataatttctatgtttattagggtgtgcgttattttctggtttaatgtgtatagccagttggcgccagctgatgttttcccctcttaatatcacatcctcaagcacttgaaaaacaaaaaaaggagaaattatttttaaaaatgcatatgcacacaaacatatatatgtatacactgaatatgaatatattgaatataaagatattatgtaggcatacttacatacaca

SEQ ID NO: 717976 - DNA, 3094 bp, Homo sapiens
tgattgtgaggcttcctcagccttgtggaactgtgagttctccattaaacttctatcctttgaaaattgcccagtctcggatatgtctttatcagcagcatgaaaacagactaatacacaatactacaaagaggaaaagaaagagaaagaagaagtgaagaaagatgaggaagaggaggaaatagaaaatatcagaatatttacatgtagtaaggactagtgttattttgtgaaacctctgtttcaattgtgtttatgtgtgcttgtactgggttaccatataaactaagtttctttctatgagttgcaataaaataattttgaaagccaagactaataaaaatttaaataatccaactcttgttaatcatttagtttggcatctttgcttactgtttttgttttgtttttctttaaattacctgagagggtaggtatttgttgtatatgcatatccatggaattcacacatgcgtgatgtggatctccatgaatgcccgtagaaactttttggtgtttctcagacctatgattcatccaattaccaagttgtatagttatccattagcaagttagatcatactaaataataatcagatgtatttacataggttatttagggcaactaatagtctaaaatagaccagcactgtctcacagaactttctgtgatgatggaaacattctatatctgcacattcaatatggtagcctcaagccacatgtagctctttagtacttgaaatgtacctagtgtgactgaggacctgtattgtaaatttaaatttaattagttaaaatttaagtagctgtacatgagcagtggctaccatgttggacagcataactctaaattctagaattagtattttgaaaaacagatggctatatttcttgttttccagactagacagtcaattggtctgatagaattattttattctggcatcgctcactgaagagtgagaagagctaacattccattggctgggcagggcttacttttcttggtccagagtattactagagacaaatgacccaacttctacatgtagaattttaagttcttatccccacttatttctggtttttcatattgaaaattgcttgatgcaagttatttgaactatatggattaaaagctataataattatttgataattataatagtaactataataacaataatacggatctatgtcctcacccaatctcatgctgaaatgtaatctcaggtgctggaggtggagtctgtgggaggtgattggatcatgggggcagagttctcacgaatggtttggcaccctcccccttggtattgtatagtgagtgagttctcatgagacctggttgtttgaaagtacgtagcaccttccccctcgctgtcttcctcctgctcccagtcamgtgaagtgctggctcctgctttgccttctgccatgattgttacctgaggcctccccagaagcagaggacatggtgccaggctttctgtacagcctgaaaaactgtgagccaattacacctcttttctttataaattaccctatctcaggtatttctttatagaagtgcaagaagagactaacactagaaataataaaagtaatgaaaatagcagcaagaatagcagacacttaataagtgcttactatgtacccagcactgtgataagccctttgtataccttattccacttattcttcacaatcatcctatgagataagagagatattatcctatatgaggaaactgatgtttgtaaaggttaagtaacttacaaggtcactcaggtagtgactgaatgagccagaatgtgaatcccattctgtcaggtttaaagtcccttgtggtaaccactatggcattcctacagggtgtgaatcagttagtttttccatcaatccattgtttccttgataaaaacatgtccaagatgaattactagtgactgcgctaggactagggcctgggtcctgtgattctgatgtgggtactccccactgccacactcttattataaatttatcattaatgctatttcggccacatttgcaggtgcatgctggtgggcttcattgggaccaagagtttcactcttgttgcccaggctggagtgcaatggcgcgatctccgcctcccaggttcaagtgcttctcctgcctcatccttccgagtagctgggattacaggcatgcgccaccatgcccggctaattttgtatttttagtagagacagggtttctccatgttagtcaggcggtctcaaactcctgacctcaggtgatccacccgcctcagcctcccaaagtgctgggattagaggcgtgagccaccgtgccagatcaaagtggggaatttttaaaaacagagaaattacaaaaatgaaaacagacattgacagaagagaagttagaagtaagtaagcaatttgcaattttgaagcgacccagcaagaaaggcaggcgaagtagagaaacaaaaagcaaaacccacggtgggcctaaaagcaaacttcctttctctttgtaactgacgttgggtgcagagctgaactctacagtccagaggccatctgaggccatcaatccaagccctgcactgctgccatgaccagtgggactgacacatgtgggacaatggcagaatgcagcctgagaaacgaggggttcctgtctcagcaagggctgcatttcctctgctttcttttcacaaagctgctactcacatcaaagtgggtccctgtgacccacgatgcccacagcctaaactcagagccctctctcccatctcagtctcaggccttttttgcagttgtttcaaccacttatctttagggactagatcttatgcccaaatttatagataatttctatgtttattagggtgtgcgttattttctggtttaatgtgtatagccagttggcgccagctgatgttttcccctcttaatatcacatcctcaagcacttgaaaaacaaaaaaaggagaaattatttttaaaaatgcatatgcacacaaacatatatatgtatacactgaatatgaatatattgaatataaagatattatgtaggcatacttacatacaca

SEQ ID NO: 717977 - DNA, 3094 bp, Homo sapiens
tgattgtgaggcttcctcagccttgtggaactgtgagttctccattaaacttctatcctttgaaaattgcccagtctcggatatgtctttatcagcagcatgaaaacagactaatacacaatactacaaagaggaaaagaaagagaaagaagaagtgaagaaagatgaggaagaggaggaaatagaaaatatcagaatatttacatgtagtaaggactagtgttattttgtgaaacctctgtttcaattgtgtttatgtgtgcttgtactgggttaccatataaactaagtttctttctatgagttgcaataaaataattttgaaagccaagactaataaaaatttaaataatccaactcttgttaatcatttagtttggcatctttgcttactgtttttgttttgtttttctttaaattacctgagagggtaggtatttgttgtatatgcatatccatggaattcacacatgcgtgatgtggatctccatgaatgcccgtagaaactttttggtgtttctcagacctatgattcatccaattaccaagttgtatagttatccattagcaagttagatcatactaaataataatcagatgtatttacataggttatttagggcaactaatagtctaaaatagaccagcactgtctcacagaactttctgtgatgatggaaacattctatatctgcacattcaatatggtagcctcaagccacatgtagctctttagtacttgaaatgtacctagtgtgactgaggacctgtattgtaaatttaaatttaattagttaaaatttaagtagctgtacatgagcagtggctaccatgttggacagcataactctaaattctagaattagtattttgaaaaacagatggctatatttcttgttttccagactagacagtcaattggtctgatagaattattttattctggcatcgctcactgaagagtgagaagagctaacattccattggctgggcagggcttacttttcttggtccagagtattactagagacaaatgacccaacttctacatgtagaattttaagttcttatccccacttatttctggtttttcatattgaaaattgcttgatgcaagttatttgaactatatggattaaaagctataataattatttgataattataatagtaactataataacaataatacggatctatgtcctcacccaatctcatgctgaaatgtaatctcaggtgctggaggtggagtctgtgggaggtgattggatcatgggggcagagttctcacgaatggtttggcaccctcccccttggtattgtatagtgagtgagttctcatgagacctggttgtttgaaagtacgtagcaccttccccctcgctgtcttcctcctgctcccagtcacgtgaagtgctggctcctgctttgccttctgccatgattgttacctgaggcctccccagaagcagaggacatggtgccaggctttctgtacagcctgaaaaactgtgagccaattacacctcttttctttataaattaccctrtctcaggtatttctttatagaagtgcaagaagagactaacactagaaataataaaagtaatgaaaatagcagcaagaatagcagacacttaataagtgcttactatgtacccagcactgtgataagccctttgtataccttattccacttattcttcacaatcatcctatgagataagagagatattatcctatatgaggaaactgatgtttgtaaaggttaagtaacttacaaggtcactcaggtagtgactgaatgagccagaatgtgaatcccattctgtcaggtttaaagtcccttgtggtaaccactatggcattcctacagggtgtgaatcagttagtttttccatcaatccattgtttccttgataaaaacatgtccaagatgaattactagtgactgcgctaggactagggcctgggtcctgtgattctgatgtgggtactccccactgccacactcttattataaatttatcattaatgctatttcggccacatttgcaggtgcatgctggtgggcttcattgggaccaagagtttcactcttgttgcccaggctggagtgcaatggcgcgatctccgcctcccaggttcaagtgcttctcctgcctcatccttccgagtagctgggattacaggcatgcgccaccatgcccggctaattttgtatttttagtagagacagggtttctccatgttagtcaggcggtctcaaactcctgacctcaggtgatccacccgcctcagcctcccaaagtgctgggattagaggcgtgagccaccgtgccagatcaaagtggggaatttttaaaaacagagaaattacaaaaatgaaaacagacattgacagaagagaagttagaagtaagtaagcaatttgcaattttgaagcgacccagcaagaaaggcaggcgaagtagagaaacaaaaagcaaaacccacggtgggcctaaaagcaaacttcctttctctttgtaactgacgttgggtgcagagctgaactctacagtccagaggccatctgaggccatcaatccaagccctgcactgctgccatgaccagtgggactgacacatgtgggacaatggcagaatgcagcctgagaaacgaggggttcctgtctcagcaagggctgcatttcctctgctttcttttcacaaagctgctactcacatcaaagtgggtccctgtgacccacgatgcccacagcctaaactcagagccctctctcccatctcagtctcaggccttttttgcagttgtttcaaccacttatctttagggactagatcttatgcccaaatttatagataatttctatgtttattagggtgtgcgttattttctggtttaatgtgtatagccagttggcgccagctgatgttttcccctcttaatatcacatcctcaagcacttgaaaaacaaaaaaaggagaaattatttttaaaaatgcatatgcacacaaacatatatatgtatacactgaatatgaatatattgaatataaagatattatgtaggcatacttacatacaca

SEQ ID NO: 717978 - DNA, 628 bp, Homo sapiens
ctgagtataatcagttatattttttttctaagcaactgtaacaaacatagggaaagctgaaatacatctttagatctatgttggaaggcactggagaaatattaaggcagtgaagattcaaggggtcaacatgccaagagaaagaaatccagagcagtgagcytcaaataccacactgctttactttttgaggcttttgtaaattcacaattagtatgaatccaaacagaaagcagtggactaagaggatgggaagatgagcagagctgctagtactcttacgcaggtcaaatgataaaagctaaggttatggcccatcaaatatgaggggccctggtagccactacagatattcagttgtgatggccaaaggattaagagtgaaatagattagcctgtaaaaatactgaagccctgttttgaaacagctcaaccccagattgggttaggtttacttaccttgaatatcactgcctgccagaatcaatgtaaattccctcaagagtacatcatccagtgatgcaaattatttcacagtgtgttctgcataatgtccagcaatccattaaaaagtaagcagtcctatgaatataagacccaatacatgaaaaagaaaagaccaaataac

SEQ ID NO: 717979 - DNA, 624 bp, Homo sapiens
aaatgctaaatctttgttggagaaatagctgtaccagctcccccaaagcactatgaaatactctatctacatcaagctgaaatttattttacaataactatttgcttttagacgtaaactaaacaattcactccaacaatacatgctattaatttgctaagaatgttagagggacacacacatactaataatctgccacaaaaaaaagaaagcatttcttctgatttcagattataataattgcttggttattttgtttyagtaaacaaaatacttcaaatttataagttaatgagtctgtttgcaaacacgttataaaatatattttctagctttgaatttttcaattctatgttaaaatgctgttttaatttttgtcttttctccaaatagccatcttatctcttttcaggaaatctgctgatttcagaaatatttaagatacttgttaatctgaaaggggctccacagtttaattatatccaatcttaggtaatactcttgtacagctacagtgaaaaaatcattaatctttctagagtgagtctgacatatccccaaataaaagatttacttgaggattgtctccttaaaaatcatagtatcacagagtttatagtacca

SEQ ID NO: 717980 - DNA, 1343 bp, Homo sapiens
cttcccaagagagctgcacagattgtcttatctgtttatgcggtctgggttatctatgctcgaaaatactctaagtacattctggctgagaggaaagttaccagcttttaaggtaaagtttgatggaattgtttatggaaaaaataaatgtgcaggacattcatttacttaaacaagaaattttatgttttcaggaaacacagttaaaggtgaaatgtttgggaatctttgaaaactattgactagaacaaaagactttattgaccctttaggaatgtgtctgattctacaaaggatgaactgaaatgtctgttttgccattatccattaatatgatcataaggccatattgtgatacccatacaaatcaagcctgaaattcatatttttattcctggcaatgactcagactgccagaattgaaaacattcttacaaggtttttggatgacactaagctatatctttatatgacagacatagatttacatatgctttttcttttaaataactcacatacatttttattttattttatatttagaaaaaggaagaaagtcacctgctggatgttcaactgcagagaagaacaagtagtcaaagcctggtgtggcataggaaaagaaaggacaggatttggaatcaaacttgtgttccagcatgtctctgccacttcccacacattcttcatctcttctagctattttgaaatatataacaaattattaactataatttccctactgtactatcaaatactagaaattattccttccacataactgtatttttgtatccattaaccaacatctcttgacttcaaggaatgaaccaaatcagttcccaaatgtgcacaaaaacagatcccttggttctagttttctcttttcttttctaggcttacctaacatatgaaggtaaataggatcaaaacccaaatgggtatagagtgctaatggtttctgttaatgttaatattcatcatcgtgagtagcctgagacaagggatactcagccratgccaaaaatagaacgagcttgtctttaccaaacagcagcattacattttagagcctcatcccaggcacatggttaatactaaagatgccaaccacatcaggaagaggctggataaagggagagctcttgtaattctatccttggaataacatccatttaaaattaaagaatagtttaaaaattaaactctaagatgcaatataaacattcctatgataaggaaattttgtagtctggaagaaatttttaagatatgttttaaaaaatgattatggccacatcaatttaaattagattgggtaatagaaaactcagctttgttca

SEQ ID NO: 717981 - DNA, 1000 bp, Homo sapiens
aaatagtagaaaaggaagactccaaattttaataatgtcaacaagacatttttgattcttatctgaagtatgtgaatatatgaacagttttcacaattatgtgcaggtttgggatttgggatacagcatcactgaaacatctcaatcrgtaacatccagaataaactacagcactgccaaaactccaagcatattaatctacattcttgtgaacatactcctgtgccagaaattctcctgaagggaacaaaatatacctgctgcatgcacttcagtaaggtctgcagtgatgtcctctcctattcaaaacaaacatttaagatacatttgttcctttgtccttacccttcactctaccatttattagagattatgataggcagaaaggttgtcttaaatgtgatcaactaggagcaatgtggagtttgtaaaactccagctgattcagctaaatcaggttggcttatctcgtgaactatgcattattagttggagatataagcattttctgcaaacctcagtttctatttccgggctgctgtttgaccttgcatattagaattagatttgcaacttttgcaaatatacaggcatttctcttactgtgtgtagcatggtgacaaaaaatagtttgtgtagtgctaggcacagaacccatatgttctgcttataaaagcaggaagtttgtatgtgctttctttttatttataatgggtccttctacatttgcttataatatacttcattttccttctttattttcacagttattacacacatagtttattaaagcagagttttagctgttctctggtgccttaaatctgtattagaaccaggttgggtataaataataaaacccaaaatcggctggttgctctgtttaagtgttttttcccttctgattattctgcttatggtctaaaatgtttctttatctaggtatttttggttctagaaccacttattgatttatattgcttagaatatggagttgact

SEQ ID NO: 717982 - DNA, 963 bp, Homo sapiens
atgtatagtgcacatttatttccatgtttaatactagaagtgttttggtcttgagaagtttggtaggccaggtacaatggctgatgcctgaaatcccagcactttttgaggctaaggcaggaggatcacttgagcctgggaggtcaaagctacagtgagtatgccatgattccagcaccgcattccagcctgggtaacagagtgagacagaagaagaaagaagaaagaagaagaagaagaggaggaggaggaggaggaggaggaagaggaggaagaggaggaggaaaaagaagaagttgtagtagtagttgttgctgttgtttggygatgtttttgtgagtagaaacttaattcctgtttgtaatcattagcctatggtaaaattcattgccttacaggtcattttgcttaaaattgcagtttctaagaacgagtgggcaatgccgactgaggacttaccgtacagctgtgcacatgcactcactggcatggaaaccattgcattatttgagcttaggattcctatattttttcaattctgggattttttttctagagtttctttgaatttctcttcctctccattcttttaattttctccatctgtatcacctgtaagacaaccgttgcaacttctcaatctgtcttccacttagcttttcttttatcctgtccagctccacccaccaccacctttttctgctggattctaggagagttcctcagtttcctcttctagaataaatctatagagtgtataaatattaactcaccacccacagttggaggagctgttatggttttgatttcataggcagggaagtatcttgatggtttatcgtgctctgggccaggccaccctgctggttgcagtagagcttgtttgactatcttgtcccaagccctctgcacttccacccactccctccctctttccagaatttgggagcaggctcagaaaat

SEQ ID NO: 717983 - DNA, 963 bp, Homo sapiens
atgtatagtgcacatttatttccatgtttaatactagaagtgttttggtcttgagaagtttggtaggccaggtacaatggctgatgcctgaaatcccagcactttttgaggctaaggcaggaggatcacttgagcctgggaggtcaaagctacagtgagtatgccatgattccagcaccgcattccagcctgggtaacagagtgagacagaagaagaaagaagaaagaagaagaagaagaggaggaggaggaggaggaggaggaagaggaggaagaggaggaggaaaaagaagaagttgtagtagtagttgttgctgttgtttggtgatgtttttgtgagtagaaacttaattcctgtttgtaatcattagcctatggtaaaattcattgccttacaggtcattttgcttaaaattgcagtttctaagaacgagtgggcaatgccgactgaggacttaccgtacagctgtgcacatgcactcactggcatggaaaccattgcattatttgagcttaggattcctatattttttcaattctgggattttttttctagagtttctttgaatttctcttcctctccattcttttaattttctccatctgtatcaccygtaagacaaccgttgcaacttctcaatctgtcttccacttagcttttcttttatcctgtccagctccacccaccaccacctttttctgctggattctaggagagttcctcagtttcctcttctagaataaatctatagagtgtataaatattaactcaccacccacagttggaggagctgttatggttttgatttcataggcagggaagtatcttgatggtttatcgtgctctgggccaggccaccctgctggttgcagtagagcttgtttgactatcttgtcccaagccctctgcacttccacccactccctccctctttccagaatttgggagcaggctcagaaaat

SEQ ID NO: 717984 - DNA, 647 bp, Homo sapiens
ggggtcctgggtcctagaaccctaggtatttgctaagtcatcagaataggtatatatttaatttaccaaaccgttttctaaagtggttgtcctattttacaccctcaccagctatgtatgagagttccaggccaggcatggtggcttatgcctgtaatcccagcactgtctgagaggccgaggtgggaggattgcctgagctcagcctgggccaacatggtgaaaccctgtctctacaaaaaatacaaaaattagctgggtgtggtratgtgtgcctgtaattccagctacttgggaggctgaggcaggaagatcgcttgaaccaagagtctgaggctgcagtgaactatgattgcaccactgcactccagcctggacaacacagcacaaccctgcctcaaaaaaaataaataaataaaaacaaaaaaacaaacaaacaacaacaaaagaaaaaaaacaccaaaaaccaatattaaggaatcttccaatcaatgaacatgatatatctctctgtttgacttagggcttccttaatttttcttagcaatgctttgtagttcttggtgcagacactttacaaagctttccttatcttaaatcctacgtgtgttatgtttctggatattagggtttttggcttttgtata

SEQ ID NO: 717985 - DNA, 647 bp, Homo sapiens
ggggtcctgggtcctagaaccctaggtatttgctaagtcatcagaataggtatatatttaatttaccaaaccgttttctaaagtggttgtcctattttacaccctcaccagctatgtatgagagttccaggccaggcatggtggcttatgcctgtaatcccagcactgtctgagaggccgaggtgggaggattgcctgagctcagcctgggccaacatggtgaaaccctgtctctacaaaaaatacaaaaattagctgggtgtggtgatgtgtgcctgtaatyccagctacttgggaggctgaggcaggaagatcgcttgaaccaagagtctgaggctgcagtgaactatgattgcaccactgcactccagcctggacaacacagcacaaccctgcctcaaaaaaaataaataaataaaaacaaaaaaacaaacaaacaacaacaaaagaaaaaaaacaccaaaaaccaatattaaggaatcttccaatcaatgaacatgatatatctctctgtttgacttagggcttccttaatttttcttagcaatgctttgtagttcttggtgcagacactttacaaagctttccttatcttaaatcctacgtgtgttatgtttctggatattagggtttttggcttttgtata

SEQ ID NO: 717986 - DNA, 647 bp, Homo sapiens
ggggtcctgggtcctagaaccctaggtatttgctaagtcatcagaataggtatatatttaatttaccaaaccgttttctaaagtggttgtcctattttacaccctcaccagctatgtatgagagttccaggccaggcatggtggcttatgcctgtaatcccagcactgtctgagaggccgaggtgggaggattgcctgagctcagcctgggccaacatggtgaaaccctgtctctacaaaaaatacaaaaattagctgggtgtggtgatgtgtgcctgtaattccagctacttgggaggctgaggcaggaagatcgcttgarccaagagtctgaggctgcagtgaactatgattgcaccactgcactccagcctggacaacacagcacaaccctgcctcaaaaaaaataaataaataaaaacaaaaaaacaaacaaacaacaacaaaagaaaaaaaacaccaaaaaccaatattaaggaatcttccaatcaatgaacatgatatatctctctgtttgacttagggcttccttaatttttcttagcaatgctttgtagttcttggtgcagacactttacaaagctttccttatcttaaatcctacgtgtgttatgtttctggatattagggtttttggcttttgtata

SEQ ID NO: 717987 - DNA, 647 bp, Homo sapiens
ggggtcctgggtcctagaaccctaggtatttgctaagtcatcagaataggtatatatttaatttaccaaaccgttttctaaagtggttgtcctattttacaccctcaccagctatgtatgagagttccaggccaggcatggtggcttatgcctgtaatcccagcactgtctgagaggccgaggtgggaggattgcctgagctcagcctgggccaacatggtgaaaccctgtctctacaaaaaatacaaaaattagctgggtgtggtgatgtgtgcctgtaattccagctacttgggaggctgaggcaggaagatcgcttgaaccaagagtctgaggctgcagtgaactatgattgcaccactgcactccagcctgracaacacagcacaaccctgcctcaaaaaaaataaataaataaaaacaaaaaaacaaacaaacaacaacaaaagaaaaaaaacaccaaaaaccaatattaaggaatcttccaatcaatgaacatgatatatctctctgtttgacttagggcttccttaatttttcttagcaatgctttgtagttcttggtgcagacactttacaaagctttccttatcttaaatcctacgtgtgttatgtttctggatattagggtttttggcttttgtata

SEQ ID NO: 717988 - DNA, 647 bp, Homo sapiens
ggggtcctgggtcctagaaccctaggtatttgctaagtcatcagaataggtatatatttaatttaccaaaccgttttctaaagtggttgtcctattttacaccctcaccagctatgtatgagagttccaggccaggcatggtggcttatgcctgtaatcccagcactgtctgagaggccgaggtgggaggattgcctgagctcagcctgggccaacatggtgaaaccctgtctctacaaaaaatacaaaaattagctgggtgtggtgatgtgtgcctgtaattccagctacttgggaggctgaggcaggaagatcgcttgaaccaagagtctgaggctgcagtgaactatgattgcaccactgcactccagcctggacaacacagcacaaccctgyctcaaaaaaaataaataaataaaaacaaaaaaacaaacaaacaacaacaaaagaaaaaaaacaccaaaaaccaatattaaggaatcttccaatcaatgaacatgatatatctctctgtttgacttagggcttccttaatttttcttagcaatgctttgtagttcttggtgcagacactttacaaagctttccttatcttaaatcctacgtgtgttatgtttctggatattagggtttttggcttttgtata

SEQ ID NO: 717989 - DNA, 1826 bp, Homo sapiens
  misc_feature 1735: n = A,T,C or G
aatgtgcctctgttgctaggctacatatgactgtatattcaagaacatggttaaatcatctcattgtacttagccagtgctacagcaaatatttattgaaataagctcacctcctaatgggatttataactagttttattaaataggaatttccattgaaatagcatttgctacttagggtttcaccagcaaacaatataatctctcatccaggaatttagatcttaagtgaatttgaaagggacatatcagatacatagtagatatagtaatataacaataatacacattgatcatgatttgggtgaattctctcagttgctctctctctttctctctctctctgtcactctatttcttctctcctctctctctctctctgtcttattcttcagtttgtgaatgtgcacatgtagaaacttaggaatctgtatgtgaatggttgttaaggtagcttgtcttgagagtttctttactacagcaatgactgataaaggatcactgccaaattgtggacacaaacacaaaaagagacaaaattagagagcaagagacaaaataaaatcgaagaaccagtgacaccaggtctactagggctgaattaccaaggaaaggatagcagttcaacacatttgcttcaagtctaccgcccagtagcctggagtaaatacactgggctattctcttttccttttcccaaataggatcrgggggtgaactttttatttatagaagaaaatagttacaggaaacagaagaggtggttagaatgcagtctgtaaccttagcccaaattttccctctttattctcagagaaagtcatatatatatggagatagagagagagagagagcaggagagagaaagagaaagaggattccttgtacttttttttcctattttctgcctaccaaaattttgacaatcctttttccttgaactatatctttttatttgaatcagatgttgattaatgttttcttttgatatgtttcaatcaattctcagatgtgcttcttctagtagggtttctgcattttcactgatttatgatttatatgctctactaatcctcatgatgaataatctgtcaaaaaccactcatatatagtacttgtcagacaagcaaaaatattttaagtgaaagaaaatcaaaacaatcagtaccactttaacatttatgggttcatgtaatacttggatgaagactgtgtgtgtatacgtatgcatatatatacatatacctgcatatattcatatgtatatgcatgtacacatacaaaactgtgtgtgtgttagtgtaaaaccctgcaaccaaatcttctgttgtatttttttggctgattaaaatttattatgcactactggcctcaacttctaaattatcaacattggtgaaatataaaccagcaagggggtattcagtaactcaacttaaaagagtcggatgacactggatgcctttgcagtgttgttctagcaatatctagaaaattcctgcctttgactctgtgtcacaaatgaccagtgatgcatatagagaatgtggtcacaaagaagtacaagaaatttgaaaacagaaaaaaattgagaatgatctacctaaccactggtgtattcatgatagtctctttatatacaaacataacacataaaaataatacgcatgcctgaaacacagttggcagtcaataaattctacttagggaagacgattttatagaagataggatnacagcgaatatgagccagacctgggatcaaatcttagttcaaaatctcttaatttatgtaactttgggcaatttatacactatctataatg

SEQ ID NO: 717990 - DNA, 1985 bp, Homo sapiens
tagaaacttcaacaacaacaaagatttgagtaaatttgtattagtgaaagctcagaaaatcagaaattatttatgaattacatggaagacatacattagtttactaactggtcatcaaaaacaactgcagtggtggtaagacaacttccctagttaaaattacagaaaacttccctggttaaaattacagaaaacttccctggttaaaattactgatttggggatcaacacatttcttgactgacagtttctttggattggtatgtatacaataccagagtaattttttgaaaaatgaacacattgcaaacatttgcttacgtggtgatcataaagttaaagattttgacatacttctactcacttaatattttgactgatacattcactcagaaatctaaaatcatatagattaaaaattgaaaataaaggctaataacaggagtagaataaaaagaaagtataatatctcagttgtgttgctgaattcagttttttcattttttttaagatgctaccaattagagtctagatatttgtagatattcattttggctgaatcaattcatatctctcaataagctaaatttgactaaaaaaattctatgtgaattatctttgccatatcaccaataatgggccccaaggcattgtcagtattctaattattgctagtttacctttctctacaacgaaggagatgaagaaggaagttctgcagaactacgcaaaatcacatggcaacttcattccattatcatccaatcaagctattgattaataaaggtcaatgtgtggggtgaaataatctaaacaaccaactggggcttttggttgcaagcaatagaaaataaatctcgatgatttaagcagtcaacaggaaggtaagagaattatactcagaaaatagtatgaaaatgggagttaaagtcacagcacacattcagcccactgagaccatcactgctgccatggttgaattttacaagccagagatgcagtgccatggccgcaagctctgaatcccaggtgtgttctctgccactcctttgaaaagacattccttcctttgagacatataaacctagttagaatgcagggtaagcctactggattggtgaagccatttgcccaatccatttatttctttcttttttgggtggaagaggagggggttatgaacaacgcagatttatttcccacagctctggaggctgggaagtccaagatcaaggcaataacagattggatatgtggtgagaacctgcttcctggttcatagatagctgtcttctctctgtgttctcagaggggagaaggggtgagggagctccctggggtctctttcataaagacactgatcccattcagaagcacttcactctcacgattgatcacttcctaaaggccccaccttcaaataccatcaccttggggaataggtttcaacccatgaattttgggggacacaaatattcagtccatagcagtgagtgaagtccatttttctgatatttcgaaattgtattgctttactgaacatatccagtgagaaaagtgaaggatttaataataataatagaatcaaaataayacattctggaacctaatgtgttcttatttttcagtggactctaatattttattttcttcttttgttaacttttattttaggtttgggagtacatgtgcaggtttgttacataagtaaacttgtgtcagaggggtttgttgtatagattatttcatcaaccaagtattaagcctcatatccaatggttattttttatactcctctccctcctcccaccctctaccctcaagtagaccccagtgtgtgttgttcccttctttgtgttcaggagttcttatcatttatcttccacctataactgtgaatatgcagtatttggttttctcttcctgtgttagttcatcaaggataatggcctccagctccatccatgttcctggatggaagacat

SEQ ID NO: 717991 - DNA, 1368 bp, Homo sapiens
ttttttattaagttcctcaatataatatttttaagtcaactattgaatataaggctagacagtctcaaagatgcaattatcccaaattcagagccaaggtatttaacaaggcatatgtatttataaggattgattgaggtatttgatcagataaatatattaaattttctccccacaagatttgggaggaaaaagtcaacacagttacttcattaataagttttctacacacacacacacacacacacacacacacacaaacaccacattgctgcttcctaattcattctaaagatttgcattatgctagtttaaacccaagagtagtatcagtagctaaaatgaaattattaggggcattgtggctataattcatatgtttctggtttagtgaattttcatcattctaaaatgtctgaccataatagaaaatgattgcataatttttctttaaaamtgtctcttcagttcattggacacatatagcttcatcctttcatacccatttgaaagtagttcagaaaaagtcacaaagaaatttacaccaatttggaaaatgtcaagtacatttaatattatgtttgacagctgataagcatatttcttcatgcaatttctttattttctttcttcagatatgaaggcttttcctcacattaatatgtagactaggcatccattaaatagaccaggcttgtgacttctttgtaataaacatatatcttggattctaaattctctgttccctttgagtcacctgatgattctttcttgtcatatctttttcatggcccatcccaaaacttctctggctgttcctgccttaggagcgtcagggatcttaatagcatatctcaaatgattgtgtattggtccctttacccaatctctacccctcctttctactagattgttctagagatcagtactcctgtctctaagcagctcacaatctaagaaaaacaaaaatacagctatcatagaatatagatagttgtatttatgaatatgttcagagaatatagaatataacttagtgactttttaaaaagtgctttggtatccggatgaaaaattgtttgactgcatcaaggacatgggaatgtctgcatattgtggatgtcattgtagctgggccttgagttatgagacgagtgtgttagaaaaggcaattcacacagcagctgaagcaaaattttccaaacaagaaaaagcacagactcggcatagagtgagaagtatttcactgattgtagactttatcacatagaatgtaaggggaggggagctacagcaagtaatcggtgctggaaagggaggaagaggccaggctggaagagaaattgaatgaataatgaggagttttgg

SEQ ID NO: 717992 - DNA, 891 bp, Homo sapiens
taagacaatatcaccaaaaatgaagtaacagacatagccattagactgggattgacaggaagagccttaataatccttttactttcacagaattttacaaagcaatttccaaagtaccaaatcttttagccttatgactctgtgaagtgttattatacccaattatacaaatgacaactgagcctcagaaaggttacatttaggtagcaggtggcaaaaccaagccaggaaattagcatcccctggaacacagcatcctcatactccttcccacatttctctgctaggcaggatgggagtcgaaaaagtatgattgcaaaagtggaaattagttgctgaatgttataacaagataatttgaagctgggggatagaatggatcatataacttctagaatcattaatagttagagaaccaaagaatttgtttgaataaaagcaccaagataacactaaataatataacagggtctatataaataaagaaatagccattatttcaatgcattaatacctgagactggcatatttatrtgtatagatttctttatttttatttttatttttttctttatttttatttaaaagattgatcttctgaggaattcctccaaagccccccaatcaaaggttttcatcataattgatgtgatgtgatcatcttatgtgaaacatcataaataagcaaaaacattagaggaaaatatatgttttgaggggtggattgtttagtgctataattatttgctttggaccctagtcttagagttcttaaaggcctctaaatggagcttgcatggaacagacaaacaaaacatagcatccccagtgagcaattccccatattttctcatcaaatcttgtgcaaaatgccatgtagaggggatttgc

SEQ ID NO: 717993 - DNA, 891 bp, Homo sapiens
taagacaatatcaccaaaaatgaagtaacagacatagccattagactgggattgacaggaagagccttaataatccttttactttcacagaattttacaaagcaatttccaaagtaccaaatcttttagccttatgactctgtgaagtgttattatacccaattatacaaatgacaactgagcctcagaaaggttacatttaggtagcaggtggcaaaaccaagccaggaaattagcatcccctggaacacagcatcctcatactccttcccacatttctctgctaggcaggatgggagtcgaaaaagtatgattgcaaaagtggaaattagttgctgaatgttataacaagataatttgaagctgggggatagaatggatcatataacttctagaatcattaatagttagagaaccaaagaatttgtttgaataaaagcaccaagataacactaaataatataacagggtctatataaataaagaaatagccattatttcaatgcattaatacctgagactggcatatttatatgyatagatttctttatttttatttttatttttttctttatttttatttaaaagattgatcttctgaggaattcctccaaagccccccaatcaaaggttttcatcataattgatgtgatgtgatcatcttatgtgaaacatcataaataagcaaaaacattagaggaaaatatatgttttgaggggtggattgtttagtgctataattatttgctttggaccctagtcttagagttcttaaaggcctctaaatggagcttgcatggaacagacaaacaaaacatagcatccccagtgagcaattccccatattttctcatcaaatcttgtgcaaaatgccatgtagaggggatttgc

SEQ ID NO: 717994 - DNA, 891 bp, Homo sapiens
taagacaatatcaccaaaaatgaagtaacagacatagccattagactgggattgacaggaagagccttaataatccttttactttcacagaattttacaaagcaatttccaaagtaccaaatcttttagccttatgactctgtgaagtgttattatacccaattatacaaatgacaactgagcctcagaaaggttacatttaggtagcaggtggcaaaaccaagccaggaaattagcatcccctggaacacagcatcctcatactccttcccacatttctctgctaggcaggatgggagtcgaaaaagtatgattgcaaaagtggaaattagttgctgaatgttataacaagataatttgaagctgggggatagaatggatcatataacttctagaatcattaatagttagagaaccaaagaatttgtttgaataaaagcaccaagataacactaaataatataacagggtctatataaataaagaaatagccattatttcaatgcattaatacctgagactggcatatttatatgtatagatttctttwtttttatttttatttttttctttatttttatttaaaagattgatcttctgaggaattcctccaaagccccccaatcaaaggttttcatcataattgatgtgatgtgatcatcttatgtgaaacatcataaataagcaaaaacattagaggaaaatatatgttttgaggggtggattgtttagtgctataattatttgctttggaccctagtcttagagttcttaaaggcctctaaatggagcttgcatggaacagacaaacaaaacatagcatccccagtgagcaattccccatattttctcatcaaatcttgtgcaaaatgccatgtagaggggatttgc

SEQ ID NO: 717995 - DNA, 601 bp, Homo sapiens
ttttacatcataggcagtgtctgccttcacggcgaacatgggtttccaagtctcctagcagctatttagcctcagaataggtccgttaataacagcacaaattctttcttccatccattctcacaggtacagtggtaatctcaactttttagagtcggaaggaaactcmgaagacattctagttcaactttctcattttacaggttagagaggatatatgatttgttcaaggccatacagttagtttagtgctgaaggagagtaaaacccaggcttacaagttctcaatagtgttgccaaatgtatttgtttctatttcaaatatgccaaatgtatgtttattctattttgaaaggaccagttagccaaatattattctagtttttgaaaaaatgataaagtgccatgttaaacagaaaactgtgaagtcataccactttttttttaattaaaaaaaatagaggtcgggcatggtggcttatgcctgtaatcccagcactttgggagcccgaggtgggtgaatcacttgaagtcaggagtttgtgaccattctggccaacatggtgaaaccccgtctctactaaaaaatacaaaaattagc

SEQ ID NO: 717996 - DNA, 601 bp, Homo sapiens
ttttacatcataggcagtgtctgccttcacggcgaacatgggtttccaagtctcctagcagctatttagcctcagaataggtccgttaataacagcacaaattctttcttccatccattctcacaggtacagtggtaatctcaactttttagagtcggaaggaaactccgaagacattctagttcaactttctcattttacaggttagagaggatatatgatttgttcaaggccatacagttagtttagtgctgaaggagagtaaaacccaggcttacaagttctcaatagtgttgccaaatgtatttgtttctatttcaaatatgccaaatgtatgtttattctattttgaaaggaccagttagccaaatattattctagtttttgaaaaaatgataaagygccatgttaaacagaaaactgtgaagtcataccactttttttttaattaaaaaaaatagaggtcgggcatggtggcttatgcctgtaatcccagcactttgggagcccgaggtgggtgaatcacttgaagtcaggagtttgtgaccattctggccaacatggtgaaaccccgtctctactaaaaaatacaaaaattagc

SEQ ID NO: 717997 - DNA, 1103 bp, Homo sapiens
taaaatatagttctttcaattcttcctgtgtatttgttgcacgcaaagtaacaatctttcgcatctattttagagctagttaaatatagctagttttagaggaatagccacataggggtaaaaactccttattctccagtgattatctggaaagaactctcaagtattaagataaaaaaatagaaagttcataagtagcaattaattagctactacttattgtcagagagcagttaaagcttccaactcatagccaggctgattattaaagagctatacgattagagtaattgaaactgtgcaggtgaaatggaaagttagtggcctccaaaagtcatgaaaaaccaacactgaacttacactaactatggaagaatagcagtacgatcccaagggatgtgtatttctttgaaccattgttttaactggctagaggaagtttgtgtttagaattttattagcttatcattttgggttggaaatttttgttctatagccgcaatgcagaccagcctgcaatgccaccaccgtttctatccttgcttgtctgctttggtagctttttcccttggattttccagagggtagaacagagggcagcccggtgttagggtcctgataatgggagggaaaatgttccaaatattctaaatggggcaactgcttctacacttgggtcagctggaaaactcttccagcttcatagtgtatttgttagcttgcttgctttctgtttgtcattctcagattctccacaaatattcatcctgcgtttctaacccccatgttttctctcgctcaacacaggctcatatttgaaccagaaggtcatctagtacaaatttctcacatgcttgatgaggagcctgaggtgtgagtagggtggcggctctcaggttacagaaaggggtgkctgtccagtggagctgtgtcccagcactgctcatggtggcccagtaatacttgcaagccagtgttctttctgtgaccatccaactcccaacttctgcttttcatttccttcctctatccctataaacatcccctacacccagaaacgcgccccgctatgcgcgcgcacacacacacacacacacactctc

SEQ ID NO: 717998 - DNA, 612 bp, Homo sapiens
atctctattttcactgagttaaagaagatctcaaaagtgtataaggaaattgttcagtgtaattgaygtactaattatatttattttaattttactttcatggtaatacagatgtaaaaacttgttaaattttatatatgtgcagtttattgaacattatttataccttaatttttttaaaactactagaggcaaaagtttgtgtacgcagcattgcaaaagtgagacatctacttaccaccaacagaaaccacataactcacacttcagtcatttagatagaactgatattaaataagaaaatgacaaattatctcataaaattgagcatgttctactaatatgcagcagaaaaggacatacgattggctcaaaatacataaaaatgtattcacttttaaacattgtaagaaaaatgaaatttatgaaaactttgtaatactgtttcacctatcattttgttatattacgaagttttataacactctgtattaattgagggtttaagaaaatggccactctccaactaaaacaaacaatgtcaaaaggacttcctattcaataaatgattgagataactggctaaccatatggagacgagtgagactggat

SEQ ID NO: 717999 - DNA, 696 bp, Homo sapiens
tagaaaaccaaggcacttaaaaattattttacttaatgtttgtaactttccttcctgcttcctggtattaatatttaatctgagctaaacttttatataatcaagttttatctttaacatttcttgcatacagcaagtgagaagattgaagatgcagcctcttctacagcttatcttgtatccccactagttttggtctttccaaatgttcacaaacactcttttttgggggttggagggcctctatttagctctaatgttgctttactgtgatataaccatatttctatatgaagtttgagtgtacactaaccatgagcttccaaaaggttgaaaaatgaattaaaaaactagtgcagaaagatttatcttcctaagaatgactcctttgatcccaccttcaccatcttccaccacaatcaaatcttcatttcctcttacgttgtttgctacattacattacagattatgtacaacttccatttgtttaatttcaacatatgtataatatgtaaaatagtttttgtttttcaattaatgtgtttcttttgtgawaatggcgtatttggggaaggaataaaatataattttcccattataattaatataattattatttcttaagttacttaccagatgttcacttagcagcagggtttttcaggggaaaaaaatattcaaactaaaggctaatgg

SEQ ID NO: 718000 - DNA, 600 bp, Homo sapiens
tgatacattttatttgtgttctactacattagtataatattaacaaattacaacaattaccactaagataaatcacaaaatgctgtttacaatttgcatgttgttttaacccttgtaatgaaatgaattgagttgtatacccctggcattctctaaagccaccttggaaactatttcttcaggagacactgttacctgtaaaattatgtgactcatttgtgcttaaagatgaaaaaagtttcttgcaatcttctactacattatctgttttcttctgaaacattgcatttayaagtgctgtgctttctttttaacaataaaaagaatgtagttatttgtaagtttgtctattaaaaatgagaaactatactgcttgctttttattctaatgtcctttaaaaggaaaaatgatgagtttttaagcaggatgttcagttaaataatattctcaatataaaggaatatggcaaattaaacaaatataattatataaatttttgaactacaataaatactctattgaaacttgaaatttgattattctgtgaactaaattaatttattattcattcattatcattaatttactgacttctaaaa

SEQ ID NO: 718001 - DNA, 830 bp, Homo sapiens
tgcaatagaaaaggctgaactttaatgcagatacaagagagtggtccgaggatcccgtacggtgttctaaagcggaaatctcccttcaaagatgttgcaaataaaaacaaggggtttataagaagacaaaaccaaatactgcacattctcactcataagtgggagctgaacaatgagaacacatggacacagggaggggaacatcacacactggggcctgtcacagggttggggggcaaggggaaagagagcattaggagaaatacctaatgcatgcagggcttaaaacctagatgatgggttgataggtgcagcaaaccaccatggcacatgcacatgtatgtaacaaacctgcacgttctgcatatgaatcctggaacttaaaatataattaaaaaaagaaaaaaaggggggtcaggcctttctactcaaacatccacaacattcatcacagagtgtagctgaagtttggatggtataamacctttattctggagacgatttgaggggagacaatcagcattgcaccatcagcagttttccatctgaggtggctcagtcttgaagaggaaaatcagtgaagcaaactataatctgtactatactatactcctcatcctgctcagatacactaatttaatgtaaatgtatatgaaagtttacttatttcataagtttataacttacgaaaattttctccagcattctggcaggtctcccttcttaggaaatactaaaatatattagtaagagaagatacaatccctgcctcagaatttggctatggggtcaaaactaagctcaagttttcatccttatactataaggtc

SEQ ID NO: 718002 - DNA, 2004 bp, Homo sapiens
atttttaaaaatccattttgttaagtttaaagacaatcttttgtagattttgtttaaacactgttaaactgatatgtggaaagtctacatattttatattctcatatactttattaaagttttgtggttttaattataaatacacctagcacatttatttttagtttcatttgtcagtgttttgtcatttacattgctattgtaatcaagtctttttaaatcatgttttccaaatggttaatgatagcataaagaaatgctgctgaattttatagggattttgtaataggccaggccactgttatatttatttttatagtttttaaaacttttttgggatctcagtagataatcacattatcaaatgattattctaattttttcataatagtttcatgtatctcatttattttattttatctgactgactagaacttcccaaaaataattgtgtgatactgatgataaggaatattattgtcttcatcttgccattaatgaaactattttcattttgcatgattaaatattttagatgagggacatgaaaaagtaatgctggactcagttaaatttttgttgaagaatatcaagaaaatatgtggttttcttcattgtacatcttaatgtgacagaatatatggatagattactttaggataaatcatctttgaattactgggatcaattttattgcctgatcttgtattaaacacttcattgcaaaaatgcacacatgtattttttcataagattgatttatagatctttcttagtgccatcttcaagttttagcattacaactatacttgattcataaaaggagcttagaaactatatttgttatgttgtataataatttagatatgaaggaatgtaactcatcaaatagaatacttgccaataacatagtcttgtctcagcaccttccttagacatatttttttgagaacgttttaaatccatctcatgcaattgccttgttcagcattattttatcatcttaaattatttttctaaaattatatgttattttaaaatgtccatttcctcatactttttaaagcagatatattttttccaggcttcatgcctctgaattaaagtttaatctgagctgatgtttctatttaattcccctaataatggaaatatcaggagacaaggttgtgagttggccctgtagggggagcttttttaaatctgttatcatctgtcccaaataagagacatccctcgaagtttctgtgaggcagatggtactctttcattgttcctagcattcttacgtgtttctttcctacactgatatcatgtgttcattgcggaggacttggtagagagtagaaaacatataattaaattgttaattgttaacaaatctacctagaaatgctattggaactaatactttaatttaaattactatatgttaaaatgtgaatgaatacataaattgtacaattaagctaaatgacttctaaattgctaaatatatatgtataaccctcccttgacaagaataataagagtacaccctcctttccaaatgtgccattatgaatgtcaacagaaatgtaatgattccgaagggaagcagtgagggtgcatctcttgtcctttcttggtttctcctcataagcaaaatatctgctcaggcagttgtcagagggtatacaaaatctgcacgactaccattctcagagacatttctgctcagaattttcaagctgtaaggatatagaaactccttttctcattcagaaccaactcagtcttattctgcccagagtactgacattgtaccccctggtgaaacttccttggcactagcagttttcttttaatggctttacaaaatggctgggatatttcagttaaattctaaattggcttgagttctgccaaatttagtatacgacttctgataataaatctattcaatgtattttatgatatttstcaactttagtacctaggtgatcagccagaaatattgaaata

SEQ ID NO: 718003 - DNA, 647 bp, Homo sapiens
tgttttagacatcattttcaaagtagtattatttattagcayagttcaataatatatttcattagaattatgaaactgcccaataataatcagaataaaaattttagattaagaaatttgataatcaaatgagagttaaaccatatcattgaatgagcttttttaaaataataaatgaatcatttattattaatttttaatgtatgaaagacaatgcaaaatgaaattcatgtatacttgaaaatataaggttaaaaggaataatccaaactaatgatgtagacaacagacccagatttttatgcacatatctgagctgaaaatgataattaaagatattttgtccaatttaatatcatattatataaatttaatttaattaaggatgctcccttaaaataatttgcaacttttgtttctttgaaaaatctaaaagactgcttttcttataaacacatatacataaacattcctggataagcaggaacagcttcttgtagttaaaatttatactgaaggcttggcacagtggctcacaccagcactttgggaggctgaggcaagaggatcacttatcaccaggagtttgagaccaacttgggcaacatagtgagaccctgtcactataaaaaaacaaaacaaaacaa

SEQ ID NO: 718004 - DNA, 647 bp, Homo sapiens
tgttttagacatcattttcaaagtagtattatttattagcatagttcaataatatrtttcattagaattatgaaactgcccaataataatcagaataaaaattttagattaagaaatttgataatcaaatgagagttaaaccatatcattgaatgagcttttttaaaataataaatgaatcatttattattaatttttaatgtatgaaagacaatgcaaaatgaaattcatgtatacttgaaaatataaggttaaaaggaataatccaaactaatgatgtagacaacagacccagatttttatgcacatatctgagctgaaaatgataattaaagatattttgtccaatttaatatcatattatataaatttaatttaattaaggatgctcccttaaaataatttgcaacttttgtttctttgaaaaatctaaaagactgcttttcttataaacacatatacataaacattcctggataagcaggaacagcttcttgtagttaaaatttatactgaaggcttggcacagtggctcacaccagcactttgggaggctgaggcaagaggatcacttatcaccaggagtttgagaccaacttgggcaacatagtgagaccctgtcactataaaaaaacaaaacaaaacaa

SEQ ID NO: 718005 - DNA, 888 bp, Homo sapiens
tcttggtggacttgttttcaagtggcttttgctctcagcatgggtgagataaataaatctaggttgacttgtcctttccttctgatttagggaggggacaaacagctttctaacttagtgcttttagggaaattgccatttacacactgattcatttattcaattgttcaatagaaagcatgtctgctctctgtggcaaacacartatcagtaggggagtaaaacgagactctattctgggaaagcttgtagtttgtggaaagagggagatatttcaacagatctcaacagaacaatgaagactattaacaagcaaaacaacaataacaacaaaatcactgacccctttctctatattgcctttccctgcttcccttaaaaaacaaacaaacaaacaaacaaacaaaaacctgcctcttctcatagctgccggtaaagaaacagaacaacaacatttcatatttaaaagttgtggcttacattcaaattgtggaacatctagcagaaattccttttggaatgtttaatcaagtaactactgccccagtctctcagaatgcaactagtattcactactgttgagtcctcttccccttttttgtgttgaaaaaaaaaatatgtcaacattaaagaaaaaattgagcagtttgactttgctacaatcttaagactaaatccaatgctagaaagtatttatttctggataaaattctctataagtttttcatgataagttttctaattctattaaagttttgactatatttttggttgtctgacctattttgacttaaggctgagagctttcctagttggtctatttgggttaaaatgattctcttctggcttattcagggagctctgatgtgaaggctgtgacttgaagtc

SEQ ID NO: 718006 - DNA, 569 bp, Homo sapiens
  misc_feature 469, 470, 471, 472, 473, 474, 475, 476, 477, 478, 479, 480,481, 482, 483, 484, 485, 486, 487, 488, 489, 490, 491, 492,493, 494, 495, 496, 497, 498, 499, 500, 501, 502, 503, 504,505, 506, 507, 508, 509, 510, 511, 512, 513, 514, 515: n = A,T,C or G
  misc_feature 516, 517, 518, 519, 520, 521, 522, 523, 524, 525, 526, 527,528, 529, 530, 531, 532, 533, 534, 535, 536, 537, 538, 539,540, 541, 542, 543, 544, 545, 546, 547, 548, 549, 550, 551,552, 553, 554, 555, 556, 557, 558, 559, 560, 561, 562: n = A,T,C or G
  misc_feature 563, 564, 565, 566, 567, 568: n = A,T,C or G
ttaactaagacttgcctaacctgttgggtgtccacctaggagcarcctgggacgtgatgggccagagggcgtgcagccagcggtacttagaactcctacgccctcgcttcagccaaagtccaagtcttgaaggttcacaggtgaggccgcgctgtcctgcctagcctgagaagagacagtttggatgcaccctagtttctgcgaagaggcaggcaggagttgggcttactcaggcattgctgggcctttcctccacccactaagccccgtgcctgacagtttgtgggggtgggaggagatatacaaaaatgcattaatggtaggccatcgcattggctcaagcctgtaatcccagcactttgggagcctaaggcaggtgaatcacttgaggccaggagttcaagaccagccgggccaacatggtgaaaccctttctctactaaaaataccatcaggcgcagtggctcannnnnnnnnnnnnnnnnnnnnnnnnnnnnnnnnnnnnnnnnnnnnnnnnnnnnnnnnnnnnnnnnnnnnnnnnnnnnnnnnnnnnnnnnnnnnnnnnnnnt

SEQ ID NO: 718007 - DNA, 633 bp, Homo sapiens
aagtaataatcaccaagcattattatgtaatagattttattcaactaaatcaatgtataatataacctagatagaattaaactggaaaaaaagtacagagatttttacaagctgtagagataatcaaaagaaaatgggatagagatcatgggttgacatttttgcattgtctcaagctaygaaattgggcagatagatttgctaaatgataaagtctcttctcatttgactgctattcaaacatacaattcctcatcatgtaattttgataagaagtatagtgagtcagaatcataataagggtagaaaaatacttcattagaatatgagtgagctctgcactcctctcagggttcaaaggtcagcagtccatggctctttcatatctgccttggctttcattcttctcctcagaagtggatttactatgacatgaaagaaacgtaaacattaggcctctcacttaccccttccaaggccctagtggcttttgtgatataaggcagattatatgttttcacaaaatattcaaaatagaaatattttaatgtaagaggttaacactgctgtctcgttccattttaaccttccctttattatcctttcccttgaggtaggtggcattggaacagc

SEQ ID NO: 718008 - DNA, 2553 bp, Homo sapiens
gtaccctagaacttaaagtataattaaaaaaataaaaaaaaagaacgaaagtaggttgtcagtagggttaaataggaaactggtattttagaacatgccccttgttgcacagtatctcttaatggccgttctcactgaggatgtgagctgggcttggtggaagcactatcacaaggagtcctgccagggttaggagggttgcactactaaattgaaacaatagaagtgtttagaagaggtgacccaaagcaatatatttgctttacagaaaagaagaagggctgtggagaggggtcaaggtctgcggttagagctgggaaaacagtaaagaatgtaaagtccaaagagcaaggcaagagagacatgagacactgaatattaaggtcgtatcaagaaagtcagtaacaggttggaatcacatgtgaggaagactgatgggaaaagtgcagatataaggcttgtgaggtgagtatgtgcttgccctggccttttacactgtgctcaggaaaagcagtgtatataaaaagtatatataaaaagtagtagatataaaagtgacttaaagaaacattgtgcttcaggtaacaactaaatatttctttagatcaacagatttctattattcttagtagcataactctctttaaaataattattgtgcagaaatttgatatataaatggataaaaaaagaattgatcttatttaggtgcaggtagaatccaaggtgatttcactagccagccagctgggccctcagccctttgggatcccctcagtagctttcctgagtattagagcctgtatggtttgaaaactactcttctaaatctttgaagacatgtccttatatcaagtcacataatcagaaactgatatatttagactttattaaattggttgtctatcactgaataataacttattcattttttgtttttaaaaatttatttacctttatatgtttatggggtacaagtgcatgcatatattgcacagtgttgaagtctctgttcttaatgtacccactgaataataattcaatatgccctgattttttattattatacttaaagttttagggtacatgtgcacaacgtgcaggtttgttacatatgtatacatgtgccatgttggtgtgctgcacccattaactcatcatttagcattaggtatatcccctaatgctatccctcccccctccccccccccaccccacaacagtccccagtgtgtgatgttccccttcctgtgtccatgtgttctcattgttcagttcccacctatgagtgagaacatgcggtgtttggtttttaaagatcagcacaagaaacaactatgagaaatgttgtttttttaaacattcagtagaattgccattaaaaaccttgttcatttcttgcttattttctctgaaatgatttcatgtgataaatatatcttagaaaattggtctcagggactggctattattatttttcccatctgtgataaaaggtaagatttgatggattctaaacatctcttcagttattaaattatatcattctaaacaacttggttaattaacatttcttttaaacacaacgtttattcaggaagttactttggagaaatctttctgttttccaggctcagtacgccatctgtgaaaacagagaggagtttggttcattctatcatttctccatccctccctctccagtctcaagggtctgtttctgttcccagacatgccaatcttatgtctgtattaaacctgtctccacttgcttttatctctggcagagcctcactagttggcacctcctcatttttcaattttgtttcaagtatcatcttcttaggggaaattgccctgctgtctccatttaaagttgcttctttccgtcttctycactttatatcacttcatgacttgccaaacagtaggcatttaataaatatttgttgaataaataaaaacattaaaaaatttaaaatgaagaatcaattcctaacaccaagagctcactaattggttagagacaaagctataaacaataataatattttaagcactctaatgaagatatgtgctacatataaacaaaataagaaatgtctatgctagggaattctaggcaaaggcaatcacatttgagctgtgttttgatgaatggatagaagaacatcaaacaaggaagtaagagaagaatatgccagtaaaagggaaaatgtgtcccaaaatactgagttgggaaagatcacagggaagaagttcagaaggtaaagtagcttcaggattatggaagcaatgttaaaacgtgtggactttattctgtaactgctgaggatttttgaagaattttaagtgaaaaagcaacatgaattagatctttgggtaaaatagatttcacttgtgtaacagcgaagaaaacaagataatgggttttgctgtttcttctgaagaaagaggagtagaatttcaatcataggcggaaatgttcccttgaagcagggcacagagccatttgcattagtgtgtgtgtgtgtgtgtgtgtgtgtgtgtgtg

SEQ ID NO: 718009 - DNA, 2553 bp, Homo sapiens
gtaccctagaacttaaagtataattaaaaaaataaaaaaaaagaacgaaagtaggttgtcagtagggttaaataggaaactggtattttagaacatgccccttgttgcacagtatctcttaatggccgttctcactgaggatgtgagctgggcttggtggaagcactatcacaaggagtcctgccagggttaggagggttgcactactaaattgaaacaatagaagtgtttagaagaggtgacccaaagcaatatatttgctttacagaaaagaagaagggctgtggagaggggtcaaggtctgcggttagagctgggaaaacagtaaagaatgtaaagtccaaagagcaaggcaagagagacatgagacactgaatattaaggtcgtatcaagaaagtcagtaacaggttggaatcacatgtgaggaagactgatgggaaaagtgcagatataaggcttgtgaggtgagtatgtgcttgccctggccttttacactgtgctcaggaaaagcagtgtatataaaaagtatatataaaaagtagtagatataaaagtgacttaaagaaacattgtgcttcaggtaacaactaaatatttctttagatcaacagatttctattattcttagtagcataactctctttaaaataattattgtgcagaaatttgatatataaatggataaaaaaagaattgatcttatttaggtgcaggtagaatccaaggtgatttcactagccagccagctgggccctcagccctttgggatcccctcagtagctttcctgagtattagagcctgtatggtttgaaaactactcttctaaatctttgaagacatgtccttatatcaagtcacataatcagaaactgatatatttagactttattaaattggttgtctatcactgaataataacttattcattttttgtttttaaaaatttatttacctttatatgtttatggggtacaagtgcatgcatatattgcacagtgttgaagtctctgttcttaatgtacccactgaataataattcaatatgccctgattttttattattatacttaaagttttagggtacatgtgcacaacgtgcaggtttgttacatatgtatacatgtgccatgttggtgtgctgcacccattaactcatcatttagcattaggtatatcccctaatgctatccctcccccctccccccccccaccccacaacagtccccagtgtgtgatgttccccttcctgtgtccatgtgttctcattgttcagttcccacctatgagtgagaacatgcggtgtttggtttttaaagatcagcacaagaaacaactatgagaaatgttgtttttttaaacattcagtagaattgccattaaaaaccttgttcatttcttgcttattttctctgaaatgatttcatgtgataaatatatcttagaaaattggtctcagggactggctattattatttttcccatctgtgataaaaggtaagatttgatggattctaaacatctcttcagttattaaattatatcattctaaacaacttggttaattaacatttcttttaaacacaacgtttattcaggaagttactttggagaaatctttctgttttccaggctcagtacgccatctgtgaaaacagagaggagtttggttcattctatcatttctccatccctccctctccagtctcaagggtctgtttctgttcccagacaygccaatcttatgtctgtattaaacctgtctccacttgcttttatctctggcagagcctcactagttggcacctcctcatttttcaattttgtttcaagtatcatcttcttaggggaaattgccctgctgtctccatttaaagttgcttctttccgtcttcttcactttatatcacttcatgacttgccaaacagtaggcatttaataaatatttgttgaataaataaaaacattaaaaaatttaaaatgaagaatcaattcctaacaccaagagctcactaattggttagagacaaagctataaacaataataatattttaagcactctaatgaagatatgtgctacatataaacaaaataagaaatgtctatgctagggaattctaggcaaaggcaatcacatttgagctgtgttttgatgaatggatagaagaacatcaaacaaggaagtaagagaagaatatgccagtaaaagggaaaatgtgtcccaaaatactgagttgggaaagatcacagggaagaagttcagaaggtaaagtagcttcaggattatggaagcaatgttaaaacgtgtggactttattctgtaactgctgaggatttttgaagaattttaagtgaaaaagcaacatgaattagatctttgggtaaaatagatttcacttgtgtaacagcgaagaaaacaagataatgggttttgctgtttcttctgaagaaagaggagtagaatttcaatcataggcggaaatgttcccttgaagcagggcacagagccatttgcattagtgtgtgtgtgtgtgtgtgtgtgtgtgtgtgtg

SEQ ID NO: 718010 - DNA, 2553 bp, Homo sapiens
gtaccctagaacttaaagtataattaaaaaaataaaaaaaaagaacgaaagtaggttgtcagtagggttaaataggaaactggtattttagaacatgccccttgttgcacagtatctcttaatggccgttctcactgaggatgtgagctgggcttggtggaagcactatcacaaggagtcctgccagggttaggagggttgcactactaaattgaaacaatagaagtgtttagaagaggtgacccaaagcaatatatttgctttacagaaaagaagaagggctgtggagaggggtcaaggtctgcggttagagctgggaaaacagtaaagaatgtaaagtccaaagagcaaggcaagagagacatgagacactgaatattaaggtcgtatcaagaaagtcagtaacaggttggaatcacatgtgaggaagactgatgggaaaagtgcagatataaggcttgtgaggtgagtatgtgcttgccctggccttttacactgtgctcaggaaaagcagtgtatataaaaagtatatataaaaagtagtagatataaaagtgacttaaagaaacattgtgcttcaggtaacaactaaatatttctttagatcaacagatttctattattcttagtagcataactctctttaaaataattattgtgcagaaatttgatatataaatggataaaaaaagaattgatcttatttaggtgcaggtagaatccaaggtgatttcactagccagccagctgggccctcagccctttgggatcccctcagtagctttcctgagtattagagcctgtatggtttgaaaactactcttctaaatctttgaagacatgtccttatatcaagtcacataatcagaaactgatatatttagactttattaaattggttgtctatcactgaataataacttattcattttttgtttttaaaaatttatttacctttatatgtttatggggtacaagtgcatgcatatattgcacagtgttgaagtctctgttcttaatgtacccactgaataataattcaatatgccctgattttttattattatacttaaagttttagggtacatgtgcacaacgtgcaggtttgttacatatgtatacatgtgccatgttggtgtgctgcacccattaactcatcatttagcattaggtatatcccctaatgctatccctcccccctccccccccccaccccacaacagtccccagtgtgtgatgttccccttcctgtgtccatgtgttctcattgttcagttcccacctatgagtgagaacatgcggtgtttggtttttaaagatcagcacaagaaacaactatgagaaatgttgtttttttaaacattcagtagaattgccattaaaaaccttgttcatttcttgcttattttctctgaaatgatttcatgtgataaatatatcttagaaaattggtctcagggactggctattattatttttcccatctgtgataaaaggtaagatttgatggattctaaacatctcttcagttattaaattatatcattctaaacaacttggttaattaacatttcttttaaacacaacgtttattcaggaagttactttggagaaatctttctgttttccaggctcagtacgccatctgtgaaaacagagaggagtttggttcattctatcatttctccatccctccctctccagtctcaagggtctgtttctgttcccagacatgccaatcttatgtctgtattaaacctgtctccacttgcttttatctctggcagagcctcactagttggcacctcctcatttttcaattttgtttcaagtatcatcttcttagrggaaattgccctgctgtctccatttaaagttgcttctttccgtcttcttcactttatatcacttcatgacttgccaaacagtaggcatttaataaatatttgttgaataaataaaaacattaaaaaatttaaaatgaagaatcaattcctaacaccaagagctcactaattggttagagacaaagctataaacaataataatattttaagcactctaatgaagatatgtgctacatataaacaaaataagaaatgtctatgctagggaattctaggcaaaggcaatcacatttgagctgtgttttgatgaatggatagaagaacatcaaacaaggaagtaagagaagaatatgccagtaaaagggaaaatgtgtcccaaaatactgagttgggaaagatcacagggaagaagttcagaaggtaaagtagcttcaggattatggaagcaatgttaaaacgtgtggactttattctgtaactgctgaggatttttgaagaattttaagtgaaaaagcaacatgaattagatctttgggtaaaatagatttcacttgtgtaacagcgaagaaaacaagataatgggttttgctgtttcttctgaagaaagaggagtagaatttcaatcataggcggaaatgttcccttgaagcagggcacagagccatttgcattagtgtgtgtgtgtgtgtgtgtgtgtgtgtgtgtg

SEQ ID NO: 718011 - DNA, 1300 bp, Homo sapiens
taaaatatttaacattggctacatagtctacataatgaaactaaagagctcmtttccccaagaagacacaccttcataaaaacaccttctggatgataatataaaatttacaaagtgaatcagacaagttctttccaaatctgcttatgtgaagatcatactgtaaaaataagtagctggtcaatatgtattagtaaagaagaaaataaaacctgcagctcacaactatttatactaaaagtacttgattcccttcatataaaaaaagccctatgccctgacattgtgcaatctacgtaagattctaggtaaagttgtagagttattgattaggtagatatggagctaaatgactcaaaatattgctatgatcttagtaagaaattaataaggagttcaccaaatcaaaccaaccatggtggttggcaccaattttggaaatttttccattatgtagcttggaaaattaaggtacttcctcaaaaactcattagtcatttgagcaatagctagagtatttatatataggtttttttagaattaaagagatctcacttaataatgcagtgcaaaatactgattagccatatttgacaatacaatgcatattttaatataacttgctatttgtttttaactgtcaaaataaaattcttagtttatattggaaccccattttctaagcaagaataattatgtggtaaaaagttacctagaattcaacaagtttaattttttaataaaaataaacttagaggagtagctatatagaatttttccttactgagcaatatcatgattcttcacagttatctatgtcaacacaaacgaactcatattgaaagtttactcataaagaagaaatacctgtattatctataaaatttctaaattaaagagttgtcaattatttagtatcaagtttaagtaaaaaaatcaatttaattcacatgacaatttactattaaaaaacatttatatgtaagtaactaaactcccttaccttataaatatccaaaaatccacactggtggtcaaatctggtgtacagttcattcagcatgctgattacttgcatgggagtacactgggcacatatggctgtgaagccaacaatgtctgaaaagagcatggtgacatcatcaaactttctggcctgtacttgctgcccttgccataattgctgggctacatcaccagggaaaatagaatatagaagatccactgtcttctttttctcttcttccagggcctggtgagttctttctaaagttgcctttaatttatccatccttttctt

SEQ ID NO: 718012 - DNA, 1300 bp, Homo sapiens
taaaatatttaacattggctacatagtctacataatgaaactaaagagctcatttccccaagaagacacaccttcataaaaacaccttctggatgataatataaaatttacaaagtgaatcagacaagttctttccaaatctgcttatgtgaagatcatactrtaaaaataagtagctggtcaatatgtattagtaaagaagaaaataaaacctgcagctcacaactatttatactaaaagtacttgattcccttcatataaaaaaagccctatgccctgacattgtgcaatctacgtaagattctaggtaaagttgtagagttattgattaggtagatatggagctaaatgactcaaaatattgctatgatcttagtaagaaattaataaggagttcaccaaatcaaaccaaccatggtggttggcaccaattttggaaatttttccattatgtagcttggaaaattaaggtacttcctcaaaaactcattagtcatttgagcaatagctagagtatttatatataggtttttttagaattaaagagatctcacttaataatgcagtgcaaaatactgattagccatatttgacaatacaatgcatattttaatataacttgctatttgtttttaactgtcaaaataaaattcttagtttatattggaaccccattttctaagcaagaataattatgtggtaaaaagttacctagaattcaacaagtttaattttttaataaaaataaacttagaggagtagctatatagaatttttccttactgagcaatatcatgattcttcacagttatctatgtcaacacaaacgaactcatattgaaagtttactcataaagaagaaatacctgtattatctataaaatttctaaattaaagagttgtcaattatttagtatcaagtttaagtaaaaaaatcaatttaattcacatgacaatttactattaaaaaacatttatatgtaagtaactaaactcccttaccttataaatatccaaaaatccacactggtggtcaaatctggtgtacagttcattcagcatgctgattacttgcatgggagtacactgggcacatatggctgtgaagccaacaatgtctgaaaagagcatggtgacatcatcaaactttctggcctgtacttgctgcccttgccataattgctgggctacatcaccagggaaaatagaatatagaagatccactgtcttctttttctcttcttccagggcctggtgagttctttctaaagttgcctttaatttatccatccttttctt

SEQ ID NO: 718013 - DNA, 2071 bp, Homo sapiens
tagtgatatctcttttatcattttttattgtgtccgattcttctctcttttcttctttattagtctgactagcagtctgttaatcttttcaaaaaaccagatcctggattcattgattttttgaagggttttttgtgtctctatctccttcagttctgctctgatcttagttattttttgtcttctgctagcttttgaaatgtggcacatatacaccatggaatactatgctgccataaaaaaggatgagttcatgtcctttgcagggacatggatgaagctggaaaccatcgctctcaggaaactaacacaggaacagaaaaccaaacaccgcatgttctcactcataagtgggagttgaacaataagaacacatggacacagggaggggagcatcacacaccttgcctgtcagcgggtgagggtgataggggagggataccattaggagaaacacctaatgtagatgacaggttgttgggtacagcaaaacaccatggcacctgtatacctatgtaataaacctgcatattgtgcatatgcatcccagaacttaaagtataataataataataataaaaagaaacataatcccagacttgaattctttctacccaggatttaaaaacaaaactcatatggcaattattatataatttatatataattatataaaaatgcatatggaaattatttcctttgttagaatgtaaacttcttgagaaaataaacattgtctttctctttggtttactccacagcatctatcatagcaccttgcacacagtaaatgctgaacacatatgtgttaaggcttataatattcacttatgcttttattttagtatgcatattataaagaagcagtgtatgtggtgcaaaaagaactagatcaggaacatctaggagctacttctggctctggcagtaatgaacctgtttgggccttcgtttcctcaaatgaaatagttaaattggattatctctaatttaatttcaagttcttgaattaaaaaaaaaatgaaagaaggaagggaggacaggaggaagaaaagggggaggttaggagacagagagggaagtagagaaatggtgcttctcctgttagactaatgagtcacaaaacatttcctaaggaagcatatttgtcatttaatgacttcaatgcatgacttgagacagtgtggacgtcgctgctgctattcaactaaagacaaattttagtaaattgaaagagatttggagagagaatgaactattctgygctcaggcagatgcaaggaagagaatgcggatgagccactgaaaatcgccagttcccaaggtcattctgcaagttggtccttctatgttcagttagcatttttgtaccttttatttggtctgtggtaataatgacatttctcccttagtttgctaaagcctgagcattcattcaatagctcctcatctttgtaattcaaaaggtgaagaggcaaattagtcaattaaaatgcacagtatctgtggtgtgtacctcagtgtcttagaattgctatctgctgctccatggaataacacagagagaatcttttctgaaatgcagacaatgaggatcttaccttatagcaacaacctacagtaatgaattatgttgccattagttgatactagtaaaaccttttctaatacaaaaaaaaatctattttaaaagatagcacaggtcatagctgcccaccaaatttccacaagccctaggtactgctttcccctaagtataaatattaaccaaactttctttagaatactatctatgcatttcaacaaataataccaagtttcccccaaattaattaattaataagtcagttaattaaaaataaagtgctactggactcactcctttaggaagctaaaatatctggtggttctcaaagagaggtaatcatctatgtttattataaagatagttggttttctacaaaaatgtacaatttatttttaaaacactgtccaaagtatattatgtgttaaacactacacagggaaataaaagagacataaagatatttatcagcctgctgtcacaatc

SEQ ID NO: 718014 - DNA, 1058 bp, Homo sapiens
ccgggtgtctggtgccagcctcctgcctggcagaggaactccagcccctgctcccggaagcccctccaggccttcggcttccctgactgggcatgggcccctcgtcccctcgtcccctcgggtacggggccggtctccccgcccgcgggcggcgaagtaaaggcccagcgcagcccgcgctcctgccctggggcctcgtctttctccaggaaaacgtggaccgctctccgccgacaggtctcttccacagacccctgtcgccttcgcccccggtctcttccggttctgtcttttcgctggctcgatacgaacaaggaagtcgcccccagcggagccccggctcccccaggcagaggcggccccgggggcggagtcaacggcggaggccacgccctctgtgaaagggcggggcatgcaaattcgaaatgaaagcccgggaacgccggaagaagcacgggtgtaagatttcccttttcaaaggcggagaataagaaatcagcccgagagtgtaagggcgtcaatagcgctgtggacgagacagagggaatggggcaaggagcgaggctggggctctcaccgcgacttgaatgtggatgagagtgggacggtgacggcgggcgcgaaggcgagcgcatcgcttctcggccttttggctaagatcaagtgtagtatctgttcttatcagtttaatatcygatacgtcctctatccgaggacaatatattaaatggatttttggagcagggagatggaataggagcttgctccgtccactccacgcatcgacctggtattgcagtacctccaggaacggtgcaccccctccggggatacaacgtgtttcctaaaagtagagggaggtaagagacggtagcacctgcggggcggcttgcacgccgagtgcctgtgacgcgccggcttgacttaactgcttccctgaagtaccttgaggttcctgatgtgcgggcggtagacggtaggcttatgcggcacgctttcgtttccaccgtggctactgcgctttgggaaggccacgacctcctcctttggggaggtcc

SEQ ID NO: 718015 - DNA, 1058 bp, Homo sapiens
ccgggtgtctggtgccagcctcctgcctggcagaggaactccagcccctgctcccggaagcccctccaggccttcggcttccctgactgggcatgggcccctcgtcccctcgtcccctcgggtacggggccggtctccccgcccgcgggcggcgaagtaaaggcccagcgcagcccgcgctcctgccctggggcctcgtctttctccaggaaaacgtggaccgctctccgccgacaggtctcttccacagacccctgtcgccttcgcccccggtctcttccggttctgtcttttcgctggctcgatacgaacaaggaagtcgcccccagcggagccccggctcccccaggcagaggcggccccgggggcggagtcaacggcggaggccacgccctctgtgaaagggcggggcatgcaaattcgaaatgaaagcccgggaacgccggaagaagcacgggtgtaagatttcccttttcaaaggcggagaataagaaatcagcccgagagtgtaagggcgtcaatagcgctgtggacgagacagagggaatggggcaaggagcgaggctggggctctcaccgcgacttgaatgtggatgagagtgggacggtgacggcgggcgcgaaggcgagcgcatcgcttctcggccttttggctaagatcaagtgtagtatctgttcttatcagtttaatatctgatacgtcctctatccgaggacaatatattaaatggatttttggagcagggagatggaataggagcttgctccgtccactccacgcatcgacctggtattgcagtacctccaggaacggtgcaccccctccggggatacaacgtgtttcctaaaagtagagggaggtaagagacggtagcacctgcggggcggcttgcacgccgagtgcctgtgacgcgccggcttgacttaactgcttccctgaagtaccktgaggttcctgatgtgcgggcggtagacggtaggcttatgcggcacgctttcgtttccaccgtggctactgcgctttgggaaggccacgacctcctcctttggggaggtcc

SEQ ID NO: 718016 - DNA, 634 bp, Homo sapiens
tcccattctccatggtggctcgactaaaggatgctgaatcaagaacttattctcagaacttgatgtaagatgttaacacatctattttgttggctgccacatgttttagaccttcataaaaccatggaaagttatagtggagtggaaatttgaaacttccacaattgccacaacctaaaatatgtttataattttttcaaaagtagaaagaatttaaaagcatattctcagtagtcttactttggagtttttccttatttttttaaaaaataatgtaacctgcaaacaaccccatcaaaaagtgggcaaaggatatgaacagacrcttattaaaagaaggtgtttatgcagccaacaaacatgaaaaaaagcgcatcatcactggtcattagagaaatgcaaatcaaaaccacaatgagttaccatctcatgccagttagaatggcaatcattaaaaagtcaggaaaccacagatgctggagaggatgtggagaaataggaatgcatttacactgttggtgggagtgtaagttagttcaactattgtggaagacagtgtggcgattcttcaaggatctagaaccagaaataccatttgacctagtaatcccattactgggtatatacccaaaga

SEQ ID NO: 718017 - DNA, 1948 bp, Homo sapiens
catgagatgactggcaccaagatctgtgaaatataggagtggcacacatggtagagcatggtcttgagaagactggttctcagatgcaaacatcaaggtgctaaggaacattgcctttgtcaaatgggagacagtgccataatctgttatgaaaagtgctaaacatttccctttaatgttgcagcaccaggtttatgatgctttggggtggggtgggaggtgaggggactataggaataattgtattatttttgttaaacaaccaggggctctcagcctttctcaaggttcataagttcaccaggagtcttcatccttatgaatattacaacctcactgtgattttcagaatccctcttctataaatcagcacataattatgaaaactgttttcacatttcaatcccaatgcagaagtgcaaataaatctggaaaggacaattattttataagttttaatgagggactatcaggatactttaacttaaaattatgaaagacactgaattttgtgactccacatgtgggtttaacatctaaagaataaaaacatttaccacttgtttttacacaaattaacctaaatcacagcaaaagattcttaatcagacaattcctgattttcaaggtttagaagcattgtgaagcaacgagtgaatgcaaacttactgagcaactactatgtatccagcactttgtgagatgctttcacaaaatcaaatttcatttaattctcacagcaaaccctcatcttagatattacaattcccattggatggatgtagaaactgagttgcagaggacttaagtgacttgcctaaagccactggacgtaagtagatattcagcacatatgtactggaaaatcaatggatgactgaatgaatatctggaaggcactgaattagccatgaaagcagtaacaccatcataaagccattctctgaaccctgggaattcatgacctggggtgatgtataaagcatatctatgaaatgaaaaattttttaaaaaacaagttaggagatgaaggtcttaaaatttcttgttctcatttactagactatgaatccctgagctttaaacaccattgagttgctcacagcatgagctttgcagccaacaaggccaagttcatgtcatgattctctattttctagctctcacagaaactttctgaatttttttcttttactatgcaaaatgggaatcacagtagctcctgccaaggaacttgttaagattaaatgagttttgagtgtttgaagcacaggtctaaatcctacctctcagtaggtatgcccacattattactgaagtgagtaacacagatcaaagaaggaagtttaaatcagaagcacctaaaactagaaggagctgagattctgtaattggtgattactaaggaatagaaggccatgcccaccttgaactaaatacaaaaagccaatgatcaggtgtcttcagtttgattacatcagacgtaacactatcctttgcaagtgtattagtccattctcatactgagataaagaaacacccaagactgggtagtttataaagaaaagaggtttaatggyctcacagttatgcattgcctgggaggcctaaggaaacttacaatcatggcagaaggcgaaggagaagcaaaggcacgtcttacatggtggcaggagggagagcatgtgtgcaagtgtaggggaactgccctttataaaatcatcagatcttgtgccactcactcactatcacaagaatagcatggggaaaaccatccccatgattcaattatctccatcttgtttctcccttgacatgtggggattatggggattatggggattgcaattcaagatgagatttgggtggggacacaatgcataactatattagcaagtaaagacactcagtgagttggatctctcagcaccagcagggcctacaagca

SEQ ID NO: 718018 - DNA, 2222 bp, Homo sapiens
gggcattccaaattcaccttatatatatatgataagtctatcgtgtatatacttatttatatatgataaaattggcatttatattacatatgtggattttatatatataaatggcctagtgtttatgtgttaccttttttcatagatatggaaatatgtacatattttaaattgttacatattctatatttttagattattatatattgtatataaatctatagagagaaatatgtatatgctttttccatatatatagaaaaagagaacacataaaacactaggaggctgtggacacagcacatgggccacagcacagaggacagtgagtgacacacacttggagaaatagggagatttggccatgggagctctgcatgggaaagaaggaaggggcagtgacaaaaattgtgtatttatagaaacgttaagactaccagacactacatatatatatataacatatgtcaattttattatatgtaaatgtcctggtgttttatgtgttacctctttttccatatacatatatggaaaayatgtatatgttttacattactatacattttatattacatattttatcatatatattacatataaataagtatatggaaatatatatttttttctatacacatgaaaaaagaggtaacagataaaacactaagacatggttactggctacatgtgggagagacagaaaaaagctaagtgcaaaaaaatcaagcctggtatgttagtttatgcccactgagatgcatccaagatgagattggacatgcaggataatttattaggaaaagtgcctgtgaggaaaagtggggcaggcatgaaaaaagtctgttgagctttgggaccaccatgcaaatctggttcctgtgaaggagaaagagaaagaaaatttagctagagttcaaagaaagcatggcaagactgatggggagtcttccccccagtcacccaggagaataaaacagaggctcatagaactgggcttgctttcatatccctgctgggagcttcaggaaagtgaggactctatgtaaagtaggttatcagtttggcaggcactgatttgggccttctgtcaatcaagtcaattgattattaattaatcgattattagctgggagtgctggaattacctagggaaatttttcaacatacataagcctatactttctcagtcctattcattaatgtgttccatcaagaactctgtaatcctcttgagaaacacaagctgccatggagacctgacagagtcttattcatgcctaccacaactgacacactgagaaaaagatgcaaccatgaaagggtagaaagttctaacgacacagaaaatagcagtcagcctttctcacatcataaagccttcaaaaatatctgagtgccgcatggtcaggatgaaattgacagaagactgatcactaacctagaaacatgttgacagattaaaaaactgcaagaatatagttggctaatcatctaccagcaaccctcccacaaaattaatgtaatccccgaagggacaaatagaaacaacttcatacttagtgatggttcataaggtaccacactgtaaaataacatcacctttattccttctcttcttttctttccatgacagatatttcagtacaaggaagttgtcctggcctttcaggtagagccactgtcagcatcatgattgaagtactggccagtgtggctctgatctagcagccctggtgtagtttatttcaggaagactggcaggtatgatggcctttccttttgttctgtttcctgcagggctgactgtcatgcttgggagagggaaagaacttctttgccagtatttgggactggacctcctcctcctctcactaaactcctgcttctcagcacttattcctgcaggtctcttctcccctgttcttcatgctccctgtaccccactgtctcctacaaatgattatcctcagcctctgctcatttgtttcccagattcaataccttataaaacgctcttgatcattttttttaacatctctcacttgtgtcattctctccattcccacaacttcaacaactgctagaggtactgcttgacttatctccagtctttgaaatcttccttgtgtatgactgcctcattaccttcctaaattctagttaactcccctattcaaaaatcttcagggatctactcttgcctatctgataagttcaca

SEQ ID NO: 718019 - DNA, 615 bp, Homo sapiens
tctgtcttcttcatttccagtagaagagagtaaagcgttcactgcacttgattttcccacagccttcacaccccaatcaagggtcccgaacctagcagtatccaataaggagcagggaggatgatgactaagtctccagatgtgaagtctagagttgaattctgactggtgatttcattcagacacattagtgccttgaggaggcttggagtaaatagcttataaataaaccagacctctttcagggattaaatgtgttttagcaagtatcattttgccaaataagaaggctcatggacttcagtgtctggatgtaaagggttggataaaggtggaaaaaaaggaagtgcataaacttcccatttcatggagaagtkacttccctaagtatgaggatcactaattacttgatattgctgttaattcattggaagcgaggagaaagcacggttgtgaagagttcaaatgagaagtgaaagaattttttaaaaatcattttatccatccctctatcttaaatcactacttaatccatccccataaaattaggaatttcctattcttttctcagaattccgtaaggagataaacagttttccctcttacaattaggaa

SEQ ID NO: 718020 - DNA, 2234 bp, Homo sapiens
ttttttttttttttttttttttttttgacagagccttgctctgttgctcaggctggagtgcagtgacacaatcttggctcactgcaacctccacctcccaggtttaagcaattctcttgcctcagcctcccgagtagctgggaccacaggtgcccgccatcatgcccagctaatttttgtatttttagtagagacaggtttcaccatgtagcccaggctggcctagaactcttgacctcaagggatccacccacctcagcctcccaaagtgctaggattacaggcatgaaccactgtgcctggccaaaattttctatttctttataattcaatcttggtaggttttatgtgtccaggaatttattcatttctttggtttccacctcaatataaacattatggattctctacgccttgtttaatgttggaagtgttgcttttgttttacaccactggtgtaaaactttaatcattattcgcattgataaactgacagaatatttaggaattctctttatttacatggcttgactgtgaacaactgggaaacagagtgcctggactctggcatcttgggatctccagtatatcattgcttccctaacattttgtttgcagtcaaatttttgaagtatccattagaaataatagaaccttctgactcatatttatatttgagcttttttctcaaaatttaggcaatatttttcctttattttctcatagtaacatccctttttctcaaatgggtgtttttcacagtcataatttattatatattttgtttcagatttttaacctctcaaggtgagggattttatgtattcaacatttatgttgtatatggcaagcacaggacttagcaaggaataggtaatgatgaataaatgtttcagaaatgaaactgagttcctttaggattgttcttartgtagctaaatgcaaaagagtaaattagactaatcctactttgggaatagaagtgaatggagaatttgaaatagggagcagtcatcagagaataaggaaaaactattagtatttacttaaaaacataaatataataaaagtatagtatatctatcacatactttaatttgctctcccctctgattctggtcaaaacattttcaggtatgcaatcaaaaagttgcttattgatgctgcattatttatttatttatttattttgagacagagtcttgctctgtcacccaggctggagtgcagtggtgcaatctcggctccctgcaagctccgcctcctgggttcacgccattctcctgcctcagcttcccgaatagctgggaccacaggtgcccgccaccacgcccagctaattttttgtatttttagtagagacagggtttcactgtgttagccaggatggtcttcatctcctgacctcgtgatctgcccacctcggcctcccacattattgatatttttaagtgccaatctttaaaagtatacactggaattttaaaactatgatctgtaaaagagactatgctccctgttactccatgctctaaattccacaaatacacagtattgactgtttcattgctttatgtataaaacctttatgtttattgcaataaagaatattattagaagcaacaatttatccaattattttattatagtattaaatatcagttctgtcatttaacactgtgaagttatgagcatattactcaccctttatgagccccaatttgtttctcatcaaaacggagataaggtatacaatttctaagtataatgtcagaatttgagttagtaacaactacagtcacttgaaatagtatcagacgtacactaaaaagatcaataaatgtttgttttcattttaatgctaatgattatttttatttggttctatctgtgtttgtctactatgaaaattagtgtatttccccttcctccatgggttttattcttttctagcatctagtttaattggacatatcacttagcttatgacttatctctattaagtgatgtgaccaatataaaataatatattcttatcactggatgtgaaatttgtagaaataagcattcttacattatttctcttcacctccaaactttcattgttttgattctttctttcttttttttttttttttttttgagacagagtctccctccatcacccatgctggagtgcagtggtgcgattttggctcactgcaacctccgcctcccatgttcaagtgtttgtc

SEQ ID NO: 718021 - DNA, 1394 bp, Homo sapiens
tcccatcagacacattgtctctctgtttccttcccactaaaaccccttatatgcctcctaatctgttacatcaataacactacacagaaaggaggagaggcccaragatgtttttctctactcaggagggagctggacaattcaggggaattagaataaaaataaataaatgttggtgcaactcatatgtagtgactgtcagagcattggcttccatgtcaagagtgggctcctgtcctgtagctgagatggaagacagagacattggaagagacctgtacaattctgattctccttcagtaacagaaaagcagattttttttttcatattcacaggaacccaaaggctgagagcaatctcatgaatacggaattgctacagatacatggctcctccttcccaggcaagttcttaatgctaattcttgattactctggccatttattaacttatttcatctgcaagtatttattacttgcttgctatgtaacaccacttttgctaagttctggttaaaataatgtattctcctcccatattctgactacctttctttaggtaagaaatactttgaataaaaaattacttgtgatgaatgtagcagtgtaaaatggaaggtcaaacagaaggttataaaaatgaatacaatctctcttgagttgggagtcattgagccattcttatttcagtgatgtttgcacaaggccacaaacgcttctggcagttcagtgaaatgaaccaaggggcggatccctgggagaacagcaaatataaaggctgagagaaagcaggcccttttgagttaaatgtaaacaatatattggatctggcatgctgagggtaaatatgttggatcagcacaatgtgagttaatctgaggtcagatcttaaatagcctggtaggcaacataagaaatattctctatattgaaagtcattggggctgggagtggtggctcatgcctgtaatcccagcagcactttgagaggctgaggtaagaggactgcttgaggccaggagttcaaggctgcagtgaactatgattgtgcagagaccccgtgtcttaaaaaaaaaaaaaaaagaaagaaaatccatgagactgtcatagagcaccttaagcagaactggatttctgattcaatttccttactagttaatggtctgttcagattttctatttcttcatgattcattcttattaggttatatgtttctaggaatttatccatttctgtcaagttatataatttattggcctgtaattatgcatagtaatcctttttgtttctggggcatcagttgtaatgcctctatttcttttttgacttttttattttttactctggatttttaaatttcttagtttagctaagggtttgtcaattttgttta

SEQ ID NO: 718022 - DNA, 970 bp, Homo sapiens
gtttattgtttactcccctatttcttactaagaaattataggggcacttaatatcgccttttctcctttgggycttttcactttcaactgattcaaaacagctgtggaattcatttaaaatgttacaaataagaaaatttctaactaaacactaaattaaatttgtacctttctctatggggaacttgtttcaatatacaccagctgctaaatgtagtttctattgaatattcagacaggatataaagccaaacatacatactgtcccataacaaattgcaaatattcaatatactggagcatataaaaatggtaatttcatgatacaatataagatggtcattttaatcactgaaatagagatctcaatgaaatcacacttcttaagaataaattcagatcctggaatttcctaagtctaatgcttcccatctttatgatatggaaatttttagatttgctcacatctagcagcacctctgtaacaaaattaccatttggaagcttttgttctccacatacgtgaaattacactaatgattttaattgaaatgtgccagaaataacaaagcaaataactcactgcttcataaaacaatcttaaagtactgtaaattgttttgctctcagataagagcaccttagttcacggtaaatgccagtactgaagaattcaaatgattgatagtcctccaaaaccaagctgtgtattgttcaagctgattcttaattattacccaaagcattaatgtcaatgtatgtattaataattctgtgcaagttgtaatgatggctacacatgtccatatggtgattttgaacaatattccaatacactggaactttctggagtaaaatctcattgtatttatgattgtgtgtaatcgtttgtcacacataccatgtgataataagcgtgctgtaaaaattttgccttacattataaaaataacttttagtcagtagaatg

SEQ ID NO: 718023 - DNA, 1131 bp, Homo sapiens
tttgcagcaagcttgttatgttcatgaatcgtttcctggacacagtcttcaagcattcgcacatgactatcactatggcataaaaaagatatagcaaatttaaaggaataaacagtaacagaaaaaattcaaaacactcttccgctttaatatggtgttatagacatttaaagttacttcactaaggactatctttagtgtgctaagtcataccactaaacaactagctgaaaaaccagtgagaaaaaatgttaaatttacctacatgatggcaatctaaacagttttcaatgagataagtctttattttagaatggaacacagcctcaatattaaaaggcaaaaaaaaaaaaaagaaaaaaatcagaaaggccacttgtaatatgcttaaacgtaaacatgtaaacatgctgtctctastattctgaaaaactacaacaggattttaaaattcccacagtgaaagaattgctataatcaacacctcacctttttgcattagtaatacagattattcgtcctctatttccaacacgttctgcattctccatgagtagagtacgagcctcatgttggtattcagtaattttgcagagagtttccactgctgcaacaaggccatgcagaatactgcagcactctggatctgcccgaggattaggaggcccaacagcggctaatgctgccattagctaagtaaaagggaaaacaattatgttgacaagagtatgtgcaattcagataaaaatatcacaagaaagaaaactacacaccaatgtatcttacatatatggacatgaacattcttaaaaaaatagtagcaaaccaaatccagtaacacacaaagaattatacaccatgaacaagtgggatttattctaggaatgcaaagtttatttaatatgcaaatatcaattattacaatacatcatatatcaataaaataaaaatcacatgatcatctcaataaacacagaaacagcacttgacaagatccaaaaccttttcataattaaaaaaattagcaacagaagggaatttcctcaagaagataaaggacacctatgaaaaacctactgataacatcatacttaatggtgaaagattggatgaattctccctacttatcag

SEQ ID NO: 718024 - DNA, 1131 bp, Homo sapiens
tttgcagcaagcttgttatgttcatgaatcgtttcctggacacagtcttcaagcattcgcacatgactatcactatggcataaaaaagatatagcaaatttaaaggaataaacagtaacagaaaaaattcaaaacactcttccgctttaatatggtgttatagacatttaaagttacttcactaaggactatctttagtgtgctaagtcataccactaaacaactagctgaaaaaccagtgagaaaaaatgttaaatttacctacatgatggcaatctaaacagttttcaatgagataagtctttattttagaatggaacacagcctcaatattaaaaggcaaaaaaaaaaaaaagaaaaaaatcagaaaggccacttgtaatatgcttaaacgtaaacatgtaaacatgctgtctctactattctgaaaaactacaacaggattttaaaattcccacagtgaaagaattgctataatcaacacctcacctttttgcattagtaatacagattattcgtcctctatttccaacacgttctgcattctccatgagtagagtacgagcctcatgttggtattcagtaattttgcagagagtttccactgctgcaacaaggccatgcagaatactgcagcactctggatctgcccgaggattaggaggcccaacagcggctaatgctgccattagctaagtaaaagggaaaacaattatgttgacaagartatgtgcaattcagataaaaatatcacaagaaagaaaactacacaccaatgtatcttacatatatggacatgaacattcttaaaaaaatagtagcaaaccaaatccagtaacacacaaagaattatacaccatgaacaagtgggatttattctaggaatgcaaagtttatttaatatgcaaatatcaattattacaatacatcatatatcaataaaataaaaatcacatgatcatctcaataaacacagaaacagcacttgacaagatccaaaaccttttcataattaaaaaaattagcaacagaagggaatttcctcaagaagataaaggacacctatgaaaaacctactgataacatcatacttaatggtgaaagattggatgaattctccctacttatcag

SEQ ID NO: 718025 - DNA, 1222 bp, Homo sapiens
gagactccacctttacaaaaagtttaaaagttaggtgatatggggcaagaccacgtgcctttagtcccagctactcgggaggctgaggtgggagaattgcttgagcccagcaggtcgaggttgcagtaaaccatgatcatgccactgcactccagcctgggtgacagaacaagagcctatctgaaaaaaaaaattattaagatctatcatatcagatgtataaaatgtttaaaattatttttaatttacctataggtttttgtattaagtggaattctgtgaagcctgattagttaatattatccttgagtgaatagcttttgaaaaaataattcaccatgaaacatctccactcccaaattaggcatagtctacctaacatcttttgaagctacttccaatcaaatcttcctgaatcactgtcagttaataaatacttttatttgagttggagacatgtataactaacagtatattttttatattatgatcaattgactatttctcttgggaggctggattacaagagaaaatagaataatgcctgttcttacttggcaagaacatacttccagtccctctaaacttcctgtattgatatttcattaatcgatatgagccacatggagattctggctcaagtatggttagggccaagattataacattctctgggtcacagccaaaaatatatccataatcgggacttaaaaagcaatatactagctgataagttggttgccaaatcataaaatacgatgtacttaaaagagagaatatcttggcagttcctgtgatggtccaaatgtgattgacagagactgccaagatattctcagtccaaatgaatggcccrttaagcttttaatcacctaaataaaattattagacctttgaagtttagaattacctcaatacttcatcagactcagtgagacaaaagcttcatatttcattttctcacttggttagttgctgttggctgtctatagtacagaagtcctcaactatcttctttgcttatgtaatatagattttgatcatgaatttaggggccatgtttttcagtagacactcgacacctccattgctccagtctgcaaattatgattagttttagccaatcacagttattgctttcttcttgcccatgattggtttagttatcagcatgtgagggagataaaaatgaataaggtgtagcttctttcctcaggactca

SEQ ID NO: 718026 - DNA, 1222 bp, Homo sapiens
gagactccacctttacaaaaagtttaaaagttaggtgatatggggcaagaccacgtgcctttagtcccagctactcgggaggctgaggtgggagaattgcttgagcccagcaggtcgaggttgcagtaaaccatgatcatgccactgcactccagcctgggtgacagaacaagagcctatctgaaaaaaaaaattattaagatctatcatatcagatgtataaaatgtttaaaattatttttaatttacctataggtttttgtattaagtggaattctgtgaagcctgattagttaatattatccttgagtgaatagcttttgaaaaaataattcaccatgaaacatctccactcccaaattaggcatagtctacctaacatcttttgaagctacttccaatcaaatcttcctgaatcactgtcagttaataaatacttttatttgagttggagacatgtataactaacagtatattttttatattatgatcaattgactatttctcttgggaggctggattacaagagaaaatagaataatgcctgttcttacttggcaagaacatacttccagtccctctaaacttcctgtattgatatttcattaatcgatatgagccacatggagattctggctcaagtatggttagggccaagattataacattctctgggtcacagccaaaaatatatccataatcgggacttaaaaagcaatatactagctgataagttggttgccaaatcataaaatacgatgtacttaaaagagagaatatcttggcagttcctgtgatggtccaaatgtgattgacagagactgccaagatattctcagtccaaatgaatggcccgttaagcttttmatcacctaaataaaattattagacctttgaagtttagaattacctcaatacttcatcagactcagtgagacaaaagcttcatatttcattttctcacttggttagttgctgttggctgtctatagtacagaagtcctcaactatcttctttgcttatgtaatatagattttgatcatgaatttaggggccatgtttttcagtagacactcgacacctccattgctccagtctgcaaattatgattagttttagccaatcacagttattgctttcttcttgcccatgattggtttagttatcagcatgtgagggagataaaaatgaataaggtgtagcttctttcctcaggactca

SEQ ID NO: 718027 - DNA, 608 bp, Homo sapiens
atctgtcctatagagtttatgtattcaaaaataacaagaatttgaaaaataatgccccaatrtatagataatacaattgatttttccaaaatacaattaatgatttttttattaatctaaattattatgtatgccttatttcatttatgattaaattatgatggttagagaggcaatttcaacataaattaatctgactataagaaaaaagttgtcttggacatttttccacaattttcttaaatttcaaagtcagaattttacttaacagtttgtgtttcatgtacagcttcccttgaattatgtgctagctgatgatttaacctagtctgcatatatgaaatttagtttttaaatataaaagcacttatatagacgaatgctgtctttgttgtatatagtctctctctctaaaagaaagggattagatgcttaagaaaaaaactaacctgattgaaaaaagatattcataattcttttatactaaccatgcttcttacaaatataactatatatttccattaatatgtatacattttcatttgacagaatgaaacaaatgaagaattgatacataaaatactaaatgtcattaatattagaagaaa

SEQ ID NO: 718028 - DNA, 608 bp, Homo sapiens
atctgtcctatagagtttatgtattcaaaaataacaagaatttgaaaaataatgccccaatgtatagataatacaattgatttttccaaaatacaattaatgatttttttattaatctaaattattatgtatgccttatttcatttatgattaaattatgatggttagagaggcaatttcaacataaattaatctgactataagaaaaaagttgtcttggacatttttccacaattttcttaaatttcaaagtcagaattttacttaacagtttgtgtttcatgtacagcttcccttgaattatgtgctagctgatkatttaacctagtctgcatatatgaaatttagtttttaaatataaaagcacttatatagacgaatgctgtctttgttgtatatagtctctctctctaaaagaaagggattagatgcttaagaaaaaaactaacctgattgaaaaaagatattcataattcttttatactaaccatgcttcttacaaatataactatatatttccattaatatgtatacattttcatttgacagaatgaaacaaatgaagaattgatacataaaatactaaatgtcattaatattagaagaaa

SEQ ID NO: 718029 - DNA, 608 bp, Homo sapiens
atctgtcctatagagtttatgtattcaaaaataacaagaatttgaaaaataatgccccaatgtatagataatacaattgatttttccaaaatacaattaatgatttttttattaatctaaattattatgtatgccttatttcatttatgattaaattatgatggttagagaggcaatttcaacataaattaatctgactataagaaaaaagttgtcttggacatttttccacaattttcttaaatttcaaagtcagaattttacttaacagtttgtgtttcatgtacagcttcccttgaattatgtgctagctgatgatttaacctaktctgcatatatgaaatttagtttttaaatataaaagcacttatatagacgaatgctgtctttgttgtatatagtctctctctctaaaagaaagggattagatgcttaagaaaaaaactaacctgattgaaaaaagatattcataattcttttatactaaccatgcttcttacaaatataactatatatttccattaatatgtatacattttcatttgacagaatgaaacaaatgaagaattgatacataaaatactaaatgtcattaatattagaagaaa

SEQ ID NO: 718030 - DNA, 844 bp, Homo sapiens
ccagaacgtattcatcttttaatcaaaaaattgtactctttgacgaatatttccccaattcccctccccagcccctggcaatcacctttctgttcttcttctgtgagttcgaggcagtggtggtgcagggagcaaagggacataaggaaacttttggaggtaatgggtttgttcattaacatgattgtgttgatcgtattcttggtctgtgcatatgtatgtcaaactcatcgcactgtatacattaaatatgcacagatttttgtactatarttataccttaataaagctgtaaaaaaataagaatggtgtcaaaagtgctaccttgtttctctctctgttttttgtattcttattaaacctgaatcaatctttttaaataggtaaaataatttttaatcctatcagctctctattatttattatagttataaacggtttcatggtatggcctttatctgaactaaactgcatgttaaacagtaacaggcaaaatgaaatttggacatgggtacagataaagtaggatgagaaccatggatttataatgtaaaattcgcttgcttttgagagaataatgacattagaatatcaactatgccatgggatattccagggaatggatttctgagtcaaaatttggaaaggaaactcacgtcatcttttatttctctaatctcatgaaagaaaacagaattgatgtgaaactgattttttggcttgatttttgtcaaagctctgctgatacaacattctacgaggaaacttttctcactgtagccaaggaaatgtctgtgtattaacagacagagaagcaaacataattacactatcccattctttg

SEQ ID NO: 718031 - DNA, 610 bp, Homo sapiens
gcagggtttgttctggttctcatcaaatatggttgactggggcaaacattattatttgtctttgacaaatagtttctttcacctagagcagtgtttctcaaagtgcggccycttgagcagccagcatcagtatcacctgggaacctgttataaatgcagattctcaggccccactaaatgagaaacatagagggtgaaccccagctatctgtattttaacaagccctcccagtaattctgtgcagctaaaatttggtaactattgttctaaagatttggatggggttgtttaatcttggaggaggactttctttataactgatgttgtttcttgtacatagtcccaggatttgtctttagggtacttgtcatcgatcccatttgagagaaacattgcaatacagagaggaaataataagccaaagtttacccctagagccaggagaagagtagattagatactagcctccatctttgaagttcagcgtttactcagcttgaaaggaaggcatacactattccctcaatttttaataagaagagaattcagtggtttttaattacaaaagtagtatatgctcgtcatcaaaaatttcaaacaatccaacag

SEQ ID NO: 718032 - DNA, 1260 bp, Homo sapiens
  misc_feature 970: n = A,T,C or G
tgaagttaaaaccaggtactgtgatcactcatttgatttttgattcttatgaagatgcttttttgtgtgaatatttgttccatttggtgttcctgcagagaggatgattagtaaaggcttctattgggccatcttgctcccaaataatataatttttattttaatcttctgtcatactagctaactggttaattaaaaaggaaaaactggaactatggaagtgggaattgcacaaatattaaaataagtgtacagagaaaggcacattcaagcaatgctggagggaatgtaaactgacacaatttgacatatctaagataatacacaaatgtayttttgtgcctttattatcatagatatgatagtatctgtgatattatcatagacatcatgataatgtcataatattatcaaacctggcaattcctctcaagaaaattatcctaaaaatatacttaaacaaatacaaagagacatgtccacaagaaacattctatgtggtattttttataccacaaacaaaacttactgtaaatgtccatcactagggttgtgttaattaaattatgacacaaacatacaatagaattttaagtagccactaaaaagaatgatgtagcactgctgtgttgatacaaaaagatctattatgttattaggtataaaattaggtatgaaatatatatatttttaatatcttatcataagatgaaaatgtctattatattattagctttttataaggactgaacagcattacaggatgctcccattggtaccatggcatatacatcatggatagataggtagatagatagacagatagatagacatataaatgcacacatataccataggcatatagacatgtcaatataaatataatttttctgtaaagaaacataagaaactgttgattgttccttctgcagagttatttcttgaggaaattctttaccttatatattgnactgcacaattaagtacttgatcatgagcatgtattttctttgttttaataatatcagttcttcagagaactagctggtagtggctaagaatccaaaatttcaattatgcaagaatctgaatgaaaatccattaggatgtttttggcttctaagcacctttaaaaaactaaattcaatatgagtctttcattctataaatgtaagaaaatcaaagtaataattgtaatgtatcctgattcatttctcctggtgttagattacaataacttatacaatatggaggtctgtg

SEQ ID NO: 718033 - DNA, 368 bp, Homo sapiens
tcatgcctgtaatcccagcaccttgggaggccaggtctggcggatcacgaggtcaggagtttgagaccagcctgacaaacatggtgaaaccctgtctctactaaaaatataaaaattagccaggtgtgctggtaggtgcctgtaatttcagctactcaggagactgaggcaggagaatcacttgatsccgggaggcagaggttgcagagctgagatcgcaccactgcactccatccaagggcgacagagcgagactccatttaaaaaaaaacaaacaaacaaagcaaaagaatacatgggtgcttttggaggagcattctatgccactccagcccatgtttcaacatttttccagaatgtccagaggg

SEQ ID NO: 718034 - DNA, 368 bp, Homo sapiens
tcatgcctgtaatcccagcaccttgggaggccaggtctggcggatcacgaggtcaggagtttgagaccagcctgacaaacatggtgaaaccctgtctctactaaaaatataaaaattagccaggtgtgctggtaggtgcctgtaatttcagctactcaggagactgaggcaggagaatcacttgatgccgggaggcagaggttgcagagctgagatcgcaccactgcactccatccaagggcgacagagcgagactccatttaaaaaaaaacaaacaaacaaagcaaaagaatacatgggtgcttttggaggagcattctatgccactccagcccatgtttcaacatttttccaraatgtccagaggg

SEQ ID NO: 718035 - DNA, 969 bp, Homo sapiens
tgatgaatattcttttaatgagcccttgtgtgtctaaatacatatatagatgtatatgttcatgaatatatgtaaatgagtatatggatatgtatgcattaaccaaaactgggattgtaccatttatgtwttcctgtaatcctcgtcactaaacaatatgaggggaccgtcttctttaagaaatatattaatagatctatattatgattaacaatgcttacctagtatttagttgtatggatgttcaattaatcatctaacaggtcatttaatttgcttatattttttctgttataatcaagacttatgtcttgattacatctttgcacacttgtgtgataattcccatggagtaaattcttggaagtaagaatacaaagttggcagccactttactattttaatatatacaataattttaagctatcttctaaatagtttatactaatttatacactcaccacaaaaattaaaaaaacatgagttcttatatatctacactgtcactaataatattagaatgtattatttagcatttttaaaaataaaattagtttttatttgcacttacaagtgaaagcatcttttctcccaacattttatttacaacatacaacaaagtttgaattcattttacagcaaacactaatgcacaccatcttgattctaccattaacattttactatagtaacaatataactatccttctatctgtacctttacccatccatttaattcatcttttaaaatgcattttaaaggaatttacaggaatccatacactttacccaaattgcagttgaccattgaaaacacaggtttgaaatgtttgaaatgtgcaggttgacttatatgtggatttttttcaatacatatattggaattttttttggagatttgtgacgatttgaaaaaactcagatgaaccacttagcctagagataacaaaaaaattaagaaaaagttat

SEQ ID NO: 718036 - DNA, 662 bp, Homo sapiens
agtagagatgggtttcatgttgcccaggctcgtcttgagctccagacctcaggtgatccacccaccttggccccccaaagtgctgagattacaggtgtgaaccactgcacctggccaaggacagcaattcttttagcctcaaggcatcttctgagctttgtctttgatggagccggtctctttgggcactagtatcattatcctatgtttggctcctagggttatcctttaaaaaaatatgtcttttcctagcacctaacagagtgccaastacaacatagaaggccttcaggctttcataatactgtttaactaatactttttcccactttactgaggtataatagacaaataaaattgtacatatttaagttgtatagtatgatgctttgatgtacatatgcattgtgaaattattgccaaaattaagttagttaacacatccctcacctcacatagttaccttttgtgtatgtggtaaaaacaaaggtctgctctcttattaaatttcaaatttacaatacagtattattaacttcattaacaattatcaaattaaataaatgagtcctgttgctgtcacccaggagatggcactcttaagagacagctcagtgatggatcaatggctgatagttgaggcatctgcttttattattatt

SEQ ID NO: 718037 - DNA, 633 bp, Homo sapiens
tttcttgagaagaagttccatctgccagccctgatcatattgtagtctgccttgcagaattcatctgaagcttcctccactgccagacagatcttcctgcatcaggtccggtgctgcccctgacatgaaatgctcaagatttctagacattgaaacactctgaagaattgaaaggtaattcaaaaaggaaaaataatgactgtcctcaatgtgtgtgtgtgtgtatatatgcacacctacctgcctgtgtgtgcttgtttagatgataagaaaaatactaagaaagtctcgacaattgaaacactatggaattgatacaagccaagaagcagacccaaatacmcgcagagaatgaatagtttatccactagatggcttaggaaaaaaatgactacttagtaaaacaacaaattaagttaaatatattttcatattacacaaacagaaaacaaaaaatccagatggcttatttaaagaaatattaacaaataaaacaataaaagatctataataaaatgtaggtaaacatatttttggagttcgaaagacatttttaacaaagaaagaaaacacaaaggaaaagaggaatatatttgaatgcatacaatttgaacacaaatttgaaactgattt

SEQ ID NO: 718038 - DNA, 633 bp, Homo sapiens
tttcttgagaagaagttccatctgccagccctgatcatattgtagtctgccttgcagaattcatctgaagcttcctccactgccagacagatcttcctgcatcaggtccggtgctgcccctgacatgaaatgctcaagatttctagacattgaaacactctgaagaattgaaaggtaattcaaaaaggaaaaataatgactgtcctcaatgtgtgtgtgtgtgtatatatgcacacctacctgcctgtgtgtgcttgtttagatgataagaaaaatactaagaaagtctcgacaattgaaacactatggaattgatacaagccaagaagcagacccaaatacacgcagagaatgaatagtttatccactagatggcttaggaaaaaaatgactacttagtaaaacaacaaattaagttaaatatattttcatattacacaaacagaaaacaaaaaatccagatggcttatttaaagaaatattaacaaataaaacaataaaagatctataataaaatgtaggtaaacatatttttggagttygaaagacatttttaacaaagaaagaaaacacaaaggaaaagaggaatatatttgaatgcatacaatttgaacacaaatttgaaactgattt

SEQ ID NO: 718039 - DNA, 1066 bp, Homo sapiens
cgtatttattcttatttattatttctattttctttctctctctttttaaaaaacaatctgtctaatcaaaactctcttttttcaaaaccaatctgtctaatcaaacagcaagtgtattctgcaaactcccccttgaaaatctccaggatacattcagtgcgttgtataacatctaatatattctgaatactgagaacttctgaagacaccaaatatgtgtttggcctctagtgaggtctaggaggtgcatagctaataggattagaatattctggtggtgtgatttttgagtagtgtgggaataaatatcttttcattattttgcttaatatatgtttcatttatatgatcaaaaaccttttctgtatcagtctagtaaatcatacatgagtttggctgcaataagtgagggtcctgcaggccctcagagatagcgttcctaacattggttttattgtacagggcagtagaagatagaaccccaaatccaccgagcctgtgatctaccttgattgaaaaaagtaattcctgctaaattcccattgcctgcaatttaaaaaaaaatactcacatcccctcctttatcttttatctatgcattctattaagcttatgtgtacatgtcctatcttagctactaaattgcaaatagcttgagggcagactaagcatctggttcacttttgtgaccctcacagcacacaacagaatatgttccacaaagcaagagttcattaaataataactgaatgaatgaatgtcaactgcctcaagttttttggttctcctaaaaacaaagcaaaagaaagaaattttagttaatttagggctttgggtcattgagttccaattaattgacrtcctacaggaactggaatctctctagcagttcttctttcatgagagaacattggaacctagagaacctggaattcctgatggggtctgatttggaatttgcaacaaaaaagttgaatagattttgtcttgagttttcaaaacttagattgttaaaatagagcagaataataataataacatttggaaccaacacctagtaagcatg

SEQ ID NO: 718040 - DNA, 1497 bp, Homo sapiens
ctggtaattcaataaattatgctgttgttttaggaaaacaaatgataaatccaaaatgcaattcttagaataacyaataactctggctcactgaatatgtactaaggtcttctttttttaaggttttcaatgatgctaaatcaatattaagaatctgaaaaccttttgttaccactctggtccaagccatgaataactttgaccagaattattacaatgattcccgagttgattcccacacttctatccttcatccctacaggatactctcagcacagcttccagagtgattcctttaaatagttcagatcattcccatattcaaaaccctaagtaaaaggaaaattgcttacaatggccaaaatccctacacaaagtgtctcatactccacatacatctctccaacctcaatatttgctattcctccgctgtctcacatttctccaactataatgatcttgccttctatcaccttgtttagtgtgcttccacattagtgtattctgaagattcttttccttgtatttctacatatctgaatctcttatgcacttcaaataaccttttcattgaggtaccattcctaacctgctctactttacattacaacagttgggaccttctccttcacgtatagtttacttaattattatctttatttcatgcttccttgcaggaataaaatgttttaaaggacagagcttttactttgctttgatcactgacaaatcccaagagctagaaaagtgggatgtagtaggtagttaataaatatgtattgagttaatgtatgaatacttccttatagttggagggtgagaagaagtcatcatctattactatatcaggaaaaataacctgacaataaagcttagaatgccaattagatagtgagtataaataattaaaccatacactgaaaaacaagacaggtacttactaaatgtcttcttctccatatgctttaagtgtctgttccttttcttggtagattataacgaaagctactgagcagtctttgtgtaagtagagattgtggttggtcataagtgagtcagtcaagagcaaaaactcacaactattttcttaaatgctaaattcagtgtgatttatatcagaatattttaaataaatataaaaattagtgcatgttagacaataaaataatctaaacttcaagtgtactaaaagtgtatatctcttaaggtcatttgcatataatatgaatcatataggaacatagtatattcaatagtgcagaaaatgtgtcatccagcttctttgagagactctataatgtaatggaaagccagcgttggtttagagctcacgtgctctgtaaacacattcagttgaaatgcctccgtgcttctgctgttgaagaatatatttttctctagtaagcattagtcccttcaagaaagcaaccaactaaccactgaaagtcccctctctatcaggaagagcagagggctctgctactgtgtcaaagtccg

SEQ ID NO: 718041 - DNA, 1497 bp, Homo sapiens
ctggtaattcaataaattatgctgttgttttaggaaaacaaatgataaatccaaaatgcaattcttagaataactaataactctggctcactgaatatgtactaaggtcttctttttttaaggttttcaatgatgctaaatcaatattaagaatctgaaaaccttttgttaccactctggtccaagccatgaataactttgaccagaattattacaatgattcccgagttgattcccacacttctatccttcatccctacaggatactctcagcacagcttccagagtgattcctttaaatagttcagatcattcccatattcaaaaccctaagtaaaaggaaaattgcttacaatggccaaaatccctacacaaagtgtctcatactccacatacatctctccaacctcaatatttgctattcctccgctgtctcacatttctccaactataatgatcttgccttctatcaccttgtttagtgtgcttccacattagtgtattctgaagattcttttccttgtatttctacatatctgaatctcttatgcacttcaaataaycttttcattgaggtaccattcctaacctgctctactttacattacaacagttgggaccttctccttcacgtatagtttacttaattattatctttatttcatgcttccttgcaggaataaaatgttttaaaggacagagcttttactttgctttgatcactgacaaatcccaagagctagaaaagtgggatgtagtaggtagttaataaatatgtattgagttaatgtatgaatacttccttatagttggagggtgagaagaagtcatcatctattactatatcaggaaaaataacctgacaataaagcttagaatgccaattagatagtgagtataaataattaaaccatacactgaaaaacaagacaggtacttactaaatgtcttcttctccatatgctttaagtgtctgttccttttcttggtagattataacgaaagctactgagcagtctttgtgtaagtagagattgtggttggtcataagtgagtcagtcaagagcaaaaactcacaactattttcttaaatgctaaattcagtgtgatttatatcagaatattttaaataaatataaaaattagtgcatgttagacaataaaataatctaaacttcaagtgtactaaaagtgtatatctcttaaggtcatttgcatataatatgaatcatataggaacatagtatattcaatagtgcagaaaatgtgtcatccagcttctttgagagactctataatgtaatggaaagccagcgttggtttagagctcacgtgctctgtaaacacattcagttgaaatgcctccgtgcttctgctgttgaagaatatatttttctctagtaagcattagtcccttcaagaaagcaaccaactaaccactgaaagtcccctctctatcaggaagagcagagggctctgctactgtgtcaaagtccg

SEQ ID NO: 718042 - DNA, 1497 bp, Homo sapiens
ctggtaattcaataaattatgctgttgttttaggaaaacaaatgataaatccaaaatgcaattcttagaataactaataactctggctcactgaatatgtactaaggtcttctttttttaaggttttcaatgatgctaaatcaatattaagaatctgaaaaccttttgttaccactctggtccaagccatgaataactttgaccagaattattacaatgattcccgagttgattcccacacttctatccttcatccctacaggatactctcagcacagcttccagagtgattcctttaaatagttcagatcattcccatattcaaaaccctaagtaaaaggaaaattgcttacaatggccaaaatccctacacaaagtgtctcatactccacatacatctctccaacctcaatatttgctattcctccgctgtctcacatttctccaactataatgatcttgccttctatcaccttgtttagtgtgcttccacattagtgtattctgaagattcttttccttgtatttctacatatctgaatctcttatgcacttcaaataaccttttcattgaggtaccattcctaacctgctctactttacattacaacagttgggaccttctccttcacgtatagtttacttaattattatctttatttcatgcttccttgcaggaataaaatgttttaaaggacagagcttttactttgctttgatcactgacaaatcccaagagctagaaaagtgggatgtagtaggtagttaataaatatgtattgagttaatgtatgaatacttccttatagttggagggtgagaagaagtcatcatctatyactatatcaggaaaaataacctgacaataaagcttagaatgccaattagatagtgagtataaataattaaaccatacactgaaaaacaagacaggtacttactaaatgtcttcttctccatatgctttaagtgtctgttccttttcttggtagattataacgaaagctactgagcagtctttgtgtaagtagagattgtggttggtcataagtgagtcagtcaagagcaaaaactcacaactattttcttaaatgctaaattcagtgtgatttatatcagaatattttaaataaatataaaaattagtgcatgttagacaataaaataatctaaacttcaagtgtactaaaagtgtatatctcttaaggtcatttgcatataatatgaatcatataggaacatagtatattcaatagtgcagaaaatgtgtcatccagcttctttgagagactctataatgtaatggaaagccagcgttggtttagagctcacgtgctctgtaaacacattcagttgaaatgcctccgtgcttctgctgttgaagaatatatttttctctagtaagcattagtcccttcaagaaagcaaccaactaaccactgaaagtcccctctctatcaggaagagcagagggctctgctactgtgtcaaagtccg

SEQ ID NO: 718043 - DNA, 2153 bp, Homo sapiens
  misc_feature 1310, 1376, 1422, 1423, 1424, 1425, 1426, 1427, 1428, 1429,1430, 1431, 1432, 1433, 1434, 1435, 1436, 1437, 1438, 1439,1440, 1441, 1442, 1443, 1444, 1445, 1446, 1447, 1448, 1449,1450, 1451, 1452, 1453, 1454, 1455, 1456, 1457, 1458: n = A,T,C or G
  misc_feature 1459, 1460, 1461, 1462, 1463, 1464, 1465, 1466, 1467, 1468,1469, 1470, 1471, 1472, 1473, 1474, 1475, 1476, 1477, 1478,1479, 1480, 1481, 1482, 1483, 1484, 1485, 1486, 1487, 1488,1489, 1490, 1491, 1492, 1493, 1494, 1495, 1496, 1497: n = A,T,C or G
  misc_feature 1498, 1499, 1500, 1501, 1502, 1503, 1504, 1505, 1506, 1507,1508, 1509, 1510, 1511, 1512, 1513, 1514, 1515, 1516, 1517,1518, 1519, 1520, 1521: n = A,T,C or G
tccaccttggtgagactgtgccatacaaacagggcttcagggaaagatagtagtgttatcagagtatggctcagtctctttcatgggctcataaatttcttcccattacaatacaacaacacaaaacttcagggtggtgttagcttttactgaaaatttagaataaacaaaaatgaattagagtgtatttttaagacatatatctgatttattaccccttatctacacttggaaaaagtcagttgccacttactggagctcagtcaaatttagataggaaacttccttgtgttcatttttagtgaggtatgtatgtgttgggacaatgcaaggtggagagaggcaggagacactggacataaagcaaagatgaaagaaaggtagaaaagatgtatcctttggttaagagttaatgcataaactattaatgttaaagggtgtaaccctatgctaaaacacctatacataacaaatttgtgtgtttctcctcctctttggaaggcatatcaaataccagcagatcaaaatgataaaataaacagggtggtcttttttgtacaaaattgccttggagttatgtattcataagggttgtcttgaaaaactgaaccagtagggtctatgtatatctgtatatatctatgtctatctatatctatatctttacctatatatctatatctataatgagtgttagttcacactctcatggaccctgagatgccccacaatattctttctgcaagccagaggcctaggaaggtagttcttgttcatgtccttaggcccaagaaccaggagtgctaatgttgaaggaaaaaagaagaatgttcacgctcaagaagagagaacaagttcacccttcctctgccttttgttcaactgggaccctcaacagactgggtgatgcccgtcctctctggtgagagccatctttttcactcattctactgatacacccagaaataataattttctagctatctgagcctcccttagttcagtcaaattgacacataaaattaaccagtataggttaccactgaggtatataattgttagaactccagagaaatcacaaaattaaactgaatccctgttgcccatggcatgtataaaacatttgccactttacctaatttcatttttccaccaggaagtgaacactgtgagactagaaggcacttacatattagaagatgtaaagattccaggtgaccacaatgtggatattctaaatgcaagaaatataattgctaatttaatcatttgagtttgaatatttttattacaatggtcagcctgggtgngatatatttagaaggtgatccatgtggcctttgctttctagtctatagtttctgagatttgtgtanacaatgtatattacctcactagggaatgtatatgtgggtctacttnnnnnnnnnnnnnnnnnnnnnnnnnnnnnnnnnnnnnnnnnnnnnnnnnnnnnnnnnnnnnnnnnnnnnnnnnnnnnnnnnnnnnnnnnnnnnnnnnnnnactctgatgtataatatggataaatcactagcattggccatggtcatatatcatatctatgactattctactgttcttgataaatattgccaagttgacttctttaacattatgccagtgtataagcrtatgatttatatatttctcaagttatatacataagaacttttacaaatcaacataaaaattctaaaagaaaaaaatgagcaaaacataaaaatatgaaaatcaaatggttaaaaattaaaaaatatgcaaatgtttgaattattaaaatcatgcaaaataagttgataattatatacaggtactttgctagactcaccaaagtaattagagaattaaaataatgttgatggatttacagtactaacaagatgtcatcttggcccaaaatttctaaaaagcaatgttgaaatatttatcaaggtctctaatataatcatagctttaataattttcagaaaattaggaatgtagacagaatatcttgtttaaaagtgtttaacatagcatcattaattaagtagctattttttaaatctcaagagtaaaagaaatatctatgttgatattgttgatattgcctaatgatctattctctcttatttcctttatcacagcaaccccca

SEQ ID NO: 718044 - DNA, 639 bp, Homo sapiens
ttttttaaataacaaagtagtagtataatctgtgaatgtgcatgagatagttcacaaaacacatacataaagggaagagacaactgttcaggactctgaatactgccaatatctaaggagaaaagaggaatcaccaatgataatgcaaggagtaagtggaacaattaaaccaagaaagactgtgtttataaattctaagagatggtaaaatgtaaaggagaatatattaaagtgcattaaatggcaggcattttaaacagtgctggaagtagtcaattgtgttatgtatcttgcaaattcaaataatttaagaataataagtgacaattagattttgcagttaggcttttagggatcttagcaagaacaatttctgtctagggtaagaaaagttggcagatcaccaagggctaagatgagaatagaagagaaggcagaataacctggctaggatgaaaagaagagaatttaacaatagagggtgattcagatgaaaatggtttcttaagtatgggaataayctgtacatatttacatgctgagaagaaagggccaaaaatataggataaagaggggaaaagatagggaagtccaaaatgtgaaagtggtacttggaacatgatggattaatgttagaga

SEQ ID NO: 718045 - DNA, 1435 bp, Homo sapiens
tgacagttccgagctcactgagtggctgagcattgtgagagaggacaagggaataattgagattggtgttaattaaaagttgtggctttcatctagcacctcagatttttcttcactgcccctagcattcctcactttactcctttatcaactcttctgcaagtctgtcattccttttaatcactttggctatcagagttgctcaaacttcactcatttttgacaactttgagagttttcaggagtactggtcagatcacttacattgggatttatctgatttttcctaatgattcaacagaaaccgtgggtttctggggagaagagtgtagaaggaaaatgctyttctcatcacaacctttcaaaagtacatgctatcaaaataagacatcactattgttgttaatcttggtcacgtggtgttcattgggtttcttcattgtcaatgtactcatcttttcccctcttttccacactactcagaagtcactatgcacatcccacccatgaagggtggggagttatgccccaccttcttgaaggaagagtatctatataaattacttggaattctgcatgaaagagtttgcagtaaaccccccaccaccaccttgattaaagtgtgattgacaaataaaaattgtaagtactcgagctatacaatgtgatgatttcatatacgtaaatatacactgccaaatgattaccacagtcaagctaattaacacatccatcacatcacataattatctttttctgtggtgagaacattcaagatcaactcccttagcaaagtataaatataaataataatacaatattattagctatagtcaccatgttatacatgaaatctccaacacttactgcagtagctttttaattggcattcttacattcgctcatcactatccgttctgtgctccttgcttccatactatagacacagaggtcattttgaagcagacattcattctctgtttaaaacctttcagtggtcacccactgatggaaatgtaaactctaaatcctaaactcaaggtatagagccgtgtacacaatattattctcaaccagtcaatttcaactttggttcacatggaatcatcaagttgctttggtgcatgtagattcctgatttctactctagagatctccaatctattagtgaaatatggctttgaaatatattagtacatattacctttttattattataaaatatgtattctcacacaattatttttataaaagccatcatcccaataattatatttacttataatattattcatacattttctgttttttttttcagttgattatttggagtcagtgattgccttttggtaattcagaagtacttgggtacatgttataagcattttaattccctctcatttctacattttcagtaaagtgtttccatggtgct

SEQ ID NO: 718046 - DNA, 1435 bp, Homo sapiens
tgacagttccgagctcactgagtggctgagcattgtgagagaggacaagggaataattgagattggtgttaattaaaagttgtggctttcatctagcacctcagatttttcttcactgcccctagcattcctcactttactcctttatcaactcttctgcaagtctgtcattccttttaatcactttggctatcagagttgctcaaacttcactcatttttgacaactttgagagttttcaggagtactggtcagatcacttacattgggatttatctgatttttcctaatgattcaacagaaaccgtgggtttctggggagaagagtgtagaaggaaaatgctcttctcatcacaacctttcaaaagtacatgctatcaaaataagacatcactattgttgttaatcttggtcacgtggtgttcattgggtttcttcattgtcaatgtactcatcttttcccctcttttccacactactcagaagtcactatgcacatcccacccatgaagggtggggagttatgccccaccttcttgaaggaagagtatctayataaattacttggaattctgcatgaaagagtttgcagtaaaccccccaccaccaccttgattaaagtgtgattgacaaataaaaattgtaagtactcgagctatacaatgtgatgatttcatatacgtaaatatacactgccaaatgattaccacagtcaagctaattaacacatccatcacatcacataattatctttttctgtggtgagaacattcaagatcaactcccttagcaaagtataaatataaataataatacaatattattagctatagtcaccatgttatacatgaaatctccaacacttactgcagtagctttttaattggcattcttacattcgctcatcactatccgttctgtgctccttgcttccatactatagacacagaggtcattttgaagcagacattcattctctgtttaaaacctttcagtggtcacccactgatggaaatgtaaactctaaatcctaaactcaaggtatagagccgtgtacacaatattattctcaaccagtcaatttcaactttggttcacatggaatcatcaagttgctttggtgcatgtagattcctgatttctactctagagatctccaatctattagtgaaatatggctttgaaatatattagtacatattacctttttattattataaaatatgtattctcacacaattatttttataaaagccatcatcccaataattatatttacttataatattattcatacattttctgttttttttttcagttgattatttggagtcagtgattgccttttggtaattcagaagtacttgggtacatgttataagcattttaattccctctcatttctacattttcagtaaagtgtttccatggtgct

SEQ ID NO: 718047 - DNA, 644 bp, Homo sapiens
gggaaaacaatactccaaggaccttcacctactatccacccctcctccctttatcctccctctcttccattatacttccttttcaagttgataaccctaaagaaccaygttatacaaggccatctgctgttcagatattatttaatttttagatttcttctaaaagttaaatgacaatcctcttatttccagagtaattggatttaatgtacaattagaataaaaatacctattacccgtcaatgaataagaagttatagtttctcttttcttcagcactttctctgccccaaaatgaaaaaaaaaaaagaagaaaatggcaaggaagatttaattttacctcagcctagtcatttttctgtgttgcttttcttttaattactctcatttaatttttttcaattaccaggatagatattaatttgacatagttaaattctcatatctttgataaaatgcactatgcttgaaaatttttggtatggcagaactttctgattcaagttcattagtagcaagaaactcttacatgccataagcaccacttcttttaaaaaccgtgtttgaatcttgctcaagttattaagccctatatttccattcagcagatataaaaagagtgctaacgtgaaagcattgttgaa

SEQ ID NO: 718048 - DNA, 1104 bp, Homo sapiens
gaactctgctcatatatgtcatttatcatttaccacattgtgttgtgcaatctgtttgcaggtctgaatctttctttagactttgacttgcttgagggttgaggctgtcttctttatctttcctgcaaaagcagtaaatgtgtgattcataaatgtgtgattcataacatttcttaaattttttttatgttgtaaagtatataaagaaaaatatacaaattatcagtgtacaactggatgagtcacaacgtgtattcaactttgccatgaaatggctgctcagaatcactctgtcactctgagcatcccctcagacccacctgctcaactcctcagtcactcttccttccctgtgtgtcagagtaatcacattcagactttcagtaccgagactagtgttttagtaaatagtaaaaatactattttacatagtttttggatcctatatattttgggtagtttttttatttctttctttttctttttattttatataaatgtaaataaaacacaaactcataagtggaagacctagcataatttaaaattaatcaataaaaatgtccagtagtgttaataatgcttatgtaatctgaacacacaacgaagatatgtgatacactaaaaagtaattgacaattatttatcttattcttccaggaatataggaacagatattttacttcttgtctcaaccaacatgcaatttctaagctagaaatttaatggttgttatgaaccgaatgtttgtcaccccaaaattcgtatgttggtgcactaacccccaatgtggtattgtttggagctgggacttttgggaggtaactagggttaaatgagctgtcagtatggccctcataatgggattgcctttataagaatagacactaaagaggttgtttgtgccccccacmcccacctcattcaccaagaagagatcatgtaagtacacaaagaagaggaaactatctgccagctacaaaaagagcccttaccagactccaaccatgtagcttattggcaccctaatcttggacctccagccttcagaactgtgagaaaataaatttctgttgtttaagccactcactttatggtattttg

SEQ ID NO: 718049 - DNA, 2160 bp, Homo sapiens
ttttctgatatttttcttgtggaattttaattctaaaattgcaataaagaatcttagatttaatgcctctaaatttattttggcaaagtttttgcgtagtcaaacttctatcaatatgaataatttaaaaggctttatcttctctcctcagtagcataaattttgctatacttcttaaaaagttctctctcacacattgataacataaccatcatcttcatatctactttttggggggttgaaaaataaaaaaggaatcttagaccagtaggaaatacaagggaaaaatctaaatgattttctgaaagttttagactgtatagtataaaaactgggttactccatccctaagatgaattcttagtcatgactttcatagttaatttcttactctttctacttttaacatgtaacttcttttctttttatgattgtattaattaataggactattcgcctgttgatttgtccgtattcctattgaatttctacaaacagctttgtatttcatgtggtattaatatatttttcctgtttgtataaacacagaaattaggaatagtgagaaaatttcacacagccacacataaagcaaataattacagcatacttcactctgatatcataataacagctactgtttatttgggcctatcatgtaccatacactttataaattatctcaacaaagctgcaaattattatcatcattgtacaaattaaaaaattaggattcagagaattggaatgatatgctgaaagccacagtgtgatgtttgtatttgaactcttatctgtgtggtgcaaaacttgaacttttctcactatactattttgtggtaattatctaatctataacattatctatctatctaatctaatgccaacattctctgtgctgtttcaggccctaggaaagataacgtgctcagactagtcaccaccaaagaaaaaaaaagcggtatttctttaaggcagaagagatctaaacatgaggactaaattaggaagatggattagggggataacagtggagatactatacatactccaattacttacaaactatgtagggaaatgtaattttgctttagagatgttacatatattctttgaactttaatgaaaaaatcatttattcctttagcgcaaaataaccctcctaaatactaattgatatatttattgttaatctgttaggaaaccatacttaattgacgcctatgctcaccccccagtttattccattttattcttagtttttcttttgaaaagatactctttacagtaacttaaacaataccaacacaaacattttaaagtctttctacatggagatatttgtttctttactgctcctttttctatttacgcgtcttctccaaacatttttaaaaatctattgattttttatagtatagaaatgaaaatgagagttcaagtaattatcttcaatatacaaatttcttctacaaagaagtgtgggggaaagaatagaaactggttttccatgagttaactgagttgacttcttgtatcaattaagagcatcgtataattgctcatctttcatactcttgccctgtagctataatgaaaagagagaaaaaagtaattactcatgctttgccttattctgaattgggcaaaattcaatagtttttcaattctacatatggtagaaattctgtttattttagtcctgagaccctgagatatttttctagcacatggtggacagagacccctatttctgcatttagatcatatgtttatttatgtcttagtaattttaaaaataccagaacaaatggcaagccaatccataatgtcttctgcataactgtgtgggagtcaaaccacaaatattatctgtatttattttaggctctcccaccctttggctgtcttcgtaggactgtttaccaggacgacactcctgggcagcagtggcgccacatccatttggcatagctgtctacatgggatctttccttctgttgtctttctttggcactaactagtgaatgaagtcatgcaaaaatgtctgtctagtcattgagatgcctaggtctgtgaygatggagactgttaatctggtagtatttcctactggttttgaattatcttctctatatacaggctagtggttggcctgaa

SEQ ID NO: 718050 - DNA, 636 bp, Homo sapiens
taaggatagtgtgtaatgcagttttattcctatagacggcttcaagaaaaaagagattaaaaacaactaactatagctacatcaaattgttaagggatatatattacaaaaataaatataagttttggtaacaaaattataagaggtagggggaaggagtaaaaatgtraaaagttactaaaggcaagttgctattggcttaaagtagcctattttaaggatatgtaattctcacagtaaccacaatgcaaaaatctagagtagttgcataaaatatataaaagagtcaaagcataccattaaacaacaaaggaagacagaaaaagacaaagaaagaaaaaaagacactagaaaacaaacagaaaacaagctacaaaatttcaatagcaagattctatcaaaagtttccttgaatgtaaatagattaaattctccagttaaaagataaagtgactgaatgggtttaacagaacaagatttcatcagatgctgcttataggagcaccatgttagtggtaaggacacacatagactgtaagtaaagggataaaaaaaatttcatgcaaatcaaaacctgaagagtacacataaaactatacttatgtcatacaaaatagactttaaattaaaaactat

SEQ ID NO: 718051 - DNA, 636 bp, Homo sapiens
taaggatagtgtgtaatgcagttttattcctatagacggcttcaagaaaaaagagattaaaaacaactaactatagctacatcaaattgttaagggatatatattacaaaaataaatataagttttggtaacaaaattataagaggtagggggaaggagtaaaaatgtgaaaagttactaaaggcaagttgctattggcttaaagtagcctattttaaggatatgtaattctcacagtaaccacaatgcaaaaatctagagtagttrcataaaatatataaaagagtcaaagcataccattaaacaacaaaggaagacagaaaaagacaaagaaagaaaaaaagacactagaaaacaaacagaaaacaagctacaaaatttcaatagcaagattctatcaaaagtttccttgaatgtaaatagattaaattctccagttaaaagataaagtgactgaatgggtttaacagaacaagatttcatcagatgctgcttataggagcaccatgttagtggtaaggacacacatagactgtaagtaaagggataaaaaaaatttcatgcaaatcaaaacctgaagagtacacataaaactatacttatgtcatacaaaatagactttaaattaaaaactat

SEQ ID NO: 718052 - DNA, 648 bp, Homo sapiens
gaaaataaatgcattccctcaacatatatatatatatatatatatatatatatatacacacacatatatatatgtatatgtatatgtatatatatatacatatacatacatacatacatacacacacacacacacacacacaaacacacacacacacacaaagggctgtaggtgtcagcaatatcagtttaataaccttttttttttaaagaacacccaaacagtggtgagctgtaaaagctaccatcacatcttcatatctctgaggatgccagcaggccttgcttcccacctgtgtctccctagggccaatgaattataaagagttgttctctgacagccaagaactacttctgcaattctagaaacctttccaggagccatttatttcccctggcattccactcagtsccagatgatttaaaacctagaaactagctagtaaataaacgtcttcctcttatagtacttgtgagtcattaccctgttccttgtgagcaccttatcattttaacatgagaaatgctattttaagtagactatcatagagctgaactgaatacttacaacccataaaatatcactgtgcaatatgactttacaaagataaaactcaattgggaaaactgatcaatcaagtgggggatc

SEQ ID NO: 718053 - DNA, 733 bp, Homo sapiens
tggtagctacctctacaggcagggatttcagggcatcctgctaacatgacgtaagctgcagccctatctcgtttgggaccagcaacaggtgctgggcaacaggaggctgatgtgtaatktgatactccaccatggcggactgaaaccagcaggtgagaccatacagcacaatggtgatgtcatgcactcattctgaaactgggttcatagttctgctttgaacatacagctgaatggtaggggaaaactttggacaagtgacaaacttctctaagcctcatgtttcttatctgtaaaatgggtacctgtcattgagttgtgaggactgaatgaagctaatgcttacatagcacttagtttagtgcctggtatatatcaagtggctcttggctcaagcagctctactttatctgttctgatgattataataatgtttatatttgtaaaagaaaatcagagaaagcagatttaggagtgtcctacattaaagattccttaagatagtagagttgaagatgatctctgacaacaaaatgagaatcatactcctaatttctttatatgggcacatggataggatgtggctgcttgggagagttcatttgcttttccttaacttcttttcctttgaaacatctgttttcaaaacgtaggtggagtaagtgtgtttatcccactaaaacacgaaccttttcttttctcaacaaccattgaaaagtttcaaccagttttt

SEQ ID NO: 718054 - DNA, 594 bp, Homo sapiens
caaatatcacagaccgcacttacgcaaacctagatggtatggcctactatacgtctaggctagatgggatagcttattgctcctaggctacaaccctgtacagcatattaccgtactaaataccgtaggcagttgtagcacaatggttgagtatttgtgtatctaaaaatagaaaaggtacagtaagtatacagtattataatcatacaggaccaccataatacacagtgcgtcattgaccaaaatatcattatgtgacacatgaccgtattcacttctttttcatgtctctcacccatgactagactgcaaagatacttatttatcccttactaatttatgccataccctgggccttagtttagcgtcaggtacakagcaggcactaaataaatgtttgaggcaggaaggtagagaggaaaaaagggaagagaaggagaaaaggtagaaacaatgtagaaatataaattgagactcaaattatgtatgtcctggttgacacggcatcattttaaaatcatgtggtgtattttcaccttggtaaaataaaagggtttattgaaactttaaaattactgaactataatgctttaa

SEQ ID NO: 718055 - DNA, 884 bp, Homo sapiens
caggtcttactaaagaataaaaaataaagctacttgaagtttgagaaggttatttgccactgctcaaggtgcaaagatttccaatttaacactagcatagtccaatccacccaggttctgtccatttgtccttgattggacattatgaatcacaagaagaaaactactccattgtatgaatcactgtccccattcccctttccatttctggttcaattgacacttttgtctatccactcacaataaggttagcatggctttgctagctacttataaagttgtattatccaaaaaaaggtgaagctccaagtgtgatataaggatgatctacgatagctactaaagctgaagaaagttaggattatacaaacttactcccaaataaaagcatgagaaacatgtacattaccaatggaattctaaaaaatatattctatgtggctcttctctcacttcaaagataaaggaaattttgagaaaaacgtgaatgatattttgggatgttatgaaaactttaagtactatttttagtactatgaataattcttgcaaagcatagagttatttactaagctggaatgccctggctttctccacatgttctgaaaagagctccattcctttcagraccataaacaatggatcgttagcttctggaatcattgcatctacatcctgaaataagaggagaggcactgttttgtgcctacatgtgatgaaggcctaaagaaaacccactagatttcaaagaaactttctagttaccttgaaaaataaaggccaaaaatttaaatggaaaaataattttgacatgtcaaggactggatggggagctggttatgaaaggcacggagaagcagcagaggtggttgaccagagactta

SEQ ID NO: 718056 - DNA, 644 bp, Homo sapiens
tcattcttaaaagaaaattatttctcctgaccaatgaatcacaaaatttctcatgtttcttccaatgcgtatctactattctattatcactggaaaactttccttatattaactattgaatttattgtttttggataatacaggatygatattcttttaatttcatgccaatttgtagccatccgaagtcttatactgctgcccttgcaaagagaaatctctttaattgggggaggatgtttgctagaaaagtttatgtaaacattaaaaacaaaaaggtatgtatgaaatacttatcttcctttaaagaacaagaagactattcaagatataaaacactacggttcatcaaagctatttccttgtgttgtcaaattttgttaacttaggaaagtatgaaaattaacttctatctcacgttaaaaacacatcgttatacttaactagtttttatttttaaagtaatacatgtacatgattaaataaataaatatataaagcctagaaaagagatattaagaaaagcaattttctcttcaacctaggtttgatcttctttagtggcaacaattattgtttgcttgtttatttctatccaaaaatttcttacacaaataagtcttgttaatttttctcggtaaagg

SEQ ID NO: 718057 - DNA, 1214 bp, Homo sapiens
atctcagggatatgcctcacctcttaaaaaggtttgtaaatggtgaaattaccaatacataaatcagtcgagaaatgtcatttgttccatatttggggaaaaattttagaatataattaaatctatggtcctgactacactgttataaaagatgagtgggtgtgagggtaatcagggattggtttaagattgcacccaaatctctatttgtgataatggttgtgcacctgtaattcaattcaagatagatgaagtatcaaaaggcaaagttaaactacaaacaatttccttttatttcttatctttacaaatgaacaacattaagctgagcctsaaaaagttacaggttccaaagcctattatctatataaagtgaatagttatccttctgcaatatcgtatgtacagcagtcttccctcactcacagttttactctccggttacctctggtcaaccatggtccgaaaataggtaaatatcttacagtagagtaggatattttcagacaaagactagatttacataactgttatttcagtatattgttttaattgctctgttttattattatttttgttaataaagtactgtgcctaatttataaattaaactttatcataggtacatatgcatagagaagtagtttacttaaggttctgtactatccacagttatagagagtcactgagcgttttgaaacatatcccttgtggataaggggggattactgcattttaattcaaaaagtagcatttcaacactattttcatgtttatctaatgcttatgagcaccaacgctttcacttacctcatgctgagcaggaaccagaagaatgcaaataatatgggaaatgtagaaatagctattttcaatttaaaataaattgcagctttcatgcattatagtctcagaacaaggaatacttctctagaaaatccaggagactttcttgccactggtattgaggtaaaggattgctactctttctcgttttttttttttttttttttttttcgagactgaatctcgctctctctcccaggctggagtgcagtggcgccatctccgctcactgcaagctccgcctcccgggttcgcgccattctcctgcctcagcctaccgagtagctgggactacaggcgcagccaccacgcccagctaatttttcagtagagacggggtttcaccgtgttagccaggataaggcctc

SEQ ID NO: 718058 - DNA, 2124 bp, Homo sapiens
agaaatgaaggctcagagatagaaaatgtcttgaacaatgtcatatagattatcacctaaaatgtaagaggcagagttcaaactagaacccaaggcttctgttaataacttgggctctttgactacagaatttagcacctgtaattcagggatgagccctctcatgctggtgaggcctctgtgtactgtgggagcaactgactcacagcttcacaatctgggcataatgtacggtgttccacactccgcccatccttccttggattaagcaataaactaaagttcaaattcaaactttcatatttgaatagaacacattttctatatttttcccaactgcctcacctccatgcagctaatctagttctgatttctcagcatctctattgaggacaaggcacctgtgagcttcattccttctgcagagcacagtccctacccttgtctttttttaatcctttgttgtcataaccatgcctttctttcctcataccataggaggcacatcttgctctctaccttccaactacatttataattgtttcttttatttttttcttcatcatggtaccttatgccatgtaataaaagagcaacagatttaccctgagtggttaggtagtttcaaatatatatatgtgtgtatatatgtgtgtgtgtatatatatacatatgtgtgtgtgtgtatgtatgtatcccagtgaagcactcctcttggattttaactaccattctattattctccctaaagtagttgcacagaatagtgtgaatggtgtgaattccagaataatacagagctgcrtccatatcctggcttcccatttattagatagaggatattggacaaatttatcatctttctaagccctagattctttctcaaccacccacaattcagtgataattatcattactctcactgtattctctttatagatcaggcattatactaggtatttcacgtttagaatattgaattgttacgaaaattttattatgcaagtattattctgatttacgtttaaagaaactaataatagagaggataagaaagctaccaaggtcatatagctggcaggtaattgagtggggacaacctaattctaaaattcttctttttaaagtgcatatcatactagaaggtacatgtgtgagtatggttgtgtgtgtgtgtgtgtttgtgtattaaggatttagtttgagttaatggatagaagagaggtgaagggcaaaacaaatatttaactaaacttctctatgctaatccctgtaggaggcacttttaattattatcacaatatttttagaagagtatggcattgtctcctgagatgctgtgagattagaaaacatgtcaaaggttacacagctagcatatgaaagagcccaaaatccaaacctgtatatatctgtctctaagccctttatgacacagacaaattatcaattagtattaatgtataatttaggaaataccttttagagtcttacacttctagatttggaaatatctttgagaataattcagaggtgataacaaacatataagttgtctacagtcgttaaaaacggtatctgcatagagtactgtgactgggtgtggtagccccactgatgctaaacattaactctttagtttcttaatcatgctacagtaagggtatcctgggaaattggcccagccaaagcaacttggacgcttgagtagaaggactctggaagttctgggtaatcgttattcaccaacctgtacaagcatttcactctctcattggcctatatgactatccattagccctagctactcttgtccttactttacatctggttaattatttaatttttccaagctttaagtatttattccgcacaccacccaatttaatgatatccactactgagaagttatgcaatttaactgatattacttatttagtttgaactctaggatcttttgtccttccaaatccattggcttgtttttaagtttcttctgtttttttttttttcttttaaaggcacttcaataaatatttttctttattttaatttaaatttcaattgcatctagatgaagtgttgcttggggtagtgctaacggctttccagttgtaatatgat

SEQ ID NO: 718059 - DNA, 2124 bp, Homo sapiens
agaaatgaaggctcagagatagaaaatgtcttgaacaatgtcatatagattatcacctaaaatgtaagaggcagagttcaaactagaacccaaggcttctgttaataacttgggctctttgactacagaatttagcacctgtaattcagggatgagccctctcatgctggtgaggcctctgtgtactgtgggagcaactgactcacagcttcacaatctgggcataatgtacggtgttccacactccgcccatccttccttggattaagcaataaactaaagttcaaattcaaactttcatatttgaatagaacacattttctatatttttcccaactgcctcacctccatgcagctaatctagttctgatttctcagcatctctattgaggacaaggcacctgtgagcttcattccttctgcagagcacagtccctacccttgtctttttttaatcctttgttgtcataaccatgcctttctttcctcataccataggaggcacatcttgctctctaccttccaactacatttataattgtttcttttatttttttcttcatcatggtaccttatgccatgtaataaaagagcaacagatttaccctgagtggttaggtagtttcaaatatatatatgtgtgtatatatgtgtgtgtgtatatatatacatatgtgtgtgtgtgtatgtatgtatcccagtgaagcactcctcttggattttaactaccattctattattctccctaaagtagttgcacagaatagtgtgaatggtgtgaattccagaataatacagagctgcgtccatatcctggcttcccatttattagatagaggatattggacaaatttatcatctttctaagccctagattctttctcaaccacccacaattcagtgataaytatcattactctcactgtattctctttatagatcaggcattatactaggtatttcacgtttagaatattgaattgttacgaaaattttattatgcaagtattattctgatttacgtttaaagaaactaataatagagaggataagaaagctaccaaggtcatatagctggcaggtaattgagtggggacaacctaattctaaaattcttctttttaaagtgcatatcatactagaaggtacatgtgtgagtatggttgtgtgtgtgtgtgtgtttgtgtattaaggatttagtttgagttaatggatagaagagaggtgaagggcaaaacaaatatttaactaaacttctctatgctaatccctgtaggaggcacttttaattattatcacaatatttttagaagagtatggcattgtctcctgagatgctgtgagattagaaaacatgtcaaaggttacacagctagcatatgaaagagcccaaaatccaaacctgtatatatctgtctctaagccctttatgacacagacaaattatcaattagtattaatgtataatttaggaaataccttttagagtcttacacttctagatttggaaatatctttgagaataattcagaggtgataacaaacatataagttgtctacagtcgttaaaaacggtatctgcatagagtactgtgactgggtgtggtagccccactgatgctaaacattaactctttagtttcttaatcatgctacagtaagggtatcctgggaaattggcccagccaaagcaacttggacgcttgagtagaaggactctggaagttctgggtaatcgttattcaccaacctgtacaagcatttcactctctcattggcctatatgactatccattagccctagctactcttgtccttactttacatctggttaattatttaatttttccaagctttaagtatttattccgcacaccacccaatttaatgatatccactactgagaagttatgcaatttaactgatattacttatttagtttgaactctaggatcttttgtccttccaaatccattggcttgtttttaagtttcttctgtttttttttttttcttttaaaggcacttcaataaatatttttctttattttaatttaaatttcaattgcatctagatgaagtgttgcttggggtagtgctaacggctttccagttgtaatatgat

SEQ ID NO: 718060 - DNA, 2124 bp, Homo sapiens
agaaatgaaggctcagagatagaaaatgtcttgaacaatgtcatatagattatcacctaaaatgtaagaggcagagttcaaactagaacccaaggcttctgttaataacttgggctctttgactacagaatttagcacctgtaattcagggatgagccctctcatgctggtgaggcctctgtgtactgtgggagcaactgactcacagcttcacaatctgggcataatgtacggtgttccacactccgcccatccttccttggattaagcaataaactaaagttcaaattcaaactttcatatttgaatagaacacattttctatatttttcccaactgcctcacctccatgcagctaatctagttctgatttctcagcatctctattgaggacaaggcacctgtgagcttcattccttctgcagagcacagtccctacccttgtctttttttaatcctttgttgtcataaccatgcctttctttcctcataccataggaggcacatcttgctctctaccttccaactacatttataattgtttcttttatttttttcttcatcatggtaccttatgccatgtaataaaagagcaacagatttaccctgagtggttaggtagtttcaaatatatatatgtgtgtatatatgtgtgtgtgtatatatatacatatgtgtgtgtgtgtatgtatgtatcccagtgaagcactcctcttggattttaactaccattctattattctccctaaagtagttgcacagaatagtgtgaatggtgtgaattccagaataatacagagctgcgtccatatcctggcttcccatttattagatagaggatattggacaaatttatcatctttctaagccctagattctttctcaaccacccacaattcagtgataattatcattactctcactgtattctctttatagatcaggcattatactaggtatttcacgtttagaatattgaattgttacgaaaattttattatgcaagtattattctgatttacgtttaaagaaactaataatagagaggataagaaagctaccaaggtcatatagctggcaggtaattgagtggggacaacctaattctaaaattcttctttttwaagtgcatatcatactagaaggtacatgtgtgagtatggttgtgtgtgtgtgtgtgtttgtgtattaaggatttagtttgagttaatggatagaagagaggtgaagggcaaaacaaatatttaactaaacttctctatgctaatccctgtaggaggcacttttaattattatcacaatatttttagaagagtatggcattgtctcctgagatgctgtgagattagaaaacatgtcaaaggttacacagctagcatatgaaagagcccaaaatccaaacctgtatatatctgtctctaagccctttatgacacagacaaattatcaattagtattaatgtataatttaggaaataccttttagagtcttacacttctagatttggaaatatctttgagaataattcagaggtgataacaaacatataagttgtctacagtcgttaaaaacggtatctgcatagagtactgtgactgggtgtggtagccccactgatgctaaacattaactctttagtttcttaatcatgctacagtaagggtatcctgggaaattggcccagccaaagcaacttggacgcttgagtagaaggactctggaagttctgggtaatcgttattcaccaacctgtacaagcatttcactctctcattggcctatatgactatccattagccctagctactcttgtccttactttacatctggttaattatttaatttttccaagctttaagtatttattccgcacaccacccaatttaatgatatccactactgagaagttatgcaatttaactgatattacttatttagtttgaactctaggatcttttgtccttccaaatccattggcttgtttttaagtttcttctgtttttttttttttcttttaaaggcacttcaataaatatttttctttattttaatttaaatttcaattgcatctagatgaagtgttgcttggggtagtgctaacggctttccagttgtaatatgat

SEQ ID NO: 718061 - DNA, 584 bp, Homo sapiens
atttaaaatgaataaattggccactgggttatgacaatagaaaaaaatgctctccctcttcccccttttattagcaaatccctgaaaataagtacctctcccctccgcacacacacataaaccacaaatatctaatatcaaagctggaaaaaagaggtagtgccattaaatgctcatcatgtgcaacattttgactctgagaaatagaaagatattggcaggttaaagcagcaaatcacagtttcaaaatataaaagcatactacttcagaacatgggaaagcacttagagctagtgtttgagacaagagtagactttgaagcaaacatttgggtgactcgttggtcttttacatccaggttcttctatcattctatccaccaaatactgctaagctgtggaaccagtaagtataagaacacaggctagaaaactaaggctgttccctgggattctggtgaaagctaataagaataggctctcaaaaagagacaactggctcttagygcacactagctagcaatatttctcattcttatcccaaaataataagaaccaagatttattacagaaactaaatattc

SEQ ID NO: 718062 - DNA, 973 bp, Homo sapiens
gatgaggtgtgtgtgtattaccttggtgtcacatagcctttttaccttacccatgttatattgctcatatactgtcagcttaaataaatataataattaaatagttatgttttattcacagaattaccctgtaagctccttcagagcaggtaacatggcttagaaaaaaatgtgcagagtttatgtacaattactgtgattgaataagcagataaactaattagcaccctaaatttataacaakatactaagttttactgaacaacacaatagtgtcacattcacgggtaattacatatcacctaggcacagcatagtaccttagagaataatttgaatgttggatacaaaagctcggttttttattaacttttatttctgcctgtattagtttgctcgggctgccataacaaaatgccatggactgtgtggcttaaacaacagagattaattttctcacatctctggaggctacaagctcaaggtgttggcaggtctggtttctcccgaagcctctctccctggtttgcaggtaactgacttctcagtatgtcttcacctggtttttcctgtgtgtgtgcctatccctggtgtctctcagagtgttcagatttccttttcttataaggacaccagtcagattggatttgagctcaccctaacagccttatttctaacttaatcacatctttaaagatctcacccctaaatatggttagattctgcagcatgaggggttacaacttcaacatatgaatattggggaacacagttcaactcataacactgcacttttcctctttgtcttgaataaacctgttgattagctgtcgaaatttggatgagtaacttgctgttgtatctttctgtgttaggtgcatccatgtgggtgagtatgtttaaaacaaacacctcaggatatgtgatatgctaaatggaaaagtaaggaaaacatacaagattgccgtgtttt

SEQ ID NO: 718063 - DNA, 973 bp, Homo sapiens
gatgaggtgtgtgtgtattaccttggtgtcacatagcctttttaccttacccatgttatattgctcatatactgtcagcttaaataaatataataattaaatagttatgttttattcacagaattaccctgtaagctccttcagagcaggtaacatggcttagaaaaaaatgtgcagagtttatgtacaattactgtgattgaataagcagataaactaattagcaccctaaatttataacaatatactaagttttactgaacaacacaatagtgtcacattcacgggtaattacatatcacctaggcacagcatagtacctyagagaataatttgaatgttggatacaaaagctcggttttttattaacttttatttctgcctgtattagtttgctcgggctgccataacaaaatgccatggactgtgtggcttaaacaacagagattaattttctcacatctctggaggctacaagctcaaggtgttggcaggtctggtttctcccgaagcctctctccctggtttgcaggtaactgacttctcagtatgtcttcacctggtttttcctgtgtgtgtgcctatccctggtgtctctcagagtgttcagatttccttttcttataaggacaccagtcagattggatttgagctcaccctaacagccttatttctaacttaatcacatctttaaagatctcacccctaaatatggttagattctgcagcatgaggggttacaacttcaacatatgaatattggggaacacagttcaactcataacactgcacttttcctctttgtcttgaataaacctgttgattagctgtcgaaatttggatgagtaacttgctgttgtatctttctgtgttaggtgcatccatgtgggtgagtatgtttaaaacaaacacctcaggatatgtgatatgctaaatggaaaagtaaggaaaacatacaagattgccgtgtttt

SEQ ID NO: 718064 - DNA, 973 bp, Homo sapiens
gatgaggtgtgtgtgtattaccttggtgtcacatagcctttttaccttacccatgttatattgctcatatactgtcagcttaaataaatataataattaaatagttatgttttattcacagaattaccctgtaagctccttcagagcaggtaacatggcttagaaaaaaatgtgcagagtttatgtacaattactgtgattgaataagcagataaactaattagcaccctaaatttataacaatatactaagttttactgaacaacacaatagtgtcacattcacgggtaattacatatcacctaggcacagcatagtaccttagagaataatttgaatgttggatacaaaagctcggttttttattaacttttatttctgcctgtattagtttgctcgggctgccataacaaaatgccatggactgtgtggcttaaacaacagagattaattttctcacatctctggaggctacaagctcaaggtgttggcaggtctggtttctcccgaagcctctctccctggtttgcaggtaactgacttctcagtatgtcttcacctggtttttcctgtgtgtgtgcctatccctggtgtctctcagagtgttcagatttccttttcttataaggacaccagtcagattggatttgagctcaccctaacagccttatttctaacttaatcacatctttaaagatctcacccctaaatatggttagattctgcagcatgaggggttacaacttcaacatatgaatattggggaacacagttcaactcataacactgcrcttttcctctttgtcttgaataaacctgttgattagctgtcgaaatttggatgagtaacttgctgttgtatctttctgtgttaggtgcatccatgtgggtgagtatgtttaaaacaaacacctcaggatatgtgatatgctaaatggaaaagtaaggaaaacatacaagattgccgtgtttt

SEQ ID NO: 718065 - DNA, 1769 bp, Homo sapiens
taattattatgaaatgcaggtatacatgagaacagaaggctgaaataaatatggtgtttttgtaaatgctgtgttgcaatacgaacaatatgtagtaatgcataattgaaagtcttggataagtatagcagcactcgcttgattaggttaagattagctcggctgaaattctatctcctccactttctgcttgacattggaaaaatctctttgctcttctgagcctcacttttctcatcataaaaatagtagtaagatataaaatgcctaaaatattatacatgtattattgtgagggaccaatgttatagcccatgtaaaaaatttagcatactgtctcatacagacagtaagctctcaataaatgttggctgttattaatacaatgatcactattgcattcattaattactctgagaatgcaagggagttatcaatatctattttcaaagccaaaatttctcccactttaggatttattcctaagtatattagtatctacctaaaagaaatatcaaaaaatgaagatttttaaataagtacaaatattactaatgtttatatttgtacatcttataaagagtttatctctttgaaattcagtttcattatttgcaaattataaaagtaagaaaaatataaatctctcagggtaattaagatgattaagtgaaataataattataaaagagactttagcagggtggatatgtagcaaacactcagtaaatggccattaatattactattattacacattaagattaatttttatgtggggctttttagtatttgtgacaaattttgtaattccttttatcactatgaggagactgagactcggaagctaaagactcacttaggtagaagctagaaaaatagcatcttgaccttagatcttttcaggtcaatagctttcttctttccaccacaccttgtcacttctgatgtttggtttgtatttaaagtctctagcataataaagaaaaatggatctattatctttctatggcttcattagaagacaaaagcaaaggagtatacttacaagtattgctaatataactcagatacagttcctgagttcaaaacttaataagtctaaatttattcagcagaaaaagaaattctgcaaaatccaactgcaaaacgacttctaagtagtagactttggtccatttcccatctctgaatacaaatgctccaggactcaaaagtggtaaaacacatcccctgcagttgggtggatatgccagatctctgaattcctaattcaaacagtggtggcatacattttagggaagcccttgacataaagtcatattttatatgagccagaactaatatttttaagctgaaggaactgccatttttactagttctttgcaacacaagtcattctcctttacctgtttatggtgccccctgtccttttaaatgtaagttgctttacatcatattctgcatcttctgtaaaccactttccttttcagtacctatcattctctttcaaagttccatatatttgtacacattgttcccagtgctgggaaagttccaytctcccaatctcagttctcattttccattccacaccctcccatatggcatagcaccaccgtttagaatattggctcttcttgcctccatgaagtcttcccccagggcctgttgtctcttccaccacagagttcatcagagtatggctccttgaatacgatcctattttttatttataccatccaatattgtttttaatctgcccatga

SEQ ID NO: 718066 - DNA, 1018 bp, Homo sapiens
ggttatagtcacccagttccttcttactaaagaactgggtatccttcttgacgtcacctgcctcacttccccatatcccattwgtgatagtattcgttctacatttcatcgatagtaatcaggcattttggcaagagctaggatttaaccttcctagtcttgtgatgttacagacttattccaatgatgctgctatttaccatattttgtgaactcccttaagaaatacttttggtccagctgggcacggtggtccatgcctgtaatcccagcactttgggaggccaaggtgggcagacagcttgagtccagaagtttgagaccagcctgggaaacatagcaaaaccccatctcaaaaaaaaaaaaaaccacaaaaaaaacaccaaaaaacaaaaattatctgggcatggtggcgcatacctgtagtctcagctacatgggaggctgagatgggaggactgcttgagcctgggaggttgaggctgcagtgagccctgatcatgccactgcactccagcctgggcacagagtacgaccctttctcaggaaaaaaaaaaaaaaaactttcagtccccttaatcgcaacttattactcaccttattcacactttttaaaatctaaataattttaaattacggtttaaagtatcaaagatgaggattaccaccttggagaatgtgatacagattctgaatatgacttcagaagagttttaacttcctaaattggtttggaaggaagaatccttgtttagataattaagttttgggtatatttgtgtcttatctagtgtaatgcacatagattttcaaaactcatctagtattccaagatacactaaaggaaaactattcagagggtaatttaaactttttggtataattcagaaagtattctgaatttttgtgttcattttcaatattgttttattattctcgattacagatgtagtacagctttagagactggactgagtacacactaaacctatttcatacccctaaatgttttcctgaa

SEQ ID NO: 718067 - DNA, 1018 bp, Homo sapiens
ggttatagtcacccagttccttcttactaaagaactgggtatccttcttgacgtcacctgcctcacttccccatatcccatttgtgatagtattcgttctacatttcatcgatagtaatcaggcattttggcaagagctaggatttaaccttcctagtcttgtgatgttacagacttattccaatgatgctgctatttaccatattttgtgaactcccttaagaaatacttttggtccagctgggcacggtggtccatgcctgtartcccagcactttgggaggccaaggtgggcagacagcttgagtccagaagtttgagaccagcctgggaaacatagcaaaaccccatctcaaaaaaaaaaaaaaccacaaaaaaaacaccaaaaaacaaaaattatctgggcatggtggcgcatacctgtagtctcagctacatgggaggctgagatgggaggactgcttgagcctgggaggttgaggctgcagtgagccctgatcatgccactgcactccagcctgggcacagagtacgaccctttctcaggaaaaaaaaaaaaaaaactttcagtccccttaatcgcaacttattactcaccttattcacactttttaaaatctaaataattttaaattacggtttaaagtatcaaagatgaggattaccaccttggagaatgtgatacagattctgaatatgacttcagaagagttttaacttcctaaattggtttggaaggaagaatccttgtttagataattaagttttgggtatatttgtgtcttatctagtgtaatgcacatagattttcaaaactcatctagtattccaagatacactaaaggaaaactattcagagggtaatttaaactttttggtataattcagaaagtattctgaatttttgtgttcattttcaatattgttttattattctcgattacagatgtagtacagctttagagactggactgagtacacactaaacctatttcatacccctaaatgttttcctgaa

SEQ ID NO: 718068 - DNA, 1018 bp, Homo sapiens
ggttatagtcacccagttccttcttactaaagaactgggtatccttcttgacgtcacctgcctcacttccccatatcccatttgtgatagtattcgttctacatttcatcgatagtaatcaggcattttggcaagagctaggatttaaccttcctagtcttgtgatgttacagacttattccaatgatgctgctatttaccatattttgtgaactcccttaagaaatacttttggtccagctgggcacggtggtccatgcctgtaatcccagcactttgggaggccaaggtgggcagacagcttgagtccagaagtttgagaccagcctgggaaacatagcaaaaccccatctcaaaaaaaaaaaaaaccacaaaaaaaacaccaaaaaacaaaaattatctgggcatggtggcgcatacctgtagtctcagctacatgggaggctgagatgggaggactgcttgagcctgggaggttgaggctgcagtgagccctgatcatgccactgcactccagcctgggcacagagtacgaccctttctcaggaaaaaaaaaaaaaawactttcagtccccttaatcgcaacttattactcaccttattcacactttttaaaatctaaataattttaaattacggtttaaagtatcaaagatgaggattaccaccttggagaatgtgatacagattctgaatatgacttcagaagagttttaacttcctaaattggtttggaaggaagaatccttgtttagataattaagttttgggtatatttgtgtcttatctagtgtaatgcacatagattttcaaaactcatctagtattccaagatacactaaaggaaaactattcagagggtaatttaaactttttggtataattcagaaagtattctgaatttttgtgttcattttcaatattgttttattattctcgattacagatgtagtacagctttagagactggactgagtacacactaaacctatttcatacccctaaatgttttcctgaa

SEQ ID NO: 718069 - DNA, 1018 bp, Homo sapiens
ggttatagtcacccagttccttcttactaaagaactgggtatccttcttgacgtcacctgcctcacttccccatatcccatttgtgatagtattcgttctacatttcatcgatagtaatcaggcattttggcaagagctaggatttaaccttcctagtcttgtgatgttacagacttattccaatgatgctgctatttaccatattttgtgaactcccttaagaaatacttttggtccagctgggcacggtggtccatgcctgtaatcccagcactttgggaggccaaggtgggcagacagcttgagtccagaagtttgagaccagcctgggaaacatagcaaaaccccatctcaaaaaaaaaaaaaaccacaaaaaaaacaccaaaaaacaaaaattatctgggcatggtggcgcatacctgtagtctcagctacatgggaggctgagatgggaggactgcttgagcctgggaggttgaggctgcagtgagccctgatcatgccactgcactccagcctgggcacagagtacgaccctttctcaggaaaaaaaaaaaaaaaactttcagtccccttaatcgcaacttattactcaccttattcacactttttaaaatctaaataattttaaattacggtttaaagtatcaaagatgaggattaccaccttggagaatgtgatacagattctgaatatgacttcagaagagttttaacttcctaaattggtttggaaggaagaatccttgtttagataattaagttttgggtatatttgtgtcttatctagtgtaatgcacatagattttcaaaactcatctagtattcyaagatacactaaaggaaaactattcagagggtaatttaaactttttggtataattcagaaagtattctgaatttttgtgttcattttcaatattgttttattattctcgattacagatgtagtacagctttagagactggactgagtacacactaaacctatttcatacccctaaatgttttcctgaa

SEQ ID NO: 718070 - DNA, 1382 bp, Homo sapiens
tgtctgggacacctggagcctcccctgtggaggaggtaaccacagaactgtccagaaatgaccctctcggtggtcctgcccaggcctggctgaggcagggggctggcagctggacccccagccccccttctcacttgctgctcctatcccacccccaggctgagcagaggcagtggctttggggtgggactgagctggaggtgtctgtatggccctgagcccaggcagaagtgccaagtgccagtagactgttcttccattttttccttcatcaactcaccttgatggggtcrtgggaaattacaggggggtttctatcctcctcggatcttgtaagcagcacgggtggtagagtatcactcttacccgaactagctggcctgagattgaatctcgcatctgctgccaccagctgtgtgaccttgggcaagttgcttaacctctgtgcacagtgccttcgtctgaataatgtggattacctctctccagagggtggtgtgagataggaggatatgttaagcatttaaagattcctgacgtggagtcagcattcagtgtttgctactactgttctcccggaaaggagaggaaatggaacttggacatgaagaagctgggaaatacacacagcaaccttttgaccatgacttccagccccggccctttccatcagctctcctctccatctgtgtgtgtctaattttttttttaaatttgtatttttttgagacagggtctctctctgtctcccaggctggaatgcagtggcgtgatcttggctcattgcagccttgacttcccagactcaagcgattttctcgcctccacctcctgaatagctgggactacaggcgtgcatcaccatgcccggctaatttttgtatttttagtagagacagggtttcgtcatgttgcccaggcttgtttcaaactcctgacctcaagtgatctgcccacctcagcctcccaaagtgctgggattacaggtgtcagccaccgcgccctgcctaaattttaaaaactagtgtttcttttttgttagaaggggatgggttacaaagtatgttggcccaacacatggtaggcacataatagtggaaattgtatttcgctcaataaattttgtatttttttagagatttttattaattttttttttttttaaatagagatggggtactatgttcccaggctggtctcgaactcctgggctcgagtgatccacctgtcttggcctcctagactgctgggattacagacatgagccattttgttttttaagtccagcctaatttttgtgttttttttttagacggagttttactctgtcgcccagcctggagtacagtgtcaccatctcagctcactgcaacctccggctc

SEQ ID NO: 718071 - DNA, 1911 bp, Homo sapiens
ttgagatatcagttaccaatataaatttactgacttgagcataaaaatgtatgccagcaagatccatgaaatataataaactgaaacagaaaagtggtaagtagagcgatgaaaaaagtatttataatgcagaaaatcactggaacaacccaagagctatcagaccagcctgctctacaaaaatctatggtatggtttggctgtgtcccatgcaaatctcatctctaattgtaatccccataatccccatgcgtcgagggagggacctagtaggaggtgattggatcatgggggcagtttcccccatgctgttctcatgatagtgagttctcacgagatctgatggttttataagtggttgacagttcctccttcccacgcacttctccttctcctgctgccttgtgacgaagttgtctgcttcccctttaccttttgccatgattgtaagtttcctgaggcctccccagtcatgcagaactgtgagtcaattcaacctctgtttataaattacccagtctcaggtagtgtctttatagcagtgtgaaaatggactaatacaatctaatactgtaattctcatttttgagtgaaggtttgagaaaagtatcagacaaaagacatagaaaactagatcctgaagacataatataggtgcaaaaattctaaatggaagtcttccagcagtgttgtggaaatgatactgtaactgcatggcggagtgaataagaaaacatctggggkcagacctgaattgaacccttgtccaccacttactagctgtgtgatccttagcagcccacgtcattaaattttagaatccctccttcacccttgaaaaaaagagcttgatggtaaaatctacataatggacttgctgtgtggattaaaagagctttacatggtgccctcaataaacattaattatttttattaatactaaagagaatatttaggaataattaattggtcggtatataatgagttgaaagtaatagaaaacttgattttcagggggcataaacaagtgtggaagaagtccatattaggttattggtgatgttggtttagtgctcaacaataattttgaggatacaggctcttcctaattttctgccccaccattcttagcgtttccttgtggttcattatcgctgctgcggatccagtcgggacatctttactcaaggcaggaatatggggcagtgccaagcgtatgtgttcccttttgtctggaaagcaaaagcttcccaagaggcccagcagatttttgcttgtatcttattgaccaaaactgtcacaaagcaacttctagctgaaaggaagctggagaaatatttagctgagttcattatcttcccaaataaatgaattctgttagcggtagaagagggggaatggatgttggattagcaatcaacagggtctgcccaaataatgaatgaatttactaaatcacagaaacttagctaactttcaagaacttttaaacattttttagtcatttttaataaaaatatttttcggatgctttcataaaaagaagatgctgattatgatgtgaatgttgttaatataggctcctcaataaaatgaaggactatactctgcgttcagtagatttatttcttccctggctaccagctgtcaatcatgctgccagaaatccagtgttgaagctatccttacaaatgtgctcttttctttctgccaacccaaatcaatccaaattattagaatttcatattaagtaataatagccagtaaattcataactgtgtttatttctacatggatacctagtttctttttgcctgtctttgtgatagttatttcacagggctgttttcgcatacttcctgatttttcactacattcaatggtgtgagtagtcagaaatctgatgcccag

SEQ ID NO: 718072 - DNA, 814 bp, Homo sapiens
caggtgatggagtatctccatgaggcccaaaatrcaagtgggtaggaagaagtcactgacaactacaagaccatatgaattatcagtatctgtgcagaaggaagcagaggaatatctcaatgtcctgaaaattccaaaataaccaacaagtactcatacaaaaaaatgctgaacagaagctgaactgggaaggatctgcatactccaatagtgagtgagtacaagaggtctactgtaaggtctaagaagaacatgagtggctatgaattcttaaaattaaccagccaaatccctcttccaggtaaaacttcttgctaaggaaaaaaaaaaactcagaagataatccaaatagaacagaacagggacattccagataaaggaaaatgaagtccagataaaagcagggaagagttcaaaatgctgctaggacaactggatatccacgtacaaaagaatgaagttggacccctacacttcacactattaaaaaaattaactcaaaatggatcacagacctaagtgtaagagctaacccataaagttcttagaaaaaaacataggagtgtttgtttgtttgttttttgcatcgtgaattttattcctgatgtggtacagatttcttccatccccaaaacgaatcacatgctgccctggaaagacctaggaaactctcccaccatctctagggaagtagtgagaaagatagatgctgaggactaggaaggctttgaaatttcccagcctacttatcctccccttctcaacagggagagctgttccctattatccctctcatccagtcatcccttaaaca

SEQ ID NO: 718073 - DNA, 814 bp, Homo sapiens
caggtgatggagtatctccatgaggcccaaaatgcaagtgggtaggaagaagtcactgacaactacaagaccatatgaattatcagtatctgtgcagaaggaagcagaggaatatctcaatgtcctgaaaattccaaaataaccaacaagtactcatacaaaaaaatgctgaacagaagctgaactgggaaggatctgcatactccaatagtgagtgagtacaagaggtctactgtaaggtctaagaagaacatgagtggctatgaattcttaaaattaaccagccaaatccctcttccaggtaaaacttcwtgctaaggaaaaaaaaaaactcagaagataatccaaatagaacagaacagggacattccagataaaggaaaatgaagtccagataaaagcagggaagagttcaaaatgctgctaggacaactggatatccacgtacaaaagaatgaagttggacccctacacttcacactattaaaaaaattaactcaaaatggatcacagacctaagtgtaagagctaacccataaagttcttagaaaaaaacataggagtgtttgtttgtttgttttttgcatcgtgaattttattcctgatgtggtacagatttcttccatccccaaaacgaatcacatgctgccctggaaagacctaggaaactctcccaccatctctagggaagtagtgagaaagatagatgctgaggactaggaaggctttgaaatttcccagcctacttatcctccccttctcaacagggagagctgttccctattatccctctcatccagtcatcccttaaaca

SEQ ID NO: 718074 - DNA, 638 bp, Homo sapiens
tcatctgtgggtcagcctttgtccaagggcctccagtgtgcaacctgaggcctatgtgcctcggccagattaaagccctgctctccaaaccctctcttggcctttgaaaaagggcgcgtcccaagrctgcccctccggcccgaatcttcctcctgctcaaacgggattggctggcggcgagggcaaatcagaacacaggagctaggagggggcgggacctcatgacaaagcagagggcaggtgagcgagcagtcatccaaccccatcagcagcccgtgtatgggattgacggattttaattacatgtcattctaatccttaacatttatctaaaaagtgacgggggcgggcatgagggcgggtcacgaacatgctcagccccaggattgccctgtgtctaattagaagttttctccctcttgatcacctaaagtcaaattcatttactctgctcgaattgagggtttaattggattcttgtttttcctcctcctgccctctcccccatctccgtaggcctctctccgtgcaggaagtaggccacagcatctcattaggagggagagcatcccttggcagactcgcatttatgactgttcataccagcctgcagccgcatccttggccccaggtcgcta

SEQ ID NO: 718075 - DNA, 530 bp, Homo sapiens
agccagacacattcattcattcattcgtttcaaaagtgtttactgagcacctactacatgccaaacatagctatttaggaaaaattcatggacaaaacagtcaagatatctgtcctcgaagattttattgtctagtggaggatttaaaaaataartaaacatataacagaatgtcaggaaatgtactttttttttaggaaaaaaacacacaaggtaaatggaaagagagagagatgggggttattattttaagtgggttgttgaatgaggacagtgggaacagcaagtataaaagccctgagatggaaatgttcttagcatttttgaagatcaactaagaatacagtgtgttaaaatactaattttcaaaggcaaggggacgctttcctttgtgagggtgagggttgtgaagaacatatgatgggaccttttttcaaaatacaggtagtttcttccctcttcccccgcttaacgaagattctaacatgcctcctgttgatgatggccacagtaaaccactgttactaagg

SEQ ID NO: 718076 - DNA, 618 bp, Homo sapiens
agtggcttaaaataatttaaattcttttcctagatactgtatcaaccatttttaatgtaaaaattcagagttgaagttctgtttgactaccacccaaatcaacctctaccgccatcccaattatcagttgaatctcttgctctcaccttcactcttgctctcaccttcactcttgctctctcgctctgattttgaaacaaatagtgtcattctatttatatatattattctgatcttgaaacataaatagtgtcattctatttatatcwattattcttcagtttcctttttttatgaaacaatacatctagaagatcttgtcttattaccacaaatagaatgccttcattcttaacttcatgctatacaatcctatactgtggatcttccacagtttaatcactcccttattaataaatatttatgtttttctaatttttcactattgcaaggttgtaatggaaattcttgcaataaaaataataaaagctggtcgggcatggtggctcacgcctgtaatcccagaactttgggaggccgaggcaggtggatcacctgaggtcagaagttcaagagcagcctggccaacatggtgaaaccctgtctctactaaaaata

SEQ ID NO: 718077 - DNA, 650 bp, Homo sapiens
ttgaagtaaggaattagagtaagctaaatatccaaatacaggcaattagctgaaacaaatcaaaggcttagcaataagagatacagatcctgtttctctgtgacaccaaataaaagcttaagatttccaaactctcaaatatcaatcttaggctatgatatttgtaggcaatgctactcttagccagaacaaacattgctgatatgtttggcccttacaagttgagccaaatctttaaaatatttcaatatgagggagtattaagctcatygtaaataattagaaatgttatatgttctccttccaactttgctgttttatttggaatattttatatcatgcactcactgggaaaaaagcatgtttaacattagagagacaatctttctgagtcaacattttataatacactaagaatattgctgcatacaaattttgctttaacttctagtaggcacctacaaggaccacctttgtactctgttctcaaggaagaagaaatgtgacaggatcattctaggcaaaccttatcctagaaagaagcagtttgctgcagccactcttatgatcacacacacacacgcacacacacacataaacacacacacacacacaaatatgggaaagcgactggacacagccctctccta

SEQ ID NO: 718078 - DNA, 617 bp, Homo sapiens
tggctcacgcttgtaatcccagcactttgggaggccaaggtgggaggatcgcttgaatcaggagtttgagacctgatcatactgagatcctgtctctacaaaaaataaaaaattagctgaatgtggtggcacgtgcctgtagttcaagctacttgggaggctgagatgggaggattgcctgagcccaggaggtcaaggctgcagtgaactgtgatcgtgccactacactcagcctgggcaacagagtgagacccttttccagaaaaaaaamaaaacaaaaccctactgtgaatgatgatcatttataagttagaattgtgtacttactggtaatttgagctaatatttagtaagcatacattatcagcctgcagaaggggatagggaacagagagtgctaagataaatggagaacacagtgtatcaagtatggcatgtcatcagttaggggtttggggcccttgtatatgatattcctttttcctcaaagtattgtctgaggacagggactggtccaccaattgtctgctgctggtcccaggcgagatatgtacagaaattaaagtaagtgtttagaaacttttatagcaatttgacattgctaaaatattcaagta

SEQ ID NO: 718079 - DNA, 617 bp, Homo sapiens
tggctcacgcttgtaatcccagcactttgggaggccaaggtgggaggatcgcttgaatcaggagtttgagacctgatcatactgagatcctgtctctacaaaaaataaaaaattagctgaatgtggtggcacgtgcctgtagttcaagctacttgggaggctgagatgggaggattgcctgagcccaggaggtcaaggctgcagtgaactgtgatcgtgccactacactcagcctgggcaacagagtgagacccttttccagaaaaaaaacaaaacaaaaccctactgtgaatgatgatcatttataagttagaattgtgtacttactggtaatttgagctaatatttagtaagcatacattatcagcctgcagaaggggatagggaacagagagtgctaagataaatggagaacacagtgtatcaagtatggcatgtcatcagttaggggtttggggcccttgtatatgatattcctttttcctcaaagtattgtctgaggacagggactggtccaccaattgtctgctgctggtcccaggygagatatgtacagaaattaaagtaagtgtttagaaacttttatagcaatttgacattgctaaaatattcaagta

SEQ ID NO: 718080 - DNA, 617 bp, Homo sapiens
tggctcacgcttgtaatcccagcactttgggaggccaaggtgggaggatcgcttgaatcaggagtttgagacctgatcatactgagatcctgtctctacaaaaaataaaaaattagctgaatgtggtggcacgtgcctgtagttcaagctacttgggaggctgagatgggaggattgcctgagcccaggaggtcaaggctgcagtgaactgtgatcgtgccactacactcagcctgggcaacagagtgagacccttttccagaaaaaaaacaaaacaaaaccctactgtgaatgatgatcatttataagttagaattgtgtacttactggtaatttgagctaatatttagtaagcatacattatcagcctgcagaaggggatagggaacagagagtgctaagataaatggagaacacagtgtatcaagtatggcatgtcatcagttaggggtttggggcccttgtatatgatattcctttttcctcaaagtattgtctgaggacagggactggtccaccaattgtctgctgctggtcccaggcgagatatgtacagaaattaaagtaagtgtttagaaacttttatagcaatttgacattgctamaatattcaagta

SEQ ID NO: 718081 - DNA, 1142 bp, Homo sapiens
tagaaaaaaaaatgtcatgagttataatagcacatagcatttcacttaaaagtgagtgcaatttaaaagataacaagtcagtttcagtggcggcatggacccacagggatttggctgccctgctgggggctaaggggactgtgcagggaaaaaaaaagaaataaaagataacatatgaggtggttttgaaatattccatggttaactctaacactgcaactactgaactactgttccaaaagcaaaggacagggctttaccagtagaattcacacttgccaatttttttttttkttaacattcatctacaaaatactgtcttcacttagcataatgtattaaatcttgaaatttcctgctttggtcagaagtcagtctggaagcgttctctgagccaatccctcatcagacctgttgaaggtctgtgaggtaggacaggaagaggtctgtacagggtattttagctgatgtctaaggaactatagcccagcactaacctaaaaggtcaaggctaactttcaggtctcacctcaacataaacgtgtccattctctggcacagagaagacgccctgggagggcaccaaaaagaggtcagtgttgtatagctccatgttgaaggtgatgtttccgtggggctgttcctggaagctgctggggttcctcacctgctgaaggctgcaattaaactggaaataacaacccacaggaagattaatgacagtcatatgaaggatgaaggccctgtagcttcatgagctttggcttttaacatctgattttattttcagatagtccctaactaaagccaacaaaatagacagcattttccacaaaccccctactgataacaaacacataccaccacgatttcaggtcgggtgaacagggaagcatctccttcatccatatctcccggaaatccattatcacctgactccagatcttcataaccatctggccaaccactactgtccccaagggctggaacctgtatcacaatctaaaaggcaaagaaagcacagccaatgttataaaaacaccaaaccatgtgtgtttggttctgcctcacacaaacactcatgtaatcattctgatgcaaattgaaaatctgactttaagacaaaataataaaataacatc

SEQ ID NO: 718082 - DNA, 1142 bp, Homo sapiens
tagaaaaaaaaatgtcatgagttataatagcacatagcatttcacttaaaagtgagtgcaatttaaaagataacaagtcagtttcagtggcggcatggacccacagggatttggctgccctgctgggggctaaggggactgtgcagggaaaaaaaaagaaataaaagataacatatgaggtggttttgaaatattccatggttaactctaacactgcaactactgaactactgttccaaaagcaaaggacagggctttaccagtagaattcacacttgccaatttttttttttgttaacattcatctacaaaatactgtcttcacttagcataatgtattaaatcttgaaatttcctgctttggtcagaagtcagtctggaagcgttctctgagccaatccctcatmagacctgttgaaggtctgtgaggtaggacaggaagaggtctgtacagggtattttagctgatgtctaaggaactatagcccagcactaacctaaaaggtcaaggctaactttcaggtctcacctcaacataaacgtgtccattctctggcacagagaagacgccctgggagggcaccaaaaagaggtcagtgttgtatagctccatgttgaaggtgatgtttccgtggggctgttcctggaagctgctggggttcctcacctgctgaaggctgcaattaaactggaaataacaacccacaggaagattaatgacagtcatatgaaggatgaaggccctgtagcttcatgagctttggcttttaacatctgattttattttcagatagtccctaactaaagccaacaaaatagacagcattttccacaaaccccctactgataacaaacacataccaccacgatttcaggtcgggtgaacagggaagcatctccttcatccatatctcccggaaatccattatcacctgactccagatcttcataaccatctggccaaccactactgtccccaagggctggaacctgtatcacaatctaaaaggcaaagaaagcacagccaatgttataaaaacaccaaaccatgtgtgtttggttctgcctcacacaaacactcatgtaatcattctgatgcaaattgaaaatctgactttaagacaaaataataaaataacatc

SEQ ID NO: 718083 - DNA, 1142 bp, Homo sapiens
tagaaaaaaaaatgtcatgagttataatagcacatagcatttcacttaaaagtgagtgcaatttaaaagataacaagtcagtttcagtggcggcatggacccacagggatttggctgccctgctgggggctaaggggactgtgcagggaaaaaaaaagaaataaaagataacatatgaggtggttttgaaatattccatggttaactctaacactgcaactactgaactactgttccaaaagcaaaggacagggctttaccagtagaattcacacttgccaatttttttttttgttaacattcatctacaaaatactgtcttcacttagcataatgtattaaatcttgaaatttcctgctttggtcagaagtcagtctggaagcgttctctgagccaatccctcatcagacctgktgaaggtctgtgaggtaggacaggaagaggtctgtacagggtattttagctgatgtctaaggaactatagcccagcactaacctaaaaggtcaaggctaactttcaggtctcacctcaacataaacgtgtccattctctggcacagagaagacgccctgggagggcaccaaaaagaggtcagtgttgtatagctccatgttgaaggtgatgtttccgtggggctgttcctggaagctgctggggttcctcacctgctgaaggctgcaattaaactggaaataacaacccacaggaagattaatgacagtcatatgaaggatgaaggccctgtagcttcatgagctttggcttttaacatctgattttattttcagatagtccctaactaaagccaacaaaatagacagcattttccacaaaccccctactgataacaaacacataccaccacgatttcaggtcgggtgaacagggaagcatctccttcatccatatctcccggaaatccattatcacctgactccagatcttcataaccatctggccaaccactactgtccccaagggctggaacctgtatcacaatctaaaaggcaaagaaagcacagccaatgttataaaaacaccaaaccatgtgtgtttggttctgcctcacacaaacactcatgtaatcattctgatgcaaattgaaaatctgactttaagacaaaataataaaataacatc

SEQ ID NO: 718084 - DNA, 613 bp, Homo sapiens
ttgggtacaaaaaagatacttgttaagtatttgtttgataaataaaacaaatcttgatgtccaattaactgcagtgcctgcctaaggttctgtgcygagaaggattctgaggtcatattcaggagcagtggagaaatgggaacaaatgccatgagcaaccacgtgtctgccagggggttagcgaaggcatcattgctctacagctgttatccaatgtagtgtccactggccacatggcaccatcaagtacctgaacctgaaatgttgctggttaaattgacctgtgttatataaatgtaaaatgcataccacttagcacaagaaaaatccctatctcattaatttttattgactgattacaagtttaagtgatattattttggatctactgggttaaacaaagtgtcattaatattaattttacttactttttttttttttttttgagacggagtttcgctcatcacccaggctggagtgtagtggcacgatctcagctcactgcagtctctgcctcccaggttcaagcgattctcctgcctcagcctcccgagtagctgggattacaggcacctgccaccatgcccggttaattttttgtatttttagtaga

SEQ ID NO: 718085 - DNA, 1332 bp, Homo sapiens
tgggctcattactcagagccaagataaaggataaatctttatgagtaccgtaagtatgagtcataaaaaataggaaacatatgtaggacgtatacacagtaatagcaccaagccagagaaagtgtttaggaaatgtatttaagaacacatgacaaaacaggacgaaaaattgcccttgtacattgctctaaaacacatttaaaaaaaaaacctcacagcaagtcaagggcccatatcactttgctgatctctaataaacatagatcatttccatatttggaaataggctggcctttttattttaaatgcaaataggagagctgaatcaagaaaaagtaacttggagtaggctttgaaagattttatgatttgggaaatttgaagagcttccaaataaaatactgggaattagatcttaacagcattaaaaatgaacacaaaagattcttttagaaaaataattgttcacaatggtaatattaccatttcatttagattctcactatcttaacaaccactggaaaaatgagtggaatcttcaaaccttatgaaagcaggaatcaaaaataaactgcaacacatgggctgacaacataccgagagcaatgaagggcctgcgtgaaagccctcacggggatgctgggctcagcaggaagaactcgcagcaaggaagaagcagagccccctggccaaaagcaccaagtgacaatctaggggatgagggcgttcagaatagaagggagggtgatyggcccccagaagtcttttggggccagatgactgaggcaaaatgtatcatcattggaaattaagctcttcagttgcctttgattttggaagatgcccgaatttaagacagcttggcaaggctaggagacacctacatgcccatgtgcccaacacggaatcatgtgtgtcccaacggacctttggctcccttggaccagggctttctcctttaccttcagaaactgctgcctcccaaggaaagcactgcttgcacatcgactgacctgaggttgagaggaggagcagaggaatgtggaaaggattgtttttaccttcattaagtgttaaatttacctaagactcccagagagtcaatgctcttcaggaactattctgaggcagaaatttcaatataacttccacctcatgaaaaaatccaactgtaggtcattaaaagaccccaggggcatggcgagggctgagaggtacgacagctcactttcgaccttttgttgctcaggcctctcagcagttgctatacctctctgcccctctcccccaaggcacctcggtatgtgctcacatcactggtagtgaggccac

SEQ ID NO: 718086 - DNA, 1318 bp, Homo sapiens
tgtggataaactctgtagttttagaaacagcagtaagtgtgctgaggaacaactgagtcatcagtactagtgatcccatagaacacggttccaacagtttgtgtaagatgatggatagacagatagcctgagtggaaaactgacaatccagagctgatggtctctctgcttggagatgaagcctcttcgtatatgagcttacacttataaaaagatataaataaggaaaagtgaagtaaaagaaaaacccatgttgatactctgtggctagaatttgtcatatatggtgttgagagaagaggggacgtattgaaagaggaattggggtagggaaaaaggagggaactacatctcagtctcatattaagccaaattctccttttgccttttgtctcagtttgcggctggatatggctgccgtgaaaacacaagggctctctaatagaaaacaaaacaaaacaaaacaaaaaactgaaaggagcattgctaagttgactctgacttgtttccagggaagacagcttactacaagtgggatagatttttcttcagtgctagtggtttcaggctrtataggcataatgtttaatggcatatttccaggttactgaccaaggagctagttagactaaaacagcattgttgcagagtggattctccaggaaacagacactgagatggaaataagattgtagaatgtttattagaaactgtgtagagatcaacaccttttaaaaaggggtgtggggaagcagcatcaggcagagagagaagtggaactgtgatgtggcatcaacaccttaagctgttgatcaacagcttaagctgacccagaggaagttctggagttgatagggtctggctgcggtgttccccattaggccaaatgtgagagagccattgtacccctccctggatcagacatcagatgagggccacccctgaagagtgagcctttggtcaatggaaggcaatcagaaaaggctgtttgataaagaaaggtagcttgttgcagcactaaaagctgctgaggcccgctcttccttaaaggggacctaagcagtttaataataagcttaagatatcagaagaacttgacaaagatgcagcaaatacaagaaaataaaagaaaggctataaaatatgtgatagtggactaggagtaggtggaggctcagggcaaactgctagaaaggaaatatgatcatgtggctttacctagtcacaataatataaatatcatgtattgcttttgccatttatattcaacctgttgaaatttggaagatttgtgactacaaggctataaatgaatgca

SEQ ID NO: 718087 - DNA, 1374 bp, Homo sapiens
tccctgataagcccacacatgggagacagagagctcagggtgggacttgggcttctttcagaatgagtctgtccatgaggctgcacctcagccttaaggacatgctcaaaatgcccatctctatacgttgaatcaaggacctctggggcagactgactgactgaagtgagggtcatgcttgtaagtcttgaagacttttcatcaaactttctgttaaaatctaagatcaaaagcaactactatccaaaatatcagggtttgctgccaatgaacggaatgacttggaggaagaacaactcattactgctgggcctgaggaacaggctggaagggagcggacttcaccagggactttccacaggtgaccctggttctgcagtgatagaagctcctataccctaagctgtaaaattattcagaaagatcaaggataatgtgtctacattttaccttgaaactggctgacaatttacttctggggattatttattttctctcttctctaatgaatttataacctattatatcttttttttttcttttctgaaaatcacagtatttttaaaagacagttgcaggaaagaaccatgactttctatcagagtgcttgttacaagtccactcttctagtttgtgaaaatgtgccacttgccaatgttttttgtttcgttttttttgttttgttttttggatggagtctccctctgtcgcccgagctagagtgcagtggtgccacctyggctcactgcaacgtccaccttccgaattcaagtgattctcctgcctaagcctccccagtagctgggattacaggtgcccactgccatgcccagctaatttttgtacttttagtagagacggggtttcaccacgttggccaggctggtctcgctctcctgacctcaagtgattcacctgtctcagcctcccaccaatgttcagttcttatcctttctctttctcagttcttgtccttcttcttgtaagttttttgaacatgccagtgaaaaagcagttcagccatttggtgaaagaaatttccatttaccaacataggaagagttcatattcacagactccaaacatagatagagtcagccctcctcattcacggtttctgcaatcctggattcaaaagatgtaaatcaaaaatatttcttataaagcatctctactaaacatgtacagacttttttctttatgttatttcttaaacaataaagcataacaatttaggtattacaagtaatctagagattatttaaagtatgcaggagtatatgcattggttatatgtaaatactatgccactttataaaaggagcttatgcatccatgcattttggtatccaagaagaatcctggaacaaatgc

SEQ ID NO: 718088 - DNA, 1374 bp, Homo sapiens
tccctgataagcccacacatgggagacagagagctcagggtgggacttgggcttctttcagaatgagtctgtccatgaggctgcacctcagccttaaggacatgctcaaaatgcccatctctatacgttgaatcaaggacctctggggcagactgactgactgaagtgagggtcatgcttgtaagtcttgaagacttttcatcaaactttctgttaaaatctaagatcaaaagcaactactatccaaaatatcagggtttgctgccaatgaacggaatgacttggaggaagaacaactcattactgctgggcctgaggaacaggctggaagggagcggacttcaccagggactttccacaggtgaccctggttctgcagtgatagaagctcctataccctaagctgtaaaattattcagaaagatcaaggataatgtgtctacattttaccttgaaactggctgacaatttacttctggggattatttattttctctcttctctaatgaatttataacctattatatcttttttttttcttttctgaaaatcacagtatttttaaaagacagttgcaggaaagaaccatgactttctatcagagtgcttgttacaagtccactcttctagtttgtgaaaatgtgccacttgccaatgttttttgtttcgttttttttgttttgttttttggatggagtctccctctgtcgcccgagctagagtgcagtggtgccacctcggctcactgcaaygtccaccttccgaattcaagtgattctcctgcctaagcctccccagtagctgggattacaggtgcccactgccatgcccagctaatttttgtacttttagtagagacggggtttcaccacgttggccaggctggtctcgctctcctgacctcaagtgattcacctgtctcagcctcccaccaatgttcagttcttatcctttctctttctcagttcttgtccttcttcttgtaagttttttgaacatgccagtgaaaaagcagttcagccatttggtgaaagaaatttccatttaccaacataggaagagttcatattcacagactccaaacatagatagagtcagccctcctcattcacggtttctgcaatcctggattcaaaagatgtaaatcaaaaatatttcttataaagcatctctactaaacatgtacagacttttttctttatgttatttcttaaacaataaagcataacaatttaggtattacaagtaatctagagattatttaaagtatgcaggagtatatgcattggttatatgtaaatactatgccactttataaaaggagcttatgcatccatgcattttggtatccaagaagaatcctggaacaaatgc

SEQ ID NO: 718089 - DNA, 608 bp, Homo sapiens
tgttgctttatcttcactggcataataaatgatttatcaagcacacaataaaagggggaagcactctagctatgtacagttgtttggatattactttttcttcccataataaatctctggtttatgataacctgtgcataaacctggtaagccaacacactttgacaccatgctgattctatatatgcaaggattgcctgccacactgtcgatacataccttcaatactctgatgaaataattgcaattatttcaattcaatgggtcttgataatctgggaccaataatttggaaacatcaactgagaaaagctgatatccacatgatttaacgcctccattgtgttcaaaagaaaaagtaaaataattttaggcttagggtgacagtgttgcccaaggtcagtaatattccatatgtacctatgatatagaacttcaattattgtctagatgtttcattgttttttggatcaggtatgaattgataggctacttatccttgtgaatttggctaatagttatactaacaataaaaactatttattgaatgactattaytgtgccagtttaagattaaggatcattttgctgtaagaactttctatgtt

SEQ ID NO: 718090 - DNA, 651 bp, Homo sapiens
acgcaggaatccttgtggggttgaaattattcagtgtctttactgtggtggtaggtacacaaacccgcacacatggtaaaattgtatgtaactgaatacacacacacacacacacacacacacacacaccaacgagcataagtaaaacttgggaaatctgaataagattggtggattgagtcaatattaatatccctgttggcgtgttatactagagtttcccaaaatgttactattggaagaaactgggcaaagtgggcgatatgatctctgtattatttcccacaacttgtgtgaatctacaattatctcaataaaaaccttaatcgaaattgatttttaaaaaaaaacataggttattagaatatttctaaagcagractgcaaatatcagtatggcaggcattttgtatagctggaatcttgaaacagggtagggatacagtgtgatgagagaggtgagaaagtggtgttagaggttgagatcagaatggtaaatgaaggcctggtgacaaagactcctgtatgttttataaaagacactagtgggcattatataggcaatggagggctccaagctcggacaggagaaggatggacgcaggtggagggattctttttatgtagataattaccttgacattgtggaaa

SEQ ID NO: 718091 - DNA, 807 bp, Homo sapiens
taccctgatgtgattattacacactgcatgcttgtatcaaaatatctcttgtatcccataaatatatacaactactatgtttctgcaaaaattagaaaaaaattaaaaaggaaaaaaaacgaattgacacttatgttgggattctgggtatggcayctaggagtatgaggtctgagacaagtaactgaacatctttgagactcagatatttttatctgggaaacaggaataataaaattaccttttaatttaattggttaatgggagggttgaaacagatactgtatgttgaagttatgtttgtattagaaaatgttgaacaaatgctattcatcctccatccctaaggaaacaatgaaaatgatgtaacaatataagaaatataaagagcgttatcttctttctagttgaatttaattcatttccattcaatatgttcttaaattgggttgccatagctaatggaaacctggtgaatggagagggaaatctaggattattgatggtagttcttttgcattaacttggtgtacaggtacataggactgtacttgtactgtggtcataatttaatacaaatatttcataacaatacaaatatcagtttgtaagaaaactgtttttagaaagtaaatctgtgatatgatagagttttgtgtgatgtgtctgtatttaagcacatgtacccattcaagcagcaatcatctcttcctttttaccaaaatagggtgtgtgtttccttgttcttctctatgtgaaagacttctgaccgactacttcacaggcatgcaggcacgtaatgataca

SEQ ID NO: 718092 - DNA, 1372 bp, Homo sapiens
tcagatcattcttactgttcatatcttttcacctttcttagaataaaacccatctatttttctcctgattaaattattggaaattgcaagcatatgcaaaattagaataaaataatccacctgtatgcatcacccagttttcacaatcatcaacacatggtccagcttgtttcgtcaccagcccactcacctttcatgtctccctaggattattttgaagcaaatcccaaacatgtatctctaaaaaaactttttaagcgtaactacagtactattatcaaccctgttaaaaatgaacagttccttaatacaagtaacttgtgctcacatatccttgatttaagtaaaaatcattaacatggatatggtctttcattttctggcccctgcctacttctctaactacttctcrcacataccactctgctctgtgtttcaactgcactggcttttcagctcttcctcatttaatacaatttcagaattcattccttttctttagagcacattgaagttcacaattaaaattcatacattactagattataacaggaactatatatcacattgcttggaacatagagcacaaatattctttagatgattaaataaatggatttgtgaggagaaagagaatggatacttagcccagagttgggggaggtaggacctcctgagtgactcaggacttaacaaaatgaagtggagacaagagcattcctctgtgagcaatgtcagggaagggaaaaatggaataatttttagtctaaaagttcacagcaggtagtggtgggaacgtggcagaccaagcaacatgtaacatgctttgtttaggaggagggacttaggaattttaagtatgagaatattattttcaaaattggactcttaaatcactgtcatctttgttgaagatggatttgggaagatattataagaatagaggcaggaagatggattaggaagcttttagagcaattgggtgtgagatgggggtcctgaataggggttgaaatagttgaattagaaaagagggatgacacaaaatagagaagtgtgtctattttcagtttattgccccaccatctccaaatccactcttctttgccctactttttgacactggagctgaactgtgtaagtatttttcctttactagctggcacagtgttaagctttgtcaaaagagagcactagggtgacactacagactatgttgtggcaggaaaactctttaaagttcccattgtccatttttactgttcaccgttgtagcccagttgtcctcagggactggctcctgtgcttttaggccacgctctctcagtggcagatgcttccacaacaagccacttccacagcaatgtatgca

SEQ ID NO: 718093 - DNA, 2517 bp, Homo sapiens
tgtggtgatggttgcacaactctgtgaacaaactaaaaaccattggattgtacactttcaaggggtgaactgtatatataarttatatctcaaaaaagctattttttgttttaaaatttcgaggaataagatttgtatagtggcttcatggtgtcatcaggaagccaggctcctaactttctgctctgttaccctccgtacatggcttccatcttcaagcacgcctcatggttttagatggcttctggagctctggtcattaaatccatattctaggctgcagagatgaggaagaaggctccatttccctctcacatttaaggtacttacctaaaagccaactcaacactttttctttacatattcttggacgaagatcagtcacatggctataaccccctgcaaggaaagttgagaattttagggctatagctgagcacagtgacaatgaatagaacctggtttctattgttttagaagaaaggagaaatgagtgttgaaagatacaattagtagtttatgccacaactatgaaccatagaaaattctttacagctcaaaacataaccctgtcctatctcctgcaaatagtcagaaagaacttatctcattgaaagataaacagtgattaaaaagaaaccagtatacaaactatgtaaagatattgcaagaaaaaaaggaggaaggaaacagaaaaaacaaatggcagatgaagaaggaacatttgtttttttaaaaaaaaaaatgttgtcaccaggcagacaaaattatgatcaagcatattgtcatatattttaagaatttttaacaatcttaaagcagagatacaagagccagggaaaagatgaataggcattactgaaaatactataagatacacagaatacggggctaaaaaagtaagcaataggaatatatatgcaaaaagatagaactatacaagcccatcaaagttaaatgaaaatgtagataactggcatccttggattataggtgttcaaaacaacattcaaaaataacaaaaaagaatcaaatgtacagtgtgataagaaaaactgatgaagaatgagtgacactaagattagcctaaaagttatgagatttcagagataaaggaaaaaaccctttaatcatgcaaaaagaccaagtcattaatgtaggtaatggaagtgtaggtgggaatcaagttgacctctggtatctctacagctttatttacctttagaagatagaggcgcaatgcttacaaatttcttgcagtccagagagtttaattagctaatcagttagaaaacttttaaagtaaaggaccagatggtaaatattttcagctcgtacaatctctgtcacagctactcaattctgctgttgtgcctgaaagcagctgtggacaacatataaatcaaagggcatggttgtgttctaataaaactttataaagacaggcagcttattgcatttggcccttgggccataatttgctgatccctgagctaaactatcattcaaatataaaggcaaaagagaagcatttttgaagtttgacatcttcaggcatgtaatccacataatctaaagtgttagaagacaaactttagtgcacaaaagataaatgaagaaagtgaagcaagaatactggcaagaaataaaaagctaaaatatgctctactacctggagaacagaaaaagaggcataccttccggctcctttggcagcaagtgccttagaagccccatgacgtgaaaggataattcaagaaaccaagacatctgttggaagccataaaaattatgatcagttctaaataaagaaggtgatgtcacatttgcagagcccttttaaaaacatctagagattcacagagatatttagattgttaacccacagtaacagctaagtaagaggggcctcaattttctcagatgtgaaacaccagggttgaattaaatcagagacgcctcagccctgactgctcatgagaatcacctgaggcattttttttaacgtctatgcctgggttccatcccagaccacttaaattagaatttctggagatagaaaagacagtatttttttaaagctctccaaatattcagatatgcagccaagggggaaaaccaccaaattagatggtttgtgaggtaattatcaattcagatattctataaatatatatgtatataatgtatatataaagaattatccaaaacttaaaaatttagaaattgctacataaaagaggcaaaactacttagtcaattttggatgcatgtttctattacagaactttgaattatggtccatactggtctacgtcacaggggcttctaaaaaaaaaaaaacctaaagacttaatgccatcctgatgtacataaactagtacttatttgtgaataaagaaaaaagtaggtaacttcttctgacaaggtaatcaattccttacttttaaaagaaaagtgtccatgtcaagtatttgtaaaatgtcaaatgttccttagttttgaaagtctaaggtt

SEQ ID NO: 718094 - DNA, 2517 bp, Homo sapiens
tgtggtgatggttgcacaactctgtgaacaaactaaaaaccattggattgtacactttcaaggggtgaactgtatatataagttatatctcaaaaaagctattttttgttttaaaatttcgaggaataagatttgtatagtggcttcatggtgtcatcaggaagccaggcycctaactttctgctctgttaccctccgtacatggcttccatcttcaagcacgcctcatggttttagatggcttctggagctctggtcattaaatccatattctaggctgcagagatgaggaagaaggctccatttccctctcacatttaaggtacttacctaaaagccaactcaacactttttctttacatattcttggacgaagatcagtcacatggctataaccccctgcaaggaaagttgagaattttagggctatagctgagcacagtgacaatgaatagaacctggtttctattgttttagaagaaaggagaaatgagtgttgaaagatacaattagtagtttatgccacaactatgaaccatagaaaattctttacagctcaaaacataaccctgtcctatctcctgcaaatagtcagaaagaacttatctcattgaaagataaacagtgattaaaaagaaaccagtatacaaactatgtaaagatattgcaagaaaaaaaggaggaaggaaacagaaaaaacaaatggcagatgaagaaggaacatttgtttttttaaaaaaaaaaatgttgtcaccaggcagacaaaattatgatcaagcatattgtcatatattttaagaatttttaacaatcttaaagcagagatacaagagccagggaaaagatgaataggcattactgaaaatactataagatacacagaatacggggctaaaaaagtaagcaataggaatatatatgcaaaaagatagaactatacaagcccatcaaagttaaatgaaaatgtagataactggcatccttggattataggtgttcaaaacaacattcaaaaataacaaaaaagaatcaaatgtacagtgtgataagaaaaactgatgaagaatgagtgacactaagattagcctaaaagttatgagatttcagagataaaggaaaaaaccctttaatcatgcaaaaagaccaagtcattaatgtaggtaatggaagtgtaggtgggaatcaagttgacctctggtatctctacagctttatttacctttagaagatagaggcgcaatgcttacaaatttcttgcagtccagagagtttaattagctaatcagttagaaaacttttaaagtaaaggaccagatggtaaatattttcagctcgtacaatctctgtcacagctactcaattctgctgttgtgcctgaaagcagctgtggacaacatataaatcaaagggcatggttgtgttctaataaaactttataaagacaggcagcttattgcatttggcccttgggccataatttgctgatccctgagctaaactatcattcaaatataaaggcaaaagagaagcatttttgaagtttgacatcttcaggcatgtaatccacataatctaaagtgttagaagacaaactttagtgcacaaaagataaatgaagaaagtgaagcaagaatactggcaagaaataaaaagctaaaatatgctctactacctggagaacagaaaaagaggcataccttccggctcctttggcagcaagtgccttagaagccccatgacgtgaaaggataattcaagaaaccaagacatctgttggaagccataaaaattatgatcagttctaaataaagaaggtgatgtcacatttgcagagcccttttaaaaacatctagagattcacagagatatttagattgttaacccacagtaacagctaagtaagaggggcctcaattttctcagatgtgaaacaccagggttgaattaaatcagagacgcctcagccctgactgctcatgagaatcacctgaggcattttttttaacgtctatgcctgggttccatcccagaccacttaaattagaatttctggagatagaaaagacagtatttttttaaagctctccaaatattcagatatgcagccaagggggaaaaccaccaaattagatggtttgtgaggtaattatcaattcagatattctataaatatatatgtatataatgtatatataaagaattatccaaaacttaaaaatttagaaattgctacataaaagaggcaaaactacttagtcaattttggatgcatgtttctattacagaactttgaattatggtccatactggtctacgtcacaggggcttctaaaaaaaaaaaaacctaaagacttaatgccatcctgatgtacataaactagtacttatttgtgaataaagaaaaaagtaggtaacttcttctgacaaggtaatcaattccttacttttaaaagaaaagtgtccatgtcaagtatttgtaaaatgtcaaatgttccttagttttgaaagtctaaggtt

SEQ ID NO: 718095 - DNA, 2517 bp, Homo sapiens
tgtggtgatggttgcacaactctgtgaacaaactaaaaaccattggattgtacactttcaaggggtgaactgtatatataagttatatctcaaaaaagctattttttgttttaaaatttcgaggaataagatttgtatagtggcttcatggtgtcatcaggaagccaggctcctaactttctgctctgttaccctccgtacatggcttccatcttcaagcacgcctcatggttttagatggcttctggagctctggtcattaaatccatattctaggctgcagagatgaggaagaaggctccatttccctctcacatttaaggtacttacctaaaagccaactcaacactttttctttacatattcttggacgaagatcagtcacatggctataaccccctgcaaggaaagttgagaattttagggctatagctgagcacagtgacaatgaatagaacctggtttctattgttttagaagaaaggaraaatgagtgttgaaagatacaattagtagtttatgccacaactatgaaccatagaaaattctttacagctcaaaacataaccctgtcctatctcctgcaaatagtcagaaagaacttatctcattgaaagataaacagtgattaaaaagaaaccagtatacaaactatgtaaagatattgcaagaaaaaaaggaggaaggaaacagaaaaaacaaatggcagatgaagaaggaacatttgtttttttaaaaaaaaaaatgttgtcaccaggcagacaaaattatgatcaagcatattgtcatatattttaagaatttttaacaatcttaaagcagagatacaagagccagggaaaagatgaataggcattactgaaaatactataagatacacagaatacggggctaaaaaagtaagcaataggaatatatatgcaaaaagatagaactatacaagcccatcaaagttaaatgaaaatgtagataactggcatccttggattataggtgttcaaaacaacattcaaaaataacaaaaaagaatcaaatgtacagtgtgataagaaaaactgatgaagaatgagtgacactaagattagcctaaaagttatgagatttcagagataaaggaaaaaaccctttaatcatgcaaaaagaccaagtcattaatgtaggtaatggaagtgtaggtgggaatcaagttgacctctggtatctctacagctttatttacctttagaagatagaggcgcaatgcttacaaatttcttgcagtccagagagtttaattagctaatcagttagaaaacttttaaagtaaaggaccagatggtaaatattttcagctcgtacaatctctgtcacagctactcaattctgctgttgtgcctgaaagcagctgtggacaacatataaatcaaagggcatggttgtgttctaataaaactttataaagacaggcagcttattgcatttggcccttgggccataatttgctgatccctgagctaaactatcattcaaatataaaggcaaaagagaagcatttttgaagtttgacatcttcaggcatgtaatccacataatctaaagtgttagaagacaaactttagtgcacaaaagataaatgaagaaagtgaagcaagaatactggcaagaaataaaaagctaaaatatgctctactacctggagaacagaaaaagaggcataccttccggctcctttggcagcaagtgccttagaagccccatgacgtgaaaggataattcaagaaaccaagacatctgttggaagccataaaaattatgatcagttctaaataaagaaggtgatgtcacatttgcagagcccttttaaaaacatctagagattcacagagatatttagattgttaacccacagtaacagctaagtaagaggggcctcaattttctcagatgtgaaacaccagggttgaattaaatcagagacgcctcagccctgactgctcatgagaatcacctgaggcattttttttaacgtctatgcctgggttccatcccagaccacttaaattagaatttctggagatagaaaagacagtatttttttaaagctctccaaatattcagatatgcagccaagggggaaaaccaccaaattagatggtttgtgaggtaattatcaattcagatattctataaatatatatgtatataatgtatatataaagaattatccaaaacttaaaaatttagaaattgctacataaaagaggcaaaactacttagtcaattttggatgcatgtttctattacagaactttgaattatggtccatactggtctacgtcacaggggcttctaaaaaaaaaaaaacctaaagacttaatgccatcctgatgtacataaactagtacttatttgtgaataaagaaaaaagtaggtaacttcttctgacaaggtaatcaattccttacttttaaaagaaaagtgtccatgtcaagtatttgtaaaatgtcaaatgttccttagttttgaaagtctaaggtt

SEQ ID NO: 718096 - DNA, 608 bp, Homo sapiens
cataacaaacagctgttattgattgaggcctactctgtacttgatgtgatcactaggacgtgacttaattacatacattacctcagatttgcccaataattatgcaaaataagtatcttaatcttcctcattttatggattaggaaatcaaatcagaagtttcaaggtcgaaaaagctaataggcttgtcttgctacaagtccatgtttttccattttgtcatctttcatcacttatgcaaatattattatgtctttggcccagattcaagataataatagatttctcctccaacatcagggagggaactaacatttaccacataaggaatgctgcctataagttattgcctttaaccttcacagcatccctgggaggtctttttrccctattcatgaatggggaaactgaggctcagaggggttatacacatcatcaatccagtgagggctgggtttccacccaacgtgtgttgttgctaaaccctggcttccttccctgacaggagcacttcccaaggctggttaaacactaaccacctttgtgagtacctctgatactattatttgctttcttttcttttcctttttttctttcatttatttatt

SEQ ID NO: 718097 - DNA, 1128 bp, Homo sapiens
tggttgtcattacaaatgatcttgatacagacgacaagagctggaagaattcagacatgatgtcagtagcctcgtctgtgaatgtgatgactggacaaattgggattggcttactatggcttttgggccaaatctggcttgctgtctcttttgtatgacctgagagctaagaattggttttgtgttttttaatagctggtaaaaaagaagaatatttaatgacatgtgagaattacaagaaattcaaatttcgctgtccacaaataaagtttattggaacacagccatgcttatggtgtatggctgctgttttgctatgacaacaggcttgagcagtggcaatgaagaccatatgtcctgcaaaaccmtgactctattacccagactctattagccatttacagaaacagtttactgactgctggactcaatgtctgctaacgtccatttcagctccaacactacctccttctgtgattagagaatcaatagccatgtgtttttctttcaagaaaactcagatgaacataggcaagtgagggcatacactttgtgttgttacagcagaaagatagtggtctgcccatgatcgcagaaacagagagatggtgctggttaggatgtgctggtgtttcctggtgacctacctggatttaaagtttggcactgaggcagccatgatgccatgattgctacgttgagagcagacgatggcaggggagggtctggtgggactcagggtcaagtgaggaacaggtgcagttggacccagggggctaagagggccttggcagccagcctggcttacctgtggcaatcacagtctatgttatgctcctgacattcttatttcctgccttagaacactgttttcctgttgatccttgcagaaatctagaaacccagaaatctctcacaggttcagagaagcacagaaggaatggaactcttaggccatctcagccattttctggtcagagccaactgaacttctaccaaacagcttcttggcttttcctccttgtctctctacaaggtaaaattaacatgttcttcaagtcaagatcattaatactttacagagttggagactaggactagacaaggaaaatactcattttagttaca

SEQ ID NO: 718098 - DNA, 916 bp, Homo sapiens
tgagggatcaaaataattatataatcaatgattatatcaattattttacagatctgcattaacttcagtaaagcaaaatgctcaccccattttcttaaagtcacttaatattttacttgggtagtagctactcacaggcatgaaatctaatatttcaatgtaaaatctggaaaatgtctttgtatttttggcaaggcttcataattcaggaattaactcatagttgtcaagatatcactgctgcaatggcccaaatattcagatcaaccattttgtggtttttcccctttcatcctaacagtctgactgtgccagaaaattgcactcttatttattgattaamttctatgtaccaagtacagtgctacatttaatattcacaatctcatataatttcttccaggtattattttctcaattttacaggtgagaacacagcttcataaagattaaataaccaggccaaggtcacatagacaatatctatcagggccagggtaggggataaagcttgctcttttccaaaacctactttgtatggcagcagcaatgaaatggctacctctttgtcctcaaagggtgactgaatgaagaggagctgggcttgagcctgagttaggcttctcactagacattaacatagcctcttagagaatcactgtgacttttgatagaaaaaatatatatataagttaactggagcagagataatcctcataactagacaaaaaatgactagacaaaaaatgactatcaattgaatcacattcatgcagataacttgatttaaacattccccatacaagagaactggccatcttgtgcaaggtcaaagacactctgtgagaatgattcccaaagctaaatctctaatcctggtgtctctcctaaattttagaatcttgttgttatacct

SEQ ID NO: 718099 - DNA, 916 bp, Homo sapiens
tgagggatcaaaataattatataatcaatgattatatcaattattttacagatctgcattaacttcagtaaagcaaaatgctcaccccattttcttaaagtcacttaatattttacttgggtagtagctactcacaggcatgaaatctaatatttcaatgtaaaatctggaaaatgtctttgtatttttggcaaggcttcataattcaggaattaactcatagttgtcaagatatcactgctgcaatggcccaaatattcagatcaaccattttgtggtttttcccctttcatcctaacagtctgactgtgccagaaaattgcactcttatttattgattaaattctatgtaccaagtacagtgctacatttaatattcacaatctcatataatttcttccaggtattattttctcaattttacaggtgagaacacagcttcataaagattaaataaccaggccaaggtcacatagacaatatctatcagggccagggtaggggataaagcttgctcttttccaaaacctactttgtatggcagcagcaatgaaatggctacctctttgtcctcaaagggtgactgaatgaagaggagctgggcttgagcctgagttaggcttctcactagacattaacatagcctcttagagaatcactgtgacttttgatagaaaaaatatatatataagttaactggagcagagrtaatcctcataactagacaaaaaatgactagacaaaaaatgactatcaattgaatcacattcatgcagataacttgatttaaacattccccatacaagagaactggccatcttgtgcaaggtcaaagacactctgtgagaatgattcccaaagctaaatctctaatcctggtgtctctcctaaattttagaatcttgttgttatacct

SEQ ID NO: 718100 - DNA, 790 bp, Homo sapiens
agtttaatagagccatataaaatgaataaattrtgaccaatatccactgcttaatgtagaggagaaatgggaaaaaattcttctccaaagagttcaaaaacagaagacttacgactgaaataagtatcattaactacactcctcaaacaaataaaaacctgtaagtctaattctgtgaagttttcaagtagccaaaattttaattcagagttactattttgattatatccatttcatggatttcaaaattggaagtcacccaagatatttgtggttcaactacaatttgaaacacatttcacagggacctaagcagaagtggttttaaaaattccaattaaagctatgttaacattttcttttgtaaaccttttggtctctacgatggtttgaaaagcaatgaaataaaagcaaaaaataattttaacaaatataaacagaaccaataattgccttcaagtaaaaacttgatgcaaccttttaggaggactgctaatatctttaaactagtatgtattttcaaggaacaaatttgaaaataaatgtgttacatttgaatttttattctgttaataactagtttaattaaaaagaagtatgaaagctttactgagaaagaacaaaaacttcagaccacagtaattgtttggtttataatgcctttgcatcctataatatttcctttttaatatactgcacaaacttccttggagtggaaaaaaggtgccttaatattttgacgaatgaacagcaaactatctactttccctttgaatgtgttactgaaaaa

SEQ ID NO: 718101 - DNA, 790 bp, Homo sapiens
agtttaatagagccatataaaatgaataaattatgaccaatatccactgcttaatgtagaggagaaatgggaaaaaattcttctccaaagagttcaaaaacagaagacttacgactgaaataagtatcattaactacactcctcaaacaaataaaaacctgtaagtctaattctgtgaagttttcaagtagccaaaattttaattcagagttactattttgattatatccatttcatggatttcaaaattggaagtcacccaagatatttgtggttcaactacaatttgaaacacatttcacagggacctaagcagaagtggttttaaaaattccaattaaagctatgttaacattttcttttgtaaaccttttggtctctacgatggtttgaaaagcaatgaaataaaagcaaaaaataattttaacaaatataaacagaaccaataattgccttcaagtaaaaacttgatgcaaccttttaggaggactgctaatatctttaaactagtatgtattttcaaggaacaaatttgaaaataaatgtgttacatttgaatttttattctgttaataactagtttaattaaaaagaagtatgaaagctttactgagaaagaacaaaaacttcagaccacagtaattgtttggtttataatgcctttgcatcctataatatttcctttttaatatactgcacaaacttccttggagtggaaaaaaggtgccttaatattttgaygaatgaacagcaaactatctactttccctttgaatgtgttactgaaaaa

SEQ ID NO: 718102 - DNA, 638 bp, Homo sapiens
aatagctaaagccatgtgccatatgtccaaaaaataattttccggaaatctttataataagagtatttcactgggactaggccaaaaatcaaatctatgaccaaagatgactgttgtgaaatatgacattataaaatattctttatcaattaatagatttatctaatatttgtgagcattttactttgtatcctaatgactcattatctctgatgcacttctccagctttttcatgttttagccttgtttactcattgtttctcttaatagtggttgaagaataacacttgttattacaggaactggggtgtttagttgtgctgcaaacctgttgctttgcttgttgctgctgaggaaataattgatactttgcatattctcctgtcctctttttcctactgtgsccctttgcatggctaaaatgggagccaatgactcaattctgtattggagaaagtgaaaacaatttctagacccattgtatatgtttcctatttctgctgtaacaaattgccaaaaacatagtgaccttaagcaatataaataagttacttcacggttttagttgtcagaagtctaaaatgtgttcttagggctgcttttcttctggaggctctagggaagaaatagtattttc

SEQ ID NO: 718103 - DNA, 2304 bp, Homo sapiens
tttaattctgaaatactacagagggtttttaaaaataagaagctacacagagatatttttgttaatattgtggaacacaaacatttggcttcaaataaaaaagcataacactaataaatcaagcaatatgtttatcttaaatcccattctttttgtagtgactaacaaaaataagtataatttgaatctccgtaccctacatatatttgtttttaatgtttcttgattatcaataaattgttcctaaaattatagctctgagaaacatacttttgataatgttaggaagatttaaagatgacaagaagagactatatctatatttaatataaaagacataaccacgatgtgctgctattgacacagtacagaataaaatcacactaaatattaaatgatacctatgattcaaaactcattggtaagctgaccagacctcagttaaccaggttgtcaatccctcttaccgttaataaagaccaatgtatttcacctgagatccaaataaatgaaatacttttaaattcaagtgatttgctttacttattttttacataaagatgagtatgtatctaaaaggagacatatttgtaattctgtttttgcattttctgagagatctcaaatatatttgttgccacaactcaaaaaagtgaacatattttaatgaatgcaataggcattcattaacgtacttttcctgtgacttcacaacattgcgagaagaaaagataagaagatctaggagacatgaggcaacaatctgattagacagtaagtttggctgaaaagaaagtgtgggaaaatcttctcttctgaaagaacaactttgcctgtaatcccagccagcactataggaggctgaggcaggcggatcacgaggtcaggagttcaagaccagcctgaccaacatggtgaaaccccatttctactaaaaatacaaaaattagtcgggcatggtggcgtctgcctgtaatcccagctactcaggagactggggcaggaaaatcgcttgaacccaggaggcggaggttgcagtgagctgaggtcacgccactgcactccagcctgggcaacagagcgagactttgtcaaaacaaacaaacaaaaaaaaaactttatcaaaaagtacaatgcagacaattctacttccaattatgtgtgtgtttataaatttaattttaaaatgcaaagatgctatgtaagcataatctcacaactcttaaatttactctacctgtaattagggttatgctggtaaatgcataccaattgtttttcaacaacaacaacaaaaatagctctgattctcagttgtaacatttgctcatttctggagtgtaaacatttttactatggttgatttcagtataataacataaagtcattgaatgcagaattaggaggaaaggtgaagtagcacaccattatagagtagttccacaaaaaaaaaaaatgtaaatatcctcaagaacatagaaaatagtacagtatagtagagtaattgtaaggtgattcttttaaagtatttattaattttattttaatgtaaattgcttaattgtaatttttataatttaattttcaataatggccatcttcaacatcttcaacaatcgatcagcttgcaaagttttgcaaagattttctccttatctttactttctagcagtttgtctatggagtgtgtggcagacagacactaaggttacccctcaataatttctggcctcctgatgttcacgctgctgagtattactgtctccttatgtctggacaggatctgtggtttgctctcaccagtagaatatggaaaaggtgataaaatgatactgtcctgatgagtttttattatatcatgctatatagcaaaggtaatgagatgttatgcctgtagtgtgctaagttaaaaaagattccagcagattagagctagagttttcttgcaggttcaatgcattarggaaccacattgaagaatttcacagaaggatctggaggccagttgcctctaggagttgaaggcagcttccagcttacagtcagcaaataactggggaccttgttcttacaaccacaggaaatgaattagatccacaacctgaatgagcttggaagcaggtaattccataggtaatcctttggaagaggaggcagtatggctgacaccttaactgtagctttgtgagatctgtaacagaagactcagtagctatgcctggattcttgatctgcaggcattctggatatatgtgtgaacatctttatccagaactgaattagtgctttattttgattatgatc

SEQ ID NO: 718104 - DNA, 1638 bp, Homo sapiens
aaacgtagaagctacccaaatatgtagatatatttgagatatttattcagcaatttaaagaacaaactactggtaaaccacctgtatggagttcctcaaaagaacattatccttagaaaaaaaatgataaaatgcataaatactgaatctctattcatatctacctattgcctatgattacattctttctttctgttaactatctatctaattctaagaaagacatatctcatctactttgattaaatgttagtcactataatattatgacaatattttagtgattattaaggtagtgttaacacatgtatataaatttacaaattccatcaaactgtacaatttaggaatgtattttgtcttgtatatattaggtcttaaagtatttaattaaaaaatgagaatgtcagtcaaaagagctaatgtactgcagtataaactctgaccctaaagaagaaataatctctaagaataatttgcaatacaaaattactaatattataaaatattaagtatacttaataagatgcacwacatacctttatgtaaaagaattgcctatgttttgcatccatttacctgatctccatatattctacatcttacaattctgattttcagaattccactgaagtgactcatgtcaccattatcaattatctaaatttactaaacacagtacatattagttcctcatgctgctgaatctctcattaaacctcaaagattcatttgagttttctccctttctatgttttaacaacactagtgttatataaggacaaaattttcctaccgaatactaaaatacattccagcaatataaagtcaccgtagtttcagataacttttaaacactttaagcaactaagcaaaattattagcagacaattttaagtgtttaagtttttgcagttattgaaagaaagtcctattaaattatgcataaaaatagattaagcaaagtgtgaaaactctgctattatcactacaacacttgttcccatatctagaacttctatgaatagttgttgaagtaaaaacaatacatattcagtaacatagcagcagcaggccatccactcactcttcaaaatagtgattttttttaatgaactatatcatgaatataataaacagtttgttttttctatgcctgagaactctcaacctctggtcacaccacttttaaattgtgacatcaaataaatatacagagatggaaaaatactatttccttttttccttccttctttcttttcttctttccttccatctctctgcctctctgtctctctctcttctctctctatttgtggcaagggcccagtcaggatacaattcacctttttcaaagattggaacgctgtctttaaaatgtatatggtttgcatgaaagaaagaaatgtatacggtttgcataaaatatatctgtctttgggattctagacaagagagaaccttctaggtggcagcttttccaaagttattgtaaaattccctgaattaaaatggtgtctaatttcattacttgttgctattgctgaatacaataatctgggtaatttagaaagaaaagaaatttatttcttgtggttctggatactgggaagtccaaggttgaggggcttcatctgg

SEQ ID NO: 718105 - DNA, 1638 bp, Homo sapiens
aaacgtagaagctacccaaatatgtagatatatttgagatatttattcagcaatttaaagaacaaactactggtaaaccacctgtatggagttcctcaaaagaacattatccttagaaaaaaaatgataaaatgcataaatactgaatctctattcatatctacctattgcctatgattacattctttctttctgttaactatctatctaattctaagaaagacatatctcatctactttgattaaatgttagtcactataatattatgacaatattttagtgattattaaggtagtgttaacacatgtatataaatttacaaattccatcaaactgtacaatttaggaatgtattttgtcttgtatatattaggtcttaaagtatttaattaaaaaatgagaatgtcagtcaaaagagctaatgtactgcagtataaactctgaccctaaagaagaaataatctctaagaataatttgcaatacaaaattactaatattataaaatattaagtatacttaataagatgcacaacatamctttatgtaaaagaattgcctatgttttgcatccatttacctgatctccatatattctacatcttacaattctgattttcagaattccactgaagtgactcatgtcaccattatcaattatctaaatttactaaacacagtacatattagttcctcatgctgctgaatctctcattaaacctcaaagattcatttgagttttctccctttctatgttttaacaacactagtgttatataaggacaaaattttcctaccgaatactaaaatacattccagcaatataaagtcaccgtagtttcagataacttttaaacactttaagcaactaagcaaaattattagcagacaattttaagtgtttaagtttttgcagttattgaaagaaagtcctattaaattatgcataaaaatagattaagcaaagtgtgaaaactctgctattatcactacaacacttgttcccatatctagaacttctatgaatagttgttgaagtaaaaacaatacatattcagtaacatagcagcagcaggccatccactcactcttcaaaatagtgattttttttaatgaactatatcatgaatataataaacagtttgttttttctatgcctgagaactctcaacctctggtcacaccacttttaaattgtgacatcaaataaatatacagagatggaaaaatactatttccttttttccttccttctttcttttcttctttccttccatctctctgcctctctgtctctctctcttctctctctatttgtggcaagggcccagtcaggatacaattcacctttttcaaagattggaacgctgtctttaaaatgtatatggtttgcatgaaagaaagaaatgtatacggtttgcataaaatatatctgtctttgggattctagacaagagagaaccttctaggtggcagcttttccaaagttattgtaaaattccctgaattaaaatggtgtctaatttcattacttgttgctattgctgaatacaataatctgggtaatttagaaagaaaagaaatttatttcttgtggttctggatactgggaagtccaaggttgaggggcttcatctgg

SEQ ID NO: 718106 - DNA, 1638 bp, Homo sapiens
aaacgtagaagctacccaaatatgtagatatatttgagatatttattcagcaatttaaagaacaaactactggtaaaccacctgtatggagttcctcaaaagaacattatccttagaaaaaaaatgataaaatgcataaatactgaatctctattcatatctacctattgcctatgattacattctttctttctgttaactatctatctaattctaagaaagacatatctcatctactttgattaaatgttagtcactataatattatgacaatattttagtgattattaaggtagtgttaacacatgtatataaatttacaaattccatcaaactgtacaatttaggaatgtattttgtcttgtatatattaggtcttaaagtatttaattaaaaaatgagaatgtcagtcaaaagagctaatgtactgcagtataaactctgaccctaaagaagaaataatctctaagaataatttgcaatacaaaattactaatattataaaatattaagtatacttaataagatgcacaacatacctttatgtaaaagaattgcctatgttttgcatccatttacctgatctccatatattctacatcttacaattctgattttcagaattccactgaagtgactcatgtcaccattatcaattatctaaatttactaaacacagtacatattagttcctcatgctgctgaatctctcattaaacctcaaagattcatttgagttttctccctttctatgttttaacaacactagtgttatataaggacaaaattttcctaccgaatactaaaatacattccagcaatataaagtcaccgtagtttcagataacttttaaacactttaagcaactaagcaaaattattagcagacaattttaagtgtttaagtttttgcagttattgaaagaaagtcctattaaattatgcataaaaatagattaagcaaagtgtgaaaactctgctattatcactacaacacttgttcccatatctagaacttctatgaatagttgttgaagtaaaaacaatacatattcagtaacatagcagcagcaggccatccactcactcttcaaaatagtgattttttttaatgaactatatcatgaatataataaacagtttgttttttctatgcctgagaactctcaacctctggtcacaccacttttaaattgtgacatcaaataaatatacagagatggaaaaatactatttccttttttccttccttctttcttttcttctttccttccatctctctgcctctctgtctctctctcttctctctctatttgtggcaagggcccagtcaggatacaattcacctttttcaaagattggaacgctgtctttaaaatgtatatggtttgcatgaaagaaagaaatgtatacggtttgcataaaatatatctgtctttgggattctagacaagagagaaccttctaggtggcagcttttccaaagttattgtaaaattccctgaattaaaatggtgtctaatttcattacttgttgytattgctgaatacaataatctgggtaatttagaaagaaaagaaatttatttcttgtggttctggatactgggaagtccaaggttgaggggcttcatctgg

SEQ ID NO: 718107 - DNA, 1588 bp, Homo sapiens
gatggtcttcatctcctgacctcgtgatccacccaactcgtcctcccaaagtgctggaattacaggagtgagccaccacattcggtgtctgtttttatttttaagtcttctattctttttgatgaattttattctttttttttttttttttttttttttttggcagaggctcactctgttgcccaggttggagtacagtgatgccatcttggctcactacaaagtccgcctcctgaggtcaagcaattcttctgcctcagcttcttgagtagctgggagtacatgcacccaccaccgtaccctgctaatttttgaatttttagtagagatggggtttcatggtgtttgccaggctggtcttgaactcctgacctcagatgatttacccatctcagcctcccaaggtgctgggattacaggcgtgagccaccatgcctggccctggatgttttcttcttaaaaagccagttgagaattctaagtgtactcacttaaaaggaaaatttagtttgctataatatttctcatatttgctgtggtgaattcatctctaggaggtttctttgtataattatttcattatctctctaatagttaattctccacatgttttgtaatattttttcacactcaccttgaatgagaagttctctacakgtcatagtcatataacaaacagaattcaccctccttcaccactaatcacacttctgtatattcaataaaatgtgcatttcttcatggatactctttgaatcatctaaatggagactctttatagaaatattgaatcattaattcttccatctactgtactcctttccaacatactgtcttactgatttttcactttttcctatttatatccattttgttctactaacccgtctgtcattggccttcttctatagccaacctcaaatttcagttcacattagctgtgaacagcactcaaattgctgctgtattcttaaaatataaatttacttcataaagcaaaagtgaattatatgcatgttacaaaaaatattcctagcagagataagatgggatggtatttgctgggatgtgcagcatcgttttttccaaattaatttctctcagaattctctcctccctactgccaggcagagctcaccactcacatgtcatgaatgacatttttagtcatttttcatcatatctgatcatatgacttgaattaatgtttagatctgctaagggcaaacaccaccatggaattaaatttgcaagagggaggaaggaggaagcaggagaaggtgggtagagtcttcagactagggtgcagatcttacacctgtagagggaaagagggaaggaaggctggttggggtagaaagagactgcagcatggttccaagaatgctttggcctaggtcactgcagactccttaaattaaagttactcattggagactctcacaactcactggaaacgtcctcacatacaatccccatgtagctctatgactgttggaaacatgactgctgcacaagtgtagaagtgcttccagagacagagggctaaagccaggctgtcgctgacttatgctgtctgattcaggat

SEQ ID NO: 718108 - DNA, 1588 bp, Homo sapiens
gatggtcttcatctcctgacctcgtgatccacccaactcgtcctcccaaagtgctggaattacaggagtgagccaccacattcggtgtctgtttttatttttaagtcttctattctttttgatgaattttattctttttttttttttttttttttttttttggcagaggctcactctgttgcccaggttggagtacagtgatgccatcttggctcactacaaagtccgcctcctgaggtcaagcaattcttctgcctcagcttcttgagtagctgggagtacatgcacccaccaccgtaccctgctaatttttgaatttttagtagagatggggtttcatggtgtttgccaggctggtcttgaactcctgacctcagatgatttacccatctcagcctcccaaggtgctgggattacaggcgtgagccaccatgcctggccctggatgttttcttcttaaaaagccagttgagaattctaagtgtactcacttaaaaggaaaatttagtttgctataatatttctcatatttgctgtggtgaattcatctctaggaggtttctttgtataattatttcattatctctctaatagttaattctccacatgttttgtaatattttttcacactcaccttgaatgagaagttctctacatgtyatagtcatataacaaacagaattcaccctccttcaccactaatcacacttctgtatattcaataaaatgtgcatttcttcatggatactctttgaatcatctaaatggagactctttatagaaatattgaatcattaattcttccatctactgtactcctttccaacatactgtcttactgatttttcactttttcctatttatatccattttgttctactaacccgtctgtcattggccttcttctatagccaacctcaaatttcagttcacattagctgtgaacagcactcaaattgctgctgtattcttaaaatataaatttacttcataaagcaaaagtgaattatatgcatgttacaaaaaatattcctagcagagataagatgggatggtatttgctgggatgtgcagcatcgttttttccaaattaatttctctcagaattctctcctccctactgccaggcagagctcaccactcacatgtcatgaatgacatttttagtcatttttcatcatatctgatcatatgacttgaattaatgtttagatctgctaagggcaaacaccaccatggaattaaatttgcaagagggaggaaggaggaagcaggagaaggtgggtagagtcttcagactagggtgcagatcttacacctgtagagggaaagagggaaggaaggctggttggggtagaaagagactgcagcatggttccaagaatgctttggcctaggtcactgcagactccttaaattaaagttactcattggagactctcacaactcactggaaacgtcctcacatacaatccccatgtagctctatgactgttggaaacatgactgctgcacaagtgtagaagtgcttccagagacagagggctaaagccaggctgtcgctgacttatgctgtctgattcaggat

SEQ ID NO: 718109 - DNA, 1588 bp, Homo sapiens
gatggtcttcatctcctgacctcgtgatccacccaactcgtcctcccaaagtgctggaattacaggagtgagccaccacattcggtgtctgtttttatttttaagtcttctattctttttgatgaattttattctttttttttttttttttttttttttttggcagaggctcactctgttgcccaggttggagtacagtgatgccatcttggctcactacaaagtccgcctcctgaggtcaagcaattcttctgcctcagcttcttgagtagctgggagtacatgcacccaccaccgtaccctgctaatttttgaatttttagtagagatggggtttcatggtgtttgccaggctggtcttgaactcctgacctcagatgatttacccatctcagcctcccaaggtgctgggattacaggcgtgagccaccatgcctggccctggatgttttcttcttaaaaagccagttgagaattctaagtgtactcacttaaaaggaaaatttagtttgctataatatttctcatatttgctgtggtgaattcatctctaggaggtttctttgtataattatttcattatctctctaatagttaattctccacatgttttgtaatattttttcacactcaccttgaatgagaagttctctacatgtcatagtcatataacaaacagaattcaccctccttcaccactaatcacacttctgtatattcaataaaatgtgcatttcttcatggatactctttgaatcatctaaatggagactctttatagaartattgaatcattaattcttccatctactgtactcctttccaacatactgtcttactgatttttcactttttcctatttatatccattttgttctactaacccgtctgtcattggccttcttctatagccaacctcaaatttcagttcacattagctgtgaacagcactcaaattgctgctgtattcttaaaatataaatttacttcataaagcaaaagtgaattatatgcatgttacaaaaaatattcctagcagagataagatgggatggtatttgctgggatgtgcagcatcgttttttccaaattaatttctctcagaattctctcctccctactgccaggcagagctcaccactcacatgtcatgaatgacatttttagtcatttttcatcatatctgatcatatgacttgaattaatgtttagatctgctaagggcaaacaccaccatggaattaaatttgcaagagggaggaaggaggaagcaggagaaggtgggtagagtcttcagactagggtgcagatcttacacctgtagagggaaagagggaaggaaggctggttggggtagaaagagactgcagcatggttccaagaatgctttggcctaggtcactgcagactccttaaattaaagttactcattggagactctcacaactcactggaaacgtcctcacatacaatccccatgtagctctatgactgttggaaacatgactgctgcacaagtgtagaagtgcttccagagacagagggctaaagccaggctgtcgctgacttatgctgtctgattcaggat

SEQ ID NO: 718110 - DNA, 1588 bp, Homo sapiens
gatggtcttcatctcctgacctcgtgatccacccaactcgtcctcccaaagtgctggaattacaggagtgagccaccacattcggtgtctgtttttatttttaagtcttctattctttttgatgaattttattctttttttttttttttttttttttttttggcagaggctcactctgttgcccaggttggagtacagtgatgccatcttggctcactacaaagtccgcctcctgaggtcaagcaattcttctgcctcagcttcttgagtagctgggagtacatgcacccaccaccgtaccctgctaatttttgaatttttagtagagatggggtttcatggtgtttgccaggctggtcttgaactcctgacctcagatgatttacccatctcagcctcccaaggtgctgggattacaggcgtgagccaccatgcctggccctggatgttttcttcttaaaaagccagttgagaattctaagtgtactcacttaaaaggaaaatttagtttgctataatatttctcatatttgctgtggtgaattcatctctaggaggtttctttgtataattatttcattatctctctaatagttaattctccacatgttttgtaatattttttcacactcaccttgaatgagaagttctctacatgtcatagtcatataacaaacagaattcaccctccttcaccactaatcacacttctgtatattcaataaaatgtgcatttcttcatggatactctttgaatcatctaaatggagactctttatagaaatattgaatcattaattcttccatctactgtactcctttccaacatactgtcttactgatttttcactttttcctatttatatccattttgttctactaacccgtctgtcattggccttcttctatagccaacctcaaatttcagttcacaytagctgtgaacagcactcaaattgctgctgtattcttaaaatataaatttacttcataaagcaaaagtgaattatatgcatgttacaaaaaatattcctagcagagataagatgggatggtatttgctgggatgtgcagcatcgttttttccaaattaatttctctcagaattctctcctccctactgccaggcagagctcaccactcacatgtcatgaatgacatttttagtcatttttcatcatatctgatcatatgacttgaattaatgtttagatctgctaagggcaaacaccaccatggaattaaatttgcaagagggaggaaggaggaagcaggagaaggtgggtagagtcttcagactagggtgcagatcttacacctgtagagggaaagagggaaggaaggctggttggggtagaaagagactgcagcatggttccaagaatgctttggcctaggtcactgcagactccttaaattaaagttactcattggagactctcacaactcactggaaacgtcctcacatacaatccccatgtagctctatgactgttggaaacatgactgctgcacaagtgtagaagtgcttccagagacagagggctaaagccaggctgtcgctgacttatgctgtctgattcaggat

SEQ ID NO: 718111 - DNA, 2524 bp, Homo sapiens
tgttttaaaggttagagataaacctgtagtttaataattctaagatactctatttctcatattttaacatctctgacattgaaatgccacttataagtcattatttgttacaagtatattctgcagaaatttaaacaatcttttattgttacataaataaggaggcatcacacaattcacggtgccttccatgaagtggcatatggtatatacaacaggatgatggcagtcctagtcataggattaacacttaaagaaattttagcttttaagagtgctacacaaaaggagagttgaaataaaaacaaactgttaaaacaaagtacttctttaatatttttaaaacttcaagccaaagaaaacttgggattaaagtaggtatggatcattttattccatatttagatttatagaatgtatgtaaattcatatttaaatttatagaatgcatgtaaattaggtatttccaatgattaatattactatttaaagctgttataaatttccaaaatcatggttggtagttatcttttactagtttcttacttcagaagtgtttttgttttaaagatgagaggaaaagcttcaattgagattcagtcctagtactccaactttaaatctctcactttgctaaggctgagcaggtaaatgtaaaatttttaaggatgaaaggattttgagagttaatgtatcttctacataataggcattcagcttacatgtgataaattgattaaaaggataaatacagttgagaagttcaataccttaaaaaaactgctataaataaagcacttatattttctattttattttcttaataataaaactacactaattaatctataattattgacatatatgtaataaatctatatataataaaaatatgtgtctaataagatgtatatgtaaatcaacaagcacaggtaaaaagattgtcttttgaagatgctaaaagttcacagaatatactaattcacaaaaaataaaaattaaagtatggaaagtgagaaattattttcattggtgcaaaattatattcctgctcttcccaaaaattatttcattaataataaactttttctaatagcattgtacatgctcaatgtggaaatcaaagataataaaaaggaaaaacattttatattaaaacaaatgccctcaaataacaaattttatcaggtttcatacacaatttcagataacacaagactgtagtctgtgtgtatgtataatcaaactgaactttaccctcacttgatacaccaaaatacattttcaaatgtcacctacttctctacatatttctaccttcagtggtcacatattatcccatgctgtaaattcactgaaatgtatttataaaagtcattatatggattcttcttaataatatggtacttaccaccaaattgtctatttgaaaagttatctgcaacttaaactttaaacagcagtgtaaatatcactgctctttttcctcataaactttgtagatagaaagcagtgtttgattcctcttttaacttaaatgccttctgtaaccaggaacactaaatattgttttctgtgtgcataggtcacttgcagatcttaagaaaatacttttccaattttaaattagaagcaaagtactatttttagacctgcaatttagayctctaatttaaattgctcaattttaaatgagggttttttgttgatttaagtgaattatctataaaaggaagatttttaaatctaatatgtatacacacacgcacatacatgtgtagtaaatattttacaagtatgcggccttttattttttctcattacagtttaatttaattttgttttgcttaattatccttcagactgcttgcttctgagcttcttagaaaggtgttgtcaacataaaaatgtacctgtgtaaataggcatttatgttttcttctggtgcttttatcattttgtatattaaaaaaattaatctatattccgttagaaatttactttgtggcataaaaatctagttttctccaaaaagcaggcatttcccttatgaaactattctttccctactagtataaagtgtgagcattatcaagttctaaattcttagatattcgggtgtttctggattttctactctgttgtattcatttacctgtcttttcagctgttatcaaagaatttgtgatttatgtatttatttttgagacacagtctcactctgtcgcccaggctggagtgcagtgatgggatctcagctcactgcaacctccacctcccagtttcaagcgattctcgctcctcagcctcccgagtagatgggcttacaggctaccgacatcgtgcctggctaatttttgtatttttgtagagtcggggtttcaccatattggccaggctagtcttgaactcctgacctcaggtgatccacccgcctcggccgcccgaagtgctgggaccacaggcatgagccagcacgcctggacttttttttttcttttttcaaattttatttatttattta

SEQ ID NO: 718112 - DNA, 830 bp, Homo sapiens
  misc_feature 357, 379, 380, 381, 382, 383, 384, 385, 386, 387, 388, 389,390, 391, 392, 393, 394, 395, 396, 397, 398, 399, 400, 401,402, 403, 404, 405, 406, 407, 408, 409, 410, 411, 412, 413,414, 415, 416, 417, 418, 419, 420, 421, 422, 423, 424: n = A,T,C or G
  misc_feature 425, 426, 427, 428, 429, 430, 431, 432, 433, 434, 435, 436,437, 438, 439, 440, 441, 442, 443, 444, 445, 446, 447, 448,449, 450, 451, 452, 453, 454, 455, 456, 457, 458, 459, 460,461, 462, 463, 464, 465, 466, 467, 468, 469, 470, 471: n = A,T,C or G
  misc_feature 472, 473, 474, 475, 476, 477, 478: n = A,T,C or G
cagtaccaagtgatatccttatattctatagtagagcaattgtaatctgtggtatataaacagaaaagttcatatcaatagttagacagacagacagacagatgagggaagtgggggatggagctcttggtattacatcttggtgctatcgattatttgttttatttacctttctatataatctgaatctgtgtcaacaaatatcataagcttttctgatactaaagaggaaactcacagacccagaaacagtaaataatttctttgcaagtaatcttcattttaaatacatatgttgagaacttgttttattcctctgttactattgagatttgctgctccctagttattcctttntaaattctaatgggacacttannnnnnnnnnnnnnnnnnnnnnnnnnnnnnnnnnnnnnnnnnnnnnnnnnnnnnnnnnnnnnnnnnnnnnnnnnnnnnnnnnnnnnnnnnnnnnnnnnnnatcctataatataaattaacgtatgggaaattgagttactcaacataaatagctagtaaatggtatagttggaacttaaacccaagctttctaattaataatttcttgttttcttatatatacttcctacctgccacatattctttccaaggaacataagatataaaataagagtttttgtttcctgtttaatgcctctatcctgaatacatcttgatatttcaaatattgtgttttttcttgaattaatatacaaatagttttctgaagaatttgagagagtttaaaaggaaaaaaaactgatgagcaatttaaatgtattgaaaatacacygtgcactgtgtttaaaagt

SEQ ID NO: 718113 - DNA, 589 bp, Homo sapiens
gagtgctgtcccttcttggctatgttatttgccattaccttgtttcatgcagaaagaaaaatgaactgctctttcctcacctttcaataaaactgctcacctttagaatcacgtaggatagttctataccaatggtgtagtaaatggcattgcttatcraagggctaattccacatgtggttatctaggtttttagtttttggttttgctgttgtttttattgttgttggcttttgggcccattttacgtgtcaaaaaatagaataaaagactaacagatttgtaataaattttctctttctgagggtcacttcgaagggactgataaaaagattggaattcttagctgagtaagtttctttggttacctgtgccacatttttaaaagcactacagagcttctttatacttagaagaacagaactttttttttcaggcaagtaaaggtattttttcaatactagatatcagagaagtagaatcttcccactctatgcctattatgaaagacaattgaatttaaattagcttgatcttggaccatatacaatggtgtttaattatagaactataaaacattattgtttca

SEQ ID NO: 718114 - DNA, 589 bp, Homo sapiens
gagtgctgtcccttcttggctatgttatttgccattaccttgtttcatgcagaaagaaaaatgaactgctctttcctcacctttcaataaaactgctcacctttagaatcacgtaggatagttctataccaatggtgtagtaaatggcattgcttatcgaagggctaattccacatgtggttatctaggtttttagtttttggttttgctgttgtttttattgttgttggcttttgggcccattttacgtgtcaaaaaatagaataaaagactaacagatttgtaataaattttctctttctgagggtcacttcgaagggactgataaaaagattggaattcttagctgagtaagtttctttggttacctgtgccacatttttaaaagcactacagagcttctttatacttagaagaacagaactttttttttcaggcaagtaaaggtattttttcaatactagatatcagagaagtagaatcttcccactctatgcctattatgaaagacaattgaatttaaattagcttgatcttggaccatatacaatggtgtttaattatagaactataaaayattattgtttca

SEQ ID NO: 718115 - DNA, 588 bp, Homo sapiens
tatagaaacgttaaaaaaaaaaatcctgagaagatgttgactatttatttttatccacaatccagtaaggtctaggcagtttagcctgcctccatggcagaaagcttaatacacaggtwttatttatctaactttaccaaagccagttgttattagtatttgatatacaaataagtacttctacataatctagtctaacataagatgttttgtcaagctatccctcccttgaatttgcaaaatataattgtgttttctctttcatattcatccaactgtcagctgaacaaagacaaacactttctttgtgaagatttatggcaagcagttcaagttgcaatctgcagtaccacagaaatttccaataattcaaaagctgaaaatagcttaagaaatgttatccttgggctatttatgtctttggcaaagaaagttcatttaatataattacctattctttacatttttaaatggaaaaggatatattgtctctaggcagtaaattctaaattccaggaagaagacatttttgaaaaagaagaagaaagtaattctagagaagaatttgaaagcagcattaggccatgg

SEQ ID NO: 718116 - DNA, 601 bp, Homo sapiens
gactggagctaagtgatggagattgatcataaattgaatgtggccagaaccagttttaagaatttttctgtacttattttctattatttctagctttaggattttagaaaaatatttaagaaagcaaaaaaatgcatcaggttgcttacttccatttatcaaatgacttgcttgttctatccataatattattttagacagaacatgagcacatctttactatttttaatcttttatttgttacagccataatatataatgatatcttaagaattaccttttcttakttagatgctatttactcagagtagtctttgcttattaaactatttaaggaactcctttctgagtcattctcagtactacatcttcaagctgtatcctttgaagcaattcagaatctgtaaaataatcttactcatttattatccgtttatgtgcttctctccccattagcatatcaatttcattaaagtagacttcattgtccttttcattatgtcctaaatgcctaaaacaattttgacacacagtaaatacacaataaatatttctttaattaatacatgactaaataagaataaaaagcacatggtccagt

SEQ ID NO: 718117 - DNA, 601 bp, Homo sapiens
gactggagctaagtgatggagattgatcataaattgaatgtggccagaaccagttttaagaatttttctgtacttattttctattatttctagctttaggattttagaaaaatatttaagaaagcaaaaaaatgcatcaggttgcttacttccatttatcaaatgacttgcttgttctatccataatattattttagacagaacatgagcacatctttactatttttaatcttttatttgttacagccataatatataatgatatcttaagaattaccttttcttagttagatgctatttactcagagtagtctttgcttattaaactatwtaaggaactcctttctgagtcattctcagtactacatcttcaagctgtatcctttgaagcaattcagaatctgtaaaataatcttactcatttattatccgtttatgtgcttctctccccattagcatatcaatttcattaaagtagacttcattgtccttttcattatgtcctaaatgcctaaaacaattttgacacacagtaaatacacaataaatatttctttaattaatacatgactaaataagaataaaaagcacatggtccagt

SEQ ID NO: 718118 - DNA, 601 bp, Homo sapiens
gactggagctaagtgatggagattgatcataaattgaatgtggccagaaccagttttaagaatttttctgtacttattttctattatttctagctttaggattttagaaaaatatttaagaaagcaaaaaaatgcatcaggttgcttacttccatttatcaaatgacttgcttgttctatccataatattattttagacagaacatgagcacatctttactatttttaatcttttatttgttacagccataatatataatgatatcttaagaattaccttttcttagttagatgctatttactcagagtagtctttgcttattaaactatttaaggaactcctttctgagtcattctcagtactacatcttcaagctgtatcctttgaagcaattcagaatctgtaaaataatcttactcatttattatccgtttatgtgcttctctccccattagcatatcaatttcattaaagtagacttcattgtccttttcattatgtcctaaatgcctaaaacaattttgacacacagtaaatacayaataaatatttctttaattaatacatgactaaataagaataaaaagcacatggtccagt

SEQ ID NO: 718119 - DNA, 1289 bp, Homo sapiens
tatatttagacatgtttagatacacaaatatttaccattgtgttacggttgcctacaccaatcagtatggtaacattctgtataagtttgtaacctaggagcaatgggttataccatctagcataggtgtgtagtttgttttagcatctaggtttgcgtaagtatacgttatgatgtttgcacaacaaccaagttgcctaaataaacctgtcattaagtgacacatgactgaatttaatctctcaacccctctctgtttcatagcactttctatatcctcatattacagtgtacaaaatattgtgctatgcttttccataataaacccaaagcctttttgtagtgcttaataataaactattataaagtgtgaggttttccaggatgatatatgtcatggtctattatagttagcatataatagaaaatagatgtgtttttgtttaatagagctgcattgctcactggttatcatgttgtgttgcaaattctttcacatttgtgtcttattccttcaatttcaagaataatataaattaaaaaggaagaaattatgtcaaacagaagtttatgtatactaagcacttgtcaatatactgcataagagtaattgcctatatgaaagatttcttaacagtcattgtcattattttctcaatataagtttagaaaaaggtgttgtgaatcatgagaaaatcaaaaaattttaagttggaaataagtaataaaacagcaaaatatactttgctctcattattgactaatttcttctttggtttagaattagtacacattactttattaagacattcatcaaatgttgatgaatgtttactatgtcttatatatagatattaaacaaattatgacaaagatggatgattattttaaaatggagtcatttaacataagaaytttgttatgtgagaaaccataataaagtgacctgacctaaacttgtggaggaatgggtcacagattaattcccttgagctagaaactttaagatgtgttgtggaaaataaataatttttctccatacaaagggagtgtgagtgaaaatagtagacagacaaaatagcatctgctgctataaagcaaatgcctttgaataactgaaagttgacctgaatgcctgagttacaaatatcatagagaaatatagtgtagaaagtgtccagaagaaggggctgaaacgttatatctaagagcataacacataagaaattaataatttgctttctatcctatgaacgaagaaaagttactgcataatgttaaataggcaa

SEQ ID NO: 718120 - DNA, 1135 bp, Homo sapiens
tagtttgtgagactttccttttttgctatgaccttgattgtgttttgaggagtactggtaaggtatcttgtaaagtgtcccacaatttgggtttgtgtgctgttttactcatgattagaagagggttatgggatttggggaaggaaaccacagaaataaagtgctatttttatcacatcatgtcaygggtacatactgtcaatgtaccttatcactgttgatgttaaccttgatcacctggcctaggtagtgtttgtcaggtttctctgctgtaaagtgactctttttttaaaactccccatcttgtcacactgtacttttggaagaaagtcatgatgtgtagcccatatttaatggttggggagttatgctctacctccttgagggcaagtatgtccacagagtatttgggatacttctgcacagaagatttatttgttctctttatttatggattgattcagtcattgatttaagcagtatagactatgagtgttttatatcctggttagtaacacaatctgtttttttttttttcacaactagatcaaaagttcctaggtgcttagaactgattcatgcttctacgcccccctgcttgcctgatgcaaaacagattacccccaaaatagacatttgttggttgatagaactaaagtaagaattaagttcccaatatctgtaatgatgtcccaaagcagtctaattgatctgttgacattatcttactatatttaactgcctttctgaaaatgttatctgaggttgaaagacccttagaaatcatctagtacaacccttttgcttacaatggtaaaacttaggactggagaggaaatgtatggacccatatatgagatgagaacctactttcctaatcttcaatgtgatgctctttagacataacgcatgctgtgataactactgcagtatctagtgggtgtaatgtgctcgccacaggctagttgaatttgtagctgcaggcaaaagtgagccatcaaagaaattttgtcagttctgtttttgttctgcaaggtggatttatacttttaaaagatctctgaggcataaatgccagaaggagagtggataggtttaagaatgatgatgaggtgacctgctcagataagagtgg

SEQ ID NO: 718121 - DNA, 1135 bp, Homo sapiens
tagtttgtgagactttccttttttgctatgaccttgattgtgttttgaggagtactggtaaggtatcttgtaaagtgtcccacaatttgggtttgtgtgctgttttactcatgattagaagagggttatgggatttggggaaggaaaccacagaaataaagtgctatttttatcacatcatgtcatgggtacatactgtcaatgtaccttatcactgttgatgttaaccttgatcacctggcctaggtagtgtttgtcaggtttctctgctgtaaagtgactctttttttaaaactccccatcttgtcacactgtacttttggaagaaagtcatgatgtgtagcccatatttaatggttggggagttatgctctacctccttgagggcaagtatgtccacagagtatttgggatacttctgcacagaagatttatttgttctctttatttatggattgattcagtcattgatttaagcagtatagactatgagtgttttatatcctggttagtaacacaatctgtttttttttttttcacaactagatcaaaagttcctaggtgcttagaactgattcatgcttctacgccccsctgcttgcctgatgcaaaacagattacccccaaaatagacatttgttggttgatagaactaaagtaagaattaagttcccaatatctgtaatgatgtcccaaagcagtctaattgatctgttgacattatcttactatatttaactgcctttctgaaaatgttatctgaggttgaaagacccttagaaatcatctagtacaacccttttgcttacaatggtaaaacttaggactggagaggaaatgtatggacccatatatgagatgagaacctactttcctaatcttcaatgtgatgctctttagacataacgcatgctgtgataactactgcagtatctagtgggtgtaatgtgctcgccacaggctagttgaatttgtagctgcaggcaaaagtgagccatcaaagaaattttgtcagttctgtttttgttctgcaaggtggatttatacttttaaaagatctctgaggcataaatgccagaaggagagtggataggtttaagaatgatgatgaggtgacctgctcagataagagtgg

SEQ ID NO: 718122 - DNA, 1078 bp, Homo sapiens
tgggatgtggtctagggtgcctcgcctctcctccacatggtgtctctcatcctccagcaggccagcccaggctttttccccatggcagtgacctaggcttagaactggcacactgtcacattctttcgttcaaagtaagtcataagccagccctgattcaagaagtggggaaacaggatccacctcttgttaggagctgctgcaaagacacgctcagaggatgagatactgsgaggttagtaatggagctgtcattgcgatcagtctacgataataggcattcaataaataaaggatagggttactcttagatatttttggacaatatccatcagacaagcccactgtcactaagttacctagagaattccttgtagtaatcaggactctttcagctacagggaatagaaacataactcatcagaagtcttcctccatctttggctctcatttgtctgttcttttcccacatcccaggagggggcaaagatgaccaccagcagctccaggcttccattttccccatcagtctcccctggctgaaagagaatatctccatgccaacatatcaagggaagccctggaacatctcaccagttcaggtgatgtcaccagacccatcccataagtcctcacagtcaccgattggccaggtccaacaaagcagggagcttttccccagaggaagctcaccatgctgttgtcaagagaaagagaaaagggcactgagagagctgctcaatgtctatgcagctgcatgcctttcctcactgcccaagaggaacccctccctatttccctaaagcccctgtattgatttgaagtttctaggctaaaatgcacttctcagatcttaagtattttttgtatgtgataaggtctagttgtactactttgaactgaagcaatattgcctttaaaagctaatcatgaaatcctccatgaggatattgtgaaaggattaaaatgagaactattcggattagaaagtgaaaggaataaaaaacaaataaaacaaaacaggacagacaggaagttgataagaagagaaggagtccttctgcatacagaacatact

SEQ ID NO: 718123 - DNA, 911 bp, Homo sapiens
gtgtgtgtgtgtgtgtgtgtgtatatatatgtgtgtgtgtgtatatatacttatatatatgtttaatacataagttaggaagaaattaacaacaataaataataataaaatagtacaattgtaacaatacactgtaataaaagttatgtgaatgtggtctgtctctctctcaaaatgttttattgtactatattcatgcataatattttcagaccacagttgactaggggtaackgaaaccacagaacataaaactgcaaataagagaatgatgacagctactatatttaagagctaataatatacaattcttagaagaaaacaggagcagatgtttacaaccttgggttttacactatttttttattaaatatgaccccaatagcacaggcaacaacaaaaatataatagataaatggaactttataaaaattgaatagttggaaataatgttcccaagtcatatatacagtgtaaattgacataaatttcatgtatacggaatcctttataccaacgcttagcaaagaggtccttgctgtcctttaaccatgtacaagatagcaaattttatctggttttcatgttcaggttttaaatttcaaaaatatgtacatttcctttaggaacattttaaattagacaatcaatttagtcgtccttaccctcagattacatatccagacataatcaaaactttttcctttaatgttaatttgggatcaaaggagaacaaagtataccaacctattcctgttgcaatctctgccttcctatcatttaaggtatttgtgtaaatccttggaagattttaactacatataacaacaaaagatttaaaccctgttttatatgcaatgcttgaaaataatgttatttagtccatgactaacaagctgagaagagacaca

SEQ ID NO: 718124 - DNA, 911 bp, Homo sapiens
gtgtgtgtgtgtgtgtgtgtgtatatatatgtgtgtgtgtgtatatatacttatatatatgtttaatacataagttaggaagaaattaacaacaataaataataataaaatagtacaattgtaacaatacactgtaataaaagttatgtgaatgtggtctgtctctctctcaaaatgttttattgtactatattcatgcataatattttcagaccacagttgactaggggtaacggaaaccacagaacataaaactgcaaataagagaatgatgacagctactatatttaagagctaataatatacaattcttagaagaaaacaggagcagatgtttacaaccttgggttttacactatttttttattaaatatgaccccaatagcacaggcaacaacaaaaatataatagataaatggaactttataaaaattgaatagttggaaataatgttcccaagtcatatatacagtgtaaatwgacataaatttcatgtatacggaatcctttataccaacgcttagcaaagaggtccttgctgtcctttaaccatgtacaagatagcaaattttatctggttttcatgttcaggttttaaatttcaaaaatatgtacatttcctttaggaacattttaaattagacaatcaatttagtcgtccttaccctcagattacatatccagacataatcaaaactttttcctttaatgttaatttgggatcaaaggagaacaaagtataccaacctattcctgttgcaatctctgccttcctatcatttaaggtatttgtgtaaatccttggaagattttaactacatataacaacaaaagatttaaaccctgttttatatgcaatgcttgaaaataatgttatttagtccatgactaacaagctgagaagagacaca

SEQ ID NO: 718125 - DNA, 911 bp, Homo sapiens
gtgtgtgtgtgtgtgtgtgtgtatatatatgtgtgtgtgtgtatatatacttatatatatgtttaatacataagttaggaagaaattaacaacaataaataataataaaatagtacaattgtaacaatacactgtaataaaagttatgtgaatgtggtctgtctctctctcaaaatgttttattgtactatattcatgcataatattttcagaccacagttgactaggggtaacggaaaccacagaacataaaactgcaaataagagaatgatgacagctactatatttaagagctaataatatacaattcttagaagaaaacaggagcagatgtttacaaccttgggttttacactatttttttattaaatatgaccccaatagcacaggcaacaacaaaaatataatagataaatggaactttataaaaattgaatagttggaaataatgttcccaagtcatatatacagtgtaaattgacataaatttcatgtatacggaatcctttataccaacgcttagcaaagaggtccttgctgtcctttaaccatgtacaagatagcaaattttatctggttttcatgttcaggttttaaatttcaaaaatatgtacatttcctttaggaacattttaaattagacaatcaatttagtcgtccttaccctcagattacatatccagacataatcaaaactttttcctktaatgttaatttgggatcaaaggagaacaaagtataccaacctattcctgttgcaatctctgccttcctatcatttaaggtatttgtgtaaatccttggaagattttaactacatataacaacaaaagatttaaaccctgttttatatgcaatgcttgaaaataatgttatttagtccatgactaacaagctgagaagagacaca

SEQ ID NO: 718126 - DNA, 1395 bp, Homo sapiens
ggtcagagcttgacattagagatggagacacccacctatacttacctgtgcaaagagggagatgctgtactgtcccattaaacccttgctccctgttctcagacaaaaattcacttcttgccttaaacggtgatacagcacagctatccaaaaaagctggtgtcttcccttccaccaatcactgaattcagggacatttgctgagtgatctggtgcctttggacgtaaggggcaaccaagacctggaaaaccagaaacctttctgtagcatgggggtttaaagtcagactgggtggacacttggttgacctaaaccttgttgagatgccttgatcctgtctcttgggtgacaggaacacttcccaaatgggaactttctaggtacttcagctccctttcttagtgcttggtggcagatggtacctactgagaatcaaaaaaggttcaccaggcagcctggcagtagtagtagctccagtcaccaagcatgcagctgctggctagctgccttgagacccttggcaggacagccaggggctgactggattaccacatctcctcagcagagaaccacattccttgagctgccagccccatatgtgacaacagatcccatcaccttggcttctgctttgtaactgtttgtcttcagccagatgtttctggctactatggaaaagtggaactgtgctaagatggagaactggcaggctgtgtgcaggagctgggcaagagccctggcttatgaaagaagctagagaggtctgtcagagctaccaacatcagattctgtctcttaatgatttaaacgattattccacaattaggccggaagggttagaagagcagctgttgggactgggattccaggtggtgaaaagcagagaccagcttctgcttaagagaagcaaaagaagaatatttaaatgaaaactcaacttccatcctcaaatatctagataagaaaatagacttgatgaacatcccacaatgacatctcctattcacccaatgtcaaatatttccagccatatggaattcaagatcagaactttcttgtcattgtgatatcaagaggacagaatgacttgttttcctttcagaagcttggtgggacatgatgttatgttacccatcattggttctgctagttaccacctagaaatgataaagaggatgctttatttttatttatttwtttttttttgagattctctttcattcattcattcactttctactaagtgtcaggttccgcatgaagttcttggacttcataaagataaaacagacacagtctctattctcaaggagctcacagcccaggagaagagagtgacatggaaacaaataactgcagtttggtgtgacaagtactgacatgagaatgtgtaa

SEQ ID NO: 718127 - DNA, 621 bp, Homo sapiens
aagtattcagtttatctgaagatacttgcaggcctctggrgaatgcagcacatattctagggtgtgaggaaaggcctttgatagtccagagcttccacaaatgaagcctgctggtcatggatgggcttgactacagcccttccttactccttatgactgtgtgatagctctggtcctggctgggaggtcacaccactgtcccctcattacccttccaagcctaggggagctgccatacagtgaaggcacaagcaatggcactcaccctcatggaggtctctccaccatgggcctgttgcagcctgaagacctgggccaccatgtgctctgtggaggggtgcagcaggatccttcgtgaggccaagcccaccattacatatctgcccattggggacaggctcaccgaaatggcattgggacctgagggccaacaaaacagagaaatatttcctaggcttctggccattccaaggaaacaactttcactcttactcttgtctttttctctaatcttcatattcacttgctcatcctggtgttatctcataggactgtagtgaggagtatgatgagaaggcatatacatactgagtgtagtgtttgacatatagaaagcacata

SEQ ID NO: 718128 - DNA, 1237 bp, Homo sapiens
atatttaaaatatgatatttattaaatatcttgctgtagctttagttgaaaagctcaatatgagacaaaatataatgcagsttttactatattatatattaatgcaattttgcatattatttatagaaataaaaaaagtgcacaaaggaaagggtcctactgtcggtctcattcataagatcatggctgaaatactgggtatagttccatacataatatttaaaaagtattgctagagaatttggaagaaaatgtttctgaaaattatgttttttagtcattttatttttactgatgtataataggtatacatagtttcagggtacatgcgataatttaataattcatataatttgtaaaggtcaagtcagtgtacttgggatatcatcatctttaatatttttattttctttatgttagaaacattcaaattattattctgttgctattttggtaggtacaatagattattgcaaactttcatcaccttactgatctatccagcactaagcttgtttatttatttatttatttgtttgtttgttttttcttgagatggagtcttgctttgttgcccaggctggagtgccctggggcaatctcggctcactgcaacctccacctttcaggttcaagcaattctgcctcagcctcccaagtagctgggattataggtgcacaacaccatacctggctaatttttgtatttttagtagagacaggtttcaccatgttggccaggctggtctcgaactcctgacctcagttgatccaccctcctcggcctcccaaggggctgctattacaggtgtgagccaccatgcccagaatagcactaggctttctttcttctttcaaaccatatatttgtacccattaatcatcttttaatgaaaattgagaagagattgggatagactacaggagaaatatcctcatgtgggagtcaagtcatttttttttaattcttgaatgcctgttatagtaaaggacaattcagcttatgttttgcagcccagtaagtgaaagttacaaggaagcagattctgggtcactattcatgagaaatatgtagcaattaggtctttccatcagtgaaatgacaattttgaggtagtcaccacttcacttcactggaagagtttaaactgagaacagaaggtctgtcatcacagaagattcctgatttgcatagcttagctggagagtactttgtagatgtggatgcacatggagg

SEQ ID NO: 718129 - DNA, 579 bp, Homo sapiens
cacacacacacacacacacacacacacatacgcttaaagtacctgcacattgggttagcatgggaccacccagtttgcattaatacatttcagatagcaggtgtctttaaactgaaagctcagaagttgactccctcccaggctcctgtagtatactgtgrtaacctcaaagtttaaaaaaaataaaattgatgcttgatgttgctctcaatactaagctttggatttggggcagctagttctaacaacaagggcttttatggtaacaaaccccaaactctctggaactccctttacttctccccttctgcatccttgtcctcagagatacatggtggcctctatatgtcagatgaacaatgtttttccaggtgtgggcttgtgtgtgtgtgcttgtagtgtgtgtgtgaatgtggctgaaggagaaaattttctgttctcccttgcttatcccattaggtaggtaagaattacctcctatttccttaatgctctgtgaatacctcattatattgtaattatccttgatatttaccaggtttcaattgcttttgagcaaaattgccctaggactgtgtg

SEQ ID NO: 718130 - DNA, 579 bp, Homo sapiens
cacacacacacacacacacacacacacatacgcttaaagtacctgcacattgggttagcatgggaccacccagtttgcattaatacatttcagatagcaggtgtctttaaactgaaagctcagaagttgactccctcccaggctcctgtagtatactgtggtaacctcaaagtttaaaaaaaataaaattgatgcttgatgttgctctcaatamtaagctttggatttggggcagctagttctaacaacaagggcttttatggtaacaaaccccaaactctctggaactccctttacttctccccttctgcatccttgtcctcagagatacatggtggcctctatatgtcagatgaacaatgtttttccaggtgtgggcttgtgtgtgtgtgcttgtagtgtgtgtgtgaatgtggctgaaggagaaaattttctgttctcccttgcttatcccattaggtaggtaagaattacctcctatttccttaatgctctgtgaatacctcattatattgtaattatccttgatatttaccaggtttcaattgcttttgagcaaaattgccctaggactgtgtg

SEQ ID NO: 718131 - DNA, 955 bp, Homo sapiens
tcaacttccccaatttagcacaccacagcctgcatgctgctactccccatccctttcaaaatactccacaacccaaagaattatcaattgtttggacctggggcaaactcactgcaattagcactgcaagggatctaggggttctatgtttgttttcaggcagaccataagcctcgaaagggtaaggactaagtttgcataacctcatgacctagcagagtactttacacctgaaaagtgtttaayaaatattagctgaatgtgcacctgtaaaaagctggctacaatttccagccagttagagtataagaagcagtaagtcctcctggggaaagaattgctttctcatttcagaaaaaaacataatgggctatttggctattactggcaagtgcccttgggcaagtcagaggcaaacaagagttaaatagttcagcataatgaactacctctgtcttttggaatcatccattgtcatcttgagaaaggatagtgggaaaattctggatgaagagatgggaggaagtgtccagaggaagagagagacctagcaaatggctggtgaggtgtccagaaaatggctggtacctgggccccagtgagatatggaccaatgagaaaactcctgtgatgaggaatggtaaatgcatttttaggagcagtgacatctaacatttaattagaattagtttcttgtctatgctataattaccatcctttatcccaatgcactcagccagagtcttttatatatgagggcactataatactgattgattagagaaggaagggagatgtgtcccagaggaagacatcccagaggtctgagaggagccaaagagaacacaggcgtgtggtgaaggatgtggcacagcatggattaaccagtgagtggatgcaattcaaacacttttctcccctaatttattttgaagaaatatgacgacagcaggga

SEQ ID NO: 718132 - DNA, 584 bp, Homo sapiens
gtggtgccaagtgtggttggaattccccgcttccagccgtttgaaagaaacatccggcagactcttctagtttggagcttgaaaccacccagtcagggctcaactatttcaaccaagcagaactgaagaagtttgaatccttcatttgcaaatgaaggatctgattgaaaacaaggctgagaactttccctattcaagacactctctagttctattcctccctctctctctccccttctccctttccctctccctccctccctctatccctctatcactccctcyctctctccttctctttgtgtgtgtgtgtggtgagaaagagtgggggtatatggactctaagctcctttagagcagattccatttgtgtttcttttacgtatcatcttaccatccctagtacagttgtctgcatgatagggaatacctgttaatgactctgcctctgaatatgagcaaaacgcaaactgctttttctattctgtcactctataataatcactacaatcaacacagaagacttctgtgaccaaatgtgtggggatttctgctcaccaccgagtgagcagtcaattctgcag

SEQ ID NO: 718133 - DNA, 584 bp, Homo sapiens
gtggtgccaagtgtggttggaattccccgcttccagccgtttgaaagaaacatccggcagactcttctagtttggagcttgaaaccacccagtcagggctcaactatttcaaccaagcagaactgaagaagtttgaatccttcatttgcaaatgaaggatctgattgaaaacaaggctgagaactttccctattcaagacactctctagttctattcctccctctctctctccccttctccctttccctctccctccctccctctatccctctatcactccctccctctctccttctctttgtgtgtgtgtgtggtgagaaagagtgggggtatatggactctaagctcctttagagcagrttccatttgtgtttcttttacgtatcatcttaccatccctagtacagttgtctgcatgatagggaatacctgttaatgactctgcctctgaatatgagcaaaacgcaaactgctttttctattctgtcactctataataatcactacaatcaacacagaagacttctgtgaccaaatgtgtggggatttctgctcaccaccgagtgagcagtcaattctgcag

SEQ ID NO: 718134 - DNA, 584 bp, Homo sapiens
gtggtgccaagtgtggttggaattccccgcttccagccgtttgaaagaaacatccggcagactcttctagtttggagcttgaaaccacccagtcagggctcaactatttcaaccaagcagaactgaagaagtttgaatccttcatttgcaaatgaaggatctgattgaaaacaaggctgagaactttccctattcaagacactctctagttctattcctccctctctctctccccttctccctttccctctccctccctccctctatccctctatcactccctccctctctccttctctttgtgtgtgtgtgtggtgagaaagagtgggggtatatggactctaagctcctttagagcagattccatttgtgtttcttttacgtrtcatcttaccatccctagtacagttgtctgcatgatagggaatacctgttaatgactctgcctctgaatatgagcaaaacgcaaactgctttttctattctgtcactctataataatcactacaatcaacacagaagacttctgtgaccaaatgtgtggggatttctgctcaccaccgagtgagcagtcaattctgcag

SEQ ID NO: 718135 - DNA, 653 bp, Homo sapiens
gggtacatagtaggtatatacttatgggctacatgagatagtttggtacaggcatgcaatatgtaataatcacatcacagaaaattggatatcaccccctcaagcatttatcttttgtcttacagacaatccaattatactcttttagttattttaaaatgtacaattaaattattattgactatagtcaccctgttgtgctagcaaatactaggtcttattcattctttctaatttttttgtacccattaaccctccccacctccctccgatgttttattattgaatgaatagtacagatctcagagtctcaccaggtttttttttctccagagtgaactgcacccaggcagtaactttgataaatcttaggtaaactttacaaccccatctcaatgcagtgctgaagaaatgctcactatttaatatttcctttaataaaaccttactcatttctttttgctgttgttgactctttttttttttttttttttttttttgagacggagttttcgctcttgttgcccaggctagagtgcaatggtgcaatttccgctcaccgcaacctytgcctcccgggttcaagcgattctcctgccttagcctcccaagtagctgggattacaggcatgccccactacgcctggcttatt

SEQ ID NO: 718136 - DNA, 647 bp, Homo sapiens
ttaacattatggccaacactgaatgctctgacatatgaccaatgtctttcatcttctttaatgctytgaaaagtctactgtaatcaagttttaattatatagaatgcatttcctatttggatctgatcacaaaacttgactccataatgaatactatgtatacagttatgttgtgtttgtttttcaatttttagactcaatgtatagataaataacaatgaacttaatttattcagagaaccaaaatgtaaatgctttgaacattgacaatatattaaaatagctaaccaatttgagaagtacaaagagggaaaaatgttaggaaaagagtaggaatgctattattatcatttataaaaaaaaaaatagggagcccagaaatagcattcaaagataatgttatatactaaatgtttatgtccccccaaaattcatattttaaagccctaaaccccagtgtgatggtaattggagatgggggcttcaggaggtaattaggattagaggaggctataaggatagggtccttatcggataggactggtgtcttcttaagaagaaacatcagagagctcatactctctcccttctcccttctcccctccaccccgcccctccccctttgctcctgcttgctcactctctct

SEQ ID NO: 718137 - DNA, 2382 bp, Homo sapiens
aacctctgtctttcatctctaaaacgggagttaaaaacaatccacagagttgttaaaggattaagtgaattcaatgttgtaaagagatcagacacaaagcaataggatgcaggtatcattattattattctcttcaggaaatactgagaaccatgaatgtagcactaggtagcttgtccttccttgagttatgagacagataacagggtcttactctgtcttaaaaagtcttaaagccttgtgttgagtggcaacagtaatatcaatccatatgcattcaaacatcgtaatttctggacattcctttctagggattcactaaacatgtatgtatggtgacctactacgccagacactttttatacactgatacaaaatattaaaaactccttccttcagagtttacattctagtaaagaatataaacactaacaagagaagtaaaaagtccattgtgttagataaaaataagctataagagaaaaaatacatagagaagaggagatatcaaatcctgatgggaaaagaagatgaaattttagataggatagacagggaaagtcccactaagaaggtgacttgactaaagattggaaggaagttaggccattcttttttcttggagagaccaagcctggctgagggacagggaaatccctgagatagagtgagccatgtgggttcaaggagcattagagaggcctgtgtgactgaagctgaaggactaggcaagagtgggagaatgtcacaaagataaggtgaggaggcagatcatgcctgatcccagagaacaaaagagactgtgacttttactttgaatgtgataagaaggcatgtcatggcaaatacattgagattttatcttatttataatttacttttattaaaaatttgaacaattcatgtatacatgttccttttgttttggatatatgttaaagaaaaaatcaagaaatgaaatttaatataaaaatagtataacaaattgtattccttacgtgtttgacaatctaacactggatttttttcttttttggtttgttttttctctaatactgatcattgttctagtggcttttttgacagtttttgagacaaaattaagtcaagataatgtaatatgtagctgtccctagttatccatggggaactagttccaggaccctcttggatactaaaatccatggatactcaagtcccttatgaaatggcatatttgcgtataaattttaaatcatctctagattacttataatacttaagacaatgtaaatactatgtaaacagttatactgtattgtttagagaatgacaagaaaaaagtatacatgttcaatatttctgaatatctttgatccatggttagttgaatccacagatgtagaagccacagaaggctgactatattatttcatatatctattgtcttataaattttaaatatactgctcattttcctatccatgtgttttttcttattgaattgcaaggccacatcttgccaaggtttcctttcatttttttaacttgccttttcttctttttaaatgaagattttgttttagtttcacagttaggagcttttaaaagtcatcagatttatcgcactgtgcctttatatttccttcatttgcccttatggatagaaaactccttcactaccatagagccaaaaaacaaacaaacaaaaaggcatgtattttattatggttatttttggttttgttttttccrtttagcacctgaatttatgttggtatatggtgtgaggtttgatggcctaagtgtgtttagtgaatgcctcagagttaattcttcagacagatggctggtaagccaggcactgccatctgaagtgaccctgatggggacagggaccagagcaggccagggagcagggtatgcactgcagctgatctctcgggttttggagacttgatcctacacccttgcttttaggtgtgaacttgcattgctgggacagtagaccttagtcctttctgtggggaactgattgcattccaggccttctgccctggaaggggtctgccctatcaccaacatcctcacccctacatgattcagcaggctcttcactcttgactcacagtggtaaaactccacccctttttactcataacctctgcctgggctcactcccttgatctgaattaatctactctcataaagctacttctttttttcttcagaggaataactgaagtcctcatccatcccccgtggctttctacttgatcagtgtccccctatcaactttctgacccactgtcatccgcagcccccacctctctagctgcataccacttgggtttctcagaaaagctcaaaggatgaggcttcaccctttatgctactgaattc

SEQ ID NO: 718138 - DNA, 1461 bp, Homo sapiens
atagttatatataaggaatagtctctctatatatagtctctctccatatatgtataggtagagttgtacaattgcaattatacacatactatatgtattagggattatacatatacaattacaattatatatatagttatatatttttatatagttatatattatatatagttctatattatatatagttctatattatatatatatatatatggaatagtctctctctatatatgagatgaattgtattgccaagagttgtgttgtcaaaataagaaaagttaaaattgttcaactcttaaatcacacataagaaatagcctaaaaatgttgtatattatccactgatgacttatctgtaggatgcacagctattagtaatggggaagtttacaggtattaccttttcaaactttacttcttttcataatctttattttctcttttagggtccataattgaccaattttaaatattctcattctatccccatgccgtatattattcactggctcttgttatatttaaatctctctgtgcttcactttaatttgtcactcaaatctaccttctattcactattagttttttartatgtctaatgggccctacatttttggtttcaggacctttaaaatttgtgtgtgtgtgtgtgtgtgtgtgtgtgtgtgtgtgtatgtatgtaaaatactatctatatagcttccaaatatcataggccatgatataatcttttgttccttgctcattttttgtgataccttctttcttgtcatatgtatttgatagatagtaattttgtgttctatatttataattgcaatatctttaatgtttgagggactaaacctgaggcttttttgtaaattttagcctctagaaaacagtaatgagatggtaatttcctttcggtgttatcctacattttgcttttgctcattgccttcacgttcctgctcttattttgctgccctggttgccattgtattttatttttattttagaggtcggctagagaagcctacaactcatttagctatgcctgttgcaatctatgtagtgtacatttgcattttagtgtgatgactcttcagagaatctggttcaacatacttccaccaatggtaaattgtttcctgccgaatcatattataagccacacaaactgattcatctaaattttttcacatgaatttactttaaaattcagatagcatatgtacatggaacacctactatgttgccataaactctgcttgatgttagttacacaaaattgatttaaaaagctgtcccagaattttttaatctgttattcatttagttatgcaagattcattagttctggagattgaaagtacaacaaagtgactatagttaacaatcttttattgtacacttgaaatttactaagagtggtagagcttcagtgttctcacctcaaaaaaaagaaagaaaaat

SEQ ID NO: 718139 - DNA, 649 bp, Homo sapiens
taacctagcaatcttctaacatgttttctctttaatgtctctataaacacccagtttctcaaatgcttttggaaccaacatgaagtaatcttactagtttctgcgttaatcagttaacagatctttgagatgtgtttattctatttttgtatgagatctgtgtttttaactcttgaaaattatactttgccactctaaggaacataaatcaggacaagtggatagagtggctgcagttggtrtgatagcatttgagacagggtgctgagggaagacctctttgggcaggaacttggatgatgagaaggaaacagacaccccaacttctgagagaagagacttcccagcagaaggaatggacaggaagggccagggtgctcctggggctgtgaggagacccatgtgaccagggcagtgggctaggagagtggggctagactgggtcagatcttgaggagccctgtagcctgtaccgggccggggccggggaggtcaagcccaacttgaaactgatgttgaagaatacactctatcctcatgacaagcaagtacgtgtcctcaggccactcttcctgtctcattggctcccctccttctccccatcctgcttagctcagtgaggccaactgatgctagttcatcttggctg

SEQ ID NO: 718140 - DNA, 649 bp, Homo sapiens
taacctagcaatcttctaacatgttttctctttaatgtctctataaacacccagtttctcaaatgcttttggaaccaacatgaagtaatcttactagtttctgcgttaatcagttaacagatctttgagatgtgtttattctatttttgtatgagatctgtgtttttaactcttgaaaattatactttgccactctaaggaacataaatcaggacaagtggatagagtggctgcagttggtatgatagcatttgagacagggtgctgagggaagacctctttgggcaggaacttggatgatgagaaggaaacagacaccccaacttctgagagaagagacttcccagcagaaggaatggacaggaagggccagggtgctcctggggctgtgaggagacccrtgtgaccagggcagtgggctaggagagtggggctagactgggtcagatcttgaggagccctgtagcctgtaccgggccggggccggggaggtcaagcccaacttgaaactgatgttgaagaatacactctatcctcatgacaagcaagtacgtgtcctcaggccactcttcctgtctcattggctcccctccttctccccatcctgcttagctcagtgaggccaactgatgctagttcatcttggctg

SEQ ID NO: 718141 - DNA, 649 bp, Homo sapiens
taacctagcaatcttctaacatgttttctctttaatgtctctataaacacccagtttctcaaatgcttttggaaccaacatgaagtaatcttactagtttctgcgttaatcagttaacagatctttgagatgtgtttattctatttttgtatgagatctgtgtttttaactcttgaaaattatactttgccactctaaggaacataaatcaggacaagtggatagagtggctgcagttggtatgatagcatttgagacagggtgctgagggaagacctctttgggcaggaacttggatgatgagaaggaaacagacaccccaacttctgagagaagagacttcccagcagaaggaatggacaggaagggccagggtgctcctggggctgtgaggagacccatgtgaccagggcagtgggctaggagagtggggctagactgggtcagatcytgaggagccctgtagcctgtaccgggccggggccggggaggtcaagcccaacttgaaactgatgttgaagaatacactctatcctcatgacaagcaagtacgtgtcctcaggccactcttcctgtctcattggctcccctccttctccccatcctgcttagctcagtgaggccaactgatgctagttcatcttggctg

SEQ ID NO: 718142 - DNA, 2008 bp, Homo sapiens
tggctgttgaatgaacagtggctgatgaggattccatgaggtctgaatcaactttccaaggccacgcaacatagtgctccccacacccctcccggtgctccttctgccataccacaagactcctggggtgccctgaggctttccttggggggatgggtgtgactccccattgtccctggaggaatttaatttaatagatgagacaaattgagtggcgggaggggtggaggtagggaagatgctcatagaggcggcagcttgcttaaggttacactgtgctcgttgaacttgggagtccacttgcagcgtctggctctgcaccgacgtaaatgtacacggatacttcactgggcccagctgtatctcttctccatggaagatcctctttcacccaaagcacttcatcaatattacaaccagagaaggggggccagtctgggctttcctgtggcctatggtgtagattggggctttgacgtaatttgggagcaaacttggggaccccttcaggcatcgtaggcatcctgccctgggctggcttgccaaagcttggaggttaggaaggaggatgggcagactctccctgtatgtttccctatcctgtagtgagaaagactcacagatatacacaaggacaggccaccgttgaaaatgaaatacaccatttccctgcctaatagaactggcagctttcctttctttctcctctgtcttcctgtaggtgatcaagcatcaaactttctgtatacactgtaaagtgcttcttccaataatctttgcagcctagacttacagtttgtccttcccaggtctgtttccttataaatattccaaggtgaggctgccagtgggtgatttatttacaagaggtatcacttcttgcggctgtgcatggtgtccaagcaaatggcttactgcagctctcaccaaactcagctttgttatctactttagatgagaccaggtgattcactctctctctaatttcaactcttggtgagctaaaatgatttctgctttaaaaatgtccagaatgtgaaaaataaaatgaaaaactacagaaacaacaagccttgttattcagatagagagggagacagagacagagactactcatcttatctgaatgctgtcwcagggaaagcacaccctgacagtccacagccctggagcctcctcaaagtttcccacccaaagaggaagccctacaaaagaaatggaagagaaccccctgtaccctgccaggtctgtcttaccaaaggaatgtatcattcaatacccttccaggcttccccattccctcccagtagttctaaacctcttgggggccaaggactcctttaagatttcccagaaaaatatgcatgtccacaaatgcctaagatttcaggaggtgcaggggagtgaagggaagcaggtgctgtggggtccagaggggaagcatcttagggggttgcagggttggaggacaggctgtgtggacggggccagggctaggaccctgggttggatgtggctacagggaggaaacgagagggcattttaggcaggaatgaggccaaaggtagaggagctgagatgcagctggcttgcctgcagagccacagtgaagggaacagagctaatgcttattgaccacctactatgtcccagccactatgatatgtgccaaagggctataaacaggcgtgctccctcgcccgaaggaacacagtctcatgggccaggcagccaaggactggggcaggattaaccatgatacggtcagaatgagcagcagtccctctcagcagggagtaaagccctgaggctgcagatgggagctggtgacccctgacagtcttcatcaccagggcaggccttgatggcaggggtgggacaggccgggcctttcagtgtgtccttggctgcctctctccagttaggggctggacgctgggctcaagtgggcgatgttccagggctttcagtggtccagagatcccagctggttccagctcctcagagc

SEQ ID NO: 718143 - DNA, 2008 bp, Homo sapiens
tggctgttgaatgaacagtggctgatgaggattccatgaggtctgaatcaactttccaaggccacgcaacatagtgctccccacacccctcccggtgctccttctgccataccacaagactcctggggtgccctgaggctttccttggggggatgggtgtgactccccattgtccctggaggaatttaatttaatagatgagacaaattgagtggcgggaggggtggaggtagggaagatgctcatagaggcggcagcttgcttaaggttacactgtgctcgttgaacttgggagtccacttgcagcgtctggctctgcaccgacgtaaatgtacacggatacttcactgggcccagctgtatctcttctccatggaagatcctctttcacccaaagcacttcatcaatattacaaccagagaaggggggccagtctgggctttcctgtggcctatggtgtagattggggctttgacgtaatttgggagcaaacttggggaccccttcaggcatcgtaggcatcctgccctgggctggcttgccaaagcttggaggttaggaaggaggatgggcagactctccctgtatgtttccctatcctgtagtgagaaagactcacagatatacacaaggacaggccaccgttgaaaatgaaatacaccatttccctgcctaatagaactggcagctttcctttctttctcctctgtcttcctgtaggtgatcaagcatcaaactttctgtatacactgtaaagtgcttcttccaataatctttgcagcctagacttacagtttgtccttcccaggtctgtttccttataaatattccaaggtgaggctgccagtgggtgatttatttacaagaggtatcacttcttgcggctgtgcatggtgtccaagcaaatggcttactgcagctctcaccaaactcagctttgttatctactttagatgagaccaggtgattcactctctctctaatttcaactcttggtgagctaaaatgatttctgctttaaaaatgtccagaatgtgaaaaataaaatgaaaaactacagaaacaacaagccttgttattcagatagagagggagacagagacagagactactcatcttatctgaatgctgtcacagggaaagcacaccctgacagtccacagccctggagcctcctcaaagtttcccacccaaagaggaagccctacaaaagaaatggaagagaaccccctgtaccctgccaggtctgtcttaccaaaggaatgtatcattcaatacccttccaggcttccccattccctcccagtagttctaaacctcttgggggccaaggactcctttaagatttcccagaaaaatatgcatgtccacaaatgcctaagatttcaggaggtgcaggggagtgaagggaagcaggtgctgtggggtccagaggggaagcatcttagggggttgcagggttggaggacaggctgtgtggacggggccagggctaggaccctgggttggatgtggctacagggaggaaacgagagggcattttaggcaggaatgaggccaaaggtagaggagctgagatgcagctggcttgcctgcagagccacagtgaagggaacagagctaatgcttattgaccacctactatgtcccagccactatgatatgtgccaaagggctataaacaggcgtgctccctcgcccgaaggaacacagtctcatgggccaggcagccaaggactggggcaggattaaccatgatacggtcagaatgagcagcagtccctctcagcagggagtaaagccctgaggctgcagatgggagctggtgacccctgacagtcttcatcaccagggcaggccttgatggcaggggtgggacaggccgggcctttcagtgtgtccttggctgcctctctccagttagrggctggacgctgggctcaagtgggcgatgttccagggctttcagtggtccagagatcccagctggttccagctcctcagagc

SEQ ID NO: 718144 - DNA, 604 bp, Homo sapiens
gaaaatgaacatttactgagcacctactgtgtaccaggttttttatataaagtatttcctttgatcctcaaagcaactctgcaaaataggtcatggtatctctattttcatgggcaagaaaattaatcctcacctgaaatttcatggccagtaccccctgacccctgggcaagtcggctcctaatgtgggccccatgccttagagggctttgctttggccctcctctggccacactgctgtccaagaggtaaatagtcccaggaacaaggaggtgcatccacgcagagcctgtgtaacgctactagacagtagtctaggttcctagaaccccagaattttttgcccaaacttctgctcacagtccactggctagaactcattatgtgcctccacaaagatacaaagagacagatgtacagcctgacttcctagcaacaactccacagcatggaagggccgcatgaatcttggggtcagttaatcatcttggtcattcgtgtcctcaaacccaggtcaattctatgtcatgaggaatctgtgtcccaccagactgctactctacggcctgaatttggtctacgtcttktgtgtgcataaagggcc

SEQ ID NO: 718145 - DNA, 3015 bp, Homo sapiens
catgcctatagaatgaggtctccatcaaaacccaaaaggactgggttcagagagcttctggataacacttcctggaaggtagtgcacccctccccgcatgccgggccccacatttatttctgaactttgtgcaatgtccgctaaaatacaacggcaaatgtaagtgtttccctgcgtgctgtgagctcttccagcaaatgaatgcaactaaatctgggagtggtggcaacctgatttatagccagttgctgagaagcacaggtaaaacaacgtagggcttcccattgttattggtgtgggaggcctgtctggcgggactcggccctttggaatctaatgctatgtcccggtagatagcgtcaccattgaattagaagacacacatatgtggagaataatctttctggtcatttactgcatgtcatatttacaatatgtaatcaaattctttatcctgaccttatggcacctgggtttaggaccatgatttgaaccaaacgttggtctgtcactttctgagtttgaaactttattttgcctttagcgttttgctattgctttttcgttttcttttgtttcgtttcgtttctaagttctggggtatatgtgcaggatgtgcagatttgttactaaggtaaacgtgtgccatggtggtttgctgcacctgtcaacccgtcacctaggtattaagcccagcatgcagtagctgtttttcttaacgctctgcctcccgaaaggccccagtgtgtgttgttccccttcctgtgtccatgggatctcacttttcagctcccattataagtgagaaggtggcgtttggttttctttccctggattagtttgctgacgataatgaccacacatcaccactgtttttgttttttagtataaagagtagtattttattgaataagatttgctcacagaaaaataagcttaaatctacaatgaatgccagaccctacagcagaaagcaattttctcacttttccacacacaatggttcctactaagtgaaaaaaaagccataaaatttcattcacaaatgtactactctgtctcaaaacatctcacgtaatcatgcactgtactaaagccatcagatcagttcttcagtcaggttaaagaagtatccctctaataactgacttttataatgctatcaatatccactcccaatcagtctgccattgttaatggtgtacagcattactgaatacaacggaattgatgacgcccatatccacagacaaaccgtgacttatgatggtttgacttatgatttttcaacgttatgatgggtttattggaatattagattcgtttytgagttacactgggtttatgagtatgcgaccctacactccagaaacagctgtataaggaaaaacaggagtacctaataaaaatatgcttagtgacttgggataaagcaatagatgttcacaagtgatggagagccgtgaaagagagatagcggtaaatagttacaataacacaattttcctgcacctgtcgaggatttcccccaaaaaacgcagaatgtgggatgcacctaaggcatatgaaagagagagggcagaaggagtaagagagaaataggaggaaggaaggaaggaagcaaggaagacaggaaggaaggaaagaaggaaggtaggacggaaggaaggaaggaaggaaggaaagaaggatgaaaggaaggagaaaacaccggtgttactaaaaccccccaaaaaatggtttccccctgtgggtaagcctacaatgtggatgaatcttgaaaatattgtgctacgtgttatgtcagtcatagcagctcacctattgtgcaattccgtttataggaaatgtccacaatatggaaatctatgcatatgggattgatcgcactaggtagttgctacctagggctgagggtcagggagagggtttgagacagaatgaggagtgactaatgtctacagggtctttctctggtcgggggtgataagacgttttacaatggattgcgaattaaaattgaatgtgcacaaccacaggtatactaaaagccactcaattcatgacctttaatgggggaatcttacgtggcgtagtctcatggagaccacggcagacatagtgagagagaaaaaggtgagtaaatatctgaaacggaggcagaaacagagagaatgaaaagccctgtgaatggaagggagagcgaaaagggaaaatggtcctatttacaaatgacagatgtgaaactggggttcacatcaacagtgtcactgccaggaaggagggtcatgctagccatgtcaccggtagtgtggcccgcagggacgccgacctgctggagcgtcgtgccagcatgggctgtggcaaccacgtgggccagcaggaggttcccgctgcacagctgtggggtgaggatagactgggtggtgatatcggccattacaggggcctcttctgctggcaagagtgtgacagtagcaagtagatggacaggcctgcgtgtgaggacggaatgcaggaggggttcttgtgcgcctgggtgtggggccctcacgggaaccgtggagaaatggccaggtaactgcgtcatgtgggctagtagattggccagggcttcgaactgaaggacgataatggggagtagctgtcaggccctgggagtgcctgagtgtaagtggagatgggtttggggtcactgagggatgcgtgggagccatccctgtataggtacaggtcatagggagatagtctcgtgaggcctgtgagtgtctagggttgtcctgggtgcctggggctgactgtggcagaaatctggggaaggctggagagaagctgggagacccaggagagtccctgaaggcagggggtgaagaggtgaaagaaatgggggagggttgcagtaaggtccgtgagtttgtaggtgattcctgggtgcgggaagctgactccaggtgaaatctggagatggttggagagtagctgagagagacagaagagtccctgagggctgggggt

SEQ ID NO: 718146 - DNA, 653 bp, Homo sapiens
agccagtctcaggtatttctctatggcagtgcaaaaataaactaatacaagaaggaagaaaaaagtatttgttaaatattaattttattttaacattatagaaataaatactagtttgaatatgattgaggccttcttaagtcatatttcctaagtatctggatcttttgggcaaagattccatactaaaagagagaaatcaattaaaaataaattgaatctacttttatcagaaagctatagaattccttccattttgcttcaccacccagtcctctttgtatttaattccaattaagataaataaaagaaggacactcagaaattcttagttcaagctgggtgcrgtggctcacacctgtaatcctggcactttgggaggcacaggcaggtggatcacttgaggtcaggagttcaagaccagcctggccaacatggtgaaaccccgtctctactaaaaatacaaaaattagctggacatggtggctcatgcctgtagtcccagctactcgggaggctgaggcagtagaatcacttgaacctgggaggcagaggttgcagtgagctgagatagtgccactgcattccagcctggatgactgagtgagactccatctcaataaataaataaataaatacatacatacatacat

SEQ ID NO: 718147 - DNA, 566 bp, Homo sapiens
aagcaaaggcaaacagaaaaagtaggcgagacaaggggaaaaagaaaaaaaatctctcaggaaaacttctgaaggtaaaaaccactctgggtcacaggctttggtcacaacagctcagatagggacttgttctttctttctatcccttcacacaccaggggcaacattcttcctgggacttactatgcgccacaagaaactcattattcgccttcaccaaaatttaaactcttcccctttctgcatttcctgcttcaattataacycaacctactaatcaaatggccaaactagggataatcttaggcccttcctttttctccactatcaatctaatttctttccaaatcctgctgacctatctctgtaatcgtttatcaaatctgcttcttcccatctctgcttgccactgccctagcctgatctagatacttgtagcatttgattggctatgttactggtcctgctctcttagatatgtctctactctgacatcagaggaatgtatataaaatgcaaatcagatgctgtcaacccactgcttaaaaatcattcaaagcattcca

SEQ ID NO: 718148 - DNA, 1097 bp, Homo sapiens
ttctgctagatagtaggaaactttatctagataattccaggtgagcctagacatcatccaatgtttcaccaagtgttttttttttaattcccatttctctgtccttttcttcatgaaatcatctaagattggctaggggcggtggctcacgcctgtaatcccagcactttgggaggccgaggtgggcggatcacgaggtcaggagatcaagacgatcctggctaacacggtgaaaccctgtctctactaaaaatacaaaaaattagctgggcatggtggcagatgcctgtagtcccagccactcgggaggctgaggcaggagaatggcatgaaccygggaggtggagcttgcaatgagtgaagattgggccactgtactccagtctgggcgacagagcaagactccatctcaaaaaaaaaaaaaaaaaaaagaaaaaaaaagaaagcatctaagatctccagctttggcagaactatcaatccatgttggcacctgtccagatgcctgtgtttgcctgtctgagctctgctcctggtgacatggcctctccagatctacagattgtttcttagctagtatcaggctcctttgctattttacttggcactttaagatgggactgtggaagattctctgggctacaggccagctggccaggctcccctgcagccattctgtccccactttaccagggaggtaggagaaactttggcaaggttgccacccttacagtccggacaggcagactgtacacttcttctactctgggactcctctaaatctatctttcactagagatctgcctggggcacctaaaaggtgccctccaccttataggacctaagtgtttttaggtagttttggggtagaaggtggtgataaaaaattcccatgttatcacattttccttcaaatattactatgatacagctagactgtgctttcaaaatgaaaatctgcgaattttatgtctcgtttgtcccctgattctgcacaccttggggttaatggaagacttatatttagttctgtcaggtagtatgaaaaaacatggtactgtgaagagaagcagcttttctttacaacgtgcatggtc

SEQ ID NO: 718149 - DNA, 1042 bp, Homo sapiens
tatgaactttagtaataatgcatcaatattggctcatcatttattacaaaggccagcttctggatgccaggacttacttttatctttttcaaagcttactgttttttaaacttacatatactcttacaacagttgttactcaactaacctctaatgaatgtagtctctgatgggttaacaatacagttgcctctccctactcacatgttctgcatccatgaattcaacaaaatgcatatcacaaatactgaaaaaagaaaaaccccaaaataaaaaaaatacaaataaaaaatacaacataactatttacatagcacttacattgtattaggtattataaggaatctagagatgatttaaagcatatgtgaagatctgcatagtttaaatgcaaatactatgctattttatataagcgacttgagcatccacatattttgatatccgctgggggttagggggtcctggagccaatcccacaaggatactgaaggacgactatactgcaagtgtccccaaatcacaatctatcagcagagatggagggagacaaagattcacattacagrtgataagtgttccttcattttgacaaagaatttgccaaaggtgaaactgttgctaaagcttcctcattttaaatggaagagtacacattaacacttagatccaaagtgaaggcctagagatgagcagttttttgctgctgagatatggtaataagcaattaggaagtcctgtcctctccagcctgctccactctcatttccttaaaatatgattcagggattctgagaaagttggtcaccaaaagctcaaattgtcatcatatttatctgataaagttgttcatgtccttaagatatatgttatggagcatatcattagtttgctagcactgccataaaaatgtactacagactgggcaacttaaacttactgaaatttattttctcacagtcctgaagacttgaagttcgaagattaaagtgccaacagagctcatttcttctgaggcttctctccttcacttccatcttcc

SEQ ID NO: 718150 - DNA, 1042 bp, Homo sapiens
tatgaactttagtaataatgcatcaatattggctcatcatttattacaaaggccagcttctggatgccaggacttacttttatctttttcaaagcttactgttttttaaacttacatatactcttacaacagttgttactcaactaacctctaatgaatgtagtctctgatgggttaacaatacagttgcctctccctactcacatgttctgcatccatgaattcaacaaaatgcatatcacaaatactgaaaaaagaaaaaccccaaaataaaaaaaatacaaataaaaaatacaacataactatttacatagcacttacattgtattaggtattataaggaatctagagatgatttaaagcatatgtgaagatctgcatagtttaaatgcaaatactatgctattttatataagcgacttgagcatccacatattttgatatccgctgggggttagggggtcctggagccaatcccacaaggatactgaaggacgactatactgcaagtgtccccaaatcacaatctatcagcagagatggagggagacaaagattcacattacagatgataagtgttccttcattttgacaaagaatttgccaaaggtgaaactgttgctaaagcttcctcattttaaatggaagagtacacattaacacttagatccaaagtgaaggcctagagatgagcagttttttgctgctgagatatggtaataagcaattaggaagtcctgtcmtctccagcctgctccactctcatttccttaaaatatgattcagggattctgagaaagttggtcaccaaaagctcaaattgtcatcatatttatctgataaagttgttcatgtccttaagatatatgttatggagcatatcattagtttgctagcactgccataaaaatgtactacagactgggcaacttaaacttactgaaatttattttctcacagtcctgaagacttgaagttcgaagattaaagtgccaacagagctcatttcttctgaggcttctctccttcacttccatcttcc

SEQ ID NO: 718151 - DNA, 1042 bp, Homo sapiens
tatgaactttagtaataatgcatcaatattggctcatcatttattacaaaggccagcttctggatgccaggacttacttttatctttttcaaagcttactgttttttaaacttacatatactcttacaacagttgttactcaactaacctctaatgaatgtagtctctgatgggttaacaatacagttgcctctccctactcacatgttctgcatccatgaattcaacaaaatgcatatcacaaatactgaaaaaagaaaaaccccaaaataaaaaaaatacaaataaaaaatacaacataactatttacatagcacttacattgtattaggtattataaggaatctagagatgatttaaagcatatgtgaagatctgcatagtttaaatgcaaatactatgctattttatataagcgacttgagcatccacatattttgatatccgctgggggttagggggtcctggagccaatcccacaaggatactgaaggacgactatactgcaagtgtccccaaatcacaatctatcagcagagatggagggagacaaagattcacattacagatgataagtgttccttcattttgacaaagaatttgccaaaggtgaaactgttgctaaagcttcctcattttaaatggaagagtacacattaacacttagatccaaagtgaaggcctagagatgagcagttttttgctgctgagatatggtaataagcaattaggaagtcctgtcctctccagcctgctccactctcatttccttaaaatatgattcagggattctgagaaagttggtcaccaaaagctcaaattgtcatcatatttatctgataaagttgttcatgtccttaagatatatgttatggagcatatcattagtttgctagcactgccataaaaatgtactacagactgggcaacttaaacttactgaaatttattttctcacagtcctgaagacttgaagttcgaagatyaaagtgccaacagagctcatttcttctgaggcttctctccttcacttccatcttcc

SEQ ID NO: 718152 - DNA, 1482 bp, Homo sapiens
tccagcctgggcaagggcgagactctgtctttaaaaaaagcaaaagaaaaccaacttgtagaaagtcactgagctggaaccagaactagaatagggctctactctttctgggtccaaagttctttaaatcagcaacccctcttactgcctatgtaagggtatacctttagttcctgttgacttgggatgtacaaagaatgaggtagtctaagagagtaacagcacactggctgtggagtcagaaagactccacctctaaactttgtttccatctctaaactttccagcagtgtggcctaatttttctgtaccttagctttgtcgttatcactagaatccttcacagggctgcagagtggattaagcaagagtgcacaggactcagacatatgaccgctggtaattrgcttttataaactgtcaaaaaatatagacctgtaatgccagcactttgggaggccgaggcagcagactgattgagcccaggagttcgaaaccagcctgggcaacatggcgagacactctctacaaaaaatacaaaaataaccggacatggtggcacgtgcctgtagtcgcagctactcaggaagctcaggaggctgaggcaggaagttcgcttgagctcaggaggtcgaggctgcagtgagctgtgatcgcgccaaatgcactctagcctgggaagcagagccagaccctgaatctaaaaaaaaaaaaaaaaaaaagcttattaaaggaggcttagcacagctacccgatgacgcccccgggcattgctgtcgagccacagggagctggcgccacacgggactggcgctctttgcaacgtccctcaagcacttaaggagaggcggcagggcccaagcgcagcggctagaaaatccttccttccggcaggaccctcgcgtggagctctgcagcgaaccctggccgcgcggcctccgccgtcgggccccactcttcctactgggcccacagttccggctcctgctctgactccaagaagccttacctcgggtacaacgcgctgccttctccctgggaacttccggcaggccaacttccctggcctttttagtctcccctgtgccctcccacttcgccctctggttctctccccgcccctggcccgaggtcacgccctcaccgagtcctaggacacgccccgtgggtccttgccaagccctacctcttcgtaggacacgcccttcaaacccttgccacgccccaccctggtccggggccgttccccgcgtttttgcctggccacaccctcctgcaggcgctgtctgactgtcggtagtttggctgaatgaaaaaaattcggggctagatccccaaacggaaagaaactgttgcattttccccagatcccagttctccatagaacagtctggaacaagggagcattccgtagctcttttggttttccccaagaataaatcggaggtggtgctctggcaatttgatgtcacagtgggttct

SEQ ID NO: 718153 - DNA, 1068 bp, Homo sapiens
  misc_feature 163, 164, 165, 166, 167, 168, 169, 170, 171, 172, 173, 174,175, 176, 177, 178, 179, 180, 181, 182, 183, 184, 185, 186,187, 188, 189, 190, 191, 192, 193, 194, 195, 196, 197, 198,199, 200, 201, 202, 203, 204, 205, 206, 207, 208, 209: n = A,T,C or G
  misc_feature 210, 211, 212, 213, 214, 215, 216, 217, 218, 219, 220, 221,222, 223, 224, 225, 226, 227, 228, 229, 230, 231, 232, 233,234, 235, 236, 237, 238, 239, 240, 241, 242, 243, 244, 245,246, 247, 248, 249, 250, 251, 252, 253, 254, 255, 256: n = A,T,C or G
  misc_feature 257, 258, 259, 260, 261, 262: n = A,T,C or G
ggagaaagagactagcaaggttttggccagtaaagacacatgagctccaatgaccaaatcagagtaaaatttacagtaatattgattataaaatgttaagcatgttgaaaactctgaaattctatgactgtgaatttatcatttctgtagttttttttttttnnnnnnnnnnnnnnnnnnnnnnnnnnnnnnnnnnnnnnnnnnnnnnnnnnnnnnnnnnnnnnnnnnnnnnnnnnnnnnnnnnnnnnnnnnnnnnnnnnnntttctgctgccaccctcaaatttaagcctttatttttttttacaaggtcaataccctaccatataacacatgtgtaacagacacacatatatactgtaatgatctcccaacctatagcttctcctccctctaaaagtggaaagcctaaagcaaagcttaaaacatgtcacttctctgctcaaaaaccttccaactgtttccacaaagcccaaattcataaatataaaatctaagatcttttacaatgatggctgaatgaactttccaataacayttctcattaatgcttttcatgaacctctaaggaaaacaatgaactactatagtaactgcttctatactaaccccgatttttgtgcccatattattttcttttctatcctgtcaacctgttaaaaatcccacccttcaacatccaattcaaatatatttcttacatgaaatgaaaattatttcttctttctcagaatttccactgcacattatacttctgtaggtaaacagctattttgccaattatattgctagacaacttttcttgtaataaggatattttctgattgattaaactgtctttagaatggaaggaactacaaatacccaatacagacacggtgctctggggttctttgggtgtggtgactcttacagacatgccctttgtaggggaccctgaaaatatgcctctggagcattataagagacacagcattatttgggacaggtccaattatctgtaagaattaggttatttatctgcaaagttaggtttataatatatctgccccatcatccttaggttattt

SEQ ID NO: 718154 - DNA, 1068 bp, Homo sapiens
  misc_feature 163, 164, 165, 166, 167, 168, 169, 170, 171, 172, 173, 174,175, 176, 177, 178, 179, 180, 181, 182, 183, 184, 185, 186,187, 188, 189, 190, 191, 192, 193, 194, 195, 196, 197, 198,199, 200, 201, 202, 203, 204, 205, 206, 207, 208, 209: n = A,T,C or G
  misc_feature 210, 211, 212, 213, 214, 215, 216, 217, 218, 219, 220, 221,222, 223, 224, 225, 226, 227, 228, 229, 230, 231, 232, 233,234, 235, 236, 237, 238, 239, 240, 241, 242, 243, 244, 245,246, 247, 248, 249, 250, 251, 252, 253, 254, 255, 256: n = A,T,C or G
  misc_feature 257, 258, 259, 260, 261, 262: n = A,T,C or G
ggagaaagagactagcaaggttttggccagtaaagacacatgagctccaatgaccaaatcagagtaaaatttacagtaatattgattataaaatgttaagcatgttgaaaactctgaaattctatgactgtgaatttatcatttctgtagttttttttttttnnnnnnnnnnnnnnnnnnnnnnnnnnnnnnnnnnnnnnnnnnnnnnnnnnnnnnnnnnnnnnnnnnnnnnnnnnnnnnnnnnnnnnnnnnnnnnnnnnnntttctgctgccaccctcaaatttaagcctttatttttttttacaaggtcaataccctaccatataacacatgtgtaacagacacacatatatactgtaatgatctcccaacctatagcttctcctccctctaaaagtggaaagcctaaagcaaagcttaaaacatgtcacttctctgctcaaaaaccttccaactgtttccacaaagcccaaattcataaatataaaatctaagatcttttacaatgatggctgaatgaactttccaataacatttctcattaatgcttttcatgaacctctaaggaaaacaatgaactactatagtaactgcttctatactaaccccratttttgtgcccatattattttcttttctatcctgtcaacctgttaaaaatcccacccttcaacatccaattcaaatatatttcttacatgaaatgaaaattatttcttctttctcagaatttccactgcacattatacttctgtaggtaaacagctattttgccaattatattgctagacaacttttcttgtaataaggatattttctgattgattaaactgtctttagaatggaaggaactacaaatacccaatacagacacggtgctctggggttctttgggtgtggtgactcttacagacatgccctttgtaggggaccctgaaaatatgcctctggagcattataagagacacagcattatttgggacaggtccaattatctgtaagaattaggttatttatctgcaaagttaggtttataatatatctgccccatcatccttaggttattt

SEQ ID NO: 718155 - DNA, 1562 bp, Homo sapiens
catttatcattccttgacaaactgtaaatatacatgttcacttttttatcgtctgtctccaaatactggaatgttaagttctgtaatgtcagatatttctgtttggttcactggtgtattcttaaagcatgttacatactaggtatactcaatgaatatttgttgaataaatatcacattgggcttattccagaaattcaagcttgtttcaatagttagagcaatctacaaatgtaattcattacattaactaattaaaggagctaaatcacatcaccaccacaataatgcagaaaaacacatttgatacagctcaatattcatgcatgcctaacaaacatctcatgatactaggaaaaaaggaagggatatattattttcatgtataaaacactaaccattgtagcatggcaatatactcaaaattcaatgaaattcctatcgaaatcttagcattcctcttagtcctcaacaaagcatttytaaaatgtgtatagaagaccaaagggccaaaagaatcaacttctgaagaagtggaaaaagaaagttgaggaaatcttaaaacatgttattgagcttaaagttgcaaaaataaactcatgtaccataattcatgagtagaaaaatagactagtggaataacataaaaataaaaacaatgcttacataaaatgttgtaactgatttggatgtcattagaaatcagtaagtaaatagatggacaatgtaatgaaagatgctaggcaaataatgtggtagggagaataatagccctcaaagatgcccatgcctaaccctggaacctgtgaatatgttacactgaatgcaataaaggcttatcagatgtgattaaggatgcaaaccgagatggagagatcttcctgggttatccagatgggcccagtctaatcacatgagttcttaaaaatggagaacctttcttagctgagtccagagagagatgtgacaatgaaagaatggtcagagaaatgtgacatcgccagctttaaaaagagagaggagaggcaatgagaaaaggaatgctgatgttctctagaagatagaaaaggccaggatatggattctaccctagccgccagaaagaaacatgcctgtcgacaacttgattttagttcactaaaattcatgcctgatttctgacttgtgtacactgtaagatgataagtttgtgttattttaggtcacttagtttgtagaaatttgttacagcagtaatagaacaagtggttatccaaatgaggcaaattagattggatacctatctccaatagaaatcaattcaaggtgaattccaggaaaatacttaaaacatttagattaaaaataaatgagaatttttgttacttttggtaggtcatagaaccaagaaaaacaaacattaaggaggaaaaatgaacacatgactacatcaaaatataaagcttctctatttggatgatatcataaggtgacaaatcataaactgtaatacttgcaacatatatatgagtgaataaatatacatttagaatatatatgaactctcaaaaatcaacaggaaa

SEQ ID NO: 718156 - DNA, 1562 bp, Homo sapiens
catttatcattccttgacaaactgtaaatatacatgttcacttttttatcgtctgtctccaaatactggaatgttaagttctgtaatgtcagatatttctgtttggttcactggtgtattcttaaagcatgttacatactaggtatactcaatgaatatttgttgaataaatatcacattgggcttattccagaaattcaagcttgtttcaatagttagagcaatctacaaatgtaattcattacattaactaattaaaggagctaaatcacatcaccaccacaataatgcagaaaaacacatttgatacagctcaatattcatgcatgcctaacaaacatctcatgatactaggaaaaaaggaagggatatattattttcatgtataaaacactaaccattgtagcatggcaatatactcaaaattcaatgaaattcctatcgaaatcttagcattcctcttagtcctcaacaaagcatttctaaaatgtgtatagaagaccaaagggccaaaagartcaacttctgaagaagtggaaaaagaaagttgaggaaatcttaaaacatgttattgagcttaaagttgcaaaaataaactcatgtaccataattcatgagtagaaaaatagactagtggaataacataaaaataaaaacaatgcttacataaaatgttgtaactgatttggatgtcattagaaatcagtaagtaaatagatggacaatgtaatgaaagatgctaggcaaataatgtggtagggagaataatagccctcaaagatgcccatgcctaaccctggaacctgtgaatatgttacactgaatgcaataaaggcttatcagatgtgattaaggatgcaaaccgagatggagagatcttcctgggttatccagatgggcccagtctaatcacatgagttcttaaaaatggagaacctttcttagctgagtccagagagagatgtgacaatgaaagaatggtcagagaaatgtgacatcgccagctttaaaaagagagaggagaggcaatgagaaaaggaatgctgatgttctctagaagatagaaaaggccaggatatggattctaccctagccgccagaaagaaacatgcctgtcgacaacttgattttagttcactaaaattcatgcctgatttctgacttgtgtacactgtaagatgataagtttgtgttattttaggtcacttagtttgtagaaatttgttacagcagtaatagaacaagtggttatccaaatgaggcaaattagattggatacctatctccaatagaaatcaattcaaggtgaattccaggaaaatacttaaaacatttagattaaaaataaatgagaatttttgttacttttggtaggtcatagaaccaagaaaaacaaacattaaggaggaaaaatgaacacatgactacatcaaaatataaagcttctctatttggatgatatcataaggtgacaaatcataaactgtaatacttgcaacatatatatgagtgaataaatatacatttagaatatatatgaactctcaaaaatcaacaggaaa

SEQ ID NO: 718157 - DNA, 601 bp, Homo sapiens
acttttatgttataaaatttatttattttaaatacccagcttgagtgaagaataaaaccgcatggctattctttccagggaaaatggattaggtttggatgaaagttgaagttttgaaatgagtctgaaggttgttggagtaccctgagaatacaatcaactgctctacataatcatttcccttaatagttacctgtcagagcacctatttcttctactacaggattagcccatcagaagtagatctgagttggatatttcactgactaaagactgctctaatatgtttcagtgtttaatgtcactttctttactgcctatgagataaactagtggaaaagtattggctcaaaaagccagcaggtctgctggtgttaccagtcatgttgcaattgtatttacctatcagaacgttgatctaaataataaacctaacatttccttytaaactgtcagtggaaagatatatttattacaatgtcctccatcgttgaggagagaggaggtttagctaaagtttaaatgaaaaaaaaaaaaaagcacaagcataggacaccactgatataagcaatagaacagtaaacaattatgccctttgtta

SEQ ID NO: 718158 - DNA, 1977 bp, Homo sapiens
tgatcaatatcactcttttctaatcagtatgtattcaaataagagtcatgaattacaagttagctggcatgtgttataaggaatgagaatggagatgacagaagctactcaaacaaattttaagtatattcacagataacaaattataacttcctttatttttcactgttgtgctgatttctttgttgtcctttgggttcaagtaatgaagcatcatggttcaacattccaataatgtctcataaaacaaagtttaagacaaactgttgtttgataatgctgcgaagataaaataacattaacatgatccttcatgtattaagatgacactgactcaccatcaatagagatgagctgcaagttgttgttccatagttgacataggcttcctgatctagccaattctattgccaaagctccccagtgaatggcagcttacatctgtaagatgattattaccagtggtcacagaaaataacaaaataaaatgatctatacagaaataaaacctatgcccttggtcccaaactaccatattctgataaacttttaaaaagtcacagaaatgtataaatactgtatgattctttcattaaaaatgatatatgtagttactctgatcaattcattgtagtctatatattacttacctaaatatgcaaataatgaaagcctgaccccctgcctcagaatgttctcagctatcttaactaaaacgaagattgtttctgacttgcaaaatcagaagtatataatgatgatgctcaaaacatgaaagcatgccaactttatatccctcatcaccagtagcaataactgaggaaattacagaatattgttgttaatgttagaaatattctctataccattaaatgtaatatgactacagccaaaattactttgacatttcctagaattctgaaaaacacttccattttttatgaagaaaaaatattttagttactagctacagtgttcattcttgttaataccgaggttttacaataaaatagttctactgactcctgatatggaattttatcagtttctagttgaatctccttcataaagctgagaagctgataaaatattactggaagacattgtttgtaagtaaaattaatgttacatgcttatttattatttagaagaataagaaattagattaacaacttaaaaattaataagaagccattaaaactagatataagtaaaacaaaatcacaatgttaagtgcctatgatgagcaaggcactatttagaggttctgtgaacaagtataaaaataacaaggcatagtacataacctcaaagaaatcacaatttagatattattgaaacattcttctttcagtgctccatagttgtttacaaaaacaaacagctagattctaacccagatcctctgttagcacaggaaggatgatgtggaaaagtacaacatcacctaccacggcatggtagctaccataaggatgcagctctggggctcctcttgcatatggaaataaggaaattttaatagaaatattgagaacatctgctgcaacctgtgatgcaggcccactgccacctgcaaacaaataaaattcattaattttaagacaccatataaacatttccagtcacaattctgttttaatgggtcatgcagcaagcatattctctttaacagctttccattatcatcccccaccaactcaccaaaattggatgtcttccactagattgcaaactcctaaagttcctcttcattttggtttccaatttctacaacgcctagccgaacaaataactcagtctagtaagaaattaaggttaaaactggctactataatactctgtaaccagttctataataagttttatagaaagtactacagatactaaaaggaaggaaraactggctttaaagaatgagttgctgctggacagagagacaagtacagaaaaagcattcttagtggaaataaggta

SEQ ID NO: 718159 - DNA, 1178 bp, Homo sapiens
tctaaccatgtgttagatattgacatagggcctcccagcttgtatggcagatccacactgcaggaggaatattaattgctatgtatcatgtattttccaataaatacttgttcaatgattctatttgtcattttctctgtaaaatttctagggggaacaacacaaaggctactctttgacaaggtaagaattaaggctgaatggagcaatttgaaattattaataatttaactgttttagcaaaattgagtcagaaagtaactagattatatggtttggctttttgtaccaaccaartctcttcttgaattgtaatcccacatgtcaaggagggacctgatggaaatgattgaatcatggggccaatttccgccatgctgtttttgtgatagtgaggagttctcatgagatctgatggtttataagtggcggttttccctgcactcgcccctccctcctgccacctagtgcagaagttacttgcttttccctcaacttctgccatggttgtaagtctcctgagtcctcccagccatggggaactgtgagtaaattaaacctcctttctttataaattacccagtctcgagtaatatctttatagcagtgtgaaaactgattgatatattagaccacataagaacttctgccagtcatggtagacatatttatgaatgaccttcaaaagtttcttagacattcttttaaatatttcttcaacaaatatttatataacaggcactgtttgaggagatgaaaatgccatcttctcaataaatataaataaaaacctgacctttaggggattaccttctaagaagagaaatacacaataaacacataaataagtccaatattatgttagaatgtgataggtgctgcagaaggaaatgttggctgatacctgctttataacagtggctggctttgattgccgaagccaatattgttaggctttttatgagttgataattgagaaacagaggtacaacaatcacctttatatgtttacttatgaatataattatataactatgtatgaatttaataaaacagagaaaactattattttcacttgttaaagcaaaaatggtagaagaaaagagataactcccttaaactgtgtttacatgtaaaattgacttttatttttggttttcttaaaaacttgagagaaa

SEQ ID NO: 718160 - DNA, 1178 bp, Homo sapiens
tctaaccatgtgttagatattgacatagggcctcccagcttgtatggcagatccacactgcaggaggaatattaattgctatgtatcatgtattttccaataaatacttgttcaatgattctatttgtcattttctctgtaaaatttctagggggaacaacacaaaggctactctttgacaaggtaagaattaaggctgaatggagcaatttgaaattattaataatttaactgttttagcaaaattgagtcagaaagtaactagattatatggtttggctttttgtaccaaccaaatctcttcttgaattgtaatcccacatgtcaaggagggacctgatggaaatgattgaatcatggggccaatttccgccatgctgtttttgtgatagtgaggagttctcatgagatctgatggtttataagtggcggttttccctgcactcgcccctccctcctgccacctagtgcagaagttacttgcttttccctcaacttctgccatggttgtaagtctcctgagtcctcccagccatggggaactgtgagtaaattaaacctcctttctttataaattacccagtctcgagtaatatctttatagcagtgtgaaaactgattgatatattagaccacataagaacttctgccagtcatggtagacatatttatgaatgaccttcaaaagtttcttagacattcttttaaatatttcttcaacaaatatttatataacaggcacygtttgaggagatgaaaatgccatcttctcaataaatataaataaaaacctgacctttaggggattaccttctaagaagagaaatacacaataaacacataaataagtccaatattatgttagaatgtgataggtgctgcagaaggaaatgttggctgatacctgctttataacagtggctggctttgattgccgaagccaatattgttaggctttttatgagttgataattgagaaacagaggtacaacaatcacctttatatgtttacttatgaatataattatataactatgtatgaatttaataaaacagagaaaactattattttcacttgttaaagcaaaaatggtagaagaaaagagataactcccttaaactgtgtttacatgtaaaattgacttttatttttggttttcttaaaaacttgagagaaa

SEQ ID NO: 718161 - DNA, 1178 bp, Homo sapiens
tctaaccatgtgttagatattgacatagggcctcccagcttgtatggcagatccacactgcaggaggaatattaattgctatgtatcatgtattttccaataaatacttgttcaatgattctatttgtcattttctctgtaaaatttctagggggaacaacacaaaggctactctttgacaaggtaagaattaaggctgaatggagcaatttgaaattattaataatttaactgttttagcaaaattgagtcagaaagtaactagattatatggtttggctttttgtaccaaccaaatctcttcttgaattgtaatcccacatgtcaaggagggacctgatggaaatgattgaatcatggggccaatttccgccatgctgtttttgtgatagtgaggagttctcatgagatctgatggtttataagtggcggttttccctgcactcgcccctccctcctgccacctagtgcagaagttacttgcttttccctcaacttctgccatggttgtaagtctcctgagtcctcccagccatggggaactgtgagtaaattaaacctcctttctttataaattacccagtctcgagtaatatctttatagcagtgtgaaaactgattgatatattagaccacataagaacttctgccagtcatggtagacatatttatgaatgaccttcaaaagtttcttagacattcttttaaatatttcttcaacaaatatttatataacaggcactgtttgaggagatgaaaatgccatcttctcaataaatataaataaaaacctgacctttagggrattaccttctaagaagagaaatacacaataaacacataaataagtccaatattatgttagaatgtgataggtgctgcagaaggaaatgttggctgatacctgctttataacagtggctggctttgattgccgaagccaatattgttaggctttttatgagttgataattgagaaacagaggtacaacaatcacctttatatgtttacttatgaatataattatataactatgtatgaatttaataaaacagagaaaactattattttcacttgttaaagcaaaaatggtagaagaaaagagataactcccttaaactgtgtttacatgtaaaattgacttttatttttggttttcttaaaaacttgagagaaa

SEQ ID NO: 718162 - DNA, 1487 bp, Homo sapiens
taaaagaacttttgctgaggcaggtcttaagggattaaaactgttttaattatggtattccatcactggaatatttgttctttctaaaaccttcccacaatgagagaacaaatgatcccatcaataaacccagtctgtaaagaactcttcagttgagtatatatttaaatcacataaacaatgcaagtggacagttatctacactttccattgatcaatttatacttgaactgtgaacaatcaaaataaattaggcaaatattctaataaattaaaatattttactctgtttacaattgaattttggttcagaggaaatattcctgccacctaacaccttttggcaaattcctcattttagataaatcttgatgcttgaatttaaaacaaataaatggaaggtgaaggagaaattcacaacttgataatctgtttgaattttcttttgaacaattmaaaactacatttttctctgcattttttaattttttaaaaagaaaatcctttcatatatgacaatatacctgaacctctaggacattaagagaaataagccagtcacagaaggacaaatactgcaagattctacttattagagatatctaaagtagtcaaacttatcgaaacagatggttgaatgctggttgtgaggggccagtggaagggggaaatggagaggtgctgatcaatgggtctaaagattcagttatgcaagatgagtaagttccagagatctgctgtccatcattgtgtccataattaacaatactgtattgtgtaactaaaaaatgattaagagggtgatctcatgtgttttaccacaattaaaataaagtaaaatcatttaaaagttttaaaaataaaaataaattttaaaaagggaaagcagtgtgaagtaagctggtacatataatgttgagtttaaataaaataaaatattaatatccttaaataggatagctgtctgttggtcaagctgctttttatttttatttttatttatttattttatttttatttttttgagacagagtctcgctccgtcgcccaggctggagtgcagtggtgcattctcagcttactgcaacctccacctcccgggtttaagcgattctcatgtcttaacctcccgagtagctgggattatagactcccaccactgcacctggctaatttttgtatttttagtaatgacagggttttaccatgttggccaggctggtctcagactcctaacctcaactgattcgcctaccttggcctcccaaaatcctgggatcacaggcgtaagccaccaggctaggcacagctgctgtttaaaacaaaatctacgtatgatcactttatcaagaataattcatttacattaagatgaacaaactattttttatgttccttgtcttttgcagcaacttggatggaactggaggtcattattctaagtgaagtaactcaggaatcaaaatccaaatattgtatgttctcac

SEQ ID NO: 718163 - DNA, 1487 bp, Homo sapiens
taaaagaacttttgctgaggcaggtcttaagggattaaaactgttttaattatggtattccatcactggaatatttgttctttctaaaaccttcccacaatgagagaacaaatgatcccatcaataaacccagtctgtaaagaactcttcagttgagtatatatttaaatcacataaacaatgcaagtggacagttatctacactttccattgatcaatttatacttgaactgtgaacaatcaaaataaattaggcaaatattctaataaattaaaatattttactctgtttacaattgaattttggttcagaggaaatattcctgccacctaacaccttttggcaaattcctcattttagataaatcttgatgcttgaatttaaaacaaataaatggaaggtgaaggagaaattcacaacttgataatctgtttgaattttcttttgaacaattcaaaactacatttttctctgcattttttaattttttaaaaagaaaatcctttcatatatgacaatatacctgaacctctaggacattaagagaaataagccagtcacagaaggacaaatactgcaagattctacttattagagatatctaaagtagtcaaacttatcgaaacagatggttgaatgctggttgtgaggggccagtggaagggggaaatggagaggtgctgatcaatgggtctaaagattcagttatgcaagatgagtaagttccagagatctgctgtccatcattgtgtccataattaacaatactgtattgtgtaactaaaaaatgattaagagggtgatctcatgtgttttaccacaattaaaataaagtaaaatcatttaaaagttttaaaaataaaaataaattttaaaaagggaaagcagtgtgaagtaagctggtacatataatgttgagtttaaataaaataaaatattaatatccttaaataggatagctgtctgttggtcaagctgctttttatttttatttttatttatttattttatttttatttttttgagacagagtctcgctccrtcgcccaggctggagtgcagtggtgcattctcagcttactgcaacctccacctcccgggtttaagcgattctcatgtcttaacctcccgagtagctgggattatagactcccaccactgcacctggctaatttttgtatttttagtaatgacagggttttaccatgttggccaggctggtctcagactcctaacctcaactgattcgcctaccttggcctcccaaaatcctgggatcacaggcgtaagccaccaggctaggcacagctgctgtttaaaacaaaatctacgtatgatcactttatcaagaataattcatttacattaagatgaacaaactattttttatgttccttgtcttttgcagcaacttggatggaactggaggtcattattctaagtgaagtaactcaggaatcaaaatccaaatattgtatgttctcac

SEQ ID NO: 718164 - DNA, 1487 bp, Homo sapiens
taaaagaacttttgctgaggcaggtcttaagggattaaaactgttttaattatggtattccatcactggaatatttgttctttctaaaaccttcccacaatgagagaacaaatgatcccatcaataaacccagtctgtaaagaactcttcagttgagtatatatttaaatcacataaacaatgcaagtggacagttatctacactttccattgatcaatttatacttgaactgtgaacaatcaaaataaattaggcaaatattctaataaattaaaatattttactctgtttacaattgaattttggttcagaggaaatattcctgccacctaacaccttttggcaaattcctcattttagataaatcttgatgcttgaatttaaaacaaataaatggaaggtgaaggagaaattcacaacttgataatctgtttgaattttcttttgaacaattcaaaactacatttttctctgcattttttaattttttaaaaagaaaatcctttcatatatgacaatatacctgaacctctaggacattaagagaaataagccagtcacagaaggacaaatactgcaagattctacttattagagatatctaaagtagtcaaacttatcgaaacagatggttgaatgctggttgtgaggggccagtggaagggggaaatggagaggtgctgatcaatgggtctaaagattcagttatgcaagatgagtaagttccagagatctgctgtccatcattgtgtccataattaacaatactgtattgtgtaactaaaaaatgattaagagggtgatctcatgtgttttaccacaattaaaataaagtaaaatcatttaaaagttttaaaaataaaaataaattttaaaaagggaaagcagtgtgaagtaagctggtacatataatgttgagtttaaataaaataaaatattaatatccttaaataggatagctgtctgttggtcaagctgctttttatttttatttttatttatttattttatttttatttttttgagacagagtctcgctccgtcgcccaggctggagtgcagtggtgcattctcagcttactgcaacctccacctcccgggtttaagcgattctcatgtcttaacctcccgagtagctgggattatagactcccaccactgcacctggctawtttttgtatttttagtaatgacagggttttaccatgttggccaggctggtctcagactcctaacctcaactgattcgcctaccttggcctcccaaaatcctgggatcacaggcgtaagccaccaggctaggcacagctgctgtttaaaacaaaatctacgtatgatcactttatcaagaataattcatttacattaagatgaacaaactattttttatgttccttgtcttttgcagcaacttggatggaactggaggtcattattctaagtgaagtaactcaggaatcaaaatccaaatattgtatgttctcac

SEQ ID NO: 718165 - DNA, 1487 bp, Homo sapiens
taaaagaacttttgctgaggcaggtcttaagggattaaaactgttttaattatggtattccatcactggaatatttgttctttctaaaaccttcccacaatgagagaacaaatgatcccatcaataaacccagtctgtaaagaactcttcagttgagtatatatttaaatcacataaacaatgcaagtggacagttatctacactttccattgatcaatttatacttgaactgtgaacaatcaaaataaattaggcaaatattctaataaattaaaatattttactctgtttacaattgaattttggttcagaggaaatattcctgccacctaacaccttttggcaaattcctcattttagataaatcttgatgcttgaatttaaaacaaataaatggaaggtgaaggagaaattcacaacttgataatctgtttgaattttcttttgaacaattcaaaactacatttttctctgcattttttaattttttaaaaagaaaatcctttcatatatgacaatatacctgaacctctaggacattaagagaaataagccagtcacagaaggacaaatactgcaagattctacttattagagatatctaaagtagtcaaacttatcgaaacagatggttgaatgctggttgtgaggggccagtggaagggggaaatggagaggtgctgatcaatgggtctaaagattcagttatgcaagatgagtaagttccagagatctgctgtccatcattgtgtccataattaacaatactgtattgtgtaactaaaaaatgattaagagggtgatctcatgtgttttaccacaattaaaataaagtaaaatcatttaaaagttttaaaaataaaaataaattttaaaaagggaaagcagtgtgaagtaagctggtacatataatgttgagtttaaataaaataaaatattaatatccttaaataggatagctgtctgttggtcaagctgctttttatttttatttttatttatttattttatttttatttttttgagacagagtctcgctccgtcgcccaggctggagtgcagtggtgcattctcagcttactgcaacctccacctcccgggtttaagcgattctcatgtcttaacctcccgagtagctgggattatagactcccaccactgcacctggctaatttttgtatttttagtaatgacagggttttaccatgttggccaggctggtctcagactcctaacctcaactgattcgcctaccttggcctcccaaaatcctgggatcacaggcgtaagccaccaggctaggcacagctgctgtttaaaacaaaatctacrtatgatcactttatcaagaataattcatttacattaagatgaacaaactattttttatgttccttgtcttttgcagcaacttggatggaactggaggtcattattctaagtgaagtaactcaggaatcaaaatccaaatattgtatgttctcac

SEQ ID NO: 718166 - DNA, 1220 bp, Homo sapiens
tgggtttttgagatagaatggccttgcctatattttgatgtcatatttctagcctccagacctgtgagatactaaattgctaagtcacccagtcagtactaccctagcaaactaatacagatgccaacagctctaagattttgattaaaacaaaatcagttcatagaattccaaatgcacatcacaagatattgggaaatatgaaataactacttagaacttccaaaaaagtcatgagcaatcagaaacaaaatggcttttcagaaaccaaaagatactctgaaacaggactgtcttcacaaatttgttagtgaagcactttttctataattctgtaacgtaacatacctctcagtattaacccctctgacctcccaattctgtctaatgtctaccattaccataagacttacgaaatgcaaagggtgtttttatattttgtattacttttcctgctatcaagataatttatgtttcctaacttaagaaagacagactataatcatagaattttaaatttcatcaattaaaactaaatattcacatctattactttgttctacaaatgtttgttatctgaataaagaaggaatttctttggtttgaattactaggatttaataatgacatttcaaatattataattttgatgctgagaataaaagataccaacaaagtaaaacgttttagaataataaaactgcacttagatcttgtcaatttgacagtcgttagaaataactgatgttaatttatactgtttgccaatctagttgctaaaaacmgaatagcttagataaaactcacttgaaaaacaagcatttctaaatagtattgctctttaaattgaaactaactaaataaagtaaatttttaaataaagtactgggcaaaagaagcaggtaactaactcttacaaccccaaaacatcctcaaaagtaaatctgtattaataggataataataaatatcatcaataataacattgaattattacattaacttgtctttgcaagttgcttatagcattattgatgcataaaaagttaaaatgatatgttataagtaattagcctaaaagcaaaatgaatttccctaaaaaataaatttatcacttagatttcctaaccatacacatatagtacatttcaaatatattcttactaaaatttcatatgtgcattttatttgaaaatgcttaataagcatagaaaagcaaa

SEQ ID NO: 718167 - DNA, 1266 bp, Homo sapiens
gagcttgaagtgtgtttgtgaaaggagaatgtgtattccataaaggtaatatttaacgagaccatgctgaaggtttaatactgcaaaggcccacactccacatgttgatggccctatgctgggaacttcccactggaagatctgattaattaaattataacctttaggccaggtgcagtgtctcacacctgtaatcccagcactgttggaggccaaggcagctggatcacttaaggtcaggagtttgagaccagcctggccaacatggtgaaggcccatatctactaaaaatgcaaaaattagccaggcatggtggcagatacctgtaatcccagctgctctggaagctgaggcaggagaattgcttgaagccaggaggcggaagttgcagtgagctgaggttgctgtcactgcactccagcttgggcgacagagagacttagtctcaaaaataaataaataaaataaatataaaaatataaataagtaaataaattataacctttagaaactataatttctttaaactatttaatatagtaacttaacctcactaaagatgcatttcttttagatataccaaaaatcttatctctagttttgtgagaaaatattatgtcatttttgttcatcttcattatataatttttatttacagttatacattatttttaatctcactatttatttaaattcataaatttagtttgtgctgttttacttttaatattagttttaaagtgttatagtcttttatcattcttaatgtttaatttataattttcactgttatgcttgacacatggaacatcatgattgactgtagagaaaagataatttaattacaaatgaaaaatctatggtcactttgttaccaaaacatgagggtttgatgtgggtcttgctgctctctgcacagaaatccaatgactaagatgaggactattgccaaggaaaaaggctttaatcgttcattgcagctgaggagatgagaactcaatctcaaatccatcaccctgagaaactaaaactagtagtttatatagcaggaaaaaaaaatgaaacaatgtataacaaaacaggaacaaatgaagggaaagaaagcaatcatgatgaaygagggttagccatctcactgtctggatgtggtgatttggtgagtttcatttctttaataattttttgagaggcctgaagttcctttcctgaggaaggaacttagataaaaaaattataggcctggagtggtggcttacacctgtaatc

SEQ ID NO: 718168 - DNA, 2164 bp, Homo sapiens
tgtcatcaaataataataataatatatttctatttcaaaatctacatggatgctgcacttttcagatttattgagtcatgtaattaagcacatgtaaggtttaggttgactctctaattacctgcacagtattgcccctcttttatatgattattttagtttaaaaatagttaccttctaaagatttgacatgatgcaaattacaatctgttagccagataatgaaaagtaacttagtatttattcattggctgacatattctgtagagacaaaattttaaaggggagaaatgagtgtagaaaagttttgagaagaagaaattttgagtacaactgtcctggagtagagaatggactttcgagaaaataatacaaattatgggcattagtataccctttttaatggattatgagataagtagaagaattaagtatgaaatctgggttttgtcctggctaagtgggtggattattctttcatttactggaaataaggaaaactaaagtaggcacagctttcaaagattacatcattccccttgacaagctaattttaggatgattttagatacctgacttattaccattctcaatggcagtcttctccagaggtatccacgctacagatattaatagctttcccttttctatgcatatatatgtgtgcatgcacgtttgtgtagtttacataggcgtgtgtgtgtgtgtgtgtgtgtgtgtgtgtgcgcattttatgttaccatcgtactggatatagtttaatgaatcattttttttttattgtctattctattatgtgggggggtggtgagtactttctaaagtacttttaaactataacactaattttctttggtagtctaaatacataaatattgtttgaaaattcaaaacattttatcctctgctctgtaattattttacttactttttttaatccactgcataggccaggccatcaactcttttaattattttatttaaacaattttaatgtataaattcaatttcaagcagtaacgatttaccagtcatccatggcgtatgtctatatatatataaaataagtagaaagtggattatctgtaaaaaaatatatgatctgagcttgtatatttgagttgaaggtagaggattaaagcaggtggtaggcaagcagatatttgaatcccaaatccgtgttttattcggttattgaggccttcaggcttttaaagtctcctaattccggtttggaaatatttatcttctgtaacagcttaattttagttttcaaatttattagcttaatattgcacgaattattatcttataattttcaagatatattttgtaattaatattcttttattcacttgaaattcaaactttttaaaagaaatattagaatataaatgtctcaaagcatttaagagtcaataaaatgtatttatcttattagtattttgaaaaaaattctttcttttattttattaaatctatattttattttctatgtatcttatttctcattatgtttaataagtcatttatatatgyattgcattttaatttcctagtatctttaaatgtttaaagacacattcaaataaataaaaaaattgtttaaatttatttaaactaaataaatatttaaactaaataattactaaataaatactaatatttatttagtataattattttagtttaaatgaatttttaatacataaatgcaaagcattttttaaatggtagcattaagtaatgttctgtaagagcaatgctaaataatcagtaatttttattttaatttttaaacatttcttttagagtttttggttaatgtatacttgtggtccattggaatttatttaatactacttccttaatataacaattgtcttcaaattcagttttacaaactagtgtgtctacatgaataagtatacaaatatatattatatactatatactctctcacgtgctctctctctatgtatcttagtaattatattggatttttactaaatgttttaatttggtgattttaatttctggaaaataagaattaaagcagtaaatttaaatagtaaattaggattgctatcgtgaagaagaaaaaattgaaataataggccaggcacggtggctcatgcctgtaatcccagcactttgggagacc

SEQ ID NO: 718169 - DNA, 641 bp, Homo sapiens
gccaggatggtctcratctcctgatcttgtgatccgccttggcctcccaaagtgctgggatcacaggtgggagccactgcgcccggccgccacaagccttatttatttaaatcacctttgtcttaggacactaaactcccaaaaggtgaggcctgggaccagcatcaggctggacaagtgctgcagaggccacgccaaccctgtgcggccactgctgccccgcccagtcactaagcacctgcaggtcaccgagcacagggcagggggcagcctccaccaagcacagggcaggggccagcttccactgagctgtcaccaccacaggacacctggaaacacgaaggaacacggcccagaagcagtgtcctggagcgtggcagctgctgcccgagcaggctgcggggtgaacgcagtcgtgggaggctcacgaagagacatcgtcttggggaagggggatcaaggcagccacagtggctgtgggagggacagaggggccagatcccagagctcccctcacaacccatcagagtggtggattccctgaggctggttgtggggctggacatcttgtgaccacaactccccagggcctgagaagggggcagctgtcctcgggctggcccgtcctgctcagaccggag

SEQ ID NO: 718170 - DNA, 641 bp, Homo sapiens
gccaggatggtctcgatctcctgatcttgtgatccgccttggcctcccaaagtgctgggatcacaggtgggagccactgygcccggccgccacaagccttatttatttaaatcacctttgtcttaggacactaaactcccaaaaggtgaggcctgggaccagcatcaggctggacaagtgctgcagaggccacgccaaccctgtgcggccactgctgccccgcccagtcactaagcacctgcaggtcaccgagcacagggcagggggcagcctccaccaagcacagggcaggggccagcttccactgagctgtcaccaccacaggacacctggaaacacgaaggaacacggcccagaagcagtgtcctggagcgtggcagctgctgcccgagcaggctgcggggtgaacgcagtcgtgggaggctcacgaagagacatcgtcttggggaagggggatcaaggcagccacagtggctgtgggagggacagaggggccagatcccagagctcccctcacaacccatcagagtggtggattccctgaggctggttgtggggctggacatcttgtgaccacaactccccagggcctgagaagggggcagctgtcctcgggctggcccgtcctgctcagaccggag

SEQ ID NO: 718171 - DNA, 420 bp, Homo sapiens
agcgttctgttttttaccattaagtaaaatgttagctttgaggttcttttttttaagatgcactttatcaggttaagggaattgtattcctagtttgctgagagcttttgtygtgaaaaggtattggattttgtcaaatgctgcctcactgagatcatgtgggtttttcttttttgatttattgatgtgataaattgcattgatagattttcaaaggtcgaaccaaccttgcattcctacaataatagattgccgaatttggtatattttttattgatggagttatctcttttactttatatttttacttttaatttattgtatagtaagttattttaatgattggaatcacagtgctagagaaatcccccatctgagcccagttctggtggctccaaagcctccaacagaacctagaga

SEQ ID NO: 718172 - DNA, 420 bp, Homo sapiens
agcgttctgttttttaccattaagtaaaatgttagctttgaggttcttttttttaagatgcactttatcaggttaagggaattgtattcctagtttgctgagagcttttgttgtgaaaaggtattggattttgtcaaatgctgcctcactgagatcatgtgggtttttcttttttgatttattgatgtgataaattgcattgatagattttcaaaggtcgaaccaaccttgcattcctacaataatagattgccgaatytggtatattttttattgatggagttatctcttttactttatatttttacttttaatttattgtatagtaagttattttaatgattggaatcacagtgctagagaaatcccccatctgagcccagttctggtggctccaaagcctccaacagaacctagaga

SEQ ID NO: 718173 - DNA, 670 bp, Homo sapiens
catttaaattaaataattcacccctacaactgcgactctgtttcctcatattttgtttctttgtgttaatactctttttattttcataaagaaagaaataattaaaaacctaagagaacactgagtttgtttatggtttaataaaattgttttgatttcaataaagctgacatttacgaagagggatcatttcttaaaaactaagaacatttctttatggaaacaattgtggaaaatgtataaaggagactaatcttgacaagtatataaaatacayttctatgaactactttaaggtttttctcctgttaattattcgcctccacttattatgtctagagtcaatagaatgcttatgagaatatgtcttcatatttttgtatgtacaccacatatactataaatccaaaacaatagatactaatacctattaaatacataggaaagaatggcatgcatatgtttgcatatgtgttccttgtgttctttccttgacgctctgaagtaatgttcttgaaattaattccttgatggctaatactcaatgcaagccaaatgaccagatatggggtacaataaaatatacattttgtacatgtcaacaagctttggggttgattgtgatacgaatgggggcttggaagctagagtgaaagcattaataagcaca

SEQ ID NO: 718174 - DNA, 631 bp, Homo sapiens
ttccttttatgtgtagaagcctttgatgcaatctcatttgtttatttttgtttttgttgcctatttttttggggtcacagccaaaatatctttgcycagatcaatgtgacagaacttttcccccacattttcttctagttccttttagtttcatgaccaaagtttattttttaagaaattcataattaaacttacttccgtttctaccatcaaaaagtcagtctttctccatgcaaacatcattatttccttgtggaaagtgtcaatgcttatcctttcctctgttgtgagagcccaaaacaaaaaagcaaacaaagtttttgaagagatgatagagaacaactactgtgtgagtgcagataatagtaaaacagagaggacaggaacatgacagaaagggagaaacaatgtgaagagcatcagcagagtgcaatgtactttgatatgtaaattccagagaaaaggaaatgaaagaggcagaaatgaaaatgcaaatgtatggatagtagcatcaatgctaaaagaaataacatcgatatgtaatagttctgcttctgcttaaaatattaaaagttgctagagactgttacccgcattctaacactgagaagtcaagcgaactataaaaata

SEQ ID NO: 718175 - DNA, 631 bp, Homo sapiens
ttccttttatgtgtagaagcctttgatgcaatctcatttgtttatttttgtttttgttgcctatttttttggggtcacagccaaaatatctttgctcagatcaatgtgacagaacttttcccccacattttcttctagttccttttagtttcatgaccaaagtttattttttaagaaattcataattaaacttacttccgtttctaccatcaaaaagtcagtctttctccatgcaaacatcattatttccttgtggaaagtgtcaatgcttatcctttcctctgttgtgagagcccaaaacaaaaaagcaaacaaagtttttgaagagatgatagagaacaactactgtgtgagtgcagataatagtaaaacagagaggacaggaacatgacagaaagggagaaacaatgtgaagagcatcagcagagtgcaatgtactttgatatgtaaattccagagaaaaggaaatgaaagaggcagaaatgaaaatgcaaatgtatggatagtagcatcaatgctaaaagaaataacatcgatatgtaatagttctgcttctgcttaaaatattaaaagttgctagagactgttacccscattctaacactgagaagtcaagcgaactataaaaata

SEQ ID NO: 718176 - DNA, 554 bp, Homo sapiens
agcttgggtgtgtagtcagctataccgtctagatttacgtaaatacattgtgatgttcacacaacaatgaaaccacctagtgatgcatttctcagaacatatcccatcattaagcaacacataagtgtatttacaagtccttaaacttagaatatagttttgagactttaataggcaatatttctttttttcttgataatttttttctttttttttttgagacggagtctcactctgtcrcccaggctgaagtgcagtggcacgatatcaggtcactgcaaccactgcctcccagatttaagcgattctcctgcctcagcctctcgagtagctgggataacaggcacacaccatcatgcccggctaaattttgtatttttagtagagacagggttttgccatgttggccaggatggtgtcgatctcctgacctcgtgatccgcctgcttcagctccccaaagtgccgggattacaggcgtgagccaccgcgcctggccagtaattttaaattctggttagttcaaccagagaaagggatttggagaagctggta

SEQ ID NO: 718177 - DNA, 634 bp, Homo sapiens
aattttctcttttctttcataggaacaaataaaattcctggaggaggagattcagagtttggaggaatcagaatcatccctcagttcctattctgattggtatggctctactcataaaaacttcaagaatgtggctaccaagattgacaaagtagatacagtaatgatggggaagaaattgaagacgttggaggtaggcacgcatacttcagatttgtatccaacctttccgttcaccaagctgccccattctcctgcatagatactggaaacacaggtgatcatcccaaccattatgattggtgatcctgagctcatcattttacttgaaatactaagttggctccttaaggccaaaagctagctttcacttattgatgatgtgttgttatcagaatgacttacacatggacacccatgaaagtcttcactgaattccagtgtgacacttcaatattragagaaaactttctctctcaaattaatggcccagtgcttgtaaagagtttaaactcaggtctttagaaggagattgctaaggatgagagaaacatcaagttctttttcaagtctctgatttggaaatgatatattgatcaagacttttagaacctatattgaaataaagaagcca

SEQ ID NO: 718178 - DNA, 634 bp, Homo sapiens
aattttctcttttctttcataggaacaaataaaattcctggaggaggagattcagagtttggaggaatcagaatcatccctcagttcctattctgattggtatggctctactcataaaaacttcaagaatgtggctaccaagattgacaaagtagatacagtaatgatggggaagaaattgaagacgttggaggtaggcacgcatacttcagatttgtatccaacctttccgttcaccaagctgccccattctcctgcatagatactggaaacacaggtgatcatcccaaccattatgattggtgatcctgagctcatcattttacttgaaatactaagttggctccttaaggccaaaagctagctttcacttattgatgatgtgttgttatcagaatgacttacacatggacacccatgaaagtcttcactgaattccagtgtgacacttcaatattaagagaaaactttctctctcaaattaatggcccagtgcttgtamagagtttaaactcaggtctttagaaggagattgctaaggatgagagaaacatcaagttctttttcaagtctctgatttggaaatgatatattgatcaagacttttagaacctatattgaaataaagaagcca

SEQ ID NO: 718179 - DNA, 2224 bp, Homo sapiens
ctgagctaatacaaatggcatcaaccacaattgatattttttaagtgtaatcatgtatgactaggcaaaagtagattaaagagagtaaaaactaaagcagtagttgccaattattttttatcccagttctacactagagggatatcacatactcacttcaggcacactagcttactactgtaagtcttaagaaaaagaacttgtagttatgtccccctggtggatgggaactaaagttaagataccagtgacctaaaaagatgagggtagagaacaaatcatttggagtttcatactattattttgattatctgtgttctttgactcttcaataatgctcttgagaaagatactgcatttgtaattaattgtattctttttctgcatgtgtttagttttgtttgttgttttttttaaggcattctgtgaaactttagaagagacaaactaccgcttacagaaagaactacttgaaaaacaaaaggagatggaatcactaaagaaactgctcagtgagaagcaacttcatatagacactttagagaacagaatcaggtgtgttgtgatacttgcatttctactctgactaattcaacccttaatactctgggctaactgccctttatattttaatatgatttaggaattttctgattctgaaagttgtaggcttttggcatacttcattgggaaaattatgctttatttagcataattttgctaaataarttttgaacattgaaggatgggaaacatcaggaaaataagccactaactgttcaacaaggtaaacattattcattttaatcattgttaaatcatttttaaataaataatcattattaaatggaataccattattttatttaagtgacatcttagtttctaggcatttatgccagcttttcacatatgaaagctctggtttgccatctcatcagcatatcttgaattgatactaaagtcattttaaattaatcatagctactgattttctctgttgacttccaaagtgagctatttattagctatgtaactacattaaggcttaacagctaaagactgctatagctacctgtattcacaacattaaacatatgcctgttttgttcatagaaaataacttgttgctataacatacttttagaacattgtctttagaacctgaagaatcactggatgtgtcagaaacagaaggtgaacagatcctaaaggtggagtcctctgcacttgaggttgatcaagatgtcctggatgaagaatctaggtatataatatttcatttatgatagcttaattcttgaataattggaggaaagtgattctaatactctatagagtatttttttatgaactcagtgttactgtatcacgaatctgctaagcaaacagagaatgaattggaaatattttaggcttttcctaaaatatttaaaaataaaaacactttaaaaataaaaagtgtctttgacatcaggatgtaagttttctcattacttactttagagctgtgtctgcattaactggcctctgactcaggtaattaactaatttcttaaatattgacagattaccttaatctccctcaatatcaccctttttccattgaaaaagtaggctactataatataatagcaaaccacccttcttacctaataggaatgatgaaaaggtaatgaatttaaaagcacatagaatttttattgcatacaaatccaaggtaattgttaatagtttagtggtaatggtcaactataattctgagaaaaattttatgttgataaaggtaattaccaagtagatttttattggtaaatggtagtttggagagctgagtttaaaaacctatctccaaaggtcttacttggcaatgacaacttaaatatatcaaatttctgattgaatgtttaaatactcttacattaaatacttttacactaagtatgtaaatactctttctataaggtagaagatttttaaaggtaatagtgaaaatgaaataatagcatgcatccagtcccatcattgatatgttcctttttttttttttttttgcagagctgataataaaccatgcttaagttttagtgaacctgaaaatgctgtatcagagatagaagtagcagaagtggcatatgatgctgaagaagactaatgtatcacaagcagttccctccatttagactattcaaaaatttagaagagtggcaaatactattttaaa

SEQ ID NO: 718180 - DNA, 2224 bp, Homo sapiens
ctgagctaatacaaatggcatcaaccacaattgatattttttaagtgtaatcatgtatgactaggcaaaagtagattaaagagagtaaaaactaaagcagtagttgccaattattttttatcccagttctacactagagggatatcacatactcacttcaggcacactagcttactactgtaagtcttaagaaaaagaacttgtagttatgtccccctggtggatgggaactaaagttaagataccagtgacctaaaaagatgagggtagagaacaaatcatttggagtttcatactattattttgattatctgtgttctttgactcttcaataatgctcttgagaaagatactgcatttgtaattaattgtattctttttctgcatgtgtttagttttgtttgttgttttttttaaggcattctgtgaaactttagaagagacaaactaccgcttacagaaagaactacttgaaaaacaaaaggagatggaatcactaaagaaactgctcagtgagaagcaacttcatatagacactttagagaacagaatcaggtgtgttgtgatacttgcatttctactctgactaattcaacccttaatactctgggctaactgccctttatattttaatatgatttaggaattttctgattctgaaagttgtaggcttttggcatacttcattgggaaaattatgctttatttagcataattttgctaaataaattttgaacattgaaggatgggaaacatcaggaaaataagccactaactgttcaacaaggtaaacattattcattttaatcattgttaaatcattwttaaataaataatcattattaaatggaataccattattttatttaagtgacatcttagtttctaggcatttatgccagcttttcacatatgaaagctctggtttgccatctcatcagcatatcttgaattgatactaaagtcattttaaattaatcatagctactgattttctctgttgacttccaaagtgagctatttattagctatgtaactacattaaggcttaacagctaaagactgctatagctacctgtattcacaacattaaacatatgcctgttttgttcatagaaaataacttgttgctataacatacttttagaacattgtctttagaacctgaagaatcactggatgtgtcagaaacagaaggtgaacagatcctaaaggtggagtcctctgcacttgaggttgatcaagatgtcctggatgaagaatctaggtatataatatttcatttatgatagcttaattcttgaataattggaggaaagtgattctaatactctatagagtatttttttatgaactcagtgttactgtatcacgaatctgctaagcaaacagagaatgaattggaaatattttaggcttttcctaaaatatttaaaaataaaaacactttaaaaataaaaagtgtctttgacatcaggatgtaagttttctcattacttactttagagctgtgtctgcattaactggcctctgactcaggtaattaactaatttcttaaatattgacagattaccttaatctccctcaatatcaccctttttccattgaaaaagtaggctactataatataatagcaaaccacccttcttacctaataggaatgatgaaaaggtaatgaatttaaaagcacatagaatttttattgcatacaaatccaaggtaattgttaatagtttagtggtaatggtcaactataattctgagaaaaattttatgttgataaaggtaattaccaagtagatttttattggtaaatggtagtttggagagctgagtttaaaaacctatctccaaaggtcttacttggcaatgacaacttaaatatatcaaatttctgattgaatgtttaaatactcttacattaaatacttttacactaagtatgtaaatactctttctataaggtagaagatttttaaaggtaatagtgaaaatgaaataatagcatgcatccagtcccatcattgatatgttcctttttttttttttttttgcagagctgataataaaccatgcttaagttttagtgaacctgaaaatgctgtatcagagatagaagtagcagaagtggcatatgatgctgaagaagactaatgtatcacaagcagttccctccatttagactattcaaaaatttagaagagtggcaaatactattttaaa

SEQ ID NO: 718181 - DNA, 2224 bp, Homo sapiens
ctgagctaatacaaatggcatcaaccacaattgatattttttaagtgtaatcatgtatgactaggcaaaagtagattaaagagagtaaaaactaaagcagtagttgccaattattttttatcccagttctacactagagggatatcacatactcacttcaggcacactagcttactactgtaagtcttaagaaaaagaacttgtagttatgtccccctggtggatgggaactaaagttaagataccagtgacctaaaaagatgagggtagagaacaaatcatttggagtttcatactattattttgattatctgtgttctttgactcttcaataatgctcttgagaaagatactgcatttgtaattaattgtattctttttctgcatgtgtttagttttgtttgttgttttttttaaggcattctgtgaaactttagaagagacaaactaccgcttacagaaagaactacttgaaaaacaaaaggagatggaatcactaaagaaactgctcagtgagaagcaacttcatatagacactttagagaacagaatcaggtgtgttgtgatacttgcatttctactctgactaattcaacccttaatactctgggctaactgccctttatattttaatatgatttaggaattttctgattctgaaagttgtaggcttttggcatacttcattgggaaaattatgctttatttagcataattttgctaaataaattttgaacattgaaggatgggaaacatcaggaaaataagccactaactgttcaacaaggtaaacattattcattttaatcattgttaaatcatttttaaataaataatcattattaaatggaataccattattttatttaagtgacatcttagtttctaggcatttatgccagcttttcacatatgaaagctctggtttgccatctcatcagcatatcttgaattgatactaaagtcattttaaattaatcatagctactgattttctctgttgacttccaaagtgagctatttattagctatgtaactacattaaggcttaacagctaaagactgctatagctacctgtattcacaacattaaacatatgcctgttttgttcatagaaaataacttgttgctataacatacttttagaacattgtctttagaacctgaagaatcactggatgtgtcagaaacagaaggtgaacagatcctaaaggtggagtcctctgcacttgaggttgatcaagatgtcctggatgaagaatctaggtatataatatttcatttatgatagcttaattcttgaataattggaggaaagtgattctaatactctatagagtatttttttatgaactcagtgttactgtatcacgaatctgctaagcaaacagagaatgaattggaaatattttaggcttttcctaaaatatttaaaaataaaaacactttaaaaataaaaagtgtctttgacatcaggatgtaagttttctcattacttactttagagctgtgtctgcattaactggcctctgactcaggtaattaactaatttyttaaatattgacagattaccttaatctccctcaatatcaccctttttccattgaaaaagtaggctactataatataatagcaaaccacccttcttacctaataggaatgatgaaaaggtaatgaatttaaaagcacatagaatttttattgcatacaaatccaaggtaattgttaatagtttagtggtaatggtcaactataattctgagaaaaattttatgttgataaaggtaattaccaagtagatttttattggtaaatggtagtttggagagctgagtttaaaaacctatctccaaaggtcttacttggcaatgacaacttaaatatatcaaatttctgattgaatgtttaaatactcttacattaaatacttttacactaagtatgtaaatactctttctataaggtagaagatttttaaaggtaatagtgaaaatgaaataatagcatgcatccagtcccatcattgatatgttcctttttttttttttttttgcagagctgataataaaccatgcttaagttttagtgaacctgaaaatgctgtatcagagatagaagtagcagaagtggcatatgatgctgaagaagactaatgtatcacaagcagttccctccatttagactattcaaaaatttagaagagtggcaaatactattttaaa

SEQ ID NO: 718182 - DNA, 2224 bp, Homo sapiens
ctgagctaatacaaatggcatcaaccacaattgatattttttaagtgtaatcatgtatgactaggcaaaagtagattaaagagagtaaaaactaaagcagtagttgccaattattttttatcccagttctacactagagggatatcacatactcacttcaggcacactagcttactactgtaagtcttaagaaaaagaacttgtagttatgtccccctggtggatgggaactaaagttaagataccagtgacctaaaaagatgagggtagagaacaaatcatttggagtttcatactattattttgattatctgtgttctttgactcttcaataatgctcttgagaaagatactgcatttgtaattaattgtattctttttctgcatgtgtttagttttgtttgttgttttttttaaggcattctgtgaaactttagaagagacaaactaccgcttacagaaagaactacttgaaaaacaaaaggagatggaatcactaaagaaactgctcagtgagaagcaacttcatatagacactttagagaacagaatcaggtgtgttgtgatacttgcatttctactctgactaattcaacccttaatactctgggctaactgccctttatattttaatatgatttaggaattttctgattctgaaagttgtaggcttttggcatacttcattgggaaaattatgctttatttagcataattttgctaaataaattttgaacattgaaggatgggaaacatcaggaaaataagccactaactgttcaacaaggtaaacattattcattttaatcattgttaaatcatttttaaataaataatcattattaaatggaataccattattttatttaagtgacatcttagtttctaggcatttatgccagcttttcacatatgaaagctctggtttgccatctcatcagcatatcttgaattgatactaaagtcattttaaattaatcatagctactgattttctctgttgacttccaaagtgagctatttattagctatgtaactacattaaggcttaacagctaaagactgctatagctacctgtattcacaacattaaacatatgcctgttttgttcatagaaaataacttgttgctataacatacttttagaacattgtctttagaacctgaagaatcactggatgtgtcagaaacagaaggtgaacagatcctaaaggtggagtcctctgcacttgaggttgatcaagatgtcctggatgaagaatctaggtatataatatttcatttatgatagcttaattcttgaataattggaggaaagtgattctaatactctatagagtatttttttatgaactcagtgttactgtatcacgaatctgctaagcaaacagagaatgaattggaaatattttaggcttttcctaaaatatttaaaaataaaaacactttaaaaataaaaagtgtctttgacatcaggatgtaagttttctcattacttactttagagctgtgtctgcattaactggcctctgactcaggtaattaactaatttcttaaatattgacagattaccttaatctccctcaatatcaccctttttccattgaaaaagtaggctactataatataatagcaaaccacccttcttacctaataggaatgatgaaaaggtaatgaatttaaaagcacatagaatttttattgcatacaaatccaaggtaattgttaatagtttagtggtaatggtcaactataattctgagaaaaattttatgttgataaaggtaattaccaagtagatttttattggtaaatggtagtttggagagctgagtttaaaaacctatctccaaaggtcttacttggcaatgacaacttaaatatatcaaatttctgattgaatgtttaaatactcttacattaaatacttttacactaagtatgtaaatamtctttctataaggtagaagatttttaaaggtaatagtgaaaatgaaataatagcatgcatccagtcccatcattgatatgttcctttttttttttttttttgcagagctgataataaaccatgcttaagttttagtgaacctgaaaatgctgtatcagagatagaagtagcagaagtggcatatgatgctgaagaagactaatgtatcacaagcagttccctccatttagactattcaaaaatttagaagagtggcaaatactattttaaa

SEQ ID NO: 718183 - DNA, 2224 bp, Homo sapiens
ctgagctaatacaaatggcatcaaccacaattgatattttttaagtgtaatcatgtatgactaggcaaaagtagattaaagagagtaaaaactaaagcagtagttgccaattattttttatcccagttctacactagagggatatcacatactcacttcaggcacactagcttactactgtaagtcttaagaaaaagaacttgtagttatgtccccctggtggatgggaactaaagttaagataccagtgacctaaaaagatgagggtagagaacaaatcatttggagtttcatactattattttgattatctgtgttctttgactcttcaataatgctcttgagaaagatactgcatttgtaattaattgtattctttttctgcatgtgtttagttttgtttgttgttttttttaaggcattctgtgaaactttagaagagacaaactaccgcttacagaaagaactacttgaaaaacaaaaggagatggaatcactaaagaaactgctcagtgagaagcaacttcatatagacactttagagaacagaatcaggtgtgttgtgatacttgcatttctactctgactaattcaacccttaatactctgggctaactgccctttatattttaatatgatttaggaattttctgattctgaaagttgtaggcttttggcatacttcattgggaaaattatgctttatttagcataattttgctaaataaattttgaacattgaaggatgggaaacatcaggaaaataagccactaactgttcaacaaggtaaacattattcattttaatcattgttaaatcatttttaaataaataatcattattaaatggaataccattattttatttaagtgacatcttagtttctaggcatttatgccagcttttcacatatgaaagctctggtttgccatctcatcagcatatcttgaattgatactaaagtcattttaaattaatcatagctactgattttctctgttgacttccaaagtgagctatttattagctatgtaactacattaaggcttaacagctaaagactgctatagctacctgtattcacaacattaaacatatgcctgttttgttcatagaaaataacttgttgctataacatacttttagaacattgtctttagaacctgaagaatcactggatgtgtcagaaacagaaggtgaacagatcctaaaggtggagtcctctgcacttgaggttgatcaagatgtcctggatgaagaatctaggtatataatatttcatttatgatagcttaattcttgaataattggaggaaagtgattctaatactctatagagtatttttttatgaactcagtgttactgtatcacgaatctgctaagcaaacagagaatgaattggaaatattttaggcttttcctaaaatatttaaaaataaaaacactttaaaaataaaaagtgtctttgacatcaggatgtaagttttctcattacttactttagagctgtgtctgcattaactggcctctgactcaggtaattaactaatttcttaaatattgacagattaccttaatctccctcaatatcaccctttttccattgaaaaagtaggctactataatataatagcaaaccacccttcttacctaataggaatgatgaaaaggtaatgaatttaaaagcacatagaatttttattgcatacaaatccaaggtaattgttaatagtttagtggtaatggtcaactataattctgagaaaaattttatgttgataaaggtaattaccaagtagatttttattggtaaatggtagtttggagagctgagtttaaaaacctatctccaaaggtcttacttggcaatgacaacttaaatatatcaaatttctgattgaatgtttaaatactcttacattaaatacttttacactaagtatgtaaatacwctttctataaggtagaagatttttaaaggtaatagtgaaaatgaaataatagcatgcatccagtcccatcattgatatgttcctttttttttttttttttgcagagctgataataaaccatgcttaagttttagtgaacctgaaaatgctgtatcagagatagaagtagcagaagtggcatatgatgctgaagaagactaatgtatcacaagcagttccctccatttagactattcaaaaatttagaagagtggcaaatactattttaaa

SEQ ID NO: 718184 - DNA, 2224 bp, Homo sapiens
ctgagctaatacaaatggcatcaaccacaattgatattttttaagtgtaatcatgtatgactaggcaaaagtagattaaagagagtaaaaactaaagcagtagttgccaattattttttatcccagttctacactagagggatatcacatactcacttcaggcacactagcttactactgtaagtcttaagaaaaagaacttgtagttatgtccccctggtggatgggaactaaagttaagataccagtgacctaaaaagatgagggtagagaacaaatcatttggagtttcatactattattttgattatctgtgttctttgactcttcaataatgctcttgagaaagatactgcatttgtaattaattgtattctttttctgcatgtgtttagttttgtttgttgttttttttaaggcattctgtgaaactttagaagagacaaactaccgcttacagaaagaactacttgaaaaacaaaaggagatggaatcactaaagaaactgctcagtgagaagcaacttcatatagacactttagagaacagaatcaggtgtgttgtgatacttgcatttctactctgactaattcaacccttaatactctgggctaactgccctttatattttaatatgatttaggaattttctgattctgaaagttgtaggcttttggcatacttcattgggaaaattatgctttatttagcataattttgctaaataaattttgaacattgaaggatgggaaacatcaggaaaataagccactaactgttcaacaaggtaaacattattcattttaatcattgttaaatcatttttaaataaataatcattattaaatggaataccattattttatttaagtgacatcttagtttctaggcatttatgccagcttttcacatatgaaagctctggtttgccatctcatcagcatatcttgaattgatactaaagtcattttaaattaatcatagctactgattttctctgttgacttccaaagtgagctatttattagctatgtaactacattaaggcttaacagctaaagactgctatagctacctgtattcacaacattaaacatatgcctgttttgttcatagaaaataacttgttgctataacatacttttagaacattgtctttagaacctgaagaatcactggatgtgtcagaaacagaaggtgaacagatcctaaaggtggagtcctctgcacttgaggttgatcaagatgtcctggatgaagaatctaggtatataatatttcatttatgatagcttaattcttgaataattggaggaaagtgattctaatactctatagagtatttttttatgaactcagtgttactgtatcacgaatctgctaagcaaacagagaatgaattggaaatattttaggcttttcctaaaatatttaaaaataaaaacactttaaaaataaaaagtgtctttgacatcaggatgtaagttttctcattacttactttagagctgtgtctgcattaactggcctctgactcaggtaattaactaatttcttaaatattgacagattaccttaatctccctcaatatcaccctttttccattgaaaaagtaggctactataatataatagcaaaccacccttcttacctaataggaatgatgaaaaggtaatgaatttaaaagcacatagaatttttattgcatacaaatccaaggtaattgttaatagtttagtggtaatggtcaactataattctgagaaaaattttatgttgataaaggtaattaccaagtagatttttattggtaaatggtagtttggagagctgagtttaaaaacctatctccaaaggtcttacttggcaatgacaacttaaatatatcaaatttctgattgaatgtttaaatactcttacattaaatacttttacactaagtatgtaaatactytttctataaggtagaagatttttaaaggtaatagtgaaaatgaaataatagcatgcatccagtcccatcattgatatgttcctttttttttttttttttgcagagctgataataaaccatgcttaagttttagtgaacctgaaaatgctgtatcagagatagaagtagcagaagtggcatatgatgctgaagaagactaatgtatcacaagcagttccctccatttagactattcaaaaatttagaagagtggcaaatactattttaaa

SEQ ID NO: 718185 - DNA, 700 bp, Homo sapiens
gttttgttactccaatcataatgagactagttgatgtacaaagaatgtgctgcatactagtatgtaagacttttaagtgagtacaatacattagtgatgacatcatgctggttatcagaaggataataccaagaaacttaaatgcgccccttaacaggaatttcagcaaagaaaacattaaaatcaaacaattcaaaattcaggcaaaagagagagtactacagtattcaagtcctattgttcatagtctttgttggggtatgatgatgattacgagccatagttcacagtgaagtggcctgattcaaagaggtattcatgctttcagttggtctgtgttttactccatttgtattgttataaataaatacttgaggctgggtaatttataaagaaagaggtttatttggctcacagttctgcaggttatacaagcaacatggtgctctggcatctgcttctaaggaagcctcaggaaacttacaatcatggcagaagactaagagtgagctggccatcacatggtgagtgtgagcaagagacagactagggagatgccagcctctttaaataarcagatcttggcctggtgcagtggcacacacctgtaatcccagtgctttgggaggccgaggtggacggatcatgaggtcaggagatcgagagcatcctggctaacacggtgaaaccctgtctatat

SEQ ID NO: 718186 - DNA, 591 bp, Homo sapiens
gtgaaattggtgagtttggtggtgattccggggtgcctggaacggactccagctgaaatgtgggcgtggttggagagtagctgggacagacgggagagtccctgagggatggtgaagacatgagagagactggggagtaacgcagtgaaattggtgagtttggtggtgatttctgggtgcctgcaacggactcccgctgaagtgtgggcgtgcttggagagtagctgggacagacaggcgagtccctgagggttggagataaagacgtgctggagactggggagtaactcagtgaaagtggtgggcttggtggtgatcccagggttcctggaactgacccgcgctgaaatgtgggcgtggttggagagtagctgggacagactggagggtccgtaagggctgggggtgaagacgtgagagagactggcgrggatctcactgaggtctgtgagtttgtaggtgtttctggggtgtggggtacagactcccgctgaaatctgggcgtagttggagagtagctgggacagacaggagagtcatgggtggctgggggtgagctgctggatgatggcagtaagaacatatggtaca

SEQ ID NO: 718187 - DNA, 1695 bp, Homo sapiens
  misc_feature 1110, 1111, 1112, 1113, 1114, 1115, 1116, 1117, 1118, 1119,1120, 1121, 1122, 1123, 1124, 1125, 1126, 1127, 1128, 1129,1130, 1131, 1132, 1133, 1134, 1135, 1136, 1137, 1138, 1139,1140, 1141, 1142, 1143, 1144, 1145, 1146, 1147, 1148: n = A,T,C or G
  misc_feature 1149, 1150, 1151, 1152, 1153, 1154, 1155, 1156, 1157, 1158,1159, 1160, 1161, 1162, 1163, 1164, 1165, 1166, 1167, 1168,1169, 1170, 1171, 1172, 1173, 1174, 1175, 1176, 1177, 1178,1179, 1180, 1181, 1182, 1183, 1184, 1185, 1186, 1187: n = A,T,C or G
  misc_feature 1188, 1189, 1190, 1191, 1192, 1193, 1194, 1195, 1196, 1197,1198, 1199, 1200, 1201, 1202, 1203, 1204, 1205, 1206, 1207,1208, 1209: n = A,T,C or G
actactctttatactaaaaaacaaaaacagtggtgatgtgtggtcattatcgtcagcaaactaatccagggaaagaaaaccaaacgccaccttctcacttataatgggagctgaaaagtgagatcccatggacacaggaaggggaacaacacacactggggcctttcgggaggcagagcgttaagaaaaacagctactgcatgctgggcttaatacctaggtgacgggttgacaggtgcagcaaaccaccatggcacacgtttaccttagtaacaaatctgcacatcctgcacatataccccagaacttagaaacgaaacgaaacaaaagaaaacgaaaaagcaatagcaaaacgctaaaggcaaaataaagtttcaaactcagaaagtgacagaccaacgtttggttcaaatcatggtcctaaacccaggtrccataaggtcaggataaagaatttgattacatattgtaaatatgacatgcagtaaatgaccagaaagattattctccacatatgtgtgtcttctaattcaatggtgacgctatctaccgggacatagcattagattccaaagggccgagtcccgccagacaggcctcccacaccaataacaatgggaagccctacgttgttttacctgtgcttctcagcaactggctataaatcaggttgccaccactcccagatttagttgcattcatttgctggaagagctcacagcacgcagggaaacacttacatttgccgttgtattttagcggacattgcacaaggttcagaaataaatgtggggcccggcatgcggggaggggtgcactaccttccaggaagtgttatccagaagctctctgaacccagtccttttgggttttgatggagacctcattctataggcatgatgggttaaaccataggctattggtgatcaactccacctgaggctctccaccctccctggaaattggggttgaggctttgccattctcagtctgactaaaagaatttacccaaacggaattttaaaacagatgagcataactggaatcttaattagatgattggattatctggagaaacaccttgatattcctaacccgagcaccctcatnnnnnnnnnnnnnnnnnnnnnnnnnnnnnnnnnnnnnnnnnnnnnnnnnnnnnnnnnnnnnnnnnnnnnnnnnnnnnnnnnnnnnnnnnnnnnnnnnnnntatatattaaatatttgtaatttttgtatgtcaaccacaacttagttttattttattttattttattttgagacagagtctcgctctgtcacccaggctggagtccagtggtgcaatctcggctcactgcaagctccaccctccaggttcacaccattctcctgcctcaacctccggagtagctggaactacaggcacccgccaccacgcccggctaattttttgtatttttagtagagacggcttttctccgtgttagcccagatggtcttgatctcctgacgtgatctgcctgcctcagcttcccaaagtactccgattacaggtgtgagccaccgcacccaggcaatttttatttttttgagtcagagtctcactctgtcacccaggctggagtgcagtggcactatcttggctcactgcaacctctgcctcccatgttcaagcaattctcctgcctcagtctcccgagtagctgggactaca

SEQ ID NO: 718188 - DNA, 1188 bp, Homo sapiens
taatgtcattttaaaaatctttgttttagtatactcacaacaacaacttttatagtttctgctgttttgaattagctattatgtttacggtcaagtatatatatagctttataaatattgcagacacttgaaaagtaactgggccaggtgcagtggctcaggtctgtcaacccagtgctttgggtggctgaggcagaaggatcacttgaggccaggaatttgasagcagcctgggcaatatagtgagaccctgtctctacaaaaaataactttaaaatatcagccaggtgtggtggtatgtgcctacagtcctagttactcaggagggtgaggtgggaagggctgcttgagccctgtagttcgaggttacagtgaaaaatgatcgtaccactgcattccagccagagtgacagagagaccctgtctctaaaaaatagtaatacactgtatcctctaatatttataagttacaaagtttaagaaatacatgttatataacacattatatattaaaagtttttttctgtttatcactgattactgctgtttatccatgtcttttagttttccaagagaaaaaaaattatttctattttagattttcattatcaatgtttatcttttctaacatttatttattgtacattctgtgactgcttctcaagtttgtcctctgttctactaatttgattttctacaatactatttctcacttccaatgaagacttaattttggatactgcgtccatttgttggaatgcaaacaggaacagacccttcagagaaactcattctcaattcctaataccactgagaaaggttattacttctagcagaatctggaatgttttaacagatgatgttctaataaaaaacagtcatatttttagaatctgctgctttttctcatttgttccaaaaaaaatttttttttagatcagaattctcaaatccagctatacaacagaataacttggagaactaaaaccacaccctagccaacaaccaatcccactaattgtgagatccagatataatatttcttaaaggttttccaggttggccaggagcagtggctcacacctgtaatcccagcactttgggaggccgaggcaggtggatcatttaagcctgggcaacaaggcaaaaccctgtccctactaaaagtacaaaaattagctggtcgtc

SEQ ID NO: 718189 - DNA, 1188 bp, Homo sapiens
taatgtcattttaaaaatctttgttttagtatactcacaacaacaacttttatagtttctgctgttttgaattagctattatgtttacggtcaagtatatatatagctttataaatattgcagacacttgaaaagtaactgggccaggtgcagtggctcaggtctgtcaacccagtgctttgggtggctgaggcagaaggatcacttgaggccaggaatttgagagcagcctgggcaatatagtgagaccctgtctctacaaaaaataactttaaaatatcagccaggtgtggtggtatgtgcctacagtcctagttactcaggagggtgaggtgggaagggctgcttgagccctgtagttcgaggttacagtgaaaaatgatcgtaccactgcattccagccagagtgacagagagaccctgtctctaaaaaatagtaatacactgtatcctctaatatttataagttacaaagtttaagaaatacatgttatataacacattatatattaaaagtttttttctgtttatcactgattactgctgtttatccatgtcttttagttttccaagagaaaaaaaattatttctattttagattttcattatcaatgtttatcttttctaacatttatttattgtacattctgtgactgcttctcaagtttgtcctctgttctactaatttgattttctacaatactatttctcacttccaatgaagacttaattttggatactgcgtccatttgttggaatgcaaacaggaacagacccttcagagaaactcattctcaattcctaataccactgagaaaggttattacttctagcagaatctggaatgttttaacagatgatgttctaataaaaaacagtcatatttttagaatctgctgctttttctcatttgttccaaaaaaaawttttttttagatcagaattctcaaatccagctatacaacagaataacttggagaactaaaaccacaccctagccaacaaccaatcccactaattgtgagatccagatataatatttcttaaaggttttccaggttggccaggagcagtggctcacacctgtaatcccagcactttgggaggccgaggcaggtggatcatttaagcctgggcaacaaggcaaaaccctgtccctactaaaagtacaaaaattagctggtcgtc

SEQ ID NO: 718190 - DNA, 1188 bp, Homo sapiens
taatgtcattttaaaaatctttgttttagtatactcacaacaacaacttttatagtttctgctgttttgaattagctattatgtttacggtcaagtatatatatagctttataaatattgcagacacttgaaaagtaactgggccaggtgcagtggctcaggtctgtcaacccagtgctttgggtggctgaggcagaaggatcacttgaggccaggaatttgagagcagcctgggcaatatagtgagaccctgtctctacaaaaaataactttaaaatatcagccaggtgtggtggtatgtgcctacagtcctagttactcaggagggtgaggtgggaagggctgcttgagccctgtagttcgaggttacagtgaaaaatgatcgtaccactgcattccagccagagtgacagagagaccctgtctctaaaaaatagtaatacactgtatcctctaatatttataagttacaaagtttaagaaatacatgttatataacacattatatattaaaagtttttttctgtttatcactgattactgctgtttatccatgtcttttagttttccaagagaaaaaaaattatttctattttagattttcattatcaatgtttatcttttctaacatttatttattgtacattctgtgactgcttctcaagtttgtcctctgttctactaatttgattttctacaatactatttctcacttccaatgaagacttaattttggatactgcgtccatttgttggaatgcaaacaggaacagacccttcagagaaactcattctcaattcctaataccactgagaaaggttattacttctagcagaatctggaatgttttaacagatgatgttctaataaaaaacagtcatatttttagaatctgctgctttttctcatttgttccaaaaaaaatttttttttagatcaraattctcaaatccagctatacaacagaataacttggagaactaaaaccacaccctagccaacaaccaatcccactaattgtgagatccagatataatatttcttaaaggttttccaggttggccaggagcagtggctcacacctgtaatcccagcactttgggaggccgaggcaggtggatcatttaagcctgggcaacaaggcaaaaccctgtccctactaaaagtacaaaaattagctggtcgtc

SEQ ID NO: 718191 - DNA, 622 bp, Homo sapiens
ctgactaaacacctaaagtgaaatagcaaagaaaatttgagaccaaattatatatctatgtgtacccactccccaccaaaaaggccttacctaccatcacctaccctttcaggcaagcctgtgtaaattaaaaacaatgttcattgaacaaatacaaattgagggcttgctgtacagcgtgcactgtgctgggagcttcccataacaatcagaggtaatattataattccatagactcaccccagagatacgtgttgagatcatactcaaatgctgagaaatacatcagactgtaaagctcttcaaagtgaggaatcccagcattctccagatatcctaaaayagaacttggccaaatctattagacacaagtttgaaatatcaagttcaaaaactgatttgaagatcgggcacagtggctcatgcctgtaatccccacattttgggaggccgaagcaggcagatcactgaagttcaggagttcaagaccagcctggccaacatggtgaaactctgtctttactaaaaatacaaaaatcagccgggcatggtggcgggtgcctgtagtcccagctgcttgggaggctgaggcagggcttgaacctgggaggcagaggttgca

SEQ ID NO: 718192 - DNA, 690 bp, Homo sapiens
gaagaggtttattttggcttatggttctgcaggctgtacaggaagcatactgctggcatctacttctggtgaggtctcaggaagcttacagtcatggcagaaggtgaagggggagcaggcacatcacatgtccagagagagagagagagcaagagagagatgggggagatcccactctttttaacaaccagatcttgcatgaacttatcaccactcgttaccttggggagggtaccaagccattcatgagggatccaccacatgcctcccactgtccctacctccagcatatttcaacacaagatttggaggggacacacatccaaaccatatcaccgatacacagtaggcatgtaataaacaattctctcagaccatgttctgaactwtaaaagtctttcactattagacccactcttcaccaagaggttcttattttatgcatatttacaaagcctgatgcattctcataaaacatttttcttctctacagctgcaataaatagtaaatagcaggttaatactaccatcttaatatctaaaattagcagtctgtggactatttgccccccaaaacttttctctatgtctccaagaaaatatttataattgaaatataatacatgtagagatgtgcacaaatcatagctggacagcttgatgaatctttacaaagtgaacaggtacatg

SEQ ID NO: 718193 - DNA, 1143 bp, Homo sapiens
caggcacgcaccaccacacccagctaatttttatatttttagtagagacagggtttggccatgttgtccagtctggtctccaactcctgacctcaggcgatctgcccacctcggcctcccaaagtgctgggattataggcgtgagtcaccacgctggcctttctgggtaatttctgacaaccaaacaactctatcctgcgtttgctagaattttccagaaaatccagggagggagaaagccttctctttggtgttgcatagacttgccctcaggatcctcagaacctgtatccactactcctcagcgggagagctggaggtgggagacccaacccttccttctacaaagaagggagcggcctgtgcagtttgcagggcagaaaccctggagacactgtgtcttaaggctacataagaatctcctctgctcgggccctgcgatctgcagcctcaagtattcacctccaattccagccctcctgctggggtgcaaggcttctaggcacccgccggctgctcctctccccatacccctggactggaagagtcctgggggccctgcatggcaggaatgtcctggctstgggtgcggaagaagaggagacagatctcaggagcccccctcaccgttgggatagaagcccttcagccatcctctaccccagggccattctaccacccctgaacgccttggggtccagggtttagaaatcagcagggctaagaggtgcccccgtagtgtttgtggaaaggaaggaaagggcacgttcggtacagacctgccacaggcagatttgtgaagctcctgggcggccccttctcgcctgatcccccaccgcagcttgcccgtgtctggaggctgcctgcccagcacccaaaggcctccagtccctacctgccctgcctcacacctgggcaatgccccccactcctcccactccatcttacccaatttcttcccttggggattccccagatgactatcgaggtaaggggctgggcctgagtagcacgcctctgtcttactcctttatttactcactgctttgtctatttgaattaccatgattgactttttgttttttgaaacagggtctcactctgttgcccaggctggactgcagtgattcaatcactcctcac

SEQ ID NO: 718194 - DNA, 1143 bp, Homo sapiens
caggcacgcaccaccacacccagctaatttttatatttttagtagagacagggtttggccatgttgtccagtctggtctccaactcctgacctcaggcgatctgcccacctcggcctcccaaagtgctgggattataggcgtgagtcaccacgctggcctttctgggtaatttctgacaaccaaacaactctatcctgcgtttgctagaattttccagaaaatccagggagggagaaagccttctctttggtgttgcatagacttgccctcaggatcctcagaacctgtatccactactcctcagcgggagagctggaggtgggagacccaacccttccttctacaaagaagggagcggcctgtgcagtttgcagggcagaaaccctggagacactgtgtcttaaggctacataagaatctcctctgctcgggccctgcgatctgcagcctcaagtattcacctccaattccagccctcctgctggggtgcaaggcttctaggcacccgccggctgctcctctccccatacccctggactggaagagtcctgggggccctgcatggcaggaatgtcctggctgtgggtgcggaagaagaggagacagatctcaggagcccccctcaccgttgggatagaagcccttcagccatcctctaccccagggccattctaccacccctgaacgccttggggtccagggtttagaaatcagcagggctaagaggtgcccccgtagtgtttgtggaaaggaaggaaagggcacgttcrgtacagacctgccacaggcagatttgtgaagctcctgggcggccccttctcgcctgatcccccaccgcagcttgcccgtgtctggaggctgcctgcccagcacccaaaggcctccagtccctacctgccctgcctcacacctgggcaatgccccccactcctcccactccatcttacccaatttcttcccttggggattccccagatgactatcgaggtaaggggctgggcctgagtagcacgcctctgtcttactcctttatttactcactgctttgtctatttgaattaccatgattgactttttgttttttgaaacagggtctcactctgttgcccaggctggactgcagtgattcaatcactcctcac

SEQ ID NO: 718195 - DNA, 589 bp, Homo sapiens
gacctcaggtgatccacccacctcggcctcccaaagtgctatgataacaggcgtgagccactgcccccggtctagtgcctgaaagtttggaatgatccagatatgtaaggagtggagggaagagcatgaggggccctgggaacagaaaatgcagtgcccagsgctaagaaaccgcatggcttagggaaagcaagtgcgggtgggtgccacgccctcctcagccctccacagcctggtttcttcccctgccactgccttggaagccacactcttctcctttgtgagcccagtgagagggctctgccatattgattagtcctccctgctctatttctccttccttgatcttctcttccggagccaccccctcttgtgacttccatgactcagagcacccccaccctccctgcatccgtgcccactccctgcctggctcctttcccgtgctggttgcctgactgcccttcaggtgtgcttgacctgagtctccattctcgcccactgctccctcactccacaccagagggtcagaacattttctggggtcatagactcctttgattctctgctggtcactcttcccagaaaa

SEQ ID NO: 718196 - DNA, 589 bp, Homo sapiens
gacctcaggtgatccacccacctcggcctcccaaagtgctatgataacaggcgtgagccactgcccccggtctagtgcctgaaagtttggaatgatccagatatgtaaggagtggagggaagagcatgaggggccctgggaacagaaaatgcagtgcccagggctaagaaaccgcatggcttagggaaagcaagtgcgggtgggtgccacgccctcctcagccctccacagcctggtttcttcccctgccactgccttggaagccacactcttctcctttgtgagcccagtgagagggytctgccatattgattagtcctccctgctctatttctccttccttgatcttctcttccggagccaccccctcttgtgacttccatgactcagagcacccccaccctccctgcatccgtgcccactccctgcctggctcctttcccgtgctggttgcctgactgcccttcaggtgtgcttgacctgagtctccattctcgcccactgctccctcactccacaccagagggtcagaacattttctggggtcatagactcctttgattctctgctggtcactcttcccagaaaa

SEQ ID NO: 718197 - DNA, 589 bp, Homo sapiens
gacctcaggtgatccacccacctcggcctcccaaagtgctatgataacaggcgtgagccactgcccccggtctagtgcctgaaagtttggaatgatccagatatgtaaggagtggagggaagagcatgaggggccctgggaacagaaaatgcagtgcccagggctaagaaaccgcatggcttagggaaagcaagtgcgggtgggtgccacgccctcctcagccctccacagcctggtttcttcccctgccactgccttggaagccacactcttctcctttgtgagcccagtgagagggctctgccatattgattagtcctccctgctctatttctccttccttgatcttctcttccggagccaccccctcttgtgacttccatgactcagagcacccccaccctccctgcatccgtgcccactccctgcctggctcctttcccgtgctggttscctgactgcccttcaggtgtgcttgacctgagtctccattctcgcccactgctccctcactccacaccagagggtcagaacattttctggggtcatagactcctttgattctctgctggtcactcttcccagaaaa

SEQ ID NO: 718198 - DNA, 767 bp, Homo sapiens
tttgagacagggtcttgctctgtagaccaggccaacgtgcagtagagtgatcatctagctcattgcagcctcaaactcctggactcaagggaccctcccacctcagcctccagagtagctgggactatagacacacaccaccatgccagctaattttttaaaaatttttccataaagacagagtctcactatgttgcccaggcttgtctcaaacttctggcctctagtgaacctcccacctcagcttcccaaagtcctgggattgcaggcatgagccactgcacccagcccagataaggattttttaaaaagatatattgacgatagtattatgacatctaattaattaatatcacctaatacccagtttgtgttcagatttccccatttgtctcaaacgtgggttttttttagcacttgctttgttcaaatcaggatccgaacaagtaagaatccgtgaatcttgaaagcctttctttagaaaataggagaaaaagtgtttttagttatttcatttagaatctgagccattccgtcttttttttaagatggagtctcrctttgttgcccaggctggagtgcagtggtgcaatctcagctcactgcaacttcagccttccaggttcaagcgattctcctgactcagcctcccaagtagctgggattacagacatgcaccgtcatgcccggctaatttttgtatttttagcagagatgggggtttcaccatgctggccaagctggtcttgaactcctgacctcaagtg

SEQ ID NO: 718199 - DNA, 617 bp, Homo sapiens
aaattgggccaggtgtagtggctcatgcttgtaattccagcactttgggaggctgagacgggtggatcgcttgaggccaggagttcgagaccaggctggccaatatggcaaaaccccgtctctactaaaaatacaaaattagccagacatggtggcacacacctgtaatcccagctacttgggaggctgaaacatgagaatcacttgaatgcgggaggtggaggcttccgtgagccgagattatgccactgcactcccgcctgtgagacagagtaagactctgtctcaaaacgacaacaataataacaaaatagaaagaaagaaaaaaaaatgatcactttaatctcaataaagtttcaaaccatttgaattctgaaaagctcttgagaggaagaaagcagccaggtgcagaggcttatgcctgtaattccaggatttgggcatcaggaggtcgaaccatggagtttgagatcagcttgggcaacagggtgagacccggtctctacaaaatatttttttaaaaattagctggrtgtggtgttaaatgcctgtagttccggctacttgggaggctgaggtgggaggattgcttgaattcacaaggttgagaagttgag

SEQ ID NO: 718200 - DNA, 859 bp, Homo sapiens
tgattcttcagagtagcagacattgacaagggacagattgtcactaacttctgggggtatgtctgggacagtttgttttacaatataggtcacatggcatgcatgtgaggagtttggaaatgagagaacaccacaaatagatactcctccaaagagaaattaagatacagtaagacctaaaatgtcccatttggagcagagcagatggctatatatagtatgtgctgaatagagaaataaacaaaacttcagaacaaaggtatcctttgctatcagagttctcactatccaaatatttgctattaggatttgcagttacttttaccaaaaaaaatcattatttgaagaaaaactgactataacaaatatatatatacacatacaaygagaaatacttaaaacacgctattccaatatgtatatttataggtgtgtgggggggtaaatctggactccttattccaatatgatcagaagcaaaagtttcctatttgagtaatttcttgtttcatagattcagctatagctttaaaggatggcttttagcattcagtttctgattttctatttctgaggagaagacaagtccacaagttccttgaatttggacatgcatgactcagtctttcctcacctcactgacattctccctttatccattccagaataatgacggtgattagctggccactttttccatttggtttttcttttatttttgacaccaagtggttgacatcaccttgtttctgctgccatcaaacttcacttgtaacccttccaatggtaactattttttattgcctaatcattttattttatttgatactttatttggatttgatatacatctttatta

SEQ ID NO: 718201 - DNA, 655 bp, Homo sapiens
tcatcaccttccctggggtatggcaggaaccatgaatgcttctattcaatataagatggcaaagttgacaggatatatgtgattaccatacataattatgttgcataaacctgcagcatttatactgggaagagaatgtcttccttgttggcctggaggaagctagctgccatgttgtactkccacattgaggaggcaatgagctgagggtggcctctgtccaaaaactagaaagaaactgagactgctgtcacttcacagcctaaaagtagttaaattctgcaaacaaccacatgagattaggaggtgatttctccccagtcagatctcagaggaatctgaagccctggccaacaccttgatggcaggtttaagactgcagcagagagccccgctaaccaaagcctgcaatcctgatctgcaaaagtgtgatatgatagatggatgttatattaagtctctaaatttgtgataatattattaggtagcaagagataactaatacagtcattttttccattctatacctaatgagatattcattgtctttttgaaaattcagtgcttggcaatggtgttgcaggaaacagatgaagattcatttgaatggttcaaggtcgcaaagagatgtcaagccttctcttcccctttctgg

SEQ ID NO: 718202 - DNA, 655 bp, Homo sapiens
tcatcaccttccctggggtatggcaggaaccatgaatgcttctattcaatataagatggcaaagttgacaggatatatgtgattaccatacataattatgttgcataaacctgcagcatttatactgggaagagaatgtcttccttgttggcctggaggaagctagctgccatgttgtactgccacattgaggaggcaatgagctgagggtggcctctgtccaaaaactagaaagaaactgagactgctgtcacttcacagcctaaaagtagttaaattctgcaaacaaccacatgagattaggaggtgatttctccccagtcagatctcagaggaatctgaagccctggccaacaccttgatggcaggtttaasactgcagcagagagccccgctaaccaaagcctgcaatcctgatctgcaaaagtgtgatatgatagatggatgttatattaagtctctaaatttgtgataatattattaggtagcaagagataactaatacagtcattttttccattctatacctaatgagatattcattgtctttttgaaaattcagtgcttggcaatggtgttgcaggaaacagatgaagattcatttgaatggttcaaggtcgcaaagagatgtcaagccttctcttcccctttctgg

SEQ ID NO: 718203 - DNA, 1617 bp, Homo sapiens
caactaatgccaaatattctataggcaaaattctataggctaattccagttcaaggatagctttaaaaccctacaatgtgcttcctctattttgaggtcaatccaagacagcaatctgaaataaacaagttctctccttccatataaatgttaattaaaaaaaaaactcacctaaggccttatattgagactgcattgtttttggatcagctgcttctaatcctttcacttacatctgtagctttgtgctgtcagtaatcgtagattcatagtcattgcaaacataaatctttctcataacattcatttcaaaatcctgtagttgagaattcacttactataaacactccctcagcagaagttgggtgttggccatgtagcctggaatggggtacttagcattcccaaggtgtggctcaggaaaatgcaagcaattgaagtaattagtggcacttgtacgttgtaaagcattttgttgtrtttcctcacccagcagaggccctttttcacatttaaaacaaaaaggttggatatttaaaaatgtgatatacagaaaaatgaaaaggaacaagttagggagtagtcctattaaaaagcactgtctggagttgggagatgggttgatatggtttggctgtctccccacccaaatctcaacttaaattgtagctcccagaattcccacgtgctgtgggaggggcccagggggaggtaattgaatcatgggagccggtctttcccgtgctattctcgtgatagtgagtaagtctcacgagatctgatgggtttatcaggggtttttgctcttgcttcttcatcatttttctcttgccagctgccacgtaagaagttcctttcacctcccccatgattatgagatctccccagccatgtggaactgtaagtccaattaaacctctttttcttaccagtctcaggtatgtctttatcagcagtatgaaaacaaactaatacatgggtctacaagaaacttgattgctaaagagaaattacctgtgaaactttatagcagtacctccccatcctatttgtccttcactattatacttccctacttttctctttaactcttgcccctctaattttccaaatcctctctctccttccttttctcttctccatttttctttttctcccctccctctcttcctactcttttctagctcttcttctcatctcttctttttaattgctattctttcccctccctgaagccctacaaggaaatcccacctttgtaaagaagagtagccatagaattcaagtggttaatatttgcataatatatcattgcccactctttgaccttcaacttaaccacgtctttatatttgaagtatgtctcttgtaaacagtatgtatttgggccatgtgagtgtgcacaggtgtgtgtgtgcacatgtgtgtgttttaatccattctgacaatttaattggtgtgtttacttcatttacaccaaatgtaattactgatacagttgggatttttctaccatcttgctttttcttttctacttgtctatctgttctttgaacttttattcttctcttccttacttatcttgaattaagcaaatatttttattattcatgatat

SEQ ID NO: 718204 - DNA, 598 bp, Homo sapiens
ttttcttttccttagagataaacataattcacctattactctccctattatatgcagagatagattcgaaagtcatttgtattttgaatttatgaacaaatgctgttaattgatagaaaagtacaagtttgttccctaaaagagacttttaatttaatagtaatctagccctaagtagcctagaagagttaaatcaattcttccattgctctgagtttacttccaaaaagtaatttagccccctggagaaaactgactcaatgatgtgtcagtataacaaaatataaaatacctctccccattcttaggcaaatttgttgaaccttgtgagcataagtatttattgttgctaagccttgataataatgaagatgacttcttccccaaaaggacattgcatatgaaagggaaaaataaatatagcatatatatggattttatagcatccagttaggtatctgagtgttctgaaaacttgtagccaaattctacctggccacaacggcatggggtaatcattaagtgaaaacaggaccatgtgggtggttactctagatgatttattcaggcctaagktggaggggattgagcataacca

SEQ ID NO: 718205 - DNA, 649 bp, Homo sapiens
ttttttctggtgtgagtctacagattagttcctcactttttaaatcattgataaaatatctaatgatgaacaaaaatttcaaaacaactatgaagcaaactcggtatatatagactatcagttaatctggtaggctgtttgagtacaagtcagttaagtaaatggcatacaataaaattgaaagtatctgttcatagtaaatgaagaggaaaatgacagagagaccaaaaaaactagaaaaatgatcatcaactgagtgacagagacaatgatgattcaataaaaaatatttagccttcctgcaatattgaactcagagcagaaaaagcatttaaatacataattttaaaacttcttccttaaataaagaaaaatttaaatcttccaatagaagcatatggcagtatatggaaggaaaaactaatgtaawataatcagcagggatttttaaaagatcttttcagtcatactgaatttctataacaagaaatatttcctgagacattgaagtaggaagaaaataaagagtcaattaagagtaaaaaattaagctgggctcagaatactacaaataacgttcaagtccaaaaaataatacaacaaaaatgttcacaaatttctgtggtgattaaaatatgagccaagaatt

SEQ ID NO: 718206 - DNA, 649 bp, Homo sapiens
ttttttctggtgtgagtctacagattagttcctcactttttaaatcattgataaaatatctaatgatgaacaaaaatttcaaaacaactatgaagcaaactcggtatatatagactatcagttaatctggtaggctgtttgagtacaagtcagttaagtaaatggcatacaataaaattgaaagtatctgttcatagtaaatgaagaggaaaatgacagagagaccaaaaaaactagaaaaatgatcatcaactgagtgacagagacaatgatgattcaataaaaaatatttagccttcctgcaatattgaactcagagcagaaaaagcatttaaatacataattttaaaacttcttccttaaataaagaaaaatttaaatcttccaatagaagcatatggcagtatatggaaggaaaaactaatgtaaaataatcagcagggatttttaaaagatcttttcagtcatactgaatttctataacaasaaatatttcctgagacattgaagtaggaagaaaataaagagtcaattaagagtaaaaaattaagctgggctcagaatactacaaataacgttcaagtccaaaaaataatacaacaaaaatgttcacaaatttctgtggtgattaaaatatgagccaagaatt

SEQ ID NO: 718207 - DNA, 504 bp, Homo sapiens
tataaaaagcagtatattaaaattaagaattaacttatatatagcattgtaataaccttgaaaactggcccaataattttaagagttaaattgttctcatttactatttaacttttttctcattgtacttaaatagtttgtagtttgtcaacagtaatcataaatttttggttgaaaaactaattaatattgagtttcattttgggaaatttataatatatagaaatrtttttgcccctattagctaatattcttttatcttatatgcattttaaaactttataaccttatatattggcatgatggagatactggtcagttataaagtttgttcattaataaataattcacatattccaatttcaattctttatacaacttgctgaatttcagcatatgtatgaatgtgaaaataagcagaaaaattatttttaaaaaaggcatagcataatgatgatatccaaagccttttttaaaaaaaggcaagagagaaaataaaactga

SEQ ID NO: 718208 - DNA, 2200 bp, Homo sapiens
taatattcattttcctgttaattcttcagacttttcatgggcagctgatgtgcaagcagtagatttatttaacatattattaagaaatattaggcaatgttctataattcacctaaatcatttggtggctaaggggggataaagactagtggaaaaaggaatcagcttatgaaatgagtaaagcatttgattatgtrtttgcctgtgcttataatcccaggagccagaatgcattgcttgaattggaaacaagcaatacatttcttttttttcacattagagttgctgaatccattctatattgattaaagtactgaaaataagttaccgttagactcttgcaaagaaagttaattcatctttggactggttcaagaatttctttttgaaaacttggctctaagtttctatttgagttttcaaacttaatttaagaaagattgccattgtataataaaatcatagggttcagtgaaacatacatcttcacattaaaaagaagcccaccaaaatctaactatggactggaaaataagacatcttgaggttcttaagtataatgctggaaggatgcattataccaactttcaaaacctgcttgaagtttttgagtttgaatttcaaattaaactagaaactttggagatttgaattgtttttttcccttggtaaagcaccccacccttattcaaaaggaaaaaggaaaccgtaatgtcctccataaaagtttgagagcttctggaaattctaatagctcataataaacatcacaacaaataaaatgtaaataaataagaaacagatgtattactctgctcttaaaatatttataaatttaaaaatgtggaatgttggaaaaaaaagagctagtgagtgataataaattgatcatggctgtattatattatcttataattaaaacattcttctccagttgaatataaaagatgcatttcttataaattttgaagtttgagtttgttccaggatctctaatgttacaacattgttaacttatttataaaataaaaacctttgtaatattttctatggaagtatatgttcttggaacaataattttcttctaattgattacacatttagtgttgtgctcctttaatccacctaattttttacacacaattacctaaactatacataaacatatggtcacatgggactgactatatgcttgtctagttttctaccactgaatccataagatgaaagaaagaccctacaaatgttaatttttccctctttatgccaactatttaattcttttttaatgctaagaatattttatgaaaaatttgaggtcaaaatctagttatatatttcaaaggctacagattaaaaaggggaacatttggtaactctcccattgctcacagagaagctaaataacttgagaacacgaagagcttattaagttttcggatccactgtgcttgctcaaatccagataagcataaaaaaatagaggctgtactattaactccatggtttgtgtgctctcttgctgcatgacactaacagttactttgttgtaaacacgtggatcaatcataaatgtacaagaagtcagaaatgtagacagccctggtggtttagaggctaaggatgttcaacaggtccaggaagaaatttaattctgatgagggtcttcaacccagtctctcagactttgaccctcacatagttcccccttccttggaattcaggtttggcctagaatctgggtaacacacaaagttgaatcagtctggacccatggagaatgtatgggcatcatgcctagaggagtttcggatcatactgctgcacactgcactgttgagataacaccctagagaataacttggtgttcttaccataggcctggcctactattttccagctctcttgaaggcccattgctaatagggacactatattttggactgtgagcctccacttgctggaaataagaagcacctctgtgaagaatcccttactgtattatacttccagcattttaaaaccatatatccttatgccccaggtggctcgactttgaacacttttcccctgcattcattctattgtaatactagccatactttattagctctatagagggtgaagtatggcagaatattccctgctcaaaaaaaaacaaaacgctttggcataagaattattttgagttaaagtcact

SEQ ID NO: 718209 - DNA, 1929 bp, Homo sapiens
gagtgaggcttcaatttcaatttatcaaattgagttgttactaggaaactgttttgtctcttgaataaactttaccaaggtagacttttcaaaggacacaggagtaagttcaagagaagaaaggttggtagcataattctagctgtcttcaagaccacaacatgttatttgggattctgaatgccaggttggtacggcagtgcactccacccactcttgccataccagcctccatgtcaatgttgaacatatggtctttcaggggaagctgcctgctccagcctcaaagcttccttgtgtctccaaagaacattatgttcttagggaaaaaagaaaatcatgttaaagttctagtacccaaaaccatttgggctttgtttacaagcttaacaccagaaccatttaaaaactaatctaaaaccaacttttggtcagcaggtgcctatttttgtggaattataactagcagctatgcagaatatcagtctctccaaatatgtctctggttccaaggataacgtaaaattgggttaaccaagaatcaagaatattattcagaatgattttagaattaatatatttctctctgtgtgtgtagatactaggaattcaggtaattaagaattaattgtaggggctagcatggcatggggccaacaggaactttgtttgaataagggtttacatgctgagtgagagataagaatttgtctctaagcagttggagaacaaaagtcaacttttgacctcccagagagaatattggaggaaatggatgttcactgcagctatagagaatcaaggaccagaaatttgtccaacactcattgggggtggacaagagaaaacaggaggtagggatggttaggagaattagcaaagagaattactttgagtgtactaagatggattgtcagtcaactgataattcaatcctagacccccaatagggagctgattgatatgaactaaaaaagcctaatatacagagagctggacttctgagaatgaggtaaaaactaagggtaggtgagaacctgtcatgaaagatctattactggtaatagatcatgacttcagtcaagtgtttgctagaaagaggctgaagagccttgcctcagtgtgacaggagtaagtatcatggggacaaggtcaaaaatcagaaatgccataagctttgataaccttgatgaattagccatggccttttgaaatgcacatatcatactcctgaagtctctttctctggaaagaggcaaaactatttgacttgtaaaaattttcaaatttatacaagatatgaaaaaagtatatacgtatgaacttctttgtaccaatggtgaagcttcaaaaatcctccactcatgaccaaacttcttatatctataattcccatccgccaactcaccctgaattttgaagcaaatcccagataccttgtcatttaatctataaacacttcagtgtctccaaaaaatagggtttcttctttaaaacttaaaaatattaacasaataatatcacacttaaaaatactagcaaaaagtcaaagaataaaattttgaggtaagtaaaattgaggttccagcaaattccctagaaagtactgagccagactactgaatgtgaacattagtataatcttcttgtatccttggttgatggatcctgaaagtgggaatatggggacacttaagaggaggactcaggtgtttgctttaggaaccctgttctgagaatgttttagcagtaatggaatgaatttatcctcagtgaagaagagataacaacccttggttttctacctgtaaagggaaaccaatttcagttttgctttaataagaaacattttccatgggcttggtgagaaatagaaactgaaatataagcaaagaataagcaaagattatattgctgttaactataaaa

SEQ ID NO: 718210 - DNA, 1515 bp, Homo sapiens
atttctgtttaaataacagtacatttatcaacagaatatttctaataacattcatattctagcatccttttctaaaaatcatcagtataatcagctaccttgtggatggagttaatcataactctctctaattcaaccaaccacttctccacttgacctctggctttggctgttgaaataatctctatgagttctacaacctctccttcgctgctcttcatgtgagtaatgtctaaagtttccgtaaattctacctttgcgattccttcaaaacatttcttcaagtgaggttgcaccctgtcaggaaaaacatttttaagataattaaccaagttaaaacaattctttacactccagagttcttcgtttaaagttcataaatgctaggtgctgctgggaatgaaatgctgtgcaaaaaccggaaacccccaaaacaaacaaacaaaaaacacaagctctgcctacatgcattatatagtccattgagatgtcagtattaactgaataatcacaaaacatctgtaaaattacaattatagtaagagctacagagacaaccacgaggctttgtcttcaatacaatgaattaaaagatgctaaaggtaacataaggagaaaaccaatcttgactaacagataaatacatgaatctgaagaatcttcaaatgcacaaaagtagccatttcaactgggttcttcagagactgcttgaaaattgtggactatgtttagtaacttaggtactttacagtttactaaatcaactgcgttgacagtatccaactattagtctattcaatgtaatacagatgggactgacacaactcatttttggcacactaccaataacccgttgcattcatctttcaaatgggcaaaaagaagcaaagtataaaaactcagatagaaatctgagcctaaatttaccttttgtttagattacatatcccctactttgaaggcacaagttaacaaaattaacacatttgtttaacaagtatctattcactgtttatatcagatgctcttctaaagattggggaatcagcagtgggaaaaaaacagtcaaaaaatctctaccatggtggagcttatattccgctagaggaagacatgccattaacaaataagtaaattayagagtatgccagatgataacaactatgcagaaggaaaatgaggcaaggaaaataagtccaggaaagagggcaagttgagcatggagggagctgcctctttaaatatggtggtcagggagggcctccctgaatgacagatgtttaaccagatttccactaagacttataggaggtaaaggaagaagtatgatgaacatttgggtaaggagcatcccaggcaagagaacagtacactgagaaaggaggctgccccttttaccggggaattgcaaaaaggttggtgggctgcatgcagagtgagcaagaagactagtaggagatgaataggaaggataacaggggaaggataatctgtgtggggcattgcaaaccatca

SEQ ID NO: 718211 - DNA, 635 bp, Homo sapiens
taacgtattttggcagcaaagtactgcattgctcacattttaccatttccattaaaccagaactctatgtataaatttggatacatttatcttctatttgttaaattatttattgcatagcacatgtcctctctgtatctgattttgttgttgttgttgttgttgttgttgttgttgttgcagataaatctgcttcactggaagattacctgttactgtgtgtttgtttattctccctttacgtttcacacaagaaccctagctcagtgtctgttctgtagtcagtacttaatatattttttggtgggttaaatggaatgtaatgggtttgagtaaaacgtctatcaagtcaatcatacaaacacttttgaagtaataaatcccagaaaaaatgcctgaatactgaacagaaggtccacaattgtataaayatcctaaccatgattatgattatttttctatagtatatggggacatgaaaaatcaaaatatctaaattattaattttggctgctttttccaaccaatctcttaattagaactagtagctaacagtctgatttgagaattactttcctctaactaatttatgttataaagggaacaacatcagtggaatgattaaatactgaaga

SEQ ID NO: 718212 - DNA, 1038 bp, Homo sapiens
tgtattcttagaaagtatgaggttactattgaaataaaaaaattagccactaggaatgctaccttttatgatgtcatgctttgtctcactaacatctttattatcttgctaaaatttttattttaagcctagcaattatttcgtttagacacatttcttttggttacggtccctgaaataaaaaaggtttaattgtaagaggaaaaaagtacctacatgtgcacagagatttaagcataaataaaaatctctatcctcatactctagttgggcacacatttcctacatctttcactatggcaacagtgctggctggctcactcaggccaaagtgacacaagtctggtatccactggtgcattttcatagccaaaatgaaattgaaagtaattattgcataacctaagaaatccctctcccacaattcctttaactacttagctaataggttttctgtctgaaacatcccaattagttataacacttcacacttcagcctggctgtggaggcttgccagtacaatgatgttagtctgtcctctgtgcaggcaaatatctccacagcaaggaatgtgctttctgaagaatgactatcccaggtaccttagaacataccaaagacaatccaaacaacagcattgcaaagtgggtctgttttatttcattttaaaagccaaagagactcagcaccacgaagctaacctgtttcctyaactgggaaatttcacttaatctctgtgacacagaagaaaataatatttagaaagtatctcaatggaagcaatgaagatccccaatatagatcatataggaaaaagcttacccacatgaccaagtttgtagtttattctgaaacttaccctatatctgcatttatactttataagcaaagtctggttgacaggatagataatgcactaaccaatagaaaacaaaaacagtatttgcttttgtattgaagattcaagattaaaaaaataaacattttaaatatgtcttttttcacctttattataattcaagagtacttcatgttca

SEQ ID NO: 718213 - DNA, 586 bp, Homo sapiens
gcaattagcaactccaagagaaacatacgattcaagaaaagcctgatgcaaatgcaaaagaaagcaaaaagtataattttaggcacctgtcaggctttaacaatgaagaatcctttgcgtgcaccagggttgtaacatttaaagcaaagaagaggaagagtgtttgtagaaaaatatatggttctgtaacgaattgtactgtgtaatcctaatcacataaaaatatgttcttaatcaaagaataatttcaattttagaaccaacttytagataaagcaagaaatatttaataatatgcaaaatatggaactaagtgaagaaggataatgagatgacagagttcttgtttatttactaattacagtaggagggaatcaagtatttactatccataggtttaaggagaggttttaaagatcaaataataagcaacagagaaaataaagactgtatacaaaactaattggagtaagagatggaagtggaagaggatgcaaataataaaattcttcatttatcaaggattcaattgatgagatttattattggtaaattaaacatctagacgtgaacacataaataaata

SEQ ID NO: 718214 - DNA, 574 bp, Homo sapiens
cgtgcttgaccaatggggaacaggaatcatgtaataaaactttctccccttttttcattgaggagatatttctgagacacattttaaaagccstctagaaatcttccaagtcaagcaacacattgactatagctgtggccaacttgaaaacatagctttgtattggctctttcacttccctaatctcagtctttttccctggcatcaaattctcaaatttcttaacaataactttgactcaggttttgcattcagggaaacccagactaagacacttacatttatctttttatgtagcttatgaaatgagttacattactttaaaatcactacctggttatatattaaaacaaacctagattttcaaaataatcagcttttttagaaacccatgtgcatagatttaaataataaagttttattctagctcaattttgccacagaatatttcataaaaagtggctatactgtgctatgtgaacagaagttgttctaagaaattcaagttaaaataattaaaatatccttttaattaaatgcttactctcttctttatccaattttatattgtttg

SEQ ID NO: 718215 - DNA, 585 bp, Homo sapiens
attaacatgtaagctccatgagatcagggatttgtcttgttcactgcttaattgccaatacttaatgaatgagaaggtgcatcaaaagacaagctgcccacagaccccctggtatgtgcaagagaagagtgggtggagataggcaagcggtgaactattatgactttagagtaattaaaagtttgagggtaaagaagcagggtggaagttgtctgccattgaggtgctagtcaaaaaatacatgtgcaaacatttgttggtagamatcctaaaagaaaaagaaatgcagaatattgtaaaggtgccacagaatgaaaagtctctgggcttaatggttttgctgagaccattttctgagactctgatgctttagcatttggattgttaatattctttatggaaaaaagccagaagcatacagacaatttatatttttaaagagactaaggtagtaagaatcaacaaggatgccctgatacacataactcactggggcagtttgttctttcctgataggtccgttttgaatcaagttcttcattttgtactgcagaattaagtcatcaaatgtagcctacttggctc

SEQ ID NO: 718216 - DNA, 1032 bp, Homo sapiens
gtttttttaaatgatgagcactgccaaattaataaaacttaaatgtaagaagtaaaggatttattttcaaaatgacctagaaaatgcgtgtgaattgacttccttctctctatactagagaagttttctataaagaaaaaagaactgaagtaattctaagactaaagacagaagaaagtcttctttttcaattgaaatattgttgcaaatatatttggaatattcagattatcccaataaatatcccacagaactctgtatttagacccagcctaaaataaattattctgaggtttcaattattttagggttggttcctctattgctgtcaaaggaaattcaattctacaagcatttattgagtattccatatagaaaacatgtgccaattcctggcaggaaagaataaccatgcaggaggggaaaggccctaaaataaaagtgtttctcaaactaagggatagagctagaattaaaaatgatttttcagactgatgyttccaaagagataattatatttatataaagtttcaagagaccattaattccacctttatagtagctaactcatcagtgacataaaaacatgaagtcatcagtatactacaaatttcaacccttactgtttgtcaagttttgtgtgaaggacttgagacatgaaaacttagatgtctccagtatttgtctgagctacattccctttccatatttctcctgtcctggaggggctgaaagtcttgaaatcaaattgctccaatgggaagttcttgcaaaggatttggaaggcaaaagaaaaacaaaaactgtccttctcctcctgaaacctatggtatagatggtagagcttggtagatccatagttttgcagaggtctcagtagtctagtggaaattactcctcttggggctgcagcaacctctgacaattggtgctcccttatctggaaaacttgagtaaaacctgagagccagggatgactttccctgaactttgcttctctatcccttacaatagtttgtaagcacttaattc

SEQ ID NO: 718217 - DNA, 621 bp, Homo sapiens
aagagaggaagtaccatttctcacacatcgacccctctcagtcttcctgccccataaatgacttaataaggtaagttggaaacttcttttacaggggaaaataaaaatatccaaaattaatctgaagtctaacaagacaatccactgaggtaattatgctatggctctactatgtggtttagcaaaaattactatttcacattttaaaagccacttatattagtagaggcatagctcattttattgtacttcactttgcagtactttgcagatgctgcattttttaaaacattgaaggtttatggcaacccatcatggagcaactctctcagtaccattttttccaacagcatgtcctcacttcatgtctgtgtcatattttggtaattctcacattttaaactttttaattattattatatctgttatggtgatctgtaatcaatgatcrttgatgttactattgtaattgttttggggtgccataactacacccatataacaaggcgtactttaaaaaaagatgtatgcactctgattactccatcagccagtggttcacatatctcttttcctctcctcaggcctccttaattgcctgaagacaacaatattgaaatc

SEQ ID NO: 718218 - DNA, 621 bp, Homo sapiens
aagagaggaagtaccatttctcacacatcgacccctctcagtcttcctgccccataaatgacttaataaggtaagttggaaacttcttttacaggggaaaataaaaatatccaaaattaatctgaagtctaacaagacaatccactgaggtaattatgctatggctctactatgtggtttagcaaaaattactatttcacattttaaaagccacttatattagtagaggcatagctcattttattgtacttcactttgcagtactttgcagatgctgcattttttaaaacattgaaggtttatggcaacccatcatggagcaactctctcagtaccattttttccaacagcatgtcctcacttcatgtctgtgtcatattttggtaattctcacattttaaactttttaattattattatatctgttatggtgatctgtaatcaatgatcattgatgttactattgtaattgttttggggtgccataactacacccatataayaaggcgtactttaaaaaaagatgtatgcactctgattactccatcagccagtggttcacatatctcttttcctctcctcaggcctccttaattgcctgaagacaacaatattgaaatc

SEQ ID NO: 718219 - DNA, 668 bp, Homo sapiens
gaaacatactcttctagttttctaagactccttccagactgttcacaacaacaaagatagcattctttatacatctctctctagttccaaactcaaccacacacaccattcagcttgagcctcacagctcccaagagaggcacagcttagtgttcttagttacaagataagggaaccaaggctcagaaaggttaagtgccttgctcgaggtcacacagttaatgcattttggcactgggattcaaacccagctctcctgaatcaaaagcaagagttcttgtggccatgccctggtgcttacctcctaagatgttcatcaccccaattccagggatgattgtttacattctggtttctgttgccatctggtttttgagcacttcaggaacaattctagtctttccrgaacttaagagtggtaggcagaagacgagtcacaagtaacagatatgctaaaagtatctcttagtaggagaaggaaattcaaacggccagtgtcacattgtcagagatcaaagtccgggcaactgacaaactgagttttcaacaaaaatccatgggaagcagtatgttaagagaaagagataatgaacagttttgttaagacatgggagtctccaagtggcagatctcattttagaaactgtttaaatacttcaagaaaaaaa

SEQ ID NO: 718220 - DNA, 668 bp, Homo sapiens
gaaacatactcttctagttttctaagactccttccagactgttcacaacaacaaagatagcattctttatacatctctctctagttccaaactcaaccacacacaccattcagcttgagcctcacagctcccaagagaggcacagcttagtgttcttagttacaagataagggaaccaaggctcagaaaggttaagtgccttgctcgaggtcacacagttaatgcattttggcactgggattcaaacccagctctcctgaatcaaaagcaagagttcttgtggccatgccctggtgcttacctcctaagatgttcatcaccccaattccagggatgattgtttacattctggtttctgttgccatctggtttttgagcacttcaggaacaattctagtctttccagaacttaagagtggtaggcagaagacgagtcacaagtaacagatatgctaaaagtatctcttagtaggagaaggaaattcaaayggccagtgtcacattgtcagagatcaaagtccgggcaactgacaaactgagttttcaacaaaaatccatgggaagcagtatgttaagagaaagagataatgaacagttttgttaagacatgggagtctccaagtggcagatctcattttagaaactgtttaaatacttcaagaaaaaaa

SEQ ID NO: 718221 - DNA, 522 bp, Homo sapiens
taaataaaataaatcagtcacagaatctgaactcaggctgcctggtgctgaatcttggctctaccacttatcatctgaatgtctgaaaggaaggtgttttacttctgttatctcacctataaaatgaaaatagaagacatttctttttcctgttctttctcgtcacttttcccygtcctttcttctctcctacccatcttccttctctgcctctctgactccttcccttctactttctacccggcatcatactcccttttttttttctttccttttagcatcctccacttgtaaatcttcccaccatggtagccaaagaggccagatatcctgtcaactgcaatatgaccttgtatgggccaacaactctgcctgcagagactttgcctctggagggcacagcacacacctgtaaagggacatgaagaatggatggtaagagcacacccacggcagtgtggtgcggtcaggaggcagcatccatcctagctgcactgccgcactcccgggtcccctgatccc

SEQ ID NO: 718222 - DNA, 599 bp, Homo sapiens
ttagaagaaaacaatataactttggttaacttagaaaagaaattgcttggatgaaattgcttggatgggccacgtgcggtggctcacacctgtaatcccagcactttgggaggccgaggtgggcggatcacaaggtcaggagatagaaaccatcctgactcacacagtgaaaccttgtctctactgaaaatacaaaaaattagccgggcgcggcagcgggcgcctgtagtcctagctactctgtaggctgaggcaggagaatggcgcgaacctccgaatgggaggtggagcttgcagtgagccgagatcgtgccactgtactccagcctggcggacagagccagactcygtctctcaaaaaaaaaaaaaagagaaaaaaaagaaagaaattgcttggatggacatatggaaactacacccaccctacacgaaggctgaggcatggtctatggatcacgggacacgggagtgcggcagtgcacctaggtatggatgctgcctcctgaccgcaccacactgtcgggggtgtgctcttaccatcctattcttcatgtccctttacaggtgtgtgctgtgccctccataggcaaagtctctgc

SEQ ID NO: 718223 - DNA, 1355 bp, Homo sapiens
  misc_feature 591, 597, 598, 599, 600, 601, 602, 603, 604, 605, 606, 607,608, 609, 610, 611, 612, 613, 614, 615, 616, 617, 618, 619,620, 621, 622, 623, 624, 625, 626, 627, 628, 629, 630, 631,632, 633, 634, 635, 636, 637, 638, 639, 640, 641, 642: n = A,T,C or G
  misc_feature 643, 644, 645, 646, 647, 648, 649, 650, 651, 652, 653, 654,655, 656, 657, 658, 659, 660, 661, 662, 663, 664, 665, 666,667, 668, 669, 670, 671, 672, 673, 674, 675, 676, 677, 678,679, 680, 681, 682, 683, 684, 685, 686, 687, 688, 689: n = A,T,C or G
  misc_feature 690, 691, 692, 693, 694, 695, 696: n = A,T,C or G
gtgagttaggggataagaaaaagagagtacctcaaaatgtttactcaccatgtttttgtctatcatagccttccgttttgctggactataataaaattggtaaagaactttggcatccataaatgtccttttgttgggagaaggactcctatcatacacctactggctaaagctcagtttgatttaaccaatgcttactgaacttttcctgtttgtaatatactttgcataacacaaagttgaagaaaaataagatgcttgtcctagaggaatttgcagtctagtgaagaagaaagacgagaacataaataacagtaacgcaaaacctgaaatgattaattggctcacaagagtcataaacaaagagttctgactgtactgagaaggcaattaatttaaatcaggtaattgaagaatacttcagaccagcattgagtcatagtctaccagaaagagaatattaacaactctctggacatttcttctgctctatgggtaatttggagctggggtacagaggattattctggttcttcgacccctgctaacagcatttgtgtgctttggagagtccagacttaaaggtagttntatgcnnnnnnnnnnnnnnnnnnnnnnnnnnnnnnnnnnnnnnnnnnnnnnnnnnnnnnnnnnnnnnnnnnnnnnnnnnnnnnnnnnnnnnnnnnnnnnnnnnnnagcgtagtgtgtttgggaaaacttagtcttttttgtaagttttaactgatgatctatgttgagggtcgtatcatgagagtcccgttaagtttagatatattaattcaacaaataattattgaacatccactaaatgccaagtattgtcttaaacaggaatgactaagacagacatgttttccactgtgaagcttagattttatgggagaaagacacagtaaacacaaatcattaaagaattaagtagtttcaactgtgttaagttctttcaggaaattaacgatgatatttaaatatgaagggaagcctgatactctctaaggagtcaataaagactcatctgaataagtgacattcaagctgagacttgaaagatatgtggrcattaattagataaaaagtttggacaatgggtgaagggaagtgggacacagggattgttctaggcacattcaaaagtcctgaaataagcagaaataagcttgcttagctcaaggatatgaaagaaagtcaatttggctggtgtgtggtagcgacagggaagatgaggaaggaatgaagttgagccagattggggaaagtttatgcagggcctgcggcctagttaaagcattttgacctttaaaagcaatgggaagtcactgagtgatttctaaaaa

SEQ ID NO: 718224 - DNA, 1134 bp, Homo sapiens
atgacatggggtgagattggagtcatatgaaattgctctgatgcttgatatcacctactcaatgttatttagtgaagaaataatattaaaaaacaaaccgcctctttccatactcatcccagacaaggaaaaactggattttaaatacatattatgtggttcaaagtaacctcagaaattggtataaacttgtcaagtgggcaaagaaatatgcttcagcccttatcacaagaagacaaagaaagaagtcagccatgaygtaactaaatatctgtgatagtctcagtggaatctatttccatagttcctgattgcagctcctttaagaaaagaaatggcaatgtgcaatttatttctatatgaaaaatagatttatttttgcttaaggataactgaatttttttctagtcatgcatgtaaagatgaaaattatactcagttaaaatgctattgatattttctatagtcattcaaactatatagaattaaaatcaatgaataatatcaggacaaacagattaaatacatataaaaatcttcattctatttctaaacctactgtggagttaaaacaacagcaagaaaaaaatttatattagttttaattttcatttttttccatttgtagatttactagaaggtatagaagatcaccgaatatttttgacaaattagtcttacattttgtgattaaggcatctgtaatattaaaaagatggttcaaaaattccattcctggtgacttaaaatgaaatcacaattactgctttgtcttcctgcttggttaaatgcagtgttcccaccacatttggattgctataataagtgaagcttaaaaaaaatgcatatacaaaaacttgcttgcagtaactttgcctgacattcatgcaaaatgcaattaaaaggtttgaattgtacaggtgctaaaaagaagtgtattacaaaacaagcaaaccataatgtcagaaaattcagtttggttattaacattttattatcttaattatgacattcaagcattgtaatcccaggtctattgctaaggagacgaggttataaaggtaggttgtcaaaatctttatcagagagtaattttaacatgtttttaaagagaatttattgtttaattataag

SEQ ID NO: 718225 - DNA, 2864 bp, Homo sapiens
cagtcatgacatatatactacattgagagaaactagctctttttttcaatttatagttatggggtttatataaacaaatttcattgatgttactttgccttgttgaacagaatagagctttaacaggagaaacaaccatcttctgaattccaaagaaccttgaattctcatgtctttctaggtgtgttcctctaaggtctagaatttgttaattgctatgatgtcttcgccaagaagactggtctgtgtggctactttcaggacaactattgtcaatcaacatctgcagagacaatgacaaaacagcctcactacatacctaggcagcttctgttctcaaaataaatgatctcagctgtttcaaaaaataaaatagtaaatacgaccatcatccaagtttccattctgtaccattccattctgtaccattccattaaatctgttgacgaattatatccatatttaaatactcttatggataaaagcagaaatgtgtcaggataatcagcaaaaatgtaaaaatcagagtgaattgataacttagttgttatattggttatggcacaatgtcatagggaaaaaatgagcttcagggtcagagagttttgtgttccaatctgaatttgaacacttacgagctctgtatctctgggaaagccatttaatttttctgaactttagaatatcttctatacaattaagataaaaatgcttattaatcagattttcattgattaaataaaacatggaaaaatacattatacagtgacttgcagatgctctagacaaactgagttgtcattttatgtcctttctatcctacatcagataactgttttgaatgatatttttaaatgaaagttattagagttttttttcttagcaacatttatacattatagtgtttatatctatctaccatcaaaatgaatttgaggtaatttaaatcattagaaaaacaggaaacatttattaaaaaatacttaaattaacatacagaataaatctctgcaggaagataagaaaacaactggcatgaagtaaaaactgaagttcttcatcatagctttgaaagtcatgcacaacatacagcaaaacctacctttctgtgcttatttcacactttgtcctaacacacatcttctgctccaatcaaagcagaccatttgataagccctacatatctcatttgcttttcttttctacctgaaatgctttctcttcctaccccaaaacttgaacgaaaactcagccaaaatgttcatgcaaaacgctcatctcttttatacagattatagagttccagacctgaatgtttcttttcctcctttgcctccccttaattctgtcttcaggaaccatcaatggttattgtcctatccaccttgtttgttcattggccttagcttctctccctacaacaagaactctggactgtccccctgcctaaaggatggattgaaccatttatctctctctcttctgcagcatccagtacagaagcttccttatttttattattcactttatatttgttaaattgtagtaaatgggaatttaatactaaactgttttctgagcttcctgacaacaaagaaaaaaaaaaggaattatagaacttggagataagttgttaaaaaaaaggaaaaaatgataaaagaaattaaagaatgtacttttagttgtccactgaataaaacataataaggtcacttgaaaagcctttttttttttttgcttctgatttctaggataaatttatctcatagatgttgggcaagggtgttctggataaaagaagagtgtgagccaaaatacagaggcaggaagggagaggatgagcaaggtttagctggagggtctgggtggaagaaaggtcagaggcctagactatgactctaggttttgactgagaaacactctttgcacatagcaactcctttattcctggaaaaataattcaagcatgctttttagttgccacttaatatatttacattttaattgtttccattttcagtgggtgttactttagacaatataacwacctcagtttctatcaatgaaaataaaaatttaggaaattgtcccctattttaacatttaaatattacaaaagtctcatattgtctaatgaattttaaattttctatagttttagattgtatcagacatggctaataagttttaacaagtaatcattgagtaccaactatataccaaatgccatttcgagtgctataaatgtgacagtgtctctgcccctcatgcagcttaagttccagtgagggagatagacatttacccaaccaacaaatcagtatatgaaaaaaaattttatctcatagattattatataaagctgtgtacatgataatagacaataggtaaaaacatagttcaccaaaaaattgtagaaatctttataaagatgaattcttttttattatacataattaaagttatggaccaaaccaattttaatttcaggaaaatgaatggcatcattcaacaatgtttttttctaattgtatttcttaacataggtaagagcttggagaaaatgtttaagtaggtggttagcttgtctctttaaatcatcccattttcaagtaaagttttgacaagacctggttacttgtagtcaatttgtgaagtaactctgacaagtgcccaaagcgcatacatctgtgttgctgattaaagagcactacaggcatcttacataccagatgtgcagatggcagagtttataaaatcttctggaatctgaggcgcctgttttgccttcttactcatatagaaaaccatataattttcagaaagcataataggatataggagaataggtatgtgtctgtgtg

SEQ ID NO: 718226 - DNA, 674 bp, Homo sapiens
tatgggaggtgaggatttagcttacctatagttacataccctccttccatttcccctttcctaacacattattgtgattttaccataattcttggtaagataatattcagtgtttataatactaggagtatgtgaaagttacttgtaattaagccatagaaggggattatgattccatttcctgcaytgagcaacttttggttttccttggaattcataactgtctctctttgcttagttttatatcattaatcctaaacctctctgctagaagtgtcacaccataaagtgatataacaattgctatatttccttctcttttctcctctccttccctccttccttttctctctttctctctttctttctttctctttctctcttttcttctttttttccttctctttctctctctgtcagcactcctggtgctctctcttacttcaatctggactggttgctctctcaaccagcctgctgtatagttttcttttttcaagacagagtcttactctgtcacccaggctggagtgcagtggcacaatctcggctcactacaacctctgcctcctgggttcaagcaaatctcctgcctcagcctcccaagtagctggcattacaggcgcctgccaccacatccggtaagttttgtatttttagtagagatggggttt

SEQ ID NO: 718227 - DNA, 2551 bp, Homo sapiens
attccgtgggcgtaggaccctccgagccaggtgtgggatatagtctggtggtgcgccgttttttaagccggtctgaaaagcgcaatattcgggtgggagtgacctgattttccaggtgcgtccgtcacccctttatttgactcggaaagggaactccctgaccccttgcgcttcccaggtgaggcaatgcctcgccctgctttggctcgcgcacggtgcgcgcacccgctgacctgcgcccactgtctggcactccctagtgagatgaacctggtacctcagatggaaatgcagaaatcaccagtcttctgcgtcgctcacgctgggagctgtagaccggagctgttcctattcggccatcttggctcctcccctctcagtccccaatagccattttaagtagttatgaagaaactcgcttgtaatgaaattgcaaaagaaatgaaattacaaaagaaaacctggtgatattattgaaaaataaaaaggtgaatgacgattcaggatataaggattgtatgtactgatttcaaatatttgaaagcacttccaaaatctttatgttgaaaaagcttccaaaatctttatgttgtggctataaatttattggtttcacttgaagtaatatatcagaaagatttattttgatgccaaagagaaactgtaaaaacggtactgataaaaatctaaaggaaaccagaaagcttagtttctttttaaactatttgactgtaaataaaaaccagttcagcaaatatcctttctaactctctgcttctccaccccacaatttgttcggtatctgaaggctttggataagcctgtaatgtgtaatgtattcttctgtaacactatcccttacttttctctaatccctcctgtttaaaaagttagcaagaaataagcaagcaaacaaacctacagctagcgaagaaactatggaaaatgacagatattcacaatgggttttttgctagttgcaaaagaactagcaaaactccacttgggaagttcaaagagggtctattgaccataatattttttttaacattaagtgaagtttaaactataatatcctttttcaagggcctcatttctaaaacacttggcaattacaaatctgaacaaggtatatactctttagttgccaatgagcaaaagtagtaaatctattatctaggtggaatggatcattctataaaagttagaagtgaagcccttacattcttacatttaaggtatggaaaaaggaaacctcattttacagaggtgcggaagggaactataaacatgaaaatcagtttttaagtttttgcaaatagtttaaattcagaactaaagccttccctttatttttggacagttattttgctgctgcttctggaaatatagggtcatcaatgtcctctaatgctgagccagcaatcctaattgaatacagacattaatcaacaagaatctataaagatactgtgaacctagtaatatatggagatttgtgcttctctaaatctgatgtgcacactaaccacccaggaagagagttaaaatgtggattctaatttggtaggtctgggtgggttctaagatcttggagttctaacaaactcccacctaatgcaatgcaactgctgtaaggactagtctttgacaaacacaattccagggttacaaaaggcaaagtggcatgcctttataaaagtgaaatcaataattgactgaggcaaaccatatggctcttgccagatagagatggagcagctacagatgagctctagctggctactggtgttggggcccagtgccgcctgaggatgaaatgataactagttaaaagtatctagttcagtggctgattaccacataggtgcttgatcattttttccccttttttctataaaataattaccaaaggaaacttagcattttatacggagaaaatcaaatgttgatcaagagagtggggcaatgggtataatgcagtatgaagcagacattgtatctgaaatgtgtttcttttggaacaagactaaccttatttaaccaaaaaagcttgaaagagaaactttctataagagaagtaacaggaaagtctacagaggggtggtggggaggagctagaactggactatgaagctaaggaaaagagacgagaaaggaaggttgatggagcaacgtaacgtgcctgtatggggagaaagtccttgagaaattgctagagatgggaatgcccaaaagacttcagagacaataaactttcagttctaagttatttgctgggttatagaccaagtaacaaattctctctattgccccaaggcaatgtgggctggacacatacagtcttgtgtagaaagtagtttggtgctggaggatttgaggtggtgccagcctgatggtgatgtgctgctgggaaagaacagcatgcacagaaggcaacacarggatagaccatggggaattcaccaggaggtcattagtgaccagggaagcttaacccctaaacaatcaacattcctcagagttattaggagagacaataggtttccca

SEQ ID NO: 718228 - DNA, 1340 bp, Homo sapiens
gtgtaatttattaattagggatcatgagttgcattgtatagattgatattggcttaacactgaatttttaggggaaaaaaacttgtcacgaatattttatgctttgttcattcagatagtagatgataaaggagagaagaattttaagaagtctatgctgataacaaaggcagacatttactctgaagccaaagctagatgtcatcactgtatttgatcaatcaatgatttttaggttttatatctatacatgtgagctagaaatgctatgatccatattttctttggtaaaccttttttcaagcaagtcataaaaagcaagattgaaaaggttgaggtttcttagaaaaataaccgctattttatagtggaacaaattctatcttcatctctcactatcctacatgctgctggattccaaaggagaagctgggattactctttctcttctataacttatgggagcatgttcaaacacttggccccagaatacaaagctcacaatctacttttctggactcatctccttgttccttcttttattccatattctaaacgtaccaacataaatgaccattccttaaagctgcccagtgtgttccatgtatttgctgcatgtcctgatcagccttccttttctccattagcctgaaacatctagcctgtctcttaaaatcagctccttggcacctatctgcaattattgttcttcaaagaaccctcaggattttgtatttggttttgttgtagtacttctatgattctttaaatatttgattacaagtatctttcccactggtctatgacttctttaaaggtatgaacaatgtattattcttacacattattttcatgcttagtgtataatagatgctcaaaaaatatctgatgattacaatgcataacagggaaaaataagcttgaaaggtaaaaactaaacaaaactacaagcccttcacagtatatctccagctaatcccactggattttagtgactaaacgaagagggaaagatgttgaggggtcctacaaaggtggtgcgaggaattaagagttaatttataatctgtagaaccaattgttgcttcagagaagtattcaaacagattctccttgtttcaattaaattcacaatatacccacccaaaacataaaaggccatagtctcttcctttgttctgattctttgaaacatcaggatycaatgggtccaccaactgaatttggggtggacttggaatatattttattgtcagtgattggggcagacattcccgttcccaatgcatttagaaaggcaagatcaagttgaaaagtagtaattggttggcaatttacaa

SEQ ID NO: 718229 - DNA, 3098 bp, Homo sapiens
agcacaggctaaaatagcacaaacctctgccccctcatctccctcctgcaaaaataataaatacataaaccctattccacctacactttttttaatctctagagttttatctttttgaacttaaataattctagggtaactaaaattatagggcaaaaatggcaaatatacaatcactctcctctttcaaacaagggaatattattcatatatcatggcccttttcccctctaagctcagatacagcatcagaatcattctgaacgtattgttccaggcagccatttccagtgattgaaattagaattcagaatgaaacctctttgcatctttcttttaggagtcatccattagagcatagtaattagaattcagattctggaacttgattgtctaggctcacattctagttctaccacttactaactgtatgaatttaaataagtaagttaatctctctgtgttttcagctctaatttggggatagttatgggtatctacttcagaaggctttgcaagaattaaatgcgttgaaatacatgtaatacttagactagaacccggaacatggtaagcattatatgcctagctgttattactgttattactatacagatgaagttttgacaatcattttttgcaagaaacaaagcgataggaggctgaaggtattgggcacctaaacagaaagaacaaaagaaaatggaatttaatgtcctgcttatagacatgattaaaggatagtactggaggagtaaactagaccatctttagaagatttcttttgtccctctgaattctacatttctgaaaagaaaaaagtaaaggtatatagggactcttaaccaagcatctcaaatatccaacaacagtatttggttaagtataaactctgacctacccataccgtgaaatactgaatatccccattaaaatgcatgtcttagaacacctggtaacttaggaaatatctcataatatattaagttaaacaataaaactttaaatcatatatataatatattcaggttttataaattacatacaaatattaacatagcacatgtgaaaaatattctacatatatgcatggtacatatattaccctattatatccattaatgtaaaatatataagtaaatctgtagatatgtaaaatatatccattctattcatagaaaacatgggcaaacatctaccaaaatgttaacgtggctgtatttggatgataagattayaggtggttgttaattttcatacattcatttatttatttcatacattcatttatttatcaaacttctaaataagcatatgttacttttatttggatttattttattttaactatatagtggtcaaaatacaaaatatttgttcgataaagctaccattttttacttggacataacagattgttaattcaaaagatataacactattagtgaagacacacaatacaatttttaaaaacaaggtatttaaacattcacaacatcctgctctgcaaaaaatcctaagttaattcttttctatgtaatttaaataaaatttattttccagaataattatgtctagcctacattttcttgtatcaaacaaagaaaaatttttaaatttcaacttttattttagatacaggggtacatgtgcaggtttgttacatgggcatactgcatgatgctgaggtttggggtacagatcccatcacccagatagggagcatagtatccttcccaaagcctatcagtcatgtgcttgaacttcaaacagtgcttcccaattttcaacctaaagtctatttataacatcagatattaacgtttctaaaacctggatatctcactatgccttaaccctgggcccctagaagacgaagcctaatgaaagttaacctgctactgctgactcttggctcccaggacagcaagactgagagcaaaatgggaagggagcagcgaaggagagaaagcaaagacaaggcagtgcattacagagcagctgtagcttcacgagaagacctagtctgctgcctggtcaacggacatctctgcaaaggctatgtggaagcagtgggcctcagaagacgtgttcgagggaggatgagagagaggttgatgctctggctcttttccatttcctgtcaagcctgcggcacagagcatgacctccctggtgcttccagattgtgtccccagtcccttggggccgctgcaggggaagccagatcgcctgtcccgcggcaagtccttcctctgaacccagacatggcggcaggagccaaagcctttgtgagatgctccatcagatgcggatgactgaggaggtcttcacccaggacaggctgagatggcaggtgggggcagcgagcaagtcgcccaggcctgaggggcaatggggcgaagcgagcctggggagaagaatccgtgactatgtaatacaccactaggcctagtcctctggtttcactgcaacttcctcgtttcctacagtgcttcctgttaagaatgaaactactgcttcttgtatgagggtgtcaaggaaactgctttgaacgaagctgactttgcctgcttgctccaggcgtgacttggagagtcatcttctctgggatttctccctggaatttcagtttattagtcgccaataaatttttctttattaaattcctcttcaaatattcagagtgatgttgccactgaaaccaatgaaataatgcaagaaaaaataataataataacacctcccactgtagtgaacttccataccataactgatatttacagcctgatcaacaggtatatgttttgtaagcaaggagaaagatgtgaaaggaagaagtgtaagctgtataagccttctactattttcttcttattcacaaggaatcactacaaaattactttacaatttggttttcttaactatacatcatagacttctcttcaggcaaaaaggtatagctctgcctcattcaaaaatagctttcaggttaatcctgagacactgtcttttggtgatggcaatttttatttttctatgtaaaattatttatcctgtccattaaaattgtctttagattcttttcttaaggaaaa

SEQ ID NO: 718230 - DNA, 3098 bp, Homo sapiens
agcacaggctaaaatagcacaaacctctgccccctcatctccctcctgcaaaaataataaatacataaaccctattccacctacactttttttaatctctagagttttatctttttgaacttaaataattctagggtaactaaaattatagggcaaaaatggcaaatatacaatcactctcctctttcaaacaagggaatattattcatatatcatggcccttttcccctctaagctcagatacagcatcagaatcattctgaacgtattgttccaggcagccatttccagtgattgaaattagaattcagaatgaaacctctttgcatctttcttttaggagtcatccattagagcatagtaattagaattcagattctggaacttgattgtctaggctcacattctagttctaccacttactaactgtatgaatttaaataagtaagttaatctctctgtgttttcagctctaatttggggatagttatgggtatctacttcagaaggctttgcaagaattaaatgcgttgaaatacatgtaatacttagactagaacccggaacatggtaagcattatatgcctagctgttattactgttattactatacagatgaagttttgacaatcattttttgcaagaaacaaagcgataggaggctgaaggtattgggcacctaaacagaaagaacaaaagaaaatggaatttaatgtcctgcttatagacatgattaaaggatagtactggaggagtaaactagaccatctttagaagatttcttttgtccctctgaattctacatttctgaaaagaaaaaagtaaaggtatatagggactcttaaccaagcatctcaaatatccaacaacagtatttggttaagtataaactctgacctacccataccgtgaaatactgaatatccccattaaaatgcatgtcttagaacacctggtaacttaggaaatatctcataatatattaagttaaacaataaaactttaaatcatatatataatatattcaggttttataaattacatacaaatattaacatagcacatgtgaaaaatattctacatatatgcatggtacatatattaccctattatatccattaatgtaaaatatataagtaaatctgtagatatgtaaaatatatccattctattcatagaaaacatgggcaaacatctaccaaaatgttaacgtggctgtatttggatgataagattataggtggttgttaattttcatacattcatttatttatttcatacattcatttatttatcaaacttctaaataagcatatgttacttttatttggatttattttattttaactatatagtggtcaaaatacaaaatatttgttcgataaagctaccattttttacttggacataacagattgttaattcaaaagatataacactattagtgragacacacaatacaatttttaaaaacaaggtatttaaacattcacaacatcctgctctgcaaaaaatcctaagttaattcttttctatgtaatttaaataaaatttattttccagaataattatgtctagcctacattttcttgtatcaaacaaagaaaaatttttaaatttcaacttttattttagatacaggggtacatgtgcaggtttgttacatgggcatactgcatgatgctgaggtttggggtacagatcccatcacccagatagggagcatagtatccttcccaaagcctatcagtcatgtgcttgaacttcaaacagtgcttcccaattttcaacctaaagtctatttataacatcagatattaacgtttctaaaacctggatatctcactatgccttaaccctgggcccctagaagacgaagcctaatgaaagttaacctgctactgctgactcttggctcccaggacagcaagactgagagcaaaatgggaagggagcagcgaaggagagaaagcaaagacaaggcagtgcattacagagcagctgtagcttcacgagaagacctagtctgctgcctggtcaacggacatctctgcaaaggctatgtggaagcagtgggcctcagaagacgtgttcgagggaggatgagagagaggttgatgctctggctcttttccatttcctgtcaagcctgcggcacagagcatgacctccctggtgcttccagattgtgtccccagtcccttggggccgctgcaggggaagccagatcgcctgtcccgcggcaagtccttcctctgaacccagacatggcggcaggagccaaagcctttgtgagatgctccatcagatgcggatgactgaggaggtcttcacccaggacaggctgagatggcaggtgggggcagcgagcaagtcgcccaggcctgaggggcaatggggcgaagcgagcctggggagaagaatccgtgactatgtaatacaccactaggcctagtcctctggtttcactgcaacttcctcgtttcctacagtgcttcctgttaagaatgaaactactgcttcttgtatgagggtgtcaaggaaactgctttgaacgaagctgactttgcctgcttgctccaggcgtgacttggagagtcatcttctctgggatttctccctggaatttcagtttattagtcgccaataaatttttctttattaaattcctcttcaaatattcagagtgatgttgccactgaaaccaatgaaataatgcaagaaaaaataataataataacacctcccactgtagtgaacttccataccataactgatatttacagcctgatcaacaggtatatgttttgtaagcaaggagaaagatgtgaaaggaagaagtgtaagctgtataagccttctactattttcttcttattcacaaggaatcactacaaaattactttacaatttggttttcttaactatacatcatagacttctcttcaggcaaaaaggtatagctctgcctcattcaaaaatagctttcaggttaatcctgagacactgtcttttggtgatggcaatttttatttttctatgtaaaattatttatcctgtccattaaaattgtctttagattcttttcttaaggaaaa

SEQ ID NO: 718231 - DNA, 778 bp, Homo sapiens
gataaacaaagtccaaatgaggcaaagagcttcatgcagctacttttttatataaacccaagaaggtactataagagcaaatacacaatgatgcactttaaaagctgagggtccacaattaattagtaacactgataattcctttctgtcttcatgacttcatagaatcaaaaggaatggagtttgaaaaaaaaaaagcctttttatctaaactgtctcttttgtttgatcatttaaaaaactattttcagtttttaggtaaaagaccatgtcactgttaagcaaaagtcttataagaaaaaaacaaggggtgagaagatactttttaaaatatatgtattatcttagcttccctaaaacgtaagtctcaaacagcattgaaaacaacagaagctcattatactgttgttttaatgacagcataaaaattgtaaactacctaaatgccatcaataggggatcacattaatgaaatgtggaatagtcatcaggaaacrcaatgaagcagttgaaacaaagctaaatccacttatattaacatggatccaaaatttgatgttgaagggaaaatgcaagatagaaaatacgtgcacatgatattacttttaaaaatataaaatattactacctattacttatacataaaaatggattggaagaatataaacgaactcatcttagtgattactctggggaagggagaagggaatgagagatgacagtgtagggggtgtggtgaagattaaagtagacttagcttatatttatggttagaaaa

SEQ ID NO: 718232 - DNA, 1394 bp, Homo sapiens
cttataaatttaaatatagccagatgcggtggctcacgcctgtaatcccaacattttggaaggccaagacgggaggatcatttgagcctcaggagtttgagaccagcctgggcaacaaaaaggagatcctgtctctatttaaaataaataaataaaatgaatttaagtatatatttatgatattaaatatatatatatattttgtaacaacaacaactaacccatctgcagacttgtgcagattacaggagatgattaagtgacatatagtgcctggaatgtcgtggatgttcagcaggtattggttgaattgtatgtgtattattttgtcacaagacagcctcacaattgagtgatagtatggtttaaagagcaaaccatggggttgtgaagatggtgagacagggaaaactgatggttagtggaacattcctggaggaaggctctcaggcagtggtggtagatattcctccccttgggtggagaaaagtgagagtttagactccctttggtctgtttgcctggggcattctatgttgcctagtgatctctgacatttctaaagtcttttggtctgcaatgtggaaaaccagtgcttcatctgaatggagtctgtcctcagcgcccccacccctcaccccagacctttaggtctccgtctagctttagccctatccagccagctttgacaagggagggggcasaggcattaggagatactgcttagcacattgttgatgtgatgctttagttgctactggtttgtattttgaaataacattaaaaccaataggatgtgaaacttgggttgtaaaattaattatggctgatgagcagaaggatgcattttataattattataatctgagggttacaagagagaactctcatttagggatggtttgtggggtacagctcctttaatctagcaacaccttgttataagatttctatgttaaacagagcgataaattcttcatttaaagtgagaaatgtagctgacaaatggagcagaatctctaattcatttgctcggtgcatcctctccctttgagcagccagttgcagaagtgaggacaagaaacccagcaaagaaggaagtcagtcttgagggaagcttccatccaggcccaggtgaggccgatgaaacacacctgtccctcatagaagcaccaagtctttcgtaactaaggtgccgtgttattgctcttcagacacctctttccaagtccccacctgcttttgtgaaaaagtctttattcactgtatatacacagttgtccattttgtctttcataattataatcacatccattcataggcttcttaaataatactgtaaacaccctgacgggtaggtttgtgcatttttcccccaatactccttttttttt

SEQ ID NO: 718233 - DNA, 989 bp, Homo sapiens
taaacacatatatcaactgaggagctaagcaagaagtgtagttatgcaaccaacatgtaagacacccatccagtggcctcctctgaaagctacaccagaaagacttactctttctgaagagcaatcttggtcagataattctttgtgggcgttatgtgaaccaacatttcagagaaaccatacaatggcagggcactatagttgaaagtgaaattgtattttccttcttactattcttgcatcagaaatggagaaaaggataagagtactgctcctttccagaataagaagaaaattagcctatttcagaaccaggactggtaacatttggaaagctaatatagggaagggagagagaaaatgaactttaatattcccatcctacacgtcaacattatgccatgacttacatgcatgacctctaagcctcacagggagttgacccggtaagcattattgtcttctgctgtaagataaggaaactagggatggaagaggccaagtaattgcacattattaagtagatgttatttgagtccgaagccacacyctttccaggtgctctcctttttgggataccctaacatgtttaatccagtttagaaattccaaatttaattatatattcacaatttttactgttggctgttcatatgtaaccttgtagtattgctatattatcaacaacatatagaagtgctcctgatcactgcataaatatgcagcaccatgcccagtacgtatagatgctcaaatatactaactattctcctagaatcagtgttccccaacctttctgtcaccagggaccggttttatggaagacaatggaatggtatggggttggagggcacagatggttttgggctgaaactgttcaacctcagatcatcaggcgttagattctcataagaagcatgcaatgtgtatcccacatgtgcagttcatgataggggtcatgatcctatgagattctaatgctgccactg

SEQ ID NO: 718234 - DNA, 583 bp, Homo sapiens
tgtgtttttgtattataaccctttttggtatctatttcaggcttgtttatattatatacatatgtagaatataaagttcaaaacatgctctagtgatgtaaccaaccaattaaaggaaataaaatatttttaaggggaatataagtttttttcctggttaaaaattatttatttattttggtatatgaataagttctttcgtggtgatttctgagattttggtgcagccatcacctgagcagtgtacactgcacccagtgtgtactcttttatctttcactccccttccaccctttcccctgaatctccaaagtgcattgtgtcattcttatgcctttgtgtcctcatagcttagctcccacttatgagtgagaacatatgatgtttagttttccattcctgagttacttcgcttagaataatagtctccaatttcatccaggttgctgmaaatgccattatttcattttttatgtctgtatggtattccatgttacatatatgccacattttctttatccactcatagattgatgggcatttgggcttgttccatagttttgcagttacaaattgtgctgct

SEQ ID NO: 718235 - DNA, 626 bp, Homo sapiens
  misc_feature 406: n = A,T,C or G
aatgctgtagacgtaaagagagagaagatgatggaaggcatcatgatggagatgatgtatgagttacagtgtcgaaggattggaagacttatactcagatgagaaaatagaaagtattttaaagagattgttcacaagttagtttgggggaagaaggcaagtgagcacgcctgtttgtagaatgaagaatgaagctagaaaggtaaactgaaaccaaagtattgatacaggagttaagaagaaattacttgggcagataatgaggctacataagtcctcggtaaggttttctttttaatgaaaagcagtgcccagtcattttcctttctaacataaaaagagccaactatatgctacctccaaagaatcatttaactagtaataacatacagagactgaaaatganagaatggaagaagacattccatggaaagatggaaaccagaaaaagagtagaaatagttatatcagataagatacactttaaatgaaaactataaaaaragacaaaaaagatcattgcataatgacaaaggagtcaactcagtaagagattaacactcatgtgtatgcacccaacattggagcacctaaatatataaagcaaatattaataaaaccaaagg

SEQ ID NO: 718236 - DNA, 626 bp, Homo sapiens
  misc_feature 406: n = A,T,C or G
aatgctgtagacgtaaagagagagaagatgatggaaggcatcatgatggagatgatgtatgagttacagtgtcgaaggattggaagacttatactcagatgagaaaatagaaagtattttaaagagattgttcacaagttagtttgggggaagaaggcaagtgagcacgcctgtttgtagaatgaagaatgaagctagaaaggtaaactgaaaccaaagtattgatacaggagttaagaagaaattacttgggcagataatgaggctacataagtcctcggtaaggttttctttttaatgaaaagcagtgcccagtcattttcctttctaacataaaaagagccaactatatgctacctccaaagaatcatttaactagtaataacatacagagactgaaaatganagaatggaagaagacattccatggaaagatggaaaccagaaaaagagtagaaatagttatatcagataagatacactttaaatgaaaactataaaaagaracaaaaaagatcattgcataatgacaaaggagtcaactcagtaagagattaacactcatgtgtatgcacccaacattggagcacctaaatatataaagcaaatattaataaaaccaaagg

SEQ ID NO: 718237 - DNA, 2247 bp, Homo sapiens
ctccctgctctcctctggggcattccaccccatgcccatgacagagccagttgcctctgaatcagggccctgttgttttggcagaacagggaggggacagcttgtggattggggtctgggatttctgacatcaggaggcttcctggtcgaggctggtgagccggagcagctcacgggggaaggaaagggaagccggttggggccagacccccactgtgcttcttgctcttagctcttagcatgcggctgtggccattctggctgactgcctgggagcagggcttctctttaggcagaataaagccccagctggcctggggtgggttgaaggttccaagatgcctccttatagctgaatcaatccttagtttccctgcctgaaactatgcctcacattccaccattagaatcagtcctgtgggttaaagagttgcttatggaaggggccttaaacacagagatagattacttgaacgagaggccctggaatcatttggctcacatcacgtcattcattcacytccacaaagcctgctggggatgccaggctctgtgcaggactgggctgcagaggtcagcacgaggagggctgtgctgcgaggatttgaagggctaactggtcatccaccttccccatggcctgcgagtcgcacagtgcagctggcaggggtggcacagttctgacaacccgattcctgtcctgtcctacaaaccacacctctgcccagccagtgggggcccggatggatagcagaggggtcacagagctgaggggaggggagaggcctccagttctccctcatttcccctttggggcagtggcgctgccatcccccttctgggagatgtgggatgtgggtgatgaggcatctaaacagctcaggaattgaaaccagactccacacagccattcacaattctagagcgctcctgagcacctgggctgggtgggccctgcagagacaaaggtgaatggagatgaaggaagtgctggtgggaacacagggaaggttgggagctgagaggaaggtgggagggagctcttggcctggctctttttgctgaaccccaaggggctcgggcctgagtccccaagcccttttcctatgggagctgaccctcagagggccaagagcaggaaccagggactctggcaatgaccctgaccctgggaaacaaaggacaaggttgttctctcgatttaccctttattctggtgtttgggttttgttctattttcttagttttggaagaataaaaagaaactcaatgaaaaataattgggggtttggtaaatcacagcagttctcttcggatccggttgttgttttgtggtttgtggttctttctggcttgggccctggatgcagagggaaggattgaagttggaaaagcacgaaggtcctgcttgttaatattatactaagaagagggccgggcaaagtggctgacacctgtattcccagtactttgggaggctgaggctggaggatcgcttgagctcaggagttcgagaccagcctgggcaagcgacatagtgagatgtcatctctgcaaaaaaaaaaaaaaaaaaaaaattatgtgggcatgatggcgcattcctgtagtcccagctgttcaggaggctgaggtaggaggatcgcttgagcctgagaggttgaggctgcagtgagtcgtgattgcaccactgcactccagcctaggcaacagaatgagaccctgtctcaaaaaaaaaagaaaaaaaagggacttagaagtggccacaaggcaggttcctggagttcctgcacaaaagccctagataacagagaggtcccagctgggatgtgtggggactcccccatcccccttaccctgactgttggttggggaaaggggtagtctgcagctgtcccccaccagctccccttacatccccattcactggaaagaatgttctggaaaacactgttggcctgagagctgttgctatgtggaggtgacccagtcgctctcatccctgcccctcagggctctcattcctccatgcctggctctgtcctcccctggaaccaaggaacctagtggagccagagaagaggagagagactgggagagggtggtggggaagggagaaggaaaggaaagggggaagaggcccgtctgggggtggggcccacactggcttggactcacagtcatcccgatgatttcacctggggaaggatgcccctaactgacccaggcttgagctctcctggctatttt

SEQ ID NO: 718238 - DNA, 2247 bp, Homo sapiens
ctccctgctctcctctggggcattccaccccatgcccatgacagagccagttgcctctgaatcagggccctgttgttttggcagaacagggaggggacagcttgtggattggggtctgggatttctgacatcaggaggcttcctggtcgaggctggtgagccggagcagctcacgggggaaggaaagggaagccggttggggccagacccccactgtgcttcttgctcttagctcttagcatgcggctgtggccattctggctgactgcctgggagcagggcttctctttaggcagaataaagccccagctggcctggggtgggttgaaggttccaagatgcctccttatagctgaatcaatccttagtttccctgcctgaaactatgcctcacattccaccattagaatcagtcctgtgggttaaagagttgcttatggaaggggccttaaacacagagatagattacttgaacgagaggccctggaatcatttggctcacatcacgtcattcattcacctccacaaagcctgctggggatgccaggctctgtgcaggactgggctgyagaggtcagcacgaggagggctgtgctgcgaggatttgaagggctaactggtcatccaccttccccatggcctgcgagtcgcacagtgcagctggcaggggtggcacagttctgacaacccgattcctgtcctgtcctacaaaccacacctctgcccagccagtgggggcccggatggatagcagaggggtcacagagctgaggggaggggagaggcctccagttctccctcatttcccctttggggcagtggcgctgccatcccccttctgggagatgtgggatgtgggtgatgaggcatctaaacagctcaggaattgaaaccagactccacacagccattcacaattctagagcgctcctgagcacctgggctgggtgggccctgcagagacaaaggtgaatggagatgaaggaagtgctggtgggaacacagggaaggttgggagctgagaggaaggtgggagggagctcttggcctggctctttttgctgaaccccaaggggctcgggcctgagtccccaagcccttttcctatgggagctgaccctcagagggccaagagcaggaaccagggactctggcaatgaccctgaccctgggaaacaaaggacaaggttgttctctcgatttaccctttattctggtgtttgggttttgttctattttcttagttttggaagaataaaaagaaactcaatgaaaaataattgggggtttggtaaatcacagcagttctcttcggatccggttgttgttttgtggtttgtggttctttctggcttgggccctggatgcagagggaaggattgaagttggaaaagcacgaaggtcctgcttgttaatattatactaagaagagggccgggcaaagtggctgacacctgtattcccagtactttgggaggctgaggctggaggatcgcttgagctcaggagttcgagaccagcctgggcaagcgacatagtgagatgtcatctctgcaaaaaaaaaaaaaaaaaaaaaattatgtgggcatgatggcgcattcctgtagtcccagctgttcaggaggctgaggtaggaggatcgcttgagcctgagaggttgaggctgcagtgagtcgtgattgcaccactgcactccagcctaggcaacagaatgagaccctgtctcaaaaaaaaaagaaaaaaaagggacttagaagtggccacaaggcaggttcctggagttcctgcacaaaagccctagataacagagaggtcccagctgggatgtgtggggactcccccatcccccttaccctgactgttggttggggaaaggggtagtctgcagctgtcccccaccagctccccttacatccccattcactggaaagaatgttctggaaaacactgttggcctgagagctgttgctatgtggaggtgacccagtcgctctcatccctgcccctcagggctctcattcctccatgcctggctctgtcctcccctggaaccaaggaacctagtggagccagagaagaggagagagactgggagagggtggtggggaagggagaaggaaaggaaagggggaagaggcccgtctgggggtggggcccacactggcttggactcacagtcatcccgatgatttcacctggggaaggatgcccctaactgacccaggcttgagctctcctggctatttt

SEQ ID NO: 718239 - DNA, 2247 bp, Homo sapiens
ctccctgctctcctctggggcattccaccccatgcccatgacagagccagttgcctctgaatcagggccctgttgttttggcagaacagggaggggacagcttgtggattggggtctgggatttctgacatcaggaggcttcctggtcgaggctggtgagccggagcagctcacgggggaaggaaagggaagccggttggggccagacccccactgtgcttcttgctcttagctcttagcatgcggctgtggccattctggctgactgcctgggagcagggcttctctttaggcagaataaagccccagctggcctggggtgggttgaaggttccaagatgcctccttatagctgaatcaatccttagtttccctgcctgaaactatgcctcacattccaccattagaatcagtcctgtgggttaaagagttgcttatggaaggggccttaaacacagagatagattacttgaacgagaggccctggaatcatttggctcacatcacgtcattcattcacctccacaaagcctgctggggatgccaggctctgtgcaggactgggctgcagaggtcagcacgaggagggctgtgctgcgaggatttgaagggctaactggtcatccaccttccccatggcctgcgagtcgyacagtgcagctggcaggggtggcacagttctgacaacccgattcctgtcctgtcctacaaaccacacctctgcccagccagtgggggcccggatggatagcagaggggtcacagagctgaggggaggggagaggcctccagttctccctcatttcccctttggggcagtggcgctgccatcccccttctgggagatgtgggatgtgggtgatgaggcatctaaacagctcaggaattgaaaccagactccacacagccattcacaattctagagcgctcctgagcacctgggctgggtgggccctgcagagacaaaggtgaatggagatgaaggaagtgctggtgggaacacagggaaggttgggagctgagaggaaggtgggagggagctcttggcctggctctttttgctgaaccccaaggggctcgggcctgagtccccaagcccttttcctatgggagctgaccctcagagggccaagagcaggaaccagggactctggcaatgaccctgaccctgggaaacaaaggacaaggttgttctctcgatttaccctttattctggtgtttgggttttgttctattttcttagttttggaagaataaaaagaaactcaatgaaaaataattgggggtttggtaaatcacagcagttctcttcggatccggttgttgttttgtggtttgtggttctttctggcttgggccctggatgcagagggaaggattgaagttggaaaagcacgaaggtcctgcttgttaatattatactaagaagagggccgggcaaagtggctgacacctgtattcccagtactttgggaggctgaggctggaggatcgcttgagctcaggagttcgagaccagcctgggcaagcgacatagtgagatgtcatctctgcaaaaaaaaaaaaaaaaaaaaaattatgtgggcatgatggcgcattcctgtagtcccagctgttcaggaggctgaggtaggaggatcgcttgagcctgagaggttgaggctgcagtgagtcgtgattgcaccactgcactccagcctaggcaacagaatgagaccctgtctcaaaaaaaaaagaaaaaaaagggacttagaagtggccacaaggcaggttcctggagttcctgcacaaaagccctagataacagagaggtcccagctgggatgtgtggggactcccccatcccccttaccctgactgttggttggggaaaggggtagtctgcagctgtcccccaccagctccccttacatccccattcactggaaagaatgttctggaaaacactgttggcctgagagctgttgctatgtggaggtgacccagtcgctctcatccctgcccctcagggctctcattcctccatgcctggctctgtcctcccctggaaccaaggaacctagtggagccagagaagaggagagagactgggagagggtggtggggaagggagaaggaaaggaaagggggaagaggcccgtctgggggtggggcccacactggcttggactcacagtcatcccgatgatttcacctggggaaggatgcccctaactgacccaggcttgagctctcctggctatttt

SEQ ID NO: 718240 - DNA, 2247 bp, Homo sapiens
ctccctgctctcctctggggcattccaccccatgcccatgacagagccagttgcctctgaatcagggccctgttgttttggcagaacagggaggggacagcttgtggattggggtctgggatttctgacatcaggaggcttcctggtcgaggctggtgagccggagcagctcacgggggaaggaaagggaagccggttggggccagacccccactgtgcttcttgctcttagctcttagcatgcggctgtggccattctggctgactgcctgggagcagggcttctctttaggcagaataaagccccagctggcctggggtgggttgaaggttccaagatgcctccttatagctgaatcaatccttagtttccctgcctgaaactatgcctcacattccaccattagaatcagtcctgtgggttaaagagttgcttatggaaggggccttaaacacagagatagattacttgaacgagaggccctggaatcatttggctcacatcacgtcattcattcacctccacaaagcctgctggggatgccaggctctgtgcaggactgggctgcagaggtcagcacgaggagggctgtgctgcgaggatttgaagggctaactggtcatccaccttccccatggcctgcgagtcgcacagtgcagctggcaggggtggcacagttctgacaacccgattcctgtcctgtcctacaaaccacacctctgcccagccagtgggggcccggatggatagcagaggggtcacagagstgaggggaggggagaggcctccagttctccctcatttcccctttggggcagtggcgctgccatcccccttctgggagatgtgggatgtgggtgatgaggcatctaaacagctcaggaattgaaaccagactccacacagccattcacaattctagagcgctcctgagcacctgggctgggtgggccctgcagagacaaaggtgaatggagatgaaggaagtgctggtgggaacacagggaaggttgggagctgagaggaaggtgggagggagctcttggcctggctctttttgctgaaccccaaggggctcgggcctgagtccccaagcccttttcctatgggagctgaccctcagagggccaagagcaggaaccagggactctggcaatgaccctgaccctgggaaacaaaggacaaggttgttctctcgatttaccctttattctggtgtttgggttttgttctattttcttagttttggaagaataaaaagaaactcaatgaaaaataattgggggtttggtaaatcacagcagttctcttcggatccggttgttgttttgtggtttgtggttctttctggcttgggccctggatgcagagggaaggattgaagttggaaaagcacgaaggtcctgcttgttaatattatactaagaagagggccgggcaaagtggctgacacctgtattcccagtactttgggaggctgaggctggaggatcgcttgagctcaggagttcgagaccagcctgggcaagcgacatagtgagatgtcatctctgcaaaaaaaaaaaaaaaaaaaaaattatgtgggcatgatggcgcattcctgtagtcccagctgttcaggaggctgaggtaggaggatcgcttgagcctgagaggttgaggctgcagtgagtcgtgattgcaccactgcactccagcctaggcaacagaatgagaccctgtctcaaaaaaaaaagaaaaaaaagggacttagaagtggccacaaggcaggttcctggagttcctgcacaaaagccctagataacagagaggtcccagctgggatgtgtggggactcccccatcccccttaccctgactgttggttggggaaaggggtagtctgcagctgtcccccaccagctccccttacatccccattcactggaaagaatgttctggaaaacactgttggcctgagagctgttgctatgtggaggtgacccagtcgctctcatccctgcccctcagggctctcattcctccatgcctggctctgtcctcccctggaaccaaggaacctagtggagccagagaagaggagagagactgggagagggtggtggggaagggagaaggaaaggaaagggggaagaggcccgtctgggggtggggcccacactggcttggactcacagtcatcccgatgatttcacctggggaaggatgcccctaactgacccaggcttgagctctcctggctatttt

SEQ ID NO: 718241 - DNA, 2247 bp, Homo sapiens
ctccctgctctcctctggggcattccaccccatgcccatgacagagccagttgcctctgaatcagggccctgttgttttggcagaacagggaggggacagcttgtggattggggtctgggatttctgacatcaggaggcttcctggtcgaggctggtgagccggagcagctcacgggggaaggaaagggaagccggttggggccagacccccactgtgcttcttgctcttagctcttagcatgcggctgtggccattctggctgactgcctgggagcagggcttctctttaggcagaataaagccccagctggcctggggtgggttgaaggttccaagatgcctccttatagctgaatcaatccttagtttccctgcctgaaactatgcctcacattccaccattagaatcagtcctgtgggttaaagagttgcttatggaaggggccttaaacacagagatagattacttgaacgagaggccctggaatcatttggctcacatcacgtcattcattcacctccacaaagcctgctggggatgccaggctctgtgcaggactgggctgcagaggtcagcacgaggagggctgtgctgcgaggatttgaagggctaactggtcatccaccttccccatggcctgcgagtcgcacagtgcagctggcaggggtggcacagttctgacaacccgattcctgtcctgtcctacaaaccacacctctgcccagccagtgggggcccggatggatagcagaggggtcacagagctgaggggaggggagaggcctccagttctccctcatttcccctttggggcagtggcgctgccatcccccttctgggagatgtgggatgtgggtgatgaggcatctaaacagctcaggaattgaaaccagactccacacagccattcacaattctagagcgctcctgagcacctgggctgggtgggccctgcagagacaaaggtgaatggagatgaaggaagtgctggtgggaacacagggaaggttgggagctgagaggaaggtgggagggagctcttggcctggctctttttgctgaaccccaaggggctcgggcctgagtccccaagcccttttcctatgggagctgaccctcagagggccaagagcaggaaccagggactctggcaatgaccctgaccctgggaaacaaaggacaaggttgttctctcgatttaccctttattctggtgtttgggttttgttctattttcttagttttggaagaataaaaagaaactcaatgaaaaataattgggggtttggtaaatcacagcagttctcttcgratccggttgttgttttgtggtttgtggttctttctggcttgggccctggatgcagagggaaggattgaagttggaaaagcacgaaggtcctgcttgttaatattatactaagaagagggccgggcaaagtggctgacacctgtattcccagtactttgggaggctgaggctggaggatcgcttgagctcaggagttcgagaccagcctgggcaagcgacatagtgagatgtcatctctgcaaaaaaaaaaaaaaaaaaaaaattatgtgggcatgatggcgcattcctgtagtcccagctgttcaggaggctgaggtaggaggatcgcttgagcctgagaggttgaggctgcagtgagtcgtgattgcaccactgcactccagcctaggcaacagaatgagaccctgtctcaaaaaaaaaagaaaaaaaagggacttagaagtggccacaaggcaggttcctggagttcctgcacaaaagccctagataacagagaggtcccagctgggatgtgtggggactcccccatcccccttaccctgactgttggttggggaaaggggtagtctgcagctgtcccccaccagctccccttacatccccattcactggaaagaatgttctggaaaacactgttggcctgagagctgttgctatgtggaggtgacccagtcgctctcatccctgcccctcagggctctcattcctccatgcctggctctgtcctcccctggaaccaaggaacctagtggagccagagaagaggagagagactgggagagggtggtggggaagggagaaggaaaggaaagggggaagaggcccgtctgggggtggggcccacactggcttggactcacagtcatcccgatgatttcacctggggaaggatgcccctaactgacccaggcttgagctctcctggctatttt

SEQ ID NO: 718242 - DNA, 2247 bp, Homo sapiens
ctccctgctctcctctggggcattccaccccatgcccatgacagagccagttgcctctgaatcagggccctgttgttttggcagaacagggaggggacagcttgtggattggggtctgggatttctgacatcaggaggcttcctggtcgaggctggtgagccggagcagctcacgggggaaggaaagggaagccggttggggccagacccccactgtgcttcttgctcttagctcttagcatgcggctgtggccattctggctgactgcctgggagcagggcttctctttaggcagaataaagccccagctggcctggggtgggttgaaggttccaagatgcctccttatagctgaatcaatccttagtttccctgcctgaaactatgcctcacattccaccattagaatcagtcctgtgggttaaagagttgcttatggaaggggccttaaacacagagatagattacttgaacgagaggccctggaatcatttggctcacatcacgtcattcattcacctccacaaagcctgctggggatgccaggctctgtgcaggactgggctgcagaggtcagcacgaggagggctgtgctgcgaggatttgaagggctaactggtcatccaccttccccatggcctgcgagtcgcacagtgcagctggcaggggtggcacagttctgacaacccgattcctgtcctgtcctacaaaccacacctctgcccagccagtgggggcccggatggatagcagaggggtcacagagctgaggggaggggagaggcctccagttctccctcatttcccctttggggcagtggcgctgccatcccccttctgggagatgtgggatgtgggtgatgaggcatctaaacagctcaggaattgaaaccagactccacacagccattcacaattctagagcgctcctgagcacctgggctgggtgggccctgcagagacaaaggtgaatggagatgaaggaagtgctggtgggaacacagggaaggttgggagctgagaggaaggtgggagggagctcttggcctggctctttttgctgaaccccaaggggctcgggcctgagtccccaagcccttttcctatgggagctgaccctcagagggccaagagcaggaaccagggactctggcaatgaccctgaccctgggaaacaaaggacaaggttgttctctcgatttaccctttattctggtgtttgggttttgttctattttcttagttttggaagaataaaaagaaactcaatgaaaaataattgggggtttggtaaatcacagcagttctcttcggatccggttgttgttttgtggtttgtggttctttctggcttgggccctggatgcagagggaaggattgaagttggaaaagcacgaaggtcctgcttgttaatattatactaagaagagggccgggcaaagtggctgacacctgtattcccagtactttgggaggctgaggctggaggatcgcttgagctcaggagttcgagaccagcctgggcaagcgacatagtgagatgtcatctctgcaaaaaaaaaaaaaaaaaaaaaattatgtgggcatgatggcgcattcctgtagtcccagctgttcaggaggctgaggtaggaggatcgcttgagcctgagaggttgaggctgcagtgagtcgtgattgcaccactgcactccagcctaggcaacagaatgagaccctgtctcaaaaaaaaaagaaaaaaaagggacttagaagtggccacaaggcaggttcctggagttcctgcacaaaagccctagataacagagaggtcccagctgggatgtgtggggactcccccatcccccttaccctgactgttggttggggaaaggggtagtctgcagctgtcccccaccagctccccttacatccccattcactggaaagaatgttctggaaaacactgttggcctgagagctgttgctatgtggaggtgacccagtcgctctcatccctgcccctcagggctctcattcctccatgcctggctctgtcctcccctggaaccaaggaacctagtggagccagagaagaggagagagactgggagagggtggtggggaagggagaaggaaaggaaagggggaagwggcccgtctgggggtggggcccacactggcttggactcacagtcatcccgatgatttcacctggggaaggatgcccctaactgacccaggcttgagctctcctggctatttt

SEQ ID NO: 718243 - DNA, 891 bp, Homo sapiens
tcaagatcccggtgccagccatgaaatgccaaacctccccttctctctgctaacaggagctgggccttgcctggggtcagacttttgccagctggtcatgcgggctccagctttctgacagcctccaacccggggtgacccccaaccacccagccacagcccagtcctacagagggtyttcctgacgctcctcctgcgaccccgcggtgcccgtggtgtgtgtggccacgtggtgagtcgtagcccaacctttcaaccacaggcagctcctggggctctggctggacagagacgccagggtcaagaggcaggtgaaggctgagggtgctcgggagtggccagggacggttctgagcatggaagttcttccccacttccccaggtaccggcaggagttactacagccactttccacgtgtctgggactcccccacgcgtgaccaactccccaggaaaatgagatggctacaggcctcaatcaatccattaaagaaaagtttcaggaaatagaaacattactaaccacaagcagagggctgaggaactaagaaatagctctggataagaagacacgcagggcccaagctgcaggtccagcgagagggacgacagtgggcgaagttccgagaagccccttccctgaggctcccactcctgtgggaagatggaagtggcccgggccggtgggggagcccggcgggatgccagggctgcactgggcactgcaggggagctagggccggggggggctccatgcgagatgaaagctgcccaccgctggcacaggactaagggctgtgcacagcacgggaagaccctccctttaagagtttctcccgatgccctcttccccctgcagccctcctctgctccccgagttccaaacacacc

SEQ ID NO: 718244 - DNA, 891 bp, Homo sapiens
tcaagatcccggtgccagccatgaaatgccaaacctccccttctctctgctaacaggagctgggccttgcctggggtcagacttttgccagctggtcatgcgggctccagctttctgacagcctccaacccggggtgacccccaaccacccagccacagcccagtcctacagagggtcttcctgacgctcctcctgcgaccccgcggtgcccgtggtgtgtgtggccacgtggtgagtcgtagcccaacctttcaaccacaggcagctcctggggctctggctggacagagacgccagggtcaagaggcaggtgaaggctgagggtgctcgggagtggccagggacggttctgagcatggaagttcttccccacttccccaggtaccggcaggagttactacagccactttccacgtgtctgggactcccccacgcgtgaccaactccccaggaaaatgagatggctacaggcctcaatcaatccattaaagaaaagtttcaggaaatagaaacattactaaccacaagcagagggctgaggaactaagaaatagctctggataagaagacacgcagggcccaagctgcaggtccagcgagagggacgacagtgggcgaagttccgagaagccccttccctgaggctcccactcctgtgggaagatggaagtggcccgggccggtgggggagcccggcgggatgccagggctgcactgggcactgcaggggagctagggccggggggggctccatgcgagatgaaagctgcccaccgctggcacaggactaagggctgtgcacagcacrggaagaccctccctttaagagtttctcccgatgccctcttccccctgcagccctcctctgctccccgagttccaaacacacc

SEQ ID NO: 718245 - DNA, 891 bp, Homo sapiens
tcaagatcccggtgccagccatgaaatgccaaacctccccttctctctgctaacaggagctgggccttgcctggggtcagacttttgccagctggtcatgcgggctccagctttctgacagcctccaacccggggtgacccccaaccacccagccacagcccagtcctacagagggtcttcctgacgctcctcctgcgaccccgcggtgcccgtggtgtgtgtggccacgtggtgagtcgtagcccaacctttcaaccacaggcagctcctggggctctggctggacagagacgccagggtcaagaggcaggtgaaggctgagggtgctcgggagtggccagggacggttctgagcatggaagttcttccccacttccccaggtaccggcaggagttactacagccactttccacgtgtctgggactcccccacgcgtgaccaactccccaggaaaatgagatggctacaggcctcaatcaatccattaaagaaaagtttcaggaaatagaaacattactaaccacaagcagagggctgaggaactaagaaatagctctggataagaagacacgcagggcccaagctgcaggtccagcgagagggacgacagtgggcgaagttccgagaagccccttccctgaggctcccactcctgtgggaagatggaagtggcccgggccggtgggggagcccggcgggatgccagggctgcactgggcactgcaggggagctagggccggggggggctccatgcgagatgaaagctgcccaccgctggcacaggactaagggctgtgcacagcacgggaagaccctccctttaagagtttctcccgatgccctcttccccctgcagccctcctctgctccccgagttccaaacrcacc

SEQ ID NO: 718246 - DNA, 919 bp, Homo sapiens
caacttcagcaaacttctactgaaaaatactgcttcttataaaggctagaataattcagtatctatactcaattatggctggctatggacatctgtgaaaaatgaacatccataatctacaaacatgggaagagagaaatattatgagtacaatgttaaaatcaacaaccattatatagttatgtttcaaagcttacctgcctagttcctttagtttcttctgaaatttacagtggactttccattgccattttccttctggagtactaagttcctcaaggaatgtcaaaaaatttttaaggttctctgttagagataatgaagtttgtttttaattcaataaataatcattccataagtgaattatgaaagaagtgttttttcatattatgtagaaacacctactttcctatgtactattttcatttctctttgtctaagggagacagatckatacatgcctaaagctctaataatataacatctacacataaaaaagaacatgttgatgacagtaatacaagaagtgattcaactgcagcaggggcagacagccttgctttacaccacatttagaggatattattggtctaagagaaggagaaagaaatttgaggtaataaaagctcaagaaaagactgaaatgtactagttatctgtgaatggcagaataaatggacagtacattaaaaagtatgagagtcagaagaggagttacgtgctcaaaagaacatcatcttaccaactgtgacaacctctgggtttagaattgattcatcagatacgataaaacctccagatacaaataattcattgtatgtatgatttttaacatcatccaggctatcaacaccagcaaaactaacacaggggagcttctttaaagtcaccaagccaggtatctgtttaaatcccaaaa

SEQ ID NO: 718247 - DNA, 607 bp, Homo sapiens
tttttttttgagacagggtctccctctgtcatgtcatggctcacccagccttgacctcgtgggctccaatgatcctcctgccacagcctccgagtagctgggactacaggtgtgtaccaccatacctggctaattttcttattttttgtagatattggggtcttactgtgttgcccagactggtctcaaactcctaggctcaagcaatcctcctgcctyagcatcccaaagtgctaggattataggcataagccaccatgcttggccaaaagatgtgatttttgatgctcacatatatcttgagccttgtaggtcacacagctaggaggctttttgttttttaacattttcatttaaagacagtagtaaagataataaagtccagtcaacaaaaaagtaccactaacatctaattcatagaactttaaggatcttaattagtttgattcattttatggatgaagaaaatattacaaggttacaactccactgtccattcagatgcattaaaaaatgtgaaattgtcattccctccatatattgagcaacaataattctacttccaaggagtcatcctctttccccaaagggtttttctggttactca

SEQ ID NO: 718248 - DNA, 640 bp, Homo sapiens
tgtgactgatgggatgtgtcagagaaattagcattttgctagaatgaaggcagtgaaggttaaatgttccaaagtctttaagcttaaattgttcrttacatagtattgtacaggctcacgcctgtaatctcagcactttgggaggccgaggcgggcggatcacgaggtcaggagatggagactatgctggctaacacgttgaaaccccatctctactaaaaatacaaaaaattatccgggcatggtggcgggcgcctgtagtcccagctactcaggaggctgaggcaggagaatggcgtgaacccgggaggtggagcttgcagtgagccgagatagtgccattgcacaccagcctgggtgacagagcgagactccgtctcaaaaaaaaaaaaattgctttgtgaaagcaagccagagcctaagaaaattgtccactgcctgccatgttgaagattccactagtttcctccagccatgcagataaaggaatgtcagccagacccagagaccagttaggtgtttgttcagtcccaataaatgatgccaccgtagcctcagagctcaattattttgacattccaaccttctctttctgtttccttcttagctcccttgcctcagctcctatgatagctactgc

SEQ ID NO: 718249 - DNA, 1546 bp, Homo sapiens
tgagcaaactgcctatttcctcccagataggggtttaataataagtagtagtaacaacaatcatggtaataattgctggcattgagtatctagtaaatcaactttatgtaatttgcctcataggttatgtatctcatttaaccgtcacaacagcctaggagatagctgttcttattaggaccattttccagatgaggcttagaggggttaaatagcttgcccaggtccacagccagcaagtgatgcagttgatgttcaaaccctgtcagtgtagactccaaatcctgtgcccttcaacttctttatgattctataccttgatgcagaaagcctgcccactactttgagtttctgttgcctttgtaattgtggagagctgtctggtcaccagcctcactggtgcagaactgggctgggtgcctccaagtaggatagaaaagaagaataaaggaccctcttctgattcatgaggtattcaatgtatctggcaggcccaacacagagatcaggcccccagtccagcacagatgggggacgcagtcgctggggttgaggcccatctcacttcatcatgtctgtttttattactgggaagagtgcgatagagttgcctcctttccatatttcatcccagcaagtgtgtggtctgcaggaataaaaacaacagggagcatgagctactcaaagtcatgacttttttgaagcatgggagcctgttctgagttactgtaaagatttctttttaatatggagcatgaaagaatactgttctgtttttttaaaaaatacccagtgagctaaagtttgaatttaaaaacagataagaatatgattgtgtgtaattcaaaatgatgtgccagtaaccagttttcctagtgcataaagtatgaagctgttttcaaaagttcactctgcatctagttattcaggcagatctgtgcatgaaacatggtatacctgcatttgaaaatgtctgcaaagcaagtcttccaaatgcctacttacacagtatacgcacaggattttttttttccctttacagaatcctcatagcattcattaccccacatgaacagaattatttagccctgtactcttgggtgcattatgaatgtttgataaacataaaacataaaacaagcaccaatatagcttgacaaatatcccatgaataaatttcccatcaatgaaaagggaaaaatcagagagcgctaagtaaattgcttccgttccaagagagttgattgcattcatacctatgattagatctaaaaagaggtcttgcctttaatgcagtgcctaaattaccacatctttattagaatttcataataatgctttgagggttgataaaaatttttctcaaaagagaacttcttaaaataggagtttggatattcagatattccagagaacttggttgtttagtgttttaaattctaagaatttttcggccagaaaatgatcctgcagagcatcccttccccccacctcaccactatttytcaactcctaaaaaaaaaaaaaatcactgaaatcagtggga

SEQ ID NO: 718250 - DNA, 614 bp, Homo sapiens
tgtgctagcagtgagtaaggctccatgggcatgggaccctccgagccaggcgcggaatataatctcctggtgtgtcatttgctaagacctttggaaaagtgcagtattagggtgggagtgtcctgattttccgggtactgttggtcatggcttcccttggctagaaaagggaattccccaaccccttgcgctttctgggtgaggcgatgccctgctctgctttggctcacggtcagtgggctgcacccactgtccgacaagccacaatgagatgaacctggtacctcagttggaaatgcagaaatcacccctcttctgcgctgctcaccctgggagctgtagactggagctgttcctattcgaccatcttggaacctcctcatcagcttcaatttttaaattaaaatacttatattctcaaatctataattagaaacactttggtactgtgcaaaaggataccaatttcaaagagccatggaggtgtcatgcatgcatgcctttttttggctaaggttacrgaaatattttcacccaggactgtcaagagaacataagaacttgtgtgctgattgtaagcattcttcttagaatcctaagtgagttcttacaca

SEQ ID NO: 718251 - DNA, 1754 bp, Homo sapiens
tagggagtggatattttctaacctggaaaaaactcattttaacctatataatttttttagaaaattccttctttgcccttactccacaatctttccaaattctcccaaatgctcaagcttttaaaaaacaaaagacagaaaagatagcaagttattagtttttccagcaaaccttttctgtctattcgtttacatcagtgagcttagaataactctgcttctggaactgggaaagggacttgggaaaagaaagaaaaaaaaagctctcaaagtttaacatcacaaaacattatagtcattgctattttattatttatttatttatttatttatttttgagatggagtcttgttctgccaccaggctggagcrcaatggtgcgatctcggctcactgcaacctccgcatcctgggttcaaacgattctcctgcctcagactactgagtagctgggactacagacgtgtgccaccacacccagataatttttgtatttttagtagagatggggtttcaccgtgttggccaggatgatctcgatctcctgaccttgtgatccacccaccttggcctcccaaagtgctgggattacaggcatgagccaccgtgcatggccttgctttgtaatttttacatcatatatcccgtgttagaccaagagcttgtaaaagccagaagacatacaccatttatagttcaattagatgttcactgataaaactgattcttccatctgagggtggtatttgtagttacagtaatgtagatgacaatctaagttatgttctataaactgtgtcactgacatctcaatctacagctaactttaattttttaaaagcagaggagtgggttgtacaggtttagaaatacatccattaagctagttaagtgagatagattcaaaccttcaactcactggaatatttaccaaattgtctattcattagctaaaggaaccatataaacaaggtacttttcaaaattcaaaattatgtaaggctttatttcctttttatgctgttatgaattggattgtagatgttataaggtaaaataagattacttttacagtaaaacatacaacacattgtcacaagagggcaacctttgaacatgaatttattctcaggcattccttgaaattttgagacagttactttaattaacacaactaaataataaaacactacagaagatttaagaagatactttgacttatgcatattgttacttttttattactgctagtggaagatgtaatcgataaggaaggtaagggctgaatttgttttatctaaaaagacaaatttctttgggttttaactttcaaacatcaagatagtaggtcaatgtctaaatgagtgtatcaaagttctcacactagcacatgtaaatccacctcttatctacccaaaactctaaccaagcaaaggcaagttggaagaatcagacaaatgtaagtgcctaggatacataaatgccactggattttatgtttttaactttcaacctcccaagtttcagtaagagacatgttatttggagaagttgctaaagtgtagttgtatgatgtctctgtgtacggttagtctggacctctttctgtccggtggttgccctcaactgattagagtcacctctctaaagatcatgcttatgtccctggagcagtccacagcactatcaatgtctgatctccacctttttccaattaatatttctgtacttactgaattggaaaacatacaggt

SEQ ID NO: 718252 - DNA, 643 bp, Homo sapiens
tttcctttctcttgagtatatagtttggagaggaattgctagttcatataattctatgtttaatcatttgtcaactgtcaaactgttttctaagataattgcaacattttacatttccaccagtggtgtacagggattcaaatttctccacatacttgccaatactgttatttgacttattaatcctagccgtcttagtgtgtgtgacatattatctgataagtaatgatgttgagcacctctgcatttgcttattggkaatttgtatatcttcttaggaataatattctttcagatcctttgtccatttttaaattttgtgttattgaatcatatgagccctttgtatattccagatacaaatcccctgtgacatatatgattgcacatattttcttcctttaatggattgtcttttaacttttttgataatttcaactgaatacaaagtcaatgtatatacatttttgcagcaaattataaagagacaaaattaaataaaatgaacagtaatataaaaatcaaatatgaagtataaaatagatacacagtattgcacaaatatttattgaacagaaattttaaaaatcatttaaatgaaaggacttatcatgcacattgattgaaaaattctcctttttca

SEQ ID NO: 718253 - DNA, 628 bp, Homo sapiens
acaaaagtttcrcatatctagagctgaaaagctgctgctcctctgggacagggctcccttttgcttctgtgtcctactaggtaacatagctgcctttcttatttaccttgtagtctttgaagtttgagatctctgcttcatgacaagagagtgaggcacagtatggtttatttcttgggcttcctgacagaaacaaagtcatttattttcttattttctttgtctttaagtgatgatacgttataaagagaaatatagtcctctgctgcattagcttcctaaggatgccataacaaagtgctacagctgggtggcttaagacaataaacgtttattctctcacagttctggagactagaagtctaaaatcagggtgttggcagggctatgctccctcagaatcctttagaggaggatcctttttgcgtcttccagcatttggtagccccaggcattccttggcttgagttggagcacttcaatctcggcctccattgtcatactctctctgcctctgtcttcacatgacattttcctcttcttacaaggacaccagcatgttagattagacttcatcttaacttgattacacatggaaaggtcttatttccaaacaaggtcacattta

SEQ ID NO: 718254 - DNA, 628 bp, Homo sapiens
acaaaagtttcacatatctagagctgaaaagctgctgctcctctgggacagggctcccttttgcttctgtgtcctactaggtaacatagctgcctttcttatttaccttgtagtctttgaagtttgagatctctgcttcatgacaagagagtgaggcacagtatggtttatttcttgggcttcctgacagaaacaaagtcatttattttcttattttctttgtctttaagtgatgatacgttataaagagaaatatagtcctctgctgcattagcttcctaaggatgccataacaaagtgctacagctgggtggcttaagacaataaacgtttattctctcacagttctggagactagaagtctaaaatcagggtgttggcagggctatgctccctcagaatcctttagaggaggatcctttttgcgtcttccagcatttggtagccycaggcattccttggcttgagttggagcacttcaatctcggcctccattgtcatactctctctgcctctgtcttcacatgacattttcctcttcttacaaggacaccagcatgttagattagacttcatcttaacttgattacacatggaaaggtcttatttccaaacaaggtcacattta

SEQ ID NO: 718255 - DNA, 2386 bp, Homo sapiens
tcattcttgagcctccttccattgtttataatactattttgtgcctcctctttcccttccttgccagataatcctttctgcctactattctaccctcaaattcagaggaacatttatgcatgctcacttatattattttacttattttgcataatatctttctgagttaaccttttttttttttttttttgaggcagagtctcgctctgttgcccaggctggagtgcggtggcgcgatctcggctcactgcaagctctgcctcccgggttcacgccattctcctgcctcagcctcccaagcagctgggactacaggctcccgccaccatgccgagccaatttttttgtatttttagtagagacagatttcaccgtgttagccaggatggtctcgatcggctgaccttatgatctgcctgcctcggcctcccaaagtgttgggattacaggcgtgagccaccatggccggccctgagtaaaccttcttattatccctttttatgcatgagaaatcttggtgtaatcaaatagctatggttacataggtagtggcagaggtggcttctcaaatctgggccttccgactgcaggtccagtgttcttagggcatcttctcccttcggagcaaataaaactttcctgccctatgccatgatttccagcctctgtgctttttaatttttatttaatgcttaacarccctccctcaccttgcaaaactcacttcattatctagagctctgcagcatccttgcttgttgtgagggtcctcctagtttggcttcttttattatgaaaaacctcattgtgatgttgacctttggcctgggtaactgacagtgttgctctctgcctgaatcatgtttgaactgatgaagttttacttattccctcttcacatcccttaggttataaactgtttgagaggagggatagacacctttttgtgtcttcaatagaatccaagatggagccttgcatagaagggcagaatggtcacagatttgacctgagatatgctttggaaggcctcacagatagggaaaagctgtcctttcaaaggtttcattttcattcttatgagttatgctggacactaggtttattaaagagtaaaggaactgctcagtgagcctctcctttttattctccctatcctgaaatgtgttcattaaggtaaggttaatactggataaataaaaataaaattcagtgactgcacacactctagtgaaggccccagaaagccattaaagaaactgttactttgcttttgtaatagtgctgtaatgaacatacacgtgcatgtatctttataatagaataatttatattcctttgggtgtatacccagtaatgagattggagtcaacccaaatgcccatcaatgatagactggataaagaaaatgtagtacatatacattatggaatactttgcagcataaaaaggactgagatcatgtcctttgcagggatgtggatggagctggaggtcattatcctcagcaaactaacacaggaacagaaaaaccaaacactgcatgttctcacttataagtgggagatgaacaatgagaagagatggacacagggaggtgatcatcacatgctggggcctgtgaggcagcacggagagggaaaccctcaagaaaaatagcaaatgtatgctgggcttaatacttaggtgatgggatggtctatgcagcaaaccaccatggcacatgtttacctatgtaacaaacctgcatatcctgtacatgtaccccagaacttaataaaaattaaaaaagcattaaactttgcacccaagaggtaagtgagagttgaccaagcaagcatcggacagcgagttgagaaattaaagggtaagaaaatcccgtacgcgtaaaatgcccgattcatagtaggtacttaaaagtagctgccgttagagtcaggtagctaaaatgactgaatcctagttctgccccttgctgcctgcatgaccttgaattctgaagtcagagcttcaaaattgtcatctgtgagcctgaagatatttccaaaaacattgcattctgtgtcacataaagctgaatttctggtatttagtgtgtggtaggcagaataatggtcccttaaggagatgcacattcgaatccttggaacctatgagcatgtttaccttacatggtgaaaagggctttgcagatgtaatgaaggatcttgagatggggaaatgatcctagattatgtaaatggacacactgtcatcaccaaggtccttttacatgaaaggaggaggcaggagaggtggaatcagagaggagatatgatgatggaaacggaggtcggagtgatgtacttttacgatggaacagggccacagccaagcaacatgggca

SEQ ID NO: 718256 - DNA, 2386 bp, Homo sapiens
tcattcttgagcctccttccattgtttataatactattttgtgcctcctctttcccttccttgccagataatcctttctgcctactattctaccctcaaattcagaggaacatttatgcatgctcacttatattattttacttattttgcataatatctttctgagttaaccttttttttttttttttttgaggcagagtctcgctctgttgcccaggctggagtgcggtggcgcgatctcggctcactgcaagctctgcctcccgggttcacgccattctcctgcctcagcctcccaagcagctgggactacaggctcccgccaccatgccgagccaatttttttgtatttttagtagagacagatttcaccgtgttagccaggatggtctcgatcggctgaccttatgatctgcctgcctcggcctcccaaagtgttgggattacaggcgtgagccaccatggccggccctgagtaaaccttcttattatccctttttatgcatgagaaatcttggtgtaatcaaatagctatggttacataggtagtggcagaggtggcttctcaaatctgggccttccgactgcaggtccagtgttcttagggcatcttctcccttcggagcaaataaaactttcctgccctatgccatgatttccagcctctgtgctttttaatttttatttaatgcttaacaaccctccctcaccttgcaaaactcacttcattatctagagctctgcagcatccttgcttgttgtgagggtcctcctagtttggcttcttttattatgaaaaacctcattgtgatgttgacctttggcctgggtaactgacagtgttgctctctgcctgaatcatgtttgaactgatgaagttttacttattccctcttcacatcccttaggttataaactgtttgagaggagggatagacacctttttgtgtcttcaatagaatccaagatggagccttgcatagaagggcagaatggtcacagatttgacctgagatatgctttggaaggcctcacagatagggaaaagctgtcctttcaaaggtttcattttcattcttatgagttatgctggacactaggtttattaaagagtaaaggaactgctcagtgagcctctcctttttattctccctatcctgaaatgtgttcattaaggtaaggttaatactggataaataaaaataaaattcagtgactgcacacactctagtgaaggccccagaaagccattaaagaaactgttactttgcttttgtaatagtgctgtaatgaacatacacgtgcatgtatctttataatagaataatttatattcctttgggtgtatacccagtaatgagattggagtcaacccaaatgcccatcartgatagactggataaagaaaatgtagtacatatacattatggaatactttgcagcataaaaaggactgagatcatgtcctttgcagggatgtggatggagctggaggtcattatcctcagcaaactaacacaggaacagaaaaaccaaacactgcatgttctcacttataagtgggagatgaacaatgagaagagatggacacagggaggtgatcatcacatgctggggcctgtgaggcagcacggagagggaaaccctcaagaaaaatagcaaatgtatgctgggcttaatacttaggtgatgggatggtctatgcagcaaaccaccatggcacatgtttacctatgtaacaaacctgcatatcctgtacatgtaccccagaacttaataaaaattaaaaaagcattaaactttgcacccaagaggtaagtgagagttgaccaagcaagcatcggacagcgagttgagaaattaaagggtaagaaaatcccgtacgcgtaaaatgcccgattcatagtaggtacttaaaagtagctgccgttagagtcaggtagctaaaatgactgaatcctagttctgccccttgctgcctgcatgaccttgaattctgaagtcagagcttcaaaattgtcatctgtgagcctgaagatatttccaaaaacattgcattctgtgtcacataaagctgaatttctggtatttagtgtgtggtaggcagaataatggtcccttaaggagatgcacattcgaatccttggaacctatgagcatgtttaccttacatggtgaaaagggctttgcagatgtaatgaaggatcttgagatggggaaatgatcctagattatgtaaatggacacactgtcatcaccaaggtccttttacatgaaaggaggaggcaggagaggtggaatcagagaggagatatgatgatggaaacggaggtcggagtgatgtacttttacgatggaacagggccacagccaagcaacatgggca

SEQ ID NO: 718257 - DNA, 2386 bp, Homo sapiens
tcattcttgagcctccttccattgtttataatactattttgtgcctcctctttcccttccttgccagataatcctttctgcctactattctaccctcaaattcagaggaacatttatgcatgctcacttatattattttacttattttgcataatatctttctgagttaaccttttttttttttttttttgaggcagagtctcgctctgttgcccaggctggagtgcggtggcgcgatctcggctcactgcaagctctgcctcccgggttcacgccattctcctgcctcagcctcccaagcagctgggactacaggctcccgccaccatgccgagccaatttttttgtatttttagtagagacagatttcaccgtgttagccaggatggtctcgatcggctgaccttatgatctgcctgcctcggcctcccaaagtgttgggattacaggcgtgagccaccatggccggccctgagtaaaccttcttattatccctttttatgcatgagaaatcttggtgtaatcaaatagctatggttacataggtagtggcagaggtggcttctcaaatctgggccttccgactgcaggtccagtgttcttagggcatcttctcccttcggagcaaataaaactttcctgccctatgccatgatttccagcctctgtgctttttaatttttatttaatgcttaacaaccctccctcaccttgcaaaactcacttcattatctagagctctgcagcatccttgcttgttgtgagggtcctcctagtttggcttcttttattatgaaaaacctcattgtgatgttgacctttggcctgggtaactgacagtgttgctctctgcctgaatcatgtttgaactgatgaagttttacttattccctcttcacatcccttaggttataaactgtttgagaggagggatagacacctttttgtgtcttcaatagaatccaagatggagccttgcatagaagggcagaatggtcacagatttgacctgagatatgctttggaaggcctcacagatagggaaaagctgtcctttcaaaggtttcattttcattcttatgagttatgctggacactaggtttattaaagagtaaaggaactgctcagtgagcctctcctttttattctccctatcctgaaatgtgttcattaaggtaaggttaatactggataaataaaaataaaattcagtgactgcacacactctagtgaaggccccagaaagccattaaagaaactgttactttgcttttgtaatagtgctgtaatgaacatacacgtgcatgtatctttataatagaataatttatattcctttgggtgtatacccagtaatgagattggagtcaacccaaatgcccatcaatgatagactggataaagaaaatgtagtacatatacattatggaatactttgcagcataaaaaggactgagatcatgtcctttgcagggatgtggatggagctggaggtcattatcctcagcaaactaacacaggaacagaaaaaccaaacactgcatgttctcacttataagtgggagatgaacaatgagaagagatggacacagggaggtgatcatcacatgctggggcctgtsaggcagcacggagagggaaaccctcaagaaaaatagcaaatgtatgctgggcttaatacttaggtgatgggatggtctatgcagcaaaccaccatggcacatgtttacctatgtaacaaacctgcatatcctgtacatgtaccccagaacttaataaaaattaaaaaagcattaaactttgcacccaagaggtaagtgagagttgaccaagcaagcatcggacagcgagttgagaaattaaagggtaagaaaatcccgtacgcgtaaaatgcccgattcatagtaggtacttaaaagtagctgccgttagagtcaggtagctaaaatgactgaatcctagttctgccccttgctgcctgcatgaccttgaattctgaagtcagagcttcaaaattgtcatctgtgagcctgaagatatttccaaaaacattgcattctgtgtcacataaagctgaatttctggtatttagtgtgtggtaggcagaataatggtcccttaaggagatgcacattcgaatccttggaacctatgagcatgtttaccttacatggtgaaaagggctttgcagatgtaatgaaggatcttgagatggggaaatgatcctagattatgtaaatggacacactgtcatcaccaaggtccttttacatgaaaggaggaggcaggagaggtggaatcagagaggagatatgatgatggaaacggaggtcggagtgatgtacttttacgatggaacagggccacagccaagcaacatgggca

SEQ ID NO: 718258 - DNA, 2386 bp, Homo sapiens
tcattcttgagcctccttccattgtttataatactattttgtgcctcctctttcccttccttgccagataatcctttctgcctactattctaccctcaaattcagaggaacatttatgcatgctcacttatattattttacttattttgcataatatctttctgagttaaccttttttttttttttttttgaggcagagtctcgctctgttgcccaggctggagtgcggtggcgcgatctcggctcactgcaagctctgcctcccgggttcacgccattctcctgcctcagcctcccaagcagctgggactacaggctcccgccaccatgccgagccaatttttttgtatttttagtagagacagatttcaccgtgttagccaggatggtctcgatcggctgaccttatgatctgcctgcctcggcctcccaaagtgttgggattacaggcgtgagccaccatggccggccctgagtaaaccttcttattatccctttttatgcatgagaaatcttggtgtaatcaaatagctatggttacataggtagtggcagaggtggcttctcaaatctgggccttccgactgcaggtccagtgttcttagggcatcttctcccttcggagcaaataaaactttcctgccctatgccatgatttccagcctctgtgctttttaatttttatttaatgcttaacaaccctccctcaccttgcaaaactcacttcattatctagagctctgcagcatccttgcttgttgtgagggtcctcctagtttggcttcttttattatgaaaaacctcattgtgatgttgacctttggcctgggtaactgacagtgttgctctctgcctgaatcatgtttgaactgatgaagttttacttattccctcttcacatcccttaggttataaactgtttgagaggagggatagacacctttttgtgtcttcaatagaatccaagatggagccttgcatagaagggcagaatggtcacagatttgacctgagatatgctttggaaggcctcacagatagggaaaagctgtcctttcaaaggtttcattttcattcttatgagttatgctggacactaggtttattaaagagtaaaggaactgctcagtgagcctctcctttttattctccctatcctgaaatgtgttcattaaggtaaggttaatactggataaataaaaataaaattcagtgactgcacacactctagtgaaggccccagaaagccattaaagaaactgttactttgcttttgtaatagtgctgtaatgaacatacacgtgcatgtatctttataatagaataatttatattcctttgggtgtatacccagtaatgagattggagtcaacccaaatgcccatcaatgatagactggataaagaaaatgtagtacatatacattatggaatactttgcagcataaaaaggactgagatcatgtcctttgcagggatgtggatggagctggaggtcattatcctcagcaaactaacacaggaacagaaaaaccaaacactgcatgttctcacttataagtgggagatgaacaatgagaagagatggacacagggaggtgatcatcacatgctggggcctgtgaggcagcacggagwgggaaaccctcaagaaaaatagcaaatgtatgctgggcttaatacttaggtgatgggatggtctatgcagcaaaccaccatggcacatgtttacctatgtaacaaacctgcatatcctgtacatgtaccccagaacttaataaaaattaaaaaagcattaaactttgcacccaagaggtaagtgagagttgaccaagcaagcatcggacagcgagttgagaaattaaagggtaagaaaatcccgtacgcgtaaaatgcccgattcatagtaggtacttaaaagtagctgccgttagagtcaggtagctaaaatgactgaatcctagttctgccccttgctgcctgcatgaccttgaattctgaagtcagagcttcaaaattgtcatctgtgagcctgaagatatttccaaaaacattgcattctgtgtcacataaagctgaatttctggtatttagtgtgtggtaggcagaataatggtcccttaaggagatgcacattcgaatccttggaacctatgagcatgtttaccttacatggtgaaaagggctttgcagatgtaatgaaggatcttgagatggggaaatgatcctagattatgtaaatggacacactgtcatcaccaaggtccttttacatgaaaggaggaggcaggagaggtggaatcagagaggagatatgatgatggaaacggaggtcggagtgatgtacttttacgatggaacagggccacagccaagcaacatgggca

SEQ ID NO: 718259 - DNA, 1394 bp, Homo sapiens
attgccttagtttttttccccttaagtctacagaataagttttttctgatctatttgataggtttttgtttcaggtgttcaggagagatttaattctgtttaaagaacaaatatatggtgggaatttcttggtttttgagttatatataatatctcttccctctgactaatcttatttgaaaatttagaactgtgggccaccagatgacttcagatgtcccaatccgacaaagcagatctggacagtgaatgaagctctaattcagaaatggctgagctatccttctggaaggtttcctgtggagatagccaagtaagaaaagcattttgggccaggcacagtggctcatgcctgtaatcccagcaccaggcagattgcctgagcccaggaattggagaccagcctgggcaacatggcaaaaccctgtctctacaaaaaaatacaattagctgggygtggtggtgcacacctgtggtctcagctacttgggaggctgaggtgggaggatcagctgagcccaggaggtcgaggctgcagtgagctgagattaacaccattgcactgtagcctgggcaacaaagtgagaacttgtctccaaaaaaaaatatccatggatatttttaaagatcttaattaaatatgtataagttgtagttctttcatgtgcatagagatatgttaaatgataacataaaatatttaatgtagccattttaggattggccttgaaatgtgttccttctggttttataatggtcactatcttaacttttatactttgtggaagacttgagtattatttctttcttgaatattttgttaacttgcctagtagcacttaagatgttatttgttttttgttggtatttgggatgatgggttgtatttgaaaagctgttttgtttctctagcttgttttccaaaactataatttttctgaaaatcccaaaggcatcccagattaggctcactgccaatataaaatgtttaaaatttttttaaattaaaaaactttttacatgaacatacacacttaatttttaaaattccatgttttaaagcagataacattggataaatggatgaaagtaatatttaagaaagtctagaataaacagtaataccttcatcaagtattattttatcagtctttagcaatttatgtaattctgattcatctaattgggtgttagaggagtgctctgtagcattaaacattagattaattattcattttaattcttttttaagaaagggtaaacaattaaatttctgattctatgattaaaaaaacttttttaaattttttagtgagatagatggaacgttttcttcctctggttgcctaaatggaagttttttagctgttaggtaagtggcaattctttaatat

SEQ ID NO: 718260 - DNA, 336 bp, Homo sapiens
tctcaagcataaatatgtctcaagacaaactcatygcatatacccagaatacataatggagcttactgagacatattttccccctagcaagaaaaagccagaaattctgcagtaaactgtgtagtttctgcaactcagaaatgggacctatgcctctaactcttgatatccttctaaaatggcacgaagtccagctgagggagaggatgaaatctggctgaagctggaggatgggagacctgggactccagctggcttcttggggagcttggctaaaatcatttcacgtgattgatttccaatttctgcatctggaaatagaggaggctgatccag

SEQ ID NO: 718261 - DNA, 646 bp, Homo sapiens
agtttccaatttaatagtattgagaggtataatccttggaggtgattgagttttaaggctctgcccatgaatgggattaggtgcccttataaaggagcttgatggagggagtttgttccttttggcccttaaccttctgccttgcaaggacacagtgttctcccttctggaggacacagtgttcaagatgccatcttggaagcagattggaccctcaccagacaccagatgttggcaccttgatcttggacttactagtctccagaactgtgagaaataaatttccgggtagttacaaattacctagtctctggtattttgttatagcagcttaaacagactaagaaaataatatattctatatatttttttctcttttcttcatttttaatctaatctttttgctttggtttgtgtacttttaacacacrcattaaagttgtaatttggttactgtgttaatcagttacaaaatttctatttgctttttaaaaatggcttacatttctctgatgaatttttttaccttgtcttgtatttcttgaacacatattaaccataattatgtaattccatgtttgataactacagttgtggatatcttatgggtgtgtttttactgctggttttctctcggtttgccaca

SEQ ID NO: 718262 - DNA, 671 bp, Homo sapiens
tggaaaaggggagatatgtttcattttaagcctgtttgaaattttttaccatgggcacttactgcttttgtaaacaaggaattctttcatgtttaaaacatggtggtgagcagttgctgagccgcgcagggcaggactcctcctctcgctccagctgcttgttagcatcgagtctccgggtaattttgacagcgccaagcaagccccagagctgagtgccaacacgtcactctacagagtgccctgtgctggtcattagagccctgctcctgttctgtggctataatcctagcactttgggaggccgaggcaggtggatcacctgagatcaagagttcgagaccagcctggccaacatggtaaaaccctgtttctactaaaaatacaaaaattagctgggcgtggtggtgggcacctgtaatcccaactactcgggaggctgaggcaggagaatcacttgaacccaagaggcagtggttgcagtgagccgagatcataccatcgcactccagcctgggcaacagagcaaaaactccgtctcaaaaaaaaaaaaaaaaaagacaaaacagaacaaasagaagcagccctttctgggtagcaagggccgcggtggtggcagtggctggtggctggtggctggcagcttgatttcctacctcaagctccctgat

SEQ ID NO: 718263 - DNA, 655 bp, Homo sapiens
tccatgcgtccatcacaggtgggctggggagctctgctcagggtaatcagtcgggcacccaggctgatggatstgcctccttcttaggcagcttctcaatgccatgcttcagggctcactacaggaggggtggagtgttgagaccagcaatgaacttctttggaatggaagtgacacctgtcacttcacctcacaactccttggccagaaccagtcacatggccatgccaaacgtcaaaggctggtggtagtaaagtcttccacacttacgtatctggaacccagtactgaaggatgcaatgcataattttggaagtgttgcaaactgatctaagacaatctgaccattcaccaattacaagtttcttttggtaaatatcggggggagattggggaggtgggaactatgtatttctccctccacagcttcactactggatagtagggtataaggaaaatgagtcacagattgaattttgctacatgtacgacatatgttagcaaatgggtggggggaggatttcacttaataacaaacagacacaaacagttatgagtgcctataaaataagtgaagtcctagctgtctgtcatgagaagtatttttctggaaagattcactccacagtgtatgcagcatattctcatggcaaat

SEQ ID NO: 718264 - DNA, 655 bp, Homo sapiens
tccatgcgtccatcacaggtgggctggggagctctgctcagggtaatcagtcgggcacccaggctgatggatgtgcctccttcttaggcagcttctcaatgccatgcttcagggctcactacaggaggggtggagtgttgagaccagcaatgaacttctttggaatggaagtgacacctgtcacttcacctcacaactccttggccagaaccagtcrcatggccatgccaaacgtcaaaggctggtggtagtaaagtcttccacacttacgtatctggaacccagtactgaaggatgcaatgcataattttggaagtgttgcaaactgatctaagacaatctgaccattcaccaattacaagtttcttttggtaaatatcggggggagattggggaggtgggaactatgtatttctccctccacagcttcactactggatagtagggtataaggaaaatgagtcacagattgaattttgctacatgtacgacatatgttagcaaatgggtggggggaggatttcacttaataacaaacagacacaaacagttatgagtgcctataaaataagtgaagtcctagctgtctgtcatgagaagtatttttctggaaagattcactccacagtgtatgcagcatattctcatggcaaat

SEQ ID NO: 718265 - DNA, 655 bp, Homo sapiens
tccatgcgtccatcacaggtgggctggggagctctgctcagggtaatcagtcgggcacccaggctgatggatgtgcctccttcttaggcagcttctcaatgccatgcttcagggctcactacaggaggggtggagtgttgagaccagcaatgaacttctttggaatggaagtgacacctgtcacttcacctcacaactccttggccagaaccagtcacatggccatgccaaacgtcaaaggctggtggtagtaaagtcttccacacttacgtatctggaacccagtactgaaggatgcaatgcataattttggaagtgttgcaaactgatctaagacaatctgaccattcaccaattacaagtttcttttggtaaatatcggggggagattggggaggtgggaactatgtatttctccctccacagcttcactactggatagtagggtataaggaaaatgagtcacagattgaattttgctacatgtacgacatatgttagcaaatgggtggggggaggatttcacttaataacaaacagacrcaaacagttatgagtgcctataaaataagtgaagtcctagctgtctgtcatgagaagtatttttctggaaagattcactccacagtgtatgcagcatattctcatggcaaat

SEQ ID NO: 718266 - DNA, 1479 bp, Homo sapiens
cccaaaaaaagtctgtaggttttaaccatggccattcttcatcttgcagtaatgtgaaaacaactctaagtaatgatacctgaaataaagcattattaaaggaaaaatgagatcacttgaaaggaaagagcacaattaaacagaacattttctaaaaccgtgcacaattttaaatgtaaatgctgacacttacagatatttatctgttccatacgtactctctccatctgaaatatattttccgaacggtataccttgaattggtatgaaagttcctgtttatccattattaagcaatacagcatctgggaagcccagaccacaagcatgtatgtgtttatttttcaagggcaacattgccatctgacaggatatgaaatgacaaaatttcaccactcccttaaacatgtttgcagtcaaaactagaaatcgctgagattgaaatatgtgtccaaattcagtcctatttgattatcctgccagacaccatatttcacaaattatctcatctcacagctaactaaaaaaaataaaaagaaaagaatgcattaagctgactgccaaatgtcacagcttctgtgtctttgaaaattgcattaggggtttactcaaaggcttttcaccatgataaatgttaaggagctgagagaaaagctatcagaatgaggtggttaggtttttagttggttataactaacaccaaattctctggaagttagctgaatatgtgttacctaaacttcctcatagaattcaaataacgcaacagcttttccttcatagatttcaagtaacaaatagagctaatcgttttcccctagtacaaggaggcaactgatatctgttgcttaaagaatctgatcatttaatcagacttcccaacattcagatggcatgacaaaggggaggctctcagactgttttgtgagggaagaaacagaggcacagttaggtgctgaccttgaaaagcttagctcattgtcaggctgtcctattttagcaaaagtgagagacaggaaaagggagacaacataactcattttctccgttttgacacacaggctaaaatatgagccaggaaaagatatagaatatacaaatggtattaagaagctatttttgactgctcagtctgacctcagttgagttgaaattggaattacaatatttattagaaaaagcttgcgtttcaggaaaagctattacaattttctagtacatttctaatctcctttcctggagatatttaatattaggatgtataattagctcactctaagtccttaattgtggctcgcctagaaagtaagtgatggacgtgctggcagcrtatgaccctactgtcttgtgatttttttttaatcaactcccacagaaaagatgggaataatgtaaattaaagccatctcaatcatatagtggtgtgtaaaaatcaagtttactttattatcacactgctaactagaaagtattctatga

SEQ ID NO: 718267 - DNA, 901 bp, Homo sapiens
ctgggcaacagagcaagactccatctaaaaaataaaaataaaaactaaaggggagagttgagagcctgctattcaaccagtgtaacaacaaactaaaacactatagtttagcttattaattttttgtttattaatttagttattggttgcttactatataagaggttttttcaaatatgtttgacagytatgtgtccactaaattgacttctttttaaactacaaagatataatctcttttatagcaagaatataatctattgattatgtgaaacaagataacagttatgtagaatatttaaaatatacattaatttgcatatttttattcagaggcttagtaggtctctactgagcaaattaattataaagaaaataattatacagaaattctataaattatgtaacaaatggaagtttatgaaggaggaaaaccttggaaatcacaattattagaaaaagtaaagtatggcaagaaatcacttaaaagtaattaaaattcttaaaggttgtggtaatatgcattttattctatgacctcttgaaacgtctatggagaggttgatttttcataaagggtatcctggggtgcttttactatttatatattaaagggtctgagttataaaggaggaagtgagagaggagaggaaaagaagtggagaagacaatttatccatagagtgaccatcaaactggtttgcctggaacagcttggtttatatctctagttatttttattttaagaagtttcctggtttgagagataaattatatagtcattctaattggtaagaggagtaaagaattgggattataaataacattaaattaattgcatatgtaatggaacatgcagggagtgaaaaatgtaaagaggagaggaatctctgaaattggg

SEQ ID NO: 718268 - DNA, 901 bp, Homo sapiens
ctgggcaacagagcaagactccatctaaaaaataaaaataaaaactaaaggggagagttgagagcctgctattcaaccagtgtaacaacaaactaaaacactatagtttagcttattaattttttgtttattaatttagttattggttgcttactatataagaggttttttcaaatatgtttgacagttatgtgtccactaaattgacttctttttaaactacaaagatataatctcttttatagcaagaatataatctattgattatgtgaaacaagataacagttatgtagaatatttaaaatatacattaatttgcatatttttattcagaggcttagtaggtctctactgagcaaattaattataaagaaaataattatacagaaattctataaattatgtaacaaatggaagtttatgaaggaggaaaaccttggaaatcacaattattagaaaaagtaaagtatggcaagaaatcacttaaaagtaattaaaattcttaaaggttgtggtaatatgcattttattctatgacctcttgaaacgtctatggagaggttgmtttttcataaagggtatcctggggtgcttttactatttatatattaaagggtctgagttataaaggaggaagtgagagaggagaggaaaagaagtggagaagacaatttatccatagagtgaccatcaaactggtttgcctggaacagcttggtttatatctctagttatttttattttaagaagtttcctggtttgagagataaattatatagtcattctaattggtaagaggagtaaagaattgggattataaataacattaaattaattgcatatgtaatggaacatgcagggagtgaaaaatgtaaagaggagaggaatctctgaaattggg

SEQ ID NO: 718269 - DNA, 1123 bp, Homo sapiens
ctcctgttgatggacacttgagtggttccagttttggggctgtcataaataaagctgctatgaatattcgtgtactcatgttttggtggacatgtttttttttttttttgctttgaataaatatctgaggcttgaattgccaattatatggaaagtgtacatatttaactttatagtaaccgacaaactgttttccaaagtggctttaccattttgcattcctgccagcaatgtatgagcatttgtttgctctacatcctcaccagtatttggtatggtcagctaaaacctgtttttatatacagaccttcaaagtctcatcttagatgcaaatagattgataaagagggcgatatcaccccatttcactcaccccatgaatcccagtctttttcttttttaaaaaatttggaacagagtcttgctctgttacccaggctggagtgcagtggtgcgatcttggctcactgcaatctccacctcccaggttcaagtgattcttgtgcctcaacctccggagtagctaggactgcaggcatgtgccacctcagctaatttttgaatttttagtagagacggggtttcatcatgttggccaggctgatctcgaactcctgacctcaagtgatcctcccgcctcggtttcccaaagtgctgggattacagacgtgagccaccatgcccggcccacgaatcccagtcttaaatgcaaatggacctgctagacagggggaggtttggtctaaatcctatcatcagccttgtctaagttccagtttctgcccatttatagctcaaatgaaatcatcagatagatacatccatttatatgttctcaaggatgttcmttgaagccttgtctagaaacagtgaaaaaaaacctagaaatgattcaagtgtcaaaaactaatagactggtgattctaggactagggtaggtaatatacaagataaacctgtagcatcttgtagtgccagaaggtaaggaaggcacaaacgaacatccaattcacagtaataggagtatgtcaaaggaatgcaggaaccaaattgaagagctcccagtggctaaaactaaaccagtttgaataaacaaataaagtagtattagtagatagtattg

SEQ ID NO: 718270 - DNA, 1123 bp, Homo sapiens
ctcctgttgatggacacttgagtggttccagttttggggctgtcataaataaagctgctatgaatattcgtgtactcatgttttggtggacatgtttttttttttttttgctttgaataaatatctgaggcttgaattgccaattatatggaaagtgtacatatttaactttatagtaaccgacaaactgttttccaaagtggctttaccattttgcattcctgccagcaatgtatgagcatttgtttgctctacatcctcaccagtatttggtatggtcagctaaaacctgtttttatatacagaccttcaaagtctcatcttagatgcaaatagattgataaagagggcgatatcaccccatttcactcaccccatgaatcccagtctttttcttttttaaaaaatttggaacagagtcttgctctgttacccaggctggagtgcagtggtgcgatcttggctcactgcaatctccacctcccaggttcaagtgattcttgtgcctcaacctccggagtagctaggactgcaggcatgtgccacctcagctaatttttgaatttttagtagagacggggtttcatcatgttggccaggctgatctcgaactcctgacctcaagtgatcctcccgcctcggtttcccaaagtgctgggattacagacgtgagccaccatgcccggcccacgaatcccagtcttaaatgcaaatggacctgctagacagggggaggtttggtctaaatcctatcatcagccttgtctaagttccagtttctgcccatttatagctcaaatgaaatcatcagatagatacatccatttatatgttctcaaggatgttccttgaagccttgtctagaaacagtgaaaaaaaacctagaaatgattcaagtgtcaaaaactaatagactggtgattctaggactagggtaggtaatatacaagataaacctgtagcatcttgtagtgccagaaggtaaggaaggcacaaacraacatccaattcacagtaataggagtatgtcaaaggaatgcaggaaccaaattgaagagctcccagtggctaaaactaaaccagtttgaataaacaaataaagtagtattagtagatagtattg

SEQ ID NO: 718271 - DNA, 2270 bp, Homo sapiens
  misc_feature 345, 346, 347, 348, 349, 350, 351, 352, 353, 354, 355, 356,357, 358, 359, 360, 361, 362, 363, 364, 365, 366, 367, 368,369, 370, 371, 372, 373, 374, 375, 376, 377, 378, 379, 380,381, 382, 383, 384, 385, 386, 387, 388, 389, 390, 391: n = A,T,C or G
  misc_feature 392, 393, 394, 395, 396, 397, 398, 399, 400, 401, 402, 403,404, 405, 406, 407, 408, 409, 410, 411, 412, 413, 414, 415,416, 417, 418, 419, 420, 421, 422, 423, 424, 425, 426, 427,428, 429, 430, 431, 432, 433, 434, 435, 436, 437, 438: n = A,T,C or G
  misc_feature 439, 440, 441, 442, 443, 444: n = A,T,C or G
cacgccattttcctgcctcagcctcccgactagctgggactacaggcgcccgccaccacccccggttaatttttttgtatttttagtaaagacagggtttcaccatgttagccaggatggtctcaatctcctgacctcatgattcgcccgcctcggcctcccaaagtgctgggattacaggcgtgagccaccgcccccggcctgttttaatatagttttaagggaataatccaaactcagcttggttggttcatggccttcattaataagactttgattaggactgtccctttccatatttcaccattcacctcctttgtccagtcattccagcacttgggcttnnnnnnnnnnnnnnnnnnnnnnnnnnnnnnnnnnnnnnnnnnnnnnnnnnnnnnnnnnnnnnnnnnnnnnnnnnnnnnnnnnnnnnnnnnnnnnnnnnnnacagttgtaatttaacatctaagaagctaaacattttgaacatttgtttgtgtgtgtggtctggtatcattttctattacttttagacagagaattttctctgaagatactgtgtgtgtgatagagtggagcgagagataataataattcaggaattattattcaaatctatatgaaacctaatgaaataatgtttactttaccttagaggaaggctgcaaagaaaaggaattggtgtgtggtaggaagagtgaaatgattgatggtaaaattcacaaaaatgttattcaaactttcacattagagtataatacatatactctatatgtattatatactctcaatattgagagagagaaaatgacagaactgttggcctatgtgtattgtattcatacacacatatacacacattctcagaatcacaagaacaagggcagtaaaaggagatatgggttaatgaactttataataaaatggggggtgaaaatctgtgtcttagtacactttttagcacaaaagcttgatatcattgtgtacctttggtgttgtttttgtattgatcttcaagacagactgaacaagatacttgaggacactaaacctctcatcatattataatgacctaatcacacaaggaaatactggctgcaagagcaggttatgccaatgagcatcattctgagtctaaccagaagagagtatagatggattgagatcagtgttagatggaaactaatcgaagtatttggagagatgtctataggcccaggactacaagtggcacatgtattttcttcttagtcactattggtcaaaccttagccgaatggccccaactaaatgcaaagcttggaaatagagttcatgttcaacagccacttctcagcaaaactctacactgtaggaaaagccactcttctctactacagtttgcacacattctagtttctcaaaacgataggagggaaattctaagacctgatattaggttatgtactgcttgccaaatattgaaatctttcgtaacttttttattatttattgttctttaacattcaataagctgttaaattgttcagcctggtctcaggcatgttttagcctggaaggtcctactgtgacaagagtgttaaagtaggagtagagaatacatacataagcagcattgaattgacaacattagttagttaattccagcaaatgtgggagaatttccatacataatacgtcatgttccagttcctacatcctatcatctttcctaagttcccaaggtcacctttctaaaacttaaatgatctaatgttcaaatacatttaacagacagttgctattttttaaattttgtttatgaatttaaaaaagaatatgttgaactataaaatacaaatcataatccttttcctgagcttaatatttaatgttttccattattgttaaaatcttaccattaaaaataagcggatgttctacattgactaccataatcaggaaagtaaataggcatataagcagctaaataatcacctacttgaaattcataacaaaattgtattcatgactttctcttcactgttaacttgtgtcgtaggaatcattgatcatacaaagaaggtttctgtttgtttgtttttttttttcaatttaagctactaggtttccattttctattacatgaagaagtaaaaagaccatcttctaacttcaaataccaaaaaacaaaaacagcctttttttagtaaaataaaccatttytgaatgtggaataaagtatattcacctcaaactctgggttacaaaaatattacaggaataccagaaac

SEQ ID NO: 718272 - DNA, 1914 bp, Homo sapiens
taatagtttagtttataagattagaagattagtttatttgatcttgagcatctggctcaagttgaatttcaagagtgttgaatttcagaggattaaacaaactagcacccaaagtagtcagggaacatggaaacagatggtgccacaaatcagggtagatgacacaatcaggcctttctcgttggtggttacaaaaggatgagggtctcagggaagggtgagacccaggatacttggcaggtactgaaggccagtggttggaaaagatcccagacaaacaccattgcctccttatcccactgcctgcccaaaaatatctccaggagcaaagaagtctcttttttttttttttttttttttgagacagggtctcactctgtcacccaggctggagtacagtggtgcaatctgggctcactgcaacctctgcctcccgggttcaagtgattttgttccacctcagcctcctgagtagctgggattacaggtgtatgtcactatacccagctaatttttatatttttagtagagactgggtttcactatgttggccaggctggtctagaactcttgacctcaagtgatccacccaccttggcctcccaaagtgctgagactacaggcatgagccaccacacccggccaacaactctcttgatgaacaccctttgctggagagggatctctccattgaatggcatgcacagagcctcagtttccttttatgtaaatgaatccctgcacacaagggttgttgtaaggattaaatgagataatatgaagaaagtgcctagtacagaggaaatactcagtaaataggttcagctatgacttcttttctctgacaccattaggcaaatattctacatcggggcacctaagaatgtgttcctcctagctaccaaggagtgaggcctgtgcttgaaaaaatgaaatagcaaagcacaaattcaaattagttatgttgctagcctgtaaaaataaaatgcaaactcaatttgaacaacttataaatttaaattgctaaagtgtttcctaaccccaaattacaattatcttcaaagtattaaagagcattaaaagcacttatcctgaaagagctattttaatgtttgactaacagcagagaatgttctcacacaacctaaccctcagtaagcactccacaaatgctaactaagagaaaactcatactcttggttattgaaaatctcaggcaagccagatagctttatctcctttctcatggcagttatcttgtagagcaaaactgatccacagttgctacttgagatttgtaagttgcccttgtaagactggaaatgctaagagtccattcactgattcagagaaacatttattccattctggcactgtgaaaagtgctgaaacaaaaatgaacaatggtggtaataaaggacaatggcatccaagttcaagaatrtacagagtgccatgaggtttaaaggagggaatggctgtacctggaggtaggggtggggtattattcaagaaaagcctcctagtggttagagatgaaataaccctggagttgggtcttaaaacacagatttttaggtaatgtggcatagatgagggttgggggcagagaaaaattgagcaacgagacaaataaggaaaggtaaatagagagaggtcaatctgggcaaagtgaaaatagagcatatgtttagcttgtggtctgtgtgttgtggtgcaagaggtgtgggtgagagataaatggagagctgaggggcaggctggggctagatgataatagggttttttgcttcccctgtggagtatgcactgcatcctaaaagcaacaggaagccattgaaggaatttcactccagctgctttaaggaagatcgattgcagacacacacacacacacacacacacacacacacg

SEQ ID NO: 718273 - DNA, 678 bp, Homo sapiens
  misc_feature 578, 579, 580, 581, 582, 583, 584, 585, 586, 587, 588, 589,590, 591, 592, 593, 594, 595, 596, 597, 598, 599, 600, 601,602, 603, 604, 605, 606, 607, 608, 609, 610, 611, 612, 613,614, 615, 616, 617, 618, 619, 620, 621, 622, 623, 624: n = A,T,C or G
  misc_feature 625, 626, 627, 628, 629, 630, 631, 632, 633, 634, 635, 636,637, 638, 639, 640, 641, 642, 643, 644, 645, 646, 647, 648,649, 650, 651, 652, 653, 654, 655, 656, 657, 658, 659, 660,661, 662, 663, 664, 665, 666, 667, 668, 669, 670, 671: n = A,T,C or G
  misc_feature 672, 673, 674, 675, 676, 677: n = A,T,C or G
atgatttgcccaaattacttaagctctttaaaccacagtttcctcatccttaagatagggataataaatagaacttatctcataaaattactgtgaggattataagtgattatgaagttgattaaatttccccagtgcttcatacaaagaaaggactcaaaggatatgctagttcatagtaggggcatagaagaagatatcccttctctcctgggatatagggtatacwtaactgtccactataaaattgaagataggctagagaaaagctaaaaatgaagaatctaatacctctttagccaagagaaaatgaaacatgagggaaagggagaagttccaaatgaggtccacatttgtcgtgggccactgaatggtggtgccattcaggcagaggaaacccagaaggaggagtcattctgtagttagagggcacttaatgagataatattagagataactgaggttgagttgttggtacatatctgggtgcaaagtctccataggtccggaattttgaatagttttctggagtcatctggttattgttaaagccaagagaattggggagatcacagaannnnnnnnnnnnnnnnnnnnnnnnnnnnnnnnnnnnnnnnnnnnnnnnnnnnnnnnnnnnnnnnnnnnnnnnnnnnnnnnnnnnnnnnnnnnnnnnnnnna

SEQ ID NO: 718274 - DNA, 678 bp, Homo sapiens
  misc_feature 578, 579, 580, 581, 582, 583, 584, 585, 586, 587, 588, 589,590, 591, 592, 593, 594, 595, 596, 597, 598, 599, 600, 601,602, 603, 604, 605, 606, 607, 608, 609, 610, 611, 612, 613,614, 615, 616, 617, 618, 619, 620, 621, 622, 623, 624: n = A,T,C or G
  misc_feature 625, 626, 627, 628, 629, 630, 631, 632, 633, 634, 635, 636,637, 638, 639, 640, 641, 642, 643, 644, 645, 646, 647, 648,649, 650, 651, 652, 653, 654, 655, 656, 657, 658, 659, 660,661, 662, 663, 664, 665, 666, 667, 668, 669, 670, 671: n = A,T,C or G
  misc_feature 672, 673, 674, 675, 676, 677: n = A,T,C or G
atgatttgcccaaattacttaagctctttaaaccacagtttcctcatccttaagatagggataataaatagaacttatctcataaaattactgtgaggattataagtgattatgaagttgattaaatttccccagtgcttcatacaaagaaaggactcaaaggatatgctagttcatagtaggggcatagaagaagatatcccttctctcctgggatatagggtatacataactgtccactataaaattgaagataggctagagaaaagctaaaaatgaagaatctaatacctctttagccaagagaaaatgaaacatgagggaaagggagaagttccaaatgaggtccacatttstcgtgggccactgaatggtggtgccattcaggcagaggaaacccagaaggaggagtcattctgtagttagagggcacttaatgagataatattagagataactgaggttgagttgttggtacatatctgggtgcaaagtctccataggtccggaattttgaatagttttctggagtcatctggttattgttaaagccaagagaattggggagatcacagaannnnnnnnnnnnnnnnnnnnnnnnnnnnnnnnnnnnnnnnnnnnnnnnnnnnnnnnnnnnnnnnnnnnnnnnnnnnnnnnnnnnnnnnnnnnnnnnnnnna

SEQ ID NO: 718275 - DNA, 1357 bp, Homo sapiens
ccaaggctggaatgcagtggcacaatcttggctcactgcagccttggcctcccgggttcaagtgattcttgtgcgtcagcctcctgagtagctgggattacaggcgtgtgacaccatgcctggctaatttttgtatttttagtagagatggggtttggccatgttggccaggctggcctcgaactcctgaactcaagtgatctgcccaccttggcctcccaaagtgctaggattacaggcgtaagccactgcgcctggccacaaatcaaatttaataatctccagaacatcaaggaagttcagctcttaatgaaaatggatgaaaagaaatgatttactcacttttatacgctcrggaaagagaatgccctgccagactcaaaagggtatcacagaatcactcagattttcagcactgagggttttccaaggatctaatgatgttccttttttcagtttgtttcgctcactgataagccttgttaataaataccattgcatctgttttcactttaaacgatgttacttaacacaattatttgctttcgaatgccccctagattggtggaaagaaattttctgatttataaatatattttcttatgaaaccaattggcatactcttccagtggagtgaatagataaattaagtctctaaaactttaaagagattactgccccaattatcttaaggacagtaataattacgtatataaaattaaaatatggaaattaagcagggtgtggtggctcacacctgtaatcttagcattttaggcagctgaggagagaagaagaattgaagtcaggagtttgataccagcctgggaaatatggtgagacccctgtctctacaaatttaaaaatgagctgattttaaaaaactagccagcacagtggctcacattggtagtcccagctgcttgggaggctgaggcaggaggatcgcttgagcccaggagatccaggctgcagtgaactataattgtaccactgcactccagcctgggtgacagagtaagacctcaactcaaaataaaagaaaatgaagaataatttcttgacttttttttttccctgcaatgccaggctggttgactcacacctgtaatcccagaaaatcaggaggctgatgtgggaggattgctttaggcaaggagttggagaccagcctgggcaacagggcaagatgccatctctaagaagttaaaaggcgggctgagctgggaggactgcctgagcccagagttccaggttggtcagctgtggttgcaccagtgcactctcacctggatgacacagcaagacactgtctattacattttttaattctacttatgctttaaatgtgatgttt

SEQ ID NO: 718276 - DNA, 2606 bp, Homo sapiens
acacacacacaaaccaaacaccacacatagaggaaacagtaaaagattaaaggacacagctaaaaatacatttgtattattacttcccaaagttctaaaattatcagaagggactagtgaatctttaaaaaatattgattatccaacactttttaataaccagtataattgcattgaaggctactgaacatgcacatgttcctaaaatttttctgttatggtgtctggtttgcgaaaggaacaaaattaaacatagttccttggcaatttttccctcttccactctactaattggcgtatgtgcgatgtgtgtttattgtaaaataggaataagattcagaggtcaagaatcaaagtgagtcagagtaggaaaagccagactcaagcataacagaagggcagagcctgtcaaaccccaaaattaaagggtaaatttcaacacaagtagaagtggttcaaaagctaagggcatcctcatagttcatgaaaaacaagtattcacgcaggtagcagactctaatctgcttcaagccaatgtgctattctcttcgtgttatttatatccctcagaatacctcaaagttcccaagagcagtcagtatttaactctaaactatatcatctatatgatatatttattatatataatatatatatttattatttgtataatacatattatatatttattatatattatatttatattgattatatataatatatatatatttattattatatatttttttgagacggagttttgcttttgttgcccaggctggagtgcaatggcgctatctcggctcaccacaacctctgcctcccaggttcaagtgattctcctgcctcagcgtcctgagtagctgggattacaggcatgtgccaccacgcctggttaattttgtatttttaatagagaaggggtttctccatgttagtcaggctggtattgaactcccatcctcaggtgatctgcctgcctcggcctcccaaagtgctgggattatagrtgtgagccaacgtgcccagccaactatgtaatattttaattgtgtagtgataaccctcatcaaaagaagtattcattatggtcagtgtactctgcttatttaccactgaagcttaacacaaaattgttgaaataaacatgcatattgaagtacttagctagctattgaggcaatacaggtttctagatttactcatttttttcactgtacacacatgtcgtgtgtgtcatgataaacccatgtgtgtgcatatattgattaaatattatatttctttttacttttattattattattgagaaaagatctcactctgtcgcccaggctggagtgcagcggcacaatctcggctgcctgcagccttgtcctcccaaagccctagaccctgtaacataatggaatatgtatgtttctaatttgtgcaatatggaagcaggaatactacatagaactgtcatcttttcctattgcatttattttggtgtggaaaaatataataattggcttcagtcagtaagtctatttcattcaagaatatttaaatataatccaaaccatcttaggtacattttgtgatacaagaggatggtatcttctatttggaaatataaaatcccagggtctcacagtttaagtatactttccaggggtatgtataaaacaagaatcccactttacaaagttaatagaaaaaatatatgctaattggaaggagaggcttctgattgaggataaagtggaaattttcacatactgctaattacactttaatggagtaagaaaaaaagaattggaaatagtaccctataaaacttctgaaatgaaattacagtttctctctctctctctctttttttttttttttcttgagacggagtttcgctcttgttgcccaggcgagagtgcaatggcgctatctcagcacactgcaaccttcacctcccgggtttaagtgattcttttgcctcagcctcccaagtagctgggattacaggcatgcaccaccatgcccagctaattttttgtatttttagtgacccaccacgcctggctgtctcctctttttagaattaggagaactgatttttttcagtgctaaactggcactgtcctatgttttcaagaaagcaatatggtgaaacgaaagagcctggatagcatgttttgttagctggcgtctagttctttaagttccatgagtctattgtgtcttctttacatctcaaaaagaagagagaagaaacctgcatctaattactgaagcagtttcattcagcaaatgtaattgcatcgcaggcacatctcaaattaaaaatcttcatcttggtctctgtcatttccattttaaactgggactgaataacctgttttaccactcaaaataatagccagtgtctctttcttattaaaatatgtgatcttttgcttgattacctaattatgtcacctgcaccttacatgaggcagatagaagagtcttccagtctgccagagcagatctaccaaactagactgcacatacaaattacctggggatcctgataaattacagattctgagtctgctttcaaacagggcctcaagtcaagctga

SEQ ID NO: 718277 - DNA, 1643 bp, Homo sapiens
ttgtaagtattctgtatgaacatgaaaataacatgaattataatattcaagttccttatataatatttgcccgttttaaaatccactagcttcttttaaaacttactcttttaattttttcttttatctattactgaaagacgtgtgtttgaaatgtctataatatttgggggcttatccatttctacttactttctgatatttttgctttatataatttgactctctctctaaatacgtgtgtgtctgtgtgtgtgagagagagtgtgtggtttgtgtgtatatatatgtatgtatcaggctaatacacattgaagtcatcacatcttcttaataacttaaaacttttatcacactggttacactaacttattttaataaatgtttctaacttacattctatttggtctacatagcaactttttaaaaaattatattcatgtagtatgtttgtatgtatatcatatatacacagtatctgtattgtttgaacttcaaagtttctgtaaatttatatattagttgtgtctcttgtaactatgatagagacggatgttttaaattttgccaatctttgtattttaacaaaaacattgtctacttaggtttaagttaatctttgatcatttatacttaattttgtattagtaatttgttgtgtatatatatatatatatawaatgtctcattttctcctatcactttctgtcttcttgttttaaaattatgacttttatttttattgttttcatagatacaacagagaaatgcataatgtccagtcaatttattaaagttccaaagtcggtcgcgcgcagtggctcacgcctgtaatctcaacacttcgggaggccgaggcgtgtggatcacgaggtcaggagttggagactagcctgatcaacatggtgaaaccccgtctctactaaaaatacaaaaattagccaggcagggtggcacgcggctgtaatccccgctactcaggaggctgaggcaggagaattgcttgaacctgggaggcagaggttgcagtgagcggagatgacgccaccatactccagcctgggagaaagggtgaatgagactccttctcaaaaaaaaaaaaaaaaaagagttgcaaagtcatacctttctgctcttgtcagacaattaaggggtctttgaatacttcagccctaataatttgcttcctaacatacatattgcagtgcttatctaattttaaatattcttttgtttcaacacctaattttctattttgatctatctttatgtttacaatatattttgctctgtgttcattctttgatttcagaacttcaatctttctgaagcgtgttttcagagtttcctttgagtttctttagtggaattctgctggtggtgttttgttttttgtctctaaatatgtgatttagccataggttgatgaatatttttcttggttgagaatttcagaatggcattattattcttaacaaataatattgtttattttacctttcatgctttcagatttcaatatgattaaaggtaatttgatttttctagtgctaattgaaatatttttcccttcctgattgtttactatttctctaggagatatgtagatgtaggtttatctccatcgtagcttgcttagcatg

SEQ ID NO: 718278 - DNA, 630 bp, Homo sapiens
tttttgccccccgccgccgcggctttttgcccccaccccgcctcggcttcttgcccaccgcggctttttaccccgcgccgccgcggctttttgcccgccgcggatttgtgcccccctcgccgccgcggctttttgcccgccgcggctttctgccacacacccgccgccgcggctttttgcccctctgccgccgcggctttttgccccaccgccgacacagctttttgcacactcgccgccttggctttttgccgccgcggctttctgccccctcgctgccgcggctttttgcccctccgccaccgccgctgctttttgccccaccgccgccgtggctttttgcccrccgcggctttttgccatcgcggctttttactcgccacggccttttacccgccgcggctttttgcgccccgctgtcacggctttttgtccccctgccgcagcgactttttcgccgccgcggcgttttgcccccgccgccgaggatttttgtccccgccgccacggctctgagggcgggagcggcagactcggctgccagctctactggcgtcctggcaagggcagcgctgaggggtgctcctggtccagctctcctggctcagggattccttgcctaggcgccgg

SEQ ID NO: 718279 - DNA, 526 bp, Homo sapiens
aagtgatgtaagaccccggatatatgccaacatgygtaaaaccccaagtcgaaaggtcagaccacacgcttgcctttcaggttgcccgcttggctgtcttctaactggtactttccttcctttcattcccattctaaaggaagcggaatagctttttcctgtttaggaaagtttataaaaagaacaggaatagccatttcctattctttttaaataaactttcactcctgctctaaaacttgtcttggtccctccttctgccttatgcccctcagtcgaattccttcttcttctgaggagaccataattgaggttgctgcagaaccgtacaggtttgctgccggtaacaataggaagtctactcccttatgagagagaaatgtggctaatataattaattatgggtttaaattttgcagccagaaatctgtgcttgaaagttcggtacaaaaggtagcagcatcaggttctccccctttttgttgaaacattctctttggagttgagcaggagtcccactggtcat

SEQ ID NO: 718280 - DNA, 584 bp, Homo sapiens
tctcaggcatcatgctaagcattttaccaacattgcctcagtttctccccaaacatccctatgaggcagatgctatagtttccacattttaaggtgaggagactgagactcagtggggttaagtgccccaccaaggtgacagagttactcgggcactgtaactagaattggaacccaagtctgtcaccctaaagcccatatttttaccacctatatcacactatttaaaagtatttcccccccaaaaaatacgatcataatatatactctgttgcaacctattttttcattagctatataatatgaaaatcatctatgccaataaatagacttctaaagcatcattattaayagcttttgttctcttgcatggatttgtcatgtgttacttaatcatttgctcaggaataaacctggacaatatcacaatgcagtagagaggactggagggtaactgtttagaaattactttaaatagaagactgcctgactgcagcatctaaacagatttggtttatacagttctgtaagcagggaagagtatttcatgctgagatatttagttgtgtagtgtgattgtgaca

SEQ ID NO: 718281 - DNA, 584 bp, Homo sapiens
tctcaggcatcatgctaagcattttaccaacattgcctcagtttctccccaaacatccctatgaggcagatgctatagtttccacattttaaggtgaggagactgagactcagtggggttaagtgccccaccaaggtgacagagttactcgggcactgtaactagaattggaacccaagtctgtcaccctaaagcccatatttttaccacctatatcacactatttaaaagtatttcccccccaaaaaatacgatcataatatatactctgttgcaacctattttttcattagctatataatatgaaaatcatctatgccaataaatagacttctaaagcatcattattaatagcttttgttctcttgcatggatttgtcatgtgttacttaatcatttgctcaggaataaacctggacaatatcacaatgcagtagagaggactggagggtaactgtttagaaattactttaaatagaagactgcctgactgcagcatctaaacagatttggtttayacagttctgtaagcagggaagagtatttcatgctgagatatttagttgtgtagtgtgattgtgaca

SEQ ID NO: 718282 - DNA, 894 bp, Homo sapiens
aagtaattgaaattcatagattaaacacattcttcaattgaaccattagctcaaacttcttcctcacataacatatcctctggctgatttgcgtttcaccatcccttcccaggactccaactacccagagcttatgctaaggagcaatggaaaggaaaaataaatagacaaagcaggcagtatgaggaaggcaataggggtaaaaaacaagacatggataaactgcaagctgagtaattggctggagtaaaatgagcactttcaaatactcagctctttcaggaaacaaaacgactgcataattgtctaaaactgcagtctgacaacctgaaaaccactgcacctctatttaatttacattccaggaaaactcagtcaaagatccaattacaatgtattaccttggatggaatttgaatactatatatgctcrttgcactttccaattagtagtcaacaagcatgttatttttaccccattatatattcgtctaataacaacttcccatttggtgcaccaacagttctggttggtaccggagggggagcaagacacaaatctgaaccatttagggagtttctctaaacacgttttatgaaaccctacccttaaagcctatatgccatgcacaataccaaccttatggacattcgccttgtaatcggtgaaccgaggctggccgcctgccaaggtgtaggcattaccctctctaaacacactgatcctctgagcagacagcttaggggagcacatctggggcctggggactttcccagacccataaacaccatccattgtttcaagagactcttgcagaaaactgtgagggtattcctcctttggtgactctaattcctgcccatcctcaaagacctgcttcaatactcgaccgc

SEQ ID NO: 718283 - DNA, 897 bp, Homo sapiens
gctggtcttgaactgttgacctcaagtgatctgcctgctttggcctcccgaagtgctgggattacaggcatgagccactgagcccagcccttattaytttcttaataacattttcttttctctagctcactttattataagaatacaatatataatacccacacaaatatatgttaatctactatgttatcagtatggcttctgttcaacaggaggctattagtagttaagttttgaaggtatcaaaagttatatgtggatttctgactgcatgaggtggggttgatgctcctaaccaccatgttgttcaagggtcaactatatttatttaaacaatgtgatattttgatacatagataagttgtgggatgattaaatcaagataattaacattgttttgaagctgtttaaatttctggggctcatgtaccaaatcctaatattgcatttttgcttcctcaaatgttaagagtacatattagcaaaatattcacataaatcataagaagtttagtatattggatgtctgatatcctgttgaaaagttattataaagatattccccccactttttaaaatgtgagtggcttcaggtagacacggccaattaattagacatttatattcttgcaaacagacaacccaaggtcattccccattcaattatttcgtacaggcactggtgaaattgcttttaatttactactatcccaaatttcttcttcccaatgctctgaatgacctttcaggaactttagaaaaccacctagaaaataatgatcacgcataatctaataatattgatttctttctgaggataatgtttcaaaataatattttcttaactttattaaataattccttcaagtaacttaactcaccttttctgatggtgaa

SEQ ID NO: 718284 - DNA, 947 bp, Homo sapiens
ttccatgaataacacaatttgggccaatggtttccttcaagactctggaaacgtatagggcaccttccagggtttgtggagggagaccaggcacgaggcccattactctatcgatgtcactgagcatttgtgtctgaaccctgggccctgggcctgttccccagcgacaggtgccgggtcccgggaggcctggtagggagcagttcaggactgtgacaaaggcccctctggggttctggctgagcacacagacagaaggacagtcagaggaccccggtccaaagccgggggctgccaggggtctggcgggggctgggtggctgcattcgccctgtggtgggtgtagaggctgagaggcaatttgctttgtccacgaggacaggaaggcccaggtcaggcttgcatctcactgacctctgtgagcagctaacaggtcagcyccatgctcccgctgcctgggagggagggagcactatggtccgttgtgcccgtcggcggaagatgcctcttttgggcatcggaaactgccacagaacctgggacaggcaagtgctgtccccaacatcctgccaggtgggctccgtactctgtccctggcggctcaggcaccacactgctgtggtcattcggtgccccttctacagtttgacccctgatttttcaattcatgatgtgaagtacagaaaaaacagtcactctcccttctgttaggtgagctttgtcaagtccctctaaacacacaggggtaactccactctctgctgagggtccaggacacctctgaccccttgcaccccttgtgcaggcaccagggcatccttgggcccagagcttgctctggcccctggggacactggacctgccctggggctccagtccctggtgagttacagaaggggttgcgcgagggaggggccggtagaagtggcacctggccgggtactttg

SEQ ID NO: 718285 - DNA, 947 bp, Homo sapiens
ttccatgaataacacaatttgggccaatggtttccttcaagactctggaaacgtatagggcaccttccagggtttgtggagggagaccaggcacgaggcccattactctatcgatgtcactgagcatttgtgtctgaaccctgggccctgggcctgttccccagcgacaggtgccgggtcccgggaggcctggtagggagcagttcaggactgtgacaaaggcccctctggggttctggctgagcacacagacagaaggacagtcagaggaccccggtccaaagccgggggctgccaggggtctggcgggggctgggtggctgcattcgccctgtggtgggtgtagaggctgagaggcaatttgctttgtccacgaggacaggaaggcccaggtcaggcttgcatctcactgacctctgtgagcagctaacaggtcagctccatgctcccgctgcctgggagggagggagcactatggtccgttgtgcccgtcggcggaagatgcctcttttgggcatcggaaactgccacagaacctgggacaggcaagtgctgtccccaacatcctgccaggtgggctccgtactctgtccctggcggctcaggcaccacactgctgtggtcattcggtgccccttctacagtttgacccctgatttttcaattcatgatgtgaagtacagaaaaaacagtcactctcccttctgttaggtgagctttgtcaagtycctctaaacacacaggggtaactccactctctgctgagggtccaggacacctctgaccccttgcaccccttgtgcaggcaccagggcatccttgggcccagagcttgctctggcccctggggacactggacctgccctggggctccagtccctggtgagttacagaaggggttgcgcgagggaggggccggtagaagtggcacctggccgggtactttg

SEQ ID NO: 718286 - DNA, 947 bp, Homo sapiens
ttccatgaataacacaatttgggccaatggtttccttcaagactctggaaacgtatagggcaccttccagggtttgtggagggagaccaggcacgaggcccattactctatcgatgtcactgagcatttgtgtctgaaccctgggccctgggcctgttccccagcgacaggtgccgggtcccgggaggcctggtagggagcagttcaggactgtgacaaaggcccctctggggttctggctgagcacacagacagaaggacagtcagaggaccccggtccaaagccgggggctgccaggggtctggcgggggctgggtggctgcattcgccctgtggtgggtgtagaggctgagaggcaatttgctttgtccacgaggacaggaaggcccaggtcaggcttgcatctcactgacctctgtgagcagctaacaggtcagctccatgctcccgctgcctgggagggagggagcactatggtccgttgtgcccgtcggcggaagatgcctcttttgggcatcggaaactgccacagaacctgggacaggcaagtgctgtccccaacatcctgccaggtgggctccgtactctgtccctggcggctcaggcaccacactgctgtggtcattcggtgccccttctacagtttgacccctgatttttcaattcatgatgtgaagtacagaaaaaacagtcactctcccttctgttaggtgagctttgtcaagtccctctaaacacacaggggtaactccactctctgctgagggtccaggacacctctgaccccttgcaccccttgtgcaggcaccagggcatccttgggcccagagcttgctctggcccctrgggacactggacctgccctggggctccagtccctggtgagttacagaaggggttgcgcgagggaggggccggtagaagtggcacctggccgggtactttg

SEQ ID NO: 718287 - DNA, 604 bp, Homo sapiens
gcttactctccatttggggcttcacatgtctgttcttacaaacccctctgaagcgggcacacttattgacccattttatagacgaggagcctgaaaactcagagagatgaaccaattcatgcagggtctgaaaagattattgatgaggtgctgcagccacagagagagttcagcagattttcatttctgtttcctgttcttgttccatccacaccacccagctgctcttttcgaggggtgtcaccttcagaggatctgctgtgaatggaatggggttgaatgagccatgtagggagatgggggcttcaatggagggaggggcttctgctcatccttattttgacttggaygcctcccttgaaatcaacagattgtaccaaagcagtggcttctgctcagagtgaagggtggaattcggccacacagggtaccacacaaagggaccatccctgctgatcagaggctggaaggcatcagttgggagtctgggaggagaacaggggacagctgtgaggatgccaggccccaagctgttaaggaaccaagacacacagggtctgagcctgtgccaagcctcctaggagtggccagggtaggcatgaaa

SEQ ID NO: 718288 - DNA, 2005 bp, Homo sapiens
gtgctactgaaaacaggcagtggtaacaggcatttgttcagaaataattataaagttgcctttagcttaaatgctctagtaaaaactttgtgtgacagtttctagtgaaattttacctacttgagaaatttgaaaaattgtaaatacctttgcagttaataaaatgattattttaagagacatttccattatcgatggttcattttatatttcattgtttcaaatcaaaatattttaacttatattattctcttcaacacttcagaattttttgtttacactgctttttttttttttttttttttgagacagagtctccctctgttgcccaggctggagtgcagtggcgcgatctcggctcactacaagctctgcctcccgggttcacgccattctcctgcctcagcctcccgagtagctgggactacaggcacccaccaccacgcctggctaattatttgtatttttagtagagatggggtttcaccagggtctcgatctcccgacctcgtgatccgcccacctggcctcccaaagtgctgggattacaggagtgagccaccatgcctggccacaatgccttatgttttaatcaaagcttccaaaatttctatctcaaatcacctaaactttataaagtccttgaaagattatagaaaataatatattaatatcaaattcgctttatgattatcatacttttcactgtgttaaaagactttcttttattattattattattattattgagatggagtctcattctgtcacccaagctggaatgcaatggtgcgatctcggctcactacaacttctgcctcccaggttcaagtgattctccttcctcagcctcccgagtagctgggaatacatgttcctgccaccacgcccggctaatttttgtatttttagtagagatgggatttcaccatgttgaccagactggtcttgaagtcctgatctcaagtgatccacccaccactatgtccggcccagacttttatgttttatagttaaaacttatttcctggacaaaataaaaataaaacaagacagaacagtggaaataagctaacttttgcwaagtaatattgtttttctttaccagtgatctttgggtgaaaccttttcttcctatttcatttattgcctttcatgacatcagacatccttgactattacttctatagaactcacttgtattactaatgttgctttgtattttctagtgtatatttaaggtttaaattttatgttgatcaaagttctataaatgtcaaaaagaagaaattctctaatctgaagttttgaaaaatctctggattgctgtcaggtaggaagtatgtggtacatgactcaggatttgtgaaagaaaatgtaaatatcaatccattaaatctgattatttccccattgtcttggtttatatcctgctgcaaaaatcctaaggttaaacattaatgctgttatgcagctttgagtctgatacttgataatttgtgaaatgtttacagaataataatcaggagatatttttaaatttttgaaaagtgtcattattaccagagtgataaaatattcaagttttttttttcaaacacaccttacatttacagcatacaaggaaacaatgacatccatacagaactttagtagaactcaatgacccaactgaaaattagtcatttgtaaatacactgaaatgtgaaatgactggtcacaacaactaccataaagccttctgtttacactactcttccattgatatatttattctctcttttttagttttatacttgctaactgagatgacagaactttacaggctcattaagaattatttggcctgaagatgaattgctatgatctgaaatgaattgtgttacatttaagattccagtgaccatcttcatgccaaggttgattacatttaaaatgaaaactttgaaagaagttgaggaattttctctcagaataaagcaggggaggaacacactgcacagga

SEQ ID NO: 718289 - DNA, 1054 bp, Homo sapiens
acaacttagcagcaagaaaacaaataacctcatttaaaaatgggcaaagaacctgaacagagatttctcaaaagatgtaccaacagccaacaagtatatgaaaaaatgctcaacatcactaattatcagagaaatgtaaattaaatctacaataagctatcacttcacgtatgttagaatagctgttatcaaaaagtcagaagataacaagtattagggaagatgtggagaaaagggaactcttgcataccattgatgggaatgtaaattagtacaaacattatggaaaacagtaaggaaattcctgaaaaaattaaaaatagaactagcatatgatccagcaattccactactgagtatatatacaaagaaaatgacattagtatattgaagagatatctgcattcccatatggattgtagcattattcccaataacaagatacagaatcaacctaagtgctggtaaaggatgaatggatttttaaaaatgttatatatatatatatatatatatatatatacatacacatataacatatcacatttatacacacacaatgtaatgttttaaaagtttaaaaaatgttctatatataatatacatatcacatttatacacacatacacacatacaatagaatattattmaaacttaaatttaaaaaagaagaaaatcctgtcatttgtatcaacatggatgaacctgaaggacattatgctaagtgaaataaagcacagtaagacaaatacctcgtgatctcacttatttgtggaatctataaaatttgatttctagaaatagagagtagaatggtggttgggaggggagggagaattgaggagatgttggtcaaaggatacacaatttcagttaggagaaataaactcaggagatttattgtacaacatggtgactatagttgaaaacaatgtatgatgtacttgaaaattgctaagagagtagattttaaatgttcttaccacataaaaaataaatatgtgaggtaatgcctatgttaattagctgaatttagccatttcacaattatgca

SEQ ID NO: 718290 - DNA, 1333 bp, Homo sapiens
tctgtcaaatctgaaatataaagttatcctataaaattaaagtaaacaccagcaattgtctccattgtattgaactaaattgctgttagtgctttttcagttctattttggtaatgaatactaggttatatgaatttttattgcatgctgcttcctttgcaggggtaaaaatcattttgagtgaagaattacttctctcaatataggttaattwtttctgaggagttggccggtgaaacacatgacaggaatattattgcttgtgtttagcttttagcatatttaacacatatagctgagataattcgaatgaaaagaatgctcattttatttaatgaattagtggaaggggcatccagaaattgtactgcaaaagttcaaccaaagctgcttagaccttcttccataaatcaactgagttgattcagtaatttcatagccaataagacaatgtcttcctttgtcttgcttttatttttttccattcaagttatatgcacacactcacttgatgtacaactttactttttaagtttatataaaagatgcaacataattttattctaaatatgcacttgacaatatggattcaaatttaattcactgatgtgcaaccttgcatgtgatatctgaaaccagaaattgtcaaatgatgtatcaaaaaggtagattagcatttgctcagtgcaacctgacatgacagatgggtaggaggagggctgttatccctgagaagagactaaatatattataatttggatgtacacacaaactggataaaactttcataaaagaattttaatgcaaaatctatttttcaaactcataataattagttaagtcctccctttacttacttttttctgtgggtctgtgaaatgccttgcaaagcatctatgcattaacattattttatagggtttacatttattgaaaacctactaatttcaagacactatgctagggtattaggctaccactagtaggagcaataataatactaataatggttgacagttattgagcactcaccatgtgctaggcattgttcaagtgctttacatatagccttatactctctctcacacagatacacacacacacacacacacacacacacgtcaactaacaataaatgacaagtgagtgatgtggacaatatttgttcttgaagattaggagaggcttaacccctacagggccacatggagaaggttgaactgaggtaggacctaaaacaggcaagggttggatggatagcatggggaggagaagacattcactttgcactgtgagcaaaaacttagaagtaggaaactgtagtccagatgaa

SEQ ID NO: 718291 - DNA, 976 bp, Homo sapiens
taatatcatcacactacttttctttatgtgatatttttctgaacaatttttctttttttctgttaataactttgtctgtttttcttataatcatgtttctagcaaatagcatgcagttgtatttttaaaataatctgagaatttttgtttgaaaakatggaatacaatctatttgcattttctgtttactgttatgttccaatttattttctttaacttgttttacattttgttttccaagctgttttgtttctctttttttctcattatcttagtttaggatgcttacattttttgttactttttttccttgtgggcttggaaattttataacttattggtattattttgttatgagtagaaattatcattgccattaattctaatgttagagatcagaaattatacaatgcacatgtaactaaaattatgtaactttgatacatacaaaagtatatacaaaacataataagtgaacacccatgaacttatcacacaatttaagaactactagaacattaccaatatccttgtatcacctgtgcactactcctagttcatcatttatcaggctaatgaagtctcctgttcctagttgctaagagggtttctttttttaaattatgaataagtagagattttatcaatctttttttttagatcaatcaagatgatcatgtgtatttttttccaatcagtgtggacatgcatttaaggttttctaatgtaaaaccatctttgcattcccagaataaacttaatttagtatgtgagttttaatatattgttggatttgttttataaatatttagcttagaattgtttcatctatattcatcggagagattaatcgctacttttttttccctcatgctaacttcgcttttaatatcaaagaataacagcattatagattgaattggagactatttcatgaaaattttaatttttgaaagagttttcagaatattaaaat

SEQ ID NO: 718292 - DNA, 976 bp, Homo sapiens
taatatcatcacactacttttctttatgtgatatttttctgaacaatttttctttttttctgttaataactttgtctgtttttcttataatcatgtttctagcaaatagcatgcagttgtatttttaaaataatctgagaatttttgtttgaaaatatggaatacaatctatttgcattttctgtttactgttatgttccaatttattttctttaacttgttttacattttgttttccaagctgttttgtttctctttttttctcattatcttagtttaggatgcttacattttttgttactttttttccttgtgggcttggaaattttataacttattggtattattttgttatgagtagaaattatcattgccattaattctaatgttagagatcagaaattatacaatgcacatgtaactaaaattatgtaactttgatacatacaaaagtatatacaaaacataataagtgaacacccatgaacttatcacacaatttaagaactactagaacattaccaatatccttgtatcacctgtgcactaytcctagttcatcatttatcaggctaatgaagtctcctgttcctagttgctaagagggtttctttttttaaattatgaataagtagagattttatcaatctttttttttagatcaatcaagatgatcatgtgtatttttttccaatcagtgtggacatgcatttaaggttttctaatgtaaaaccatctttgcattcccagaataaacttaatttagtatgtgagttttaatatattgttggatttgttttataaatatttagcttagaattgtttcatctatattcatcggagagattaatcgctacttttttttccctcatgctaacttcgcttttaatatcaaagaataacagcattatagattgaattggagactatttcatgaaaattttaatttttgaaagagttttcagaatattaaaat

SEQ ID NO: 718293 - DNA, 976 bp, Homo sapiens
taatatcatcacactacttttctttatgtgatatttttctgaacaatttttctttttttctgttaataactttgtctgtttttcttataatcatgtttctagcaaatagcatgcagttgtatttttaaaataatctgagaatttttgtttgaaaatatggaatacaatctatttgcattttctgtttactgttatgttccaatttattttctttaacttgttttacattttgttttccaagctgttttgtttctctttttttctcattatcttagtttaggatgcttacattttttgttactttttttccttgtgggcttggaaattttataacttattggtattattttgttatgagtagaaattatcattgccattaattctaatgttagagatcagaaattatacaatgcacatgtaactaaaattatgtaactttgatacatacaaaagtatatacaaaacataataagtgaacacccatgaacttatcacacaatttaagaactactagaacattaccaatatccttgtatcacctgtgcactactcctagttcatcatttatcaggctaatgaagtctcctgttcctagttgctaagagggtttctttttttaaattatgaataagtagagattttatcaatctttttttttagatcaatcaagatgatcatgtgtatttttttccaatcagtgtggacatgcatttaaggttttctaatgtaaaaccatctttgcattcccagaataarcttaatttagtatgtgagttttaatatattgttggatttgttttataaatatttagcttagaattgtttcatctatattcatcggagagattaatcgctacttttttttccctcatgctaacttcgcttttaatatcaaagaataacagcattatagattgaattggagactatttcatgaaaattttaatttttgaaagagttttcagaatattaaaat

SEQ ID NO: 718294 - DNA, 976 bp, Homo sapiens
taatatcatcacactacttttctttatgtgatatttttctgaacaatttttctttttttctgttaataactttgtctgtttttcttataatcatgtttctagcaaatagcatgcagttgtatttttaaaataatctgagaatttttgtttgaaaatatggaatacaatctatttgcattttctgtttactgttatgttccaatttattttctttaacttgttttacattttgttttccaagctgttttgtttctctttttttctcattatcttagtttaggatgcttacattttttgttactttttttccttgtgggcttggaaattttataacttattggtattattttgttatgagtagaaattatcattgccattaattctaatgttagagatcagaaattatacaatgcacatgtaactaaaattatgtaactttgatacatacaaaagtatatacaaaacataataagtgaacacccatgaacttatcacacaatttaagaactactagaacattaccaatatccttgtatcacctgtgcactactcctagttcatcatttatcaggctaatgaagtctcctgttcctagttgctaagagggtttctttttttaaattatgaataagtagagattttatcaatctttttttttagatcaatcaagatgatcatgtgtatttttttccaatcagtgtggacatgcatttaaggttttctaatgtaaaaccatctttgcattcccagaataaacttaatttagtatgtgarttttaatatattgttggatttgttttataaatatttagcttagaattgtttcatctatattcatcggagagattaatcgctacttttttttccctcatgctaacttcgcttttaatatcaaagaataacagcattatagattgaattggagactatttcatgaaaattttaatttttgaaagagttttcagaatattaaaat

SEQ ID NO: 718295 - DNA, 600 bp, Homo sapiens
tggtctaaatcagctgaactctctcctacccaacaatctgccttaaacagcaaatttctagacatccaaaaatgatagtctcacttaaaaaaattctgtaagtggaggtaatgagactccgaaggggaacagataaattaagtaatatatcggaaaccacaaagagagtaaatggcagagttgaagttcagacacagctagtttgtttctggggaccaatctctaagagaacaggacactagggtcatctagctatatgatttctctatacatgagttcaggaattgcaatgtgctcattaacatttctcacataatgaaatattaaataaraatggttatacatcagtgagaacacatggacacaggaaggggaaccacatacactggagcctggcaggggagtggggtggggagggagagcattaggaagaatagctaatgcatgctgggcttaatacctaggtgatgggttgataggtgcagcaaaccaccatggcacacatttacctatgtaacaaacctgcacatcctgcacatgcaaatcagaactaaaaagaaaaattagaaaagaaaaaaagaatggttatacatgtctaat

SEQ ID NO: 718296 - DNA, 2804 bp, Homo sapiens
ctttcacagctcagagaaacatggtgagcacagtgctcccttctaagtgacgggagcttcgagatacaacaatgagactttactttggaggaaatgtctcagaatttcacagatcctaaaaactttcattcacgaaccaggtcgatgaatggtttctgtgtttctctcccaccctctggagcatgcagggcttaacaaaatctgcaacttacttgacacttcttgctcatcgaagatttaaatgatactatcaatacagtgtaccaatgttttgctgttggtgcagacagttcaattctctttggactagattaggaaaaattgggggacttgrtatacctctggagtaagaacataaatgcatacttttgtctagtccatgtgaatatgaactgtttctgttctttcttcctgataacaatagaaaaaatgcattccccaaatcaaagactgcatgccaaagaccttgcaatttttgcttttatgttcatattgtttataacatgattaatttattaactttacattccaattctattttcttatgtattcaagtgaaaagtgttaattatgagaaattctgcactatggcactgctaatattgcaatctatatcccagacttcgttttaccgacagaagaaagcataccctcatcaatttgtcatgtcttcggaagaagggacatgggtttgtagtggaattcatgactttttctgcctgaacattaattagcagaagcatgctccatttctttatatagacccactcttagaaccaaggtgaactgagtgaaaaagatacttgcctttatatttctcttatcaaactaaccattcttgaatctacctttatcacttttctcccaggacctcctagtggaagaaactgtgaaaatggctggtgtcacttcagacgcaaaaggaaaagtggcacatcatgttcagaatccgattaaatagtgtcagcaattattacctctgcttaaaggattcagagctgagtttgttcagctaccctgccctgactaatggcatcatgcaggtgtacttagaagtaaatttaaaactcccccttactttaggatcacacatctcctagggtaattgcaggagtgattgggaaagagcagtctactctgaggaggtcagatggagaccaagtgaatcctgtaaaatacaagtagtgtcatatgacaaaaatgcaaatccaacactactaagtcttggatttcttctttgtttccttgattaattttcttgcttcgctccaaaaatcatagcataaagcaaattattgttctacctattgctttccactttactcatctttcatctggtgtctgtgtgattatgtctccattagagactgagacctgttattacctattaaatcccttcattccaggatgtggaactaattagataagtttcagattgttgaatttagtggttattttagaggtaattagatcgttaaatttaacacttgtagctccacatgatgatggagtgcaaatatctatttattcataaatatccataggcagggatcagaaccaacattgagaagacccactccctccaaacaagacgaccaagaaaacaaattgattctactaccttggatttattaaacttgctgagcaaagagccgtacctctatggagtcccagtactgcctaaaacaagggtgagtcagagaccagaatttaaagggtctggggactggagctattcataggacacttttagggggaaggttagtaaggtccttctcaggagggactggacagaatttctttttctttttcttttcttttctttttttttttttttttttttttttgagacggagtcttgctctgtcgtcccggctagagtgcagtggcgcgatctcggctcactgcaagctccgcctcccgagttcacgccattctcctgcctcagcctcccgagtagctgggactacaggcgcccgccaccacgcccggctaattttttttgtatctttagtagagacggagtttcaccgtgttagccaggatggtctcggtctcctgaccttgtgatccgcccgcctcggcctccgaaagtgctgggattacagacgtgagccaccgcgcacggccagaatttctaaactaggcgaatcataggtttattcagtggaacttagctgctggaacatgaagatctgcgcagagttgctggatccgtttggctttggtcttatcttggatcatcgggtctgagtaagctggtgttaaaacaatttgagcttagtgtggtatggcagggtttgtagactcgtcctgtgctgtaagtcacagggcttttgcaacttctgtgtttgttcatttctcaatttgccctctttcctcaccaacagaactgcccaagaaatcaacttacagtatagctactggaacttagctccgaaaaggtcctctgcaaatctagaacacttgtttttttgttttttttttttttttccaaataagaaagttgaagagcaaaacgacgtgtctaacgtcacacattgagctttaaagacagatgggatctggcatgcgtttgtcagttaacagtgctagcacaaatacaactcttgttaaaatcgtaaggattttatgtcgtgagacactcaggactcacctgatctcggtgttcagttgtgcgtagtttttgatttgcgcctcgcccttgggcaagtgcagaatcctggggttatacaaagcgcatcacagttaacccctttgtcccagtccgcagaatgagagctcagagcccggccatgggaggc

SEQ ID NO: 718297 - DNA, 3036 bp, Homo sapiens
  misc_feature 1346, 1347, 1348, 1349, 1350, 1351, 1352, 1353, 1354, 1355,1356, 1357, 1358, 1359, 1360, 1361, 1362, 1363, 1364, 1365,1366, 1367, 1368, 1369, 1370, 1371, 1372, 1373, 1374, 1375,1376, 1377, 1378, 1379, 1380, 1381, 1382, 1383, 1384: n = A,T,C or G
  misc_feature 1385, 1386, 1387, 1388, 1389, 1390, 1391, 1392, 1393, 1394,1395, 1396, 1397, 1398, 1399, 1400, 1401, 1402, 1403, 1404,1405, 1406, 1407, 1408, 1409, 1410, 1411, 1412, 1413, 1414,1415, 1416, 1417, 1418, 1419, 1420, 1421, 1422, 1423: n = A,T,C or G
  misc_feature 1424, 1425, 1426, 1427, 1428, 1429, 1430, 1431, 1432, 1433,1434, 1435, 1436, 1437, 1438, 1439, 1440, 1441, 1442, 1443,1444, 1445: n = A,T,C or G
tggagaatgcgggcgtcgatcccgctacctctcgcatgctaagcgagcgctctaccgcctgagctaattccccactgaggatacaccatcccccacccattttcctggttatcaggagcctgccggtactttgggccgccaaatccctggcaggacaagattgagggcggagcttctcagatactgccttgggcaaagttctacgagcctgagagtgtgaagaatacggatttccaaaataggtcatgagggagacctctctcctcacttctcaatttcgccttcttcatctctcggaagtagagagcacgttccagttggagaagcaccacccggaactgcctggcttgcgggcacagctattccagcccgctctagagctgtgatcctcacctgctccctgcaggcaaggccgcccggaagtagtggggcagcttctcccagccccagaacttcacgccatacgcgccgcatcttcaatagcactttcctcctgtaggactcagaaagtgatggagaaccttggaggagttgagaaagagaaagcttgagaattttcatctcaatctgtggattcattcctgaagcacttcttcagcaccaggcacagtggatgaggccagtgatccacatagaaagtgccacaacaatagcaagtaatagtactgtgcaattgccgtctagaccctattttagatgctgtacacatattaatagtaatgcaggtaaaatgcctagaaatagtttataatcttcattttttatatgaaaaattatggaaaattgtcaccacagagctcagggatctctcagccaaaaggaaaaacagatgcaggytataccgtgtctgctgtgtaggtgcttctcctgccatttcccttccctgtcaccttcctccccccttctcttgctccattgggcaccacacttgtccttcttatgcctgtctagttcttcaattcccgggcccacagaagaaggcttcccctgtagcccaggggaggctacattagctccactgccttggagttgtagtggattccaaatctgctttccacctgtgaagaattctcatttaagacaggaacatagttattttactctgagtataactagcgtcaagtaggatttttgcctgatgaaaatttgctgaatggagaaaggctatacagataatttagaagcctcaaaggagagagtggcttcagatcagtaaagactgaagaaaggattagaagctagggtctaacaaacccatagaaatgtttttgcctgaaaagaaatgtggttggggaagagtggaggggcactactttcagagtgattagtgggtgggaggcatggcnnnnnnnnnnnnnnnnnnnnnnnnnnnnnnnnnnnnnnnnnnnnnnnnnnnnnnnnnnnnnnnnnnnnnnnnnnnnnnnnnnnnnnnnnnnnnnnnnnnntctttgcaactttagctcactcattcatacaacaaatatctaattccaaaccctcttccttacttactttttgggcttaacttttttttttttttttttcgacagagtgtcactctgtcgcccaggctgcagtgcaatggtaagatcttggctcactgcaacctctgcctcccgggttctagtaattctcctgtctcagcctccagagtagctgggactacaggtgcctgccaccacgcttggttaatttttgtatttttagtagagacggggtttcaccatgttggccaggctggtctcaacctcctgacgtcacgtgatcagcctaccttggccttccaaagtgctgggattacaggcatgagccacccctcctggcctgggtttaactattttattttatgacagggtctcactttgttgtccaggtaccggtgcgttctctgttcactgcaacctccacctcctgagttcaagcgatcctcccacctcagcctcctgagtagctggaactacagatgcataccaccacacccggctaatttttgtatttgttgtagagacaggttttcactgtgttgcctaggctggtctcaaactcctggtgtcaagggatccactgatctcggcctcccaaagtgctgggattacagaaatgagccaccacgtctggccctgggcttacctttcaagtcaactttgattcattgtcttccttgaaacaccacattcagtgattagtcaaataatgaacattattcttgcacaactcttttgaatctatcaattactttctactcatttagtacatattcactggggagatgctctgtgccagacactgtagtaagatcaggtaattcagaggaagtatagacaccccagacctcaaacgaagacaagataaatatggacaagggaagatccacctccacattcaccattttcagtctttctgtcatttccagctaaataacgtcttcaaaaatgtttcaaaataactaagtcactatttcaaactctttcaataatagcacccttctatacgctggactactcttaattttctcattataacatgatcttgcttttcttttaatttttgtctttgctttctacctgaatttttattttgcattatgaaattgataggtccattactggatggcatggttcaattctccagtatgtctgttgatttgtgttctactaaatcttccaattactgagagaggagtgttaatgactgcaactataactggatttttctatttttacttggcgtatccaattttgtttatgagttttgaagctctgtgtcctcatatacatttgggacaatattctcctgaaaaattgacaatcataattatttaggaggcctcattattcctgaaaagtttctctgctttcaaatctactttgtctgattttatatatatacaccacagctgtctttgattaatgcttgcatgaggtatcttttcccactcttttctttcaatctgctctataacttttattcttatttataagtgtattgcaggtggctttctttagtcagcatatttatttttaacacattctgatg

SEQ ID NO: 718298 - DNA, 3036 bp, Homo sapiens
  misc_feature 1346, 1347, 1348, 1349, 1350, 1351, 1352, 1353, 1354, 1355,1356, 1357, 1358, 1359, 1360, 1361, 1362, 1363, 1364, 1365,1366, 1367, 1368, 1369, 1370, 1371, 1372, 1373, 1374, 1375,1376, 1377, 1378, 1379, 1380, 1381, 1382, 1383, 1384: n = A,T,C or G
  misc_feature 1385, 1386, 1387, 1388, 1389, 1390, 1391, 1392, 1393, 1394,1395, 1396, 1397, 1398, 1399, 1400, 1401, 1402, 1403, 1404,1405, 1406, 1407, 1408, 1409, 1410, 1411, 1412, 1413, 1414,1415, 1416, 1417, 1418, 1419, 1420, 1421, 1422, 1423: n = A,T,C or G
  misc_feature 1424, 1425, 1426, 1427, 1428, 1429, 1430, 1431, 1432, 1433,1434, 1435, 1436, 1437, 1438, 1439, 1440, 1441, 1442, 1443,1444, 1445: n = A,T,C or G
tggagaatgcgggcgtcgatcccgctacctctcgcatgctaagcgagcgctctaccgcctgagctaattccccactgaggatacaccatcccccacccattttcctggttatcaggagcctgccggtactttgggccgccaaatccctggcaggacaagattgagggcggagcttctcagatactgccttgggcaaagttctacgagcctgagagtgtgaagaatacggatttccaaaataggtcatgagggagacctctctcctcacttctcaatttcgccttcttcatctctcggaagtagagagcacgttccagttggagaagcaccacccggaactgcctggcttgcgggcacagctattccagcccgctctagagctgtgatcctcacctgctccctgcaggcaaggccgcccggaagtagtggggcagcttctcccagccccagaacttcacgccatacgcgccgcatcttcaatagcactttcctcctgtaggactcagaaagtgatggagaaccttggaggagttgagaaagagaaagcttgagaattttcatctcaatctgtggattcattcctgaagcacttcttcagcaccaggcacagtggatgaggccagtgatccacatagaaagtgccacaacaatagcaagtaatagtactgtgcaattgccgtctagaccctattttagatgctgtacacatattaatagtaatgcaggtaaaatgcctagaaatagtttataatcttcattttttatatgaaaaattatggaaaattgtcaccacagagctcagggatctctcagccaaaaggaaaaacagatgcaggctataccgtgtctgctgtgtaggtgcttctcctgccatttcccttccctgtcaccttcctccccccttctcttgctccattgggcaccacacttgtccttcttatgcctgtctagttcttcaattcccrggcccacagaagaaggcttcccctgtagcccaggggaggctacattagctccactgccttggagttgtagtggattccaaatctgctttccacctgtgaagaattctcatttaagacaggaacatagttattttactctgagtataactagcgtcaagtaggatttttgcctgatgaaaatttgctgaatggagaaaggctatacagataatttagaagcctcaaaggagagagtggcttcagatcagtaaagactgaagaaaggattagaagctagggtctaacaaacccatagaaatgtttttgcctgaaaagaaatgtggttggggaagagtggaggggcactactttcagagtgattagtgggtgggaggcatggcnnnnnnnnnnnnnnnnnnnnnnnnnnnnnnnnnnnnnnnnnnnnnnnnnnnnnnnnnnnnnnnnnnnnnnnnnnnnnnnnnnnnnnnnnnnnnnnnnnnntctttgcaactttagctcactcattcatacaacaaatatctaattccaaaccctcttccttacttactttttgggcttaacttttttttttttttttttcgacagagtgtcactctgtcgcccaggctgcagtgcaatggtaagatcttggctcactgcaacctctgcctcccgggttctagtaattctcctgtctcagcctccagagtagctgggactacaggtgcctgccaccacgcttggttaatttttgtatttttagtagagacggggtttcaccatgttggccaggctggtctcaacctcctgacgtcacgtgatcagcctaccttggccttccaaagtgctgggattacaggcatgagccacccctcctggcctgggtttaactattttattttatgacagggtctcactttgttgtccaggtaccggtgcgttctctgttcactgcaacctccacctcctgagttcaagcgatcctcccacctcagcctcctgagtagctggaactacagatgcataccaccacacccggctaatttttgtatttgttgtagagacaggttttcactgtgttgcctaggctggtctcaaactcctggtgtcaagggatccactgatctcggcctcccaaagtgctgggattacagaaatgagccaccacgtctggccctgggcttacctttcaagtcaactttgattcattgtcttccttgaaacaccacattcagtgattagtcaaataatgaacattattcttgcacaactcttttgaatctatcaattactttctactcatttagtacatattcactggggagatgctctgtgccagacactgtagtaagatcaggtaattcagaggaagtatagacaccccagacctcaaacgaagacaagataaatatggacaagggaagatccacctccacattcaccattttcagtctttctgtcatttccagctaaataacgtcttcaaaaatgtttcaaaataactaagtcactatttcaaactctttcaataatagcacccttctatacgctggactactcttaattttctcattataacatgatcttgcttttcttttaatttttgtctttgctttctacctgaatttttattttgcattatgaaattgataggtccattactggatggcatggttcaattctccagtatgtctgttgatttgtgttctactaaatcttccaattactgagagaggagtgttaatgactgcaactataactggatttttctatttttacttggcgtatccaattttgtttatgagttttgaagctctgtgtcctcatatacatttgggacaatattctcctgaaaaattgacaatcataattatttaggaggcctcattattcctgaaaagtttctctgctttcaaatctactttgtctgattttatatatatacaccacagctgtctttgattaatgcttgcatgaggtatcttttcccactcttttctttcaatctgctctataacttttattcttatttataagtgtattgcaggtggctttctttagtcagcatatttatttttaacacattctgatg

SEQ ID NO: 718299 - DNA, 559 bp, Homo sapiens
gacttgatatacctctggagtaagaacataaatgcatacttttgtctagtccatgtgaatatgaactgtttctgttctttcttcctgataacaatagaaaaaatgcattccccaaatcaaagactgcatgccaaagaccatgyaatttttgcttttatgttcatattgtttataacatgattactttattaactttacattccaattctattttcttatgtattcaagtgaaaagtgttaattatgagaaattctgcactatggcactgctaatattgcaatctatatcccagacttcgttttaccgacagaagaaagcataccctcatcaatttgtcatgtcttcggaagaagggacatgggtttgtagtggaattcatgactttttctgcctgaacattaattagcagaagcatgttccatttctttatatagacccactcttagaaccaaggtgaactgagtgaaaaagatacttgcctttatgtttctcttatcaaactaaccattcttgaatctacctttatcacttttctcccaggacctcctagtggaagaa

SEQ ID NO: 718300 - DNA, 559 bp, Homo sapiens
gacttgatatacctctggagtaagaacataaatgcatacttttgtctagtccatgtgaatatgaactgtttctgttctttcttcctgataacaatagaaaaaatgcattccccaaatcaaagactgcatgccaaagaccatgtaatttttgcttttatgttcatattgtttataacatgattamtttattaactttacattccaattctattttcttatgtattcaagtgaaaagtgttaattatgagaaattctgcactatggcactgctaatattgcaatctatatcccagacttcgttttaccgacagaagaaagcataccctcatcaatttgtcatgtcttcggaagaagggacatgggtttgtagtggaattcatgactttttctgcctgaacattaattagcagaagcatgttccatttctttatatagacccactcttagaaccaaggtgaactgagtgaaaaagatacttgcctttatgtttctcttatcaaactaaccattcttgaatctacctttatcacttttctcccaggacctcctagtggaagaa

SEQ ID NO: 718301 - DNA, 559 bp, Homo sapiens
gacttgatatacctctggagtaagaacataaatgcatacttttgtctagtccatgtgaatatgaactgtttctgttctttcttcctgataacaatagaaaaaatgcattccccaaatcaaagactgcatgccaaagaccatgtaatttttgcttttatgttcatattgtttataacatgattactttattaactttacattccaattctattttcttatgtattcaagtgaaaagtgttaattatgagaaattctgcactatggcactgctaatattgcaatctatatcccagacttcgttttaccgacagaagaaagcataccctcatcaatttgtcatgtcttcggaagaagggacatgggtttgtagtggaattcatgactttttctgcctgaacattaattagcagaagcatgttccatttctttatatagacccactcttagaaccaaggtgaactgagtgaaaaagatacttgcctttatgtttstcttatcaaactaaccattcttgaatctacctttatcacttttctcccaggacctcctagtggaagaa

SEQ ID NO: 718302 - DNA, 1093 bp, Homo sapiens
agaatgagtagccactgcgccttgccctgggccatcagtgagaagacctgctcttagtagagccctgctttcccgctgaaggccttgaaatcccctgtgttccaggacacccactaaagatcaagaaagctcccctgacgtggggaattagctcaagcggtagagcgcttgcttagcatgcaagaggtagtgggatcgatgcccacattctccaagctttattatttggaccttgggtctccaaacactcaagtatccaaacccaagttagtgtctgagagcaggatgctgctttggttcaagacataggagcagcaacaatacaggcctggtgatggctccctcctggcattcagtatagtgtagatctactgtgtaattcatttgctgtttcytcaaggagctgtgaaaccaagggacatatacaactgctcttttctccctgtttctgcctgcagcttggtcctaaacctcagacaatcgtgaaatgtgcagggcagagccacctgggtaaacacagcctcggctttctgctcaggggactgaaaccaggatgtgtcaagtaactagaatgtgcctggacagatactgtagaaagcaaacccataaagttgttcatgagcttgtggacacacctgccagctgtgaataagtggctctaatcccaaacaacttacctacaaagagcctgagagctgaactgcgcaatggcccactttccagtcctcactgaagttgcacacactccggaaatctctgaacagtggcgtaaaggctttgcaaatagagttatctttgaaacaacaacacgtggaaggctggttggtacttggaacttgaatacaaggcaattttgtgcctgcaaaaacaaaaatagcaatattattcttaagatttcaacaaaacacagtgtctcatcacataatccaaagaagtccaggttacaagccccaaaatcttcggcattatgaaaaaaacagggagatcttcattcacatggcaaagagactcctcgaataacaatactgagaggacacagatgtcaaaatcatctgacgcatacagtggagcagttatgacaacaatgctccta

SEQ ID NO: 718303 - DNA, 1509 bp, Homo sapiens
acacacacacacacacacacacacacacacactttgcttttgctataagactttttttcctttttttttttgacaaagtctcactctgtccccactttggcctcccaaagtgctgggattacaggcgtgagccaccgcgcctggcccattatttttcttagattaaaatcatgttttctttctattttgtcctgaaatcatatttatagatatgctatttaatacatttgcaaatctttaagtagtgatctttttcccatcaaatacctttggggaatttggatttgaaagcattaggagatatttggcaagattcaggatagaaggaggctaaagaatatttgaaattatggaaagaaagcagttttcatgggataaagtatttctggatgtggcagtgctgtatattttagagataagtggaagaaaatattccagtaaaataccgtggaaatagatgaaggagctagaacattcacgtctcaccttcccaattttggctataggtttatatagaagataatttaagggacaagaaaaacaaaagactacaaatttggttcaatgtacactgctcaggtgaaggatgcaccaaaatctcacaaatccccaccaaagaacttacacatgtgaccgaataccacctgtttcccgaaaacctatagaaaggagaaaattctaaaaatgggcaaatttatttatcattctagcatctgatattagttccctgaggaagaatatttctgaccataatatgagctcaatgtgaaaaaataactcattaagatctaatcagctaatgacatcttagtgtggttgtattgttttagacctcaattcctgaaggtttttagtgaaaggcaaagtgtcagtttcatctgtgagaagatctggaacaagtcaattttagacacatttctaagattccttgagcctgatccaccatcgatcaatttttctcactttcctttctttaagaggtaaaattgggtaactctaactttctagcccagagataaatgaaccttttcattttaaactgcctcccagcacatcctttttaatgtagagagatcaaactaacaagaaatgaaattttaaaagctttcatatacgtcagctgcaatggtggtcactcgggtcttctctaccattagtctgaatgcattaatctgctttagttcttgtcyggtgctgttgaaatttcactctgatttctctggacactctggtacccatatgccttattagtaggacatgtgcttgcaaagagatgcaactatactattcaacagttaaaatgactcttatccatttacatttttggaagttttgagataacactttctaaaatacaatagtttgattatttgtaagcacattaaacagatgtcaagaggaaggatcattttatattcctgtatttaaatgtctagttcagaaaataatttatactcttcaaaaggaagaagtttcatctaaaagtagatcagaagtaattcatatgca

SEQ ID NO: 718304 - DNA, 1509 bp, Homo sapiens
acacacacacacacacacacacacacacacactttgcttttgctataagactttttttcctttttttttttgacaaagtctcactctgtccccactttggcctcccaaagtgctgggattacaggcgtgagccaccgcgcctggcccattatttttcttagattaaaatcatgttttctttctattttgtcctgaaatcatatttatagatatgctatttaatacatttgcaaatctttaagtagtgatctttttcccatcaaatacctttggggaatttggatttgaaagcattaggagatatttggcaagattcaggatagaaggaggctaaagaatatttgaaattatggaaagaaagcagttttcatgggataaagtatttctggatgtggcagtgctgtatattttagagataagtggaagaaaatattccagtaaaataccgtggaaatagatgaaggagctagaacattcacgtctcaccttcccaattttggctataggtttatatagaagataatttaagggacaagaaaaacaaaagactacaaatttggttcaatgtacactgctcaggtgaaggatgcaccaaaatctcacaaatccccaccaaagaacttacacatgtgaccgaataccacctgtttcccgaaaacctatagaaaggagaaaattctaaaaatgggcaaatttatttatcattctagcatctgatattagttccctgaggaagaatatttctgaccataatatgagctcaatgtgaaaaaataactcattaagatctaatcagctaatgacatcttagtgtggttgtattgttttagacctcaattcctgaaggtttttagtgaaaggcaaagtgtcagtttcatctgtgagaagatctggaacaagtcaattttagacacatttctaagattccttgagcctgatccaccatcgatcaatttttctcactttcctttctttaagaggtaaaattgggtaactctaactttctagcccagagataaatgaaccttttcattttaaactgcctcccagcacatcctttttaatgtagagagatcaaactaacaagaaatgaaattttaaaagctttcatatacgtcagctgcaatggtggtcactcgggtcttctctaccattagtctgaatgcattaatctgctttagttcttgtccggtgctgttgaaatttcactctgatttctctggacactctggtacccatatgccttattagtaggacatgtgcttgcaaagagatgcaactatactattcaacagttaaaatgactcttatccatttacatttttggaagttttgagataacactttctaaaatacaatagtttgattatttgtaagcacattaaacagatgtcaagaggaaggatcattttatattcctgtatttaaatgtctagttcagaaaataatttatactcttcaaaaggaagaagtttcatctaaaartagatcagaagtaattcatatgca

SEQ ID NO: 718305 - DNA, 706 bp, Homo sapiens
cagtaacagattcttgctagagcacatggtgcaatgttgacagatgacaaatgtgggaaatttgctgcagaatttgaggggaagttttcctgattccttaaaggaggttctcaggaagaaattctgtatctttcctctgtacaatgtcacatctgaatatgatgcttgggattgctgctgccatctagccatgaacctgagaagcyaaatcatagatggggtgggaccaaaataattccagaagaaagtggctgcagctctgtcctacctacttatgataggaaagaataaatactcctattttaaaagtcattctagggtggatgtttattacttgcagctaaacacatgtaaatgaatccatatggtttttatggaatcatccctttatgtctcaaggagtaaaccatttatgtggttaatcctctatcctagcatgctaaaagactcattaataggaaagcaattattccataattatttccatgtaaatcttaaaagataatagtgctttacttccttaactcactctttacttttccccttgtctttattagtcctgttggcttttacacatgacatgttatgaagcacatcacttgttagcaaatgaaataaaacaaaaatggtctcgtatgtaatcattcacaatttttggtgacattatatgcaatcgcatatatccattcaagttatatgcctgaca

SEQ ID NO: 718306 - DNA, 877 bp, Homo sapiens
actacttacgaatcatgattatatatattttatagccctgttgttattgaaaactgttcttgaaattcagagcctgacagtctgttgaatgcagaaaacctgttaaaaagcaatctgaaatgcatttcaggtgaaatcactttttaccaaagtgcagatcatttcatttattctaaaggcatataattagaaaggagaacaaattgtttttatttttacaatatagcacaaatatatgtttttattctagcctcagcatgtgtatagtcatgaaaaagtccatgtcagaagagaataatttttttccatttgcatggacctctataatatatatactcaaaattttaaaaatgtattttcaagtgaaaaaaacagatggtattatttattttggccttatctgcatgtcagaaaattaaaactttttaaattgtgacacattacacattgctgtacaaaatttgattatcagaggcagaattcatattttttctgcttaaaawacagaagacaaattttctcatttagggaaatcaattttattagtgcttggtcagaaaagactaaaaatttcatgttgaatacgtactaattcaatttttactgaataattttaaaggcatacattgaaaacatttatctgctaaactaacaaaaggttatttatttggtcactgctttattaacacttatttactgaaagaacagctactttttaattcctaaatcataaaatgttagaaaggaaaagtgcttttatatgacatattttaaataagcctgttcacttggggaatggatttaggaaagtaaactttattactgaataaatttaggtccactcaaaatagttcataatatttttaaagattatcta

SEQ ID NO: 718307 - DNA, 2830 bp, Homo sapiens
gatgcaattgttgcagctcattgggaccaggtgtcttttctggtgtgtcataaaagggctctgtatccttttattgtcaatacctgaaggcaaacaaccaggtattgacaatctattgatttcagatgatgtgtaatgccatcatttcttggataagaaattaggagaaaatctctctttctctttccaaaggagagcaactcagtaaagagtaatggaatcctggctaactatggggctaggcttaaaaagagtccccactctcacacattttagcagcagtataaattggtacaaccacttggaaaaactgtttgacagtagctaatataacttaatatatgttgggccaggtgcagtggctcacacctgtaatcccaacattttcggaggccgaggtaggtggatcacttgagatagggagtttgagatcagcctggctaacatggcgaaatcccatctctactaaaaatacaaaaaaaaaaaaaaaaattgcgggcaaggtggtgtgcacctgtaatcccagctacttgggaggctgaggcacaagaatctcttgaayccgggaggcagaggttgctgtgagctgagatcacacccgggcactccaacctgggtgacagacagaaactctgtctcaaaaagaaaaacccaaacaaacaacaacaaaacaacttaatatatgctgaataaaagcaattccatgcttgtgcacttaatctaagagaaatgagcgtggatgtctacccaaaaacaggtacggaaatatccatagcagctttattaataatatcccccaaacagaaacaacacagaaactgtggtgtgttcatgtatggagtactactgagtaatgaaagagaatgaaatactgaaatatacagtaacatggccgaatgtcacagatacatcaatacaaaagaaaacattcagggtgattctatttagttgaagtttagaaacaggtgaactgaatctatgataatagaggtcattttggagggtgttgattttgagggggatagagtaggagagagccatctggagtgcagggaatgttgataccttcactggggtagtgattacatgagtaaaacttgagtatttagccgaatgtaaattatacatagtagaaaactaaacattttacaaagaatttctttccactggtaacgttgtcttgaggggctgcagaatgggacatcccaatgactgtgcttgatagcagcaatctggggtcggttgtgtcctcaaccccattctacaatggtcaattgcatatgctcttgcccacctgtgctgggcaacaatcaccaatcagccaaggctctgtcaatgcctgtgcattaagccagtgccctcaggactgcttccacctggaggacaaaggctgaggccacacaagctctaggacagcggacagcttttctcaaacttcagtgtgtaaaataatcacctggtgatgttataaaaatactgattctgatctaataggtcctggggtggggatgtcctcaaatgtatttccaataagctcctaggtgatactgatgctgcttgaccaactttgagtatcaaggctctagaagctgacaggccagggtaagaatcttggctctgccatgtatgagctctgtaatctttgtttttttgtttgtttgttttcttttttcttttttttttgagatggagtctcactccatcactcaggctggagtgcagtggcactatctcagctcactgcaacctctgcctcccgggttaaagcgatccttttgcctcagcctcccttgtagctgggattacaggcctgcaccaccacacctggctaatttttatatttttagtagagacggagtttcactatgttagccaggctggtcttgaactcctgatctcaggtgatctgccctcctcagcctcccaaagtggtggaattacaggtgtgagccatcttttctggcctgagctctgtaatctttgccaaactacttgacctctctgaacctcagtttctttttccataaaatggcaggggtgggatggcttatctgaggtggagtggggagggacaggtaagacaaccatctcccagaatggtgcagattaagcaggataatatacataaagtgtttagcagagtacctgctctatagcaagcactcactaattgataactcttgttatattatttttaataaagaagaaggcttgggtcatgatttggagaaaggtgagtgaagtagttaatgagagcaggaacgaatgagcagttcccttgtatcttatctaggaaggatattttctcttctttttcttccacttcatccatcatccttcccttgaattcattccccgggtcttcactatcaagataagatgtgtttcttcttcattcttcctcccaccccaagccacctaaaatctaacaaagctggaagaactcaggcagaactgaagcttgaagccagacagattgtcagattgtgcccggaggtgatatctttgttaaggaaacatcctccccaccttggctgtttctagaggggcaggcttggcccttgagagtagaggtccatggctgggtctccacgcatgcccacgcccagctgccctcctcagaaaccgcccatgcttctccacacgcaaggcccctctggaggaagacatatgtttctcaatctgtggggctgtcagttggcatctttttcaagaactgaattaacttgtcgtcctagagggaaaaaagagaagtgctttgttttgtgttgtctgtagggtaacaggcctggactgggtccaagtttgggggtgctcctctttcagttgg

SEQ ID NO: 718308 - DNA, 2830 bp, Homo sapiens
gatgcaattgttgcagctcattgggaccaggtgtcttttctggtgtgtcataaaagggctctgtatccttttattgtcaatacctgaaggcaaacaaccaggtattgacaatctattgatttcagatgatgtgtaatgccatcatttcttggataagaaattaggagaaaatctctctttctctttccaaaggagagcaactcagtaaagagtaatggaatcctggctaactatggggctaggcttaaaaagagtccccactctcacacattttagcagcagtataaattggtacaaccacttggaaaaactgtttgacagtagctaatataacttaatatatgttgggccaggtgcagtggctcacacctgtaatcccaacattttcggaggccgaggtaggtggatcacttgagatagggagtttgagatcagcctggctaacatggcgaaatcccatctctactaaaaatacaaaaaaaaaaaaaaaaattgcgggcaaggtggtgtgcacctgtaatcccagctacttgggaggctgaggcacaagaatctcttgaatccgggaggcagaggttgctgtgagctgagatcacacccgggcactccaacctgggtgacagacagaaactctgtctcaaaaagaaaaacccaaacaaacaacaacaaaacaacttaatatatgctgaataaaagcaattccatgcttgtgcacttaatctaagagaaatgagcgtggatgtctacccaaaaacaggtacggaaatatccatagcagctttattaataatatcccccaaacagaaacaacacagaaactgtggtgtgttcatgtatggagtactactgagtaatgaaagagaatgaaatactgaaatatacagtaacatggccgaatgtcacagatacatcaatacaaaagaaaacattcagggtgattctatttagttgaagtttagaaacaggtgaactgaatctatgataatagaggtcattttggagggtgttgattttgagggggatagagtaggagagagccatctggagtgcagggaatgttgataccttcactggggtagtgattacatgagtaaaacttgagtatttagccgaatgtaaattatacatagtagaaaactaaacattttacaaagaatttctttccactggtaacgttgtcttgaggggctgcagaatgggacatcccaatgactgtgcttgatagcagcaatctggggtcggttgtgtcctcaaccccattctacaatggtcaattgcatatgctcttgcccacctgtgctgggcaacaatcaccaatcagccaaggctctgtcaatgcctgtgcattaagccagtgccctcaggactgcttccacctggaggacaaaggctgaggccacacaagctctaggacagcggacagcttttctcaaacttcagtgtgtaaaataatcacctggtgatgttataaaaatactgattctgatctaataggtcctggggtggggatgtcctcaaatgtatttccaataagctcctaggtgatactgatgctgcttgaccaactttgagtatcaaggctctagaagctgacaggccagggtaagaatcttggctctgccatgtatgagctctgtaatctttgtttttttgtttgtttgttttcttttttcttttttttttgagatggagtctcactccatcactcaggctggagtgcagtggcactatctcagctcactgcaacctctgcstcccgggttaaagcgatccttttgcctcagcctcccttgtagctgggattacaggcctgcaccaccacacctggctaatttttatatttttagtagagacggagtttcactatgttagccaggctggtcttgaactcctgatctcaggtgatctgccctcctcagcctcccaaagtggtggaattacaggtgtgagccatcttttctggcctgagctctgtaatctttgccaaactacttgacctctctgaacctcagtttctttttccataaaatggcaggggtgggatggcttatctgaggtggagtggggagggacaggtaagacaaccatctcccagaatggtgcagattaagcaggataatatacataaagtgtttagcagagtacctgctctatagcaagcactcactaattgataactcttgttatattatttttaataaagaagaaggcttgggtcatgatttggagaaaggtgagtgaagtagttaatgagagcaggaacgaatgagcagttcccttgtatcttatctaggaaggatattttctcttctttttcttccacttcatccatcatccttcccttgaattcattccccgggtcttcactatcaagataagatgtgtttcttcttcattcttcctcccaccccaagccacctaaaatctaacaaagctggaagaactcaggcagaactgaagcttgaagccagacagattgtcagattgtgcccggaggtgatatctttgttaaggaaacatcctccccaccttggctgtttctagaggggcaggcttggcccttgagagtagaggtccatggctgggtctccacgcatgcccacgcccagctgccctcctcagaaaccgcccatgcttctccacacgcaaggcccctctggaggaagacatatgtttctcaatctgtggggctgtcagttggcatctttttcaagaactgaattaacttgtcgtcctagagggaaaaaagagaagtgctttgttttgtgttgtctgtagggtaacaggcctggactgggtccaagtttgggggtgctcctctttcagttgg

SEQ ID NO: 718309 - DNA, 2830 bp, Homo sapiens
gatgcaattgttgcagctcattgggaccaggtgtcttttctggtgtgtcataaaagggctctgtatccttttattgtcaatacctgaaggcaaacaaccaggtattgacaatctattgatttcagatgatgtgtaatgccatcatttcttggataagaaattaggagaaaatctctctttctctttccaaaggagagcaactcagtaaagagtaatggaatcctggctaactatggggctaggcttaaaaagagtccccactctcacacattttagcagcagtataaattggtacaaccacttggaaaaactgtttgacagtagctaatataacttaatatatgttgggccaggtgcagtggctcacacctgtaatcccaacattttcggaggccgaggtaggtggatcacttgagatagggagtttgagatcagcctggctaacatggcgaaatcccatctctactaaaaatacaaaaaaaaaaaaaaaaattgcgggcaaggtggtgtgcacctgtaatcccagctacttgggaggctgaggcacaagaatctcttgaatccgggaggcagaggttgctgtgagctgagatcacacccgggcactccaacctgggtgacagacagaaactctgtctcaaaaagaaaaacccaaacaaacaacaacaaaacaacttaatatatgctgaataaaagcaattccatgcttgtgcacttaatctaagagaaatgagcgtggatgtctacccaaaaacaggtacggaaatatccatagcagctttattaataatatcccccaaacagaaacaacacagaaactgtggtgtgttcatgtatggagtactactgagtaatgaaagagaatgaaatactgaaatatacagtaacatggccgaatgtcacagatacatcaatacaaaagaaaacattcagggtgattctatttagttgaagtttagaaacaggtgaactgaatctatgataatagaggtcattttggagggtgttgattttgagggggatagagtaggagagagccatctggagtgcagggaatgttgataccttcactggggtagtgattacatgagtaaaacttgagtatttagccgaatgtaaattatacatagtagaaaactaaacattttacaaagaatttctttccactggtaacgttgtcttgaggggctgcagaatgggacatcccaatgactgtgcttgatagcagcaatctggggtcggttgtgtcctcaaccccattctacaatggtcaattgcatatgctcttgcccacctgtgctgggcaacaatcaccaatcagccaaggctctgtcaatgcctgtgcattaagccagtgccctcaggactgcttccacctggaggacaaaggctgaggccacacaagctctaggacagcggacagcttttctcaaacttcagtgtgtaaaataatcacctggtgatgttataaaaatactgattctgatctaataggtcctggggtggggatgtcctcaaatgtatttccaataagctcctaggtgatactgatgctgcttgaccaactttgagtatcaaggctctagaagctgacaggccagggtaagaatcttggctctgccatgtatgagctctgtaatctttgtttttttgtttgtttgttttcttttttcttttttttttgagatggagtctcactccatcactcaggctggagtgcagtggcactatctcagctcactgcaacctctgcctcccgggttaaagcgatccttttgcctcagcctcccttgtagctgggattacaggcctgcaccaccacacctggctaatttttatatttttagtagagacggagtttcactatgttagccaggctggtcttgaactcctgatctcaggtgatctgccctcctcagcctcccaaagtggtggaattacaggtgtgagccatcttttctggcctgagctctgtaatctttgccaaactacttgacctctctgaacctcagtttctttttccataaaatggcaggggtgggatggcttatctgrggtggagtggggagggacaggtaagacaaccatctcccagaatggtgcagattaagcaggataatatacataaagtgtttagcagagtacctgctctatagcaagcactcactaattgataactcttgttatattatttttaataaagaagaaggcttgggtcatgatttggagaaaggtgagtgaagtagttaatgagagcaggaacgaatgagcagttcccttgtatcttatctaggaaggatattttctcttctttttcttccacttcatccatcatccttcccttgaattcattccccgggtcttcactatcaagataagatgtgtttcttcttcattcttcctcccaccccaagccacctaaaatctaacaaagctggaagaactcaggcagaactgaagcttgaagccagacagattgtcagattgtgcccggaggtgatatctttgttaaggaaacatcctccccaccttggctgtttctagaggggcaggcttggcccttgagagtagaggtccatggctgggtctccacgcatgcccacgcccagctgccctcctcagaaaccgcccatgcttctccacacgcaaggcccctctggaggaagacatatgtttctcaatctgtggggctgtcagttggcatctttttcaagaactgaattaacttgtcgtcctagagggaaaaaagagaagtgctttgttttgtgttgtctgtagggtaacaggcctggactgggtccaagtttgggggtgctcctctttcagttgg

SEQ ID NO: 718310 - DNA, 808 bp, Homo sapiens
cctcccccaagaagctttattttcctccagccagtctcctgggctgagatatagagaatatgcagggggctgttcccaggctacctgagacccagccaggctcttcttccatgcagctcaggggtgcgtttgcccagagctttgtttgacatcccacctgtgtgtgtataccctctgccctgcctgccagtgctggcgctaagcccttaacacagctcacaaggccttgaaaatccagtcccaatttctccccagccccatctcccaccatttcacctctctacatgcctcccagtcccycctgcatggtgaacactggcatctgagcctgcgggtctctgcacatgctctccccctgcccaggacaccctgccgtgccctgacatcaccttctctggagcgttcctcagcttcctgtgtcccttccaggcagtattgattgcttctcctctgttccaccagtgctttgcacaccctgggaacgacaaaccttattttacggtgtagtttttggtttgggggtctagatggtagttcttttaaaggagaatggtttaagtgcccaaaatacgagcttgtagaatttctctttgtgtcttcctccggtctagctcggtggttctcaaaggttagtatacctaagaattattgtacagggaagatgcaactggaatttacatagaattctgaattttagataaaactggaaggcttggggcaattctgacttccctaattcgcaccttatgtgcctgcatttgaatgcattccttatagcgaatccactgtcgtaaggcatctagaatga

SEQ ID NO: 718311 - DNA, 3555 bp, Homo sapiens
acaggcgtgtaccaccatgctcagctactttttgtagttttagtagagatggggtttcatcattttggccaggcttgtctcaaactcttggcctcaagtgatctgcctgcctcggcctcccaaagtgctgggattacagacgtgagccaccacgcttagcccagagtgtacccttctgctgccattgtttcaggagcaaattcagttaattgaaggacagtcctcggggtcagttctcaggctagagttagcaccctgggaggatggtggatggggtggagagaggggcttttctagctaaatgtaagcaatgggcctgttctttaaatatccttgcagctggatttcagtgtctcacccctctggagctgtgaggacttcgactagattgttttccttcaagaaaaaaaaattcatgaattgcttaaggccctacaattcttgtttcatctatatattccctatgtctgcaattatgaccaacacacaataggtgcttactaaaagttcaatgactagatgaccaggtgaattgtaatttcccctctgttgtcaatttttgtttacctggtttttgtttgttttccccacttgttctcattctcctgtgggagcagaggttgcatctgtcttcatgaggactatttccccagcacctagcgagggcctggccctgagtccacgaggtggaagttggttgaatgaatggatggaagattgtggagcagatgctaggccttactagtgctcggcccgaatacctactgctcggggccttctctggctgccacacccatgggggcagcccccatcttgtgactgcattgggtataaataccccggctctcacctgagacattctatgtgactccagagtttcccaggtgtgaagtccccttgactttcagagatggcagagacttgatgatattctcctttttggttgccttctcccacctcacttctccactgctgtttcctggatcacttacggaataaacaagttgcacttgaaccttcatctcaggatttgcttctggggtagcccaaagtaagatgatagacatcttatctcccagtgatgacaacctcatcgggagaaatagtgtattttccctctcaacattttatttagagggacttcaagccaaagaaaaattgaaaaaatatatacactttcaaccagtctcaccaaccaataacatttctccatatttgctttatttatctgtctccctcttctctctgtttatagatagatagacgatagatagataagatacattagatagatgaagctgtgtgagaaagagagagagagtctttatttttattttttgtggagatggagtcttgcttggtagcctaggctggtcttgaacttctggactcaagtgattctcctttttcagtgtcccaaactgctggattacaagtgtgaaccaccatgcccagcctgagtctttattacttattttaattttctcagagggaatttgtttttattgacacagttgttcatgcgaagaatcctggatttcctctggtaaagtctgaccaatacaaggtggtaatagtgtccacctgtcagttttcattaataaagaaatgactgcaaacttccacagtcaacatggactaaagccagcatgaaatagagattactccaacctcaaagctgcaatgttgcacaattcacaataaatgcattattagagaatctttagactttagaatctagagatttcagaggaaaactctcatgtaaatatatatattacatatatcattttctcccagaacatttgaaagtaagttgcagacttcatggaatttcacctgtaaattctttagaatgtgtctaccaaaacaaggagtatcctcctccataatcagaaagactatcatcacagccgagaaaacagacattgatacaataatagtgtcaaatatacagtcgaaactcaaattgccccagttgtcccaataaagtccctgagagccatgggacactgtgtcttcacactctaccgctagccccttctgtcactggggctcatacaacacctttctgaacacaggactatccattatatgcaggccaaattggtcagaatgaaatagcttctctaggaccggaagatagagacgtttaagttgtgcttctggcagagggacaaatattgccaccagactatggggcatggcagggttccctgacacctagttaaaatatctgaaggtgcagagctgggccccagcacagctccccaccctcttctccagagtctttttccagagagtcctggcctagggagaggaattcctcctacaggtagaccaagcttgcagctctgagtccagttcctgatttcggatggttctgccatgaccagcaacagacttgaaattttgttttaattggaaggaaaaggaagtcaggtctgagaacccagtggctatccttggaattcaggactggctacgtaatttgccaggctcggtacaaaatgaaaatgtagatcctgtgttcaaaatgtattgtgaatttccagagggtgtgggcagagcactgtgacaagcgcagggctcttctgagagtggggccgcgtgtgacttcagaggtcacaagtctgtgacgctggctctgtgggtatttgcgtgcagcctggattcacagaaggcctttctggactttgaagtagcgaatattgaccaaaggcttgaaggtcttgcggcacgcgggaagaaattaaggtggaaagacttagccccatgccaaactggtcagcaacaattataactcattatttcctcaagagaacagcgtctacagttttttggtttgttttcatgtcagacaggtaacgtgctgacttcaaaatgaggttcgagggtggcatatctcacacatgagtgtgagcacccgatcatcacactcaagaactacaaaaggatctgcagttcttacgaatgcatctgcagttgtcacatattcactgtcaccttgcarcacaatgtcaggtctgggaggcatttctacggcatcacacaggcattctcgcgcgtgctgtaactgccctcttctgttcgggctgctttgacgtgaggccactccccttccctgttactcagggcaagctgcaccccgctcccatcccttgatggcccccttcagcctcacaccgcatggaacattgcagaagcggtatcagcagaatcagaagttgagattgcccatccctccgccttggtccttttcgacacggatgcagttccccaaagaggaaactgaggcactgtcggcagaataacgcatcacagttctggaagagaaacacgtgtttgtcctgtctggatgttcccctctgaagaccctggaggacaggctatttcagcacggagccacgaccctgggagggggagagcagagagacagaaaaatgatgccaggacctcagcagaactggggacagaggagagacaggagaaggggatccagggagaccagagccaggaggggctcccaaatgcccatttttatggactaaatga

SEQ ID NO: 718312 - DNA, 682 bp, Homo sapiens
atttgctaagtggttctggctcaaggtctctcatgaggttgctcaaatatcaaccggggctaaagacttctgcaaccttttttacagatgaagaaaatgaggcccagaggagggccaaggcctcagagccctgtggtgaaagagctgggactgtaatgcagatctctttactttcatgtttctggtttcttcccttgatcaggggcctcccttacagcaccrtgggtcagggccagtatagcctctgcttggtgatgttcagagaccgagaacccttccttcactgctttagcctgcttgacacttcatccaagtttgggcggttcagcggaagcctctgtccctggggccatttcatcacccagagggttcaagtagtgggaaggttatggcttccttggtcctctgagaagggaggactgggcccagagtttttgaccactgatttgtggctgatgagactggcatatcagacagaccagaattcattataaagaaactcaagacaacagtgagggccagtagtagagcagagagcaaagaaatacaggctgaaataaagtcaaaaaatagttatctgcatgagctagctagaatcaaaacaggtgcttaaggatacaggaagctatagttgattgtagggaagataagaagtgtaaggagagaaatggccaagagccaa

SEQ ID NO: 718313 - DNA, 682 bp, Homo sapiens
atttgctaagtggttctggctcaaggtctctcatgaggttgctcaaatatcaaccggggctaaagacttctgcaaccttttttacagatgaagaaaatgaggcccagaggagggccaaggcctcagagccctgtggtgaaagagctgggactgtaatgcagatctctttactttcatgtttctggtttcttcccttgatcaggggcctcccttacagcaccgtgggtcagggccagtatagcctctgcttggtgatgttcagagaccgagaacccttccttcactgctttagcctgcttgacacttcatccaagtttgggcggttcagcggaagcctctgtccctggggccatttcatcacccagagggttcaagtagtgggaaggttatggcttccttggtcctctgagaagggaggactgggcccagagtttttgaccactgatttgtggctgatgagactggcatatcagacagaccagaattcattataaagaaactcaagacaacagtragggccagtagtagagcagagagcaaagaaatacaggctgaaataaagtcaaaaaatagttatctgcatgagctagctagaatcaaaacaggtgcttaaggatacaggaagctatagttgattgtagggaagataagaagtgtaaggagagaaatggccaagagccaa

SEQ ID NO: 718314 - DNA, 600 bp, Homo sapiens
tgacttaggaaccatttttttctgttcttcccctccttagaataatatatcatatatacataccagtagaaaattcaggtaatatagtactggcacagaaaataaaaaatagtaatccagccctcctgagataatcaccattaatattatttggtatacttccttccagttttttttttttttttttttgagacagagtctagctctgtcaccgaggctggagtgcagtggctcaatcttggctcactgcaacctccacctcccaagttcaagcaattctcctgcctgagcctcctgagtagctgggactacaggggtacaccaccacacacagctaatttttgtgttttttagtagagacggggtttcaccatgttggccaggctggttttatattcctgacctcaagtgatccgccygccttggcctcccaaagtgctgggattacaggcataagccaccatgcctggccttcctttcagtcttttttctttgtatgtgagtacatgtattttgttgttgttgttcataaaatcaagatcgtaccataagtgctattttttgaattgctcttttcatttcataacatgttttaaagta

SEQ ID NO: 718315 - DNA, 587 bp, Homo sapiens
cgatcctcctgcttcagcctcccaaagcgctggaattataggcgtgaaccatggcrcccagcctggataataagattaaaataaggtttctgcttttgtaaagatagtagagataatatattatctaataattacaatataaagtaccagaagagagatacaggtgcataccaccgcacccagctagcttgtatgtatgtatgtatgtatgcatgtatttatttatgtagagatggggtcttgctatgttgccaaggctgcaaagtaatttttactgagtttatagactaataatacctcttcctggggagtacaggagaataatcaggtgaagggcttcattgatctgggctttgcaggataaatcatatttgaagacagaaggacattctggggcacatagggtagattctgaacacagagaacagtttccttctaatctactaccatcttcagggttttgcactattgcctggtactttttaaaggttttgaagtagagatgttcaataccaccgtgtatttgcccaagaagtcatttgttctctgaagaagctggcaaaagaaaagttgaaggagctttaggg

SEQ ID NO: 718316 - DNA, 786 bp, Homo sapiens
aggggagcasagtgatatatcactagatttgtttaaatctggaaatttcacatggtagctatagtgaagtctacagtacatttaatcagaatgtaaagaaggaagcagggagacgatgaggcaaagttaatatttcaagagataatggctaaatttttcctgtactaataaaaataccaattcaggaggcctaacaaattctttttagaataatttttaaaaatattgcatctagacacaccttagttaaattttaaaacatcaaaacaggaaaggcattgttaaaattaaccaaagaatgaagagatgattcacaaaattatgcaaggtaaattgacaactgaccctttaacagcagcacttgtaagctaacagttagtggaatgtcatcttcaatgtgcggcaaaagaggacagaggactggagtcctagaacatgaaatcaagcaaaaatatcttcaataataagaattacatgaattcacattcatgcaaaaatcatgtaaccagtagacctctggcagaaagctaatgcttctggatagaaggtctgagaagaaagaaaaaagtggtgaacatacaggtaaatctaaacaaatcatgactgtacaaacaaaattagtgcattttagtgttaaaagctcaagatagattaaaatatccaataacaataacataaatagcagtattttagcccatgtaattatcaggagaaagattgagctatcaatagacttttaacttatgatggatgttattacttttattgtagccacaaaaagaaaag

SEQ ID NO: 718317 - DNA, 786 bp, Homo sapiens
aggggagcacagtgatatatcactagatttgtttaaatctggaaatttcacatggtagctatagtgaagtctacagtacatttaatcagaatgtaaagaaggaagcagggagacgatgaggcaaagttaatatttcaagagataatggctaaatttttcctgtactaataaaaataccaattcaggaggcctaacaaattctttttagaataatttttaaaaatattgcatctagacacaccttagttaaattttaaaacatcaaaacaggaaaggcattgttaaaattaaccaaagaatgaagagatgattcacaaaattatgcaaggtaaattgacaactgacyctttaacagcagcacttgtaagctaacagttagtggaatgtcatcttcaatgtgcggcaaaagaggacagaggactggagtcctagaacatgaaatcaagcaaaaatatcttcaataataagaattacatgaattcacattcatgcaaaaatcatgtaaccagtagacctctggcagaaagctaatgcttctggatagaaggtctgagaagaaagaaaaaagtggtgaacatacaggtaaatctaaacaaatcatgactgtacaaacaaaattagtgcattttagtgttaaaagctcaagatagattaaaatatccaataacaataacataaatagcagtattttagcccatgtaattatcaggagaaagattgagctatcaatagacttttaacttatgatggatgttattacttttattgtagccacaaaaagaaaag

SEQ ID NO: 718318 - DNA, 635 bp, Homo sapiens
attgccttaggagtgcattgagtaagttccatttacaaagtataattgtaggggccccgagtctcttgaacgccttgcacaacactaccttctctcctagctggccagaagtccctatcaatagcactggtcttcaagatcaggtaataagtatccttgtactttttcacacacactaattgaagagagagtgttgaaggttttctcaaaccttctccaaagggactttgttacttcagttagcacatggttacacactaaggcaaaatttccaaagttttgttctgtggattcctatactccaacctcagttgtcattgtttaatcactataccctgcttaatttttattcataatgtttattattacctgaaatcatgtatgaatttagtctttactttctgccgtcgttactgagagcttaaactccaagagctcatggatttatcaccagcacagaaattagtatttggcatactaggcgctctataaatatttgaataaatgaaaaggctttatgatgtgatgatgtgaaaaaagacttttttttttttttgagacttagtcttgctctggtcacccaggctggagtgcaatggtgtgaactaggctsactgtaacctctggctcccggg

SEQ ID NO: 718319 - DNA, 1249 bp, Homo sapiens
gagccttggcaccggaaacacagtgggttgagttattctgcagatgactccccaaaamccaggcacccaggtacacagctcagagctctcaaacatctgatgctggcacttcacattacagatgaagcaaatacaagactcaaggtcaagtgtgcgatgagtttctaagcccaagagtccctggaaaactagaaggaacaattgtccccacctctgcaagatctccacaagacactcccagtctgtggcaggcagtcactgatgggtccagatgtggctggagcaggggggcacagggctccttgttaatcaggtccttgttagcatggcccaggggtactgatgactcctggggggttcctccaggaagctcattggaagcacagacatccttgggtatgaagcctcggtggtcagacaggtcttgtttcctgcagaacagaactgcagggcacttcctccgtggtgaatgagagagacggtcatgtcatcactctcttccgccataatagcttcgtccagctcttgggagagcttctggagatgctgagttcccgcccccgacgtccctcggtcactgtcagactcactgggagagcagaggggctctgttgaggagtaggggctccggaaggcagcctcccgcctcgacaaccttactgggtgggcaggtgagcctatggggcagagaggcggtgatgctccttctcccaggggtctgcggctgagtgggcaggggcggctccagacagccgggtgctctcatggctcaggctgtgagttggtgatccactgccctctgtgcccctctcttcctcctcctggccttcacctgggtctccaccagccatttggtgccgctttggtaggactcctggattctctgggacttggcacccaaggcactcttagctgagggagctgcagcctggaggccctgtggccctggctctggtgtttccaggcgtttccaggaggggcctgcctggaggctgaggttgacagctctcaggggcagcctcctttggagctgtctgcttagggaactcagggccccggcagaggtctcctgatggctggccaaaggctgcagctccttgctgccctccagctgctcctggtgctgtagagatttccggcgcacagaggcccccattccctgccaccaggaagccatctgcctggccaagagtcttctctgcccactacaccctgacaccaccaacacccacccgagcccgaacgcatc

SEQ ID NO: 718320 - DNA, 1249 bp, Homo sapiens
gagccttggcaccggaaacacagtgggttgagttattctgcagatgactccccaaaacccaggcacccaggtacacagctcagagctctcaaacatctgatgctggcacttcacattacagatgaagcaaatacaagactcaaggtcaagtgtgcgatgagtttctaagcccaagagtccctggaaaactagaaggaacaattgtccccacctctgcaagatctccacaagacactcccagtctgtggcaggcagtcactgatgggtccagatgtggctggagcaggggggcacagggctccttgttaatcaggtccttgttagcatggcccaggggtactgatgactcctggggggttcctccaggaagctcaytggaagcacagacatccttgggtatgaagcctcggtggtcagacaggtcttgtttcctgcagaacagaactgcagggcacttcctccgtggtgaatgagagagacggtcatgtcatcactctcttccgccataatagcttcgtccagctcttgggagagcttctggagatgctgagttcccgcccccgacgtccctcggtcactgtcagactcactgggagagcagaggggctctgttgaggagtaggggctccggaaggcagcctcccgcctcgacaaccttactgggtgggcaggtgagcctatggggcagagaggcggtgatgctccttctcccaggggtctgcggctgagtgggcaggggcggctccagacagccgggtgctctcatggctcaggctgtgagttggtgatccactgccctctgtgcccctctcttcctcctcctggccttcacctgggtctccaccagccatttggtgccgctttggtaggactcctggattctctgggacttggcacccaaggcactcttagctgagggagctgcagcctggaggccctgtggccctggctctggtgtttccaggcgtttccaggaggggcctgcctggaggctgaggttgacagctctcaggggcagcctcctttggagctgtctgcttagggaactcagggccccggcagaggtctcctgatggctggccaaaggctgcagctccttgctgccctccagctgctcctggtgctgtagagatttccggcgcacagaggcccccattccctgccaccaggaagccatctgcctggccaagagtcttctctgcccactacaccctgacaccaccaacacccacccgagcccgaacgcatc

SEQ ID NO: 718321 - DNA, 767 bp, Homo sapiens
agggtgagtaactttctcctccacaaaacagtaaatagaaagtttttctatgtacacaatttgcaaaattagtctgatcatgaaattccttcattttccaagacgtaggagctatagacacatagatggaaatatatatttttcagccttgttgattcacttagatcttctgaaacagaatttaaataataaaataatgtttttaaatatgtaagttagtaaaaagcacttttttaaccatgctatatatacatattcacataagaaacttcccaagtgaaacgaatattgtacaggtatcaggaggtacattttaaaataaagattctcatcttcaccttgtttttgaattctccattaaaagcaaactggttttctggttttccatctggtaccttatataatctaaaccaattaagagtagcttccaggtaacccggtttgaacttcttaacatcatcaatatctgtaaagaaaaaaacaaaaagatgttttgttaagaaccaaaattaattccctttagtggcagagcattggactgagsgagccaggaaacatggggcccagtctaaccagaagcacaattgattatgatacctagagcagcatcatcattgatatgtatatcaccttcagacttttgtgttttcatatgtataatactattcctgcactccacaaacatttacaaagcatcttcagacaatgtgctatgtatggggaataaatggatggatacaacaaagttcttttcatcaagatactca

SEQ ID NO: 718322 - DNA, 343 bp, Homo sapiens
cagatcatgctaacaccaccgttttttgaacatgggtcccgtggagaagcatgaagctcaactgagcatgcttgcaggttgcagccctttatgagaaataaagctctgctttccaaatttatgagcctcatcattcagttgccatttttatgaagctgagtaactagaagtcaggtttttggcctttctagtcrttgctcctgtgcaaatttatagatatattgcccattaaagcattattattatctgagatctaaggccatatttgttttctagaagtagttatatttttactctttttcttcactattacatttttatttattaatactatttcatgaaa

SEQ ID NO: 718323 - DNA, 1333 bp, Homo sapiens
aaaattcaagtgatgattcatttcatcatgagccattcttttctctttaaatttaatactctttaaacagagttaagcaaagaaaggcagcttgacattatttgtagagtcatttacttatttccattaatttttttctgagtatatttggaaactagaattgagaaatattgtaattcaagcacaaaatactatctcctcaggaggaatattatatcttgaaaggaatattctattcattatgttgggctttatrcatgaaatatatgaccagaaatggcatatctgttactcatttcattaaaagttttcaacaaatatttacagaaatcttaatatgtgctaatagctttggacctgattggtccattgtaaaatattacagtataattctatatcctgactatttaatctttgttcttactttgtgttgcccttgcccttgtccttgataattttcttcaggagatccactatgaaggccactttctttatgcctgcatccatgctggataaagagctatagccaagcagacctggcctccttaatatttatacaaaccagctgtaagctggccctgaccactgttcagcatgcctgatatttctccctcattgactccttggcttattgctctcaaaaatattccaaatctcttcagcctataaacttccaatttttcctccttaatctcagttacagcagatcacttattttattgtgtatactggaacaatccaggactccttttgttatttcagcagccctcatatttttcttctatcctttcatacagtcttaggagtagattctattctcctcttgtccaaaacccagagctgtatttttaagattttctggcatcccaaggaaacctggatatatattaatgcctttgagtttaagcatcttaaatgtcactctactttttttatctgcatatttattcaaataacaaatgcttactagggtctactacaatagacactggtctataaagaagaaaaattatgcctcctggcattaaagagttcataaacagatatttaggtaatcatattataatgtggtgagtgaaatacaaatatcaacaaatattttattgaactctgactatactaaggcattatattaaactcattatttaatacaaacataacaaaataaaaatttgtacaggaagctctatgcttacattatttttaccaactatgaaaccgaggttttgagaggttaaataactgttgaaagtatatttaactaaagagtgtcagagctgatatttaaactcatgagtttctctgatttcagggctcatatacttaaatcata

SEQ ID NO: 718324 - DNA, 1333 bp, Homo sapiens
aaaattcaagtgatgattcatttcatcatgagccattcttttctctttaaatttaatactctttaaacagagttaagcaaagaaaggcagcttgacattatttgtagagtcatttacttatttccattaatttttttctgagtatatttggaaactagaattgagaaatattgtaattcaagcacaaaatactatctcctcaggaggaatattatatcttgaaaggaatattctattcattatgttgggctttatgmatgaaatatatgaccagaaatggcatatctgttactcatttcattaaaagttttcaacaaatatttacagaaatcttaatatgtgctaatagctttggacctgattggtccattgtaaaatattacagtataattctatatcctgactatttaatctttgttcttactttgtgttgcccttgcccttgtccttgataattttcttcaggagatccactatgaaggccactttctttatgcctgcatccatgctggataaagagctatagccaagcagacctggcctccttaatatttatacaaaccagctgtaagctggccctgaccactgttcagcatgcctgatatttctccctcattgactccttggcttattgctctcaaaaatattccaaatctcttcagcctataaacttccaatttttcctccttaatctcagttacagcagatcacttattttattgtgtatactggaacaatccaggactccttttgttatttcagcagccctcatatttttcttctatcctttcatacagtcttaggagtagattctattctcctcttgtccaaaacccagagctgtatttttaagattttctggcatcccaaggaaacctggatatatattaatgcctttgagtttaagcatcttaaatgtcactctactttttttatctgcatatttattcaaataacaaatgcttactagggtctactacaatagacactggtctataaagaagaaaaattatgcctcctggcattaaagagttcataaacagatatttaggtaatcatattataatgtggtgagtgaaatacaaatatcaacaaatattttattgaactctgactatactaaggcattatattaaactcattatttaatacaaacataacaaaataaaaatttgtacaggaagctctatgcttacattatttttaccaactatgaaaccgaggttttgagaggttaaataactgttgaaagtatatttaactaaagagtgtcagagctgatatttaaactcatgagtttctctgatttcagggctcatatacttaaatcata

SEQ ID NO: 718325 - DNA, 1333 bp, Homo sapiens
aaaattcaagtgatgattcatttcatcatgagccattcttttctctttaaatttaatactctttaaacagagttaagcaaagaaaggcagcttgacattatttgtagagtcatttacttatttccattaatttttttctgagtatatttggaaactagaattgagaaatattgtaattcaagcacaaaatactatctcctcaggaggaatattatatcttgaaaggaatattctattcattatgttgggctttatgcatgaaatatatgaccagaaatggcatatctgttactcatttcattaaaagttttcaacaaatatttacagaaatcttaatatgtgctaatagctttggacctgattggtccattgtaaaatattacagtataattctatatcctgactatttaatctttgttcttactttgtgttgcccttgcccttgtccttgataattttcttcaggagatccactatgaaggccactttctttatgcctgcatccatgctggataaagagctatagccaagcagacctggcctccttaatatttatacaaaccagctgtaagctggccctgaccactgttcagcatgcctgatatttctccctcattgactccttggcttattgctctcaaaaatattccaaatctcttcagcctataaacttccaatttttcctccttaatctcagttacagcagatcacttattttattgtgtatactggaacaatccaggactccttttgttatttcagcagccctcatatttttcttctatcctttcatacagtcttaggagtagattctattctcctcttgtccaaaacccagagctgtatttttaagattttctggcatcccaaggaaacctggatatatattaatgcctttgagtttaagcatcttaaatgtcactctactttttttatctgcatatttattcaaataacaaatgcttrctagggtctactacaatagacactggtctataaagaagaaaaattatgcctcctggcattaaagagttcataaacagatatttaggtaatcatattataatgtggtgagtgaaatacaaatatcaacaaatattttattgaactctgactatactaaggcattatattaaactcattatttaatacaaacataacaaaataaaaatttgtacaggaagctctatgcttacattatttttaccaactatgaaaccgaggttttgagaggttaaataactgttgaaagtatatttaactaaagagtgtcagagctgatatttaaactcatgagtttctctgatttcagggctcatatacttaaatcata

SEQ ID NO: 718326 - DNA, 1023 bp, Homo sapiens
attatagatatataggtatatacatcaaatatttataaagttcttagaatagtgctttgcaaactgcaattattgttactaaatattagctatttctaattattttgaaaatattttatattaccaagatttcactctatctggtcaaactggttgatataagaatagtaaaggtgactaagagaaaaaaagtcagaatatggctaatcccaaaacagattatttaaaataattggattttagagtgagtgtgatcttctaaattatctactccagccctctctttctatgcaggaaacagagaagtcacagagaaattaagtgatgtgtttaagcttttgtagctaattagccgtactggagttctagaactcagtttaatcctatgctagtcaatatttttgaatgtagcattatattttcttagtccacttycttttgctcataagagaatatctgagactggataatttataagaaacacaattaattttttatagttccgaagatggggaagtccaaggttgaggggttatatctggtgagagccttcttgctgagaccctgcagagttccaaggtggcacagggcatcacatggtgaaggcgctgagcatgctggctcacgtctctcttcctctttctataaaaccaccagtcctactcccataataacccattaatccattaacctgaaaatccattaatgcacgaatggctctaccctcatgctccaatcaccttttaaaggggtcacctctcaatactgccacattcgggattaagttttcaacatgaattttagaggggacctttaaaccataatgaatatcttcttacagtgttatctctatttcctagtgctatgaattcagctgaattgtagagttgacaacataccgttgcttcagtatcttgtcctgcttgttctgaatgctttttcctaaatgctttattgttgttgctgttgttgttgttcctgcatagggcaaaatgagatgcctttatttctattaagtttcaa

SEQ ID NO: 718327 - DNA, 627 bp, Homo sapiens
gtctccattttgcaaatgagattgatgactcaccttcttgactcatgactgatggagctagaataagaatgtgtgctcttgacccctagactagtgtcatttctattccaccatgacaccttgcccaaccctgctttatattgtgattttggaagtactaacacctccattctacacttccacccagagcatgtgtacagtgaagcctggagctcctccttataaatcacactgccagatcagtgttcatggatgtgcaaatttaaaaatgaaatgacatttgggttggttccaagtctttgctattgtgaatagtgcctcaagaaacatacgtgtgcatgtgtctttatagcagcatgatttacaatcctttgggtatatacccgtaatgggatggctgggtcaaatggtatttctagttctagatccctgaggaatcgccacaytgacttccacaatggtgtgaactacgtttacagctcccaccaaccatgtaaaagtgttcctatttctccacatcctctccagcacctgttgtttcctgactttttaatgattgtcattctaactggtgtgagatggtatctcattgtgcttttgatttgcatttctctgatggccactgat

SEQ ID NO: 718328 - DNA, 627 bp, Homo sapiens
gtctccattttgcaaatgagattgatgactcaccttcttgactcatgactgatggagctagaataagaatgtgtgctcttgacccctagactagtgtcatttctattccaccatgacaccttgcccaaccctgctttatattgtgattttggaagtactaacacctccattctacacttccacccagagcatgtgtacagtgaagcctggagctcctccttataaatcacactgccagatcagtgttcatggatgtgcaaatttaaaaatgaaatgacatttgggttggttccaagtctttgctattgtgaatagtgcctcaagaaacatacgtgtgcatgtgtctttatagcagcatgatttacaatcctttgggtatatacccgtaatgggatggctgggtcaaatggtatttctagttctagatccctgaggaatcgccacackgacttccacaatggtgtgaactacgtttacagctcccaccaaccatgtaaaagtgttcctatttctccacatcctctccagcacctgttgtttcctgactttttaatgattgtcattctaactggtgtgagatggtatctcattgtgcttttgatttgcatttctctgatggccactgat

SEQ ID NO: 718329 - DNA, 595 bp, Homo sapiens
attttaagatgttaaaaaaacagcaggagtgagcataatttatttatgtataatggtaccatatttgagcaagggtcaaaaggcagtggttccagcattagttatgctacaaatgcaccaaatggscttgagctcagcattgaatctcctccctgagtctggattgggtgggataatatctgagatccctcttagctctaactaattatgtgactcaattcagagagaggctttcatttgcagaatacaactgctacataaaactgcctctagtttttgactacagagcaaatctctgttcatatttggatccctccttccatttaccttcctatttaaaaagggaatgtctacaaaaggttcagaagagaagtccattaccagtagccagttctccaaatcgatttcctctactagtattccactataccaaggtgtaccccaacaaactttgagacaggcgatatgtaacatcagtctccctaatactctagtcacaggggctcacaggccaggactggcacttatagtacgccgctgcagtttggagtaaagggtgaggggcctcactcatgctttctttcagacaaatggt

SEQ ID NO: 718330 - DNA, 628 bp, Homo sapiens
ttttgatgttgagaagccacctagtctatggtgttctgttaaagcagcccaagcccaccaagacagcagcaggaacatttcaacatgagctgtctaaacacaccttcctgcctcagatgaaaacttcatctaggttttcctgttatygtaaccatcactccttgtttttaaatgaagaaataaaaattatgtgagaaactgaaatctatgtgaagcattctagactcagccatgggaaattaggaagctcaggatcccagaggctccaaatcatacttcttatcagccaaaagccccgctcctcctgaacccacccacccacctaaaaacaagccaaagaggagcctttctagaggcttcactttcctcagaacaagagaaaaactctctcttcaacatcaacagtcaaaatgtgaatagaccagtcaaatcctctggatatgaaacaaaacaattttaatttcagaatattacaagaatataaaagaaagacaatgcataggatcgtttctttacaattacatatacatagtcaaataagaatgaaaactttaaccaaaacacttaagaaaccttgtttctcttgttgagcaagctcagggataggacaaaggcaacccttgctctg

SEQ ID NO: 718331 - DNA, 622 bp, Homo sapiens
taaagaacagcagctcactcccctctggggagaggctggctcagggttacacagtcagggtggggacagaggtaggcccacagtaccttccttgttgggttgtctgaggacccctctggccacctccccacaggagatggaggacaacatctggacagtgaggaggaggaggcgcctcggcccacgccaaacatcccagaggacctggagagccgggaggccacggtgagcctgactttccctgccccactttgccaccttcctctgtggtccctmccagagcccgttatgctcttggttttcccaccttctgatttctctggcccctcaccccttccgggagccagtggtcagacactttgtcacctgtgaccaacaggtgcactctctgaggccccaagggaaggggttgttctccacctccctgcctcatttgttctgtctatgcccctacaagaatactcacctcttgccttcaagtggcatttttcaactccgctggagccagttcccaggaggagcaggcacggctatgtgggcagcggaaggtgtgaaggctgtgctgcctgcacctggctcatctggtggccttggcctggaaggagccagaggcagaggcccc

SEQ ID NO: 718332 - DNA, 1798 bp, Homo sapiens
cagaaaggaatgcttggtttcaatacttagcaaataataacaaaaagaatattgaagtatatataaacattttgaggccgggcgcagtagctcacgcctgtaattccggcactttaggaagccgaagtgggaggatcacttgaggtcaggagtttgagaccagcctggccaacatagcaaaaccttatctctactaaaaatacaaaaattagccgggcgtggtagcacgcgcctgtagtcccagctactcaggaggctgaggcaggagaatcacttgaacccagtagcaggaggttgcagtgagccaagatcgtgccactgcactccagcctgggcgacagagcaaggctccatctcaaataataaaaatttaaaaataaagtatatgtaaacatttgaaaacaatgaccatttatttctctatctggaaatatgcagactagctgaatagagaaatcccttcctaaaaatgctgaatgaaataccaaaaatgtgtgtgtgaaagcacagataaaagggtgttaaacagggaatcagtcagaagccagaataacaagagcatgaccccatcagggtgagcctgcaccggggcctgtgctttctgagaccctgggatgtaaatggccagtgtgccaggcacctcctgggcaccacttcagtctgcttggccccagttctgattctggccactgctgaggtgatgagtgttctgtgggcctcatgcaggtgctgcctcaccttgggcacatggggcccacccctcccttcctgtctgagtctcactgaccccacagggcagatgctctcgggaatcccctgaaccattatgcatgcgcagaccccaagttcaggggagttcatgtctgtgaggccactcttgaccaatgattgacacaagcaaatactcattgtgtcttttttgtatctcccatttcataagactccttggaagatcctatggaatcaagcacctatcagaggtccccttaaataatgcgaccttgtcccgggcttccctctttctttctctctccagccctcactcctactccctgggattacttccaaagttaattacacaaaaacctttgtctgaggctttgcttttaggggaaacaaaatgaggaaagagaagaaaagacctgaggtctggtcctgggaagtaggttatcaaagatttcctttctcccccaaatttgggacttctcaaaagccagtgccctaagggagaaatggggagaaaacaactcagccacagaagactttgccgtacccacttagctgtgctggagaggtaacacaggctaaaaagaaatccagtaaaatgcataacaagctgatattcacacagagaaaagcccaacatcatattccctatgtgattggaaaaacactaagccaaaaacaatttttaagtggatctgagttggaagtacccctaggcgcctggcaaaagcaaacaaaaatcctttctggaagaatatattttaaacacagattcaaagacttcccacaaagaatttcaaggaacataagytcataattaaacatcaataaactcaaaaagaaacaaaccacaagggcatgagtcagcagaaacaacgaataacaagatgagacccacaaatactacataaaatagaatgatgagatgcaggatagaaaataagtgtttcaggccgggcgctcggctgtaatcccagcactctgggaggcctgggctagaggattgtttgagccaggagttcaagaccaggctgggcaatagagtgagaccccatctctctctctctaaaaa

SEQ ID NO: 718333 - DNA, 1798 bp, Homo sapiens
cagaaaggaatgcttggtttcaatacttagcaaataataacaaaaagaatattgaagtatatataaacattttgaggccgggcgcagtagctcacgcctgtaattccggcactttaggaagccgaagtgggaggatcacttgaggtcaggagtttgagaccagcctggccaacatagcaaaaccttatctctactaaaaatacaaaaattagccgggcgtggtagcacgcgcctgtagtcccagctactcaggaggctgaggcaggagaatcacttgaacccagtagcaggaggttgcagtgagccaagatcgtgccactgcactccagcctgggcgacagagcaaggctccatctcaaataataaaaatttaaaaataaagtatatgtaaacatttgaaaacaatgaccatttatttctctatctggaaatatgcagactagctgaatagagaaatcccttcctaaaaatgctgaatgaaataccaaaaatgtgtgtgtgaaagcacagataaaagggtgttaaacagggaatcagtcagaagccagaataacaagagcatgaccccatcagggtgagcctgcaccggggcctgtgctttctgagaccctgggatgtaaatggccagtgtgccaggcacctcctgggcaccacttcagtctgcttggccccagttctgattctggccactgctgaggtgatgagtgttctgtgggcctcatgcaggtgctgcctcaccttgggcacatggggcccacccctcccttcctgtctgagtctcactgaccccacagggcagatgctctcgggaatcccctgaaccattatgcatgcgcagaccccaagttcaggggagttcatgtctgtgaggccactcttgaccaatgattgacacaagcaaatactcattgtgtcttttttgtatctcccatttcataagactccttggaagatcctatggaatcaagcacctatcagaggtccccttaaataatgcgaccttgtcccgggcttccctctttctttctctctccagccctcactcctactccctgggattacttccaaagttaattacacaaaaacctttgtctgaggctttgcttttaggggaaacaaaatgaggaaagagaagaaaagacctgaggtctggtcctgggaagtaggttatcaaagatttcctttctcccccaaatttgggacttctcaaaagccagtgccctaagggagaaatggggagaaaacaactcagccacagaagactttgccgtacccacttagctgtgctggagaggtaacacaggctaaaaagaaatccagtaaaatgcataacaagctgatattcacacagagaaaagcccaacatcatattccctatgtgattggaaaaacactaagccaaaaacaatttttaagtggatctgagttggaagtacccctaggcgcctggcaaaagcaaacaaaaatcctttctggaagaatatattttaaacacagattcaaagacttcccacaaagaatttcaaggaacataagttcataattaaacatcaataaactcaaaaagaaacaaaccacaagggcatgagtcagcagaaacaacgaataacaagatgagacccacaaatactacataaaatagaatgatgagatgcaggatagaaaataagtgtttcaggccgggcgctcggctgtaatcccagcactctgggaggcctgggctagaggatygtttgagccaggagttcaagaccaggctgggcaatagagtgagaccccatctctctctctctaaaaa

SEQ ID NO: 718334 - DNA, 1302 bp, Homo sapiens
acaagtcattattaataatgacatcttattccttattcagttaaacatttgcataatgttctttatacaattaagcatttgcataggtattttgkattacacaatgtacctagatcatttaacactatatgtgaaaagacataactcatttgtctaacttaaaactaaaaaccagaaaattcagaaatgatcttgaaattcttctttaaaaaacatactgtgagtagatttaaggaaaaaaaatgtcatgtgaagactgcatattctttcagtattggctggcactcttaaaatttaatgtacctcacaatagatttagtttataacactatgacaaagttaggagcagctttctgttattcaaatattctcactctgtatatttaaatttcttaattgaactaatctaattctgaaactcaaattctaaccaagtatccctgggtgcattgtgtctcaattgtaggcaataaatgatcaccagttcaaggcaataattgtatatcttccatctacatatttaagattaataagtaaaaacaaaggaaaagacagcctcacacatctttgaatttcagcacctccctcagtgatctcatttactcttccagcttccactaactcccaaatttagaattatatcctagacctctcctgttatcttcaacctcacattgaatagtctgaatatttccacttacacatttcactttcacctcaaactcaaattatttagagccgaacacatcacctttaaacaagtcttccctttcaagtttccttatttctgtgaaaagtatcttcattcttctagttatccagacccaaaataattaagtgatttttgactcctatctctctactctttttttacctcacccattgtcgattgcaagtcttatctgtttattactttattaatgcttcttacatccatcccttattttttctactgccacaatatatttcataggctcataacgaactaaatattctcccaaatcacttaggatgtttgaatgagctattcctacaaaatcaattgcactattttctgctgctggtacctgcttactgttgacaacatcaaattcttcagtaagttctctacagcatttttttttttcatggctggttttcttgttttccagtcatttggagctagcagctacactagtctagattccttctgtttttctattcactacaaatctcatagcagagactacctctctggcaatacaactgatttgtaattcactgttagccttagattgcctttgtttgaagctcactcctgaa

SEQ ID NO: 718335 - DNA, 2682 bp, Homo sapiens
cgcagtttttgccattataatgctaaaaactgtgattacttttgcaccgacccagtactatgattacaaggaggtcctgtggtgtgagcttcagaactttcccagggatcctctgatcctgcagtgaacagaaaatgcctcccctttcactgtgaccacatggggtgggggccaagggaacggctggcatggtacctccatgtgccttatagcagccacagggttccagctctgcctccttccygctactgtccaagctgcctgggcagcaagccgggtgttctgctgaccaaatgagactgggctgctccaggcaaggttcccacccctcctgggcctagttctaccactatcccacttggtgatcttggtcaaacgtgcttctcctccataaatcccagattgccaacatggactagaatctgagggttctaaacccggggtctctgtcaggctctatgaatggaactcagagagtatatcaacttgaatggaaaaaaattaaaactctttcattttcatgaacctctaattgaaatttagcatttgcctcgaatatgagtgtaggcaacaaaccacagtagtactaccaggacctgggactgtcccagaaagtgacatggcacattacaatcattgctgcagagatctcaaaatacatcactaaggcttggcattacttcaaaattgaggccgctgttacacctgctactagaactcattatttaatgcattgccaaagaagcatatatatgaatatattatattttaacatattttcataattgcatttctatataatcagtttcctttgtttttaattttatgcatttataaactctattctgagaaggggatccctgggcctttccagcctggcaaagaaatccaaggcacaaaatatggttagggctcttagatacagtgatttccaaggatctttgtgctctgacttccaagaccctgcatatctatttcccgagggccctaccattagcataactatgaaactgaatttgctgatcaaattgccttttttttttttttccaatcaggaaatatatccaggccgcggcagcctttccaaactcccgggcttcccacagaatgcgctcgaatgacactggaaagatttcaaaaatccaggcctccccctgttttaattcctttcttcccccaacagatgttgcaggcctggtgaggaagcccatcgtgtgtgactctcacgccactgacggggtttcgtggtgcggccaaattcctctatggccatccccagcatcagtccttccagattgaggaagccccttccaggaatgagctccatatttaaaggagtggaggagatgaacacctctccaccttggagccaagaggttaagctttcaggaggccccagggctgggcaggaaggattgaagctgtccctctgcccatccctcagagctgtttctctggactttaattgaaggtcgtgatcctcaaaccttcattttaatgactagttgcaacctcttctcttcttcagaccttgacccagcttctcaaccagccagagccactggtttggatttcatcttctatataatttagggatgcctagaccaagggaccttggcaagtggtaacacttctctggcctttggcttcctgatctataagctgatgggaacacgagcaacgactgccaagggctcctccagttttaatgtcctgggggagcagtcacataacctctttgggcaaatgcaccaaaaacctgtgtgtagagtcaggctgtggggaaaagctgtcgtgactatgatccacagctttctcatttacagacttccccgttctgagggtcaccgtccacattcgtgaaaggggtagaggactgaacctacctctggagttgttctgagaattacacgaggtggtgcatggagggtgctgggcaaagggcttggcacagagtaagggcccaataaatggagccactcattcagagaccgttgctaactaacctgctctcccacaggccccggccgaccaggatcccctggttccccctgcaaagagacaaagaggaggatggattgggatgggagatgaaagtctagacctcctggggaagtcccaggcctgctggccttagctgccattagtggggatgaaccagggatcttatctccagtgtgtggccttggagacccccaacaaatgggcagagtcaaaggggtacttggacagaacctcaggcagacatgactctagtcacccattccctctgagggggccttggcttactcagcacctggatgtgtatgtctcatctaggtccttcagaagcccattgcattttgtggaggtggaaaatgaggcccagagaggtgaagtgacctgcctgaggtcacacagtgagccagaggtagggctagaaccgaaaccttggtctgcccggttgaaatgcacattctgggccaggtgcggtggctcacgcctgtaatcccagcactttgggaacccgaggcaggcgaatcacctgaggtcaggagttcgagaccagcctggccaacatggagaaaccccatctctactaaaaatacaaaaaattagctgggtgtggtgctgcatgcctgtaatcccagctactggggaggctgaggcaagagaattgcttgaacccaggaggtggaggtt

SEQ ID NO: 718336 - DNA, 703 bp, Homo sapiens
aactcctgacttcaggtgatctgcccaccttggcctcccaaaatgctgggattacaggcatgagccaccgcgcccagcccctaaaactattcttgatgatatttctgagactattcagtggtcttctaaaatgccgccagcagaatggaaaacgtatcccctaaatggctggccaaccttagcatatgggacagtgtgacctctctcacacagagccactaaaaactaaacactaaaaccagttttcttgagtaaaggtttctaagatggaaaatttaagcagcgagatatgtcaagttgtagacgttggccgggaaaaagccagcagcaaccaggcaggggagagtgtgcatccgacatcctcctgtgtgatgaagggatgacacctcttccctctgggctgtcagcctttactgttccaggatacagatctcctgattcaggtgtccagtgccttttgaactgaacgcaagccctcctggacgattggaactgtaatgtggaaagggctctgatggagccrgttaaaatgcttcattatttgcaaaataccacatacagtaatacgatctggatgtctttcccctcctccactaagtagcataagtgaagacttcccagaggaagtgcgcctttttcatctcgtatctgagtcagtgagtatcctttttggaaacaagcttcatcctggttttctagagtg

SEQ ID NO: 718337 - DNA, 703 bp, Homo sapiens
aactcctgacttcaggtgatctgcccaccttggcctcccaaaatgctgggattacaggcatgagccaccgcgcccagcccctaaaactattcttgatgatatttctgagactattcagtggtcttctaaaatgccgccagcagaatggaaaacgtatcccctaaatggctggccaaccttagcatatgggacagtgtgacctctctcacacagagccactaaaaactaaacactaaaaccagttttcttgagtaaaggtttctaagatggaaaatttaagcagcgagatatgtcaagttgtagacgttggccgggaaaaagccagcagcaaccaggcaggggagagtgtgcatccgacatcctcctgtgtgatgaagggatgacacctcttccctctgggctgtcagcctttactgttccaggatacagatctcctgattcaggtgtccagtgccttttgaactgaacgcaagccctcctggacgattggaactgtaatgtggaaagggctctgatggagccagttaaaatgcttcattatttgcaaaataccacatacagtaatacgatctggatgtctttcccctcctccactaagtagcatamgtgaagacttcccagaggaagtgcgcctttttcatctcgtatctgagtcagtgagtatcctttttggaaacaagcttcatcctggttttctagagtg

SEQ ID NO: 718338 - DNA, 3274 bp, Homo sapiens
tcagcccaggaaagggaccagaggcgggaaaaccacacggcaaaggctgtcccgtgaggtcacggctccgtcaccgctgcccacacacggaaggcagccgcggctgggtgaagccatcttcacagacatgccgtccttgaggctctcacacatgcacacagacgctccgtcctctcccacccgcccccccgccaccccgggcaggccaggaagtcccatctggggcctcccaccccgagggttgccgtcagtccgtgtgcccaggcatcggggcctgcagcctccacagacagcgagacctgtgtgcgaagcagactctgtcctagggacagtgctgaccctacaaggctgggtcactggaggctccccgggtccagtggctttggtgggactcctggccaggctcctcctgggccgggctggtctccggcctcctgcctcccttggtggagcacccttgctccccagcacctcccaggttcacacagctcctccctggggctgcgcactgacccaggggcaggaggtgggccatcctctcggtggactgaagaccttgtccgaagggaaagcagggccggcccaaggcctggctggaagagtgggtcttggtggcaaaggcggcccgtggggggagcccacgcgaatgcttccccggcgccctgagcccctgaccgcggctgagcctgcggtactctggcccctctcatggaaagatgacctgggtctaccatgctcagtatcacccaaaaattcctacagaagtctctcgggacaagaaaaggccttcttccctccctcctcctttcctcttcctttctttcatcagggaacagcttccggctgcctgcactgtttgggcgccgtcataaggagccgtgacggccttcacggagctccggggctcacgggtgtggctgacctgccacaaatggggcgacagaggagagggagggtcgggcaccgatggctcaggagggaagagatcccttctgtatggggagacgggggcttcctggagggcactggagcgaggggctcaccagagtgagacatccaagggatctcggggaccggccatgggacactgtggtcccacgtggctcctggatgtgctgtgtgtttgctgaggtggaggggatggggaaaccatgtgtgggagagggagaggccatgcacgccctgagtcgggctttacaaaaaccttctgggggcagcaggagaggagccacgcagaggcagagccaggcagaggcggtggggtagtgagggggatgtcggggtgcacgggttaggagacccccgagccctgggacctgcatgctgatagtcaaggttgcagaggcggctgctgtggtgaccacagggcagggagaggcagtggggtagtgagggaatgtcggggtgcacagcaccagaccctcccagatcttctgattcagtcctagggggaccctaccccagatcttccaattcagtcctggttcagcctgagaatttgcatttttaacatgtccagggaccacagtttgaaaacctccacggctgacatgtaatgggatgacatggtccaataaatgaaggaaaaataacaggtggcaacctcargcagcttcatcccaaccagtaagaaagtaaatccttttgtaaactaagaggaagtattaatatgggtgtttgagcaaacatttaagtgttagaacaaagaattaaaaactagcacaggcacccctgaagcatgataggatggcaacagaagggctgatttagtttccaagaaataactgacaggcagtgttgtgcgtgtgtctactacttaggaacccaaaacaaaccttcagaccgttttcatgagtactgagaccaagaaaaccactgggcagtgggtggtctggaaatgtaaatgttgatggtactccagtaatgagtcatggaacaatgtttcatattgaaaatgtttttgtaaatgtgggtttcaaggtttcaaagtgaacctgtatgtgttaggagaaaggacacaccaaagaagtaaaataattgggtcaatagaaaaagaaagtagaatactgcccagagagaagatgtggataattcctaacacggatcaaaggcaccaaaaaggtgagctgtgggtaagatattcagacctgcaccgtcccctgcattagacacagacaacatcttggtaggcaactgggtgaaaattcagagacaaccctaggaactatgaggatgaaaaaagttagcattcatggaatgaggcactgacgaaactgaaaagctggaataaccccatgaaataacgagaataattgtagtattctgaaccggggcacaggacacaggactggagtggaaggccgcatgagaccaccccgggaaagacccagggatcacactggcccaaaggtgggcacttcccaactccgggatttgtgctacaggcactccaggctccaccatagaactgtgtccagcacgaaggcagtgctgtcttgcgggaggcagggctgcaccaccacaggggcgggaaggggcccggcagggaggcgcccagtgtttccaactgcacggggtcggggaccgcgctgatgcagagcgcgggggcgcaggttaaacctaaaggagggaagcttttgggggcggaacagacaacggagaacgctgcacactgcccttcccacccgaattgtgctttgcctttttttttttttttttttttttttttttgagacggagttttgctcttgttgcccaggcctggagtgcaatggcctgatctcggctcactgcaacctccgcctcccgggttcaagcaattctcctgcctcagcgtcccgagtagctgggattacaggcgtgcgccaccacgcccggctaattttgtatttttagtagatactgggtttctccatattggccaggttggtctcgaactcctgacttcaggtgatccaccggcctcggcctcccaaagtgctgggattacacgcgtcagccaccgcacccggcctgcttgcttttttttttttttttgcagagtctcgctgtccaccgggctggagctgcagtgatctcggctccctgcggcctcgacctcccgggctcaggcgatcctcccgcctcagcccacggagtacatgggaccacaggaggccaccacgcccgactacttgctgtaatttttgtagggatggggtctagccccgctgcccaggctggtccgcactgctgggctcaagagctccgcccgcctccgcctcacaaagcgcag

SEQ ID NO: 718339 - DNA, 3274 bp, Homo sapiens
tcagcccaggaaagggaccagaggcgggaaaaccacacggcaaaggctgtcccgtgaggtcacggctccgtcaccgctgcccacacacggaaggcagccgcggctgggtgaagccatcttcacagacatgccgtccttgaggctctcacacatgcacacagacgctccgtcctctcccacccgcccccccgccaccccgggcaggccaggaagtcccatctggggcctcccaccccgagggttgccgtcagtccgtgtgcccaggcatcggggcctgcagcctccacagacagcgagacctgtgtgcgaagcagactctgtcctagggacagtgctgaccctacaaggctgggtcactggaggctccccgggtccagtggctttggtgggactcctggccaggctcctcctgggccgggctggtctccggcctcctgcctcccttggtggagcacccttgctccccagcacctcccaggttcacacagctcctccctggggctgcgcactgacccaggggcaggaggtgggccatcctctcggtggactgaagaccttgtccgaagggaaagcagggccggcccaaggcctggctggaagagtgggtcttggtggcaaaggcggcccgtggggggagcccacgcgaatgcttccccggcgccctgagcccctgaccgcggctgagcctgcggtactctggcccctctcatggaaagatgacctgggtctaccatgctcagtatcacccaaaaattcctacagaagtctctcgggacaagaaaaggccttcttccctccctcctcctttcctcttcctttctttcatcagggaacagcttccggctgcctgcactgtttgggcgccgtcataaggagccgtgacggccttcacggagctccggggctcacgggtgtggctgacctgccacaaatggggcgacagaggagagggagggtcgggcaccgatggctcaggagggaagagatcccttctgtatggggagacgggggcttcctggagggcactggagcgaggggctcaccagagtgagacatccaagggatctcggggaccggccatgggacactgtggtcccacgtggctcctggatgtgctgtgtgtttgctgaggtggaggggatggggaaaccatgtgtgggagagggagaggccatgcacgccctgagtcgggctttacaaaaaccttctgggggcagcaggagaggagccacgcagaggcagagccaggcagaggcggtggggtagtgagggggatgtcggggtgcacgggttaggagacccccgagccctgggacctgcatgctgatagtcaaggttgcagaggcggctgctgtggtgaccacagggcagggagaggcagtggggtagtgagggaatgtcggggtgcacagcaccagaccctcccagatcttctgattcagtcctagggggaccctaccccagatcttccaattcagtcctggttcagcctgagaatttgcatttttaacatgtccagggaccacagtttgaaaacctccacggctgacatgtaatgggatgacatggtccaataaatgaaggaaaaataacaggtggcaacctcaagcagcttcatcccaaccagtaagaaagtaaatccttttgtaaactaagaggaagtattaatatgggygtttgagcaaacatttaagtgttagaacaaagaattaaaaactagcacaggcacccctgaagcatgataggatggcaacagaagggctgatttagtttccaagaaataactgacaggcagtgttgtgcgtgtgtctactacttaggaacccaaaacaaaccttcagaccgttttcatgagtactgagaccaagaaaaccactgggcagtgggtggtctggaaatgtaaatgttgatggtactccagtaatgagtcatggaacaatgtttcatattgaaaatgtttttgtaaatgtgggtttcaaggtttcaaagtgaacctgtatgtgttaggagaaaggacacaccaaagaagtaaaataattgggtcaatagaaaaagaaagtagaatactgcccagagagaagatgtggataattcctaacacggatcaaaggcaccaaaaaggtgagctgtgggtaagatattcagacctgcaccgtcccctgcattagacacagacaacatcttggtaggcaactgggtgaaaattcagagacaaccctaggaactatgaggatgaaaaaagttagcattcatggaatgaggcactgacgaaactgaaaagctggaataaccccatgaaataacgagaataattgtagtattctgaaccggggcacaggacacaggactggagtggaaggccgcatgagaccaccccgggaaagacccagggatcacactggcccaaaggtgggcacttcccaactccgggatttgtgctacaggcactccaggctccaccatagaactgtgtccagcacgaaggcagtgctgtcttgcgggaggcagggctgcaccaccacaggggcgggaaggggcccggcagggaggcgcccagtgtttccaactgcacggggtcggggaccgcgctgatgcagagcgcgggggcgcaggttaaacctaaaggagggaagcttttgggggcggaacagacaacggagaacgctgcacactgcccttcccacccgaattgtgctttgcctttttttttttttttttttttttttttttgagacggagttttgctcttgttgcccaggcctggagtgcaatggcctgatctcggctcactgcaacctccgcctcccgggttcaagcaattctcctgcctcagcgtcccgagtagctgggattacaggcgtgcgccaccacgcccggctaattttgtatttttagtagatactgggtttctccatattggccaggttggtctcgaactcctgacttcaggtgatccaccggcctcggcctcccaaagtgctgggattacacgcgtcagccaccgcacccggcctgcttgcttttttttttttttttgcagagtctcgctgtccaccgggctggagctgcagtgatctcggctccctgcggcctcgacctcccgggctcaggcgatcctcccgcctcagcccacggagtacatgggaccacaggaggccaccacgcccgactacttgctgtaatttttgtagggatggggtctagccccgctgcccaggctggtccgcactgctgggctcaagagctccgcccgcctccgcctcacaaagcgcag

SEQ ID NO: 718340 - DNA, 803 bp, Homo sapiens
gttcyggaagatggagagagcctgagacaggtgctgggattctgagaggacttggccagcttggccgggggaaggcatcctgaggttcttggctgtggagcataggaaacagggcagctggcaggtgggcaccaggcgcataggcgggagcgaggagggagggtgtgggcttggctgaagaggctgtttgctgaagcttcaggtcttcgtagcaacttagttttccttcttcagaaaatgaagcagccaagaagctcctctgggtgtcagagcctccagtgaggtttgaggcccactgggggagggggacgggctcccaaggcaggaggaggaagggctggagagcaggggcacccaggcattgggcatgggtggaccctgcccaatgggcctgtggggttcccgtctcgacggctgggcagccccactcattgtcactttgccctgtgttttctgcagatcatgattgagttctgtccagggggagccgtggacgccatcatgctgggtgagtcttacttgattcggtgcattgtcgggaccagacgactcgtttggagtcctaagcctgactgctggacagctctgtctaggactgggacctccactctcccattccatcagttcccatggcctctttgagcacctctctactatgtctgcttttgggagcagggtgtgggttctttttttctttctttctctttttgagacagagtcttgctctgttgcccaggctggaatgcagtggtgcgatctcagctcactcactgcagcctccgcctcccgggttcaaatgactc

SEQ ID NO: 718341 - DNA, 803 bp, Homo sapiens
gttctggaagatggagagagcctgagacaggtgctgggattctgagaggacttggccagcttggccgggggaaggcatcctgaggttcttggctgtggagcataggaaacagggcagctggcaggtgggcaccaggcgcataggcgggagcgaggagggagggtgtgggcttggctgaagaggctgtttgctgaagcttcaggtcttcgtagcaacttagttttccttcttcagaaaatgaagcagccaagaagctcctctgggtgtcagagcctccagtgaggtttgaggcccactgggggagggggacgggctcccaaggcaggaggaggaagggctggagagcaggggcacccaggcattgggcaygggtggaccctgcccaatgggcctgtggggttcccgtctcgacggctgggcagccccactcattgtcactttgccctgtgttttctgcagatcatgattgagttctgtccagggggagccgtggacgccatcatgctgggtgagtcttacttgattcggtgcattgtcgggaccagacgactcgtttggagtcctaagcctgactgctggacagctctgtctaggactgggacctccactctcccattccatcagttcccatggcctctttgagcacctctctactatgtctgcttttgggagcagggtgtgggttctttttttctttctttctctttttgagacagagtcttgctctgttgcccaggctggaatgcagtggtgcgatctcagctcactcactgcagcctccgcctcccgggttcaaatgactc

SEQ ID NO: 718342 - DNA, 2300 bp, Homo sapiens
gcattatggcctcttctttcttcatttgaagcgttccatcattaaatcaaggttttcaaagaggaacccaaaacaggaaaacaattataatcatacttaacttcagaattgattgttttttaccaatgtcaaaatgagtttttggtagaatgctttaaattatgtagtaaaaatatttaaaattatgtgttatttagatctgagaaacaagccttacttgggttttctgtgtgttagatctgtttatttgttacagagtgggaagaagtgtttaaagattacaaggaaagataaagagtgggtgaatatgattaagaggtttctgagaaaaagatgacttttggacacgttttgaagtaaatgtggattgatgggggaaaggatattttctgaaatagattgtgtggttttttaagattagattgctttattaattttttatttctcatatgttaattcatagtgcactaaagatggttggttacctgcagtttaaggatagagaagcagaaatttggggaataaaagatgtttcctgtctttaaattcttcactgttagagcatggtacctagtcctatatgctatgtatgattaccaagcatctctcttttggtatcagcagtcagaagatgtgtgaagcagataaaactgaaagtttaagagcataaaatgaaatctagttgagtatgtatatattctacatcttacaaaaatgtttggcttggtacaaacatgaggtacttagctgccaggctgataatctatgtccaactactgcattttcagaaatacaggtttgtggcaccacctgaactcaaaggataagatttggtgaacaaatgcctagcaagtgtactctgataaggcacaggaagtgcatgacaatcagggacatttctttaacatttaaggaagggattgggaagttatgaaaagaagaaagacagcctgtatatttttgccaaaggacttaaagatgttatttcatatagtacctctaagttcatttttacttatttagcaaacatttatttgcagttttattgtatatcatgcattattatgagtggtttatgaatatgaacttaagtcctcttaacaaacctaaatattttcatgttttcacgagaggatagttcaaatgcttttgctaaatgctaatttttttcccagttatttatttaacaaaggttagtcatttagtttaacatgaagcttcaagcctcagattttgtagtgaaaattctgcactgctctgtggtttcactaaagtaattatgttacaaagatttaatcattttttaacagtggacattctatagacagatattctatattatgtttataatacaggcagaaataggcaaataaaagtaatcttccttcatgtcacaaattaccgtgaaacttttgacagcatgtagatttgaaaatgcattgggggcctgtcgcagtggctcatgcctgtaattccagcactttgggaggctgaggcgggcggatcatgaagtcaagaaattgaaactatcctggccaatatggtgaaaccccgtctctactaaaaatacaaaaattagctgggcatggtggcgcgggcctgtagtcccagctactcgagaggctgaggcaggagaatcgcttgaacccaggaggcggaggttgcagtgagtcgggttgcaccagtgcactccagccttggcgacagagcaagactctgtctcaagtatatgaataaaatttaaaaattaaagaaaatgcatttggaatgattttccttaagcaacataaacgcatcatctgttctttttgtgggactttgttcatctatgcttagtacaaacggagagaggtgaaatgaacctacctcacatttgtaaggaaggtgttttacaatttttccaaggtactttgtacccttattatgattgtttttctgttggcttcctcttttcaaagtcctcttcctttcatttgctttagttttaggtcctgagattcttctgtagaggttttgttgtttttgtccatgctttgtaattctctcagaatgacaggaaaaattatactgagttatctctcatgcatttaatacatatgaggccagataattctgtagaaatactcagacccaaaactttattcagataaatatcttactgagtctacctrcttactgtgccatcttccacttcctggtcagtaagctgagtgttgtctgtaaactgtctctaactcatctaaatgataatgtagcagaaaataaaatcaaccttgcattccatcgtgttggtgcaatca

SEQ ID NO: 718343 - DNA, 626 bp, Homo sapiens
taaaacgttttgtaaaattttttgtaaattttgtaaatgtagctaaaagtgattttggaaaaatagaaaaatccctgtattgtcaacttttagagtgttccttcccttttgtstttaaacatactgggtttctttaagcaaacctctctgtattagtctgttttcacactgctgtaaagaactgccggagactaggtaatttacaaagaaaagaggtttaattgactcacagttccacagggctgagggggccttaggaaacttacaatcatgatggggaagcaaggccccaaaggggaagcaaggcctccacatggcagcaggagagagaagagtgaggagcagagcgggaagagtcccttataaaaccatcagatcttggccgggcacagtggctcatgcctgtaatcccagcactttgagaggcagagacaggcaggtcacttgaagtcaggagtttgagactagcctggccaacatggggaaatcccatctctactaaaagtacaaaaattagccaggcatggtcgtgcatacctgtaatctcaggagcctgaggctgagaattgcttgaacgtgggaggtggaggtttcagtgagctgagattgtgccacctcactccagc

SEQ ID NO: 718344 - DNA, 1519 bp, Homo sapiens
tctctgtggccatgtgaaggagtaaacatttcactgataggygccaatgtttgttattctgtgaaaatctgcttaatttataagcaacagtgatactcccaataggttaagttgaattcacccttgagaaattttaatttcagtgtcactattgttataatctgggggtcttccaagatagacatatcagtagaaaaacagtgactcatctgagaaactcagggctatatatatatatacacatatatatatatttgcatttttcatatgtactttccaacttccttcctttcctcagtatttaagtgtagaatacccactccttggattttttaaactataaaataatacatacgtacgtatatatgtacacacatgcacagatatattctgctttatatagtttagcattaaaatgtatttgagtaatacctaagaccatgtctatttaattttaaccagtgggttatgggaatcatcaaaaatcaaacacaataaaaagaaacaatatttatggcattttaaagcctatccattattggttagtgctcccctcaattgtttaactgcaattggttccactttctcagtgtggatgatttttatacatctgagttaaaaaataatgctgcttgcaagtgaaaagttaaagaccaagacagggcctattagaataacattacacttttttattccctgcacttactttgtcaattactaattatttcccttttgctatgcaacaaaatagaagccataaaatctttgatttaatgaaaacttcctaccaaataggtcctctaactctgctgaaggcttataggtaatttatctacctcagtaggcaatgaccttttgtgaatcatgagtcattcctcactcctgatgagagggatccagatgccatcccaccctctgcctggcccctccttcctccatccaacagaggctgtgcggctcctgtgccctgcctccgacttctccaaagtgggctgtaattagtccttgcacagggaacctgccagggagtggatctccctcctcctgtgctcctttggctccttcgttaaggtgactgaacattcaatgttcttttctaagtggccctgaagaaaaaggggtgagggatggtagaggccaaggtaagtcttattattgtctgggaagtgggaatacttcctcacacttcaacagaagcctctctgcctactcttcccaaagcacagttatggagaaaatcaccaggggctcagaatggcattttggggtcagtattttagcggcacagagcagtgcatgctgggagccacactgcagtcctggggtttccaggtggttttgactgagattctaacatgcatgttatttgtaaattatatacatgtactattgattgtacattatatacatgtattactaattatatacggggtctctagttatacatatgtattactgtacacatacatgtatcactgctctggaccaaaatattaagtgcattataaaacacatataa

SEQ ID NO: 718345 - DNA, 629 bp, Homo sapiens
caaatgatagatttgctgtgtaaaatagtggaaatggagtacatagccatagttcgagcatttttttattcttaccacaaacattaagtgcctattctgtgccaggcactgatayattagatcctctgccctcaaaaagctctgtctattagggtagagatgggtctgtggtcagctaaccatgaaactgttcaggttctgagtgcagtggggacacagaattgccttgttttctaagaaacatctccatctaatgtgaacttcacgtgggcttgcttttgtttgtggatgccattcactgaaaaagccaggctgtaatcccagcactttgggaggccaaggcaggagaatcacatgtgccctggagtttgagaccagcctgggcaccatggtgaaaccccatctctacaaaaacatacaaaaattagccaggtgtggtggcacacacctgtaatcctagctactcaggaggcggaggtgggaggatccattgaacccagggagttgaggctacagtgagccatgattgtgccactgctctccagcctgggcaacagagtgagactctatctcaaaaatagacacataaataaaaataaaacaaaaagaagagattagattggaatcat

SEQ ID NO: 718346 - DNA, 596 bp, Homo sapiens
agaaaatatctacatcttgcttttgtaaacatgcattttgcctttgctttttgcatcatatttaacaaaggtctatgatgtctcaaaattttctctcttaatattgaaaagttaattagaagtggaggaatgggatgaagcttttctaataacaagtcaaattcatttgaacagtaaaaataattgctgtaagaaattaaggtgcaagcacatgcctgctgtaattggtgcgtacttattaggagctcttcttttgcaacctctctcggtatttggggcccatgataatgtgaatacttaagggaaaagtgtgattagggatggtgtcgttcattcagtaaacatttcttagtgtttgatgtgactgaactgcgcgtcacatatgattttacacttttatcctttcaggcaactgacaggtctctaatctccatctcagaaccttcactcagcttgaactttggctcataaaggtcatttttgaaccrcttgggacaaagagccacgtccatgaaatcccacagagtcgatagatgcaataatagctttaggcacattttcttaagacccaaggggaaagacaatttcaataaatg

SEQ ID NO: 718347 - DNA, 596 bp, Homo sapiens
agaaaatatctacatcttgcttttgtaaacatgcattttgcctttgctttttgcatcatatttaacaaaggtctatgatgtctcaaaattttctctcttaatattgaaaagttaattagaagtggaggaatgggatgaagcttttctaataacaagtcaaattcatttgaacagtaaaaataattgctgtaagaaattaaggtgcaagcacatgcctgctgtaattggtgcgtacttattaggagctcttcttttgcaacctctctcggtatttggggcccatgataatgtgaatacttaagggaaaagtgtgattagggatggtgtcgttcattcagtaaacatttcttagtgtttgatgtgactgaactgcgcgtcacatatgattttacacttttatcctttcaggcaactgacaggtctctaatctccatctcagaaccttcactcagcttgaactttggctcataaaggtcatttttgaaccgcttgggacaaaragccacgtccatgaaatcccacagagtcgatagatgcaataatagctttaggcacattttcttaagacccaaggggaaagacaatttcaataaatg

SEQ ID NO: 718348 - DNA, 1243 bp, Homo sapiens
gaaaaagaaaaagaaagaaagaaagaaagaaggaaagggagagagagaaaagaaaggaagaaaagaaaccaggtcagtcaaaatggcccagactaaaacttcttgatagaagacttatctctcaccttcttgctcaaaaaatttaagggtcgttggtacaacctttccacatgtgctgcattccacccctgctaaaatcctgcctttcgtgttgaattcaaacctcttcaggaaatgatccagggtgtaaaaggaagatagtctacgattttgccctcatttcctgcagaaagcatttagatgtttgttagggaatatacatataaatatacatatatatgtgggtgtatatacgtgtgtgtgtatatrtgtgtgtgtgtgtgtgtgtgtgtgtgtgtatatatatatataaaacattctactttaaaaaagaaaatacaggtttcaaaaaaaaccctattcaatcacaaacacattgcagtcagtagctatgcttcagactacaaatcatagtgaaagccagcttctatctatctatgtaacccataaaatgcctttttaactcaatattgttagcagcattctattccagatttgaaaggatttccctattattttctacccaaaagattaagtattaattaatgacccccaaaataggtactgccttgtttgttaaggagacctgtcttacactttcctaacattatagccagatttcacggtcacaggaaaacaaaacacacataatggagtggttattaattcaataaatccagcagctcttgtgctctgggcaaaaggcaaagttaaaagcagctgttcattgacgacatatgggacatggtcagggtgaggtagctgctttagcacatcatccaccacttttaaggctgactgcactcaatttcttagacaatctacacaccgttttcagttctgtacctccataatttatcacaacaatacctcaagcacacagatcggagggggaaaatgaaagcaatttacagtatcaagatgaaagtagctgggtggatggagaagacctactatgtaaatcatacccacaacttcaaggaatgttgacataatattctggaattaatttttccagcattcctttgtaggtcacacaaaggtaaatctactttctcctccctacctcttatatctggagttgtttatcaatatgttgaagaggaaattgattttacctctcccttcaacagggacaataaga

SEQ ID NO: 718349 - DNA, 1243 bp, Homo sapiens
gaaaaagaaaaagaaagaaagaaagaaagaaggaaagggagagagagaaaagaaaggaagaaaagaaaccaggtcagtcaaaatggcccagactaaaacttcttgatagaagacttatctctcaccttcttgctcaaaaaatttaagggtcgttggtacaacctttccacatgtgctgcattccacccctgctaaaatcctgcctttcgtgttgaattcaaacctcttcaggaaatgatccagggtgtaaaaggaagatagtctacgattttgccctcatttcctgcagaaagcatttagatgtttgttagggaatatacatataaatatacatatatatgtgggtgtatatacgtgtgtgtgtatatgtrtgtgtgtgtgtgtgtgtgtgtgtgtgtatatatatatataaaacattctactttaaaaaagaaaatacaggtttcaaaaaaaaccctattcaatcacaaacacattgcagtcagtagctatgcttcagactacaaatcatagtgaaagccagcttctatctatctatgtaacccataaaatgcctttttaactcaatattgttagcagcattctattccagatttgaaaggatttccctattattttctacccaaaagattaagtattaattaatgacccccaaaataggtactgccttgtttgttaaggagacctgtcttacactttcctaacattatagccagatttcacggtcacaggaaaacaaaacacacataatggagtggttattaattcaataaatccagcagctcttgtgctctgggcaaaaggcaaagttaaaagcagctgttcattgacgacatatgggacatggtcagggtgaggtagctgctttagcacatcatccaccacttttaaggctgactgcactcaatttcttagacaatctacacaccgttttcagttctgtacctccataatttatcacaacaatacctcaagcacacagatcggagggggaaaatgaaagcaatttacagtatcaagatgaaagtagctgggtggatggagaagacctactatgtaaatcatacccacaacttcaaggaatgttgacataatattctggaattaatttttccagcattcctttgtaggtcacacaaaggtaaatctactttctcctccctacctcttatatctggagttgtttatcaatatgttgaagaggaaattgattttacctctcccttcaacagggacaataaga

SEQ ID NO: 718350 - DNA, 1243 bp, Homo sapiens
gaaaaagaaaaagaaagaaagaaagaaagaaggaaagggagagagagaaaagaaaggaagaaaagaaaccaggtcagtcaaaatggcccagactaaaacttcttgatagaagacttatctctcaccttcttgctcaaaaaatttaagggtcgttggtacaacctttccacatgtgctgcattccacccctgctaaaatcctgcctttcgtgttgaattcaaacctcttcaggaaatgatccagggtgtaaaaggaagatagtctacgattttgccctcatttcctgcagaaagcatttagatgtttgttagggaatatacatataaatatacatatatatgtgggtgtatatacgtgtgtgtgtatatgtgtgtgtgtgtgtgtgtgtgtgtgtgtgtatatatatatataaaacattctactttaaaaaagaaaatacaggtttcaaaaaaaaccctattcaatcacaaacacattgcagtcagtagctatgcttcagactacaaatcatagtgaaagccagcttctatctatctatgtaacccataaaatgcctttttaactcaatattgttagcagcattctattccagatttgaaaggatttccctattattttctacccaaaagattaagtattaawtaatgacccccaaaataggtactgccttgtttgttaaggagacctgtcttacactttcctaacattatagccagatttcacggtcacaggaaaacaaaacacacataatggagtggttattaattcaataaatccagcagctcttgtgctctgggcaaaaggcaaagttaaaagcagctgttcattgacgacatatgggacatggtcagggtgaggtagctgctttagcacatcatccaccacttttaaggctgactgcactcaatttcttagacaatctacacaccgttttcagttctgtacctccataatttatcacaacaatacctcaagcacacagatcggagggggaaaatgaaagcaatttacagtatcaagatgaaagtagctgggtggatggagaagacctactatgtaaatcatacccacaacttcaaggaatgttgacataatattctggaattaatttttccagcattcctttgtaggtcacacaaaggtaaatctactttctcctccctacctcttatatctggagttgtttatcaatatgttgaagaggaaattgattttacctctcccttcaacagggacaataaga

SEQ ID NO: 718351 - DNA, 1629 bp, Homo sapiens
  misc_feature 1114, 1130, 1132: n = A,T,C or G
ttttaatctctaggagaaattttatttgttatttttgaagctccttttaaaaatcatgtaattcttgtttcatggattcgatattttttacctctgtgagaatgtaaattggagagtttccccgcatagttttcccttctctgagttctgcatcgtatttattttctctaggctcctttactctgtttatctgcctttcagttagaggtgttactcaactgttttaatatctggtatcttttcgcatttaaaagtgaagcattgcagagataagcagcttcatgggcatgcacctgacttccattaggatgctcctgcaggcatggagccatttttttaaaggacgatcaactgacactatctgtaagactcttctctctgttgggtcagcttgactaccctccaatcttctgtaaagggctagaggacttctattcctaattcccagttttcagcacagtaatctgcacctcccactctgcccaagctgtgcagggtattcttgagttataagttcctctgggtcaacttcttcagagagcaaacctccagtctcctgctagataggggagggagagctgtctggttgcctaaggtaaagaagggaatgtrggggtctaattatttcttttatggagtttcaaccaattctttacttttaagctccatccacaccttaatttttgaagacatctattgccttaaattctaaagtgtttacagagttccagaatggaaattggttggcttcttgttttacccacccagcaaccttatgggcattttattttggctttctttgctatgcaaagttaaattttagttatccatctgtcttctaacatccaaagttatcttgatatttctctgttttttttccttcttgatcttcgtcttcataagcgcatgcttttaacaaaatctttttacattcattttagtgggatcttggagcagaacaggataaaacacctaagttctattgaccacattttacaagagcctgtctccttctttcttctcttccagctctgaagccaagatctcctcctctgaatttgtggctgcaaaacttctttccaagtgcaggtatgtggctactacctctgttctntatgggatgaggtttntntgctccacgccccgcagggaaaagaggagccccacccacccccagggcaccccactccaacgtcaccactctgcaccaaccatctcctcccctttcctctcccaaatcacaatctccttggctatcttggtcatagagactcctctcctccttctcttcaagatctcaatgatcctttacccaactctgactcccttcctcgcacaagcaggagccctgtttcaaaaatttctggttggacttattgccaatcacaccttaattttaatgtctgatgttttatttttggcttgctgccttgagcctcagtcagttttctaaaatgaggaaaagaaggtataattaccaactattctgggtcaagatatatcctgccatcaacagaacctttaagccgtctgcctgttttttgaacaacacattcaatactctgtaaaaggtaaaccctacatctttctgggtctccatggaatccatcctgaacttgccttaagtca

SEQ ID NO: 718352 - DNA, 2294 bp, Homo sapiens
ttgggctgggggttgtggggaaagtgtgggagaaataatatatgcagaaagttctatatcctgaagtgagggggagggatgatggattatcccgcaaaggggttttagtgggataataataacaacagcaaaacaacagcagcagcaactaaggttcactggatgtttaccgcatgccaagcaccactcaaatgcctgactattccaactcatttaatcttcgcacaaccctatgtggcagggactcttgctatcatagttttatggatgatgaaattgaaatctagagagtgagtgaattggacattgtcccatacctagtgggtgacagaagtagcatttagacccaggtctggctacagaagcctttttttttttttttttttttgagacagagtctcactgtgttgcccaggcttgagtgcagtggcatgatcttagctcactccaacttccacctcccaggctcaagcaattctccttcctcagccttctgagtagctgggaacacaggtgcccgccaccatgcctgcctaatttttgtatttttggtagagacggggttttgctatgttgcccaggctggtcttgaactcctgacctcaagtgatcctcctgccttggcttcccaaagtgctgggattacaggggtcagccaccacacctggcctggaagctatggtcttaactgccaggctatgctgcctcccctgggtggcagaccacaagtgggctgaggatatatactccatacttctgaacatcttgaaccaccaatgcccaccccattgtagccacagtgttccctagcccacaagcaagagcaagaagtagaaaagcccagtgcaaacccatccctgtcttggggaaacagtgcaaagcacacactacacctactccaggtgtaataatataggttgttggaagaacacccaagttttacagccaaagggacctgagtttgaatccctatccagtcaatttcttggatgagttacttaacaccctagaatctcaaatagtaggtgcagtccaaaggtgggaaaatccggcagttgcaaactctcaggaatcagcagttatgtggcgggcactgtccccagaacccaggtaccaggagtcagctcaggttctgctcccaggcagtggaggactctgagcagggaaggcgggagggcccttcagggagcaagacctggtctgccagggtggtcattgacttaacagtgaagtgcttttgtgtcactcagcctagatatgactcttgggctcttctctttatcagccatatgacccaggccaagttgtttagctgctctgagcctcagttctctcatccataaaatggatgtgataagttaatgtgtgtgaacagcttggcacagggccgggctcaggccatgtgaggatcgggggtaatgagcatgcagaggcatgatgatgaatcgtatcctgaaaggaaactcaaggcatacagagggtcgccatcactgggttggtgtggagggggatgggggtggttcccttatcctaaacctttctcccagccctgcttcccaaagtgcccgcgtttaatgtttgctaacagccacgcagcttaatcttcactgcctgctgctttcctgttagaaatgaccaaagctttgcccctgtggccactggaccatgctaaagagcccgagacgcctctccacagcatttctgagtggctggctacgtgtctttttgttttgctcaagtgtctgtgtgtgcatttcttggaattgctttctggaacactaagatcaatattgtctctaacattggtcttgagagatgctggggacagcgcaggatgatggagtgggtgggattgggaggcagacatagaggggtgaggtagggtgaacagtcacttccatcgagcccattcaccaaaagtggatccttgccaccagtgttgtagtaacagtaatgcatttggacatgatagtcatgaaaaccatgatggaaaggctttcaaggacacagagcgaacacaggagtcagccctgctccacayagaattaaagcatctgaagtcagctgtgagacaaatggagaaggtggcccttgaatactgctcctttcccccaccgctgacagtctttgctgtccccacctccccttcctgatttcccagtctcccacataggagcaaggggctttccatggacccagccttaaagacataataaggcatccttgattcttcctttaccttcctataacaccctgttcgtcagaaattccttttgactccacttgtagatata

SEQ ID NO: 718353 - DNA, 1350 bp, Homo sapiens
aataatacttcctactatgcattatgtcagagcaaggatcttctatgtatatcgtttaatcctcaccagaaaatttggcaaggtgaaaatcattattactctcatcttaaaagtgagaaaattgaggctcagagaagctaagccacttgcctcaagccacacagcagttaggtagcygaagctcagttttcttatctgtaaagtagagatgaagtgcttcctacctcataggattgttgtgataattaaatgaagggtgtgttatgaatttagagcagggtctgataaaagtaacctctactcaagccaggcatggtggctcacgcttgtaatttcagcactttgggagaccgaggtggacagatcacttgaggtcaggagtttgagaccagcctggccaacaaagtgaaaccccatctccactaaaaatacaaaaagtagccaggtgtggtggggggggcacctgtaatcccagctactcaggagactgaggcaggagaattgcttgaacctgggaggcggaggttgcagtgagccgagatcatgccactgtactccagcctgggtgacaaagcaagactctgtctcaaaaataaataaataaataaataaataaataaataaataaataaatacataaaaaagtaaaataaaaaatgaagtaagttctactcacttttagtactgtttcctccctccctccctccctccttccctcccttccttccttccttctttcttcctacttgtctttttcttttcttcccagaatttaagggtaattgcaagaatatgtaagataaaatgagaaacatttaagtgactttcttaaggtcacgtaccagcaagcaggtcacaaatataagagttataaagttaaagaaatccaatatttttcaaaagggttcgtattcaacccgggtagtagtgaaatgtaaaggggaagacctgccaattgtggcctttttgctgactcttgttaggtgacaccaggcaacaggtctccacacgcactcgcatgcgcctgcacgcacacacactgacggagaactcaatgcacgagagacatcagtcactcaggttcacgatctcatttcatcttcaaaataactcagcaaggtaagtatatttcccccatttggcaaatgagaaaattgaggctttgtgagcttacccaagctttccaggttcacgcagcaggtaatgggggaatgtgagtcaaatccgggtttgtctgattccaaaatccttgcccttttgcctacacaatgttgcctccctctaagatcataaatatttctcagtgtaaatagtagtttctcagtatgagctttgtaaatggctctcagt

SEQ ID NO: 718354 - DNA, 1350 bp, Homo sapiens
aataatacttcctactatgcattatgtcagagcaaggatcttctatgtatatcgtttaatcctcaccagaaaatttggcaaggtgaaaatcattattactctcatcttaaaagtgagaaaattgaggctcagagaagctaagccacttgcctcaagccacacagcagttaggtagctgaagctcagttttcttatctgtaaagtagagatgaagtgcttcctacctcataggattgttgtgataattaaatgaagggtgtgttatgaatttagagcagggtctgataaaagtaacctctactcaagccaggcatggtggctcacgcttgtaatttcagcactttgggagaccgaggtggacagatcacttgaggtcaggagtttgagaccagcctggccaacaaagtgaaaccccatctccactaaaaatacaaaaaktagccaggtgtggtggggggggcacctgtaatcccagctactcaggagactgaggcaggagaattgcttgaacctgggaggcggaggttgcagtgagccgagatcatgccactgtactccagcctgggtgacaaagcaagactctgtctcaaaaataaataaataaataaataaataaataaataaataaataaatacataaaaaagtaaaataaaaaatgaagtaagttctactcacttttagtactgtttcctccctccctccctccctccttccctcccttccttccttccttctttcttcctacttgtctttttcttttcttcccagaatttaagggtaattgcaagaatatgtaagataaaatgagaaacatttaagtgactttcttaaggtcacgtaccagcaagcaggtcacaaatataagagttataaagttaaagaaatccaatatttttcaaaagggttcgtattcaacccgggtagtagtgaaatgtaaaggggaagacctgccaattgtggcctttttgctgactcttgttaggtgacaccaggcaacaggtctccacacgcactcgcatgcgcctgcacgcacacacactgacggagaactcaatgcacgagagacatcagtcactcaggttcacgatctcatttcatcttcaaaataactcagcaaggtaagtatatttcccccatttggcaaatgagaaaattgaggctttgtgagcttacccaagctttccaggttcacgcagcaggtaatgggggaatgtgagtcaaatccgggtttgtctgattccaaaatccttgcccttttgcctacacaatgttgcctccctctaagatcataaatatttctcagtgtaaatagtagtttctcagtatgagctttgtaaatggctctcagt

SEQ ID NO: 718355 - DNA, 1268 bp, Homo sapiens
aagtactcaagaaaaagccagctgtcagaggaggtctgagaaatacaatgtgctgacctcagtctcctaatacatagcagtcaggcaggatggaggttaggggtcaagagcaaatagacaaatgatctccatgaaagtgcccttatcttttggctgaaggaatatggacaatctttttgcaggaggacttagggagaggagagagaagtgacaaaattagagaattgataggacagcatttyttggcttaccagtcagttaggttaggtttgatatctggcaaaaacaagtaggctcaagatagaagcttaaataactcatttcattaactgcactatgagatcccaggaatagagctttggtgcttcagggtcaacctgatactgtgcatgaaatatagcacttgcagaaacttcaaggactgaaaatgagtctcagcacaaacttggttcagttcctagaaaagaatgccagagtagaaaaaattatactcaaatcatcatgacacatgcaggatacctccagccttcacattctctacaataacaaattgggagaacagggattttagaagagatgaattttttgcttaaactgatgaaagttttaaatccagtggaaattagtgtttaatgtgacacagtgttgttacagcctgatggaatctaagaccgtttacaaaactgcagaacttaagaaatgaaatgaaactagtccatctaatctaaattatatgtatgatgacccacaaaaggaaatatatcttatgatggattacacacacacatacacacacagagacatattccaaaataactttaaaaaatatttcatgaaacagcacttaccctcatgtgatatgctttgatgttttctgttctttctattctataccattttatttattagaagaatgctggttgtggcccatttatttaatttcatgactacttttcatgactttaaaggaagtataacagccctctttcagtttaaaaaacactgatcacagctaattctcaccttataattaaaaaaactgagatatggtttgatacatctttacatgtttcttaatgttccttatgcagtaggttgtcttatgttgttttcagtcataaaatccttaaaaagttaggttataactagttaaagtgtatttaacattattagaattttcatctatgtttttagtgaatgctttacaatgattacgagtatgtatttgaactgcgtgtttcatgagctaatctaatttcccccaagga

SEQ ID NO: 718356 - DNA, 1268 bp, Homo sapiens
aagtactcaagaaaaagccagctgtcagaggaggtctgagaaatacaatgtgctgacctcagtctcctaatacatagcagtcaggcaggatggaggttaggggtcaagagcaaatagacaaatgatctccatgaaagtgcccttatcttttggctgaaggaatatggacaatctttttgcaggaggacttagggagaggagagagaagtgacaaaattagagaattgataggacagcattttttggcttaccagtcagttaggttaggtttgatatctggcaaaaacaagtaggctcaagatagaagcttaaataactcatttcattaactgcactatgagatcccaggaatagagctttggtgcttcagggtcaacctgatactgtgcatgaaatatagcacttgcagaaacttcaaggactgaaaatgagtctcagcacaaacttggttcagttcctagaaaagaatgccagagtagaaaaaattatactcaaatcatcatgacacatgcaggatacctccagccttcayattctctacaataacaaattgggagaacagggattttagaagagatgaattttttgcttaaactgatgaaagttttaaatccagtggaaattagtgtttaatgtgacacagtgttgttacagcctgatggaatctaagaccgtttacaaaactgcagaacttaagaaatgaaatgaaactagtccatctaatctaaattatatgtatgatgacccacaaaaggaaatatatcttatgatggattacacacacacatacacacacagagacatattccaaaataactttaaaaaatatttcatgaaacagcacttaccctcatgtgatatgctttgatgttttctgttctttctattctataccattttatttattagaagaatgctggttgtggcccatttatttaatttcatgactacttttcatgactttaaaggaagtataacagccctctttcagtttaaaaaacactgatcacagctaattctcaccttataattaaaaaaactgagatatggtttgatacatctttacatgtttcttaatgttccttatgcagtaggttgtcttatgttgttttcagtcataaaatccttaaaaagttaggttataactagttaaagtgtatttaacattattagaattttcatctatgtttttagtgaatgctttacaatgattacgagtatgtatttgaactgcgtgtttcatgagctaatctaatttcccccaagga

SEQ ID NO: 718357 - DNA, 1892 bp, Homo sapiens
gttatgtcttgatcacgaggggaagatgaaaacttagtgaagttaaagtttaaaggtacatcttctgaattctacaaaaaaatgcagtttctacttcaccatcatgattttctgtgcacttttgcaaaggtacacatgtatgtatccccctaacatatctacacaccacttacaccctaagccttacaaagaacgttcatgtacattcatttaatcagttgactgactaagatgcaatcgggtcttctggctttaagggggctttatttttaaaacaaaatccaaaaaaaaaaaaaaggagtgcctgctatgttctgcacttcttccttcattctatacatcattacttagaagagtaaaaatggctgaatctgccattaagcaatgagtggtgatggaccaacagtattgttaggctaacaacatttctttgctttgtgataacaagatgatttgtccaagagttgtgtgtataagtttaagagtagctaattatcactgaattttcagggaatttatgtcactgaatatttaataatttctaagaaaaaaaaaagcagcatacaacttgaaatatacttatttgatatttgatagtctttatagggtactattttttcaaaccaaagtggggaagaaaagcttttgatttctaatttgattttgaagtggtaatgcctcagccagtaaaagtgtcagcttcatggtgtgtaatgcagtgatgaacatgaaatgtaatagtgaaaagatgtttcttgggctcttcattataaatattgtataaatgttgacctctacccagccccttggagatttacgtgtctgtttgaatatcctagacagattttgtcatatcactatattctcatatgtgccttttgaaattgtgctcttaaaaatgacaccatttatgagactcataaagaatgtgagttctctggagttttaggtgattctagtgaaatattgaaaagcatgccayattaaatatactagcactagaactttcctcgaggcagttagataagaggtttaagaagtatttaaacatcaaatcagctagccttctaagtacctcttaaatatagaaaaaggaatacatggagatttagtatttaactaacttgcattcacatgattgtgtttctacttcaaatagcttttaagatattttccctaactttttcataaagcttcatcatttaataaaattaagcaatggataacatttatgaaactagtcttttccccttccatgtattatcccttcttttgctcttatgttaagcttattaatgccataagaagtggaacaatgggagatattatagaaatctttcaaaccagaaagctacttaaacactattatttattgaaatgatactgtgtcaagtggtgtcagcacttttgaggtcagaagcagaggtaatagacaaataacctcatcttaatcataaggtattttggatacatatcttagcatctagcatttccttatcctttctaattctttagcttaattttctagtgttccaataaatcctgtgaggtacccagtccccttctaataaatgttttctataattaagtagagtttctatttagaaacaagaaacctgattagtcaggatattttattataaatgaggttcagagaaataggtaaaattagaaaatgaatccttgatccaattggggctgaaggcaaatgcaaaccagctaagaatcaaaatctggaatattgcacacttggtatgcaatagcatgatgactaactatattatttcttagagtcacctgtgtaaattctccactgaaggcaaagctttgagaatccatcaagaattacttatctgtggatgaggtggttgaataaccataaataaaagaaa

SEQ ID NO: 718358 - DNA, 1892 bp, Homo sapiens
gttatgtcttgatcacgaggggaagatgaaaacttagtgaagttaaagtttaaaggtacatcttctgaattctacaaaaaaatgcagtttctacttcaccatcatgattttctgtgcacttttgcaaaggtacacatgtatgtatccccctaacatatctacacaccacttacaccctaagccttacaaagaacgttcatgtacattcatttaatcagttgactgactaagatgcaatcgggtcttctggctttaagggggctttatttttaaaacaaaatccaaaaaaaaaaaaaaggagtgcctgctatgttctgcacttcttccttcattctatacatcattacttagaagagtaaaaatggctgaatctgccattaagcaatgagtggtgatggaccaacagtattgttaggctaacaacatttctttgctttgtgataacaagatgatttgtccaagagttgtgtgtataagtttaagagtagctaattatcactgaattttcagggaatttatgtcactgaatatttaataatttctaagaaaaaaaaaagcagcatacaacttgaaatatacttatttgatatttgatagtctttatagggtactattttttcaaaccaaagtggggaagaaaagcttttgatttctaatttgattttgaagtggtaatgcctcagccagtaaaagtgtcagcttcatggtgtgtaatgcagtgatgaacatgaaatgtaatagtgaaaagatgtttcttgggctcttcattataaatattgtataaatgttgacctctacccagccccttggagatttacgtgtctgtttgaatatcctagacagattttgtcatatcactatattctcatatgtgccttttgaaattgtgctcttaaaaatgacaccatttatgagactcataaagaatgtgagttctctggagttttaggtgattctagtgaaatattgaaaagcatgccacattaaatatactagcactagaactttcctcgaggcagttagataagaggtttaagaagtatttaaacatcaaatcagctagccttctaagtacctcytaaatatagaaaaaggaatacatggagatttagtatttaactaacttgcattcacatgattgtgtttctacttcaaatagcttttaagatattttccctaactttttcataaagcttcatcatttaataaaattaagcaatggataacatttatgaaactagtcttttccccttccatgtattatcccttcttttgctcttatgttaagcttattaatgccataagaagtggaacaatgggagatattatagaaatctttcaaaccagaaagctacttaaacactattatttattgaaatgatactgtgtcaagtggtgtcagcacttttgaggtcagaagcagaggtaatagacaaataacctcatcttaatcataaggtattttggatacatatcttagcatctagcatttccttatcctttctaattctttagcttaattttctagtgttccaataaatcctgtgaggtacccagtccccttctaataaatgttttctataattaagtagagtttctatttagaaacaagaaacctgattagtcaggatattttattataaatgaggttcagagaaataggtaaaattagaaaatgaatccttgatccaattggggctgaaggcaaatgcaaaccagctaagaatcaaaatctggaatattgcacacttggtatgcaatagcatgatgactaactatattatttcttagagtcacctgtgtaaattctccactgaaggcaaagctttgagaatccatcaagaattacttatctgtggatgaggtggttgaataaccataaataaaagaaa

SEQ ID NO: 718359 - DNA, 2280 bp, Homo sapiens
  misc_feature 1171, 1173, 1179, 1181, 1183, 1187, 1212, 1213, 1214, 1215,1216, 1217, 1218, 1219, 1220, 1221, 1222, 1223, 1224, 1225,1226, 1227, 1228, 1229, 1230, 1231, 1232, 1233, 1234, 1235,1236, 1237, 1238, 1239, 1240, 1241, 1242, 1243, 1244: n = A,T,C or G
  misc_feature 1245, 1246, 1247, 1248, 1249, 1250, 1251, 1252, 1253, 1254,1255, 1256, 1257, 1258, 1259, 1260, 1261, 1262, 1263, 1264,1265, 1266, 1267, 1268, 1269, 1270, 1271, 1272, 1273, 1274,1275, 1276, 1277, 1278, 1279, 1280, 1281, 1282, 1283: n = A,T,C or G
  misc_feature 1284, 1285, 1286, 1287, 1288, 1289, 1290, 1291, 1292, 1293,1294, 1295, 1296, 1297, 1298, 1299, 1300, 1301, 1302, 1303,1304, 1305, 1306, 1307, 1308, 1309, 1310, 1311: n = A,T,C or G
acttttcacatgtgcaaaaaatattgcctttcctaatctgtttgatccggaaaagtcataaccaagcacatcagatagtacctgttgattttgcatagagaaggtataagtaaagcaacatttcatagggtcacttataatcttctaaaatgatacattcattatatcgaaaagggtacattcagccttgtagttctcattttaaaaaatagatattttatttactacattatcacattagttaagaggtgaagtacttgaataacgtgctatcagaggaaacatttttgatgactatcactgttttgacattgcaataagaactgttatataaaactaaggcacaggctcatcctgaatgcttggagctaattcatcatcaacggtaaacactcaaaaaacaaataaatacaactaaaagggcaagaccaagtcttctgataaattttaccagtaacttcagagataaaagaattcatcagtaacttttgacattataagtaaggggcactgagtttccaaaaacaagcggatatagtttcactgtgtctcatccaaatttcattttaaattgccacgtgttgtccgagggacccagtgggaggtaattgaatcatgggggcaggtctttcccatgctgttctcgtgatagtgaataagttttttgagatgtgttagttttttttttttttttttttttttttttttgaaacattgtctcgctgttgcccaggctggagtgcagtggcgcgatctcggctcactgcaggctccgccccccggggttcacgccattctcctgcctcaacttcccgagtagctgggactacaggcgcccaccaccttgcccgggtagttttttgtatttttagtaaaaacggggtttcaccgggttagccaggatgggctcgatctcctgacctcgtgatccccccccctcggcctgatgtgttggttttataagggggagtttttttgcacaagctgtttttttttgcctgccgccatccgcgtagtaaacgggacttgatcctccttgccttccgccatgattttaaggcctccccagccacatggaacagtaagtccattaaacctctttcttttgtaaaatgcccagtctcgggtatgtctttatcagtggcatggaaatggactaatacaccccccncncctccncncncaantcaccaacaaaacaaaacaaacaannnnnnnnnnnnnnnnnnnnnnnnnnnnnnnnnnnnnnnnnnnnnnnnnnnnnnnnnnnnnnnnnnnnnnnnnnnnnnnnnnnnnnnnnnnnnnnnnnnnaattagatagaattaagaactcaatacacaaagctagaaggtttcaacgttcttctccaaataattgataggacaaaatagaaaatttaagaatggaggatattagaaaaagctatcaattaaataaacctaattatcatgcctagaagactaaaaccaaactgcagtgtacacatattttctttagcacacataaagcattcaccaaaaatatgaaaatatcttattaaatttcaaagtatggtcatttttatttaagatatgtgtggaaagtaattggcaaaaatataattagaaaactcccctatatttggaaataaagcaacmcatttcaaaatagcacaataattaacgtagaggacattaaaaaataggaaatatttcaaactgaataataatgaaatatggcatacaaaaacttctgagatgcagtttaaaccatacagcaatgtttacacctttacaaattatatttaaaaagaagaaatatgtaaaatgaataatctaaattttcacctttaagaataaagaaaaatgttgagtatattaatcccaatgtatgtagaagaaagtgcataagaacaatagcacaaacaattaagaaaaatgatcaacctataggtaaactagtccaagaaaagaagagagaaaaaacaaattacaaatatcataaatgaaatcactgaaaaacttctataaaagcttaataaagagtagcaacttcatgctagtgactcagacaacctggctgataagtcacttgtttagcaaaaacataactcaaaatgggtcaagaagaaactgaaaatcaaaataatgaactgtatatttagaaaaaaagtaatttgtaacctgaaactttctcacaagtaaaacccaatgcccacatgacttaaatgataaattgtagtgcacatttatgaaaaggaaaaaaatatatatatatactctttctggaaaaaaagaaaa

SEQ ID NO: 718360 - DNA, 2280 bp, Homo sapiens
  misc_feature 1171, 1173, 1179, 1181, 1183, 1187, 1212, 1213, 1214, 1215,1216, 1217, 1218, 1219, 1220, 1221, 1222, 1223, 1224, 1225,1226, 1227, 1228, 1229, 1230, 1231, 1232, 1233, 1234, 1235,1236, 1237, 1238, 1239, 1240, 1241, 1242, 1243, 1244: n = A,T,C or G
  misc_feature 1245, 1246, 1247, 1248, 1249, 1250, 1251, 1252, 1253, 1254,1255, 1256, 1257, 1258, 1259, 1260, 1261, 1262, 1263, 1264,1265, 1266, 1267, 1268, 1269, 1270, 1271, 1272, 1273, 1274,1275, 1276, 1277, 1278, 1279, 1280, 1281, 1282, 1283: n = A,T,C or G
  misc_feature 1284, 1285, 1286, 1287, 1288, 1289, 1290, 1291, 1292, 1293,1294, 1295, 1296, 1297, 1298, 1299, 1300, 1301, 1302, 1303,1304, 1305, 1306, 1307, 1308, 1309, 1310, 1311: n = A,T,C or G
acttttcacatgtgcaaaaaatattgcctttcctaatctgtttgatccggaaaagtcataaccaagcacatcagatagtacctgttgattttgcatagagaaggtataagtaaagcaacatttcatagggtcacttataatcttctaaaatgatacattcattatatcgaaaagggtacattcagccttgtagttctcattttaaaaaatagatattttatttactacattatcacattagttaagaggtgaagtacttgaataacgtgctatcagaggaaacatttttgatgactatcactgttttgacattgcaataagaactgttatataaaactaaggcacaggctcatcctgaatgcttggagctaattcatcatcaacggtaaacactcaaaaaacaaataaatacaactaaaagggcaagaccaagtcttctgataaattttaccagtaacttcagagataaaagaattcatcagtaacttttgacattataagtaaggggcactgagtttccaaaaacaagcggatatagtttcactgtgtctcatccaaatttcattttaaattgccacgtgttgtccgagggacccagtgggaggtaattgaatcatgggggcaggtctttcccatgctgttctcgtgatagtgaataagttttttgagatgtgttagttttttttttttttttttttttttttttttgaaacattgtctcgctgttgcccaggctggagtgcagtggcgcgatctcggctcactgcaggctccgccccccggggttcacgccattctcctgcctcaacttcccgagtagctgggactacaggcgcccaccaccttgcccgggtagttttttgtatttttagtaaaaacggggtttcaccgggttagccaggatgggctcgatctcctgacctcgtgatccccccccctcggcctgatgtgttggttttataagggggagtttttttgcacaagctgtttttttttgcctgccgccatccgcgtagtaaacgggacttgatcctccttgccttccgccatgattttaaggcctccccagccacatggaacagtaagtccattaaacctctttcttttgtaaaatgcccagtctcgggtatgtctttatcagtggcatggaaatggactaatacaccccccncncctccncncncaantcaccaacaaaacaaaacaaacaannnnnnnnnnnnnnnnnnnnnnnnnnnnnnnnnnnnnnnnnnnnnnnnnnnnnnnnnnnnnnnnnnnnnnnnnnnnnnnnnnnnnnnnnnnnnnnnnnnnaattagatagaattaagaactcaatacacaaagctagaaggtttcaacgttcttctccaaataattgataggacaaaatagaaaatttaagaatggaggatattagaaaaagctatcaattaaataaacctaattatcatgcctagaagactaaaaccaaactgcagtgtacacatattttctttagcacacataaagcattcaccaaaaatatgaaaatatcttattaaatttcaaagtatggtcatttttatttaagatatgtgtggaaagtaattggcaaaaatataattagaaaactcccctatatttggaaataaagcaacccatttcaaaatagcacaataattaacgtagaggacattaaaaaataggaaatatttcaaactgaataataatgaaatatggcatacaaaaacttctgagatgcagtttaaaccatacagcaatgtttacacctttacaaattatatttaaaaagaagaaatatgtaaaatgaataatctaaattttcacctttaagaataaagaaaaatgttgagtatattaatcccaatgtatgtagaagaaagtrcataagaacaatagcacaaacaattaagaaaaatgatcaacctataggtaaactagtccaagaaaagaagagagaaaaaacaaattacaaatatcataaatgaaatcactgaaaaacttctataaaagcttaataaagagtagcaacttcatgctagtgactcagacaacctggctgataagtcacttgtttagcaaaaacataactcaaaatgggtcaagaagaaactgaaaatcaaaataatgaactgtatatttagaaaaaaagtaatttgtaacctgaaactttctcacaagtaaaacccaatgcccacatgacttaaatgataaattgtagtgcacatttatgaaaaggaaaaaaatatatatatatactctttctggaaaaaaagaaaa

SEQ ID NO: 718361 - DNA, 1174 bp, Homo sapiens
  misc_feature 552, 553, 554, 555, 556, 557, 558, 559, 560, 561, 562, 563,564, 565, 566, 567, 568, 569, 570, 571, 572, 573, 574, 575,576, 577, 578, 579, 580, 581, 582, 583, 584, 585, 586, 587,588, 589, 590, 591, 592, 593, 594, 595, 596, 597, 598: n = A,T,C or G
  misc_feature 599, 600, 601, 602, 603, 604, 605, 606, 607, 608, 609, 610,611, 612, 613, 614, 615, 616, 617, 618, 619, 620, 621, 622,623, 624, 625, 626, 627, 628, 629, 630, 631, 632, 633, 634,635, 636, 637, 638, 639, 640, 641, 642, 643, 644, 645: n = A,T,C or G
  misc_feature 646, 647, 648, 649, 650, 651: n = A,T,C or G
gattgcatgagctcagaagttcgagaccagcctgggcaacatagtgaaatcctgcctctaaaaaaaaaaaaaaaaaattcactggacatgatagcatgtgcctgtagtcccaactacacagcaggctgaggtgggagaatcgcttgagcctgcagggtggaggttgcagtgagctgagatcacactgctgcactccagcctaggtaacagagccagttcctgtctcaaaaaaaaaaaaaaaaaaaaaattcatagcaaaagtggtatggaatgagggcaatatctttgtaagacattgtgtgggtgcatttrtttgtgtatgggtagtctgtatgcattaaataggaagcatttataaatggggatttaattaatgaccatagtaactagaagttcctcatataatttgaacttaaaatatttttttgtgtgactttgaatattgattctatttgatgttattttgcatattggttttaatttgaaaaggagatcttttatttgtgaatttagctgttttacatagcaattatataatctagtggggagtgnnnnnnnnnnnnnnnnnnnnnnnnnnnnnnnnnnnnnnnnnnnnnnnnnnnnnnnnnnnnnnnnnnnnnnnnnnnnnnnnnnnnnnnnnnnnnnnnnnnncaatttaatttctggaagaaattaccaactttgaaaataagaagataggcagtaaaaatgttaccttaaaaaaataagaaaacattgaaaataaattataaagacatgaaatcaaaactaatttgtgaaggaggggaaacagttttatattttgtcctgagttttaagatcaggcagtcctaatgtacaaatcacaagtcctgacatgatcagtaaagcaatgcatgttaaaaaaaaaaaaaaaaaaaagatctttcttttccccctacacatttctgggacaactcttgatttaatgtatcacagcaaaacacatcagattatgaatatactctttgtatagtgtgtgaatctaatttggcaatctgaaactgttccagctcatgattttattttaaatatatatttaaaatatcattgcattagctcattgacttttttctgtgtttcagatatatgggtctttgaaactgtccttgctagtgttactggggtggaggggtccttgctcccagagctccca

SEQ ID NO: 718362 - DNA, 1174 bp, Homo sapiens
  misc_feature 552, 553, 554, 555, 556, 557, 558, 559, 560, 561, 562, 563,564, 565, 566, 567, 568, 569, 570, 571, 572, 573, 574, 575,576, 577, 578, 579, 580, 581, 582, 583, 584, 585, 586, 587,588, 589, 590, 591, 592, 593, 594, 595, 596, 597, 598: n = A,T,C or G
  misc_feature 599, 600, 601, 602, 603, 604, 605, 606, 607, 608, 609, 610,611, 612, 613, 614, 615, 616, 617, 618, 619, 620, 621, 622,623, 624, 625, 626, 627, 628, 629, 630, 631, 632, 633, 634,635, 636, 637, 638, 639, 640, 641, 642, 643, 644, 645: n = A,T,C or G
  misc_feature 646, 647, 648, 649, 650, 651: n = A,T,C or G
gattgcatgagctcagaagttcgagaccagcctgggcaacatagtgaaatcctgcctctaaaaaaaaaaaaaaaaaattcactggacatgatagcatgtgcctgtagtcccaactacacagcaggctgaggtgggagaatcgcttgagcctgcagggtggaggttgcagtgagctgagatcacactgctgcactccagcctaggtaacagagccagttcctgtctcaaaaaaaaaaaaaaaaaaaaaattcatagcaaaagtggtatggaatgagggcaatatctttgtaagacattgtgtgggtgcatttatttgtgtatgggtagtctgtatgcattaaataggaagcatttataaatggggatttaattaatgaccatagtaactagaagttcctcatataatttgaacttaaaatatttttttgtgtgactttgaatattgattctatttgatgttattttgcatattggttttaatttgaaaaggagatcttttatttgtgaatttagctgttttacatagcaattatataatctagtggggagtgnnnnnnnnnnnnnnnnnnnnnnnnnnnnnnnnnnnnnnnnnnnnnnnnnnnnnnnnnnnnnnnnnnnnnnnnnnnnnnnnnnnnnnnnnnnnnnnnnnnncaatttaatttctggaagaaattaccaactttgaaaataagaagataggcagtaaaaatgttaccttaaaaaaataagaaaacattgaaaataaattataaagacatgaaatcaaaactaatttgtgaaggaggggaaacagttttatattttgtcctgagttttaagatcaggcagtcctaatgtacaaatcrcaagtcctgacatgatcagtaaagcaatgcatgttaaaaaaaaaaaaaaaaaaaagatctttcttttccccctacacatttctgggacaactcttgatttaatgtatcacagcaaaacacatcagattatgaatatactctttgtatagtgtgtgaatctaatttggcaatctgaaactgttccagctcatgattttattttaaatatatatttaaaatatcattgcattagctcattgacttttttctgtgtttcagatatatgggtctttgaaactgtccttgctagtgttactggggtggaggggtccttgctcccagagctccca

SEQ ID NO: 718363 - DNA, 2070 bp, Homo sapiens
attaatctgacaatatacaggagggcaaagaggttttcaaaattatttcagaaaatgtggtccaaatgtttgtaaaataggttaagatctttccatttccctaatttactagagattaaactcaggcccatagatattgaatctgtttttcagtatcagagaaaaacactcgacaagttttttttttattggctataattaaatatatttcacatcatatgcttatgcaactgcatttaaaatgattagaatatgttcaaattattttgttcatgtttttccccctccccaacacttcgtatattgaagccctaacccctaatgtgactatatctggagattgtgtttttaggaggtaattaagtgaggtcaaggagagaatggagtcctaagtccataggactatgccttgtagaaggggaagattgattctctcttctcttctcctctttttctttcttttcatggtgagaaggtgactgtctgcaagagccaggaagagagctctcctggaactcagtctttgactatacagcctccagatttgcgaaaagcaaattttggttgtttataagttatctagtctcaggtattttgttacagaacaggaataaactaaaacagtctccatgtgacaaattatattagggttcttcagagaaacgaaaaataggatatagatttggatatagatttagatatatgaggacatttattctgggaatggctcatgtcattatgaaagccgaaaaaaaaaaaaatcccacaaaatgccatctgcaagctgaagcacctgaaagtctaagaaacaggggagccaatgatataacttccagtccaaggccaaagagagagatagaggtgctcatgctgtcctgaagtacaaaggcccttgaaaggagctccagtgtctgagaggaagagaagatgaaagtcccagcttaagaagagagacagcaaactcgctctttttttgcctatgataatggccacccacataggtgaagaccgatattctgattctcctttattcagttactaattcaaaagctactctcttttagaaaccaccacaggcctacccagaaatagtgctttatcacctatccaggcatcccttaacccagtcatttgacacaaaattaaccactacacaaatactattaatgtgagtacaacttgaggaaatagcagctatttaaatgctacttaataaaaatcaaggcagagtttagataaaattatttgttaaaatgctaacatttatccactaagataaactttaatactgtatccattttatgtcactttctgccaccctatatgaatttaaccatagtatatattagcatcatcaacaaattaaatatttctaaataatacacttcagttacgtgtttcagacacatgtaaatatcagggaggaaaaaattatataacatatgaaagaattttaaacattattcaagtgttacttgaagacatttggaaaacattctgaaagcagtcattaagtttatgtatcttcatataattcattaaaagtataattattctattaaaaaacttgtaaaatatatttttttaacatgtaattgccttaaaatatcaaacacaaactgagtctatgtctaaacatatctcttaaaatatggcatgagtctagcctagaaaaactctgcacaaagtctgatggtggtgaagccaaggtcagattttaattgttgcatgtaatgtagttcygtgttcagaaatgttactcagagagttttatgtaataatcataaaggtatccaggtgacaatataagatcaataagttcattttcttcatattaaggaaacaattcaaaggatgtgctaatgatgaagaattaactaagctcttaaattaattatcctcaaatataattctcagtttaaagttatagtgcctgtcacttggaagtcattaagacatagtaattggtataatattttgaaaaaaaactgaaatgagaaacactcatttttttaaattcatgatattgtttggctgttcagccactaaatcaatgagacttagtacatc

SEQ ID NO: 718364 - DNA, 664 bp, Homo sapiens
aataacctcttggcagtgttgaggaatcaactggaaatcaaagagaaaagaatcttaccactaaaatatactgaaagatgcagtctgggactggagatcaagttataaatgagtatgtatgaataaacaaagtgatcagaggttttaatagggaagattcygtgaactgaagacttgaaagctgagtttcttagcctagactctatggacccccaagatgcctgtggagggaacttagatggtcaaagaatttgcatgagaaataagttacaccctaatttccactatctctaactggaacttataatttccttcaattatgagtattggcaacagcaatagtaataatagcagtacccatgacgaatagaagtcatggatatttccatatgacactgaagttgctgcagatctcaaaatgtcctttatactcatccatattttgaaattacagtacttattttataaggtttggctgtgtgaccccacccaaatctcaacttgatttgtaatagtccccatatgtcaagggtagggccaggtggagatacttgaatcatgaggtggtttcccccacactgttctcgtggtagtgaataagtttcatgagatctgatggttttataaaggagagttcccctgaaattactggcttgcctcccac

SEQ ID NO: 718365 - DNA, 1611 bp, Homo sapiens
tgaagtaagaattagatgagatgctaagaggaagagtgaaaggggggccatcaggatcaggcaaggctgagagcctttgacagagcccaactctgcctctctttgcagtggaaatcctggcaggcagtgggaaaggtgatgatttcgggaaagggggttaactatatggcgtttgagtctctaaggcagaaagggcttaaggtctgctttctacccataatggtgagaggactcagcagtactatggaggcttcaggaaagggcaaatgttcctagaccaagagggcttgagatgactacaagtctttctttgtttcagcaagatttagagtaaataaaggaaaactatctatggctaccagagtgaagggaggaagaaatccccagttgaytcccaagatctgaaggtagatttcccagagcagggactatgaagacatggtagacagaagcaaatctcagattatcagcagtgttggtaggagctgatgctgagcctgtcacagtgtgtattctgtgctgaggtaatccagagggagagtagttgagggcagagagacaagctgccactctggaggccaagtaggacacttcagcctgaaatcagatagttatccctaacaacttggtgtaactttcagctcgatgtgatttggtcactactaatccctccaaccccatccgctactactctaagcctactatagccacactacttttttgttcttcctcaagcatgagaaggtcatttctactggggtctttgcaggttgtttctgttgctgaaaatgctcttccctcagattttcacagctatatactctcacttcattcaactctctgcttaaaaattttcttcttagagatttttcccaaaacattctttctaaaatagtctcctttaccatcctctctatccctttaccctgttttattttcttcatagtgttgattattttctaaaattctattttgtatttatgtacccgttttgtgtgtgtgtgcgtgtgtgtgtgtgtgtgtgtgtgtgtgtatcttctatctagaatgcaagtctgtgagggcaaagcattgtgggtctccttcacatgtatacctttagtgtctgacatataacaactttcaattaatactaattgactgaataaaggaatgaataaatgaattccccctgcacagaaatacctgctagaagaaaaaaataagaatgagtagaaatcttaaaaggtgaaatacttaccaaaatagttaagtggctaatcagaaatgagcacattgcttttaatgagtaagattaatagtctccccacactccagtacacaaaaacacctctgccttccctctacagatgagtacttgagccttatatgcaaatcgaattatagcaaaataaaatttattttctgcatatctgaagtatgactataaattttgagacattcacatttatattgtcagtaccaatatattattaatttgcacaaagatatgtttctaccagtatcttagaaaattatagtttacagatatttttggaaatttttgctagtgatgaagaaaacatttttggtatgttagctagatcatagttatatgcccatatcacataa

SEQ ID NO: 718366 - DNA, 1611 bp, Homo sapiens
tgaagtaagaattagatgagatgctaagaggaagagtgaaaggggggccatcaggatcaggcaaggctgagagcctttgacagagcccaactctgcctctctttgcagtggaaatcctggcaggcagtgggaaaggtgatgatttcgggaaagggggttaactatatggcgtttgagtctctaaggcagaaagggcttaaggtctgctttctacccataatggtgagaggactcagcagtactatggaggcttcaggaaagggcaaatgttcctagaccaagagggcttgagatgactacaagtctttctttgtttcagcaagatttagagtaaataaaggaaaactatctatggctaccagagtgaagggaggaagaaatccccagttgattcccaagatctgaaggtagatttcccagagcagggactatgaagacatggtagacagaagcaaatctcagattatcagcagtgttggtaggagctgatgctgagcctgtcacagtgtgtattctgtgctgaggtaatccagagggagagtagttgagggcagagagacaagctgccactctggaggccaagtaggacacttcagcctgaaatcagatagttatccctaacaacttggtgtaactttcagctcgatgtgatttggtcactactaatccctccaaccccatccgctactactctaagcctactatagccacactacttttttgttcttcctcaagcatgagaaggtcatttctactggggtctttgcaggttgtttctgttgctgaaaatgctcttccctcagattttcacagctatatactctcacttcattcaactctctgcttaaaaattttcttcttagagatttttcccaaaacattctttctaaaatagtctcctttaccatcctctctatccctttaccctgttttattttcttcatagtgttgrttattttctaaaattctattttgtatttatgtacccgttttgtgtgtgtgtgcgtgtgtgtgtgtgtgtgtgtgtgtgtgtatcttctatctagaatgcaagtctgtgagggcaaagcattgtgggtctccttcacatgtatacctttagtgtctgacatataacaactttcaattaatactaattgactgaataaaggaatgaataaatgaattccccctgcacagaaatacctgctagaagaaaaaaataagaatgagtagaaatcttaaaaggtgaaatacttaccaaaatagttaagtggctaatcagaaatgagcacattgcttttaatgagtaagattaatagtctccccacactccagtacacaaaaacacctctgccttccctctacagatgagtacttgagccttatatgcaaatcgaattatagcaaaataaaatttattttctgcatatctgaagtatgactataaattttgagacattcacatttatattgtcagtaccaatatattattaatttgcacaaagatatgtttctaccagtatcttagaaaattatagtttacagatatttttggaaatttttgctagtgatgaagaaaacatttttggtatgttagctagatcatagttatatgcccatatcacataa

SEQ ID NO: 718367 - DNA, 1611 bp, Homo sapiens
tgaagtaagaattagatgagatgctaagaggaagagtgaaaggggggccatcaggatcaggcaaggctgagagcctttgacagagcccaactctgcctctctttgcagtggaaatcctggcaggcagtgggaaaggtgatgatttcgggaaagggggttaactatatggcgtttgagtctctaaggcagaaagggcttaaggtctgctttctacccataatggtgagaggactcagcagtactatggaggcttcaggaaagggcaaatgttcctagaccaagagggcttgagatgactacaagtctttctttgtttcagcaagatttagagtaaataaaggaaaactatctatggctaccagagtgaagggaggaagaaatccccagttgattcccaagatctgaaggtagatttcccagagcagggactatgaagacatggtagacagaagcaaatctcagattatcagcagtgttggtaggagctgatgctgagcctgtcacagtgtgtattctgtgctgaggtaatccagagggagagtagttgagggcagagagacaagctgccactctggaggccaagtaggacacttcagcctgaaatcagatagttatccctaacaacttggtgtaactttcagctcgatgtgatttggtcactactaatccctccaaccccatccgctactactctaagcctactatagccacactacttttttgttcttcctcaagcatgagaaggtcatttctactggggtctttgcaggttgtttctgttgctgaaaatgctcttccctcagattttcacagctatatactctcacttcattcaactctctgcttaaaaattttcttcttagagatttttcccaaaacattctttctaaaatagtctcctttaccatcctctctatccctttaccctgttttattttcttcatagtgttgattattttctaaaattctattktgtatttatgtacccgttttgtgtgtgtgtgcgtgtgtgtgtgtgtgtgtgtgtgtgtgtatcttctatctagaatgcaagtctgtgagggcaaagcattgtgggtctccttcacatgtatacctttagtgtctgacatataacaactttcaattaatactaattgactgaataaaggaatgaataaatgaattccccctgcacagaaatacctgctagaagaaaaaaataagaatgagtagaaatcttaaaaggtgaaatacttaccaaaatagttaagtggctaatcagaaatgagcacattgcttttaatgagtaagattaatagtctccccacactccagtacacaaaaacacctctgccttccctctacagatgagtacttgagccttatatgcaaatcgaattatagcaaaataaaatttattttctgcatatctgaagtatgactataaattttgagacattcacatttatattgtcagtaccaatatattattaatttgcacaaagatatgtttctaccagtatcttagaaaattatagtttacagatatttttggaaatttttgctagtgatgaagaaaacatttttggtatgttagctagatcatagttatatgcccatatcacataa

SEQ ID NO: 718368 - DNA, 1611 bp, Homo sapiens
tgaagtaagaattagatgagatgctaagaggaagagtgaaaggggggccatcaggatcaggcaaggctgagagcctttgacagagcccaactctgcctctctttgcagtggaaatcctggcaggcagtgggaaaggtgatgatttcgggaaagggggttaactatatggcgtttgagtctctaaggcagaaagggcttaaggtctgctttctacccataatggtgagaggactcagcagtactatggaggcttcaggaaagggcaaatgttcctagaccaagagggcttgagatgactacaagtctttctttgtttcagcaagatttagagtaaataaaggaaaactatctatggctaccagagtgaagggaggaagaaatccccagttgattcccaagatctgaaggtagatttcccagagcagggactatgaagacatggtagacagaagcaaatctcagattatcagcagtgttggtaggagctgatgctgagcctgtcacagtgtgtattctgtgctgaggtaatccagagggagagtagttgagggcagagagacaagctgccactctggaggccaagtaggacacttcagcctgaaatcagatagttatccctaacaacttggtgtaactttcagctcgatgtgatttggtcactactaatccctccaaccccatccgctactactctaagcctactatagccacactacttttttgttcttcctcaagcatgagaaggtcatttctactggggtctttgcaggttgtttctgttgctgaaaatgctcttccctcagattttcacagctatatactctcacttcattcaactctctgcttaaaaattttcttcttagagatttttcccaaaacattctttctaaaatagtctcctttaccatcctctctatccctttaccctgttttattttcttcatagtgttgattattttctaaaattctattttgtatttatgtrcccgttttgtgtgtgtgtgcgtgtgtgtgtgtgtgtgtgtgtgtgtgtatcttctatctagaatgcaagtctgtgagggcaaagcattgtgggtctccttcacatgtatacctttagtgtctgacatataacaactttcaattaatactaattgactgaataaaggaatgaataaatgaattccccctgcacagaaatacctgctagaagaaaaaaataagaatgagtagaaatcttaaaaggtgaaatacttaccaaaatagttaagtggctaatcagaaatgagcacattgcttttaatgagtaagattaatagtctccccacactccagtacacaaaaacacctctgccttccctctacagatgagtacttgagccttatatgcaaatcgaattatagcaaaataaaatttattttctgcatatctgaagtatgactataaattttgagacattcacatttatattgtcagtaccaatatattattaatttgcacaaagatatgtttctaccagtatcttagaaaattatagtttacagatatttttggaaatttttgctagtgatgaagaaaacatttttggtatgttagctagatcatagttatatgcccatatcacataa

SEQ ID NO: 718369 - DNA, 1611 bp, Homo sapiens
tgaagtaagaattagatgagatgctaagaggaagagtgaaaggggggccatcaggatcaggcaaggctgagagcctttgacagagcccaactctgcctctctttgcagtggaaatcctggcaggcagtgggaaaggtgatgatttcgggaaagggggttaactatatggcgtttgagtctctaaggcagaaagggcttaaggtctgctttctacccataatggtgagaggactcagcagtactatggaggcttcaggaaagggcaaatgttcctagaccaagagggcttgagatgactacaagtctttctttgtttcagcaagatttagagtaaataaaggaaaactatctatggctaccagagtgaagggaggaagaaatccccagttgattcccaagatctgaaggtagatttcccagagcagggactatgaagacatggtagacagaagcaaatctcagattatcagcagtgttggtaggagctgatgctgagcctgtcacagtgtgtattctgtgctgaggtaatccagagggagagtagttgagggcagagagacaagctgccactctggaggccaagtaggacacttcagcctgaaatcagatagttatccctaacaacttggtgtaactttcagctcgatgtgatttggtcactactaatccctccaaccccatccgctactactctaagcctactatagccacactacttttttgttcttcctcaagcatgagaaggtcatttctactggggtctttgcaggttgtttctgttgctgaaaatgctcttccctcagattttcacagctatatactctcacttcattcaactctctgcttaaaaattttcttcttagagatttttcccaaaacattctttctaaaatagtctcctttaccatcctctctatccctttaccctgttttattttcttcatagtgttgattattttctaaaattctattttgtatttatgtacccgttttgtgtgtgtgtgcgtgtgtgtgtgtgtgtgtgtgtgtgtgtatcttctatctagaatgcaagtctgtgagggcaaagcattgtgggtctccttcacatgtatacctttagtgtctgacatataacaactttcaattaatactaattgactgaataaaggaatgaataaatgaattccccctgcacagaaatacctgctagaagaaaaaaataagaatgagtagaaatcttaaaaggtgaaatacttaccaaaatagttaagtggctaatcagaaatgagcacattgcttttaatgagtaagattaatagtctmcccacactccagtacacaaaaacacctctgccttccctctacagatgagtacttgagccttatatgcaaatcgaattatagcaaaataaaatttattttctgcatatctgaagtatgactataaattttgagacattcacatttatattgtcagtaccaatatattattaatttgcacaaagatatgtttctaccagtatcttagaaaattatagtttacagatatttttggaaatttttgctagtgatgaagaaaacatttttggtatgttagctagatcatagttatatgcccatatcacataa

SEQ ID NO: 718370 - DNA, 1084 bp, Homo sapiens
tgacaatttttatgtaattaataattcgcgttttccttcaatttgcttagcttccatgttctcactcgcactttaaaattctctttcaaatacatcaaatactggaaataacttttcaaattctcagaaaaattagcaatctcatttatcatggggtgctgtcacccacagcactttgttctttttgctccattctgcacatagggtcgtygaatggagtgttttttcagacatccctgtaccatcctctgacaattggttggctggattttctctttcttggtttataaacttattttactgaagcacatttttcactacttcctgagaaagaattccttgtttgtacaaatgcatctttattctgacctcacacttgattgaaagtttgatttggcatagaattctaggatgaaaaaatactttttctcattgtttggaaagcacagttctactaccttctagcttctgtgataacattgaaaataagactcacattcctttgtattttatattttttggtgttattgttttataaatgaatttttcttctatctctctaagaatgttaattacagggtttttttcttaaagttttctcctcttacctgcattgtctctgtgttctctgtgttccctgctcctgcttactgtgttttccatgttctgttgaagtcttacttatattgtctgtagatccttgacgttctatttatactccagaaagaaatggaagactttggggctacagatggaattattgactggtgaacttcccaatgtgatcaagcagcaagccttatttatgtgtggtaactcaagtatcagaaagaaaatgagacctttcaattatttctcagaaaaaaaatattccaataccctgattagaaagagataaaggcaggcagctgatacacgccttgactcagatattctcagaacacagtgatagaaactggtcaagggttttataatataatatgcatatgtcttttagatttagtggtttattgcattgtttagatatctgttttcttagttatcttatgtctggttgttctatccattgctgagaaggggatat

SEQ ID NO: 718371 - DNA, 648 bp, Homo sapiens
tactcccgggactttttccatggccaagttgtacttgcccttcagatgttaccttctgaggtaatattcttcccccacatgtccatttctcctctaaagaaatcttctcaaacaattacataatggaatcatctaagatgcttgttaattatccatattccagggactcacttctarttcaatgttgtaaagggatcacatgtgtttatcttttcttctcccacaaaacccaataaaagggaaatgtaataataaatggcattattacattattgccccacaaagaaaaaggacaatagagaagaaaaaggaagataaatttatttcaaccaagttttgaaagatgggaagcaaatagtggagcggtaactagcttagcacagtggaagaacttaaaattttagtgacagaagaaggggaaaatcaacataaatgaaccaatttgttttgaagaaccgcctgagaagctcagcactttgaacattaggctgagctgaaagtaaagagtatttgcaaagctatatacaaagcaatgaataacccagcctttccaccactccatttacacctgatagatgaccaaatctttctcttcactgtatatgcttcttctggataagatatttcctttgaaggaattgaaaacaa

SEQ ID NO: 718372 - DNA, 648 bp, Homo sapiens
tactcccgggactttttccatggccaagttgtacttgcccttcagatgttaccttctgaggtaatattcttcccccacatgtccatttctcctctaaagaaatcttctcaaacaattacataatggaatcatctaagatgcttgttaattatccatattccagggactcacttctaattcaatgttgtaaagggatcacatgtgtttatcttttcttctcccacaaaacccaataaaagggaaatgtaataataaatggcattattacattattgccccacaaagaaaaaggacaatagagaagaaaaaggaagataaatttatttcaaccaagttttgaaagatgggaagcaaatagtggagsggtaactagcttagcacagtggaagaacttaaaattttagtgacagaagaaggggaaaatcaacataaatgaaccaatttgttttgaagaaccgcctgagaagctcagcactttgaacattaggctgagctgaaagtaaagagtatttgcaaagctatatacaaagcaatgaataacccagcctttccaccactccatttacacctgatagatgaccaaatctttctcttcactgtatatgcttcttctggataagatatttcctttgaaggaattgaaaacaa

SEQ ID NO: 718373 - DNA, 1570 bp, Homo sapiens
gaataatcacaggaaagtaagcaacacataggttgggtacagtagaagtgagcaggggacaatgattacctggggccctcagacactttcagtcaatactgtggtaactctgaatcccctccttacccaaagcagttttgtaacatatagcacaaagttagcacagcatgtatatgtatgtgtatatatgtatatgtatatctgtatatgtatatatgtatgtatatatgtatatgtatatgcatatatgtatatgtatatatgtatatgtatatatgtatatgtatatatgtatacatgtatatgtgtgtatatatatatatatatgaccccatgtgtttttcctgaatcttcaagttatcttttgctgtgtaacaaactatccccattgttactgacaaatcatcaacttattatttctcatggttctatgagttgactaggctcagctggttggttccaagaggccaaatagaagcaaggatttttataatctagtcttgtaaacctgagaatttcacttctgccatattctatttgtcaaaaaaatattgaagtcagcccaaatacaagaggaagagaattagacttcatctttggcaaacacctctgctatgctgaataaaggaattggatgttagtcaggattcagatacactttggaagactacttcattttccttatgtctcaagcttctgatttggttcatattttaagagctgccaagattagatatatcttccttctcttaatcagaccttactcttattcatttaatttctatgagatagcattacataatacatcattgccaaatagttttggtcaacttatcttatttctctaagcctcagtttaaaaaagtctaaaaatatagactgtaaaagctgccttatctgctacattaggttggtgtaagattgccagtgaatcattcatttatgcaacaaacaacaatagtatgacagtaacacttaggatacttagcatgtacctaaaactattccactattctaaagaactatatgttaaatcttsataacagaacaagggccagctttttgtcggatagcatgctataatatgttctggggatataaatactaatagtgttaccctcaggaatttctagcataaaggagggattcgccattaatcaaataatcacacaaatatgaaattaaactttggatacaaaacatgtaatggggagaacaacatgttagttgaacaaagatatacaagtacctactttgtgccaggcatggggtgatttaaatccatagatgatagttcccactgtgggtgatgtgtaaatatcattacttatgtgagtggtttgggagttttggagtgacctgaataattgtaagcatctggctaagtaaaaagaagctgaaatacagatttgatgatgatgaagtttcttcaagtggttttgaagagtttgctcctcgtggttttaatttgaatggacagatgtaatggaagaactattgaaattgcttaaaaatagtaattcttagaaaattctgacttttttttctgacaaaacagcccactttctcc

SEQ ID NO: 718374 - DNA, 1154 bp, Homo sapiens
tgcttagctttttgactattttcattgcataaatatgtcataacttattcatccattctcttattaatggcactgagatatttccaaagttttgctgctaccgtcgttaccttttgtacacatcgacaaatctctctaaggtacatatacgtgtgtgtgtgtgtgtgtgtgtatatatatatgttcacacatacaccatgtatatatgtgtgtgtgtatgtccatgtatatatattttaaaccttwtgaaactgccatttttataggtcaaaaacgaaaactgtaaaagtcaagtatcagcaagctcggatggttcaaactagtacttagaagtggaattgatgggccacttcaagattactgggtttttccaaattaatctccaaaatgattttgccatttacatacacattttaaatttatttttattgtatttatttaaggtatacaacatgatcttttgatatacatagtgaaatgattactacagttgagcaggcttcaaagtgaccctcctatcctgcacacccccaaccccaacatcttgcactcctcccagactcgcacctggacaaccaaacccttggtgttcttccacctctgagagtattgtcgagtgtaaggggcaagtctacctgaatttggacctttctactttttggtaaggcctagactttgttcaagctcttctttccaatcctccctttatagaacagaggtgtctgtctctgcctacctgcaggagatttgggtttaagggaaagaaagagagagagaagaacgccttcttcacctctgcttcaggacaggaggtttgggtcacagtcacacaaagggctcaacagaaaacttccgctttctctgcctctgtctcacagcaggaaggctggattacagtgctggcagtaaagcaccacaggtttcactcttttcacctaaaattatatagcgtgctttagaaattgcagctgcttcctattgcttttaatttggacttgtcttttaattagtgaccaattcttgttagtttcaaacagaaagatgaatgagagtgagttctctcattctgaaattaagaggcatttgctccctctggcccattcagatgctgtaagtgactagagactatccagcaatgccaagacgtttgtcca

SEQ ID NO: 718375 - DNA, 1176 bp, Homo sapiens
tgaattcatacaaagagaaaccataaaacaatcgaagtatgcacattatttataagagctatgcacagtggtgtgctggtaaatatgaacaatttgctctcctggggtggaggacaatttcaagcaacaagggaaagccattaaatatggagttgcatatcattatatggtttttccacccaaaagacattaataacctcaagaacacaaataatggtaacatggagaaaaataatgggggacttgtaagttttgaattttattgccttttaaaaatataatttattaaattttaagtgtatagaatttaatttttattaatgtctatgtataacaactggcacttgaaaatttaactatcagctcttctgarctggtacaaacccctattgtgtgtgtctacttacatttgcttaaattaactgtttgtgaactgcacataatttattccattatgtgactcagtcttggcatggtggcaggtcatatgctccagtatggacaatgagctgaatcccagctctgagacatgttagctctgggaccttagacaagtgacaacatttccaaagctcattttctttattgttagagttgaagattagggctaaaaataatacttaacccataaaatttttatacattgaaagaattcatgtaaaaaacctgacatgatgctttacgtgacgtgaattcagtaatgttagtaccatcctccatttctcccaatctttttttgacttcacaatgtctagaggtaaaacaaacaaaccaaggaaccaaataacaatacccctttgggcctgattttttaaaaagtccttgaaccaagtaaccccacctagattgtgcctttgtgtgtttttgtatctttgttctccagtcaaaagcaagtaactagaattatctggaattggtgccacacagaagtaattaccatttacatgaagcagtgcttacatcgatgtgcagataagaaacaaccttccctggctcttctgaaagaactgggtcctgaatttgggtcaagtgagatgttacgtctgggttgtagatgtgtacaaaaaacaaacaaacaaacaaaaaaagccttgaaaatgctaatggcaaaagagaattcaggacccaaactgaaaacatcttttatacattcattcctgacttttactaatttca

SEQ ID NO: 718376 - DNA, 654 bp, Homo sapiens
tgttaatccacttcacccattgtacatgtttgtatcttgattgtagtctttcaggaaaagaaaattttttaactttgtaggagatggcgtatgtaaatccccaaaaaactgcctttgttcttcactgctggaacatgattccctccccagtttcctgtgataggaaaacaaaatgggatcaaacatgtggtgttttgtttttgttaatagtattaggtcatcagctcttccctgtttcacagattgatacttggaaaaggatgtaatgaattatctattcctaatgctttcttcaagaagcttctagaaacagagacttaagactcttagaaaaatggaagcagcaagaggaagttaacgtttatatgcatgggccataaaaaatgtatccttctttatttcaaattggcaacaaaacaaggagaataagaatttatatatatatgtaggtcacatactrttttatttaatttacacagaacatagcatatcacatgcatctctgcttaatattttaaacctctaattatttagaattgaaaccagaatgtaaatgtccaaaggattagttttctcccagctctcaccaatgattatctggaacaactgcaaaatctgtgtagatctcagcctaagatctatttatactacaca

SEQ ID NO: 718377 - DNA, 654 bp, Homo sapiens
tgttaatccacttcacccattgtacatgtttgtatcttgattgtagtctttcaggaaaagaaaattttttaactttgtaggagatggcgtatgtaaatccccaaaaaactgcctttgttcttcactgctggaacatgattccctccccagtttcctgtgataggaaaacaaaatgggatcaaacatgtggtgttttgtttttgttaatagtattaggtcatcagctcttccctgtttcacagattgatacttggaaaaggatgtaatgaattatctattcctaatgctttcttcaagaagcttctagaaacagagacttaagactcttagaaaaatggaagcagcaagaggaagttaacgtttatatgcatgggccataaaaaatgtatccttctttatttcaaattggcaacaaaacaaggagaataagaatttatatatatatgtaggtcacatactattttatttaatttacacagaacatagcatatcayatgcatctctgcttaatattttaaacctctaattatttagaattgaaaccagaatgtaaatgtccaaaggattagttttctcccagctctcaccaatgattatctggaacaactgcaaaatctgtgtagatctcagcctaagatctatttatactacaca

SEQ ID NO: 718378 - DNA, 654 bp, Homo sapiens
tgttaatccacttcacccattgtacatgtttgtatcttgattgtagtctttcaggaaaagaaaattttttaactttgtaggagatggcgtatgtaaatccccaaaaaactgcctttgttcttcactgctggaacatgattccctccccagtttcctgtgataggaaaacaaaatgggatcaaacatgtggtgttttgtttttgttaatagtattaggtcatcagctcttccctgtttcacagattgatacttggaaaaggatgtaatgaattatctattcctaatgctttcttcaagaagcttctagaaacagagacttaagactcttagaaaaatggaagcagcaagaggaagttaacgtttatatgcatgggccataaaaaatgtatccttctttatttcaaattggcaacaaaacaaggagaataagaatttatatatatatgtaggtcacatactattttatttaatttacacagaacatagcatatcacatgcatctctgcttaatattttaaacctctaattatttagaattgaaaccagaatgtaaatgtccaaargattagttttctcccagctctcaccaatgattatctggaacaactgcaaaatctgtgtagatctcagcctaagatctatttatactacaca

SEQ ID NO: 718379 - DNA, 3150 bp, Homo sapiens
gatggaggacattggcattccagcttacgagtcagactctgaggagcttgataagagtgagtcagcctccctgagtctgatcaacttgggaatgctgacgaccctgtgataattttagtagaaagacatattgcctgcccctggagacatccaaccccatcctcaccatccacaagtattcttatcattagagaaaaagaaacaaatcacttcaagcaagattgtcttttgtagtgcaaattctgtaagaaatttatcaggtaagattttgcatcggatattctggcctaagtagttgatgacacctggaaacacaggcagagggctggtggttttaatagtatcctttgataagaactgagggctgccattagagcctgaagaaaaatacttctaaataaggccaagataatgtgttccaagtggtaccatgttttcagtgatctggactaatgcataaatgaaactttgagtgcctagggaattgccttccaaaaatcctccagatggtcacttccccaggaagagagcctagaggcaacccaggattacattctctatgaagagtctggaatctataaggagaatttagtctagaggaagggcctgagatccttttcctgagtttgttggttgagggagcatcctacactttgggatttgggaaagcggaaacttactcaatttcatatccttgtttggaaatacagaatcctaaccaagaccctggcctcaaaggagaactgctcagcttctacagagagtgactaaacagataaactgatggaaaaataaaaatttttctcaaacagttgtatttattctcttgtagcaaataagcaaatggctgactcagcctctgaagatcaccactatgatgagttttacctgtgaggcttctaaagcagaagttgccatgagcatctgttcactgtgcctatggagacacagccaggaaacatattaaaggatattaatttagatgattaaatgtatttagttgaataaatattataattttatattgaaattacttttatatgattgtgttttatgcactgatttcatcaagcaatctcactacttactatgaacaagccgcattttattataatggcagtggacattataagttaatataaaattcttccaattctcttacagcctttgatgatgccctttgttcagcagaaatgtggttgctcctgagggagttaacaacatgataactaatttcttagaaaggtgaaagcaatttacaattattttattatatagttcggtatgtttattataactatgataaaatggtgacaaaaataaaatgtcaaatcacccataatcacaacacccaaagataatattttggtatgcaactttatcctccagtttacaaaaagtatattttgtaaaatatatcaagaaagagaaagagatttccaggagtaacgaagagcaacgcaacccccaaagctggctggctgatactgaccagctaagtgaactggcacacgttgttcaacttctctatgccttcattgtctcatctctaaaacacatgcatattgtctggtagaaatggtgtctatccccagatcccatttcaccagaccaagtattaagtaactgataaaaggaataaaatgctagtatctctctaatgcctattttcttcttatttatcctacctgtattatttcttacttccttccattcctccttctctcctggatttgtaaaatataaatcaattaactaaacttactttcttgacaataatcagccttaaaactttgtgtagcccaaaccctttttgaatttaattgtaagttttaactctcttttcaggaaaaaaaaaaaatagcatatgggataatacaagcaggtacctgaataatatttcaggcccttcatrgcccacactcaactccctaaagaagctagaacccctattccagctttcctcctttcctctgctctctagttggattttcttatctgacattactctcaataacacattagaacctttccttttcaggggccaagggagagctttccccttggtcctctcaagtttctatgaaaaatcaacttgcaaaaggtagattaattggggaaaaggtttacaaatttatttaatgtgcatacgcaggagccttcagaatagaaacccaaagatacagaagaaattgttcattttatgcttaggttaaatgaagtatggatgattgtgtagaaatatgattggacaagaagggtatgatctcatgctaatagatcgagtgaggaaagccagcaaggcctgtctgtctgtattcttcttggcccctttgagcatgtatttcttccttctaggtatgaggcaggaccatctctggaatgggggtcttatgacctacagtcaaacaaggtatatcagataaattatggccagtttttacacagaaagatgtcaggagggagttaaagtaatatttttaggtttttatggttggctttggggaaaagcggttctggcttctatgacttgcctcgcagaaaagagattctagtttctatgatagtcctccagggagagtgggactatgaaacaggagggcaggagaaggtcagagaaaatcttttgcttctgaggctgcttctgaagccttcatttgggttattgttttctgagtcccaacacccctcaatccactggtagaatagactttccatttgcttctgcagcttatagtcagcagttatagggctagtgggcagggatgagggtgtggtgtttgatatgggagagaaaggggaatatacatcacccagtttcttctcacaacctgctggacctgcagatgaccagtttagtcacctatgtacagtcagtgataaatgtgacaaaaatacttgtgactcccaaacatgtggggaaataaagggaaaaagatatagtctaaaagaccaagagaacagcctcaaaagtagcagaaggttctgcataatataggaaagtctttgtgggctctggctaccagatgcttgttattcaaagatttcattacggtgcaattcataggcatctaaaataccaggaaatatactaatagcatttgcagtccatcccaaaccaggaagatttcaaaagtgttccatgtgagc

SEQ ID NO: 718380 - DNA, 3150 bp, Homo sapiens
gatggaggacattggcattccagcttacgagtcagactctgaggagcttgataagagtgagtcagcctccctgagtctgatcaacttgggaatgctgacgaccctgtgataattttagtagaaagacatattgcctgcccctggagacatccaaccccatcctcaccatccacaagtattcttatcattagagaaaaagaaacaaatcacttcaagcaagattgtcttttgtagtgcaaattctgtaagaaatttatcaggtaagattttgcatcggatattctggcctaagtagttgatgacacctggaaacacaggcagagggctggtggttttaatagtatcctttgataagaactgagggctgccattagagcctgaagaaaaatacttctaaataaggccaagataatgtgttccaagtggtaccatgttttcagtgatctggactaatgcataaatgaaactttgagtgcctagggaattgccttccaaaaatcctccagatggtcacttccccaggaagagagcctagaggcaacccaggattacattctctatgaagagtctggaatctataaggagaatttagtctagaggaagggcctgagatccttttcctgagtttgttggttgagggagcatcctacactttgggatttgggaaagcggaaacttactcaatttcatatccttgtttggaaatacagaatcctaaccaagaccctggcctcaaaggagaactgctcagcttctacagagagtgactaaacagataaactgatggaaaaataaaaatttttctcaaacagttgtatttattctcttgtagcaaataagcaaatggctgactcagcctctgaagatcaccactatgatgagttttacctgtgaggcttctaaagcagaagttgccatgagcatctgttcactgtgcctatggagacacagccaggaaacatattaaaggatattaatttagatgattaaatgtatttagttgaataaatattataattttatattgaaattacttttatatgattgtgttttatgcactgatttcatcaagcaatctcactacttactatgaacaagccgcattttattataatggcagtggacattataagttaatataaaattcttccaattctcttacagcctttgatgatgccctttgttcagcagaaatgtggttgctcctgagggagttaacaacatgataactaatttcttagaaaggtgaaagcaatttacaattattttattatatagttcggtatgtttattataactatgataaaatggtgacaaaaataaaatgtcaaatcacccataatcacaacacccaaagataatattttggtatgcaactttatcctccagtttacaaaaagtatattttgtaaaatatatcaagaaagagaaagagatttccaggagtaacgaagagcaacgcaacccccaaagctggctggctgatactgaccagctaagtgaactggcacacgttgttcaacttctctatgccttcattgtctcatctctaaaacacatgcatattgtctggtagaaatggtgtctatccccagatcccatttcaccagaccaagtattaagtaactgataaaaggaataaaatgctagtatctctctaatgcctattttcttcttatttatcctacctgtattatttcttacttccttccattcctccttctctcctggatttgtaaaatataaatcaattaactaaacttactttcttgacaataatcagccttaaaactttgtgtagcccaaaccctttttgaatttaattgtaagttttaactctcttttcaggaaaaaaaaaaaatagcatatgggataatacaagcaggtacctgaataatatttcaggcccttcatggcccayactcaactccctaaagaagctagaacccctattccagctttcctcctttcctctgctctctagttggattttcttatctgacattactctcaataacacattagaacctttccttttcaggggccaagggagagctttccccttggtcctctcaagtttctatgaaaaatcaacttgcaaaaggtagattaattggggaaaaggtttacaaatttatttaatgtgcatacgcaggagccttcagaatagaaacccaaagatacagaagaaattgttcattttatgcttaggttaaatgaagtatggatgattgtgtagaaatatgattggacaagaagggtatgatctcatgctaatagatcgagtgaggaaagccagcaaggcctgtctgtctgtattcttcttggcccctttgagcatgtatttcttccttctaggtatgaggcaggaccatctctggaatgggggtcttatgacctacagtcaaacaaggtatatcagataaattatggccagtttttacacagaaagatgtcaggagggagttaaagtaatatttttaggtttttatggttggctttggggaaaagcggttctggcttctatgacttgcctcgcagaaaagagattctagtttctatgatagtcctccagggagagtgggactatgaaacaggagggcaggagaaggtcagagaaaatcttttgcttctgaggctgcttctgaagccttcatttgggttattgttttctgagtcccaacacccctcaatccactggtagaatagactttccatttgcttctgcagcttatagtcagcagttatagggctagtgggcagggatgagggtgtggtgtttgatatgggagagaaaggggaatatacatcacccagtttcttctcacaacctgctggacctgcagatgaccagtttagtcacctatgtacagtcagtgataaatgtgacaaaaatacttgtgactcccaaacatgtggggaaataaagggaaaaagatatagtctaaaagaccaagagaacagcctcaaaagtagcagaaggttctgcataatataggaaagtctttgtgggctctggctaccagatgcttgttattcaaagatttcattacggtgcaattcataggcatctaaaataccaggaaatatactaatagcatttgcagtccatcccaaaccaggaagatttcaaaagtgttccatgtgagc

SEQ ID NO: 718381 - DNA, 3150 bp, Homo sapiens
gatggaggacattggcattccagcttacgagtcagactctgaggagcttgataagagtgagtcagcctccctgagtctgatcaacttgggaatgctgacgaccctgtgataattttagtagaaagacatattgcctgcccctggagacatccaaccccatcctcaccatccacaagtattcttatcattagagaaaaagaaacaaatcacttcaagcaagattgtcttttgtagtgcaaattctgtaagaaatttatcaggtaagattttgcatcggatattctggcctaagtagttgatgacacctggaaacacaggcagagggctggtggttttaatagtatcctttgataagaactgagggctgccattagagcctgaagaaaaatacttctaaataaggccaagataatgtgttccaagtggtaccatgttttcagtgatctggactaatgcataaatgaaactttgagtgcctagggaattgccttccaaaaatcctccagatggtcacttccccaggaagagagcctagaggcaacccaggattacattctctatgaagagtctggaatctataaggagaatttagtctagaggaagggcctgagatccttttcctgagtttgttggttgagggagcatcctacactttgggatttgggaaagcggaaacttactcaatttcatatccttgtttggaaatacagaatcctaaccaagaccctggcctcaaaggagaactgctcagcttctacagagagtgactaaacagataaactgatggaaaaataaaaatttttctcaaacagttgtatttattctcttgtagcaaataagcaaatggctgactcagcctctgaagatcaccactatgatgagttttacctgtgaggcttctaaagcagaagttgccatgagcatctgttcactgtgcctatggagacacagccaggaaacatattaaaggatattaatttagatgattaaatgtatttagttgaataaatattataattttatattgaaattacttttatatgattgtgttttatgcactgatttcatcaagcaatctcactacttactatgaacaagccgcattttattataatggcagtggacattataagttaatataaaattcttccaattctcttacagcctttgatgatgccctttgttcagcagaaatgtggttgctcctgagggagttaacaacatgataactaatttcttagaaaggtgaaagcaatttacaattattttattatatagttcggtatgtttattataactatgataaaatggtgacaaaaataaaatgtcaaatcacccataatcacaacacccaaagataatattttggtatgcaactttatcctccagtttacaaaaagtatattttgtaaaatatatcaagaaagagaaagagatttccaggagtaacgaagagcaacgcaacccccaaagctggctggctgatactgaccagctaagtgaactggcacacgttgttcaacttctctatgccttcattgtctcatctctaaaacacatgcatattgtctggtagaaatggtgtctatccccagatcccatttcaccagaccaagtattaagtaactgataaaaggaataaaatgctagtatctctctaatgcctattttcttcttatttatcctacctgtattatttcttacttccttccattcctccttctctcctggatttgtaaaatataaatcaattaactaaacttactttcttgacaataatcagccttaaaactttgtgtagcccaaaccctttttgaatttaattgtaagttttaactctcttttcaggaaaaaaaaaaaatagcatatgggataatacaagcaggtacctgaataatatttcaggcccttcatggcccacactcaactccctaaagaagctagaacccctattccagctttcctcctttcctctgctctctagttggattttcttatctgacattactctcaataacacattagaacctttccttttcaggggccaagggagagctttccccttggtcctctcaagtttctatgaaaaatcaacttgcaaaaggtagattaattggggaaaaggtttacaaatttatttaatgtgcatacgcaggagccttcagaatagaaacccaaagatacagaagaaattgttcattttatgcttaggttaaatgaagtatggatgattgtgtagaaatatgattggacaagaagggtatgatctcatgctaatagatcgagtgaggaaagccagcaaggcctgtctgtctgtattcttcttggcccctttgagcatgtatttcttccttctaggtatgaggcaggaccatctctggaatgggggtcttatgacctacagtcaaacaaggtatatcagataaattatggccagtttttacacagaaagatgtcaggagggagttaaagtaatatttttaggtttttatggttggctttggggaaaagcggttctggcttctatgacttgcctcgcagaaaagagattctagtttctatgatagtcctccagggagagtgggactatgaaacaggagggcaggagaaggtcagagaaaatcttttgcttctgaggctgcttctgaagccttcatttgggttattgttttctgagtcccaacacccctcaatccactggtagaatagactttccatttgcttctgcagcttatagtcagcagttatagggctagtgggcagggatgrgggtgtggtgtttgatatgggagagaaaggggaatatacatcacccagtttcttctcacaacctgctggacctgcagatgaccagtttagtcacctatgtacagtcagtgataaatgtgacaaaaatacttgtgactcccaaacatgtggggaaataaagggaaaaagatatagtctaaaagaccaagagaacagcctcaaaagtagcagaaggttctgcataatataggaaagtctttgtgggctctggctaccagatgcttgttattcaaagatttcattacggtgcaattcataggcatctaaaataccaggaaatatactaatagcatttgcagtccatcccaaaccaggaagatttcaaaagtgttccatgtgagc

SEQ ID NO: 718382 - DNA, 3150 bp, Homo sapiens
gatggaggacattggcattccagcttacgagtcagactctgaggagcttgataagagtgagtcagcctccctgagtctgatcaacttgggaatgctgacgaccctgtgataattttagtagaaagacatattgcctgcccctggagacatccaaccccatcctcaccatccacaagtattcttatcattagagaaaaagaaacaaatcacttcaagcaagattgtcttttgtagtgcaaattctgtaagaaatttatcaggtaagattttgcatcggatattctggcctaagtagttgatgacacctggaaacacaggcagagggctggtggttttaatagtatcctttgataagaactgagggctgccattagagcctgaagaaaaatacttctaaataaggccaagataatgtgttccaagtggtaccatgttttcagtgatctggactaatgcataaatgaaactttgagtgcctagggaattgccttccaaaaatcctccagatggtcacttccccaggaagagagcctagaggcaacccaggattacattctctatgaagagtctggaatctataaggagaatttagtctagaggaagggcctgagatccttttcctgagtttgttggttgagggagcatcctacactttgggatttgggaaagcggaaacttactcaatttcatatccttgtttggaaatacagaatcctaaccaagaccctggcctcaaaggagaactgctcagcttctacagagagtgactaaacagataaactgatggaaaaataaaaatttttctcaaacagttgtatttattctcttgtagcaaataagcaaatggctgactcagcctctgaagatcaccactatgatgagttttacctgtgaggcttctaaagcagaagttgccatgagcatctgttcactgtgcctatggagacacagccaggaaacatattaaaggatattaatttagatgattaaatgtatttagttgaataaatattataattttatattgaaattacttttatatgattgtgttttatgcactgatttcatcaagcaatctcactacttactatgaacaagccgcattttattataatggcagtggacattataagttaatataaaattcttccaattctcttacagcctttgatgatgccctttgttcagcagaaatgtggttgctcctgagggagttaacaacatgataactaatttcttagaaaggtgaaagcaatttacaattattttattatatagttcggtatgtttattataactatgataaaatggtgacaaaaataaaatgtcaaatcacccataatcacaacacccaaagataatattttggtatgcaactttatcctccagtttacaaaaagtatattttgtaaaatatatcaagaaagagaaagagatttccaggagtaacgaagagcaacgcaacccccaaagctggctggctgatactgaccagctaagtgaactggcacacgttgttcaacttctctatgccttcattgtctcatctctaaaacacatgcatattgtctggtagaaatggtgtctatccccagatcccatttcaccagaccaagtattaagtaactgataaaaggaataaaatgctagtatctctctaatgcctattttcttcttatttatcctacctgtattatttcttacttccttccattcctccttctctcctggatttgtaaaatataaatcaattaactaaacttactttcttgacaataatcagccttaaaactttgtgtagcccaaaccctttttgaatttaattgtaagttttaactctcttttcaggaaaaaaaaaaaatagcatatgggataatacaagcaggtacctgaataatatttcaggcccttcatggcccacactcaactccctaaagaagctagaacccctattccagctttcctcctttcctctgctctctagttggattttcttatctgacattactctcaataacacattagaacctttccttttcaggggccaagggagagctttccccttggtcctctcaagtttctatgaaaaatcaacttgcaaaaggtagattaattggggaaaaggtttacaaatttatttaatgtgcatacgcaggagccttcagaatagaaacccaaagatacagaagaaattgttcattttatgcttaggttaaatgaagtatggatgattgtgtagaaatatgattggacaagaagggtatgatctcatgctaatagatcgagtgaggaaagccagcaaggcctgtctgtctgtattcttcttggcccctttgagcatgtatttcttccttctaggtatgaggcaggaccatctctggaatgggggtcttatgacctacagtcaaacaaggtatatcagataaattatggccagtttttacacagaaagatgtcaggagggagttaaagtaatatttttaggtttttatggttggctttggggaaaagcggttctggcttctatgacttgcctcgcagaaaagagattctagtttctatgatagtcctccagggagagtgggactatgaaacaggagggcaggagaaggtcagagaaaatcttttgcttctgaggctgcttctgaagccttcatttgggttattgttttctgagtcccaacacccctcaatccactggtagaatagactttccatttgcttctgcagcttatagtcagcagttatagggctagtgggcagggatgagggtgtggtgtttgatatgggagagaaaggggaatatacatcacccagtttcttctcacaacctgctggacctgcagatgaccagtttagtcacctatgtacagtcagtgataaatgtgacaaaaatacttgtgactcccaaacatgtggggaaataaagggaaaaagatatagtctaaaagaccaagagaacagcctcaaaagtagcagaaggttctgcataatataggaaagtctttgtgggctctggctaccagatgcttgttattcaaagatttcattacrgtgcaattcataggcatctaaaataccaggaaatatactaatagcatttgcagtccatcccaaaccaggaagatttcaaaagtgttccatgtgagc

SEQ ID NO: 718383 - DNA, 1334 bp, Homo sapiens
ggctctgargtatagatgctcacacacaaaaaccagagagaggtctctggagcttaaagccagctgtcaggcagcaaatgagaacctcactagtgaaaccaaaataaagtggattctgccagcaacgtgaatggcattgggagcagattcttgctagaactgttgattagagcttagccgatggacaccttgattccagcctagtgaaaccagaagcacagtaatgagatgatccagatttcaacctacaaaaccatgaaataagaaatacatgttttaaaaaaactaagttcgtaataatatgttatggcagcaaaggaaacaattgtagcaccctaccagctggctagtagccctagttgtggtcagcctagtagatcttttcttcccttgtccctctcccagtgtttatctatttcattacttcagagctgcatctgccacagttagaacattatatattttagtcacaaaattcaactcgccaagggtcctcagagaacaccctccctctttcctattttttaacgaagtgtctccatcacaaaatactactcttgagccaaactcactatgactaatttaaagattgtgtaaaattaattcatggactgatatttcctatatactcagttataaccaataatgaacaaatctagtcatttctttttcaacaacaacttgtattttactataaattaatgtattcttatgtttaaagtgcctgtggtatcataagcacttggcataatttattaggaagtggtgttaatgggggccacacagcagtgtgattgggacctcgaagtcctcctctgtatgactgtgctgcttcctggacatgcacacagcagcaatggataaggcagtcactttccaaaaaaccagagtgagtctgattttagcaaatattttgcttcttttttccttccctccaaagagctgttgagaaatatgttccttgattttgctgtagcttatccttctgtaatagttttctattgctatggagcaaattactacaaacttagcagctttccacaacacacatttatgatctcacagtttttctgggttaggggtccaggcatggcttggctggattctttactttaggatcttactagggtgaaatccaggtattggcttgggctgagttctcattagaatcttgactggggaaagattcaattaactttcatgcagctttgagtctgaggttctctttttcttgctggctgttaggcagagaacatactcagctggagaggctgccatgtgatcctctcatagcccttcctaaagaccctctcccaatgtggccactcacttct

SEQ ID NO: 718384 - DNA, 1334 bp, Homo sapiens
ggctctgaggtatagatgctcacacacaaaaaccwgagagaggtctctggagcttaaagccagctgtcaggcagcaaatgagaacctcactagtgaaaccaaaataaagtggattctgccagcaacgtgaatggcattgggagcagattcttgctagaactgttgattagagcttagccgatggacaccttgattccagcctagtgaaaccagaagcacagtaatgagatgatccagatttcaacctacaaaaccatgaaataagaaatacatgttttaaaaaaactaagttcgtaataatatgttatggcagcaaaggaaacaattgtagcaccctaccagctggctagtagccctagttgtggtcagcctagtagatcttttcttcccttgtccctctcccagtgtttatctatttcattacttcagagctgcatctgccacagttagaacattatatattttagtcacaaaattcaactcgccaagggtcctcagagaacaccctccctctttcctattttttaacgaagtgtctccatcacaaaatactactcttgagccaaactcactatgactaatttaaagattgtgtaaaattaattcatggactgatatttcctatatactcagttataaccaataatgaacaaatctagtcatttctttttcaacaacaacttgtattttactataaattaatgtattcttatgtttaaagtgcctgtggtatcataagcacttggcataatttattaggaagtggtgttaatgggggccacacagcagtgtgattgggacctcgaagtcctcctctgtatgactgtgctgcttcctggacatgcacacagcagcaatggataaggcagtcactttccaaaaaaccagagtgagtctgattttagcaaatattttgcttcttttttccttccctccaaagagctgttgagaaatatgttccttgattttgctgtagcttatccttctgtaatagttttctattgctatggagcaaattactacaaacttagcagctttccacaacacacatttatgatctcacagtttttctgggttaggggtccaggcatggcttggctggattctttactttaggatcttactagggtgaaatccaggtattggcttgggctgagttctcattagaatcttgactggggaaagattcaattaactttcatgcagctttgagtctgaggttctctttttcttgctggctgttaggcagagaacatactcagctggagaggctgccatgtgatcctctcatagcccttcctaaagaccctctcccaatgtggccactcacttct

SEQ ID NO: 718385 - DNA, 1985 bp, Homo sapiens
atagaattcattccatttcataggagagcaaaatcatttccagcctcaaacttctgagaaaaatacatcatataaaacctttatgtatgtgacatttggaatatgatagaacaagtcttcactaatcattctttacaaatgcagagaaattttatggacttgttttttatttcactggcttccggggtaagccagtagacagtttcagttcatagtaattctttaagaaaatcctggtgctggggctgatggctgcagagacagcgaaagatattggtcccaggtatgtagctttttaaaaattcgactaaatttatgggaaaaacaaaacaaagtaacaacaacaaaaacctctaaggccgggtgcagtggctcacgcctgtaatcccaacattttgggaggctgaggggggcaatctcttgaggtcaggagttcaagaccagcctggccaacatggtgaaaccctgtctccactaaaagtacaaaaattagccaggtgtagtggcatgcaagtggcgtgcacctgtaatcccaactactcaggaggctgaggcaggagagtcacttgaacccaggaggcagaggttgcagtgagctgagattgtgcaactgcactccagcctgggtgacagagctagactcaatctcaaaaaataaaaawaaaaaaaaaataataataataataaaaaacatagaaaatacagtgaatagttaacagaattattagctcatttctttcagatcccaattgtctcagatggctttgtggtaagacctcccagcaggccactcaaatgactgtcatctgtgaggaccagaagggcagacattttgtgttactgactgaagaaagatcaatatgctctaccaaggtcagagaaaagcattccttctttttgtgaaaaatgaaagattgtgacagaaaatcttccttgatgaaagatttcctcagatttgtggtgagaaggagcgggggtgtctacagaccgggctggcatctcccgccccacattagagcatctgaattaaaggagagtgtgaaaatgagcacatgccaaccccagaagtaaaagaagtagagaaaaatacaccaaaagaaagtacgtaagaattaataaagactgaaactgagattattccactagaaaacatagcaaacaaaaagccaatgcaacaacgagtaaaagtagacattattttttaatgaaaagtctaataaaaacaaggaaaatgtaagcactgggtaaaatcatttatcaaaaaccaggagcaaatattatattaaaagaataattgcttaaaaaagttttactaaaatcaagaaaaaatataaggatatcaattatttaaaatgttttgataggggatatgtgatataattaaaaaaataaaattaatggtatatctaaaataaagatattatccttaattgcagatattgctatatatttagaaaataaaagaacttcaattaaaatagttagaactgatagataattttcatatgcagcaggatataggagatttgtagtaacatctatcaattgtcagagaatgaaatgaaacaataactaatggaattcatccatatagtgacataaatacaaagtccataatattaaatgcaaaaataaatatgtaaatcccatgtgcaataaactatattttatggaaaaatattaagaatccaattaagaatcacaagccctgttccaagttaaaatgtcaattctccaaaataaataattaaacccagtaatatttctttcttacacttaacaggggcatatttgggagttggacaaattgaatataaagtttatataaaagaataaatgtgtgaggattgccaagaacaatgtgaaatctttgcataattgaggtggttttgtcttatcagatattaaaacattctaagaagttaccattataacaaaatatggctatcccagaagaacaaaacataagaatgataaatatatcc

SEQ ID NO: 718386 - DNA, 1075 bp, Homo sapiens
aacccacagtttatatgaaaatgcagtagtactatcagcatagcctgtcttatatcagtttcaatcacgccctcttrtgtaaaagtgtagcacagcagcagctttcattgtaaatagaaataacattgaataccgagcacctaccatgttcaggctttatgctaaatgccaagaatatagctgaggacagacctacaaagtcctcatattcatgaaagttattcaggactcattttaataactctggaagtttaaattctattccaaaacctctatgaatatgaagcatttcactgtatggtacaaatagttttatcaataaaagagaagtattgtcaataatttctttggcatataatcttaaattatttattcagtatgcctctaaacttttctctttagcttccattggtaaattttagaatacactgactaagttttacagctatttttttacaacaatatattcttcaatacaataccttgtgatatttaattctaaagcccttatttaatcttagtgttagttgtcattggaaagcctctgaggctataatttcacagtttatgatcccaggaaaacttcctttattaatttacagtcaagagacagcgctttactctgttattaaaattgaaattccctaaatctcattatatattcttaccatctgcatttttatgattcttgtctaaagaaatcttaagaacatctcagttctgatataaatttttcagactttactgtctggcttttttgtctttcaaaatcaaaaactcttgttttaatttaaaagaatagtgactaaattgaaatggcagcatataaatgatgttttatgttgctcagaatgaaccttcctataataaacgcaaatatgataagatgtaaaccatggtggacaggtttggtaaaattagattttaataaaatatttaaatcaataatcattcatgctagcttttgattacacaaagactattgcttcaccattagcagttaaatcatcttatctctgcaacaggcgcttgttccttcatttctacttgtgaacactgcaccttgctcatttaa

SEQ ID NO: 718387 - DNA, 960 bp, Homo sapiens
gaatatggtatagagaagttagatttattaaatagcacttatgacttaaaaagaaaaataaactttagatttatttcaggaatacttatatttttattaacttcatctttaggacttccaagaaatcatcctgaaagctaccattcttatatgtggaataatttttttaagcatatcgatatagatcctaataatgcacatatccttgacgggaatgctgcagatttacaagcagaatgtgatgcttttgaaaacaaaataaaagaagctggaggaatagatctttttgttggaggtatgtaaaaaccttttgtcattaactgtttgttagtgtttgaattagggatttttaaatttaaaaaataaatcttcccatwgtgtaatgtaaagagcacctgtggctgtccgtaatacgcgtttattctgctactgattcctgttttcattttcttcagaaaataatcttaaaattcccgtcttaatcttcaaattgacagctggaattgtttaccttatgccttgagaggtagatcccaatccccgttaaactctgttaattacctctttaaagttgacagtttaccacatctttcaaaatgagtaatatgtttctttacctaaatgatagcttctttttactatttctttaaaactctagccagcctacttatcaaattacagagtttaaacgtttgcatgaggaacaggtggattttagtagattactttaattgtttcatcttactgagtaatcagttaagaatgatgtaaaactttttacttaccagccttaagttaatatgagttaagctgtataattgtcataataaattccaaaattaatgtttaatttaccaaattccacttgtaatttatatatgtgtgtgtatatataatctacagttaaaaataagttttttcctttgtaatgacaacgtggttttctattatcagtgtaaa

SEQ ID NO: 718388 - DNA, 960 bp, Homo sapiens
gaatatggtatagagaagttagatttattaaatagcacttatgacttaaaaagaaaaataaactttagatttatttcaggaatacttatatttttattaacttcatctttaggacttccaagaaatcatcctgaaagctaccattcttatatgtggaataatttttttaagcatatcgatatagatcctaataatgcacatatccttgacgggaatgctgcagatttacaagcagaatgtgatgcttttgaaaacaaaataaaagaagctggaggaatagatctttttgttggaggtatgtaaaaaccttttgtcattaactgtttgttagtgtttgaattagggatttttaaatttaaaaaataaatcttcccattgtgtaatgtaaagagcacctgtggctgtccgtaatacgcrtttattctgctactgattcctgttttcattttcttcagaaaataatcttaaaattcccgtcttaatcttcaaattgacagctggaattgtttaccttatgccttgagaggtagatcccaatccccgttaaactctgttaattacctctttaaagttgacagtttaccacatctttcaaaatgagtaatatgtttctttacctaaatgatagcttctttttactatttctttaaaactctagccagcctacttatcaaattacagagtttaaacgtttgcatgaggaacaggtggattttagtagattactttaattgtttcatcttactgagtaatcagttaagaatgatgtaaaactttttacttaccagccttaagttaatatgagttaagctgtataattgtcataataaattccaaaattaatgtttaatttaccaaattccacttgtaatttatatatgtgtgtgtatatataatctacagttaaaaataagttttttcctttgtaatgacaacgtggttttctattatcagtgtaaa

SEQ ID NO: 718389 - DNA, 960 bp, Homo sapiens
gaatatggtatagagaagttagatttattaaatagcacttatgacttaaaaagaaaaataaactttagatttatttcaggaatacttatatttttattaacttcatctttaggacttccaagaaatcatcctgaaagctaccattcttatatgtggaataatttttttaagcatatcgatatagatcctaataatgcacatatccttgacgggaatgctgcagatttacaagcagaatgtgatgcttttgaaaacaaaataaaagaagctggaggaatagatctttttgttggaggtatgtaaaaaccttttgtcattaactgtttgttagtgtttgaattagggatttttaaatttaaaaaataaatcttcccattgtgtaatgtaaagagcacctgtggctgtccgtaatacgcgtttattctgctactgattcctgttttcattttcttcagaaaataatcttaaaattcccgtcttaatcttcaaattgacagctggaattgtttaccttatrccttgagaggtagatcccaatccccgttaaactctgttaattacctctttaaagttgacagtttaccacatctttcaaaatgagtaatatgtttctttacctaaatgatagcttctttttactatttctttaaaactctagccagcctacttatcaaattacagagtttaaacgtttgcatgaggaacaggtggattttagtagattactttaattgtttcatcttactgagtaatcagttaagaatgatgtaaaactttttacttaccagccttaagttaatatgagttaagctgtataattgtcataataaattccaaaattaatgtttaatttaccaaattccacttgtaatttatatatgtgtgtgtatatataatctacagttaaaaataagttttttcctttgtaatgacaacgtggttttctattatcagtgtaaa

SEQ ID NO: 718390 - DNA, 761 bp, Homo sapiens
tttttctgtttttcagcactaaagaacttttcatagatccacctctacctttacattgacatttcttaatttttaggagatatatatatatatatatatatatatatatatatccatatatatcaatgtacagaaatcatgaatgtgccacttgataatatttatgatgtgattttagttatataactatcactcaaagaaaaattatcagccacccagctcttaaggtctgtctcagacaatactccaaagtataagcacatttctgacttctagtcctatgaaaaaactttgtggaaatggaattatatagcatgtattctttcatctctcttttttcttcaacactatgcctgtgaaatcttctcattttattttatatcrctgtagcttcttttgtaatggctgactaatgtttttgtgttttctactattgaaattaaatgaggtgttttgcaattgatattaactaatgtgctatgaatataatttcatatgtattttgttataaatatatacaaatttcctaaaatgtattccaagaaatggactcaatgacactcctgatatgcatatattcatttagcaaataataacaatttttaaagatgtatttaccagtttacactatcaccaatctccattttcattcttttaaaggcatgtgcatttgaacttgcattgctttaaaccacattatacagatagctaccaagttttgcttgttgatactaaagccctactagaacaattttaaaaat

SEQ ID NO: 718391 - DNA, 1004 bp, Homo sapiens
acattttaaaatagggaaaatgaatttcaagtgccttaaaccatccagaaacaagtgagaaaaagaatggtagcaactaatgttaatccatcctgttaccagaagttgattaacaatcatattactggaagagaagctctttcagtatctcatatgattttaataatgcagccttattttctacagtgagaaattatttccttacatgactacttcttagtataatgcttcagtatatgtccaagctactgagggtacaaagaaaatgctctcacctcaatcaattacagtaatcgttaagacagtcatcacttttaaatgattgactataattatttcaatatttcatgctgcggtattactgtggtttctgcaaatcattgcagtgatatttttcatcttcaataggtatgaaataagttacttttgttctgaatataatttcataaatttgtcatctaggtaagatgggctattcatgtaaaacacaaaagatttcttttaaatgaacttcttttcagcttatctgtggtccataagatacacacagtgggagcaaactasaaggagtggcagacacaaaacttggcagaactttaagaaaatctcaacttggattttagaagttgtttagtttaactacagaaggctaaaagtaaagaatggtttttatcatacagatcattcagatcttatatttgtaagatataagcagaatgtactttttctctagaagaactaatgtgccagtggcatatctctatctgaaggtttacctgtagacatgtagattttcaggggtagaatgtccacaaaggcaaaagttaggccacaaaaattgccttgctcagtctttagctagattagaagttttcaaaattcacagtcccctgtgtactccagccttgtgtcctatcacagtgtcctgctcatggtaggtaggataatgattattgcatcttagaagagatggtgtagtcagctttcatatccatggaaatcca

SEQ ID NO: 718392 - DNA, 540 bp, Homo sapiens
cacaaggatagaaaaccaaacaccgcatgttctcactcatagatgggagttgaacaatgagaacacatgggcacagggaggggaacatcacacactggggcctgtcagggggtgggtggctgggggagggataacattaggagaaatacctaatgtaaatgatgagttgatgggtgcagcaaaccaacatggcacatrtatacctatgtgacaatccttcatgttctgcacatgaaccctagaacttaaagcataataacaaaataaatacataaaaggaaaaattacaatgtaaataccatggtgtctggaagaatttggagttcaaaaagaattcaacactggtttgtaacttagggatcaccagtctacaaatactatttaaagacatagccctggatgagattccctaaaaacaataatgtaaggaaagaatgaagcccattattacattttgtctatctaatattgccaggtctatattgcttcatttttcagaacaagatcctctgacaacatactttgctttaacattagttt

SEQ ID NO: 718393 - DNA, 1389 bp, Homo sapiens
tgtgtattatactaaaaaatattgctatgcatataaatattaattcacttatttctgtgacttttatgtgatgtcctcatattgtaatattatgctactatatttgacctaaaagctgaaaacatttatataggaaaattttataccaaatagtatgagaaaaagttaaagcagcttaaagattccataatatgagtatagctgaaaggaaagataataagtgcttaaatatctgctatttatataatttattagatatttttgaataagaaatatcagtttatgtatcattctttctaagtttaaaaaagtcattcttatttcttagatatagtagaacctattcctgtaggcagttttacaagaatataaaatataccataaattggagagaatctaataacaactcaaatatgctcacacacatacacacacacacacacacacacacacacatgcctagagcaacaccgaggcaaagaaaatggctaaaaagtaaagcatcatctttttattgaccttcaaatttgatatctaatttcagaaatgcccttgagctatttctaaagtgaatgtcctcttgaataaatgtcaagattcaacaatgaatctgatttttaatgtacatctataaacataaatataattttacttgaaattatttcaaggttttgtcagtctctgaatgctctaaggaaagattccattttaatacaacttaggtacaggtataagacttggatgaaaaatttacactctgtgtcatgggaccctaagcgttaaaggtagtacataaatttctagtactgttgaagtaattatctgtagaaaaaagtagtagagcatactaccattgaagtcattgtgaggtggaatgtcttctatatgctacaagttagagaaagacataggaaaattcctcatattattagtcacctgatattgtttggctgtatccccactcaaaatctcatcttgaattgtaatccccataattcccttaatccccacctttcaaacgacacaccaggtggagataattgaatcatggggayggtttccgccgtgctattcttgtgatcgtgagttctcacaagatttgatgtttttataagtgcctggcatttcgtctgccggctccattctcttctgccaccctgtgaagaaggtccttgcttcccctttgccttctgccattatcgtaagtttcctgaggcctccccagccatgctgaactgtgagtcaattaaacctctttcctttataaattacccagtcttgggcagttctttatagtgatgtgaaaatggactaatacatcaccacaggggtttacaaaagcatggaacagaaaacagatcaatggccaagacggacattctcagcatt

SEQ ID NO: 718394 - DNA, 1389 bp, Homo sapiens
tgtgtattatactaaaaaatattgctatgcatataaatattaattcacttatttctgtgacttttatgtgatgtcctcatattgtaatattatgctactatatttgacctaaaagctgaaaacatttatataggaaaattttataccaaatagtatgagaaaaagttaaagcagcttaaagattccataatatgagtatagctgaaaggaaagataataagtgcttaaatatctgctatttatataatttattagatatttttgaataagaaatatcagtttatgtatcattctttctaagtttaaaaaagtcattcttatttcttagatatagtagaacctattcctgtaggcagttttacaagaatataaaatataccataaattggagagaatctaataacaactcaaatatgctcacacacatacacacacacacacacacacacacacacatgcctagagcaacaccgaggcaaagaaaatggctaaaaagtaaagcatcatctttttattgaccttcaaatttgatatctaatttcagaaatgcccttgagctatttctaaagtgaatgtcctcttgaataaatgtcaagattcaacaatgaatctgatttttaatgtacatctataaacataaatataattttacttgaaattatttcaaggttttgtcagtctctgaatgctctaaggaaagattccattttaatacaacttaggtacaggtataagacttggatgaaaaatttacactctgtgtcatgggaccctaagcgttaaaggtagtacataaatttctagtactgttgaagtaattatctgtagaaaaaagtagtagagcatactaccattgaagtcattgtgaggtggaatgtcttctatatgctacaagttagagaaagacataggaaaattcctcatattattagtcacctgatattgtttggctgtatccccactcaaaatctcatcttgaattgtaatccccataattcccttaatccccacctttcaaacgacacaccaggtggagataattgaatcatggggatggtttcygccgtgctattcttgtgatcgtgagttctcacaagatttgatgtttttataagtgcctggcatttcgtctgccggctccattctcttctgccaccctgtgaagaaggtccttgcttcccctttgccttctgccattatcgtaagtttcctgaggcctccccagccatgctgaactgtgagtcaattaaacctctttcctttataaattacccagtcttgggcagttctttatagtgatgtgaaaatggactaatacatcaccacaggggtttacaaaagcatggaacagaaaacagatcaatggccaagacggacattctcagcatt

SEQ ID NO: 718395 - DNA, 1389 bp, Homo sapiens
tgtgtattatactaaaaaatattgctatgcatataaatattaattcacttatttctgtgacttttatgtgatgtcctcatattgtaatattatgctactatatttgacctaaaagctgaaaacatttatataggaaaattttataccaaatagtatgagaaaaagttaaagcagcttaaagattccataatatgagtatagctgaaaggaaagataataagtgcttaaatatctgctatttatataatttattagatatttttgaataagaaatatcagtttatgtatcattctttctaagtttaaaaaagtcattcttatttcttagatatagtagaacctattcctgtaggcagttttacaagaatataaaatataccataaattggagagaatctaataacaactcaaatatgctcacacacatacacacacacacacacacacacacacacatgcctagagcaacaccgaggcaaagaaaatggctaaaaagtaaagcatcatctttttattgaccttcaaatttgatatctaatttcagaaatgcccttgagctatttctaaagtgaatgtcctcttgaataaatgtcaagattcaacaatgaatctgatttttaatgtacatctataaacataaatataattttacttgaaattatttcaaggttttgtcagtctctgaatgctctaaggaaagattccattttaatacaacttaggtacaggtataagacttggatgaaaaatttacactctgtgtcatgggaccctaagcgttaaaggtagtacataaatttctagtactgttgaagtaattatctgtagaaaaaagtagtagagcatactaccattgaagtcattgtgaggtggaatgtcttctatatgctacaagttagagaaagacataggaaaattcctcatattattagtcacctgatattgtttggctgtatccccactcaaaatctcatcttgaattgtaatccccataattcccttaatccccacctttcaaacgacacaccaggtggagataattgaatcatggggatggtttccgcygtgctattcttgtgatcgtgagttctcacaagatttgatgtttttataagtgcctggcatttcgtctgccggctccattctcttctgccaccctgtgaagaaggtccttgcttcccctttgccttctgccattatcgtaagtttcctgaggcctccccagccatgctgaactgtgagtcaattaaacctctttcctttataaattacccagtcttgggcagttctttatagtgatgtgaaaatggactaatacatcaccacaggggtttacaaaagcatggaacagaaaacagatcaatggccaagacggacattctcagcatt

SEQ ID NO: 718396 - DNA, 1389 bp, Homo sapiens
tgtgtattatactaaaaaatattgctatgcatataaatattaattcacttatttctgtgacttttatgtgatgtcctcatattgtaatattatgctactatatttgacctaaaagctgaaaacatttatataggaaaattttataccaaatagtatgagaaaaagttaaagcagcttaaagattccataatatgagtatagctgaaaggaaagataataagtgcttaaatatctgctatttatataatttattagatatttttgaataagaaatatcagtttatgtatcattctttctaagtttaaaaaagtcattcttatttcttagatatagtagaacctattcctgtaggcagttttacaagaatataaaatataccataaattggagagaatctaataacaactcaaatatgctcacacacatacacacacacacacacacacacacacacatgcctagagcaacaccgaggcaaagaaaatggctaaaaagtaaagcatcatctttttattgaccttcaaatttgatatctaatttcagaaatgcccttgagctatttctaaagtgaatgtcctcttgaataaatgtcaagattcaacaatgaatctgatttttaatgtacatctataaacataaatataattttacttgaaattatttcaaggttttgtcagtctctgaatgctctaaggaaagattccattttaatacaacttaggtacaggtataagacttggatgaaaaatttacactctgtgtcatgggaccctaagcgttaaaggtagtacataaatttctagtactgttgaagtaattatctgtagaaaaaagtagtagagcatactaccattgaagtcattgtgaggtggaatgtcttctatatgctacaagttagagaaagacataggaaaattcctcatattattagtcacctgatattgtttggctgtatccccactcaaaatctcatcttgaattgtaatccccataattcccttaatccccacctttcaaacgacacaccaggtggagataattgaatcatggggatggtttccgccgtgctattcttgtgatcgtgagttctcacragatttgatgtttttataagtgcctggcatttcgtctgccggctccattctcttctgccaccctgtgaagaaggtccttgcttcccctttgccttctgccattatcgtaagtttcctgaggcctccccagccatgctgaactgtgagtcaattaaacctctttcctttataaattacccagtcttgggcagttctttatagtgatgtgaaaatggactaatacatcaccacaggggtttacaaaagcatggaacagaaaacagatcaatggccaagacggacattctcagcatt

SEQ ID NO: 718397 - DNA, 1389 bp, Homo sapiens
tgtgtattatactaaaaaatattgctatgcatataaatattaattcacttatttctgtgacttttatgtgatgtcctcatattgtaatattatgctactatatttgacctaaaagctgaaaacatttatataggaaaattttataccaaatagtatgagaaaaagttaaagcagcttaaagattccataatatgagtatagctgaaaggaaagataataagtgcttaaatatctgctatttatataatttattagatatttttgaataagaaatatcagtttatgtatcattctttctaagtttaaaaaagtcattcttatttcttagatatagtagaacctattcctgtaggcagttttacaagaatataaaatataccataaattggagagaatctaataacaactcaaatatgctcacacacatacacacacacacacacacacacacacacatgcctagagcaacaccgaggcaaagaaaatggctaaaaagtaaagcatcatctttttattgaccttcaaatttgatatctaatttcagaaatgcccttgagctatttctaaagtgaatgtcctcttgaataaatgtcaagattcaacaatgaatctgatttttaatgtacatctataaacataaatataattttacttgaaattatttcaaggttttgtcagtctctgaatgctctaaggaaagattccattttaatacaacttaggtacaggtataagacttggatgaaaaatttacactctgtgtcatgggaccctaagcgttaaaggtagtacataaatttctagtactgttgaagtaattatctgtagaaaaaagtagtagagcatactaccattgaagtcattgtgaggtggaatgtcttctatatgctacaagttagagaaagacataggaaaattcctcatattattagtcacctgatattgtttggctgtatccccactcaaaatctcatcttgaattgtaatccccataattcccttaatccccacctttcaaacgacacaccaggtggagataattgaatcatggggatggtttccgccgtgctattcttgtgatcgtgagttctcacaagatttgatgtttttataagtgcctggcatttcgtctgccggctccattctcttctgccaccctgtgaagaaggtccttgcttcccctttgccttctgccattatcgtaagtttccygaggcctccccagccatgctgaactgtgagtcaattaaacctctttcctttataaattacccagtcttgggcagttctttatagtgatgtgaaaatggactaatacatcaccacaggggtttacaaaagcatggaacagaaaacagatcaatggccaagacggacattctcagcatt

SEQ ID NO: 718398 - DNA, 3243 bp, Homo sapiens
  misc_feature 2108: n = A,T,C or G
agcgaaagcactgaaagattaccaacaaaaatatttgtcaatcttaccaaagtaaaaaacaattttgaatacacaaaataatatttcaattatgatatttaatattgtttttacagaattacattatataattacagcacttggtttgtgtcttttcaaaattaatagaaatatgtttgaattaaaattatgaaatataaataatatatagcagaaaaaagtgacagtttagaaagaacactaatcaaataaccagattaaaaatcaatattttagatgttttcaggtttttaaagatatagtgtcaaaatgaaacccataaaattcacaagacaaacaggaaaccaaccaaccattagatgtaattttagaaaattatatttacctggtttcttaaatttcaatgaatagacaaagctgttaggaacaaaaataaaattcctttaattttttattactatgtgttagggctgaggaaagatattataatgtattctgtgttctcgtgagaaaaaagtcatcagaaatctgcagaattaaacatactgtgttttgcaaggctttcaatacacagtgagtgctcactaaagggcacataataatcactacagtaacgatcatactgatcataactcagtcagacacatgtttatagaacatatttaaatgctaatttaaattcacttaaaattgaaattggaactttcccttttttcaaaataaaatattgccttagcggttcctcattagtggaattttaatgaatgtaatagtcttggactatgattaaatctttggtttgtactgaatatagtttagtgttgatgctaaacaattgttacataataggaagactttcagaatctaccttaactcccaaatgctgtaaacttgcaaagctttcaatgtttgtatactttgtcaaaaatgtgagataaattttaaatatatacacatgcaaagatattaatagtatttgcaggcttggtagaagaacgaagcacatagcaccctcatttgtgtttttcaggttcttaaaaaacacataacttagtacagtgtttataaattattctgatgatgtgactgaggtcactgtctgtctatgcatataggtgtcacttttaagagaagataaaataatgaaaaaccttattagcaggaccagattaggtggtaattgtcagtttccttgctttaaagtatctgaatgaaaacttactattttctatatagtaactatgacataccttatatacttctttggataattttatgctgtactatttcaaattatactaccttcctaaaattttcatgtcttttcctttctgggaagctgatatgttgattgctatactatggaacacattaaacacaaaaggagaaaatctcatttgatccctataatagccctgtgagggatcctataatccacattttatagatgaagaatgataggttaaataattttcccaggatcagacattaacaggtacttaaacagagatcagaagtgtgagactggctctcgggccacactctgtaacagcatgctgtgccgctctcagagcaccatgtgggagctagggcagmccacaaaacccactcccatcatccaggccacatttaccttcgttaggcctgagccatccggaaaaatccaaagctgagacgaggacttggaataaacgatgaggggaaatgtgtgatttttttggaaagattgcttagtaacttaaaaaaattccctcctacattcccgtttgcagctacatgtttgagaattagtgttcatctccatcttattcatttggggattactttaaatgccaaatgattcaagtctctcactaaatatattccaatacacactcttaaaggattttatctcttgtttgtccccagtttgtcctctttttcacagaagttaataagctgtttattttctctgaacttttagttataaccccatctgtgccttcaaaaatggcatcttttccactttgaatgtcttctctttcaatacttccagctcaattctattccttaccaacatgatatatataaaaaatctcagtcacatgaattctttcctgagacacagnaacttacacacacacacacacacacacacacacacaccacacacatacacacatttgcttatatctgtatttccatctaagtacattttggagaagaaaggacaccaattcagatgaagtaagaaatgtctatatacaatgaatgagcaggatgatgaattagaggctatgaagtatactccatataatcagtatttaatattactgagtttccagaacacctcagatatttcacatgatgtggtctgattgatagactttacttggaaactctaaattttgtttttgtgttgttttgttttgctatgttttacatcagcattgcaatttccaaaggacgttttcttttatgtagcatgttagctttcaagaacagataagtgaattttctctggcattcatttgctttctataaatatctacacatgtttataaatatctgaaaaaatagctgccaatgtggtataaaaattagtgagctatgtttcagacaacctggttctcccacttattgtgctaccttggtaggtcacctgcgttagttattactcctatcatcaccaggcgggagattagggggtgaagccaacaattgcagtggaagcctgtaaatttcatatcaattcttggctaaaaatttttaaataggtaagaaaaacagtttaaaagtaaagttttatgtaaaagcaagcaaaataaaacaacaaatacatctaagtagggtatagaatgaaaactatatctataaatcgatataaataggatatcatatatttatttataaacttagaaccaataaaatgataccaggttttctttgaactatgcctgtaacagttgagaaggaaaaatattttccttgaagccagaagtaaatagacatttttatctcaaaatcgtaattgagcataagtataaaagattacactcattatgcaagaaaatgctggtaattaaaatacaaaatagatcttcagacattattacttcagtaaatatgcatcagaatgaagtatatgaaaatagaaagcagctatttcacatgctcataaagaccaccacaaagaagtgccatgattgaatcgattatgataatcgtaattagatttctcataaatagaaaataaattaaaat

SEQ ID NO: 718399 - DNA, 3243 bp, Homo sapiens
  misc_feature 2108: n = A,T,C or G
agcgaaagcactgaaagattaccaacaaaaatatttgtcaatcttaccaaagtaaaaaacaattttgaatacacaaaataatatttcaattatgatatttaatattgtttttacagaattacattatataattacagcacttggtttgtgtcttttcaaaattaatagaaatatgtttgaattaaaattatgaaatataaataatatatagcagaaaaaagtgacagtttagaaagaacactaatcaaataaccagattaaaaatcaatattttagatgttttcaggtttttaaagatatagtgtcaaaatgaaacccataaaattcacaagacaaacaggaaaccaaccaaccattagatgtaattttagaaaattatatttacctggtttcttaaatttcaatgaatagacaaagctgttaggaacaaaaataaaattcctttaattttttattactatgtgttagggctgaggaaagatattataatgtattctgtgttctcgtgagaaaaaagtcatcagaaatctgcagaattaaacatactgtgttttgcaaggctttcaatacacagtgagtgctcactaaagggcacataataatcactacagtaacgatcatactgatcataactcagtcagacacatgtttatagaacatatttaaatgctaatttaaattcacttaaaattgaaattggaactttcccttttttcaaaataaaatattgccttagcggttcctcattagtggaattttaatgaatgtaatagtcttggactatgattaaatctttggtttgtactgaatatagtttagtgttgatgctaaacaattgttacataataggaagactttcagaatctaccttaactcccaaatgctgtaaacttgcaaagctttcaatgtttgtatactttgtcaaaaatgtgagataaattttaaatatatacacatgcaaagatattaatagtatttgcaggcttggtagaagaacgaagcacatagcaccctcatttgtgtttttcaggttcttaaaaaacacataacttagtacagtgtttataaattattctgatgatgtgactgaggtcactgtctgtctatgcatataggtgtcacttttaagagaagataaaataatgaaaaaccttattagcaggaccagattaggtggtaattgtcagtttccttgctttaaagtatctgaatgaaaacttactattttctatatagtaactatgacataccttatatacttctttggataattttatgctgtactatttcaaattatactaccttcctaaaattttcatgtcttttcctttctgggaagctgatatgttgattgctatactatggaacacattaaacacaaaaggagaaaatctcatttgatccctataatagccctgtgagggatcctataatccacattttatagatgaagaatgataggttaaataattttcccaggatcagacattaacaggtacttaaacagagatcagaagtgtgagactggctctcgggccacactctgtaacagcatgctgtgccgctctcagagcaccatgtgggagctagggcagcccacaaaacccactcccatcatccaggccacatttaccttcgttaggcctgagccatccggaaaaatccaaagctgagacgaggacttggaataaacgatgaggggaaatgtgtgatttttttggaaagattgcttagtaacttaaaaaaattccctcctacattcccgtttgcagctacatgtttgagaattagtgttcatctccatcttattcatttggggattactttaaatgccaaatgattcaagtctctcactaaatatattccaatacacactcttaaaggattttatctcttgtttgtccccagtttgtcctctttttcacagaagttaataagctgtttattttctctgaacttttagttataaccccatctgtgccttcaaaaatggcatcttttccactttgaatgtcttctctttcaatacttccagctcaattctattccttaccaacatgatatatataaaaaatctcagtcacatgaattctttcctgagacacagnaacttacacacacacacacacacacacacacacacaccacacacatacacacatttgcttatatctgtatttccatctaagtacattttggagaagaaaggacaccaattcagatgaagtaagaaatgtctatatacaatgaatgagcaggatgatgaattagaggctatgaagtatactccatataatcagtatttaatattactgagtttccagaacacctcagatatttcacatgatgtggtctgattgatagactttacttggaaactctaaattttgtttttgtgttgttttgttttgctatgttttacatcagcattgcaatttccaaaggacgttttcttttatgtagcatgttagctttcaagaacagataagtgaattttctctggcattcatttgctttctataaatatctacacatgtttataaatatctgaaaaaatarctgccaatgtggtataaaaattagtgagctatgtttcagacaacctggttctcccacttattgtgctaccttggtaggtcacctgcgttagttattactcctatcatcaccaggcgggagattagggggtgaagccaacaattgcagtggaagcctgtaaatttcatatcaattcttggctaaaaatttttaaataggtaagaaaaacagtttaaaagtaaagttttatgtaaaagcaagcaaaataaaacaacaaatacatctaagtagggtatagaatgaaaactatatctataaatcgatataaataggatatcatatatttatttataaacttagaaccaataaaatgataccaggttttctttgaactatgcctgtaacagttgagaaggaaaaatattttccttgaagccagaagtaaatagacatttttatctcaaaatcgtaattgagcataagtataaaagattacactcattatgcaagaaaatgctggtaattaaaatacaaaatagatcttcagacattattacttcagtaaatatgcatcagaatgaagtatatgaaaatagaaagcagctatttcacatgctcataaagaccaccacaaagaagtgccatgattgaatcgattatgataatcgtaattagatttctcataaatagaaaataaattaaaat

SEQ ID NO: 718400 - DNA, 3243 bp, Homo sapiens
  misc_feature 2108: n = A,T,C or G
agcgaaagcactgaaagattaccaacaaaaatatttgtcaatcttaccaaagtaaaaaacaattttgaatacacaaaataatatttcaattatgatatttaatattgtttttacagaattacattatataattacagcacttggtttgtgtcttttcaaaattaatagaaatatgtttgaattaaaattatgaaatataaataatatatagcagaaaaaagtgacagtttagaaagaacactaatcaaataaccagattaaaaatcaatattttagatgttttcaggtttttaaagatatagtgtcaaaatgaaacccataaaattcacaagacaaacaggaaaccaaccaaccattagatgtaattttagaaaattatatttacctggtttcttaaatttcaatgaatagacaaagctgttaggaacaaaaataaaattcctttaattttttattactatgtgttagggctgaggaaagatattataatgtattctgtgttctcgtgagaaaaaagtcatcagaaatctgcagaattaaacatactgtgttttgcaaggctttcaatacacagtgagtgctcactaaagggcacataataatcactacagtaacgatcatactgatcataactcagtcagacacatgtttatagaacatatttaaatgctaatttaaattcacttaaaattgaaattggaactttcccttttttcaaaataaaatattgccttagcggttcctcattagtggaattttaatgaatgtaatagtcttggactatgattaaatctttggtttgtactgaatatagtttagtgttgatgctaaacaattgttacataataggaagactttcagaatctaccttaactcccaaatgctgtaaacttgcaaagctttcaatgtttgtatactttgtcaaaaatgtgagataaattttaaatatatacacatgcaaagatattaatagtatttgcaggcttggtagaagaacgaagcacatagcaccctcatttgtgtttttcaggttcttaaaaaacacataacttagtacagtgtttataaattattctgatgatgtgactgaggtcactgtctgtctatgcatataggtgtcacttttaagagaagataaaataatgaaaaaccttattagcaggaccagattaggtggtaattgtcagtttccttgctttaaagtatctgaatgaaaacttactattttctatatagtaactatgacataccttatatacttctttggataattttatgctgtactatttcaaattatactaccttcctaaaattttcatgtcttttcctttctgggaagctgatatgttgattgctatactatggaacacattaaacacaaaaggagaaaatctcatttgatccctataatagccctgtgagggatcctataatccacattttatagatgaagaatgataggttaaataattttcccaggatcagacattaacaggtacttaaacagagatcagaagtgtgagactggctctcgggccacactctgtaacagcatgctgtgccgctctcagagcaccatgtgggagctagggcagcccacaaaacccactcccatcatccaggccacatttaccttcgttaggcctgagccatccggaaaaatccaaagctgagacgaggacttggaataaacgatgaggggaaatgtgtgatttttttggaaagattgcttagtaacttaaaaaaattccctcctacattcccgtttgcagctacatgtttgagaattagtgttcatctccatcttattcatttggggattactttaaatgccaaatgattcaagtctctcactaaatatattccaatacacactcttaaaggattttatctcttgtttgtccccagtttgtcctctttttcacagaagttaataagctgtttattttctctgaacttttagttataaccccatctgtgccttcaaaaatggcatcttttccactttgaatgtcttctctttcaatacttccagctcaattctattccttaccaacatgatatatataaaaaatctcagtcacatgaattctttcctgagacacagnaacttacacacacacacacacacacacacacacacaccacacacatacacacatttgcttatatctgtatttccatctaagtacattttggagaagaaaggacaccaattcagatgaagtaagaaatgtctatatacaatgaatgagcaggatgatgaattagaggctatgaagtatactccatataatcagtatttaatattactgagtttccagaacacctcagatatttcacatgatgtggtctgattgatagactttacttggaaactctaaattttgtttttgtgttgttttgttttgctatgttttacatcagcattgcaatttccaaaggacgttttcttttatgtagcatgttagctttcaagaacagataagtgaattttctctggcattcatttgctttctataaatatctacacatgtttataaatatctgaaaaaatagctgccaatgtggtataaaaattagtgagctatgtttcagacaacctggttctcccacttattgtgctaccttggtaggtcacctgcgttagttattactcctatcatcaccaggcgggagattagggggtgaagccaacaattgcagtggaagcctgtaaatttcatatcaattsttggctaaaaatttttaaataggtaagaaaaacagtttaaaagtaaagttttatgtaaaagcaagcaaaataaaacaacaaatacatctaagtagggtatagaatgaaaactatatctataaatcgatataaataggatatcatatatttatttataaacttagaaccaataaaatgataccaggttttctttgaactatgcctgtaacagttgagaaggaaaaatattttccttgaagccagaagtaaatagacatttttatctcaaaatcgtaattgagcataagtataaaagattacactcattatgcaagaaaatgctggtaattaaaatacaaaatagatcttcagacattattacttcagtaaatatgcatcagaatgaagtatatgaaaatagaaagcagctatttcacatgctcataaagaccaccacaaagaagtgccatgattgaatcgattatgataatcgtaattagatttctcataaatagaaaataaattaaaat

SEQ ID NO: 718401 - DNA, 1399 bp, Homo sapiens
tttagaaatttggaagaataaaaagaaaaataccaaggtggacatgattaggtttgtaatacttaacttctgggatatttgaacaatgttcattgacactgcttgagactgtgaagaagtgagtgatagatgctcaaagtgatttcaaaaggaatacataatgatggagtatgtaggtaaggaaaggcttgcatgctgaaggagagaaataaaacttatggtgagagtgtgtttgcaatatcctgcaagcttttgcagaatgctattctataaagtctggctaaattgttaaggtaagaaatttaactggtgtagccatcttatagattgtgttataacagttttagtggtagactgatgaattatgtcataaaaaaggcactttcagaaaactggcaatctttaagtcttaatgggaaggaaatctgcctatgccctctcttttttccaagtcccttccctccctaccccataaagatgggtaagactttaaatctttccagctattgctgtgggaagtatttcatggacrcaatcatgtaaaagaaaaatatagagaagtatatttccaggtttttaggattacacatgtatagaaacaaaatgagaaaattgccagggctggaaatacaatttgagaagcctaaatagaacaaagccaatagtgattccttcaactgtggattttatggactgaatatgtacaaatgttgggtataaatcagggccaatttttccacaagaatctagaatatatcaaagtctaaaacaggattatagccactttagagaagaaattgcaccagaaccagactgtttctaaccaaatgacatacgtcttctctgcgtttacattcatatacacacattcatgttaacttagattgtatcatattgaagataattctatataatgcctccaaatttaaattcagttcttttccacaaatgcttattgtagttaagctatactaactttgaatagaatcacagagatgctggtaaatgacttatattgcatacatgagggaaacagctttttttttttaaatgatgcctgtataaagcctcttcctgttgagatagattccaacacacactcacacacacctctacacacacttacaccctcatatatgtaaaaatttgcatattagattgtttttcctagaaaatttactacctatttactattctaagtaaatagaacataattctctaatattggttttttaaactaataaatccttaagtattttatatcatcttttagttaatattaactttgagaagtatcacaaaccatacttactaaatttacaaagacaattctagctaatttaagaatcatcatctatacagtttcaaaaaaaataaaattggctgctagacaatttta

SEQ ID NO: 718402 - DNA, 603 bp, Homo sapiens
gcactaataaacaattgtattctctatgatattctgtatgagatttttacctttgtgaacaggatctgtagacagtccctttctgagcatgatgattataaggatgacttggtggatgaattcattaagcagagatttattcatatgcctcatggggtcaccaaagtgtataacattcatgcatacttatcttttgcaagcatccccataaataagcccatttctgattgatgcttatatgtgatagatcagagcacaatcattctgcyaatcactggttactcatgcatggaattaaaaatcttccagatccatgccatttctatatttggtttggctttacctattactcaaagtaagaaaaaaaagagaaggaggataagatgtaaacagatataattttaacattaaaaggatagcaggatactttcaggctgttccaaaagaactgaaatagcatcaatctaataatatcctacatgaacattgttgaatttataaatatgaatgacatcggaatagccactgaatgctattatggtacttacaaatagtgaataaatgtacctttgtaagaatttaacccattggcattagataaaa

SEQ ID NO: 718403 - DNA, 603 bp, Homo sapiens
gcactaataaacaattgtattctctatgatattctgtatgagatttttacctttgtgaacaggatctgtagacagtccctttctgagcatgatgattataaggatgacttggtggatgaattcattaagcagagatttattcatatgcctcatggggtcaccaaagtgtataacattcatgcatacttatcttttgcaagcatccccataaataagcccatttctgattgatgcttatatgtgatagatcagagcacaatcattctgccaatcactggttactcatgcatggaattaaaaatcttccagatccatgccatttctatatttggtttggctttacctattactcaaagtaagaaaaaaaagagaaggaggataagatgtaaacagatataattttaacattaaaaggatagcaggatactttcaggctgttccaaaagaactgaaatagcatcaatctaataatatcctacatgaacattgttgaatttataaatatgaatgacatmggaatagccactgaatgctattatggtacttacaaatagtgaataaatgtacctttgtaagaatttaacccattggcattagataaaa

SEQ ID NO: 718404 - DNA, 609 bp, Homo sapiens
atagaataatttgaaagaaaagtgaattatgtgtattgtcttttttattatacttatcttaaaagtaacttgacaaaaattgtcaaaaataaattccaatcttcaatctacaaagagttgcatgtagcatagagagttatttttgggaccaaaatcatttttaagggagaagaaggagagtgctagggttcagattctgaacccagagtcagaaagtgagaggaagccactgaatgctgtgagatgggtgtagtgtatgctttctcctgaattgccttttgacacgccaccttacacacttagcatgtaaaagactggaaatctgacaaattaaattagatgtcttgttgtatccttgtctcagtgtccattaactgcaccatcctcttgctcagattaaaagcctaaggatataattgattgcttttccatctctggcagagagctgttcacttttttaaaaactttttttttatttccataggttttgagggaacaggtggtatttgcttacatgagtaaaatatttagtggtgatttgtgagattttggtgcacccatcaaccaagcaacattcactgaacccaaygtatactcctttatccctca

SEQ ID NO: 718405 - DNA, 1462 bp, Homo sapiens
tgaataaatcactttttttaaggacattatttaaaactgaactccaagaacccacattactcacaggtccacttatcagagcccagaagagagtagtagcatacatttcattattatttacgttataaactcaagggaatttttgccatttagatatataattttccttaaagccactggggtcaaagtacaggccccgcacccagggtcaacatagctgtctttcagaaatgccaggaacagaaaaaaataataattctttaattcctaggccactgttcttttcaaayactagagttttggggccaaaactattttcctttctataattttggaatagttgcttctgttgattcataatgagattacacttaattttttctgtgtactaataattgcattgttcatagaaacagttgcatataattctctacatattcaggtggaagttctttgctggaattaggaaaatctttaaaagcatttaaaatgttgctgtggacacctgcctatgtaaagattaaaacaaatataaaatctagaattttttaagataaaataaggtaactacctcaagatagaactggccctgttcttaatagagagaccgagagagagagagagagagacagacagacagacagaaataagtgtctatgatttgaatgtgtttcccaaagatcatatgttggaaacttaacatgcaatacaacagtgatgagaagtgggactttgaagaactgattagttcacaagggctctgctctcacaaattaattaatgctattatcataggagtgggcttactgttgcaagggtgagtttgttttgactgagtttgaccctctcttgtgtattcttttttgctcttccaccatgggatgatgaaacaagaaggccctagcttgacagatgttggcctctcaatcttggacttacagcctccacaactgttaaccaaataaatttctgttcattataaattacttagtctgtggtattccgctatagcagcacaaaacaaactaaggcactagtttagtaatttacatccaactgaacatgaggatagggcaaattattgctactccaaaccctcattaatatgaaaaatgcatatatagttgtcacactttttttaaaaataattacattgaagtaataggtcatgcctgtaatcccagcactttgggaggccaaggcgagtggatcacttgaggtcaggagtttgagaccaacctggccaacatggtgaaaacctgtctctactaaaaatacaaaaattagctgggcatcgtgatgcttgccggtaatcccacctactttgggatgctaaggtatgagcatcactagaacccgggaggcagaggttgcagggacctgagattgtgccactgcactccagctcagcaacagtgtgagaatctgtctaataataataataataataataataataata

SEQ ID NO: 718406 - DNA, 1272 bp, Homo sapiens
attgccactttgcttcttattctgaatatgacaaacataggttttctatcctttattttgaacattttttggtcaatttatttaaatatccttcttgtaaatatattatagctatatttttgttttttactctcccaccactttctcactgcctttctgtttgggaatttggcagttattctcattcttttttaaaagaataatttaagctaatgtttttacttacaatatttgttttaaatatttcacaaaatagatgctttactgccaagtatgttacagcacatggaatagtgtagttcattaaaagactaattaattaatcattcattcactcactccataatacatattcaagactaatcacaacacaatgctacaatgctagrtacagatactaaaaacataacattaaaaaattaactcttagtgaggcatggcagtgtatacctgtagtcccagatacttgggaggctgaggcaggaggattgctttagcccagaagtctcagtccaacccttacaatatagtgagaccccgttgctaaaaaacaatttttgaagtctcttgcttactgtgtagaaaataaacagaattaaccacaaagtaaattttagtatattaaaaatctagcttatcaaagaatatttctaaacatgttatagaagatctgagaacaaagaaattacttctaagaaattgtatgcaaaaaaaaaatgacattagaatagatgaacgggatttgtctgtgataagcctctggggttgatgagccaggttttaccaaatattagggatctagaagaaggtgcaacattgagtttagaaccaagtttgagttcatgaagagaagtaggagaaaaggtatagaataaaggggagcgagctcacaaagatttaaacacaaaggctgcctccatataaatttcctcttatgttttagatgccttttgaatcttttctagtcatgtttttctacatccagtccaatgtttttcacatacaggtttcttctacccttaagtattttttactagttttcttctctttcttactgtttctaatgatgtctctttctagcttcctaaaatatgtttacctatgtatataaatgttgtaactaaacctaataagtaataactttctctttgactttccaaatccatcttatatctctgtgcttacaaaaatgtccaacatatgtctagtaaatccaatggtacaatgagcctcctggaaacaagattacctgttttctcatatcaattttac

SEQ ID NO: 718407 - DNA, 650 bp, Homo sapiens
ttttttgtatttggacaatattccttcacatttattcttgaagaagtaatcctttgaagagtgacactcaatcgtgtgctttgagagtagaacacagatattttcaagtatattatagccacagagggaacatataaaattgtacaaccaccataatctctctgaaaaattataaattcaattaagaataataaagactattaaaaagttttcatagagtatttgttattcaaatactaatatacttgtttatatttagtcctgttttcttcaaacacacggaaagatacatttttgagcttgcatgctcagtctgtgggaagaattaatgtgaaaactgaagracacagagacacaaacactgagctccacttttagggtaaatttattcatagagatgtaccattaaataacatcagtattaattaatctttttatatttgacaagtatttcattattttttataaattatttctcatttaagtcatatggactacccaacaaataactgaaaacaaagaaacaccctcttcttattttaggttatatctgtgtcagttctggaaataattttgtgaagttaacaaggcttctgtaattctattaggcatataatatttgtattaaacctctccacatttaaaaactt

SEQ ID NO: 718408 - DNA, 623 bp, Homo sapiens
tccctcccatatttctctgtttgtctgaggaaagtgactcctttgcccacattccccacatcccaaagggtaataattattttttatattagctaatacccactgctataagggaggcaaaaagcaggaacctggggagaacagtcaagaacttcaatggccacaatgcaggcagtgaaaattattaccagggctggaactgtgaaaacagtgggtcactcttaaaatgggtaatgtgagagtccccagagagcatttgstgattgcaaaagtcaatctttgagctcatgattcttggcccaattggagcattttcctttatagtcttcttaccttggactcctcctcattccagtggcccgaaaaagtctaccttgtttcttatccagagaagggggagtggattttatttttcaaggtctacatgtgctctagacacaagaagatgccatcctctgacttagagttttagtcctccccgaccacatctgcacaccccagtagtgatgatagatagtcactgagccactttctttgaaaaccatctttgcatttgtgaaaatagggaaaattagcaatgcatgttctctacacaggatactgctatctttcctaccaattca

SEQ ID NO: 718409 - DNA, 603 bp, Homo sapiens
agtcattctcctcttttttatattcctcagtgacacatgtatcaccaagttctaatttcactccaatttctttctaatttatttttttgtctcaatgtatcatgtttgctccagttctcatcatttcatcatgtcctctgagactaggggtcccagcccccttgacatatgtcagtacctgttagcaaccaggccacacacccagaggtgagtagctggtgagccagcagaagcttcagttgtttttacagccactcccccgcttgcattaccagctgagctccacctcctgtcagatcagcgttgkcattagattctcataagagctcaaaccctattgtgaactgagcatgtgagggatctaggttgtgcactccttatgagaacccagtgcctgatgatgtgcaggctgcagctctaagaggctgcagttcaaaaagtggcatgtgctcctcttttggctagcaccataactagacaaactgatgaaacagcagagcatattgaggcacaattgttagagaggatgaatgagtcacagtggtacacaatccaggttgacaagtctaccgatgttgacaacaaggcaacaatgcttgcttt

SEQ ID NO: 718410 - DNA, 603 bp, Homo sapiens
agtcattctcctcttttttatattcctcagtgacacatgtatcaccaagttctaatttcactccaatttctttctaatttatttttttgtctcaatgtatcatgtttgctccagttctcatcatttcatcatgtcctctgagactaggggtcccagcccccttgacatatgtcagtacctgttagcaaccaggccacacacccagaggtgagtagctggtgagccagcagaagcttcagttgtttttacagccactcccccgcttgcattaccagctgagctccacctcctgtcagatcagcgttggcattagattctcataagagctcaaaccctattgtgaactgagcatgtgagggatctaggttgtgcactccttatgagaacccagtgcctgatgatgtgcaggctgcagctctaagaggctgcagttcaaaaagtggcatgtgctcctcttttggstagcaccataactagacaaactgatgaaacagcagagcatattgaggcacaattgttagagaggatgaatgagtcacagtggtacacaatccaggttgacaagtctaccgatgttgacaacaaggcaacaatgcttgcttt

SEQ ID NO: 718411 - DNA, 603 bp, Homo sapiens
agtcattctcctcttttttatattcctcagtgacacatgtatcaccaagttctaatttcactccaatttctttctaatttatttttttgtctcaatgtatcatgtttgctccagttctcatcatttcatcatgtcctctgagactaggggtcccagcccccttgacatatgtcagtacctgttagcaaccaggccacacacccagaggtgagtagctggtgagccagcagaagcttcagttgtttttacagccactcccccgcttgcattaccagctgagctccacctcctgtcagatcagcgttggcattagattctcataagagctcaaaccctattgtgaactgagcatgtgagggatctaggttgtgcactccttatgagaacccagtgcctgatgatgtgcaggctgcagctctaagaggctgcagttcaaaaagtggcatgtgctcctcttttggctagcaccataactagacaaactgatgaaacagcagagcatattgaggcacaattgttagagaggatgaatgagtcacagtggtacacaatccaggttgacaagtctaccgatgttgacaacaaggcaacaatgyttgcttt

SEQ ID NO: 718412 - DNA, 1691 bp, Homo sapiens
aaaagatctcatatgccccataagtatatacctacaaaaattaaacataaataaaataaaaattacatatgtgactagcatcagttttcttttatatagtactgaagtaaacatttccacaatagctacatattttagacatctttacagatttagaaattctataaactcagagtcaacctcaaaatgagatagtatagatatttaggacatttagcaaatgctgttaaacaaatgagctcatgtataatacataagtatgttctagatcagagtgtatatgtgggtattttcacatatattaaaaccactaaagtaacttttttctctgtgacattccagtctttttcaattttaaattctaatcatctttgaaattttggtataaatattgactttttaatctcttattttgcttctttggatatggcattatttttctcttttctgggctaaacaaacctccactggattagaataataaatctgagagaataaagaatggttttgttcatcttggcaaatactttgcattgatctaataatgttctctgttgcatatatggcaagagaataaattgaatactaacacaaatcaatgaaataaatctattcactgaatactagaaatattaggagatataaatttaagcaagtccctttatattcggagcttttgaacctcaatcagttggaatatatcttaagttatatttcataattacctaaagctcattaaaatcagcctaagttattcttgctgctgagtaaattgtttttgttttacataattaggtgaagtaccaaaaagccttccatattttacaataatgtaaaactatgtaatttttagtgtggatcataaagaataaataaaatagtatcagagaagaaataataaattgcagttgcaatcaaatcatagttttaaccttgaacaaatgagaggtgcatttgaaagtcatttccatggcagcccatttgtcgattaaatttatctcatcatgaaaatatagagccacaattatcattattcatgtaatgtatgggaattcattccaagtgtcacttctgtctctgtctcctatctgcatttattccaaatgcatttaaaggacaattgttccaaaaggataacttaaaaatcagcttcaagttctaattttatttggaaaatcagatatgaatcccaatgtctttgtccacaaaataagtccagcaaagatgacttcaccacatttaaagtgtctaactcttaattgaaattattataagtttttgttctattgaacacaaaaaagcctttcatttacattaaaggtgttaaatattttcacttgcctctgttatagccacccgtatccactacaaagcaaactgtccacagaccaaaagaagatttttgaattgccagagagttttgcttctgttttttaatttgttttcattaggaaagcaagcaataaattaaaacttttacaccaggtccagtgaatagtaagtaagaaataaaagtgcattggtaaaatgagacctcatatactgaggataaaaggccagtggatgaatgttggttatcatggttttaaaggaatggcagaaagacaggggaacatacaggaaggtaagaaaaaaaagcggcctaaagagtagaaagaagtccagagaawaaaggccgtgtcacagacaac

SEQ ID NO: 718413 - DNA, 921 bp, Homo sapiens
tgttaatatctaccagagagcatataycaaagttgaagctacaatcaaccaagtaaacaaaatgactcagttggtatgctgcagccagcctctgcattggccacacttatgctgatacagtagggtcatttacaaagtagctacgttgctaaaaggaccattatgcatacatgccaaagcaagggttccctgttcccaaagccgatttatctattactgctgccctaactacaagaaatagatacatactaagtcctctatatgtcaccatcttttaaagagaacatagacacttggcaagttgactacattaatccctttcatcctggaagagatagcaattgtctaaagtggaatacaattatattcttttttttgagagagagagagtctcactctgtcacccaggctggagtggagtggcgtgatctcgactcactgtaacctgggtctccagggcccaagtgattctcatgcctcagcctcccgagtatctgagattacaggagtgtgacaccacacctggctaatttttgcatttttagtagggatagggtttcactatgttgcccaggctggtctcgaactcctggtctcaagtgatctgctcgcctcagcttcccaaagtgctgggattacagacatgggccactgcgcctggctggaatagaatacaaatatattcttgatatgaatttcccttacctgtccacaagacctaaatcagcactactgtcctagaactcacagaacatgtaatcccttacacaggatcccacataaccaatggactcactctagagcaagaaggttgtatcatgttctggcactatctggaagctaatgacttcatatgatgttggaataacctaatgaaggtacagctgagacatcagctacaaaatgatgccctataaggat

SEQ ID NO: 718414 - DNA, 921 bp, Homo sapiens
tgttaatatctaccagagagcatatatcaaagttgaagctacaatcaaccaagtaaacaaaatgactcagttggtatgctgcagccagcctctgcattggccacacttatgctgatacagtagggtcatttacaaagtagctacgttgctaaaaggaccattatgcatacatgccaaagcaagggttccctgttcccaaagccgatttatctattactgctgccctaactacaagaaatagatacatactaagtcctctatatgtcaccatcttttaaagagaacatagacacttggcaagttgactacattaatccctttcatcctggaagagatagcaattgtctaaagtggaatacaattatattcttttttttgagagagagagagtctcaytctgtcacccaggctggagtggagtggcgtgatctcgactcactgtaacctgggtctccagggcccaagtgattctcatgcctcagcctcccgagtatctgagattacaggagtgtgacaccacacctggctaatttttgcatttttagtagggatagggtttcactatgttgcccaggctggtctcgaactcctggtctcaagtgatctgctcgcctcagcttcccaaagtgctgggattacagacatgggccactgcgcctggctggaatagaatacaaatatattcttgatatgaatttcccttacctgtccacaagacctaaatcagcactactgtcctagaactcacagaacatgtaatcccttacacaggatcccacataaccaatggactcactctagagcaagaaggttgtatcatgttctggcactatctggaagctaatgacttcatatgatgttggaataacctaatgaaggtacagctgagacatcagctacaaaatgatgccctataaggat

SEQ ID NO: 718415 - DNA, 921 bp, Homo sapiens
tgttaatatctaccagagagcatatatcaaagttgaagctacaatcaaccaagtaaacaaaatgactcagttggtatgctgcagccagcctctgcattggccacacttatgctgatacagtagggtcatttacaaagtagctacgttgctaaaaggaccattatgcatacatgccaaagcaagggttccctgttcccaaagccgatttatctattactgctgccctaactacaagaaatagatacatactaagtcctctatatgtcaccatcttttaaagagaacatagacacttggcaagttgactacattaatccctttcatcctggaagagatagcaattgtctaaagtggaatacaattatattcttttttttgagagagagagagtctcactctgtcacccaggctggagtggagtggcgtgatctcgactcactgtaacctgggtctccagggcccaagtgattctcatgcctcagcctcccgagtatctgagattacaggagtgtgacaccacacctggctaatttttgcatttttagtagggatagggtttcactatgttgcccaggctggtctcgaactcctggtctcaagtgatctgctcgcctcagcttcccaaagtgctgggattacagacatgggccactgcgcctggctggaatagaatacaaatatattcttgatatgaatttcccttacctgtccacaagacctaaatcagcactactgtcctagaactcacagaacatgtaatcccttacacaggatcccacataaccaatggactcactctagagcaagaaggttgtatcatgttctggcactatctggaagctaatgacttcataygatgttggaataacctaatgaaggtacagctgagacatcagctacaaaatgatgccctataaggat

SEQ ID NO: 718416 - DNA, 2123 bp, Homo sapiens
gaaaaacaaatgaagaaaaagtttaatttctagagggagattttgtgcatgagcaggactaaatctaataatcccaatagtctggcatatggcatacgtggatattcagtgagaatgtaaaatcatcctgcaagcttttctgtatttatttttggggattgattacaatctctatagtacagtgacttctctacatggattacaggagactgttgtctcagtccacagttcttggaatagtcatatttctgagcaactgattttttttaaccttatggacactgaattgattgtttttcacttgtgataactgctagatctactggagctgagacggtttttcacttctagaaaatgtgcaaaactgcaagacacatgtttggtttacaatttcaacccaggcttttttattttactttttttcatttttctttcttccaatgtcctcacttttttcttgacatgtagacttgtatttaaaaaatgatgtttgggaaaaaagtaatgtatgagtaaataactttattggaaggatagctattaacactttcttttgtatcagagaaggacctcattcccagtttctacatgccttagggatagaatgggatatttttaaagtatgtaaaaggataagtattcttatatatccctttatagtggttggggaatcatttaaaaataaagcaacacaaattggtaattgttaggggattgtcatgtgtttgttttttaagatgagaagttccaaagaaacaagccttatttccttttcgtggtattaaacagctactgccaacagtttatacagagccacaaccatcactgcagctgaccctgaaaacagaaagtgagggccatccattaagaggtccacgactgcactgagtctatgatgcgcaatgtagtggagcagaaatgatgcttgctgcacatttagttgagcctaggagagcagggccctccatagacactagtttgaacattgctaggtttaaaatggtttaaatataagatggaaatctgcacactactagtgtttgtattcatattttttatttggaataacctgtctgtgtatctatgtatctagttgctttagtcttctcatagaattagtataacagttggttatgtataataattatggaaaagggttaatcaaattattacatttttacttgaagcctacatcacagcattacaatggaaagctagactgttactattttgttttcacaagtgtttggtgcatatttgattcatttcagtattgttagaaaattaaactggcattatttttctgatgatgtctcacattgtcgtcactatagaaatgaggctaataatgccagctcattcgaggaatatagcttcaggaatgaattgttttttttttttctttatattgaaatggtagttttttaatagagatactgaatggtgtatttcagatatctttaaaggaacacttaattcagaattgagtgcaaaaaagctgcagaagatcattcatccatgtagatacaattatattgtggtggataatggatttgtgttattcttaatgtctatacatggctacagtaagactgaagttgtttttataacttttcagtacattgaatgaaagaaagtatgacagcagaaaacatctgataaattaaatgtgacatgttttttattcatataaaatggtttctgagcagctggtaattgtgaatatttcagcagtcatttttgatgtggaatacttcttctgtggtaaacactaatgagttgtgagttgtacttcatcaaattgacagtttccttacttttgtaaataggcatttgatacaccttgtaaaagctggtaaaagacactcaactyaccttttaaatgcatagaattttccccttattctctttctacattgtgccatccacttttcctataaggaagataatgcaaagaaaggctaccattcactgggagcttaaaaaattcccagaatcattctgggtaccataatatacactatccattcataattcttacagctcaaattagctcagaggaaaaactaagactgtacattggctgggagagtaaacgagtgcaccaagaaattacccgtact

SEQ ID NO: 718417 - DNA, 946 bp, Homo sapiens
atatgcttgttgaccatttgtatgtcatctttggagaaatgtctattccagttcttcctgttttctaaccaggtgatttttttttttttttttttgccattgatttgtaggagttttataattttggctattaactatttatcagataagtggtttgccaatgagagactaaatattaccattttatttaaatattatgtgcacagtcattagtattacaatattatattccccttgctcttaactgggtgaagcgtgcaggttaacatgtgaaattctgtgctcaaattctagttctttgaatctagtttccctgattttaaaattgagaggattgctacctgagacataaacaagattaggaagcatgtaaccccttagcccctgatacatagtaaatacttaacaatttccttcttaaaatgattatttttctataatgtatcggtatcgcatttatatatctacaattctgttataacataccatttgtttacaaactaatttaaattgcccttgaaaaagttaaccatatataaataagttaattcagaagaatgactgcttgttttatttaaaatttaaaacattcctaataatagaaatacatcattcttgaaaatatgcccatagaacccatagaagcttcttatgtaaggattttgtttgaaaatatcaatgtgaaccagctgtaaarataaccattgtacagatatatttcacccatctagaagtcactattcaagtcactattccaaagtaatcaatatctatcatttgagagttatggagaatttcccatatgtagaatgtaatagacaaaagtagctcatacctcataaaattgtgataaggaggatttaattaggttgcacatgataacctagtgtaactaacacagaggatagcccatagtaaagattagatgcattattatcatttgcat

SEQ ID NO: 718418 - DNA, 946 bp, Homo sapiens
atatgcttgttgaccatttgtatgtcatctttggagaaatgtctattccagttcttcctgttttctaaccaggtgatttttttttttttttttttgccattgatttgtaggagttttataattttggctattaactatttatcagataagtggtttgccaatgagagactaaatattaccattttatttaaatattatgtgcacagtcattagtattacaatattatattccccttgctcttaactgggtgaagcgtgcaggttaacatgtgaaattctgtgctcaaattctagttctttgaatctagtttccctgattttaaaattgagaggattgctacctgagacataaacaagattaggaagcatgtaaccccttagcccctgatacatagtaaatacttaacaatttccttcttaaaatgattatttttctataatgtatcggtatcgcatttatatatctacaattctgttataacataccatttgtttacaaactaatttaaattgcccttgaaaaagttaaccatatataaataagttaattcagaagaatgactgcttgttttatttaaaatttaaaacattcctaataatagaaatacatcattcttgaaaatatgcccatagaacccatagaagcttcttatgtaaggattttgtttgaaaatatcaatgtgaaccagctgtaaaaataaccattgtacagatayatttcacccatctagaagtcactattcaagtcactattccaaagtaatcaatatctatcatttgagagttatggagaatttcccatatgtagaatgtaatagacaaaagtagctcatacctcataaaattgtgataaggaggatttaattaggttgcacatgataacctagtgtaactaacacagaggatagcccatagtaaagattagatgcattattatcatttgcat

SEQ ID NO: 718419 - DNA, 1737 bp, Homo sapiens
cctcgtagctgggctcaggggtggatgagtttctggctagaagcgcattgtgggtagagggagaacatatatagaaaggcatgaagatggtggacatgtttggaaagagtgagtactagactgatgaacacgatgagtcaggagcttatgacgtcaggggctactgctagcctagctaatgactgaagattctgtgaaaagaaaaccctaacatttccagctgagtactagggccatggtgattatatatcatctctcatgacaacacaaatgtttgggcttacttatcatcctgctcagtaatcattatgtcactcattaaagatgtatcagggtaaattttaggtgagaattgattagaaatgtaaactctatatatgtagttacaggcttcacagtttgccactcaaacaatatggtcatccaatcatgaggcacaaccttctgctcagaacttttttataattgggagaaagtgacatccgagttccatctcttctgagaactgtgcagctcagaaatcttcttcccttttttgatcccccagttgggtgagatgacattaacagtgtgttataagcacttttcatgtttactaccccatattcaaaattaagcatttcaaacaactgtataattgtctataaatgtagcattattagttaattttccttttaacacattgaggttacctctaatgttttgctatttttaactatgttgaaataatcatgtggtttttattctttgaattattttatattgtaatgttccctgaaatgaaattagttgatcaaaagatgagtaatcttttcatgacttttgatacatgtcactcaatcaccttctggaagagttggaacaagagcctattgctggcatcccatttcatagccatctcaccaatgttggaaaatgggcttttcctattttctgctaattcattagttgttaatggcttattttaactattaatcccttgttattgatgaaagttaagcattttctgtatttttattttctgtctaaattctactttttgcacaatttcctttgctcacttcttcactggaatttagtatttttctttccaatttgyatgactccaaaatcagtgataaaataagcaaagggtctttcttagaggctaaacaagggaatgaataaggaacaagaacagcaaagggatagtgaataaagatacaaaataataacttatttttatttttgaagctttccccaggcagtaattcttgacctttttaagattataaattattttgagatatgcattcttatcctcaaaatgaattagtacataaaatttaaatgggttgatagatcccctgaagtgtatccacaaaatgctctcaggttaagcaacattgttctataataactgctttaaccaaaatgtttaattattgcttgtgtttacctgtcctagcaaagagctaattgttaaattttgtgttagagggtcaatattataaataacttaatgtggcctctctttcctttcctttttttgagagttttgaggctatcactaagtgggctttagagtaccaggtgggaatctgacctcactgctcaaactttcaacttcaggcatgaagtggtcccagtgatgtgggaacctcagagtctaaaacaaaaatagtagactgaggccctcagaaaccagacttatcagattcagaatttaatataactatgtttgaaagatttaaagaa

SEQ ID NO: 718420 - DNA, 1016 bp, Homo sapiens
tctttcaaatcaagccaattcagtaaatatttaagtgtttcctgtgtgtgaggcactcttgggatggaatggcaagttggtctcgtggagacactcccagcatactccctagagcatcctcccacattgggcggaacccattagtttcctcctgcactttcaggtctcatcacaaatgtcgctgacaaataaaaggcttctctctcactctgcaaatggcagggctgcttgcccctgctttccatggttcatggttcctcaggtgcaccctcacagttacgatattatttgcatgttcactgcacatttccttgcttgttcactgactgtctctcttcctaggctacaaattccaccaggacgtctctattgccattcccattctgaacacctggaacagagatataaatcaataaatatttattaaggaaggaaggaaaggagggagggaggcagaggttcataaagtcagggagatcatctaggacacaatttaagtatctaggcaacaaattatcagtgtctccaaaggtaccttatgggggaggaagattttcctaaactatctctttctaaatttcataaaatcttgtcaaaaatataactcattatacttcatatcaacttatattcttgctcaaagccaccaagactattaatagactaacaaatgcttttcttaggagaaagtaccttgtatgctttttataatattttttctgattattaatgtatattcaacgtaaaacatttgaaaactatatacawataaaaagatgaaatcatagtccaatccataagcctgtcaccaagaaatcgggtgttttttagcacattggcatgtttttttcatgtcttttttctatgcttgtctgtgtcatatatttagttgagactgtgaagtatatatgcaatttgttatttaatttttttcacttaacataatgacataattttctcctaccaataatcagtcctgtattattgggtatttatagtatttccattttttcagc

SEQ ID NO: 718421 - DNA, 634 bp, Homo sapiens
ccaatacctttttctagatggccaaattcataagatagtctgttattgagtccccacctacctcaggaactgcattttatttaatttattattttcaggagtgaacctaatagaacagacctatttctagagcaaaatgaaagatttgtggagctctttagctgatccaggtcattgttggttgcctgtgcctgtgcctttattgacatgtattatgcggctctgcgcatgcttccatctcattgctccctctgcaagctgtaataagtctcccttgacaggctgcttagggcgtttacaagacatttggccttttggtgacttatgctttttggttttgatgtgaggggccagggtgatccatcatcccacaataataatgtcagtgctttcctgagtgagcccaaactcttttrcagagtttgaataatgttgagatcaatgcttttttcatctgctgagatgggaagagctgacctcctgatctcttaaacataagctttggcaccttgaatggttggaagccaagccgtaacatcgctctgtgtacctaggtgaagcctcaggttgtttatatttgtgctttctcctgtgtccacagcttctctggaccctgcctctgctgttcaaaaaa

SEQ ID NO: 718422 - DNA, 634 bp, Homo sapiens
ccaatacctttttctagatggccaaattcataagatagtctgttattgagtccccacctacctcaggaactgcattttatttaatttattattttcaggagtgaacctaatagaacagacctatttctagagcaaaatgaaagatttgtggagctctttagctgatccaggtcattgttggttgcctgtgcctgtgcctttattgacatgtattatgcggctctgcgcatgcttccatctcattgctccctctgcaagctgtaataagtctcccttgacaggctgcttagggcgtttacaagacatttggccttttggtgacttatgctttttggttttgatgtgaggggccagggtgatccatcatcccacaataataatgtcagtgctttcctgagtgagcccaaactcttttacagagtttgaataatgttgagatcaatgcttttttcatytgctgagatgggaagagctgacctcctgatctcttaaacataagctttggcaccttgaatggttggaagccaagccgtaacatcgctctgtgtacctaggtgaagcctcaggttgtttatatttgtgctttctcctgtgtccacagcttctctggaccctgcctctgctgttcaaaaaa

SEQ ID NO: 718423 - DNA, 1582 bp, Homo sapiens
aattctgtacctggaatacaagattcaagagcaattctccacctggaattgtgaatggagacctatccttggtgtaaataaatacacacatctttaatttcttgcaaatctctccctttcacacacatgcatatatttgacctgtttaagactagtcacacccatgctgaagaaaaataaaataccttctcattatgaatttttaaaactccatcatgaattgatatagcagtcttcttatgaggacctgtgggataaataactttcatacctcagaaactgaaacagcttcgcctttccaggacgagtttgtttttatcttaaaggttatatgagttgcaaaactgatcatatttttatcttttttgctagggagctcatttttggtccaccttttggtataggaatttaaataatgcattttgggttattaatcttaccaactacttttccccttttcccttccatccttacttttttccatgtctcctcattttttatcagattataccatgtgcatattgcctcttacccattttggaaccaattagcataaaacaaataagcaaaatggttaccctgagtgtgagtttacaagtaatttacttcaggggtttcactaggaacttttgttttttaagttagatattctattattggaattttaaaatttgtttttaaactatgtgtttatacctctctaggccatctataaattttttggggggacagggtccaggcataagtaaatgtaattttacacacacacacacacacacacacacacacacacacacactcactctcactctctctctctctctctctctctctccccccccttactataatttcagtttttggtttgccttctaaagaaacaatttaatgaggtcttttctgtttacttttccattatttgaggacccaatttaatgaggttatttaaggacccaatttartgaggaaggtgcaaaacctcaggcttttgttacttcttgagaaatggcttaagagtcactttaaatgtctgacttatttctgcttcacagccaacatttgaatgtatagttaggtacacaatcaaacacacactaagtatctgaggcatgtatcacaccttagttctatcataatgtgtttttcttgttatcaaaaaaacagaaaatacagaaaaatcaacattattgtagtagaaagttgccataaaatattgaaattagtgtgtgtacgtatattgtatatgtactatagagtatcatttaaactagggggaaatagtaaaactagtattattttaatgtactacatggcacataattgtaatattattgaataatgctacaaacatttttgtatgttcattttccttaggttccgatcagaaagctgtaattcattccaaatcctctcctgagatttctctgagatttgaaagtgggcctggtgctgtaatacactctttacttgcagaaaaaaatggatttctgcagtgccacatagaaaacttcagcactgagtttcttacatcttctcttatgaatattcaacattttttggaagatgaaactgttgcaacagt

SEQ ID NO: 718424 - DNA, 1328 bp, Homo sapiens
ggcagggttccttcatgttggccgggctggtttagaactcctgaccttaagggatcctcccgcctcggcctcgcaaagagctaggattacaggtatgagccaccacgggaagagcattctttagacaaccaggaaaacttgaatttagtgtttatccttaactgagctttgtggatcatgactaacaatcgccaatagcttgggaagtttaagaaggactttttgcgtttaggaagtagagagggcagagataaacaaaggaaccagaaacggagcattgggttccaggaggcacaagaggcagcagaagtgactgaacattgatatcttgagctcaagagctctaaataagcccaggcagttcaaagccgggctctaactgtggctgaaattgctgacctgcgtatagtttataatcttttataacctcacactctaggaaagtaatcttgtgattttatcacagccaaaatgaacattttgtctcattgctttatacctgaggacaaaagaactaaggcattacattagagatgtcaatcatggaggctgccggccctctgtccttcctcagtgaaacagacctgtgcgtagccactgctgagcagactttcctgtgctgccagggccattctgttctcctcccttccttgcctactttgtaactattatttggacagagacgagcacttgatccacaattagctagtgacatattagattattgacttgacattagacagaggttgccatccagttgtatttcttctttcaggtgtttgaaatggaaaatactgagaatattagatagtcggtgactgtagctgaagctgaaagtatgcatagaggctccatgtggggttatgaagagaggacaagcaggagctggcaaagatatcctgccagagactrtatcgccgagaggaaagtgctagagaaaattgacgatcactagaattgccttagtttctgatggcttcctggttccaggtccagttctagttctgctctgctccacatctgtgcttacaaacaaactcatcttttgaggtcaattgaatgtcttttccttgcaatggatgtattagtcaggattttctagagggacagaactagtaggatatatatatacacaaagaggagtttattaagtattaactcacaggatcacaaggtcccacaataggttatctgcaagctgagaggcaaggagggccagtccatgtcccaaaactgaagaacttggagtctgatgtttgagggcaggaagcatccagcacaggagaagatgtaggctgagaggctaggtccgtctctccttttcatgt

SEQ ID NO: 718425 - DNA, 1011 bp, Homo sapiens
gcaactgatacagcatggtccacggcagccaccacaaatcacattgttagcatagactatctggcatatctcaaggctttaggtatataaagacactctcatcaggcaaaatattccaaagtcttactggttatctccaaggaggtatcaagagtcagttctctctttagaatgaatggggtttcaacaccccagatcacttagttcatccttcacagcacagggactaaaccatggtgggctccatgggaagccttgaatgccaggacaaaagtagacagcttaatctagtagcagagtttacaatgggctagacaagaaaagagtagaaacyagagaatcaattccaaactttttgtactcatccaagtaagatactgaggtcctgagaaggcataataaatgaggacaaaggaacatttttgagcagaggaattatatgaagagatttatttaaagttcaatcaggcagcaatgtgcagtattgcactaaaccttcaagaacaggaaagcctgaatcccaacattaaaacttaccagccaagaaaacaccttgaactccctagatagctctttgtccatgtggatagatgatccctacatgtggtgggaggctttcacagttaatctcttgaaatgatttccaacttggtgtgtctaaaactatactctactcaaaacaaatgttgaggtaagatactaacataaagcaataattaaatatttttccagattttctttttttttttctttccatttggcgtttctccccattccagcagtcaggctttctgtgttcaaggatttagaaaatgaatgtgacgtctcacacggagagagagtctctcccttgatttttgtgcattagaggttcaggcacttgggaaaatacaaagggtatacagcttagacaacaaactgacaaaaatatcataaaaacaacttggtctgccctagctttcaccctcaagggtatgccattgaaagggaaggcagagactaaaggacagc

SEQ ID NO: 718426 - DNA, 960 bp, Homo sapiens
  misc_feature 329, 330, 331, 332, 333, 334, 335, 336, 337, 338, 339, 340,341, 342, 343, 344, 345, 346, 347, 348, 349, 350, 351, 352,353, 354, 355, 356, 357, 358, 359, 360, 361, 362, 363, 364,365, 366, 367, 368, 369, 370, 371, 372, 373, 374, 375: n = A,T,C or G
  misc_feature 376, 377, 378, 379, 380, 381, 382, 383, 384, 385, 386, 387,388, 389, 390, 391, 392, 393, 394, 395, 396, 397, 398, 399,400, 401, 402, 403, 404, 405, 406, 407, 408, 409, 410, 411,412, 413, 414, 415, 416, 417, 418, 419, 420, 421, 422: n = A,T,C or G
  misc_feature 423, 424, 425, 426, 427, 428: n = A,T,C or G
tatgaagaacatagacatgccaattgtctaaataaggcaaaataaaataaactataaaaaatagttttagaggttgtaccaagattattaagtgcaagagtggctataccagagccttagtacttttctcctcttgtctttcacaatattttgggtttgtttttgtttttgagaaaggggccactctggtccccgggcgggagtgcatggtggcatcatagatcaccgcaggctagaactcctgtccctagggggatcacccccttcaggctcccaagtaggtgggggatacaggggagggcccccaaccccaccaaatttgtgtcgtnnnnnnnnnnnnnnnnnnnnnnnnnnnnnnnnnnnnnnnnnnnnnnnnnnnnnnnnnnnnnnnnnnnnnnnnnnnnnnnnnnnnnnnnnnnnnnnnnnnntccatttggacaagatgaagatgattttagaaaagatagcttctaaagctgcttaaactccacacatagggaggaatatccacttaaataattctaaatgttgtattatagtttcaagaattccattagtagttctttacattgttgttcagttctaactgtatcagccccttagaactctgtctctgacacttattatgaagtacccattaaatcactcagctgtgttttttctttatatgctcaaatcacaagaagaaagtagcatttttagagctgtatatcatttgtgaacagcttgctatttcttctgaatgacaaatgtgagaaaaaaaaagttttaaatagctgtggctcaccacaagaagtgtagggcataaagttaattgtgtaaaatatagtatgcttttttttwaaaaaaaaggggaacaaacaaaaaagaaacccaatgaagtactacattttaatattttatcttccaagatttatattcttctcccagaagtctagttttgggcattcttacattttt

SEQ ID NO: 718427 - DNA, 699 bp, Homo sapiens
gagttcatcatagttgtgggtttcgtgaacgtgaagttcttgccctaatagtggtgccaattggtaaaactggtcatatccacatttgtcccaatgaatggcttagttatgctatcttccctagtcccctacctcttctcttttggatttgtggaggtctgagaattatggaaagaacaaggatctgcgtatattaaatgagtttttaaaatatcctaaaaatattgtaataaaactgaaatgttattatttatatttatatggcagcatgtcccagcaaagcttcgcaaagatgtcagtattaattgtcaccatcctccagggaggtaagtaatggtatttctaagccaactggtttatttaaatttagttcctatatgcatatgatttttatgtaaatgagctccatgataaaagcaaccctacataacaatagcctaatctgtgtcattctgatggcctgctggtttcaagaattgagcgtaaatatatggaacctaaacaaattgcattctagggttagaatctcccagaaaaatagacttacctttagcatctgagagctattatcacttgtcttgtggatctatggtttaagaaaaaatatattagcrggagctagggagtattcagtgcttaacataagcagctgttaattgtaaaatggcagtcatttatattttcctaaaaatgttcata

SEQ ID NO: 718428 - DNA, 2164 bp, Homo sapiens
ttaaaattttgaggaactatcaaactcttttccaaagtggctattcattttacgttcccaccaacaatatataaagggtccagtgtttccacatcctcaccaactcttactatttaaaaaaaaaaaaaaaacagccttcctaaccggtatgaagtggtatcctattgtagtttcgatttgcatgtccccaattattagtgatgttgagcatcttttcgtgcttattggccatttgtataacttgtttggagaaatgtctaatcagatcctttaccattttttaactggcttacttttgtcttttgttgagttgtaagagttctttatatattctggatacagatcatttattgmatatacagtttgcaaatattttctcattctgtgcattgtcttttcactttcttaatgtgagttctctaaatttgttcctttttcaagattgttttggctattctttcaacaattgtttctgaattgtactactgtactgcttttgttaaatttattcctaagtattttattccatttgatcctaatgtaaatgaaattgtttacttagttttatttttggattgctcattgctagtttatataaatacatttgtaggttgtatcctacaaccttgctgaatccgtcttttctagtagttttttcttgattccttgaatttctgtatacatgatgtcctctataaacaaaggtagttttatttctaaataaaatgttacaaaaactccaagttacttttgaataggattgtttgttctacttttctgagaaaatgaactggttaaaaaagccagggggagaacaaggaagaaagtcaaacctctccctagtctttggattgactttggcagtatttgttggccagctcaatcaaggctcaccactgctgtgactatgaggatttctctatccagatacacctcctttctaaccagagaaatcaggcaaggatatgtatacatctgtgccttatatatacatacatacatacacacacacacacacacacacacacacgtatacatctgtgccttatatacacacacacacacacacacacacacacaccattctctccaccagagcatcctttacttctctaatgtcaaacatcacttactgccttgctaaaagtattgtggcaaaaaaaggaggagaaaatcaaagcaactaatgtgtgatgtgcccaaaggtcatggtgttttgctagaaaaccatcatctctggttaaatgtgaattgcactttcacaacttcatttgtgattttactttcacaatttcaaattagatgtaattttatttttaaacattcagggagttaggttttggtgttctcttggccactcagattctgggcacattgcctgccttcatctaccctctatattaatgccttttcatagcaaagaatagcatagaaacaagtaaaatcagaccgtgaatgagccagaaacatgatgtatgaaaaaccttctctcagattcatcacaactttcaaggtatatgtggatgttaccaaatcacctcccaaattgatctattaatgtcttatttgtcagtctaagaaataacaatatgcaattaatgactactaaggcataacggtttggatccagatgccttaggagaaatttttcctttggggcctatttatatcaagcaacacctgtttcatgtcaactgtaaactgaaagtttgtcagaacaacaaaaacagttcacagttccaaaaacatagagggctctcaaaaattgcttggtatattctgaggtcagtaatgcctatgctgatccactcattggacttctttttcaactagccttttatgataatgactataaacagaaacataaattgggttttgcccattctgtttctacctagggaaaataaaattataacctcagcttccttttacttattttgctatcctaaaaaaaacaggcacaatctgctgggcaactagatacacatgtcatgcatcacctacccccaacttttgttcattaactgaggttaagtggatcctaaaatctgaacattaacttcagattcctgtaatgagattactcttaacacaagctctggtttcctcaattccttaggttctgttagggtagcagggaatccagattgaaccagcaaggaat

SEQ ID NO: 718429 - DNA, 717 bp, Homo sapiens
attttatcatttcatatataatgttttttcattttattaaaccttcttcagaaacattttttaaaggttgtaataatccactggaagggagaataaatctctttctaaccggttttcaagtccctgccaaaaaaaaagacacattgaacacttcactgccaagtaatgaccataagcaacagcgactgaccagctgagagggcttgagccatgctgaccctgtgcaggcatgatgctgtctgcttttgctcagcttsggacatctctctgcctttttccttggtccctcctccagctcatggctgccacaggaggtggggagcataaccagggaagaaatatgctcagcttgtcagaaaaaaaaaaatggtatctgttacccatatgtggggcaagcccaggaattcaaacctaattctctcctgaaatgcaggattgaaataaactctttattgtgcttttccaagcaaaatgaccttcataatttgtaataaatcccaccgttctgtggaacagcatgatgttggattccaccagcaaccaccctttagctacaaactacactgagaaataacactggggctgaactgcttggattttcatacagataaaaagatgatggatgtattattataatttagtccaaattaaaatttaagataggattaatcatatgaccacttttgccatcgtaaccacctggttacaataatttta

SEQ ID NO: 718430 - DNA, 1717 bp, Homo sapiens
ctgtctgggcatttagcttcatgctgcatgcaggtgaggagagagagggaggccaaagggggcccacaagcacacaaggagccctcctgcatgaggccatgaaaagtctgcaggaaggcatagcagatttctgggaactgaggaatctggtgagggcccatagacggcaggatgcttaaaccaggttttgaaggttaaattgactttttttttttttttttttttttgagacagggtctcactctgtcacatagactggattgcagagcacagtggtgcaatcatagcttactgcaacctcaacctcctaggctcaagggatccatttgcctcaggctctcaagaagctgggaccacaggcacatgccaccatgcttggctaatttttttttttttttgtagagatgggatcttcctatgttgcccaggctggtttcaaactcctaggcacaagcgatcctcccacctcagcctcccaaagtgctgggactataggtgtgagccaccacacgcttggcctgaattggcttttaaggaaactgccttgtagaaagagaatagagcatgagctgttagaagttggggtcagatgaggagcctcaggtatccctgccaacggcactgcaggaagaggaaaaactgcctggataggaggagccacayggtagagtgctttgaaggctgtgggcaagggtgtccagggtcgggtggtaaccctgcatatgctgctgtgcctgacatgcatatggtgggattaggtgggaagagtgagcacttagcacaatataactggtatgagcgttcacacatgtgactatgattgtggcagctaccacaggaaagccaggcctttttcaaacaggctgtctgagtgagactcctaagcagggcctactctcatgtctctgtaccagacttcagagtcttttctcccccagacttgtctatcgtcagcctgggatgcccttgcaggccccgggattattgcagtgggtcctctgtgttctatgcccagtgtgccagccaccgctaccacacagagcctctgcttctctgatcaatcacccgagcccgtgggtcattcattccacaaacattcactgagccctgctctgggccaggccctgtgccaaactctgaggactctgtggtcactgtgtgtagaggaaagccagatggcccacttttctctggaaccacccctcttccccatggcttcctccagggttttctgagactctgccagtccacattgatttctccttctgggagcccccagaccactgacccctcccaccaaacacacacatgcacgttcaagttcccatgcttttgtatgtgatagatggagttttgtgtgtgagaacacttgctttgtattcttttgattgtaataaatttgaaattgcaaggcaaaggtagagttcagagggtttcattcttattttactacctgttatttctaggcgggtggatcacctgagatcaggagttcaagatctgcctggccaacatggcaaaaccccatctctactaaaaatacaaaaaattagctgggtgtggtcgctcaggcctgtaatcccagctactcaggaggctgagtcaggagaattgcttgaacctgggaggtggaggttgcagtgagccgagatcacaccactgcactccagcctgggcgacaagagcgaaatttcatcttaaaaaaaaaaaaaaaaaa

SEQ ID NO: 718431 - DNA, 610 bp, Homo sapiens
ctgccatttcttcacttttttttaaagccagggtaaaagcaatgtattatgcatatggaaaaatctttcttgagtattttctcaagagaatactctcttgagtattctcaagagtctaagtaataaaagtaaggaggtcaaagtttgcctactcatgaaagggccagatagaatatatacacaatgtaggtaagaaaaaaaattagcttaatatatttaactgacagttgatcaagcacacctgctggttcaggcaggtgtcaatgccagaaaacactattcaggtaggatatgtgtgtcaggaatgmagtgctcagtaggactactcaataaattaaaaagtaaaagttttagaagaactcagaaattttctaactatattgcagaaatttgaattacttttagtatttttgttgttacatttacatatctttcaatggaggcaatgaaacatgttacttttcaaaattgcttttaaaccaaatggaaatcttagttttaaatgttttaagaggatatgtgttgtcatatttggcctaacagtattatttttattaacattctgatatattattataaatatctgctaaagagaaagtttgaaaaatgc

SEQ ID NO: 718432 - DNA, 1235 bp, Homo sapiens
tatagaaaattatgaatggtgggaaaaaataatggcaataaggaagataattatcttgctacacaaagaacgtgtgagatatgccagggacaacattaggtgacagcaccaacaaggagtgagggtgatctactgggacatcaactctaaaagaagatgaaattttgagagggtgagattagcattgaggagctaggagaataatcatgtgactaatgaattgtatggtataaggtgaaggaactgtcatcatggaagaggggaggaatgggttccagaagtgccccattaagaaccacagaaagtgtaagaaatttgttagtattttggaatgtatggtatcaaaatattggggcatgtagttagcagaggaaaaatgagccaatgaggagaaggcacaaataacctggagtaaagttctggggagtatagacctgagtattttgtgctgtgatcataactggaacaagtgtgaggcagggtgagattgcccttcagcttcccaggcaatgccagggtccagtttgagtgttgggatggatgaaaaaaattaattcaagaatcttggtttctggataacaaagttgaaatgtagtaaggacattagagaacatgggtgcagatacgaaagcaggaacaatgaaaagaatttagctaagaaacatacggtttaactgttttcagttttaccaggcttaaggcatcctatttataacaaatatatttaatgctctctttattatccttaaatgaaatttaggtaatataaattaattttgtgtattcttataaaaatcaatatgttaccttaacagatataataaatataaagaagtattaacaaagtaaattatagaaaaacaatatgtttcaatgtctatacttttttgaaagatcacattagaacagcaaaattgttcccccaaattttaaaatcatgcttccttccttgacaattactgggtgatgtggtttggctccatgtccccaccaaaatctcatcttgaattatactcccataattcccacatcttatgggagggactcagtgggagataattaaatcatgggtgctgttttccccatactattctcatggtagtgaataagtctcacgagatctgatggtttgataaggggttttgactttcacttctctttcattctttcttggcactgccatgtgagaagtgcctttygctttctgccatgattgtgaggcctccccagccacg

SEQ ID NO: 718433 - DNA, 2159 bp, Homo sapiens
ttgggatcctttaaacatggctactatttaatatgcgtagctataaaagccaagaaccaatcagaaagaacatcagtcataaggtgctgaaacagtgttgtggggcacatcccactgtgatgccaggcagtagcccttcaggtgctggcatatgggaaaattcagaggcttttggggatgaggccacagtggccacaatggtgatggggacactctygcagctcaggagatcattattaagccatacaaaagtatttcaggctgggcgcagtggctcacgcctgtaatcccagcactttgggaggccgaggtgggtggaacacttgaggtcaggagttcgagagcagcctggccaatatggtgaaaccctgtctctactaaaaataagccgggtgtggtggtgcacacctgtaatcccagctactcaggaggctgacgtatgagaatcgcttgaacctgggaggcggaggttacagtgagctaagatagagacactgcactccagccttggtgacagaatgagactctgtctcaaaaaaaaaaaaaaagacagatcgaaagaaaaaagaaaaaaatgtatttcaacattttagtaataggcatacacctgttgtacatatccttgagtatcagacctattgtaaaatttgcatttttattctaaaagacaaagatatggattaggtatataaattattaacaacctaagttcagaaaacttgaccaagttccttgggagtatggctagaatatagaggaccaaaagaaataattgcttattctgggaaggctgttagtttcttgtgttacgtcagtgctcttcttttgtctgttttaggacagtctttcagtcatgcattaaatgagtttcttcttggacctcagaattcattggctctcctctgactggtctgtctcagactggccctcttgttgttaggagtttaggcggtgtcaacaagatgtaggtgctgagaaaactgcctgactgctgttgatcttttacagataagatatccccaatctatgatgtctcttaatgaaatacaatgggtttagcactggaatttatagctcctttctgatgttctccatgtaatatacgtttctggggtataagttgtttaagcttctcatccataaaaaaaggtaagtatgctatttcatttatgagaaagaatatttttcccatgatcatcttgaagattttgtgcttgtggcaggagaaatgaggtttttaaaaatgtcaattttatgattcttcaaatagcatatttctctgaggtttccatttttagagtggaatgtgccatttaaacagaatagtctattttatggtgaaaaaattctgatgtcacagtgaaaaaaaaaagagcaataattcaatagtgtagtgtgacatacaccagagaagatagaatagggtggcttggggagcctgaagctatacctatagtcatttatcacttcatattcctcaaactaggcaccaaaatactgatgatttgctctcttgagaactgcacagcttcagggcaccaagctcaatctgcctttgtaggggaagatgcacttggaatatttatctgggagccccttaaagtataaagcttgggatattttcttgaaaattacggtgaagcatctgggcaatgtgatgtgtactgcattgatttaaggctccatgaaatcaaggaaattagctggcagattaaatccaccactccagatttttttgaaaaaaatagttacagtgtgtttcttgaaactgcaataggccgtaaaaagatttgatgctggtttacttacttcgctagcacaaattcactatgagtagttatatctgggataattctccatatttctgaagagtctttatggcatgctgtaaaagatgtaaaatcaataagtaactctaaaaatctgtccatacttcatatttcctcatatttttctcttttctctttctctaacctctgtcttctttccactttcccttacaatctttcttttcctctcacttatttattacctatttcttaaactcctttggttgttattgaacaggattttaaacaattggaagtgaaatgaagttgcaggaccatgcagagaagtgaagtgaaaaaacacatcattatgaaatgtcaaacaggttg

SEQ ID NO: 718434 - DNA, 2159 bp, Homo sapiens
ttgggatcctttaaacatggctactatttaatatgcgtagctataaaagccaagaaccaatcagaaagaacatcagtcataaggtgctgaaacagtgttgtggggcacatcccactgtgatgccaggcagtagcccttcaggtgctggcatatgggaaaattcagaggcttttggggatgaggccacagtggccacaatggtgatggggacactcttgcagctcaggagatcattattaagccatacaaaagtatttcaggctgggcgcagtggctcacgcctgtaatcccagcactttgggaggccgaggtgggtggaacacttgaggtcaggagttcgagagcagcctggccaatatggtgaaaccctgtctctactaaaaataagcygggtgtggtggtgcacacctgtaatcccagctactcaggaggctgacgtatgagaatcgcttgaacctgggaggcggaggttacagtgagctaagatagagacactgcactccagccttggtgacagaatgagactctgtctcaaaaaaaaaaaaaaagacagatcgaaagaaaaaagaaaaaaatgtatttcaacattttagtaataggcatacacctgttgtacatatccttgagtatcagacctattgtaaaatttgcatttttattctaaaagacaaagatatggattaggtatataaattattaacaacctaagttcagaaaacttgaccaagttccttgggagtatggctagaatatagaggaccaaaagaaataattgcttattctgggaaggctgttagtttcttgtgttacgtcagtgctcttcttttgtctgttttaggacagtctttcagtcatgcattaaatgagtttcttcttggacctcagaattcattggctctcctctgactggtctgtctcagactggccctcttgttgttaggagtttaggcggtgtcaacaagatgtaggtgctgagaaaactgcctgactgctgttgatcttttacagataagatatccccaatctatgatgtctcttaatgaaatacaatgggtttagcactggaatttatagctcctttctgatgttctccatgtaatatacgtttctggggtataagttgtttaagcttctcatccataaaaaaaggtaagtatgctatttcatttatgagaaagaatatttttcccatgatcatcttgaagattttgtgcttgtggcaggagaaatgaggtttttaaaaatgtcaattttatgattcttcaaatagcatatttctctgaggtttccatttttagagtggaatgtgccatttaaacagaatagtctattttatggtgaaaaaattctgatgtcacagtgaaaaaaaaaagagcaataattcaatagtgtagtgtgacatacaccagagaagatagaatagggtggcttggggagcctgaagctatacctatagtcatttatcacttcatattcctcaaactaggcaccaaaatactgatgatttgctctcttgagaactgcacagcttcagggcaccaagctcaatctgcctttgtaggggaagatgcacttggaatatttatctgggagccccttaaagtataaagcttgggatattttcttgaaaattacggtgaagcatctgggcaatgtgatgtgtactgcattgatttaaggctccatgaaatcaaggaaattagctggcagattaaatccaccactccagatttttttgaaaaaaatagttacagtgtgtttcttgaaactgcaataggccgtaaaaagatttgatgctggtttacttacttcgctagcacaaattcactatgagtagttatatctgggataattctccatatttctgaagagtctttatggcatgctgtaaaagatgtaaaatcaataagtaactctaaaaatctgtccatacttcatatttcctcatatttttctcttttctctttctctaacctctgtcttctttccactttcccttacaatctttcttttcctctcacttatttattacctatttcttaaactcctttggttgttattgaacaggattttaaacaattggaagtgaaatgaagttgcaggaccatgcagagaagtgaagtgaaaaaacacatcattatgaaatgtcaaacaggttg

SEQ ID NO: 718435 - DNA, 772 bp, Homo sapiens
actttctttggccttaaaataacacacctgaacaatctcagtaataagacccttctctcataaagaaattcatgtagggcgggtgtggtggctcacacctgtaatcccagcactttgggaggctgaggcaggtggatcacgaggtcagaagtttaagaccagcctggccatcatggtgaaaccccgtctctaataaaaatacaaaaattagctgctaggcttggtggtgcgtgcctgtagtcccagctattcaggaggctgaggcaggagaatcgcttgaacccaggaggtggaggttgcagtgaactgagatcatgccactgcactctagcctgggtaacagagcgagactccatcccaaaaataaaaaaaataataattccatgtaagttactctcaatgacaggatattttcttatattgaagttccttactccataatttaaatttrtttattcttttctttgtcttaaaatgagatctaccatacaggacaggaatagataaactggaagtaccataaagaggctatatttttatcactggaatttattcatcaatctctctcttttacataccatattacccaataagtattcaatgaatatttgtttatagaataattgcacagcattgttattcaatatcagtatgctcatgaactgaataagcacatcaaccattttatgaatgcttgctactcaaaatagtcttttggttgtttatatacactcaaatatcaccccatccaataggaaaattcaaaaagaat

SEQ ID NO: 718436 - DNA, 772 bp, Homo sapiens
actttctttggccttaaaataacacacctgaacaatctcagtaataagacccttctctcataaagaaattcatgtagggcgggtgtggtggctcacacctgtaatcccagcactttgggaggctgaggcaggtggatcacgaggtcagaagtttaagaccagcctggccatcatggtgaaaccccgtctctaataaaaatacaaaaattagctgctaggcttggtggtgcgtgcctgtagtcccagctattcaggaggctgaggcaggagaatcgcttgaacccaggaggtggaggttgcagtgaactgagatcatgccactgcactctagcctgggtaacagagcgagactccatcccaaaaataaaaaaaataataattccatgtaagttactctcaatgacaggatattttcttatattgaagttccttactccataatttaaatttatttattcttttctttgtcttaaaatgagatctaccatacaggacaggaatagataaactggaagtaccataaagaggctatatttttatcactggaatttattcatcaatctctctcttttacataccatattacccaataagtattcaatgaatatttgtttatagaataattgcacagcattgttattcaatatcagtatgctcatgaactgaataagcacatcaaccattttatgaatgcttgctactcaaaatagtcttttggttgtttatatacactcaaatatyaccccatccaataggaaaattcaaaaagaat

SEQ ID NO: 718437 - DNA, 1611 bp, Homo sapiens
caacaacaacaaatgttaatttggtgtgtctgacatttttttcctcctcttcaccaattcctctaagttgtcaggctgcccaggtttcttcttgtctggaaagaaagcaatatgtaaaacatatctgtgtttaccatttttttcactcccgagaatactggagttctaaaaaaaaacatgacatggaaacagcaatgtttatcgcaaatgggagaagttctaatgatgaggatttcaggcactgtagtcagacactgagcgaggtctttttggactaactatatgtgtgaggagagtaaaaaggagtttccacagtcctcttcaattcctacgtagagatccgtctgcagcgacgctgactttaacacattcacacttactgagataatgaaaaagaaaagagctttttcctctgtggaattctttttacgacaaacttttcctggttgaaatatctaaaaataattataaatcatcaacatttttccaagagatgctttagacaagttagtcttgggcaactgagtaaaattttttgcatttggtttttcgtttccatggtttcctttctccactcaaatgctagaactggggctgggaagctaccagagtgagaatgccagggrcctatatagttgcaggaacgttgcattataagaagcagaaaattaatatagtctctaagaaggattccagtctcagatgatatttggtggtatccagcgaaattatcctgtagatacttgtagatctgggcttagaatgtttttggtagattgctctaaaataggacgcttgtggaactaaacttcatctttgctttcaaaactgcaagcagaaaaggctggtggtgtgccttattatagatgagaaggaagatctagtactctagaaaaaattctgtttataggtggtatgcaaagcttactacctggaacgtgaaatgaacgaaccgcgggctgtgcttttcaaggtcaaactgcaaacaaagcaagtctgctctcatagccttggtaacagtatttgaatacgcatgataataaatttgttcatatgttttccgtgagtgaaattaatttcttgctggtgatattgcaggttatataaatacataatactcttctttcacctcttcgcatattatcaaacaatccacatttgacttcataacattttgagacagtctacaatcatcaatcctggatattacttcacagctaaagtacttacactaacaatattctgattgtgattttatctttatgttttttatcatatcaacaagggaaattatgggtttcatgaaaccataatgcaatgataaaaacataggacaagatggaagtttttttattctgctgaaaacatatttaatagcagtctaaacacaaaaatgtaaactgctgtcttttggaaaacataacacagggtcacaattttgtaagataaaagtttcaagttattttaataaattgccacattttttcttatagaaaaatgacccatatgcctttgcttttttaaaaaaaaaacaatactgggtatgacttatgtgctatagaagtattagccattattactgtattattatcccttccaccagatagaaat

SEQ ID NO: 718438 - DNA, 584 bp, Homo sapiens
ataaagaaacgtaatacttaggaatgaagcagaaaaaccaacatactagtaattgtgatattcacttaactgtcacttattcctaaccatgtaaagactgtcacatctcaataaaaaaggaagcactctacttttcaaaatttgtcactccacatatgaacaaatatagcaatattatgatactctagataagagctgtgatttttgagatttgaaattgataagaaaagcataaaataacttcagagtagaatataaaagtaaaaaaaaatctatatggtatgttaactttactattaaaaaactgattctgaaaatcaaatatttagaaaattatttcctttgaaaataagaatactgatagtaagttctagaatttggttttcaatagtcaaaatctttcaactcatgatttgataatgggatttctgacaaaatatttgttacactctattgtcttttcaagaaaactcaagatgtcatgaatgataggggccattcaataatatgcagtacccaaaacagtgaggaaagtacaagagactgtattactcttacatttaccacayacaaccaacatttca

SEQ ID NO: 718439 - DNA, 822 bp, Homo sapiens
gacaagagacctcaagtagtaagacgttaaataaatactactgttgggccaggtgcctgtggtcccagctactcaggaggcagaggctgcagtgagctgagatcgcgccactgcactccagcctgcgtgacagagcaagactctgtctcaaaataaatacataaatgcatacatacatactactgttggtattctcaatttaatgctagtaattaatggagtattcaccacacccaagatattatgttaggtacttacaaagatactaaaaaagcaaaaatgtccctgccctccaaaataccattctacaacagaaaagatgcacgcattcaagcaacgtggatggattcctccaaacagttcacagcgctctttaacagaaattatttcacttgaaccacaaaacaacacttcagagtaatacctgttttgtagttgaggaactaaagttcaaagatatactactcaaaaattgaaatataggcagtaatattaagatttgsgccaggtctggtggttcatgctcaggctagtctcctgacctcatgtgatctgccctcctcggcctcccaaagtgctggaatcacaggtgtgggccacatgcctggccaagagtactttcatatattaactgattcaatagctagtactaatttgttaactaactccacgggcattttaaatattaaaattccatttaaaagctaatttactacttgaacttgagactgtcttctattttctcggcattaacttttttagcataaatacacgttcagtaacaagtgctgacatttgatcactttttggatgactcattca

SEQ ID NO: 718440 - DNA, 3564 bp, Homo sapiens
ttttgctctttctaagtggctacaagatgtttactccagctctagccatcgatctgcatttatggcaggaagagaggagaaagagtaaggtcagtgccatgcaatctatctctaaatgactttctttctttctttaaaaaaaaaaaaaaaaagaaatgaattacctgccctgcttgttcttagggggactaggaaatcaggagacaggattgtcatgactggtgtagatcatttaagatcctcactttaggctaggcacattgctgtcctgaagaaaaccaaggagtccttttaggaaggagtgaatgggtattagacagcaattarcaatacccaccacaatgaacatgaaaacgcctttgcaaaaatcataactgagaaaattatacagtaaaagatattagacctacctgaccccatcttgcttctaacctctaaactgtccttgttcattcctgggcataggccaaactagctttggtaagaaatttagtgcatattttaaataatagcccttcccaaaaggctaaactgttcttagaaaacaaatggaaggccaccaggcatcaagtcaagaggagctggaattctagatattacctgccattattctggaggttataagacttgcaacttccccaattactcttgaaggtaacatcactattgtgaacctaagatcagccttttgaaatgtcttttcaaatttttgcatttctaacaaccagatagccccacctggacctgccaaccagttttgtggcccccacccagaaactgattcagcataagagaacagctttgaccccctatgatttcatcccccagccaaccaatcagcactcctgattcattggctccctacccaccaaattatccttagaaactctgatcctcaagtttttgaggagattgatttgagtaataataaaactcaggtctcccacacagctggctctgcgtgaattactctttcctcatcgcaattcaactgtcttgaaaaatcagctctgtctagggagtgggcaagatgaacccattgggcagttacacgctcataatttctaggtgtgttcctccagaaatttgtctgtaaacctacaaataaatgtatatgtatacttttttcttttaaaactcaatagatttcaaaataacatttttaaaatgatgcaaggtatgattttccccttgaataaactcaggtttgctgttttaacaggaagtctattgatattttggggacttcaactcaatctttattcaaagatacatctttcctttcccaagttaagctgcagccagtggttttctgtctttcagaaagaagtgtggtgatttttgctttctctccccacacaatgcctcccctacttgataactattgttttgtgctttgacagcatctaagatggggaaagttgataagagagagaagacaggacaactattggctatgtgcactttagtttagcaaatggtaaaagacgattcttggggcacatttcgtgagttcccattgctgcactgctttcctgcaattctcttgacctggtcagatgcctctattttagctggctgattgcaacacctttttctggaatctggctttcacttccatgtacttactacatggtctcaccattcctctaggttgttctgttggactatagataagatcaagtcatacttagactttctataggcaatgcttaccatagaaaacatccagatgtaacttgcttcttagaaacttgaaagaatcagacaaagtatatatttacttattttctgcagctacaggcaacataaattttctcagatgtgattaatgctctaactataaactctccaagtgttgaaactgcctttgcaaagttatgactgagacagtgaaggagatctaacttaaccgactccatcttacttctaacctccaagctgtccttgttcccttctgggcgtaggctgaactagctttgggagaaacttagtttatagttcatagtttatagtttaaacaaagatgataacagccctttcccaaagcagacctccttcttgcctggggactagattgtgtttgtaggactaacattagccacaagattagaaattatggtttaggagtcatgcagctggaagctacaagattctaaccctccctaaactgcttctaagatcagtgcttgagatattttgcagaccctgcacttgatggatcagctggcaccacccagatcaataaactggcccatctgaacttgtggcccccaacctaggagctgactcagtgcaagaagacagcttcgactctctgtgatttcatctctgaccagtcagcactcctggctcactggcttcccccaacccaccaagttatccttaaaaactctgttccccaaatggtcagggagactgatttgagtaataataaaattctggtctaaaactctgttctcccgcacagccagctctgcgtgaattactctttctctattgcattttccctgtcttgatgagttggctctgtctaatcagtgggcaacgtgaaccccttgggcggttatagtgttcccaaaactcttcatatcccaggcttgaagtgaagcagaaagtgttccatcttctccaccaaaagatgtagcgggcacatgtaagtggcaaacatttcctttcaaaaattctctagcaaatcttttaagtttctgatcacttcttatatcttacctgaacgagagtgcaagaatcataaaagcagttctagaccatttgcattacaaatgttgcacatgggaacctgtctacttcttcaatattaaactattgtattggcgtctcaattttaccttccctttattgatccaaagggcatactccatttccagtgttcttcattcttttgcatacatccatatttcaatttgatatcattttcttttaaataattttctttaacattagttgtagtgcaaatctgttggtgatgaattctttctacaattttatgtctgaaatggcaattatttctccttcatttttgaaaaataatttgaccttgagtagaattctaagatgatagatttttctttcagtattttatatgttctgttccactgtgttttggatatgttgcttcaaatgggaaatatactattattctttgttcatctgcacaaaatataagcttttaattttttctctgtcacatttcaagcaatttgcttatagtactcttgtttcaagtactagggatttgttgacatttttggatcagtgggtttatagctttcataaaataaggaaaaatttcggctattatttcttcaaatacttttttgtctctcacctttctctcttggacactccaattacatgtttagtagactgcctgaaattgcctcacagctcactgttgttcttttcgttttactttctgtatttctttttttctatctatgttttattttgaatactttctattgctttgtttttaggttaactaatcttcttatctgtagtgtctaatctgctgctaataccgaccaataaattttttatttc

SEQ ID NO: 718441 - DNA, 638 bp, Homo sapiens
ggattcaccatttcatatgtaggcaggaaaagttcctgagtgcagcactccttggctccccttctgtgtgggctagaaggaactcagagatgagtgtgtgtacctcaagagggtggctggcatgggaggaggggttctgccaggagtggctgctgcattggggttgaaatggctttgaagcagattaatggggccaagtgctggggccaaagaaagtcagagtcacaggtgagtctcaggaggtatgcaggacccattaggaagaaaatccagcctatgcgatgtagaaccaaggatgtacaacactttccttgtgcaccagaggtgaacagtgcatttcctggaagtgaggagggcccaggcagacagacyctgccataagccagggtcagttaagacctgcatgtagcagaagaccctgacaggcagacaggggaactttcctcaaagtttcttctttacacaccacactcaacctcaccttcggggttagactagcttgaaatctaagagatacaccttttacctaaaagcactgtttccaacattgcatcagattgcatgactctattggactttatttgtgctcatgacctgtaggagagaaactgcaggaagagccaattagctacaataac

SEQ ID NO: 718442 - DNA, 1137 bp, Homo sapiens
tcttttgcttttaaacctttccagagatttgattatatgttattagcatgaagattcattgaatatgaacccaggagacaaaatagtatatttagcttcaagactcttcctgagggggtgtgtgtgccttgtttgcatgtgcctatgtgtttgcctgtgcacatcaatctttctttctacgtgtgcaagaataagaagagaayactgacttctttgtccagatctcttcagtagggaacaaaccttatctaggacccaggacaatggctttttaaacttactttaatccccttcccttcgggaaggcatgaaaggaatactgtactttcagtatgaacccagcatcgaagtcttggaacaagcctctcaggggtcttaattaacaatcatgtatctaaaaacagttgatggttttcaggattgccgggaaataacaccccctggcatttcctgcctgagaacttcctcaccatttccagttcatgggtgtgaagcctttggtgaactgtcagtcatggaaaggagttggggggtgggggaaacgagtggacccttgattggatgtcctcttcacgcacactgtatgatttacgttctgtagtgcaccggtggtgagtcaggcttacccccacggtaaagacagggaagcagacacagatgaaagtgtaattcacctaggccagggcagctacatcatttgagccctgaactatgcaaggtcaaaggacgcgtttctcataccaccctttgtttatagtctcataaatgtatgtgattcaggtttccaccgaatcttagcagtgaatagtgcttgaatgctccaagacacatttttagttgttttgtaacaaatgtcattttcccattgacagaaataaacaacactgagatattttccccatgggtaggattcacatcagcgactatcacttggtcgggaagtttattcattgtgcaattccacgaagagccaagtcatctgccgttgtcatagaggaggaagtggagctgtgagcactgcctggcttgctgtctgacagatttggtggtccccatgtggtccctgcagcaagatggctttcaggcatgcaccactggcagctccatgggacaccaagcagttcccatttatgcgcc

SEQ ID NO: 718443 - DNA, 1137 bp, Homo sapiens
tcttttgcttttaaacctttccagagatttgattatatgttattagcatgaagattcattgaatatgaacccaggagacaaaatagtatatttagcttcaagactcttcctgagggggtgtgtgtgccttgtttgcatgtgcctatgtgtttgcctgtgcacatcaatctttctttctacgtgtgcaagaataagaagagaacactgacttctttgtccagatctcttcagtagggaacaaaccttatctaggacccaggacaatggctttttaaacttactttaatccccttcccttcgggaaggcatgaaaggaatactgtactttcagtatgaacccagcatcgaagtcttggaacaagcctctcaggggtcttaattaacaatcatgtatctaaaaacagttgatggttttcaggattgccgggaaataacaccccctggcatttcctgcctgagaacttcctcaccatttccagttcatgggtgtgaagcctttggtgaactgtcagtcatggaaaggagttggggggtgggggaaacgagtggacccttgattggatgtcctcttcacgcacactgtatgatttacgttctgtagtgcaccggtggtgagtcaggcttacccccacggtaaagacagggaagcagacacagatgaaagtgtaattcacctaggccagggcagctacatcatttgagccctgaactatgcaaggtcaaaggacgcgtttctcataccaccctttgtttatagtctcataaatgtatgtgattcaggtttccaccgaatcttagcagtgaatagtgcttgaatgctccaagacacatttttagttgttwtgtaacaaatgtcattttcccattgacagaaataaacaacactgagatattttccccatgggtaggattcacatcagcgactatcacttggtcgggaagtttattcattgtgcaattccacgaagagccaagtcatctgccgttgtcatagaggaggaagtggagctgtgagcactgcctggcttgctgtctgacagatttggtggtccccatgtggtccctgcagcaagatggctttcaggcatgcaccactggcagctccatgggacaccaagcagttcccatttatgcgcc

SEQ ID NO: 718444 - DNA, 1225 bp, Homo sapiens
tattagcatcagtggtagtaacgatcattgattatgtacgtaacatttgctaccataaacactaaagtttttctatttattatctctaattcatacaagaatgttcaagatgagaaatgtttttcttattttaaatatttaaaaaataaggctcagattaattaagtaacttggttaaaggcacgcagtaaatgttggatttgtattgtgaatgcaggttaacctgttccaatgaaataaatttttttcctatttaggagctcttttacaaacatagttaactgattyttggaagaaaatctctgagaatagtttaaatatgtatgaaccttaattagtacatagtacctagtagtaccattgggaaagtaagggtttcttttttacataacaggacaagaaaattattgtcatagaaaaaaaccaagcactgggttttataacttatctatgtaattcttcctctttttctgcctgctttgtgaagaaaatgacataagcaaatgtgctcacacacacataagcacagctttttccaagatagagattctgtcctcttgttctaatttggaatattataaaaattaaaccagaacctttgttctaatttgggatattacaacaattaaaccagagaaacatagctgaacataaaactgaaacagaagtgaagatcacgctgtctgttacataaacttcactttcaatcccagatcaatgcattgagagagagagtcaaatatttatctcagaaaaatgccagaggaggaaaggaaggagctggaagggtgatgtccacacatcttgccatggcacctctgcctgttagaagacctttgggtttcaccatttttttcttttcatcctagctcattctcttcagcacaaatggttgggtcatacaaagaagctacacaagtaagaagggacatgagggagttccttgattattcatgtctctcagaacattattagttgccttttatatgcagacaaagtagtaggtgtggtgcaggtgtattgaggaggagtgggggttgtaggtgtggaggtggctggtgtggtacaggtgtactgaagagctgtggtggtagcaggtgtggaggtggtagatgtggtacaggtgttttgaggaggcatggaggtggcaggtgtggtgcaggtgttttgaggaggtgtggaggtggcaggtgtacaggtgtattgaagagctgtggtggtagca

SEQ ID NO: 718445 - DNA, 617 bp, Homo sapiens
cataaagtggttttccagtggagaaataaggatgagaaataaaaatgtgttaccaaatatttgtggtataaaggagtcactgttgtccaaaccaaaaaacaattcgctagatctctaatctctcagaatttttaaataaaaacccggatttttaatcactttgctgaaaaataaaatctttatcttaggtatcagggcaaataaaagcattttggggggtggggggkgctgtctctgtcctctgtaagcaggacctttaaaattgagttgatatgttattacctcgctctcccagaccaaagatgatttcatcaaacaattcttgacagactcaggtgaagtttattttgcttctgacccagtggtgatgttcctgtgagatcttggtacatatagttcttatgataaatatctttagatttgtgcaggagagcagaagaaaagaatttgttgaggcaaaattccttgatttgaatttgaacctgcactcatcattaggcagtctataaaacaaggtgcaatcaaataaattgagcatagcaatattttttcagcattattgtcctaactggccagcgagctttgtggatggttttaagtggtttggctggtctttt

SEQ ID NO: 718446 - DNA, 610 bp, Homo sapiens
gtaatcccagctactcaggaggctgaggcaggagaatcgctttaacccaggaggcggaggttgcagtgagccaagatcgcagcattgcactctagcctgggcaacaagaacaaaactccttctcaaaaaaaaaaaaaaaaaaaagaaagaaaccctgtctctactaaaaaatacaaaaaattagccaggcgtggtggcaggcaggcgcctgtaatcccagctacttgggagggtgaggcaggagaatcccttgaaccccggaggcggaggtttcagtgagacaagatcgcaccactgcactccagcctgggcaacaagagcaaaactccatctcaaaaaaaaaaaaaaatgacaaaagacaggcatcatttaaacctctgtgctcagccacacctgaagcaaacaagatctgtcttttccattttcttagacaaagaatttttctttgcaaaattacatgacttatttttyttaagcaactttgaggtaaatttttgttacctgcacttggaagatgcctaatacttgctatgtctacttggagtaggattgcttgggttcggctatgtccctagagatgtcttttcttcctccatgaagcttgtcgtta

SEQ ID NO: 718447 - DNA, 609 bp, Homo sapiens
ggtaaatcttgatggacccataccatggaatactactagcaatataaaggaacaaactgctgatacacacatgaatcaacaacgtggatgaatcttaaaacccttatgtgaagtgaaagatgacaggtacaaaaggctatatagtttgttattccatttatatgaaatgctacaaaaggctaaactgtaaggagaaaaatcagaaatttctgctagggggttagaggaagagaatgactatagaagggcatttttttaaaagatgacttttactatatgtaaattatgccacataaccattaattttaaaaatataaaaatgcatatattttatttgtagattcaacagacatgaattcactctgcccagttgctattgaagtttccaaacacttactcttcccatactcatctcttccctgcttggtaacagtgtatgagtggcaagttcacagctgaagcttggggtcaggacagtatacctacatttggaaggttatrtaaagtaataatagtgcctggggaggcgataccatttatgatcagtaaaatccttttttaattggagtgacatcttccaaaggaaataatttgaaggataaatcttta

SEQ ID NO: 718448 - DNA, 677 bp, Homo sapiens
ttgtgaaccttcattagcttccttatatgtgtccgttacccatcaagtctctgggcaacatgttatgccttgaagttgcttgttcttgcagctgctgttgaagtctggtgtcacagctagagcctctgaccttgaggtccccaattcttttttcccctcaaccaggacccaagcctccattaatttaccatttcctcatttttaattccccctggtgcatctgaaaccaagctagtttttaaacaaggatttattagaagtgcaactttagtaataataaaygagaatatcacaagtaacacataaatagttagaatgtagaagaaaaagacattaaagcgtatttatattagaagtccaaattaaagagaacaaaacttaaagaggtatctaatagcagttatgcctcttacctaaattctgccttaattgttaatcacttcctgttttcttccaggtcccttatcttaggagctgcctgttctaaagataactgactgtcataatatcttagccttttaggaagatttccccttcatacagtgtatcatcagaatatcataattcaactacccattttatttataaaagaaaaaatacagtatcaagtgactcattttcttcagttttaaatagcaagctataaaatatataaaataaacaaacttttttaaatg

SEQ ID NO: 718449 - DNA, 2119 bp, Homo sapiens
tatttatttttttaaaaacttttattttaagctcaggggtacaagtgtatatttgttacataggtaaattagtatcattggagtttgctgtacagattattttatcacccaggtattaagcctagtaccygttggttattactttgctgacatttgttattgtcagtgtgtaagcttttggtttgtgtggtgtatatcgacctttaagagtagatgccttggacaccatttgatcttgccctctctatttactctagctagactgaatcctggagggaagggggtatattttagtatgctgaattcttatcaagcacttgttatgtgctagacactatggcaggtgtcagaacacagcaccattgtatttgactctggggactcacaacttagcagaccagataaataagtgaataagtaaacatggttattaaataatgcagtaagtaatacaggtatgtgtaaagtgctatggccattgataaaaaaattgttccctagaacagtggttcttaaattttagaatgcatcagaatcatgtggtgagcttgttaaaattcacattgctggtccttatcacacaaagttttggattaaacagagtctaaagtggggccccaagaagttgtattctaacaagttcccaggtgatactgctgctctggcccagggcccacattttgagagacagaaatttgtcttaaaggatagataggagtttgtcaggtgataaatgagaagagttgtgaaacaaggaagagcatgaacaaagacatggtgaggaatgtgcatggtgtgctcaaggaatggccattctcatgtacgaccagggcacaacttaatttcaaggggaaaagtggatattttatgttagggccagactacaaaagaccttaaatacttacctaaggagttatgtaggcagtagaagtctgtattttaaaactagattgtgtttggggaaaaaaaaatgctggcaagagatcagtagctgaaaatgtcggcaagatgagttaggggactattgcaatagtccagatgaaaaacaaatgaagactatggttgggcaatggagatggacaatagaaagatttgaaagacatttcagaggttaaatatctaaaacctggtaactagccggatgtgtagggagacaaaggaatccagaatgagaacgggtggatggtagtgctattaaccacgacaggaattacacaaaggaagagcaagtttgctggtaagatattaatctggttttggttactggatcagaataaactgtgaaacatctatatgactatatcaaccatgaagttagaaaatgggaagagaggcagcactaggatatgtcacaggagaggttaaaacaaggtgaaggatatagtgtaagaagtgaatcgagactggaacccagagtgttaccaaaattaaataggtaaggcttgtctgaagtcagtagtgtctacaattaattgatcacaaccagttacagatttctgtgttccttctccattcccactgcttcacttgactagccttaaaaaaaaaaaacaaaaaagagaaatacgtaagtaattctggagccagtgaaggtagctagcaagaagtagacaggtaaaaccaggacattcacatataataaatgttaagaaaagaggtttcagaaaggaagaacagaagaaacagttaatggtgttatatatctaaaggctagaaagaatttagtctaaaaagcgatctgttgatttaatgactttggcaatgagtcagatttaatgacctttcaatggagttagaagaatgggttgaagaatgaattggagatgagaaagtgaggtgactagggtagactatacacttaggagccttggtggtaataggagagggaggacaagggcagtggctttagggagaggcaagacgagaaaaatttcttctggaggccttcagaaatctcaagataaacaccaagagtttccagtgattaatcagtatttattctgcctacctgacttgaaatatgcaaaacacagaaaaccattgaattaactactactgatccattcgtagtaggcaatttgaatgtgctatcactctggtatctttctcaatacattca

SEQ ID NO: 718450 - DNA, 2119 bp, Homo sapiens
tatttatttttttaaaaacttttattttaagctcaggggtacaagtgtatatttgttacataggtaaattagtatcattggagtttgctgtacagattattttatcacccaggtattaagcctagtacccgttggttattactttgctgacatttgttattgtcagtgtgtaagcttttggtttgtgtggtgtatatcgacctttaagagtagatgccttggacaccatttgatcttgccctctctatttactctagctagactgaatcctggagggaagggggtatattttagtatgctgaattcttatcaagcacttgttatgtgctagacactatggcaggtgtcagaacacagcaccattgtatttgactctggggactcacaacttagcagaccagataaataagtgaataagtaaacatggttattaaataatgcagtaagtaatacaggtatgtgtaaagtgctatggccattgataaaaaaattgttccctagaacagtggttcttaaattttagaatgcatcagaatcaygtggtgagcttgttaaaattcacattgctggtccttatcacacaaagttttggattaaacagagtctaaagtggggccccaagaagttgtattctaacaagttcccaggtgatactgctgctctggcccagggcccacattttgagagacagaaatttgtcttaaaggatagataggagtttgtcaggtgataaatgagaagagttgtgaaacaaggaagagcatgaacaaagacatggtgaggaatgtgcatggtgtgctcaaggaatggccattctcatgtacgaccagggcacaacttaatttcaaggggaaaagtggatattttatgttagggccagactacaaaagaccttaaatacttacctaaggagttatgtaggcagtagaagtctgtattttaaaactagattgtgtttggggaaaaaaaaatgctggcaagagatcagtagctgaaaatgtcggcaagatgagttaggggactattgcaatagtccagatgaaaaacaaatgaagactatggttgggcaatggagatggacaatagaaagatttgaaagacatttcagaggttaaatatctaaaacctggtaactagccggatgtgtagggagacaaaggaatccagaatgagaacgggtggatggtagtgctattaaccacgacaggaattacacaaaggaagagcaagtttgctggtaagatattaatctggttttggttactggatcagaataaactgtgaaacatctatatgactatatcaaccatgaagttagaaaatgggaagagaggcagcactaggatatgtcacaggagaggttaaaacaaggtgaaggatatagtgtaagaagtgaatcgagactggaacccagagtgttaccaaaattaaataggtaaggcttgtctgaagtcagtagtgtctacaattaattgatcacaaccagttacagatttctgtgttccttctccattcccactgcttcacttgactagccttaaaaaaaaaaaacaaaaaagagaaatacgtaagtaattctggagccagtgaaggtagctagcaagaagtagacaggtaaaaccaggacattcacatataataaatgttaagaaaagaggtttcagaaaggaagaacagaagaaacagttaatggtgttatatatctaaaggctagaaagaatttagtctaaaaagcgatctgttgatttaatgactttggcaatgagtcagatttaatgacctttcaatggagttagaagaatgggttgaagaatgaattggagatgagaaagtgaggtgactagggtagactatacacttaggagccttggtggtaataggagagggaggacaagggcagtggctttagggagaggcaagacgagaaaaatttcttctggaggccttcagaaatctcaagataaacaccaagagtttccagtgattaatcagtatttattctgcctacctgacttgaaatatgcaaaacacagaaaaccattgaattaactactactgatccattcgtagtaggcaatttgaatgtgctatcactctggtatctttctcaatacattca

SEQ ID NO: 718451 - DNA, 2119 bp, Homo sapiens
tatttatttttttaaaaacttttattttaagctcaggggtacaagtgtatatttgttacataggtaaattagtatcattggagtttgctgtacagattattttatcacccaggtattaagcctagtacccgttggttattactttgctgacatttgttattgtcagtgtgtaagcttttggtttgtgtggtgtatatcgacctttaagagtagatgccttggacaccatttgatcttgccctctctatttactctagctagactgaatcctggagggaagggggtatattttagtatgctgaattcttatcaagcacttgttatgtgctagacactatggcaggtgtcagaacacagcaccattgtatttgactctggggactcacaacttagcagaccagataaataagtgaataagtaaacatggttattaaataatgcagtaagtaatacaggtatgtgtaaagtgctatggccattgataaaaaaattgttccctagaacagtggttcttaaattttagaatgcatcagaatcatgtggtgagcttgttaaaattcacattgctggtccttatcacacaaagttttggattaaacagagtctaaagtggggccccaagaagttgtattctaacaagttcccaggtgatactgctgctctggcccagggcccacattttgagagacagaaatttgtcttaaaggatagataggagtttgtcaggtgataaatgagaagagttgtgaaacaaggaagagcatgaacaaagacatggtgaggaatgtgcatggtgtgctcaaggaatggccattctcatgtacgaccagggcacaacttaatttcaaggggaaaagtggatattttatgttagggccagactacaaaagaccttaaatacttacctaaggagttatgtaggcagtagaagtctgtattttaaaactagattgtgtttggggaaaaaaaaatgctggcaagagatcagtagctgaaaatgtcggcaagatgagttaggggactattgcaatagtccagatgaaaaacaaatgaagactatggttgggcaatggagatggacaatagaaagatttgaaagacatttcagaggttaaatatctaaaacctggtaactarccggatgtgtagggagacaaaggaatccagaatgagaacgggtggatggtagtgctattaaccacgacaggaattacacaaaggaagagcaagtttgctggtaagatattaatctggttttggttactggatcagaataaactgtgaaacatctatatgactatatcaaccatgaagttagaaaatgggaagagaggcagcactaggatatgtcacaggagaggttaaaacaaggtgaaggatatagtgtaagaagtgaatcgagactggaacccagagtgttaccaaaattaaataggtaaggcttgtctgaagtcagtagtgtctacaattaattgatcacaaccagttacagatttctgtgttccttctccattcccactgcttcacttgactagccttaaaaaaaaaaaacaaaaaagagaaatacgtaagtaattctggagccagtgaaggtagctagcaagaagtagacaggtaaaaccaggacattcacatataataaatgttaagaaaagaggtttcagaaaggaagaacagaagaaacagttaatggtgttatatatctaaaggctagaaagaatttagtctaaaaagcgatctgttgatttaatgactttggcaatgagtcagatttaatgacctttcaatggagttagaagaatgggttgaagaatgaattggagatgagaaagtgaggtgactagggtagactatacacttaggagccttggtggtaataggagagggaggacaagggcagtggctttagggagaggcaagacgagaaaaatttcttctggaggccttcagaaatctcaagataaacaccaagagtttccagtgattaatcagtatttattctgcctacctgacttgaaatatgcaaaacacagaaaaccattgaattaactactactgatccattcgtagtaggcaatttgaatgtgctatcactctggtatctttctcaatacattca

SEQ ID NO: 718452 - DNA, 879 bp, Homo sapiens
tacattatgctgagcatagtaggtgtttagttcactaaatatttactgctgatattgatagagaaacctcacttggatgctaatgtaaggctttcaggaatgcaagaataaagaaaagatgagtataactcttctccatagcatggagaccttgaggccttttacaaaaatggaaaacgatgtgaaatctggggagtcagagagattctgagaagggtataacaataataccaagaaccatgactcatgtagtatgttggaatttctgaaggcaaagaagacaaactcagcagggtacatgaaagtatgtaactcaactctgccaggtgcagctcaaagggcctgcatggggaccctaactgggaaggaagttgtagtggagtgagaagaccacaggaacatatttcagccattcactggtgtctgtgtctctgactgtcacgctagcccaggatgcaggcagaagtggcaggtgcctccatgcacagtccctagtgtgggaggcaaacctaccaggggccctgagcagctctgtgcattcttgtcaggtatgccaagaagcaaggctctgactgctctttatccaggccatttctcagggttgtgtttgtaatgagcaaccttgagggatcaggtaacatcttcccctagacaaagaacaggcttgttacaactcactataaaagcagtggacttaccaggctcaggattcctctccttaaatggtagcccactgtgtgtgtgcaaacatccataaacatccattatgggactttcattcccctcatggcacgtggggcatggaaaccagtaaaagctcaatattaagttctgattactgcttttgccatgagtaatcaagtgttttttytctgaccc

SEQ ID NO: 718453 - DNA, 1003 bp, Homo sapiens
tgtggcaactgccattctttggctacatttcaagcggatacttcttggttccctcatgtttaagcttttaagaaatgctcagctatgcaatttccacaaagtcaatcaatgatgaattcaaagctgtaatgcaagatgagacagatttgcttccaaaggtcaagatgtcagaaaatccaaggccaaaatcaccttagatcacccttaggtttatcttctacacctgttggccatatcgctgcctccagtcccgaagcagcatttatacacctggcaactaaataggtattcatctacttgttagaaaacttatgcaaggtaaagggatttagtaaaaagtgccaagtcctaaatcaacagaatttccacttacattgcaaatgaaagggtctaaaacagagaattccaatcacagacaattactcattcattgatcttcccacaccatctatcatttctatatgatgaaacttcggctcacttcttggtgcctgtctaaccctctagattattacagtactatttttggccatgcactatgcatcagacacctcaactgccttctcttcagtcgctcatatcagccgagatgtaaactacggctgaatggtccgctatttttatgctaacrgcacttcaatatttttcatctgcctcttcttacatgttggccgaggtctatactaggtatcatttacatttctagaaacctgaaatatcggcattatcctcctactcacaactatggcaacagcattcataggctacatgctcccatgaggccagatatcattcggaggcgctacagtaattacaaatctactatcagccatgccatctattggaagtgaccttctgcaatgaatctctgaggtggattctttcctcttactgactgaccttgtcttttgaaactatgacttccctcatgtctaaggtaaacttttctccttatatctaaggtaaactgtttcaaccagaagcacatcttccatgggtctcc

SEQ ID NO: 718454 - DNA, 1030 bp, Homo sapiens
catttataaaatatttcactaaataggaaggttgtagctctgcagtagtttaaaaatggtaacaatggccaggtgcgatggctcatgactgtaatcccagcattttgggaggccgaggcaggtggatcacgaggtcaagacatcgagaccatcctggccaacatgatgaaaccccgtctctacttaaaacaaaaaacaaaaattagctgggcatggtggcacgcacctgtagtcccagctactctggagactggggcagaagaatcacttgaacccgggaggtagaggttgcagtgaaccgagatcgtaccactacactccagcctggaaacagagtgagactccatctcaataaataaataaaataaaataaaataaaataaaaatggtaacaactaatgtcctctttcataaagtaaaagtgagtacactgtatttccagcatagatgagggttttcatgatacaaagtaaccaaaactaagttcagaagaagactggatactagggctgataggactacagctgctatctgtaaacccccaaytgaaagttttggtttgtcagaatgtccccattttcagttctcactggctatcattttaacaagaaaatattataaatttggttcaatatagtgaatatatactaatactgtttacttcgtgtattggggttcttcgtaagatgccattacaattttatgcaggtagtgatcttactaatatgtagaatctaaaatgttgagctcttggaagcagaaactagaatgatggttaccagggactggtgggtggtgggattggggaggtgctggtcaaaggatacaaaattgcagataggtaggaggaataaattcaggaggtctgttgtagaacatggtgactatagttaataacaatgtattgtatacttgaaaattgctagaagagtaagtagattttaaatgttttcactacacaccaaaaatttgaggtacagtactggtatgttgttaattagcttgatttagctagtctacaaaggtacgc

SEQ ID NO: 718455 - DNA, 1302 bp, Homo sapiens
aaattcaatttgttgctgtatgtgaatcttatatcctacaaccttgcttaacttggagcatataataacatatttgtagattcctcaggattctacataccagatcatgtcatctgtggataaaagctttacttcttcctttacaatcccaatccatctttctaatcaagtctctgtcaaccccctttcacatgttataccattgcctctacactgaagtaggaggcagcccatgaataccctgaaaagatttgttctaatcctaatacacactggaaataagcttaagcatacatacattctgaatgcatagacatacacacgctcctttgcctttgttcaacttcctttctctacctgacatactttttcttctcatttcaacataaatcagattattttcacatttcaacacctaaaccaaatcccctgtccttaattaagccttcccttgctcaccaactcttgaaaaaagtcctctcctctgtataaataaatgtcaaaaagacttttgcggtatggtatatatagtgtaaatatacaaaacaaataagcataatgttactcacgccttaaagcttccaaaggcaataatgtttaacccatcatgaagtgttttaagaaaattgaccatagtgactgctgaagctgtatttataaactgcaccaaaacatataacagtgaaatccattcaacaaagggaagaaaagttaaacttagacacttgggagcccgctttgctttaacagtttcaactgccctctggaaaaaacaaacaaacaaacacacacacacamacacacacacacacacacacacacacacacacacacgcacacacaactgaacactggccccaagagaagtgaccaaaagatatcaaggggcctcagagaattctgataattccttcaccccatttttaatagttttcattgaaatgtccctcagaaaggggcagcaaattcaacaattgtgggcaagtgcttgtgatgtctgatataacaacttggcaaccggtcaaagaaaacgaggtcagataagagggagacagggcaaggcaaagccctgcgtgacagattgcttgctttactattaaatactggagtagtttctcgtggtctgtgtttactgttctaagaactggaacagacggggggagacaaatgttctgagaggcgaaaggacctgaccaaggtcaataaaatgatgttcaataaagtattgttttagaactctaagtcaggactaaatttctagtcttctgtctctcaggagtaaaagcctgggagaaactcagg

SEQ ID NO: 718456 - DNA, 968 bp, Homo sapiens
ctctactaaaaatataaaaaaattagcgtggcagcgggcacctgtagtcccagctactcgggaggctgaggcaggagaatggcgtgaacccgggaggcagagcttgcagtgatccaagatcgcgccactgcactccatcctgggtgacagagcgagactcaatctcaaaaaaaaacgcaaaaatcttttttagccttytcttcagaatggttaaaatatattggcaacaaaaaaaatttttacaaatgatttaaaacacaaattatttgcttattatttttcacagtaataacaaagaatatagacactatatatgttccaatcacattgatcatgcagaaaataaatattctttggtactggttttcctttgatcacaaacagatatgagggcaaaatgtcttatcacttatttacaaataactgatggccaaaatggataattgtcatgatagaagttattgacactggctgggtggggtggctcatgcttgtaatcctagcactttgggagaccgagaaaggtgggatcacctgaggtcaggagtttgagaccagcctggtcaacatgtagaaaccctgtctctacataaaaaaaaataaaaaataaataaacactctttggttttggtggtgggcacctgtaattccagttactttgggaggctgaggcaggaaagaagttattgatacaaatatttgcaaaaataaaaagttatttgatacccacaaacaattccaaagtatgtccatgtgctaatttgtaaataggaaggaagttcttattttgaaacttgcagcctggaaaatatttataaggttgttatgacattgataactggagtacttcctatatcaacttactggaattttggagactgactttaaaatataataaaaagggaaagacagggaattgaacttccttctcatgttttttacaaattttacagggagccagagtctca

SEQ ID NO: 718457 - DNA, 515 bp, Homo sapiens
tgtaaaaaataatacagtaatactcacagataatactaacatttattgagtaggttttagcttcaatgataagtacttttcatgccttatgctactctatcgtcacaygaaatttgtattattaccactatcttttttttttgagactgagttttgctcttgttgcccaggctggaggagtgtaatggcatgatctcggctcactgcaacttccgcctcctgggttcaagcgattctcctgcctcagcctcccaagtagctgggattacgggtgccgtgcctgatctatcatcctcttttaacagaggagaaaactgtgagcccaaaagagatttaagtaatttgcctaatgtcacatgactactacctaagtggccagactgcgatctgaacccaagttgagagctcacctcaactaccattctattaaccgagtgccttccaaattccaacatttccagaatcagtggaaagagctcctctaaatggggtagggggagtgattatatcttgag

SEQ ID NO: 718458 - DNA, 563 bp, Homo sapiens
acctcccaaagtgctgggattacaggcataagccacagcacctagccaagttttttttaagtatttgtatttacatggaagagtaattaacatttttgtaagctacgaaagtcacaattttcatgttttcttaattctaacaagaaaagtatagtaggctcrgcacagtggctcacgcctgtaatcccagcactttgggaggctgaggcaggtggattgctcgaggtcaggaattcaaggctagtctgaccaacatggtgaaaccccatctctactaaaaatacaaaaattagccaggcttggtggcaggcacctgtaatcccagctacgcaggaggctgaggcagcagattcacttgaacctgggaggtggaggttgcagtgaaccgagatcacgccactgcactccagcctgggagacagagcaagactgcgcatcaaaaaaaaaaagggagaaaagtatagtaaatatgagtaaatacacataaaagtctgtataaaaatgatatatagaagcttccttttctgtcagaaaaaattaaatttcttagtgttatcttttta

SEQ ID NO: 718459 - DNA, 1017 bp, Homo sapiens
atgagtgttgatggtttatactaccaagtatgacatggcttgctatacagcaatacaaaaccagaggctcaccttaaaaataagtaactgtggctcaaggttatgaaatgacctgtccaaaggtgaaaggcaaaaagctaaatatccaggctaaccatatctgatattgggatgctctccaggagcaggaggaaggatggggaggccattactttgccacttcattcattgcatgtgttccctttggcttattaaaccatgakgccttcttttacccagggaaataaaggaaggatgtttgctggtgtcgtttctgcatgggaagatgaatataatataatcctggtctgtaatgactattcacataaaaatcatgttttctttacaaagagcctctctccctttttctctcccccaaatcaatccaaactgcaagaactatgaaaagtacagcctccaagatgatcttcagtctgtcagatttgcagtccttcattataagcataatcatcataaatgaaagataaggcttggtgcagcacagttcatcatggaaagatgctaactcaccagcccgtctgcctgtgagaactgctgttccatgtgggtgaagtgggggaaacaaaacctggaggaggtggttaaatgcccccatcagccaggggacgctcggaggtggaacccaccagaaccggcatggcagcccaggctgagcgaattccttcccacacactttctggttccttctcaaacttctccaaggcaacagattttcactttcttttaagatttcttttttgctcagagaaagggaaagaaagaagttactgcacactgagttcttacactccaggcattttggggccacgctgcagacggtgtctcaaaagctttatagctaccctgggaggtgggcattatttcgggtagcaggagcggggctgcagagtctagacagacatgggtttgaatcccctgatactcaatagctgtgcaaactgatgctcaacaaatgaa

SEQ ID NO: 718460 - DNA, 584 bp, Homo sapiens
gcccagttctttcaatgatacctaatttgaagaacttgttcaatgccccacctgtccacttttccaattagttctagaatatcttggggtagagtggaaattttagggtatattccctgtaattgcatacatttgtataagagaaggtatcattcttttattttactatctaaaaatagagacaggcggctggatacacttgcaacagatcaatcatccagctaataactaaaaaaataaaaaccaaaaccacgaccacactctggggcttttcagagggaaaagggtgggaggagagagaggatcaggaaaaatrattaatgggtactaggcttaatacctgagtgatgaaacaatctgtaaaacaaacccccatgacacgagattatctatatagcaaaactgcacatgtactcctgaacttaaaagttttttaaaaatgcaaaaaatgtcacaaatttggtatcatggaggttactgacaaaaggagttttaatgaagtggtgctactgtacatgtgtatacaatttgaatatatgttaatcaaaagtgttaacactgtttaaataatcaaaaaattaaaa

SEQ ID NO: 718461 - DNA, 552 bp, Homo sapiens
agtctaaaatagaacatcccattttgtagtatcaattcactttatattaatgctctgaagcttttcttgtttgtgaatttggttattggttggctagttattttatttatgtctacctctctcttcccactagaatgccccacggagcagagaactgtttatctgcatcccctttgaacagctacttaatctcgctttagtttctattttataaaagagaaaagaaatattatatatctcatagtattaatctaatggtaaaatgaagtgatacctgtaagttgctgacaacttctttgacacacaatagacattagataaatkatttttatgaaaataaacaaacagaaagaagttacgctagagctggcacagtgaagatcactgtggtcccaggtactcaggaagattacttgaacccaggagtttgtgatcagcctgggcaacaaagtgagactctttttttaaaaagaagttacaatgtagcaaaaagacaagtatgaaataatatggtggttatggagatgaagaggtataaaagctgtactagag

SEQ ID NO: 718462 - DNA, 1091 bp, Homo sapiens
tgtcttctactcctagcggtgaaataggtaaatatgggagaaaactatctgtctcactgtcgtgggatgctagatataatgccccaacttggtagtttattaatgaatgggaaaacacatccgagtggcagccagagaaagtggcctttgacatccagttactactggcctttgatgtaaacagattccttctagaggcaggtcttcaggacacaagcgggagtcactgtggtgatgccagttcctcttgtgtttcagccaccactggagtagctcctggcacaactgttgcccctggcagttccaagacaggtaagtcaacaggttgacatggaatcttccacgtgccctcccataattagatatctcctttgtattattttttgcaggagtagcaccatatcttctccacaatccttaaatattctccaggtaacacttatctctttgtttcccttagaggccaccactttcctaggagtaagtggaacaacaaacattggaagagccaygggtgagtgctgctagactaagacctttaattcctaatgaaaccttcaatagtcttctgaaaatatctacatgattcgcatatgctatattgtgaaaatacagagaaaaagactagacagtcattatattgcctccttatttcctgagcttagaagggctttcattaaagcatcgaaatgtaaaaccatgacagataaataggtaatatggggagaaaattccaatttccctgccaaaaagaaggacattatagttgagaactgtctcagtaaaattgctgtggaaagaaatgttgcatgggacaagtacgaattacttctagcactgcaagtgtcagagtaacaatttgcttctaagtggggatttgagatccctattcaaatcagtggacaaacagttgaactagtgactccatctctttgttattgtaagtattactagtgtagtctctggaaaaacactgaaacctggaagttacaacacaagccagtctgaaaatacatgcaaaatctggacatgggcaccgtggttgacatactctgcccacagcactgtgtatagtctcccaaaccttaatc

SEQ ID NO: 718463 - DNA, 727 bp, Homo sapiens
tacatcccaaagatctaacagaagtaatgatcaggttgcaacagctgctagcaacctagtgatgttgaatgctaattacttttcattatttaaaggaaaagccatggggcattttaagagatgattcacgctacaaatatgtgtacagttggtattttttactgttagccatatacaatcatcatgaggaaatttcatgacttttccagtgatttttcatattaatataaatataaaaagtttgtttccttcccacctcccaggaaaaagaaaagaacaaaaattccagaatagttttttttaactaataaagaagtgtatataaatgaagagttccagaaaaatctcagagttgaaatttctgttccaaccaaatggaatttttgttttgttttgttttgcaatttgggaactgaagcccaaagctattaatatttctacgcggcctctgctgctgtaaatgtaaatagaattcctggtgtctgagtcctctggcttctcatctctttgcgctgacctctgaaagagcagttgttccttccttggctctcagcccttaacccactgcaaggacggagcacatgggatgaagtgctggtgttcaaggagaattgcatgctcttcaagactatayacacatatacacatatatacatacatctgtttgccaccagctgagggactaggaaacacacagcttagtgcaactggagaattacagtgaata

SEQ ID NO: 718464 - DNA, 727 bp, Homo sapiens
tacatcccaaagatctaacagaagtaatgatcaggttgcaacagctgctagcaacctagtgatgttgaatgctaattacttttcattatttaaaggaaaagccatggggcattttaagagatgattcacgctacaaatatgtgtacagttggtattttttactgttagccatatacaatcatcatgaggaaatttcatgacttttccagtgatttttcatattaatataaatataaaaagtttgtttccttcccacctcccaggaaaaagaaaagaacaaaaattccagaatagttttttttaactaataaagaagtgtatataaatgaagagttccagaaaaatctcagagttgaaatttctgttccaaccaaatggaatttttgttttgttttgttttgcaatttgggaactgaagcccaaagctattaatatttctacgcggcctctgctgctgtaaatgtaaatagaattcctggtgtctgagtcctctggcttctcatctctttgcgctgacctctgaaagagcagttgttccttccttggctctcagcccttaacccactgcaaggacggagcacatgggatgaagtgctggtgttcaaggagaattgcatgctcttcaagactatacacacatatacacatatatacatacatctgtttgccacsagctgagggactaggaaacacacagcttagtgcaactggagaattacagtgaata

SEQ ID NO: 718465 - DNA, 582 bp, Homo sapiens
tttcagcatacatttggtgcagcaatatgacttctgtgtatctactcaacagaaacaaaaccaacaaaatataaagtcaagaacgtttggggtttttaaagaagacacgttcgcaggtactggggagctctggtcaacccactcctgctcctgactcacattatgttcctgagtcattgatgtttggtgtcactgaggaacaagttgatcaggaagcaataccatagccatgcttctaaagatactggaaagaaccagaggtggagatttgacaaatcggaattatgctaagcagtcgcaatgtaaaatygccgaagatgatgtgtgctggcttgaacagaggcgcaaaggaaaggaatcttaaaaggaccagttcagatgcctaagactttgagaatcactacaagaaaaactcacggtgaaggtcctaaaacacgggatcgcttccagttgagaatctaaaagcaactcagacttggagaatccttctaagattgttaaacagattacttccatcactactgcattagtaattgaggctgaagttaccactggagatgcttaactatttaataaactgat

SEQ ID NO: 718466 - DNA, 650 bp, Homo sapiens
ggataacctgaggtcaggagttcgagaccagcctcgccaacttggtgaaaccccatctctactaaaaatacaaaaattagccaggcgtggtggcgggcgcctgcaatgtcagctactcgggaggctgagacaggaaaatcacttgaacctgggaggcagaagttgcagtgagcccagatcgcaccatcgcactccagcctgggcaacaagagcaaaaytccatctcaaaaaaaaaaaagagagagagacttagcagtattacctagcagtttctttccattcatattcttctccatctctgtaacacagttcatccatttccgtgaagagatcatggggaatatgttcttcatcatcatcttcagtaccaaggataaactgaactctctgggatggtgtatctttacaaaataagaatttacatatactcaaatttttcctcaagtcattcaaagataaattcacagttttgaaaatgaaacacttttgttacctgtataaacaaatatatttcatcaaaactctcttaattattgaactatcacaattctgaaaggaaacaagaaccaacaatccaggaaaaaaaaaaaagtcacagaaagataatctctatagaaaaaaaagaaaattatgttgaaaataaacaagtc

SEQ ID NO: 718467 - DNA, 650 bp, Homo sapiens
ggataacctgaggtcaggagttcgagaccagcctcgccaacttggtgaaaccccatctctactaaaaatacaaaaattagccaggcgtggtggcgggcgcctgcaatgtcagctactcgggaggctgagacaggaaaatcacttgaacctgggaggcagaagttgcagtgagcccagatcgcaccatcgcactccagcctgggcaacaagagcaaaactccatctcaaaaaaaaaaaagagagagagacttagcagtattacctagcagtttctttccattcrtattcttctccatctctgtaacacagttcatccatttccgtgaagagatcatggggaatatgttcttcatcatcatcttcagtaccaaggataaactgaactctctgggatggtgtatctttacaaaataagaatttacatatactcaaatttttcctcaagtcattcaaagataaattcacagttttgaaaatgaaacacttttgttacctgtataaacaaatatatttcatcaaaactctcttaattattgaactatcacaattctgaaaggaaacaagaaccaacaatccaggaaaaaaaaaaaagtcacagaaagataatctctatagaaaaaaaagaaaattatgttgaaaataaacaagtc

SEQ ID NO: 718468 - DNA, 542 bp, Homo sapiens
acttaccaaaaggctttcggctggacagagctaaccttcctattcccctcctaaacctacaacctagttttcatttctcaagaagcctttccctgtgctcacgcacgccgttgttagctggctcggtgaggcactccaagcagtaacagcggtagccacaraataaaccagaagcatctccaccatgaagcagtaataataatttgccctaatgattcctttgtccttggaaaatcaacttcagaaagaaagttatccactgtgagcagggcaggctcgcggcttcttggtccggagacccaggtcccactggcccactcacccttggagagagcttgccgaagctgggtgtccgatatcactccactcctctctatcaaccctataacatcaagaagaccaaacaagctggcgatcgaaagttcaggaaaagcaaaacaaacgtctcctgtcaaccctgcaccgactctggaaggctccctcctggaacctccgcctctccggtcccgctgacgagtacagcggaatcaaggaagtgcccc

SEQ ID NO: 718469 - DNA, 542 bp, Homo sapiens
acttaccaaaaggctttcggctggacagagctaaccttcctattcccctcctaaacctacaacctagttttcatttctcaagaagcctttccctgtgctcacgcacgccgttgttagctggctcggtgaggcactccaagcagtaacagcggtagccacagaataaaccagaagcatctccaccatgaagcagtaataataatttgycctaatgattcctttgtccttggaaaatcaacttcagaaagaaagttatccactgtgagcagggcaggctcgcggcttcttggtccggagacccaggtcccactggcccactcacccttggagagagcttgccgaagctgggtgtccgatatcactccactcctctctatcaaccctataacatcaagaagaccaaacaagctggcgatcgaaagttcaggaaaagcaaaacaaacgtctcctgtcaaccctgcaccgactctggaaggctccctcctggaacctccgcctctccggtcccgctgacgagtacagcggaatcaaggaagtgcccc
